United States Patent Application Publication US 2011/0183924 A1 - sequence listing, part 207

SEQ ID NO: 499976 - DNA, 5336 bp, Homo sapiens
  misc_feature (436)..(436): n is a, c, g, or t
tgatctagaggtcccatgcgcgacgcttccatcaacgtccctttcagctggaaaatcaaggactatctggaggagctgtgggtccaggctcagtacatcacagacgcagaaggactgcccaagaagttcgtggacatctttcagcagactcctctgggcaggtttcttgcccagctccatggagagccgcagcaggaacttcttcagtgttacttgaaggatttcattctcttgaccatgcgtgtgtcaacggaggaggaattaaagtttctgcagatggctctgtggtcctgcactaggaaactgaaagcggcgtcagaagcgcccgaggaagaggtttccttaccgtgggtgcaccttgcctaccagcgtttcagaagccgtctgcagaacttttccagaatcctgaccatctaccctcaggttctccacagcntgatggaagcccgttggaaccatgagctggctggatgtgagatgaccctggacgcatttgccgcaatggcctgcacggagatgctgacaagaaacaccctgaagcccagtccccaggcgtggctacagttggtgaagaatctttccatgccgctggagctcatctgctccgatgagcacatgcaaggcagcgggagcctggcccaggctgtcatcagggaagtcagagcccagtggagtcggattttctccaccgcactcttcgtggagcacgtgctcctaggaaccgagagccgcgtccccgagttacaggggctggtgaccgagcacgtcttcttactagacaagtgtcttcgagagaactctgacgtgaagacgcacgggccttttgaggccgtgatgcgcactctctgtgaatgcaaggagacagccagcaagaccctcagcaggtttgggattcagccgtgctccatctgcctgggagatgcaaaggaccccgtctgtctgccctgcgaccacgtgcactgcctgcgctgcctcagggcctggtttgcctcagagcagatgatatgcccctactgtttaactgccttgccagacgaattctctccagctgtttcccaagcgcacagggaagccattgaaaagcatgcccgcttccggcagatgtgcaacagtttcttcgtagacctggtgtccaccatttgcttcaaggacaacgctccgcctgagaaggaagtgattgagagcctgctctctctcctcttcgtccaaaaggggcgcttaagagatgctgcccagagacactgtgaacacacaaaatctctctctccattcaatgatgttgtggataagactcctgtcatccgctcagtgatactgaaactgcttttgaagtacagctttcatgatgtaaaagattatattcaggaatatttgaccctgttaaaaaagaaagcattcataactgaagataaaactgaactgtacatgctcttcatcaactgcctggaggattcaatacttgagaagaccagtgcttactccagaaatgatgaactgaaccacctagaagaggaaggtcgtttccttaaggcatattctccagcaagccggggccgagagcctgccaacgaggcctcggttgaatacctgcaagaggtggcccggatccgcctctgcctcgacagagctgcagatttcctctcggagcctgagggaggcccagagatggccaaggagaagcagtgctacctgcagcaagtcaagcagttctgtatccgggtggagaacgactggcaccgggtgtacctggtgcggaagctcagcagccagcgggggatggagttcgtgcagggcctctccaagcccggccgcccgcaccagtgggtgtttcccaaggacgttgtcaagcagcaggggctgcggcaggaccacccaggccagatggataggtacctggtgtacggcgatgaatacaaggctctccgtgatgctgtggccaaagctgtcctcgagtgcaagccactgggcattaagactgctctgaaggcctgcaagaccccccaaagccagcagtcagcctacttcctgttaacactgtttagagaggtggctattttgtacagatcccacaatgcaagcctccaccccacgccagagcaatgtgaagctgtgagcaaattcattggcgaatgcaagatcctttcacctcctgatatcagccgttttgcaacatcgctcgtggacaattctgtgccattgttgagggcggggcctagtgacagcaaccttgatggaacggtgacagaaatggccattcatgctgcagccgtccttctgtgtggacagaatgaactcttggagcccctaaagaatctggccttctccccagccaccatggcgcatgcttttcttccaaccatgcctgaagacttgctggctcaagctcggaggtggaagggtctggagcgagtccactggtacacttgtcccaacggccatccttgctccgtgggagagtgtggcaggccgatggaacagagcatctgcattgactgccatgcgccgattggaggcattgaccacaaacctcgggacggctttcatctggtcaaagacaaggcagacagaacgcagaccggccatgtgctgggcaacccgcagcggagagacgtggtgacatgtgaccgagggctgcccccagtggtcttcctccttatccggctactcactcacttggctctgcttctgggagcgtcccagagttcccaggctctgataaacatcattaagcctccagtgagggatccaaaaggctttctgcagcagcacatcctgaaggacctggagcagttggccaagatgctgggacacagtgccgacgagaccatcggcgtggtccacctcgtcctgcgcaggcttctccaagagcagcaccagctctctagcagaaggcttttaaattttgacacagaattgtcaactaaagaaatgaggaacaactgggaaaaggaaatcgcagctgtgatttctcctgaactggagcatctagataaaacccttcccaccatgaataatctcatcagccaagataagcgtatcagctctaaccctgtggccaaaataatatatggtgacccagtgaccttcctgccccacctgccccggaaaagtgtggtccattgctctaagatttggagctgcaggaaaagaattacagttgagtacctccagcacattgtggaacagaaaaatggcaaagaaagagtgcccatcctctggcatttcctgcagaaggaagcagagctgaggctggtaaagttcctgcctgagattttggccttgcaaagggatctagtgaagcagttccagaacgtccagcaagttgaatacagctccatcagaggcttcctcagcaagcacagctcagatgggttgaggcagctgcttcacaacaggatcacagtctttctgtccacatggaacaaactgaggagatcgcttgagacgaacggtgagatcaacctacccaaagactactgcagcactgacttggatctggacactgagtttgagatcctcttgccacgccgacggggcctgggcctctgtgctaccgctctcgtcagctacttgattcgcctacacaatgaaattgtctacgccgtggaaaaactctccaaggaaaacaacagctattccgtggatgccgccgaggtcactgaactgcatgtcatcagttatgaagtggagcgggacctgactccactgattctctccaactgccagtaccaggtggaggagggcagagagaccgtgcaggagttcgatctggagaagattcagcggcagatcgtcagccgcttcctccagggcaagccccggctgagcctcaagggaatacccactctggtgtacagacacgactggaactatgaacatctctttatggacatcaagaacaaaatggcacaggactccctccccagctcggtcattagtgccatcagtggacagctgcagtcctacagcgatgcctgtgaagtgctgtctgtcgtagaagtcactctggggtttctgagcacagctggtggggatccaaacatgcagctgaatgtgtatactcaagacatcctgcaaatgggtgatcagacgattcacgtgttaaaggccttaaacagatgccagttaaaacacaccattgccctctggcagttcctgtctgctcataagtctgaacagctgctgcggctgcacaaagagccatttggggaaatcagttcaaggtacaaagcggatctgagcccggaaaatgctaagctcctcagcacattcctaaatcagactggcctagacgccttcctgctagagctgcacgaaatgataatcttgaaactaaagaacccccaaacccaaaccgaggagcgcttccgccctcagtggagcctgagagacactctcgtaagttacatgcaaactaaagaaagtgaaattcttcctgaaatggcatctcagttcccagaagagatactgctcgccagctgtgtctcagtgtggaaaacagctgctgtgctgaaatggaatcgagaaatgagatagaattatttcctcagctatctttggatgactttggagagaagactcctctctcctcgtctgcggcgtggacttgatcatggactggtgcctttgcattcagaaggagagctgtcagcgtagcaccgaattcaagaccaaggcgtgctacctgagctgacagctttttgaaagccgagctgtttctgaaccatgtacatacatgttctgaaactttctcatcattttatgagtactgttcattgagagatgacaatgaagattagatgaaattggaaataaaccaacattgtttacattccaggagacttgtagctcagccacacacgcagtaatgacctgtgcccgttcgcctctggcactgcccacccctctttttttttttcttctaattctgtactcacaaaagagaatctcattttcttctttcttccattcccttaaattctgagtactgtacatatatttctgggttcccacgatgatgtgaaaaactaccagactgttttttgtcttctcacaaagacaagaaaaatcagggcattttgtgagtgccttaagatcaaactaacaagatctgaccctctcccctcacagtgagccactgccccacttcagagggtaagagccaaaagcctcattgtgaaaggcactggacttggaccagggacaccatcagggccttggttttctcacgcattagatgactgtaaacttggtcacaggcctggttctggcagttctttgcggacttttttctagcattatgccaaataaacatgcagtctcagtgtgctctcgca

SEQ ID NO: 499977 - DNA, 166 bp, Homo sapiens
atgtcaccacaagaagtactgcagggaggaagccagcgctcaaattgcccctaggactcacccttattccccgaagtcagaagctccccggacgactcgggatgagatacgaagagcttcagcattaatgatagtggagcgtcgccccccgagacaagactcacca

SEQ ID NO: 499978 - DNA, 352 bp, Homo sapiens
gaaaaaacaaaaaaattagtagcataaaaacatgaccctaagtctcacagcctggagtagccccaggtttataaatccatggtcagggctgcaaacaacttgagagcaaccggcctggctgataacaagtcagcagtgttactagcattggcttgtaaacaatacctcaataagggacaagaagaagggaggtgaaatttaaatgtgccaattttgaaactggctaggcattctagtagtgagttgggtggagaacgaagttaaaattatctaaaaataacgttttggaatttcttactatctgtgccatctctccatatgtggtcagaatctttttttttctactaactgg

SEQ ID NO: 499979 - DNA, 4943 bp, Homo sapiens
  misc_feature (436)..(436): n is a, c, g, or t
tgatctagaggtcccatgcgcgacgcttccatcaacgtccctttcagctggaaaatcaaggactatctggaggagctgtgggtccaggctcagtacatcacagacgcagaaggactgcccaagaagttcgtggacatctttcagcagactcctctgggcaggtttcttgcccagctccatggagagccgcagcaggaacttcttcagtgttacttgaaggatttcattctcttgaccatgcgtgtgtcaacggaggaggaattaaagtttctgcagatggctctgtggtcctgcactaggaaactgaaagcggcgtcagaagcgcccgaggaagaggtttccttaccgtgggtgcaccttgcctaccagcgtttcagaagccgtctgcagaacttttccagaatcctgaccatctaccctcaggttctccacagcntgatggaagcccgttggaaccatgagctggctggatgtgagatgaccctggacgcatttgccgcaatggcctgcacggagatgctgacaagaaacaccctgaagcccagtccccaggcgtggctacagttggtgaagaatctttccatgccgctggagctcatctgctccgatgagcacatgcaaggcagcgggagcctggcccaggctgtcatcagggaagtcagagcccagtggagtcggattttctccaccgcactcttcgtggagcacgtgctcctaggaaccgagagccgcgtccccgagttacaggggctggtgaccgagcacgtcttcttactagacaagtgtcttcgagagaactctgacgtgaagacgcacgggccttttgaggccgtgatgcgcactctctgtgaatgcaaggagacagccagcaagaccctcagcaggtttgggattcagccgtgctccatctgcctgggagatgcaaaggaccccgtctgtctgccctgcgaccacgtgcactgcctgcgctgcctcagggcctggtttgcctcagagcagatgatatgcccctactgtttaactgccttgccagacgaattctctccagctgtttcccaagcgcacagggaagccattgaaaagcatgcccgcttccggcagatgtgcaacagtttcttcgtagacctggtgtccaccatttgcttcaaggacaacgctccgcctgagaaggaagtgattgagagcctgctctctctcctcttcgtccaaaaggggcgcttaagagatgctgcccagagacactgtgaacacacaaaatctctctctccattcaatgatgttgtggataagactcctgtcatccgctcagtgatactgaaactgcttttgaagtacagctttcatgatgtaaaagattatattcaggaatatttgaccctgttaaaaaagaaagcattcataactgaagataaaactgaactgtacatgctcttcatcaactgcctggaggattcaatacttgagaagaccagtgcttactccagaaatgatgaactgaaccacctagaagaggaaggtcgtttccttaaggcatattctccagcaagccggggccgagagcctgccaacgaggcctcggttgaatacctgcaagaggtggcccggatccgcctctgcctcgacagagctgcagatttcctctcggagcctgagggaggcccagagatggccaaggagaagcagtgctacctgcagcaagtcaagcagttctgtatccgggtggagaacgactggcaccgggtgtacctggtgcggaagctcagcagccagcgggggatggagttcgtgcagggcctctccaagcccggccgcccgcaccagtgggtgtttcccaaggacgttgtcaagcagcaggggctgcggcaggaccacccaggccagatggataggtacctggtgtacggcgatgaatacaaggctctccgtgatgctgtggccaaagctgtcctcgagtgcaagccactgggcattaagactgctctgaaggcctgcaagaccccccaaagccagcagtcagcctacttcctgttaacactgtttagagaggtggctattttgtacagatcccacaatgcaagcctccaccccacgccagagcaatgtgaagctgtgagcaaattcattggcgaatgcaagatcctttcacctcctgatatcagccgttttgcaacatcgctcgtggacaattctgtgccattgttgagggcggggcctagtgacagcaaccttgatggaacggtgacagaaatggccattcatgctgcagccgtccttctgtgtggacagaatgaactcttggagcccctaaagaatctggccttctccccagccaccatggcgcatgcttttcttccaaccatgcctgaagacttgctggctcaagctcggaggtggaagggtctggagcgagtccactggtacacttgtcccaacggccatccttgctccgtgggagagtgtggcaggccgatggaacagagcatctgcattgactgccatgcgccgattggaggcattgaccacaaacctcgggacggctttcatctggtcaaagacaaggcagacagaacgcagaccggccatgtgctgggcaacccgcagcggagagacgtggtgacatgtgaccgagggctgcccccagtggtcttcctccttatccggctactcactcacttggctctgcttctgggagcgtcccagagttcccaggctctgataaacatcattaagcctccagtgagggatccaaaaggctttctgcagcagcacatcctgaaggacctggagcagttggccaagatgctgggacacagtgccgacgagaccatcggcgtggtccacctcgtcctgcgcaggcttctccaagagcagcaccagctctctagcagaaggcttttaaattttgacacagaattgtcaactaaagaaatgaggaacaactgggaaaaggaaatcgcagctgtgatttctcctgaactggagcatctagataaaacccttcccaccatgaataatctcatcagccaagataagcgtatcagctctaaccctgtggccaaaataatatatggtgacccagtgaccttcctgccccacctgccccggaaaagtgtggtccattgctctaagatttggagctgcaggaaaagaattacagttgagtacctccagcacattgtggaacagaaaaatggcaaagaaagagtgcccatcctctggcatttcctgcagaaggaagcagagctgaggctggtaaagttcctgcctgagattttggccttgcaaagggatctagtgaagcagttccagaacgtccagcaagttgaatacagctccatcagaggcttcctcagcaagcacagctcagatgggttgaggcagctgcttcacaacaggatcacagtctttctgtccacatggaacaaactgaggagatcgcttgagacgaacggtgagatcaacctacccaaagactactgcagcactgacttggatctggacactgagtttgagatcctcttgccacgccgacggggcctgggcctctgtgctaccgctctcgtcagctacttgattcgcctacacaatgaaattgtctacgccgtggaaaaactctccaaggaaaacaacagctattccgtggatgccgccgaggtcactgaactgcatgtcatcagttatgaagtggagcgggacctgactccactgattctctccaactgccagtaccaggtggaggagggcagagagaccgtgcaggagttcgatctggagaagattcagcggcagatcgtcagccgcttcctccagggcaagccccggctgagcctcaagggaatacccactctggtgtacagacacgactggaactatgaacatctctttatggacatcaagaacaaaatggcacaggactccctccccagctcggtcattagtgccatcagtggacagctgcagtcctacagcgatgcctgtgaagtgctgtctgtcgtagaagtcactctggggtttctgagcacagctggtggggatccaaacatgcagctgaatgtgtatactcaagacatcctgcaaatgggtgatcagacgattcacgtgttaaaggccttaaacagatgccagttaaaacacaccattgccctctggcagttcctgtctgctcataagtctgaacagctgctgcggctgcacaaagagccatttggggaaatcagttcaaggtacaaagcggatctgagcccggaaaatgctaagctcctcagcacattcctaaatcagactggcctagacgccttcctgctagagctgcacgaaatgataatcttgaaactaaagaacccccaaacccaaaccgaggagcgcttccgccctcagtggagcctgagagacactctcgtaagttacatgcaaactaaagaaagtgaaattcttcctgaaatggcatctcagttcccagaagagatactgctcgccagctgtgtctcagtgtggaaaacagctgctgtgctgaaatggaatcgagaaatgagatagaattatttcctcagctatctttggatgactttggagagaagactcctctctcctcgtctgcggcgtggacttgatcatggactggtgcctttgcattcagaaggagagctgtcagcgtagcaccgaattcaagaccaaggcgtgctacctgagctgacagctttttgaaagccgagctgtttctgaaccatgtacatacatgttctgaaactttctcatcattttatgagtactgttcattgagagatgacaatgaagattagatgaaattggaaataaaccaacattgtttacattccaggagacttgtagctcagccacacacgcagtaatgacctgtgccattttgttcttgatgtccataaagagatgttcatagttccagtcgtggcagcaccaccaataca

SEQ ID NO: 499980 - DNA, 254 bp, Homo sapiens
tctgggtcggagtgagttgaggcaggatatcaggctctgaaggagacaagaggagaggtctgagcctggaagagggagaggagaggtctgagctggaagagggagaggagagggtctgagccgtggaaggagggagaggagagggtctgagcctggaaggagggagaggagagggtctgagccgtggaaggaggaagaggagagggtctgaggcctgggaaggggggagcaggagaaggctctgagccgtggaa

SEQ ID NO: 499981 - DNA, 273 bp, Homo sapiens
cggcacgaggctcctggcacaggatatgagggcacttacaagaggaggacttggagactcgacaagtcacctccctgaccacaaataaggtcctcccaaggcagaaatcaatgatgaatgtgttttgtttttttgttttgttttgttttgtttttaaagaaagaaagaaaagtcatcgtaggaacacctgcctctgaggaacattactattaggatcctaaatacagcaattgtctgtattcttattgcataggtccccttaaaaaaaaaaaa

SEQ ID NO: 499982 - DNA, 1200 bp, Homo sapiens
  misc_feature (40)..(40): n is a, c, g, or t
ccccggaaaacagcttttaaccttatttccggttcaagcncctgtcccttagcgggctcttgccttggctaccctggtaagagccaaaagcctcattgtgaaaggcactggacttggaccagggacaccatcagggccttggttttctcacgcataaaatggagagtggattaatcgccaaagattcttctgatctgacattttgaaattgtgagagaaactagatgactgtaaacttggtcacaggcctggttctggcagttctttgcggacttttttctagcattatgccaaataaacatgcagtctcagtgtgctctcgcatgtatgaatatctagtcctttctgtggttctcagccaagacataaaaactaggactcagagcacatacaaaaccagttatgtttcggaaagagggaaaagagtccccgagcccggatcttgtgctgcttttctcactgacgtgttgccttttttctttacaaaatctgctttgatacttaggacctctctggactaatttctcttcctagacagctcagcacagctattgatatgttagaggcagtatccttaatattcattctaaatgagttaacgacttaacttgaaattgggcctaaggagtgagaactacaaaaatacaaaatgcttgtccaggactcagccatgcacaccttgagcagcgccggcaggaggcacggaaggaactgtgctccgttctcctcactgtcatggtgccaccagtgtctgatgaagggcagagtgacccagactgcaggcagtaactgacttcacacagtccctggcatttagtcatctgtgattgttttatcactctggactgtgcagagccacctgccaccgagatctgcattccgactgcctatgaacgggtgtgggggccgggggctggcttgctgaagtcttcaacttgcactcggagctcctttgatacctcagagctggctgtcaggtggcagctcacacccagactcactggccacacctcagcagggggggagtcgagtgtcagtctctttctgtgaaggctttttttttcctttggcctgggaatttttcccatttttatgaaggggttttaaattgtttcattttgtgtgctgtgcttcaaagccttaactgtcaaatcttgcattatcttgtttgtacagaaatatactggcctagcagaggca

SEQ ID NO: 499983 - DNA, 206 bp, Homo sapiens
  misc_feature (115)..(115): n is a, c, g, or t
tgccgcggttgcatctcgacgagctcccctcactcctggcgtgttgcctgtcttttcgacccgcaggtttctttcttcgtttttttcttcatttccagcccatcctcattggtgngttcactgtcggtcacacttcctctcaagccactcatttccacattcaccatctttcacgtggggtcccggcagctcgcacattcgtcaca

SEQ ID NO: 499984 - DNA, 1014 bp, Homo sapiens
  misc_feature (16)..(16): n is a, c, g, or t
aatttctctcggaccnacattggtccgagagaaattagatgactgtaaacttggtcacaggcctggttctggcagttctttgcggacttttttctagcattatgccaaataaacatgcagtctcagtgtgctctcgcatgtatgaatatctagtcctttctgtggttctcagccaagacataaaaactaggactcagagcacatacaaaaccagttatgtttcggaaagagggaaaagagtccccgagcccggatcttgtgctgcttttctcactgacgtgttgccttttttctttacaaaatctgctttgatacttaggacctctctggactaatttctcttcctagacagctcagcacagctattgatatgttagaggcagtatccttaatattcattctaaatgagttaacgacttaacttgaaattgggcctaaggagtgagaactacaaaaatacaaaatgcttgtccaggactcagccatgcacaccttgagcagcgccggcaggaggcacggaaggaactgtgctccgttctcctcactgtcatggtgccaccagtgtctgatgaagggcagagtgacccagactgcaggcagtaactgacttcacacagtccctggcatttagtcatctgtgattgttttatcactctggactgtgcagagccacctgccaccgagatctgcattccgactgcctatgaacgggtgtgggggccgggggctggcttgctgaagtcttcaacttgcactcggagctcctttgatacctcagagctggctgtcaggtggcagctcacacccagactcactggccacacctcagcagggggggagtcgagtgtcagtctctttctgtgaaggctttttttttcctttggcctgggaatttttcccatttttatgaaggggttttaaattgtttcattttgtgtgctgtgcttcaaagccttaactgtcaaatcttgcattatcttgtttgtacagaaatatactggcctagcagaggca

SEQ ID NO: 499985 - DNA, 4596 bp, Homo sapiens
  misc_feature (436)..(436): n is a, c, g, or t
tgatctagaggtcccatgcgcgacgcttccatcaacgtccctttcagctggaaaatcaaggactatctggaggagctgtgggtccaggctcagtacatcacagacgcagaaggactgcccaagaagttcgtggacatctttcagcagactcctctgggcaggtttcttgcccagctccatggagagccgcagcaggaacttcttcagtgttacttgaaggatttcattctcttgaccatgcgtgtgtcaacggaggaggaattaaagtttctgcagatggctctgtggtcctgcactaggaaactgaaagcggcgtcagaagcgcccgaggaagaggtttccttaccgtgggtgcaccttgcctaccagcgtttcagaagccgtctgcagaacttttccagaatcctgaccatctaccctcaggttctccacagcntgatggaagcccgttggaaccatgagctggctggatgtgagatgaccctggacgcatttgccgcaatggcctgcacggagatgctgacaagaaacaccctgaagcccagtccccaggcgtggctacagttggtgaagaatctttccatgccgctggagctcatctgctccgatgagcacatgcaaggcagcgggagcctggcccaggctgtcatcagggaagtcagagcccagtggagtcggattttctccaccgcactcttcgtggagcacgtgctcctaggaaccgagagccgcgtccccgagttacaggggctggtgaccgagcacgtcttcttactagacaagtgtcttcgagagaactctgacgtgaagacgcacgggccttttgaggccgtgatgcgcactctctgtgaatgcaaggagacagccagcaagaccctcagcaggtttgggattcagccgtgctccatctgcctgggagatgcaaaggaccccgtctgtctgccctgcgaccacgtgcactgcctgcgctgcctcagggcctggtttgcctcagagcagatgatatgcccctactgtttaactgccttgccagacgaattctctccagctgtttcccaagcgcacagggaagccattgaaaagcatgcccgcttccggcagatgtgcaacagtttcttcgtagacctggtgtccaccatttgcttcaaggacaacgctccgcctgagaaggaagtgattgagagcctgctctctctcctcttcgtccaaaaggggcgcttaagagatgctgcccagagacactgtgaacacacaaaatctctctctccattcaatgatgttgtggataagactcctgtcatccgctcagtgatactgaaactgcttttgaagtacagctttcatgatgtaaaagattatattcaggaatatttgaccctgttaaaaaagaaagcattcataactgaagataaaactgaactgtacatgctcttcatcaactgcctggaggattcaatacttgagaagaccagtgcttactccagaaatgatgaactgaaccacctagaagaggaaggtcgtttccttaaggcatattctccagcaagccggggccgagagcctgccaacgaggcctcggttgaatacctgcaagaggtggcccggatccgcctctgcctcgacagagctgcagatttcctctcggagcctgagggaggcccagagatggccaaggagaagcagtgctacctgcagcaagtcaagcagttctgtatccgggtggagaacgactggcaccgggtgtacctggtgcggaagctcagcagccagcgggggatggagttcgtgcagggcctctccaagcccggccgcccgcaccagtgggtgtttcccaaggacgttgtcaagcagcaggggctgcggcaggaccacccaggccagatggataggtacctggtgtacggcgatgaatacaaggctctccgtgatgctgtggccaaagctgtcctcgagtgcaagccactgggcattaagactgctctgaaggcctgcaagaccccccaaagccagcagtcagcctacttcctgttaacactgtttagagaggtggctattttgtacagatcccacaatgcaagcctccaccccacgccagagcaatgtgaagctgtgagcaaattcattggcgaatgcaagatcctttcacctcctgatatcagccgttttgcaacatcgctcgtggacaattctgtgccattgttgagggcggggcctagtgacagcaaccttgatggaacggtgacagaaatggccattcatgctgcagccgtccttctgtgtggacagaatgaactcttggagcccctaaagaatctggccttctccccagccaccatggcgcatgcttttcttccaaccatgcctgaagacttgctggctcaagctcggaggtggaagggtctggagcgagtccactggtacacttgtcccaacggccatccttgctccgtgggagagtgtggcaggccgatggaacagagcatctgcattgactgccatgcgccgattggaggcattgaccacaaacctcgggacggctttcatctggtcaaagacaaggcagacagaacgcagaccggccatgtgctgggcaacccgcagcggagagacgtggtgacatgtgaccgagggctgcccccagtggtcttcctccttatccggctactcactcacttggctctgcttctgggagcgtcccagagttcccaggctctgataaacatcattaagcctccagtgagggatccaaaaggctttctgcagcagcacatcctgaaggacctggagcagttggccaagatgctgggacacagtgccgacgagaccatcggcgtggtccacctcgtcctgcgcaggcttctccaagagcagcaccagctctctagcagaaggcttttaaattttgacacagaattgtcaactaaagaaatgaggaacaactgggaaaaggaaatcgcagctgtgatttctcctgaactggagcatctagataaaacccttcccaccatgaataatctcatcagccaagataagcgtatcagctctaaccctgtggccaaaataatatatggtgacccagtgaccttcctgccccacctgccccggaaaagtgtggtccattgctctaagatttggagctgcaggaaaagaattacagttgagtacctccagcacattgtggaacagaaaaatggcaaagaaagagtgcccatcctctggcatttcctgcagaaggaagcagagctgaggctggtaaagttcctgcctgagattttggccttgcaaagggatctagtgaagcagttccagaacgtccagcaagttgaatacagctccatcagaggcttcctcagcaagcacagctcagatgggttgaggcagctgcttcacaacaggatcacagtctttctgtccacatggaacaaactgaggagatcgcttgagacgaacggtgagatcaacctacccaaagactactgcagcactgacttggatctggacactgagtttgagatcctcttgccacgccgacggggcctgggcctctgtgctaccgctctcgtcagctacttgattcgcctacacaatgaaattgtctacgccgtggaaaaactctccaaggaaaacaacagctattccgtggatgccgccgaggtcactgaactgcatgtcatcagttatgaagtggagcgggacctgactccactgattctctccaactgccagtaccaggtggaggagggcagagagaccgtgcaggagttcgatctggagaagattcagcggcagatcgtcagccgcttcctccagggcaagccccggctgagcctcaagggaatacccactctggtgtacagacacgactggaactatgaacatctctttatggacatcaagaacaaaatggcacaggactccctccccagctcggtcattagtgccatcagtggacagctgcagtcctacagcgatgcctgtgaagtgctgtctgtcgtagaagtcactctggggtttctgagcacagctggtggggatccaaacatgcagctgaatgtgtatactcaagacatcctgcaaatgggtgatcagacgattcacgtgttaaaggccttaaacagatgccagttaaaacacaccattgccctctggcagttcctgtctgctcataagtctgaacagctgctgcggctgcacaaagagccatttggggaaatcagttcaaggtacaaagcggatctgagcccggaaaatgctaagctcctcagcacattcctaaatcagactggcctagacgccttcctgctagagctgcacgaaatgataatcttgaaactaaagaacccccaaacccaaaccgaggagcgcttccgccctcagtggaggtatggatttgcacacctatggggcggggcagacacaatgttgtgctgtctctcctgtgatcttctatagacacaaaaatagttcttttcttaccacagaatcccatttcctgctttttgtcattaccagggcacctgaggactggctttttggttttaatctccagcctgggcaacagagggagacttcatctcaaaaacaaacaaaaaaaaa

SEQ ID NO: 499986 - DNA, 121 bp, Homo sapiens
actgagcataagcacagtggccaagaacagctgtaacagccgctggtccattccatttggtggcagcgcggtcacagcaaggcaaaattcccaagacagctccatggtgtatccaggtgca

SEQ ID NO: 499987 - DNA, 4122 bp, Homo sapiens
  misc_feature (436)..(436): n is a, c, g, or t
tgatctagaggtcccatgcgcgacgcttccatcaacgtccctttcagctggaaaatcaaggactatctggaggagctgtgggtccaggctcagtacatcacagacgcagaaggactgcccaagaagttcgtggacatctttcagcagactcctctgggcaggtttcttgcccagctccatggagagccgcagcaggaacttcttcagtgttacttgaaggatttcattctcttgaccatgcgtgtgtcaacggaggaggaattaaagtttctgcagatggctctgtggtcctgcactaggaaactgaaagcggcgtcagaagcgcccgaggaagaggtttccttaccgtgggtgcaccttgcctaccagcgtttcagaagccgtctgcagaacttttccagaatcctgaccatctaccctcaggttctccacagcntgatggaagcccgttggaaccatgagctggctggatgtgagatgaccctggacgcatttgccgcaatggcctgcacggagatgctgacaagaaacaccctgaagcccagtccccaggcgtggctacagttggtgaagaatctttccatgccgctggagctcatctgctccgatgagcacatgcaaggcagcgggagcctggcccaggctgtcatcagggaagtcagagcccagtggagtcggattttctccaccgcactcttcgtggagcacgtgctcctaggaaccgagagccgcgtccccgagttacaggggctggtgaccgagcacgtcttcttactagacaagtgtcttcgagagaactctgacgtgaagacgcacgggccttttgaggccgtgatgcgcactctctgtgaatgcaaggagacagccagcaagaccctcagcaggtttgggattcagccgtgctccatctgcctgggagatgcaaaggaccccgtctgtctgccctgcgaccacgtgcactgcctgcgctgcctcagggcctggtttgcctcagagcagatgatatgcccctactgtttaactgccttgccagacgaattctctccagctgtttcccaagcgcacagggaagccattgaaaagcatgcccgcttccggcagatgtgcaacagtttcttcgtagacctggtgtccaccatttgcttcaaggacaacgctccgcctgagaaggaagtgattgagagcctgctctctctcctcttcgtccaaaaggggcgcttaagagatgctgcccagagacactgtgaacacacaaaatctctctctccattcaatgatgttgtggataagactcctgtcatccgctcagtgatactgaaactgcttttgaagtacagctttcatgatgtaaaagattatattcaggaatatttgaccctgttaaaaaagaaagcattcataactgaagataaaactgaactgtacatgctcttcatcaactgcctggaggattcaatacttgagaagaccagtgcttactccagaaatgatgaactgaaccacctagaagaggaaggtcgtttccttaaggcatattctccagcaagccggggccgagagcctgccaacgaggcctcggttgaatacctgcaagaggtggcccggatccgcctctgcctcgacagagctgcagatttcctctcggagcctgagggaggcccagagatggccaaggagaagcagtgctacctgcagcaagtcaagcagttctgtatccgggtggagaacgactggcaccgggtgtacctggtgcggaagctcagcagccagcgggggatggagttcgtgcagggcctctccaagcccggccgcccgcaccagtgggtgtttcccaaggacgttgtcaagcagcaggggctgcggcaggaccacccaggccagatggataggtacctggtgtacggcgatgaatacaaggctctccgtgatgctgtggccaaagctgtcctcgagtgcaagccactgggcattaagactgctctgaaggcctgcaagaccccccaaagccagcagtcagcctacttcctgttaacactgtttagagaggtggctattttgtacagatcccacaatgcaagcctccaccccacgccagagcaatgtgaagctgtgagcaaattcattggcgaatgcaagatcctttcacctcctgatatcagccgttttgcaacatcgctcgtggacaattctgtgccattgttgagggcggggcctagtgacagcaaccttgatggaacggtgacagaaatggccattcatgctgcagccgtccttctgtgtggacagaatgaactcttggagcccctaaagaatctggccttctccccagccaccatggcgcatgcttttcttccaaccatgcctgaagacttgctggctcaagctcggaggtggaagggtctggagcgagtccactggtacacttgtcccaacggccatccttgctccgtgggagagtgtggcaggccgatggaacagagcatctgcattgactgccatgcgccgattggaggcattgaccacaaacctcgggacggctttcatctggtcaaagacaaggcagacagaacgcagaccggccatgtgctgggcaacccgcagcggagagacgtggtgacatgtgaccgagggctgcccccagtggtcttcctccttatccggctactcactcacttggctctgcttctgggagcgtcccagagttcccaggctctgataaacatcattaagcctccagtgagggatccaaaaggctttctgcagcagcacatcctgaaggacctggagcagttggccaagatgctgggacacagtgccgacgagaccatcggcgtggtccacctcgtcctgcgcaggcttctccaagagcagcaccagctctctagcagaaggcttttaaattttgacacagaattgtcaactaaagaaatgaggaacaactgggaaaaggaaatcgcagctgtgatttctcctgaactggagcatctagataaaacccttcccaccatgaataatctcatcagccaagataagcgtatcagctctaaccctgtggccaaaataatatatggtgacccagtgaccttcctgccccacctgccccggaaaagtgtggtccattgctctaagatttggagctgcaggaaaagaattacagttgagtacctccagcacattgtggaacagaaaaatggcaaagaaagagtgcccatcctctggcatttcctgcagaaggaagcagagctgaggctggtaaagttcctgcctgagattttggccttgcaaagggatctagtgaagcagttccagaacgtccagcaagttgaatacagctccatcagaggcttcctcagcaagcacagctcagatgggttgaggcagctgcttcacaacaggatcacagtctttctgtccacatggaacaaactgaggagatcgcttgagacgaacggtgagatcaacctacccaaagactactgcagcactgacttggatctggacactgagtttgagatcctcttgccacgccgacggggcctgggcctctgtgctaccgctctcgtcagctacttgattcgcctacacaatgaaattgtctacgccgtggaaaaactctccaaggaaaacaacagctattccgtggatgccgccgaggtcactgaactgcatgtcatcagttatgaagtggagcgggacctgactccactgattctctccaactgccagtaccaggtggaggagggcagagagaccgtgcaggagttcgatctggagaagattcagcggcagatcgtcagccgcttcctccagggcaagccccggctgagcctcaagggaacacacagagagaaaaccgtgtctagggaaggcgatgcctggggctggaaaaaggaagcactctgcttgcccagaggctggaaggagctgctctgttccctccattcacccctgcctggttaagacctgcggtattcgggagcgtctgcacgcaagtgttcagtgagcatatatggggagtcttcagttccgaagtcagccccgtaggtcattcccctaccatgctgggagcacgtgtcatccacacagagcgtggccagaaggaggggtcctctagagtcacct

SEQ ID NO: 499988 - DNA, 348 bp, Homo sapiens
ggtggcgattaacattcctcagcctcactgagcgccgctgacccatctgtgaaagggctggctcccggcgggcctcagagatcagaactcaggaagccgaagacacccactcggtagctgggaagtgaccacgatggaggttgccaaacagcagccaagaaaggagccgtcgaatagccggccatccttcactcatcctcccggctccagtggggtgggtggaagaaacaccagccacatgacgcgttaagcgggccacatttcgtgagggcatgacacacattgtgagattacaaagcaactcgttcacgtgagcgtccgaggagaacggtggagtggcacgaagcg

SEQ ID NO: 499989 - DNA, 135 bp, Homo sapiens
tgagatcaggttatgagactggctaatttttgatttttgttagagactcaccatgcaaggctgtcgaactctggctcagcactcctctcagctaagtctggatcagatagccacgcacttacatatgcatagaag

SEQ ID NO: 499990 - DNA, 987 bp, Homo sapiens
  misc_feature (5)..(5): n is a, c, g, or t
  misc_feature (115)..(115): n is a, c, g, or t
  misc_feature (136)..(136): n is a, c, g, or t
  misc_feature (161)..(161): n is a, c, g, or t
  misc_feature (195)..(195): n is a, c, g, or t
  misc_feature (225)..(225): n is a, c, g, or t
  misc_feature (239)..(240): n is a, c, g, or t
  misc_feature (261)..(262): n is a, c, g, or t
  misc_feature (271)..(271): n is a, c, g, or t
  misc_feature (278)..(278): n is a, c, g, or t
  misc_feature (302)..(302): n is a, c, g, or t
  misc_feature (326)..(326): n is a, c, g, or t
  misc_feature (329)..(329): n is a, c, g, or t
  misc_feature (335)..(336): n is a, c, g, or t
  misc_feature (339)..(339): n is a, c, g, or t
  misc_feature (341)..(341): n is a, c, g, or t
  misc_feature (348)..(348): n is a, c, g, or t
  misc_feature (350)..(350): n is a, c, g, or t
  misc_feature (352)..(352): n is a, c, g, or t
  misc_feature (355)..(355): n is a, c, g, or t
  misc_feature (357)..(357): n is a, c, g, or t
  misc_feature (366)..(366): n is a, c, g, or t
  misc_feature (371)..(371): n is a, c, g, or t
  misc_feature (375)..(376): n is a, c, g, or t
  misc_feature (391)..(391): n is a, c, g, or t
  misc_feature (395)..(395): n is a, c, g, or t
  misc_feature (444)..(444): n is a, c, g, or t
  misc_feature (458)..(458): n is a, c, g, or t
  misc_feature (478)..(478): n is a, c, g, or t
  misc_feature (505)..(505): n is a, c, g, or t
  misc_feature (513)..(513): n is a, c, g, or t
  misc_feature (521)..(521): n is a, c, g, or t
  misc_feature (537)..(537): n is a, c, g, or t
  misc_feature (541)..(541): n is a, c, g, or t
  misc_feature (603)..(603): n is a, c, g, or t
  misc_feature (950)..(950): n is a, c, g, or t
aatanggatatatttataataatataataattatataaagaaaatataataattggatatgaaatgagtataaagatgtaattattaagtaaaaaaataagtagtaagaatgtanaagaaagaaaaaaatataaanaaaagtatgctgagtgtagggagtnggtgagggatataataaaatattgtgaaggagtnaaaatagaaaaaatgaagaaaaagttatantgatttataagatnnatggaaaataaaaaagtaaanntggtagtgnagtaaanatttggttaaaaggaaaaaattantgatggaaaaagatagtaattaantgnatttannttntntaaattntntnttnanaaaaattanttttntttnntttaagatgggtttnatantgttgaaaaaagatttggttttatttgtaaagtaaagaagataatatantgattgaagtattnaatgatttagttgaggatgnttggggataaaaatttgtaaaaaggtnaattaagntagttagnagagaatataagtggnttgnagaaaaaaaattaggataatatgtttgttaaaaagaaaaaaagaataagaggtgaaaaatantagggattaatgtgaaatagaaaataaaaagaagataggtgaaatttgattaaataaatttaattgtggagtgagataaaaggaggataaaagaaagagtttggttaaaaaaagtgtaagtggaaaaagggaaaaataagaaggtataataatatagtaggaaatggaaaaaggatgagaagtatttatttgagtagaaatttgaaaaaataataatgtagatatgatgggaaagaatgaaaagaaggattgggatatttgtgatggtagaagagtattgtgaaaataaaagataattagaaatgagtgttgttaaaaataaaaaatgatagttattagaagagggnaagaaataaataaataaaggtaaaggattataagtgt

SEQ ID NO: 499991 - DNA, 411 bp, Homo sapiens
tttttttttagaagcttcaatctcaaacctttattttgctgtaaaggggaggaaaatggttagtgggtttgtacactgaacactttagtacagagaagcgtgtgcgaccaaccgtgcagttacagctttcttcacatttccccattccacacagctgttccaatgagcgatcttgccctggtcacaccacttttaagcacactcacaaaacaaccacatatacagggttttcacaaatatgcaaataaacagggttttcagaaccaatttttacaaagtgttatctaagtaagatgacccagggcccagtctcttttatttcccaaactgctttgactgacagtttaacagcttcccctctgctcagggatggttttttaagcaccattcaagccaaacccacaatggatg

SEQ ID NO: 499992 - DNA, 95 bp, Homo sapiens
aggtttcccttttaaagagctccccccttaaccccaaaaaaaccggggtatggttttttaaaaaggaagggggaattaaaaaatttccaagctta

SEQ ID NO: 499993 - DNA, 1061 bp, Homo sapiens
ttgaaccctgggaggcggaggttgcagtgacccgagatctcgccaccgcactccagcctgggcgacagagcgggactccacctcaaaaaaaaaaaaaaaggggaaactgactctactctgtgatgccaaaacagatgggagttcccttgtacaccacttttctctcctttctattctcaaggctaattggtgtaacagctctgctttgtgtggcactcattccagttcctttcagcccacttacagttatcgtgggacagaagctgggttgtcagcctgaccagtggcgcgggagccgttgggcagctttgtggtccctttgagggggactcaaggtctcgcaggtggcgccgtcggtcttcccagggctcaaaagggaggccacacccccttgcaggtttctcagcgggagcgcgcttacatcgctgggagaccctttgaaccccatttggtttgcgaccgtttgtgtaccgggcgaagcgccccttgaaagccccagttagcacggtgtgggcagcgagggccctcgcggtggccacgtttaccgcgtgttgccttggtgcggtgggaccgaacctttcgagtgtgtgtgctccctgtgaagccctgttgggcctttgggggggccgggaatgggacgtggtgccataagaaacccttctccattctccaccttaagcgtggccagaagaggccaccgcgtgtgtttgcctgggggcaacaccttaaaaggggggggacacacctatgttgtgtgtggcgctccctttgtggttgcacacaaaaaacaacagggtgggaaaaaattttgcgcggcaagggcaattgaaggggacacaaatgtggcagctttcccgtggcctgtgaaagtgtgcgccccttcgagggtcccctccaggaacgcccattcgctgcacatcccttggccggtgccttgaagcggcgccctgtggcccccacgctgtgggccttctcgtgcgcaggaggcaaattgttggcccgccgggggacgacggccgatgggaagggaactccccgtggctgggcggggccaacaccca

SEQ ID NO: 499994 - DNA, 157 bp, Homo sapiens
cacccgacgtgctgggattacaggcatgagcagatgcaccaaggccgaagacagtatatcgcttgtagccagctgctttgggttcaactcccagatttctgggagtttcctcatcccctgacttgagtgacgggtacatatgttggggctgtttgag

SEQ ID NO: 499995 - DNA, 210 bp, Homo sapiens
tggtatgtaatatctcactgatgacagctggagaatcccagctgatcagtaggctggtgggggtcgcagcaaacaacttccaggtccctcggaacatcagaaactgttgattgttggccactcaataagggactttcctctctgccattatgagcaatgatgctgaccacatactctgtgcctggagtgagtgttggtgagggtgatgga

SEQ ID NO: 499996 - DNA, 297 bp, Homo sapiens
gccctggattaagatgcactgatcaacatggtgaaagcgcattctatactaacaatacacaacattagccaggtgtggtggcatgcgcctgtaatctcgtgctactcagtgaggctgaggcgggagactcgcttaaacccgggaggcagacggctgcagtgaaccgaggtggcgccactgcgctcacccctggggcaagactctatctcaaaaacaaaaattaaaaaaacattaatctgggtagatggtcatcccagtaacgggatatggctgtaagaatttcatgaactttgaaat

SEQ ID NO: 499997 - DNA, 833 bp, Homo sapiens
  misc_feature (189)..(189): n is a, c, g, or t
tgccgggcgggggttgtcgtagtgtattgggcggtggctgactagcaccgccccgcgtctccctgagcgtgacggcaggtggggcttctgcgctgagccgggcgatggacgacagcggcgagctgggtggtctggagaccatggtgaccctcacaggaggctgggcgacgagctgaccctgggagacantcgacgagatgctgcaattctgtcacgtaaatcagggtgggagagttccctgacttgttttcagaacagctgtgtagctcctttcctggcagtggtggtagtggtagcagcagcggcagcagtggcagcagcatgcagcagcaggcaattggcaggggctagcagcagcggagcttgtggacccttcagttgcaaggggtcattcacgccaggtcacattaccttccttctctccctcgggggcctccccaagaggctccaactctgcaaggtcaatggtttctcccacctcagttcccaccaaacccaggcaactcctattcttcaggccccgcccccagccccagctcatcctcaaactcaggcttgcaacaacagacggtaatgatcacgccaacatttcagcaaccactccgcagacgaggattcatcccagcagcctttgatattcccagaaattgcagctactaagctttcaaagttctttcacccttaaagtcgaaagcctgggtgacatcttcgcaggtaacatcgggtcaccaattcagcaggcatgttgagactgtacaggccacggtggtcgtgcaacaaacggcatggctccgttgaaccttttcccggtacggtgcgacacgtgctggcca

SEQ ID NO: 499998 - DNA, 744 bp, Homo sapiens
  misc_feature (254)..(254): n is a, c, g, or t
  misc_feature (296)..(296): n is a, c, g, or t
  misc_feature (332)..(332): n is a, c, g, or t
  misc_feature (391)..(391): n is a, c, g, or t
  misc_feature (498)..(498): n is a, c, g, or t
gggaactgtgcttagggaacacacattccttttgacagggctctgtcactgggtgcggtgatgaacttatacagactgacatgtgctcttttttctctttatttcaacctcaatggtattcctacaggacatggataaccatatttaactgtattttattgcagcccgtaccttctttgggaatacaattgtcataactttttattcttaggtctggctgtagtggtgtgcaaaactccgtacattgctatttngccacactgcaacaccttacagatgtggaagatgtgaaattngtcatcaattatgactaccctaactcctcagaggantatattcatcgaattggaagaactgctcgcagtaccaaaacaggcacagcatacacttnctttacacctaataacataaagcaagtgagcgaccttatctctgtgcttcgtgaagctaatcaagcaattaatcccaagttgcttcagttggtcgaagacagaggtncaggtcgttccaggggtagaggaggcatgaaggatgaccgtcgggacagatactctgcgggcaaaaggggtggatttaatacctttagagacagggaaatttttaacagaggttcctttacccggttaaaaagattttgggggcaaactcccaaaggggtgtccagggttgcaaatttccccctgggggccttttgaggaatttttgggtcgctggttggcaatcccgactatttgtagggatggt

SEQ ID NO: 499999 - DNA, 461 bp, Homo sapiens
  misc_feature (33)..(33): n is a, c, g, or t
  misc_feature (67)..(67): n is a, c, g, or t
gaggcattgaggcagccagcgccaaggggggcnttttctgctgaaggggggggcagggcggggagcnttggatggaataccgagatagtttctctgaagataatatacatataaaatatgtcaaggtactagatatgtagtagtttagtattatagctagattagagaatatgagataagagtaggaggagaagataaggtttctaaaacatgacggaggtgagatgaagcttcttcatggagtaaaaatgtttaagaaaatgagagaaaggactacagagcccgatataccaatagagggcaatgtttaataaatgaagtgataaagtaagttagttaagtgtaggtgtaaatattgaaggattttaaagagataacgggtgataagactgaatcatggcagagatggtcttaagctagtaagattataagcgagaaatggagatattggagtgtggaga

SEQ ID NO: 500000 - DNA, 131 bp, Homo sapiens
gatctagccgatgcttatcgacggtcccaacaaaaggacagctccttctgccagggaggccatggggactgaggggaaagggctgccccttgtgaggggcatggaaggtggcggcagttctgggacgccca

SEQ ID NO: 500001 - DNA, 1438 bp, Homo sapiens
gtcttcctgggcatgttaccgtatgacatatgcgaagagcgtgcactccgtgagtttacctcttgtcagttggctgctgacttgagtacgttggccaacgtacgatatgataatcctacttgctagaagatagtgcatgtgcactgcttgccaggtatcctcgatggagatgtcgtattgcgcaaagatgttcctgatgagatttaatacccttcttggttggagacgcaggcctcgaggaattttgaattcagaaatcgacacataattggtagcatggcttcttttcgatgcaggccttgtgtgacgtatgtagctaagattcgctaagaaagtagtcggtctagtctaacgtttaccttataggcatcgcaaaagggaaaaagctgagctcgctcataatgctgttgcgagaacattccaaagctgcagttaggttgaaagaattgtggttcgtcaagagagaaagagccacttacggtggaaatctaagcttgcgtgcgaacgcgatagacttgctttggctatagaacaattctccttggacaaggcaaacaatagtgagaatgcccccatcggtccgccaggaagaaagaagcttagttcgtaagtccccggcttggggtaccccatttgaacattcacagatggtaataattgggcttgatttgttctcgcggcaaagttgaccggtaacaccagaacctggcacaatgtgttaaaaactgcgtcgagcccattggagggttcgcaggcgccaagaagaagtcgggcttggcgaagcacattgataaattccccatattggcggatttagaaaacatcaagggtggcgagaagctcccaaattttgcctgtatagtgtcccaggggcttttcgttggagaaagcggttccccggaacttgggactagcaccccaagattaaccggctttgtccccccaaatagaagggacacgcttctgtaataagtcggccgttgcaaagagaccaatattgtttcaagccgccgttttccccgagtttggtccaagggacacttcgttagttggctacctaagcgggtttgtcaagtgggagaggacaacggggcagcaaagaaaccacatagaggtttccaaacaggaagatacgccgtgacaactttgggcgcacctttgtgtttcttgcaccgccctttggtcggtaagcaaacgagaccaaagaggagctccgccaagatatggtccacactccgtacacgacaacgtgaagggcgaaacctttagtgaatataagatccctcgggtttgatttcggggcctgtcggagtcctcgcccggccgacagtctttgtgttggtttgcagaacagtcagaagtttcagccttcggccagaacctggggatctgagcagcgctggagtacatcatgggagatggcagaccccatcggccg

SEQ ID NO: 500002 - DNA, 843 bp, Homo sapiens
ccaggaacgtcaagctgctgctggagctgtcactggtgatcgtgcaccattcccttgcacccttttggcatgccgttcctccagcgtgggcagccacgccagcttcctgctggactggaggctgggggccttgccggagcggtctgaggctcctcctgagtactcggaggtggtagccgacactgaggaggcgagccttggaggcagtaggtccccattccacgctttccgcatggaacccgatatgagctctgtgaaggcccgttacttcgactacatccaagagttccggatagctgccgtcatcgccatgtactctgtaggtaggtatccagagacccagtcttggagggacatgaggccgcgctgcgttgacttgctttaacgggacagggtaccccgtcgaggaacaatggtatgcacaccagacttttcagccaccatgactgctgagggagtgcgctggactcaagggctgacctcccgctgactgtcgattctaaagtaggggaaccgaaagtctcgagcacgtgaggcgaggggcctattcggcacttctcgacaatggagaacagaggaggagcccggttggactctgacttacctggaccgttgaccttgtgaggcattgagatgcccagtgcagtatccgagagactggccaataagcctgtcgtccaagagcaataggtggtgctggaagtccccgtaggagcctcacagtctgggagaagcagagccagacatagagagatccaagtatcagagaacccagaagaagagaccatgcaacgtgtgaggagtccagacaggaaggacgagaaggagtccttgcgggacagg

SEQ ID NO: 500003 - DNA, 751 bp, Homo sapiens
gggaggctgacggccgcgggcgtaagctggactgcagccgcgagctcctggaggcggcgggatggaggctggcggccgagcctggaaacctgtgccggctgtcaggcacatcatcctggtcctctcagtgaaaggggggcgttgtggaaaatgcaccatctccactggagctggccctgtgcactgctgccatgcaggcaagaagtgtgtggaatcctgtgatgttgtgaccttgtgtggacccatgtatacccctgcatgctcgggtgctgcatgggcagggctgtgcaccagtgctgacctgcaggctggtgcaccctgtcttcctggaccgggagcagagcatctcgctcatgtctgtgtgtgcttcctgctgtgagaatgccggacgaggccgtggatgtggagaggccccaagaaaaacgcgctgatacagcagtattgtgtccgacgtggccatggggggagctggactaccttggtggtgtgacactgccccctggtggacctcctgatgcagcactatggccacccatcagaagcccgtgcgtccctaccagcccctgtggggcccacgctggtcaccacggccccaaggcgagtgaccgtgggggaacgtgaggcgcgagatggacctacggaggaagagggctgccggctgactgggaatcgggagaatatggcgggtgaccagcccacctgacgagggcacagcgactctcagggcgcggcgaggctgccactgcagggc

SEQ ID NO: 500004 - DNA, 987 bp, Homo sapiens
ggagtttcatctcactcggctggaccatgaccgatactatgtccccatcgccgtttgtgcgccattgtataatatcatttcccgtcgaaaatcgcgatccccccggggtcttgcaccacccgcgttccagggcacgggtgtgggacccgagatgtgttctctgcaaagggtgtattcctccctgcaaagtgcccatgggttgaaaatggccgagcgctaagtcacaggccaattaatagcctaaagttcaaagtgataatgcgacctgtgcatgtctctgcgatgggcagagcatagggttttatcacccaatcgcggcaggtttaaaagagcattcttcccgtggtgcgtgaacaattgttggttcaaaggatctcttggttcggacactgttcttcatggtcccccgtgtcagtgccccaagtaagtagggccaactgttctacggtgtgaaagttgtaggggtgaaagtctacaccgcggaaagggttattgtataaggtgagtacgtggggacgtataagaaattggtaggagagcgcgttgtgctcaaaaggcggtgttcacgccgacgggtcgttttaaaagtacacctttgtgatacctccacggcaccagcgggatgtacattggcgtgagcggttcaacgcacgcggttttgagagccggtgtgtagtcgtagtggccgtgcctcatggtgagctcgaatcgtaaattggggcattgaggaagtggcggaacaatctgtggggagtaagaagagaagatctgttaatgggtataaccgtgtaaacaactatctttactgggacggtcgctagacataagagtactatagaaagaaaattagggaggaaattctaaaagagtagtcaacatcacgctcttatgacaggatgacaacagatgacgttgtcaagcccccacaatgttgggacaccaaaaaaaaaaaccacgttggcgaaccaaaaatcaagggccaaaaaa

SEQ ID NO: 500005 - DNA, 1307 bp, Homo sapiens
  misc_feature (436)..(436): n is a, c, g, or t
  misc_feature (1087)..(1087): n is a, c, g, or t
  misc_feature (1093)..(1093): n is a, c, g, or t
  misc_feature (1103)..(1104): n is a, c, g, or t
tgatctagaggtcccatgcgcgacgcttccatcaacgtccctttcagctggaaaatcaaggactatctggaggagctgtgggtccaggctcagtacatcacagacgcagaaggactgcccaagaagttcgtggacatctttcagcagactcctctgggcaggtttcttgcccagctccatggagagccgcagcaggaacttcttcagtgttacttgaaggatttcattctcttgaccatgcgtgtgtcaacggaggaggaattaaagtttctgcagatggctctgtggtcctgcactaggaaactgaaagcggcgtcagaagcgcccgaggaagaggtttccttaccgtgggtgcaccttgcctaccagcgtttcagaagccgtctgcagaacttttccagaatcctgaccatctaccctcaggttctccacagcntgatggaagcccgttggaaccatgagctggctggatgtgagatgaccctggacgcatttgccgcaatggcctgcacggagatgctgacaagaaacaccctgaagcccagtccccaggcgtggctacagttggtgaagaatctttccatgccgctggagctcatctgctccgatgagcacatgcaaggcagcgggagcctggcccaggctgtcatcagggaagtcagagcccagtggagtcggattttctccaccgcactcttcgtggagcacgtgctcctaggaaccgagagccgcgtccccgagttacaggggctggtgaccgagcacgtcttcttactagacaagggattacctggccttgtggagtgaccccagaacagaccactagcctggcatctgtggaagctgttaccattttcatagtcatggagacaaggatgtcagagaatgccaccggggtttggggtcttcaaaacagtgctgtcaacagaaccaaggaacaggaagccaccatgcctgtcactcaacacccttcataaagctactaatgtggggtggtctgcagaaagaaacctgtgaccctacagtgatgcccctctgtggccacgcagtggtgtccagcaacagtggccactcagccaaacacagnctcagnctctgcctcnnccgcacggtgaccttcacgtgagcacatccagagccctcacctgccaggggtctggaagaggcagcgctggtgtccgaccttgtggagcacaggaaggtttactacaaggaggccagcatggatgctggatgtgttgactctgacctatcaaaaacatcagcggcttagacacagtatcaggtggattccacccaggcatggg

SEQ ID NO: 500006 - DNA, 966 bp, Homo sapiens
  misc_feature (436)..(436): n is a, c, g, or t
tgatctagaggtcccatgcgcgacgcttccatcaacgtccctttcagctggaaaatcaaggactatctggaggagctgtgggtccaggctcagtacatcacagacgcagaaggactgcccaagaagttcgtggacatctttcagcagactcctctgggcaggtttcttgcccagctccatggagagccgcagcaggaacttcttcagtgttacttgaaggatttcattctcttgaccatgcgtgtgtcaacggaggaggaattaaagtttctgcagatggctctgtggtcctgcactaggaaactgaaagcggcgtcagaagcgcccgaggaagaggtttccttaccgtgggtgcaccttgcctaccagcgtttcagaagccgtctgcagaacttttccagaatcctgaccatctaccctcaggttctccacagcntgatggaagcccgttggaaccatgagctggctggatgtgagatgaccctggacgcatttgccgcaatggcctgcacggagatgctgacaagaaacaccctgaagcccagtccccaggcgtggctacagttggtgaagaatctttccatgccgctggagctcatctgctccgatgagcacatgcaaggcagcgggagcctggcccaggctgtcatcagggaagtcagagcccagtggagtcggattttctccaccgcactcttcgtggagcacgtgctcctaggaaccgagagccgcgtccccgagttacaggggctggtgaccgagcacgtcttcttactagacaagtgtcttcgagagaactctgacgtgaagacgcacgggccttttgaggccgtgatgcgcactctctgtgaatgcaaggagacagccagcaagaccctcagcaggtttgggattcagccgtgctccatctgcctgggagatgcaaaggaccccgtctaggagcgtaatcggtacgagctcgatcga

SEQ ID NO: 500007 - DNA, 745 bp, Homo sapiens
ggctgcaggaattcggcacgaggagagagagagcgagagagagagagagagagagagagagagagagagagagagagagagagagagagagagagagagagagagagagagagagagagagagagagagagagagagagagagagagagagagagagagagagagagagagagagagagagagagagagagagagagagagagatagggagataggagaagagagagagagatagtgagatagagtgagagagagatatataggatagtagatattaagagagatattaaagataggatagatgtggtgtgaaagaagagtggatgagaatgtgagtaatatggtagtatttaaagatagtggtttgagagagataagttgagatggaagaagagttttataaatagagaaagagattggggaggtttagagtgagttgagagagatgatattgagaggtgtaaggtttaaaggaagatgaggataaggatgttgggagtgtgagatagatgtgaaggaagtatttagaaagagtgaaaggtagtaatgaggaatagaatgatgaagggaatagaagatattatagaaaagtggtataatagataagaggatataggagtgtgtgggtaagaataagagagtgaagatattgaataaatttgaatttagtgtagaaggatgagtgattattgaggtaaattgaagtttgttaaaaggaatgtggatgaagagattagggatggtg

SEQ ID NO: 500008 - DNA, 942 bp, Homo sapiens
  misc_feature (35)..(35): n is a, c, g, or t
  misc_feature (88)..(88): n is a, c, g, or t
  misc_feature (131)..(131): n is a, c, g, or t
  misc_feature (148)..(148): n is a, c, g, or t
  misc_feature (154)..(154): n is a, c, g, or t
  misc_feature (156)..(158): n is a, c, g, or t
  misc_feature (171)..(171): n is a, c, g, or t
  misc_feature (178)..(178): n is a, c, g, or t
  misc_feature (188)..(188): n is a, c, g, or t
  misc_feature (193)..(193): n is a, c, g, or t
  misc_feature (213)..(213): n is a, c, g, or t
  misc_feature (225)..(225): n is a, c, g, or t
  misc_feature (235)..(236): n is a, c, g, or t
  misc_feature (239)..(239): n is a, c, g, or t
  misc_feature (243)..(244): n is a, c, g, or t
  misc_feature (247)..(247): n is a, c, g, or t
  misc_feature (257)..(257): n is a, c, g, or t
  misc_feature (271)..(271): n is a, c, g, or t
  misc_feature (301)..(301): n is a, c, g, or t
  misc_feature (330)..(330): n is a, c, g, or t
  misc_feature (349)..(349): n is a, c, g, or t
  misc_feature (372)..(372): n is a, c, g, or t
  misc_feature (388)..(389): n is a, c, g, or t
  misc_feature (400)..(400): n is a, c, g, or t
  misc_feature (407)..(407): n is a, c, g, or t
  misc_feature (416)..(416): n is a, c, g, or t
  misc_feature (425)..(425): n is a, c, g, or t
  misc_feature (427)..(427): n is a, c, g, or t
  misc_feature (449)..(449): n is a, c, g, or t
  misc_feature (564)..(564): n is a, c, g, or t
  misc_feature (594)..(594): n is a, c, g, or t
  misc_feature (631)..(631): n is a, c, g, or t
  misc_feature (817)..(817): n is a, c, g, or t
  misc_feature (862)..(864): n is a, c, g, or t
  misc_feature (882)..(882): n is a, c, g, or t
  misc_feature (921)..(921): n is a, c, g, or t
ttgtaaataagaagcccgtagatttttctcatctnatgaacttgttttcagtaagatgttctctttgttctgacacctctcgccaacnccaatgcccaaagcatcaaggaacagatcaggatgtcattccntcctttaatcccatggngccgtncnnnagactgacacagntgccganctcttccctnatggnagccatttttaactgccaancttcccattccntactccattnnggncctnncanagtgtgtcancattcgttcctcanctgaatccagaagggctggaagtcctacanctgtcacagaagaaggaacattctcttcnacccacttcaaatcatctncctgtccctcgcttaactttacnatttccattgggttcnngtctggtactnctcattntcattcctncaaagcctncnttcagcataggctccttttgtncatcctcctcctcttcctcagacaatggtgataaggcaaacctctggttgtttttagatggtcgccagagaaccatgaagacaaagaggatcatggagaacagcaagcgccaganggcatcgtctacccacagctcccgccagtncgactgacatgtcactattctgaacttcatggttgtncagatgataaacacaatggatgctgccactgccaaaataagcgtgttggtgaaatgccgatacaaagagagtcttacaatgttcctccgaagttttaatagcttcattgtttgagtgaggctaataaatatccaccagcacaaggcagtgtctaggaaagccaaggggataaaggccaaggaagcnagatcagtcttgggccccagttactctgaggaccccttccatgcnnnaaaacaaatgtatttttnttcctgctactacaaccttatgaagagtgaatccaaggnggggctggacgatgcaaaacc

SEQ ID NO: 500009 - DNA, 274 bp, Homo sapiens
gagtaacatatgtgtagagatcgaagtgtgtgagatgagagatagggtgggaaaggtaagtggtgtatggcacattgtgagaatcggcgtagccagttaatagcccctctgatagtcatgttagcttgatcgaatgagttcaggcaaaagtctggccctccagcgtgaacaggtccacagaggagggaataaatgactaccatctcaaatctccaactaatatctcagaagtcagttctgaaactctaaggaggggggccacctcccctaacaa

SEQ ID NO: 500010 - DNA, 417 bp, Homo sapiens
tcagccggtccatacattgtctgatgacaagaagtgtcagatgccaagaaagaaagggtgcatgacgatagacttgggggggctcgagtagtggcttcctggaacgatgtgacattcagactgaatactggaacgatatgagtaagaggctaattcggaccaagtatgaaggagtatacagtaatcatgaaggaacagttagcgatacaaatgctcagaatgtgcaaaatcaaagctttggaatattttgagcgcaactgcaaaagcgaaacaacaaacaaatatgccatccctgtgacctagactaagtgcaccttggggtcatgatccttgaatggtgcttggcatgtatctacttcttcctgctatgttaagacttttgttactatgacattataagcgagccattggagtagc

SEQ ID NO: 500011 - DNA, 161 bp, Homo sapiens
  misc_feature (11)..(11): n is a, c, g, or t
  misc_feature (13)..(13): n is a, c, g, or t
  misc_feature (116)..(116): n is a, c, g, or t
  misc_feature (120)..(120): n is a, c, g, or t
tcacaggcganancctggaatgcaccggccagaggcatgctgctgctgctcacgcttgccctcctggggggccccacctgggcagggaagatgtatggccctggaggaggcaagtntttnagcaccactgaagactacgaccatgaaatcacagggctgcg

SEQ ID NO: 500012 - DNA, 981 bp, Homo sapiens
ggtgccatccagtctgcaggagtgagggagaccctcaagcgggacaggagtctacacagtcttcgcttctccatcaaattgatatgtcgcttcgcgacggccctggcaccagagaagaacggacgcagactcttgggagatggcatgggaacttgcgcagagcagtcctgaaatagccagcattaggtgatgaaatcctggttagcggaggcatcgtgggccctgtgtgcggtctagaagtcttctcctagagtgtgagcaagctgggaagtcaagcattgagagaagagcagatgtggtgatgtgtcaacaaaggagcctgttggccgagcctgacagtcagtggccacaaggtggcgtggtccatgtcatcaccaagtgttctgcagcctccagccaatcagacctcaggaaagaggggatgaacttggagactctgcgcttgagatcttcaaacaagcatcagcgttttccaggggcttcccagaggtctgtgcgactagcccctgtctgatcaaaagttattagagaggatgaagcattagcttgaagcactacaggaggaatgcgaccacggcagctctccgacaatttctctcagatttccacaggagactgtgagaatgttgtcaaaaccgaagtatcacacttgaatgtaacatggggccggaccataatcagattgtgagccttgtgcatgtggggcgaaggacgggaacaaacatgtccgtggaaatcatgttccccctaaaacatgggtgtcaacccaatgcattgcgaaaattgggattgtcctggcctgagattcacttcccagacagggacctatttccccaaatgtgtggcaatttgagctgggtaatgccaagttcccgggcaagggagcgcccaggattgtggggggccacataagagtggattaggcaaccaggctctggggagtcttggaccaacactggaaagcctgacacttgttaactg

SEQ ID NO: 500013 - DNA, 984 bp, Homo sapiens
  misc_feature (24)..(24): n is a, c, g, or t
  misc_feature (30)..(30): n is a, c, g, or t
  misc_feature (125)..(125): n is a, c, g, or t
  misc_feature (197)..(197): n is a, c, g, or t
  misc_feature (301)..(301): n is a, c, g, or t
  misc_feature (303)..(303): n is a, c, g, or t
  misc_feature (307)..(307): n is a, c, g, or t
  misc_feature (320)..(320): n is a, c, g, or t
  misc_feature (400)..(400): n is a, c, g, or t
  misc_feature (405)..(405): n is a, c, g, or t
  misc_feature (427)..(427): n is a, c, g, or t
  misc_feature (441)..(441): n is a, c, g, or t
ggttgcggggaggcccgggtggtncccggngctcggtcccagtctcctgggcttctccagtccttcagcgccgtctccggtcacagggaatgaaagcgaggaagaaggaaacggtgtcgagaatngcgaagagagaaagcatagaaaacccacattagaggcactcccagagcagaaacccttcggagcatcccganttcctcggcccgcgtgcaatccaggcaaaattgaggttgtctctgagccgccctccctaagcaggtcggaaagcccccgaatcatcccaggtcccgccggctgnantcgnaacctgggtgganggtccctctagtggttggcaccaaacaaaagttctgtcttatgaagagccgaggtcaggaagcatttccctgtgcccagngccanggtctgggaccttaggtccaanaaaagcgttggcantgtctgaccacaggaatgggttctcgaactggggaggactgaagctggagatctggtccagcccctacctccagcgtgtggcctgaacccgttttggttgtactgctatgttgtggccctgcccaggcctccaaggactggctgctgttaagctgtttaaaatccctgtaggcctcagatggcagcgacaccagggactcggcatagtccccagctctggcaggagtcaccacagccctagcctttagttctctacaggctggagtgtcgacaaactccacaggacacaactttttcaaaccaatttaccctcgcggtctgaaatgaccagtaggcccaggagattttccctgtgacaggaacctaaccacctggcaatatgagaagtgtggccctgccgggacctggcccagcggcgaccgagcccagccgccggggaaggtgggcccccacgactgtgttcccaggcaccctcagtcctttactgcttaatagccccacgccttgtgcgccgcggcgcgtccccggctgggttcggatccc

SEQ ID NO: 500014 - DNA, 332 bp, Homo sapiens
ttttttttggatatggagtctcactctgttgcccaggctggagtgctgtggtacgatttcagctcaatgcaagctctgcctcctgggtttaagcaattctcctgcgtcagctccccagtaggtgggactacgggtgtgcaacacaacatccggctaatttttgtatttttcgtagagacagggtttcacatgttggccaggctggtcttaaactcctgacctcagttgatccacctgcctgggcctcccaaagtgctgggattacaggcataagccactgtgcccaagctgaattgttgctgttttttattgttagttaagagaggtcgacg

SEQ ID NO: 500015 - DNA, 216 bp, Homo sapiens
actcgtagtcgcgcagttcttcaggcttaaaccataagctgattgcttattcagcgacttgtgactgaatcattgccatgaatgatgttcctgcctacctgaatgcagaattcccacgaatggtgcctggctttgaatctgttggcttggtctcccaaagcatcactcggcctggtggtattagcctcggtggtatagagtgatagggtggtatag

SEQ ID NO: 500016 - DNA, 153 bp, Homo sapiens
ggctctccctacacccaccttctttttcagcttgtcgcgcgcttggcggccctggcgctgttggggactttgggctccgtgctgttgatgaattccagcagctcatccacatctcggtggtccgcaccccccagggatcccgcccaggtcccc

SEQ ID NO: 500017 - DNA, 400 bp, Homo sapiens
ccttcttgcagctcacgatcaggaagtagattcattggtgagtatatgatgtggggcaggtcagtggaagtcctctatgcgtgctcgcactgctatgtcgttctcagcagcggcgatgcactggcgcatgttcacttaaccccgatcgtcatttggaatgacctgcttttcagccaccatgtcttcaaattcatcagcattgaacttggtgaagccccacttctttgagatgtggatcttctggcggccaggaaacttgaacttggccctgcgcagggcctcaatcacatgctccttgttctgcagcttggtgcggatggacatgataacttggccaatgtgaaccctggccacagtgccctggggctttccaaaggcacctcgcatgcctgtttggagc

SEQ ID NO: 500018 - DNA, 789 bp, Homo sapiens
gaaagagccggcggagcctggagcaccgctcccggagacgccgcctcgcgatccccgcgcgggcgggacctgggcggccggcatcaatagaccctagtaatcacttcgggaactgcttcgctactatgcctactataccccatactatacatacacctacaagtgcagcggcctagtaccgagtacaacgcctatctaggaaatgcgtccaggctggagtacaccgtacctacttatgtaccaactactagcaagatgctagtatctatggccactttctttcccacctgggaagtgcggcatactatgacttacatatgggtgagttcatagaagtgccagcgtggatagtaggcagacctgatagtgtcaaaaccttgtcatgtacccggaatgccggcaagggagagtacaagatacatggttgctgccctgggctgggccactgctgagcttattatgtcccgctgcataacccctatagggtcggagcccggggcatatgagtttgactggaagtacatccagatgagcatagactccaacatcagtctggtccattacatcgtcgcgtctgctcaggtctggattgataaacacgctatgatctgtaccacagcttccggcagcctgtcctcctgctgatgttcctcagtgtctaccaggcctttgttatggagaccttcgtccacctctgctcgctgggcacttggccgctctactggcccgcgcagtgtaacggggctgtggcctcagccttggcctttttcccttgtcatgcctctagca

SEQ ID NO: 500019 - DNA, 169 bp, Homo sapiens
aagaagaaggagagacagcctcagaagagacggaagaaatagccgtggagggtgcggaaggggaagccgaggaggaggaagaaactgcagaaggagaagaagagcctggagaagacgaatatacctaggcctttccatgcgttcatttctgacactgtatgcagaaaat

SEQ ID NO: 500020 - DNA, 871 bp, Homo sapiens
caccagtaagcttcaagctgcttcctttcttgaaaactaaacgtttaacgtataatgtctgtttggatactgtccaaatagtagatgcatgtggataatgttgcattagagcactttgcagttgcataattcattaatgttttgtgatgacttgcatttgtgagttattggttgatcagactgaattttgtctagtatcacattgtgcatccttgcctagatgtcgatgactgcaagtaagtaatacagtgtataatgaaactatctacagagttcttgtgtttgtagcacatctgttatccgtagaacatctgtaatagctttctaaatccagtttatttgagagttataggagttagcgaatcactaatttgtagttgctgaggttggattgtagtgattgattaagctacttctgtcagtctttgaaagatgtaacgtattttttgtgcgtgaagatctctgaagaattgcttttataatagaatgggcatgtattgtagcagtgtttatgtcacatgatctgtgctgtagaaaagattatgccttgttcacaagaatggtgagtggcctttctagggtagaatgacctgtcagtataagtcttcggctcttaccttctgttctgaattcatctcttagtataggcgataacttcccggaaaaaacgcggaaggccatggtttctccaaactcctctacgggccggttgggctcacattggcttggggtttacccaattaatttgtgtgcggctccagccaagtgcgccggggccacgcggtgctcaccaaaacccctggccacatatagctgcccccaacgcaaacagtcatcatataaccccgtgtacaaattttaacagtagcgc

SEQ ID NO: 500021 - DNA, 140 bp, Homo sapiens
tataggcgctagtgcatacagtgctctacccccacatatcttctattaaggctgcacctaaatgcatttcggagagaacgagctatctccgtagttcgattggcttttgcacccctaagacctatctcatctccccaact

SEQ ID NO: 500022 - DNA, 797 bp, Homo sapiens
  misc_feature (32)..(32): n is a, c, g, or t
  misc_feature (39)..(39): n is a, c, g, or t
  misc_feature (73)..(73): n is a, c, g, or t
  misc_feature (287)..(287): n is a, c, g, or t
  misc_feature (299)..(299): n is a, c, g, or t
  misc_feature (327)..(327): n is a, c, g, or t
  misc_feature (371)..(372): n is a, c, g, or t
  misc_feature (375)..(375): n is a, c, g, or t
  misc_feature (377)..(377): n is a, c, g, or t
  misc_feature (380)..(380): n is a, c, g, or t
  misc_feature (392)..(392): n is a, c, g, or t
  misc_feature (395)..(395): n is a, c, g, or t
  misc_feature (399)..(399): n is a, c, g, or t
  misc_feature (402)..(402): n is a, c, g, or t
  misc_feature (408)..(408): n is a, c, g, or t
  misc_feature (410)..(410): n is a, c, g, or t
  misc_feature (430)..(430): n is a, c, g, or t
  misc_feature (445)..(445): n is a, c, g, or t
  misc_feature (462)..(462): n is a, c, g, or t
  misc_feature (520)..(520): n is a, c, g, or t
  misc_feature (522)..(522): n is a, c, g, or t
  misc_feature (531)..(531): n is a, c, g, or t
  misc_feature (539)..(539): n is a, c, g, or t
  misc_feature (580)..(580): n is a, c, g, or t
  misc_feature (584)..(584): n is a, c, g, or t
  misc_feature (699)..(699): n is a, c, g, or t
  misc_feature (703)..(703): n is a, c, g, or t
  misc_feature (737)..(737): n is a, c, g, or t
  misc_feature (754)..(754): n is a, c, g, or t
acctagaaacagaatacaggacgaatagctanaatgaanaagcaatacaatttgtatttgggatgcaattgtnttgtaaagtttcaaataatcaatttataaatttgttgcttttacttttacaaaaatattcatttaacccataacatgagttgcaaaattatctccagacttctacagatgattataaactgtaattgtgtttcagttacacagcaggtgaaaaatttaactgaaccgttacttcaaaatacaatgcattaaaaataattgttacaatataggcnccaataaaaagnattttcttggcatacaacaccacaacanctttctcaagtatctgtattatgtaaattaaaaagagggtgtcnngcncnccntggctgggggcngtnttcnttncagggngngtatctttcttttaaaattngacaaatactcaganttttttaaaagactttngtgcaaaaaccaaactgtgcagatccaaacaattaaacattagctatcaaaactaaanancaaaaaatnctacaacnactgaaatacagccccagttcagaacttaggcaggcaaaanatangtactgggcttaaaagaaaaaggcaacacccacataaaagtaccaaaaaaaaaagtgaaaaataactgtgcaatctaaattaacctttgtgtggacagaaaacaacctggactanggtnattttcatatgaactagaaaatgctcacttaaanatccttttaaaaacaanaaactgatgcttattagtgataattatgaagaacaaaaatata

SEQ ID NO: 500023 - DNA, 174 bp, Homo sapiens
cttaagtagcaggaaagcttatcagctgaattgtatttaacaaaatagttaactagcaacctcaaacagacaccatggtgcatctaaatcctgaggagaagtctgccgttactgaccctgtgggcaagggtgaaacgatggatgaaagttggtggtgaggaccctgggcaggct

SEQ ID NO: 500024 - DNA, 122 bp, Homo sapiens
tataggaccttacatatgttactttgtatgtatgtgttattatgtgctatgcatatgtgagaaataggtctggaatgacacacaagtcatggtaggatacctctgcgggttagggcaagtga

SEQ ID NO: 500025 - DNA, 683 bp, Homo sapiens
cgcctgtaattccagcgctttgggaggccgagacgggtggatcacttgaggtcaggagttcaagacagcctggccaacatggtgaaacctcatctctactaaaaatacaaaaaaaaaaaaaaaaatcagctgagtggtgggcgggcaggcgccggtaacccccagctactcaggaggctagaggcgggacaaatcgttagaacacaaggaggtggcgaggtagacacaaagagctggagatcacgccactgcctcccagcctggggcgaaaagaagtgagtgagacccccgaatcaacacaagaaccaaaacacacaacaaaaccagaactaatacacagaaaaaacaaacaacacaacaacaccaacacaacggcgtgggcgacaccacagcaccaaaaaacaattaacaaaccagacaagcagaggagagagacacaaacgagaagtacaacagacacaaaaggaaccacacgagagcaagcaggacaaaaaaaagaggaacaacaaaccgaaaaaaaaaggcgcgggcggacacgatcgccacaaaaaaccaagagagctagaggacaacaggggcaaacaaaggcgaacacagcaagtaaaaatcaaaaccagcgagaaaatacaaaaagccgagacaacgacgagacaagaaacaaaaaggaagcagaaagaagaacg

SEQ ID NO: 500026 - DNA, 139 bp, Homo sapiens
aagtgaagtacctggttagtaagggactaccttttaaacgttctgttgatattggacaatgctcctggctcacccagagactctatgagttaacaccaactggtgttcgatgatggtctagcttgcaccccaaggcaca

SEQ ID NO: 500027 - DNA, 780 bp, Homo sapiens
gcaccgatcaataatcagggcatcccccagatggccaggccgcgtttcgttggggcaggaggggcagacgctcgtcctccagtgtcagccatttgtattcgtccgtgcctcccattctggttcaattgctctcgggcagaaacttgtgttggccacccactgcccgttgcccagacccatgggctctgggagtggacttcccttgggcgccccagcccttggcccagcccggaaaggcaacctttctgccatgtgtctctgccttgggacacaacaccccggggtgtttttcccgcgcgcatcccctgagtggggtcgccccctctgtctccccactgtcgagagggcgccacccccactctcagcactccaccggcactggccttgccgtgtccccaggcgtaattatactattaacccctatgctgtgacaccagtttgccagtctccagcgtgttggtgaacccgcctcccggcgtcggggagggcccccgggcgtgggaacgccctgtgcccctctctgcgcgcgaagcccacgccccctttgtccttccctggccctgctgcgcgagcccggaggctgcgcccgcctgtgggcggtctggctccttctcctcccttctgctccttttttatattagtgattttataaagggaatttttcaaggacttgtttaatggttttgggggtccccaggcacttaagcttggggttgggaggtcccctgtttcaaatagaggcacccccaataatataaggccccccatttgtcctttgga

SEQ ID NO: 500028 - DNA, 901 bp, Homo sapiens
ggatgcctttcagctcgtgtgcaaaccacaagcttctcctgacaggtggaatttcctcaggactgtccgtctcaggtgcgtccatgtctgtctgcacctggatggcatcgcctctccatctcgaggacgccattctgagggggccagggcagggtggctgatcccctgcaggcccagccctgtgactcagccacacaaagcccaatctccagcccaaggaaaccaaggggtatcttcttcatcatccttccagtcctcttccccttcgcgggctccagcctcagtttggcctcacctccatctctccccttcttaacccttgcccccattccaattcatctccctccctcaaccttaagggcacctctggcattgctccttaatgctgacgtgattttctacaatctctacatcagccaagagatctcatcacctaaaaacacgtgatgtgacccttaagatcacaatatgtcattatgggggtgaaaggtgggggtgggaaggcactaaagggcaggccatgcaaggtggttcaagccccaggtgtgacaatagatgggggtccagggtccagaagaagaacccttaaaacaattaaagcaattgataagccggaaaacaacaaacaaaaccacagcaacaacaaattgtgcggcgcgcctgcggcccagcaaaaatatcaagccatcgttggggcgcgacagatggagtgaatgggcacgactggcccaggaacccgctagacaggtggtgttccccaaaaagcggggaccgctcgacacaccatgggtgggtcacggattcacgggcaggcgtgacccgcgaggcgagagacgcacagagacacaaacacagaagcagcgacacaccaacacacacaggacacacgacggacgacgca

SEQ ID NO: 500029 - DNA, 439 bp, Homo sapiens
  misc_feature (351)..(351): n is a, c, g, or t
  misc_feature (411)..(411): n is a, c, g, or t
gagacggagtctcgctctgtcgcctaggctggagtggagtggcacgatctcggctcactgcaatcttaacctcccaggttcaagcgattctcctgcttcagcctccccagtagctgggattacagacgtccgccatgacgcctggtaatttttgtatttttagtagagacgggggtttcaccacgttagtcaggctggtctcgaactcctgacctcaggtgattcgcccaccttggcctccaaaagtgctgggattacaggcatgagccacagtgcccagtcagcaatttttatattgatcagaactcttaccaccaccctttgttgactgcatgtgttacaaatatcttntcccactttgcaacttgttcttgtactttcaaaatatatcttttgcggaatgtcctattnttagtacagtagaatttgccagcctttc

SEQ ID NO: 500030 - DNA, 205 bp, Homo sapiens
ggctggtcacatgattgctcacgctcccttatttttttttttagtcttttcaactttccatggaagttggttgtaccttgtaaactatgtttttaaaattaaaaattaagataaagtgtagtccccgtcccgttacaaagtgccaaaacttctaatgtgttgggttcgccttttttttgtccttccttttcatttggtaaacctt

SEQ ID NO: 500031 - DNA, 368 bp, Homo sapiens
ctgaagccacccataatcctctctatttctgataatgaattatcagatcttcaaccaaaacctaatattagataaagggaacctgagtgaacaaataacacaacagttacctacttatttatttgatttcataaactaagttatgcaacacccaatgccctgtgtgaaaaagtaattgcacccttacactcaataactggttgtgccacctttagctgcaatgactccaaccaaacacttcctgtagttgttgatcagtctctcacgtcgctgtggaggaattttggctcaatcctccatgcaaaactgctttaattcagtgacatttgtgggttttcaagcacgaactgctcgtttcaagtcctgcc

SEQ ID NO: 500032 - DNA, 103 bp, Homo sapiens
tgcggtcacgttgggttggtcaagataaaaactaagttgagagatgaatgcgaaggaaacaaatcttttccaaagtccatgtcccaacggtgaccggcgactt

SEQ ID NO: 500033 - DNA, 727 bp, Homo sapiens
ggctcagcgtgccaggacccctccactgtcccggaggaaagctgtagacatgcggctgcgagatggagttgggtgctccatgaagagatggggcaggtgcccccacttgactctcgccccagactccccagccctctacttcacccacgatgccagcctggttcacataagtctccagtaccccttcggagcagtagcagctcagaagttcatgcctggccctactcctatgttgtgccatcagttggtcacctagactagcgtacgatgatcatgtggctccaggaagcctggttggctattgacaacaaaatcgagcatagcctatggacttggtgaagtcccacctccatgtttgcggtccgggcaggaggtggcaggctgctgaacggagcagtatccggtgcaattcgcggccgtgagtcgtgatacgctgcgctgtgcagcaggagaactggtgctgctgctgcgccctggctctatgccctggagcagctggctcagctgccctcctcgtggggtcccacggcttgggcccccctgcgcccaatgggccctccgtctgagcctcccttcgcttacaatgtgcctttggggctgctccggccttgcgtcagtctgctgtccctcttcctatgcagctttaatgtccccgtgtcccggagatgggagttcaaggctcagtaatggctgggtccccgagccctgccaatctcctcatgaatgc

SEQ ID NO: 500034 - DNA, 1570 bp, Homo sapiens
  misc_feature (258)..(258): n is a, c, g, or t
  misc_feature (727)..(727): n is a, c, g, or t
  misc_feature (1157)..(1157): n is a, c, g, or t
  misc_feature (1570)..(1570): n is a, c, g, or t
tggaaactttaaaatccctcaaaaacggtttattatacaagtgagtttggagtcacgaggggcttatcggtaggatttctggttagcgagcgcgggcaccagggccctccaaacttttgggacctcgcagcgacgagggctcagcttaccagcagggctccggctcatacgtggagtgaggagtgtcttgtgactctcctttctgtggaagcctacattccacaaatatttctcgtggataatatagcgccaccaagnggcttgtgtgggaaagtggcactgtgacgggatatagcatataaatctctgtggcgccacgggtgaaccaccaacccctttatacacgggcaccacgggatgtgttctataccaccaagaacaaatctcgccctccttgggcgcgagagaagagccagaaaagcgtgtggctctcccgagcgcgagccgtgtggtacgtggatagcgcggtggcggcggatctcaaatctcactctctccgaggggggccgcgccgcgtgtatcaaccgtgtgtagtgcagacaccattgtggcccggcgttatggggccaggtggcgcccaacgaggcgtgagtgcggcgtgggtactatcatgagggcgttcccgaaaagaaaccgtggcacagaagtgtggccagcgcggggcccctgtggacagcggcaagtgggcccccgaagcgcggtggaaactagaaacacaccctccagnctgggtatcacccgagggggggcgggcggcgagggggctactataacagcccgaatgtgtggcacacgaaagaagcgcgcctacaggggaccgtgggagggtcccctcgaggggaaatggaccccggatgtgggggcgaaccaccgaggcaaggcaaacccaagggcggggtgggtcaaagaaaaacccccaagaaacactaccaaagggcctcctgttgggggaacaggtgtggaggccacgcggcatgcaatgcgtcgccacgggaatcccaaggcgcacccttttctccccttggcgagggactcaccctttggggcccgctgaaagggggaacaaacgtcattggccccaagttaaccttggcccctcaacaacgtgcccggggcggggaaatgcccggcaaagacgccttccccgcaaaaaggcnccaacggggcccccatgtgtgggggaggggcgcaactacatataaccccgagtgtagtggatgtccaggggcggcacacaaagcggaagaaaacgacactatgcaacggtggcgccacggacaagcacgacccggcggaaaaaaaaaaccgggtctcagggggagaaaccctcggcagggcgtgggtgaagccccacaccaacacagggccccgcgcgggagagaccccacccgcatgtggggccggccgcggtgtgacaaacgcgtgagaggtacccccccggaggaagaacaccgtattgtcagcacccagaggcgccgacaaacacgaggggcagcagagaggcggccaactaaaaaagcagagcacgtcatcgacaagatgccaacatactatgcagacggaaataatn

SEQ ID NO: 500035 - DNA, 844 bp, Homo sapiens
actaatcgactgatctcacttcccttccgctccaagcaccagcttccggtggtactggcgggaataccagtgaaatagttttggttctccctgaagcatctgcatattgaatagaacgctttccccactgtgtgtcttctaccccctcctcccaggtaaaaacgagtcccggctgtgggctgctgatggcatcgcgttcattgtacatcccaggcactttcgggagagccgtagggtgtgtgccggattcaccctgtaggtcgaggagttctgatgaccatgcgctggccaagcactggctgtgaaaccccgctctctatctaaaatatacaacagaagaagatttagccgtggcttagttgtgcaacctgtggatcccagtctacttgggagagctgaagtgccacgtgagaatctgccttgaagcctgggagaagctaaggcaggagaatcgacctgacacctggagagcgcagtatggtatgcagatgacgtcccagatcggcgaccattgctactcatagccatggtagcaacaacactgcatggacgtcctgatcccatacaacagaaaagtgctacacaacatacatttggacaggagtactcattcatgaatcggcgcgagcaggaaagaaagggacgggatgacaatgagagttgtggccctggtggtgcataaagcgttggttttccttgaccccctggtattcctctgacgttaccaaagtgtgtcaatgaaactcgagccaggaacaccaccctgaatacggtaagcgctaagataatattcagagtacacaccaagcggtaaccccgtgcttatcgactatctaataagaat

SEQ ID NO: 500036 - DNA, 1200 bp, Homo sapiens
gcagtgtacaaggtgtcacgagtagtgcacggcgcttctgctgttccggtcattgctgatggaggaatccaacatgtgggtcatacttgcgaaagcctatggaccttggtgcctccacaggtcactgatggggctctctcctgaggcatgaccatcagatgagagccccctggtgaatagcattctttgccgactgggattccggtctaaatgaatctatcgcggtccatgggttctctcgtgtgccattggacaatgcagcctcagtgagtccagaacagattattatcacgtgaaagctgacatataatcaaaggtggcccaggtagtgtctggtgctgtgcacgtgacaatagggtcagatccatcaacactttgtccccttagcgtgattgcgtgtccatccaatgacctcatgccagagacgattggtcgccaatgagcgtttgaccacatagtccagagccaatgatgtactctcgtgggacgcgttaaggtttgacgacatgagaacgtcctcagcccaggtggaaagggtggcggtctcaataggctctccaattcgtatgatgaagcggcttctgcgtgaaacaggggatccagcaatcatcatcctcgggatgttgcttacaatttgactgttttagacaagagcgtcaataacatctgattccaggacagcatttggcacatagacactagaagaaggcttgccacatctaatcggatcctctccaatgatgtcttcgacagaaaaaacgtaagaaactgcgtgatagacagccccaaaggtttggaatacggggaaaatgcctcaattgggaggccttcgactggatcgaaatcggcaagacagtcctcgggcatgaaggccactgggcgaacgacgaaccaaggagatggcttaacgtgggtttgacacccgaatgcttgattggggaaaaacaatgagcaacacaccagacccactgatgacccccaaagaaacttctctgggtttacaaaaggggttccagcaacacgtgcgcaaccatcaacttcggggacagaagtgacaccacacatggcgccatacatctgtgttgcacaaacgacagacacacaccggcaagcgatcaacagaagacaacccagcgcgagggtacacataagaaataaccagagagagggcggaaactccacaacaaaggacaaacgaga

SEQ ID NO: 500037 - DNA, 691 bp, Homo sapiens
ctacacaagagatattgattaatggtcggttgaatttacagttttaacatagcaaaccaagatgaattaccacttgggcagaaagcacatcattctacattataacccactggtttctgctaacacattggaaaagctagtggtgcgggatgttagggatcatctcaaaagatccaagctacttctttctttgctcctaagtacctaatcctctgcttactgccagactttgagctaatcaccaggagacaagaggacaataaggggggtgggggcgggggtagcgtttaaaagatatcacaggaaaatgtgggtctagtgacgattaccccaggactaagcgctgtgaagctcatccctgactagggtacagtgcaaatccctggatagtgctccttgccacctgcgcgtgaatcaaatacaaggccatgccggcatgcggaacaacacaaaattcacttagaattgagggggtattggataacactctagtgttgagggacaccgaagaacggtgctctataataaatttaagaccggacagggtagtgagactaggctaaactttgacttgggcggaagccccccgggattcaaaccccaaacgggaagctaaggcggtttgccagtggtttgcccttaacagaagggacccggagccaaattggagccttctggaaccgcgttttag

SEQ ID NO: 500038 - DNA, 111 bp, Homo sapiens
agagaactctgttgaagtactcggcaatttacctccgtaacttcgggataaggaggcctttcgtcggcgcaagccgtcgagaggggcacagaccagggggtggtatcaggt

SEQ ID NO: 500039 - DNA, 407 bp, Homo sapiens
  misc_feature (48)..(48): n is a, c, g, or t
  misc_feature (58)..(58): n is a, c, g, or t
  misc_feature (79)..(79): n is a, c, g, or t
  misc_feature (81)..(81): n is a, c, g, or t
  misc_feature (84)..(84): n is a, c, g, or t
  misc_feature (196)..(196): n is a, c, g, or t
  misc_feature (214)..(214): n is a, c, g, or t
  misc_feature (258)..(258): n is a, c, g, or t
  misc_feature (264)..(264): n is a, c, g, or t
gacacctctagggctaggggcataaaagtgtcagtgccatcctccccngcctgtgttngggtctgcccatgcgccagcncngcntgtagctcagcatatcagagagtcaggcaagaacctagtgagccgcgatctctacttaagactcaatataagtggattagtggaaaagataacatttcccaccattacaacngggcctgaagccataatngattcttattacctccctcctttatcaaccatattatagttccngccccnagagccaacctttacgggtcgaagatgcttacctagggggaaaacagactttcacttccaagaggtcagatcccttagctgacttacccggatagagagctgcgatggctgcaagtgcccacggagggttatgccggggtagg

SEQ ID NO: 500040 - DNA, 300 bp, Homo sapiens
ttagtcgggcgcggtggggggcacctgtagtcccagctactcgggaggctgaggcaggagaatggtgtgaacccgggaagcggaggttgaagtgagccgagattgcgccactgcagtccgcagtccggcctgggcgacagagcgagactccgtctcaaaaaaaaaaaaaaaaaaaagatccatgcatggtgcatcagcagcccgtggcctctggccaggcatggcgaggctgaggtgggaggatggtttgagctcaggcacttgaggctgtcgtgagctatgattatgccactgctttcc

SEQ ID NO: 500041 - DNA, 818 bp, Homo sapiens
tctttaaaatgaaacggacctcattgtgttgcccaggctggattgcgtggtgcaatctcagctcactcaaacctctggccacccggggttcaaagcgattctcctggcctcagttcctggagtacgctggggattacagggcacctgccaccggtgcccgggctaattttggtattttaagtgggaagataggtttcaccatcttgccaaggctgggtcttgaacctcttgaccttgtgatccaacccgccttgcggccttcccaaaaaggtgcgtggggaattcacgagcgctatgagccaaccacaaccgcgcgcttcgtgctttgtggtttttctaaacaacaaaagagaaatgtgccaagaagcagggcagggaaggcaagcctcctgtgaaccaattaaaagcggtgatttctggaaattttttttctctttttatttttctggagaaaaagggagctcttggcctcttgtcttccaaagaggctgggaatgtcgcaaagtgggctatgggtctgtcaaagctcaattggcggagccttacgggatacccccggtgggttttcaaggtttgaatttgtgctccctgtgcctttgggcgcccgggtagtagatagtatacgctatagagagatttataacgtgggcgacaccccgggcccgacagaaaggggccccacacgctataaatctttcggcgagaattctcctcagcacggcctcgaacacaccaggccgggttctcgagaactaattgtttggagaaaaacgcgcctggggtctctttaaaaaccttccggtagaactttctacagg

SEQ ID NO: 500042 - DNA, 124 bp, Homo sapiens
  misc_feature (83)..(83): n is a, c, g, or t
gtaccgacgacatggcgactcccaaagtgctgggattacaggttagccaccatccctggctgagccacgatgcctgactgttngtgaactattttaacattagtttgctttttttttttgagat

SEQ ID NO: 500043 - DNA, 529 bp, Homo sapiens
gaagaaaatatatgaacagtggattgtctgtatggtcggagtatggatgacctttccctcatgtgttttctgaattttctacaatgaaatttgtgttgtataacccagaaatatttgtgaaagtgcatgctagcagtagcatggaaggtggattggtgaagggtgataaccctgtggtaggagacccgttaggaagcttttgagagtaaaagtgtttatgaagcacctgctctggtctaggcaccctgccaagtacttaatagtcaccacctcacttaatcctcatagcagctctatgaggtaaatactgtcagtggctccattttagccatgaggaaacagattaagtaatttaccaaggtcatacaaactagtgaaagtgagatttgaacctaggcagttggactcttaaccaccatgtcatattgtgattgaaattggtcagttgggaaacaagtcctcactaaaacaatggtagtagaatgaagagaaccaacgaagagatttgctctgaaacagcttctggagg

SEQ ID NO: 500044 - DNA, 645 bp, Homo sapiens
ggccattatggccggggcaacacttatgacgccttttattttggctcattcacactgaacaagcttaacgtttctcatgaatgcgttgcacaatatcaccccaaattctgtcacatgctggatcgttcgctagccagtgtactggcttggccaccaaaagagtacgcctgatattgatgcacctggaagatgggtgtgctagtttgtggatacactgtaggcattgtcacatggacatatgcttcactacaagcaggtatagaatggaccatgaaccccgaagacgtattcaccgccgctgtaggggaggaatgagtaccatctctaatgtggccattgccatttgaaggtagatcagcttagtgtttttacccctagaagccactgtgctcgcatgagagaatgaatcaccagcagatgtctagtgcgctggcatgccctggtgcaaaaggattggcccccattatggcgcttctgactaatcttgccaagatagacaaactctgatgaaactcagactgagcttgctactcatgttgatttatgcatcacaaccctgggtattggaaattccacataacgggaaaccatttatcacaaagacccttggaaaaactctttatactctaaagtgatacccataac

SEQ ID NO: 500045 - DNA, 249 bp, Homo sapiens
tggggttaatccggccacattaaaggggggggagggggggacctatcctaaggccattttactgttaaaaaaagttccctagccatgaagccctgctgctgatttagacagggttttagggccattatttggaccccttatccttccaagcactttgggaacttaagccgtttttacgtgcccaccaccccctaagggggctctgctacggcctttagctaaagggaagacacattcatccttctccct

SEQ ID NO: 500046 - DNA, 1651 bp, Homo sapiens
  misc_feature (1)..(2): n is a, c, g, or t
  misc_feature (957)..(957): n is a, c, g, or t
nnagctttgcgtgcgcttcctcctccttctgttgttcaacgatgtgtttcttttgttctcgctccggcgtgttgtattttattttccccccgtccgtgatgtttctttgcttgtggggtgtattttagctcgcgtgttgtgtttccctcgtgtcctttattattgtggttgtggttcgtttactttattctatcagcttgcggtgttcctctctgttctgtgtatgcttctgcgttcgtggtgtagtttgcttcggtcttgcttgctcttctgtctttttatttggtgcggtgtctgcttttgttagtttgtgcttatcttctctatatgtgttcttcttgtgtatatattctttttcttcttctgatggtggcttgtcagttgttggtaatttgttttttatattgtatggtgttttcgtgtaggtcagttattatatttttctggctgtctcttccctgtcttgtatattcctctcttcgcttcgcattattgtcttgtggctctgtgttcgctctctcctttcttttttgttctgttgcgtgtgctgttcttttttttctcctctgttttgtctgttgtcgctccggcctgtgttactctcctccggttggtgatatctttatttttttctgtctctcttcttctcttgtgtgtgtttatttcttcttcgttggctcttcttctttgttttgtactcggctggcttcgtcgtgttggttttctcctatctttcttcctctctctttttgtttgcttctttttctctcttatgtgttttcggggggttttcttgtctgccctctcttgttttttttttttttttttttttctccactacattggtgggtgcgtcttctctttctgtggtgtttatgtttctactttttgtctgctctatgatgtgatgtttttctttctttgtggtgtgtttgtgttcttctgcttgtgttcttntttctgtctcgtctccttcgctcttcgcttagtataatgttgtgttgtgagcatcatctgttgttttcttttgtcgactatcattcctcgactagtagtgtccgtctttataaatcagcacagatgtttgttgattactttatataaagtacgtgtctgtatgagaatatatgattcgccctctctgtacacatgtgtgttctctgcggcttataaatgtgtccactggagtttctttttcttggccccgttttctgcttcatcgagtggttatcttgtgtgcgctttgctgggtagtcgccttttgggtttctttgtgcgactggagccttgtagttgacccgcctcttatttgctctgttgttagggtgctgtgtccttgttctgtacttctgtaagtacagaggtgatactattagggtgtttatgttttgtttttttttgttttgttcttgttaagaaaaataacttactttaatttgattgtaagtttatttgattaggttgttttttgaacaaatgaagatgtgtcagctttctcaaccttctgccctaccaaggactgtggacccagactggccttgagccacagtcccatctattcccgtccatcaccctcttccccctgacgggctcgctcgtggtctgtccattctgttactgtgctgtgactggttattgcgcgcgagttggc

SEQ ID NO: 500047 - DNA, 284 bp, Homo sapiens
gcctatggttagccagcaaacatagagacccaagcagctgtgtagagtcatggattttgcagtcccgtccaacgcattaccacggcagcaaatctggtaagtaagcagatagctggcaatcagtatgtatccataagcatcacagaattctgagtggaaattaaggtcggcggtaaggtaaaagcacaggcctcctgtgagtatggctggtggtgcataaggcctctcccccagaaaaggtgtattgagcagtgatatggtacctgtgattgccggttccttta

SEQ ID NO: 500048 - DNA, 660 bp, Homo sapiens
tggttggaagttttgcatttccataatgactaatgatattgagaatctttgcacgtgtttgcttccccttccaccatgattgtaagtttcctgaggcctccccagctgtgctgaactgggagtcaattaaacctctattctttataaattacccagtcctgggtatgtctttgttagcagcatgagaacagactaatacagatagatatacagttcaattaaacagattagagtccagaaatagactcacataaatataaccaactgacttgttgcaaagatgcaaagtaattttacagaggaaaggcagtctttccaacaaatggtgctgggcaagacgggacatgcgtatgaaaacataaatgcccacccatagaaatactaacttcacaattactagactcacgtgtaacatttaatctatgaaaatttctttaccaacattgggaacaataatttcgtgtgacacttgagacttagatacaacatcaacacgcaatattcactacacacggccaccgaatcactaactggactttgttataattttcacaaaatccgtccgaacagaatacaaagacagccacaggctgctacagagctattctgcaaaattacatttctgacaaaggactctagacatgtaatgagctcttaatc

SEQ ID NO: 500049 - DNA, 335 bp, Homo sapiens
  misc_feature (14)..(14): n is a, c, g, or t
  misc_feature (52)..(52): n is a, c, g, or t
  misc_feature (65)..(66): n is a, c, g, or t
  misc_feature (80)..(80): n is a, c, g, or t
  misc_feature (117)..(117): n is a, c, g, or t
  misc_feature (130)..(130): n is a, c, g, or t
  misc_feature (303)..(303): n is a, c, g, or t
acggccaaggcgcntgcgtacgtgccgccgctgcttcttagtgccgcgttcncgcctgggttgtnncggcgccgcccganggaagccactgcaaccaggaccggagtggaggcggcnacatgaagcggcnaggccgctccatagcgcacgtcgggacggtccgggcggggcggggggaaggaaaatgcaacatggcagcagcaatggaaacagaacagctgggtgttgagatatttgaaacttgcggacctgtgaggagaatattgaatcacaggaatcggcctaaaattggagcctttttantgttgagccggtattccttggagtcagcttaa

SEQ ID NO: 500050 - DNA, 214 bp, Homo sapiens
gtgcaagaggaacaaagggactcctgcagcatccggctgacctggcccttgtcatattaatcttccattccttagcctggcttcttcactctgttccggggcctgggtgggtgcttgattgcccacagatgcctgctttgtctatatctaccagtatgagcatactgcggaccctgtgactacctaggcagactggaatccaggacctacagcc

SEQ ID NO: 500051 - DNA, 130 bp, Homo sapiens
  misc_feature (40)..(40): n is a, c, g, or t
  misc_feature (87)..(87): n is a, c, g, or t
tgatctgtgttgtgtggtgatagccccagcaggctgactnttgtccacccaccacagacggcttctgcattccgacctcggtgagtnctcaccccactcagcccacacactctgccttggttccctttca

SEQ ID NO: 500052 - DNA, 741 bp, Homo sapiens
agactcgagcctgctgttcaccggtcctagcatttgctctcgccgatggctctcatctgatgctgacgtgcaacagcagataaagcatatatggctttcattgaacaagaagccaatgaggaaagcagtaagaaatagcatgcaaaggcagaagcaatgagtttcaacagtagagaagaggctcggctctgtgcaatgcccaaaagactaaagtagttatggaatattatgagaagacagagcaaagcagctttgagacagtcacgaacgaaaattcagcatgtccatagtttgactgacatcaagcgagatctcatagtcctcagagcaacgcagatgacctttatcacagacctactaaatgaagcaaaactagtagaactctagcagaggtggtaagagagatactagccaggtaccaagtgctgctggatggactggttcatccagggtttgtaccagttgctggagccccgaattgattgttctgttgcaggaaacagagatttccctctggtaaaggctgctagtgcagaaggcaattcctatgtacaaaattgccagcattgaacgatgtcgatgtccatagtggaccaggagttctacctgcctgaatgacatagctggtggagttgagagtctataatggagatcgtaaaataaggtttgcaataacctggaaagcggctggatctcatagccagagatgatgcagaagtcgggaggctggttgggcaatgc

SEQ ID NO: 500053 - DNA, 345 bp, Homo sapiens
  misc_feature (5)..(5): n is a, c, g, or t
  misc_feature (17)..(17): n is a, c, g, or t
  misc_feature (56)..(56): n is a, c, g, or t
  misc_feature (58)..(58): n is a, c, g, or t
  misc_feature (81)..(81): n is a, c, g, or t
  misc_feature (89)..(89): n is a, c, g, or t
  misc_feature (108)..(108): n is a, c, g, or t
ctgtncgtattttatancttacaggcttacacaggacacagtggtctgtacctgtngncctagctgctcaggaggctgagncaggaggntcacgtgaacccagaaatntggggctacagtgtgctatgccccgggccccttcaccagaataaaaccattggagaggctttcagactgctgtgaggagaaagagatgttcttcctaagctactgggcatagaaagagacggacatgtagaggaggtcttagagaaactggagcttaggagaagaaggccagctgggatggtagtgagtgtctaagtgttttatcatttacaggttctagaatcaagttagtagatt

SEQ ID NO: 500054 - DNA, 987 bp, Homo sapiens
  misc_feature (302)..(302): n is a, c, g, or t
  misc_feature (463)..(463): n is a, c, g, or t
gattagcgtgcactcatactgcgctatacactgagttaagtggcatatgccagcatgagtgtagcacccataatgaagtgacccagctcgaattcgctacgcatatatcgacacgtacaccgcgttctagcacttagttgtagtaactacaacgtattcgcgatcgtactcgagtaaacctgcttcacctcaacaacatgagagactctgagcgtaacctcgatacatcgacgtaatcctcattgtagccaagatagtactcgcgcggaaatgctgacgatctgaagggagacgctcgaatntcacaatggagcgctacgcaatgactagactaggcttgatcgcgcaaacaaaggtcgcatttctgcaccatggaggtatacattgcctaaatttgtaatgtgccatcaagaaagtgatatagactctacggaccaggggagtaagacgtagaagtccatangaacgcaacttccaggtgctgatgtctgactatacgcgactggcgaaattgggatagtagttaggtgcctcgccaggaaaggttcgtcactgctggtgacaatacccttggaagagtaccgtttcactagatgacagaccggttgttgctcgtggatcaggggaatgtcagatcattgatgtggctgcatgcgatctaggcttaatataatgaaagaagtcggtaccaatgaattgtacaggcactggtgttggaccttgttcagaaagtgtgttctatttctcgttccatactagtctactgagcctttcctgtgtcgttcctccatctgtggaagggttttctcggtactgtctaagtatgccctggtgtttgccactggggacctcgtacctccggggttccttcccttaattttctgtgtcttggcgccaatcctttttctttaacttgccacgtcacttgggcgtggggggtgcgccgggtaaaggaacgtcggggtttgaccttcaggggggtcgccc

SEQ ID NO: 500055 - DNA, 364 bp, Homo sapiens
agaaggaaaacaactttttatgtatagcttctaaaaggggaaaaaaaaaaaaaagagaaaccctttgacttccacgttgcccatctcaagacattccactcacagaattggaggtcctgggatcccaggtctggagtttcccaatgttaagtgtaaacagaacgggcacacacacatttacgatgacctgtaattataatccctcttgcgggtcactaccgtcgcttcctatactctacttcctatggtgctgaacttctatttaaaagaaaaaaaaacttttggtaacgactattggcagtttaagaatattcaattaaaccccccgtagttttccaagaaagacacaaacaaacaaaaaagg

SEQ ID NO: 500056 - DNA, 394 bp, Homo sapiens
tctggtcgaagtgtcagagggactctagcttggagatggtcattattgggaggaactcagcgtggagtggtcatgtatcagacgagtgatccatacttgagacgatggtcagaaccaaagtgagtcatgcttggagtgtgctcagaatcagagggactcagtttggattgttcagttaccatagggactcagtccggagtgttcagtgccagagggactcagccctgagtggtcagtaccagagggactcagtccggagtggtcagtaccagagggactcagtctggagtggtcagtaccagagggactcaggttgggtgagctctgtggtgcgacctgcaggggctgctgcttgttccttatcctcccgtgacaggacactttgcatccagag

SEQ ID NO: 500057 - DNA, 549 bp, Homo sapiens
  misc_feature (416)..(416): n is a, c, g, or t
  misc_feature (495)..(495): n is a, c, g, or t
gggccgcccttttttttgtgtttttttttggaagagtgtttggagtttcattcacacaaaacatggacatcatctgtgaggctctgtcccagagagacagggccatccctcatgtctgtaatggggttgtagataaacaaaagttataaactcaaacaaacgtgcaaatttactcgtgtcgtcttttccttaattcaatacagcaacagttcctcgagtgtggtacgtgcgaccacttcgttggaaaaaagtgccttcgaggttcctttcccatcccccaaggcagcagcaaattccttcggtgtcgcctcctacgggccaaggcgagccaaagaattgtgaaagttcttgggcctcgataaagtggccagaatccgcttagagactttccgtggtgtagagcttccacgcgtggncagctttacacataaattctcccaatgtgaggcgcgtggaatactttcagctccagtgttctccgtgggcttagacagnctgtgtgtacattctcagattataatctccagagagggctccctcagtgtgtcc

SEQ ID NO: 500058 - DNA, 471 bp, Homo sapiens
  misc_feature (36)..(36): n is a, c, g, or t
  misc_feature (74)..(74): n is a, c, g, or t
  misc_feature (106)..(106): n is a, c, g, or t
  misc_feature (170)..(170): n is a, c, g, or t
  misc_feature (177)..(178): n is a, c, g, or t
  misc_feature (197)..(198): n is a, c, g, or t
  misc_feature (200)..(201): n is a, c, g, or t
  misc_feature (207)..(208): n is a, c, g, or t
  misc_feature (220)..(220): n is a, c, g, or t
  misc_feature (224)..(224): n is a, c, g, or t
  misc_feature (231)..(232): n is a, c, g, or t
  misc_feature (254)..(254): n is a, c, g, or t
  misc_feature (260)..(260): n is a, c, g, or t
  misc_feature (263)..(263): n is a, c, g, or t
  misc_feature (267)..(268): n is a, c, g, or t
  misc_feature (279)..(279): n is a, c, g, or t
actcgccacccgtatttctaacattacttcagaggnggtagtgggggaatttgcaacaaagtggtgagatgcancaataaccattgcctctttgcaactctgtgancaaaaccagcaattctttcttttatttttaatttattttttattttttttgagaccgagtctcnctctgtnncccaggctggagtgcaatnncnngatctnngctcactgcaanctcngcctccnnggttcaagcgattctcatgccncagccnccnaagnngctgggattanaggcgctccccaccacactcggctaatttttttttttttgtatttttagaagagacagagtttcaccatgttggcgaagctggtctcaaactcctgacctaatgatcggcccacctgggcctcccaaagtgctgggattacaggcatgagccaccacaccttgctgacattaagctttaactcagcctttat

SEQ ID NO: 500059 - DNA, 288 bp, Homo sapiens
aaggatagatcacaatagtcgaccataaataaaagctgcaacacaccaattgcataaatagagctaggacagagggccctctgacaactactgacctgaaaatgacctgagggctctacgacccattaataccctatgagccaacatttagtgcacagcttttggctgtattaatagaggtaggaaatccagagccagagaggtgatataggtgcacttgtaggcagtgctccggacacagctggaggtgcaggctcagaactgggagccacgtctagaggaatgctg

SEQ ID NO: 500060 - DNA, 338 bp, Homo sapiens
  misc_feature (36)..(36): n is a, c, g, or t
  misc_feature (74)..(74): n is a, c, g, or t
  misc_feature (106)..(106): n is a, c, g, or t
  misc_feature (170)..(170): n is a, c, g, or t
  misc_feature (177)..(178): n is a, c, g, or t
  misc_feature (197)..(198): n is a, c, g, or t
  misc_feature (200)..(201): n is a, c, g, or t
  misc_feature (207)..(208): n is a, c, g, or t
  misc_feature (220)..(220): n is a, c, g, or t
  misc_feature (224)..(224): n is a, c, g, or t
  misc_feature (231)..(232): n is a, c, g, or t
  misc_feature (254)..(254): n is a, c, g, or t
  misc_feature (260)..(260): n is a, c, g, or t
  misc_feature (263)..(263): n is a, c, g, or t
  misc_feature (267)..(268): n is a, c, g, or t
  misc_feature (279)..(279): n is a, c, g, or t
actcgccacccgtatttctaacattacttcagaggnggtagtgggggaatttgcaacaaagtggtgagatgcancaataaccattgcctctttgcaactctgtgancaaaaccagcaattctttcttttatttttaatttattttttattttttttgagaccgagtctcnctctgtnncccaggctggagtgcaatnncnngatctnngctcactgcaanctcngcctccnnggttcaagcgattctcatgccncagccnccnaagnngctgggattanaggcgtgagccaccgcacctggccaaataaacaaatcttgatggttaatgttagagata

SEQ ID NO: 500061 - DNA, 177 bp, Homo sapiens
ttcataaaagtcttgaaaggcatgacaatttctaacagtagctagaaatggtaccaactctgggttctatgggctgttaatgcacagaaaattggcatgagactgacaaaagtttccccagacaaggcattattggagtttacacctggacataaagagaggatgtcggcgagggag

SEQ ID NO: 500062 - DNA, 213 bp, Homo sapiens
tcccaaggatgagaaattggttaaacatacacaaatcaataaatgtgactcatcacaaaaacagaactaaagacaaaaaccacgtgattatctcaagagaagcagaaaaggcctttattagtccattctcacattgctataaagaactacccatgactgggtaatttatgaagaaaggagattcactgactcacaattcctcatcctgggagg

SEQ ID NO: 500063 - DNA, 1277 bp, Homo sapiens
tggctgtaacagggttaattggatgatgagtccagggctccggctgaagccctgggggggaggggcacagagcgaaatggggcgtaagggaatgcttgaatggctgctccgtgattgtcggtcggagtttccaaatctaggcagagggcagggtgaggcctcgggcacacagccggggcccagtcacccgtggcccagaagtggatgggcgtggccggtggcccttgaaacaggccattgtgccagagggggctccacaattcacgcgcaaacttcggtactggaaatatcaatggccgtgtttcccaaaactttcaaccccaggtgcaaaggaacttatagggcccaaattcaaatttcaaacagggcaggggggggaaaacgagaattcgggtgggagggcttttggcgaatcttcttcgagaaaaaaagaggaaacagcaccgggaacaaagctctcaaagaaaacccaaagacagacacaagacagagggtattgccaccacagcagaaaaaacaaaaaggggatattagtgggtcgggtaaaatctctcgaaaatcctcccagaggaacgtgggtaaccctcaagaggtcccttttaacaccgtgacaaagggcatctcggaggacaaaaagggcgtggggacattaatatatcacacatatagcgctggtcacaaatcttgtgtggacccaaatatactttggggaccaattccttacagaacaacaaccaaacacgaaaacaacatctgcagagggagcaccaaaatgtgaggggaggtgcggggacaaacaacaaagggggataccactagacaacgggggaccccgagtggggcaaaaacagcgagtgtacacctcggaaccccaacgacaatcccagggcacacacaacaggggggaacaaactcaggcgccggggacccccccaaaaaagaggagaagcgcacaaatcaaacaactgcgccaaaacagcgcccgaggtataaacccccgggacctaaagcgagccccgcggcaagagaaaggcgactccacggccagcaaagagcgaccaagcccaacagaccgccggacgcgaaccaatagagggaaacgacaagcagacacccacacagcagaaacacacacacgagatatcgcgcgagagacacaggcaatgaaccgatcgaacacccaacgaaacaaccacccggcaaccaagacggtcagggatccgcaccgcaagcaaccacccagcgaacgcaccacaaacaaacaacgacagaagaaa

SEQ ID NO: 500064 - DNA, 576 bp, Homo sapiens
gtccagctcggaaccctttgcgacggaatgcgacctgttaaatcttttacagtatttatacatgcacttacttaagagattttataaatgactttccttttcaaaaacatttcgtaatgtcacatatccctattacataagacaatccatatatttagcgaatcctcatataaagtgctcaatacacaactttaataatgtgacctacctgtcaaaaaagcataacatgaacatattttacagaaaccttagacgctcataagatgatgaatatcctaccaaggtactcagcctatactcctcaaaaattataagctaaaggagactatcgcgacgagactaggacctgcatcacgtgcatatggactggatcttgtaccaaatggcatattttagacttatgcactttcggacatttttgagacattcggaccaatatcagtaccgtatgcacatgattaatagccttatatcagtgcgacttcctgatttagataataatgtcatggatccttgaaaaagtccttgttatttaggacatagacactggagcgtttaaggttaacggaatattga

SEQ ID NO: 500065 - DNA, 508 bp, Homo sapiens
caagagaaatgtattctctcacagtcctggagccagaggtccaaaatcaaggtgtctgcagagccacgctccctctggaaggtctaggggagggtccttcctggtctcttccggtttgagtggctgcaggcattccttggcttgtggccacatcattccgacccctgcctctgttgccacatggacagggtgtgtccctttgtgtgccctctcttcttctcatacggatgccagtcattagatagggcctactcaaatctagggtgacctcatcttagcttggtgacatctgctgagaccctatttctgaataaggtcacattgggagcttctgtgtggacatgaatcttgggggagcactgttcaccgcggcatatgctctatgggtgccaacctgaatcccagaaacagctcccgacatcagtgtggtcatcaccccgttttaggaaagggtgacgcagagctcaagccttcagcacaagtgatggctgagcagtgactctggtta

SEQ ID NO: 500066 - DNA, 450 bp, Homo sapiens
tctagaggacccccgcacgctgtcgcgtctgtaatcccagcactttgggaggccgagacgggtggatttctatcagcccaggagtttgaggcaaggctgggcaatataggcaaaaccccatctctacaaaaaatacaaaaaaattggctggccatggtggtgtacacctttagtcccaggctgaggtgggagaatcatctgagcccagggagactgaggctacggtgtaccatgattgcaccacagcacaccagcctgggcaacagagtaagaccccatctcaaaaaaaaaaaaaggtggaaccagctaaaattccccttttaatttatcatcttgggagggtgctaccgaaatagtcctccacttggaaacagggtaaagagtgagattcaagtatatatcgggtcttccctatagagactgttttgaaaggacaaccaattagcccca

SEQ ID NO: 500067 - DNA, 157 bp, Homo sapiens
tcaaggatagtcagtagaataagacttgtgaagatgatcggtgtagagtggaaggttaatggttgatatggctagggtggggcttccaattagttgcataattcgttggccggcagtaatgttagcggttaggcatacgcccggttaagcggggaac

SEQ ID NO: 500068 - DNA, 380 bp, Homo sapiens
  misc_feature (73)..(73): n is a, c, g, or t
  misc_feature (356)..(356): n is a, c, g, or t
  misc_feature (378)..(378): n is a, c, g, or t
tggatgtattcagcccgctgcgtcatctctgaggaaggtcctgctgcacctgttgaagcatcccagtgtcacncaggaagtgaggtgtgacgagagcaaccgtctggacacacaccactacctgtcccagcggagacaggcggtggattacttcattctcatcctgcaggggagggttgaagtggagatcggaaaagagggtcttaagtgtgagaatggggcctacacgttctatggagtgtcggccctaactgtgacatcctcggcacaccagtccccggtgtcctcgctccagcccatccgacatgaactagaggccccacccaggtgacgggacgcattcatctgtgtattgncccctactacaacgaggagggngc

SEQ ID NO: 500069 - DNA, 312 bp, Homo sapiens
tggggcatgatctactggcattgtggtggtatatctaagtgggatgacaaaacgctacgactcagtcaatcatattctgcatttccgtcttactactcaacaatagtgttacagggtttgatgaccgtcatcgaaacccttcatcgaagcccttcatcgaaacccttcaagtcatctttcagctcctttccatatgctgcttgatattgctagggtttgatgactcgaaaccctctcggcatctgtgcctcagtttcctcatttataaaatccctatgatctctgtctcacctactttacagggtttgatga

SEQ ID NO: 500070 - DNA, 372 bp, Homo sapiens
  misc_feature (141)..(141): n is a, c, g, or t
  misc_feature (155)..(155): n is a, c, g, or t
  misc_feature (160)..(161): n is a, c, g, or t
  misc_feature (173)..(174): n is a, c, g, or t
  misc_feature (189)..(189): n is a, c, g, or t
  misc_feature (243)..(243): n is a, c, g, or t
  misc_feature (330)..(330): n is a, c, g, or t
gaaaattaaaggaggacaagaggaaataaacttcttttataggctattaacaacctatttaatttttcagcagatttcttctcactgtgacaccaagagatcccattcacttaatccacaaaatgcttacctcgttaccanctctcgaatacacntctannagtgaaatccanngaacaaaattcacanacatttgcgagcaaaactctatacaagtccacagaaaacacaacctgggacacntcacgcactatattttgatactctatttttacacaatcaatggaacaaaaacataaattgagtagagaatgcagtcgagtatttacncgattccatagactgaaagtcagtgctgacgaggactgtctt

SEQ ID NO: 500071 - DNA, 282 bp, Homo sapiens
  misc_feature (37)..(37): n is a, c, g, or t
  misc_feature (147)..(147): n is a, c, g, or t
  misc_feature (240)..(240): n is a, c, g, or t
  misc_feature (249)..(249): n is a, c, g, or t
cggtcgagcagatcgccacgcaacaccagcagcagtncagcagcataaaggagagcgaaaatgccgaaagctgacttaacgttgaccacggctgacgtaacaggcggctaacccaggcgcagaggcagcgatttcagcgtcatgcgncgaagtacattcagcagcatccagcccagcacaccgcacagcaaagccagtacttaccgcgcccgccagcaccgcccaaagcagcatgttgcnacccattantccggcgagcagcagcacaaccaccacactgac

SEQ ID NO: 500072 - DNA, 323 bp, Homo sapiens
gatctagagtatcccaatgtcacgcgagtataatacggacacggctggcaacaagaaaacacaaaaagaagccacacctcttaccttaatccataattttccatgattctttttctataactcttaaatgccagtgcaaaggtcaacttctgacagtctcaggcactggcttaattctcattgggccaaaaatagaagccatcaaaatgaatttatccactacgggatacatgatggtaaatgagatggtcctcacttttctaggtcgtggtcacttaattttccccaaatcatttcttctcatcatcccccggctgccaggt

SEQ ID NO: 500073 - DNA, 402 bp, Homo sapiens
ggacacgcagaggcattcattgtgaggtgtactcgtatgaggcccatatttgagactcgtggacatttatattatactcgtgtcatgtgttataatttatacactaaaatgtgctggttgactgtgtaccttggttttgaagaaatttattcgtgaaaggaagagacagttggtatttattgggagggctcttgcttgtaaagggctttttttccttgtgaaccatttaagtccattccttactattcacttacttatctgtgttccttcatttcactgtgagactctttttcactttcccttgcatgtcagtttctgtgatgtgtatttattggattctctggtgtctgagctgtacatacatgagaccttgggttttggttacacgggaccttgactggc

SEQ ID NO: 500074 - DNA, 1059 bp, Homo sapiens
agtctatcaccattcgcgtgtggcccggacccagtcaggtaagtgagcatggtgatacctgtgtatcctactgagatccatgggtcagtgaccgtagtgcttggattctcatccagatacaaggacggctcggcgggaagtcgagacgtactgtaacgaatgtcacgtatggaggttcagtaggtcacattactagtgatcatatcagacaggaggtcgaagcgaattcgatagttcagaactgagcagcaccgcaaggacccagggaaagggggaagccaagcgggagaacacagaagaacagacaacaaaaagaagagaccgggagcgacaacacgacaaaaaaagaaaagaacaccacagacagaacagacgcacgacaagacacagaaacaacggggaacacacccaagcaacagggcacagaagagcgagcaacacacgagaaaaaaagcgacaaaggacacaaacaaacaagaggcacacaacaatacccaagaaacgaagacagaaaagggaaacaaccacaaagaaaaagaacaaataaaagagaaggaaaagaaaaaagaaaaaaccagaaacaaaaaagggaaaaggagaaagaagagacaaaagcagagcaagaaaaaagaaacaagaaaaacacaaaaacaagaacaaaaaaaagaaacaaaaaaagaaaaaacaaagacaaaacaaaaagacaaaaaaaaaaaaaaaaagaacccaaacaaaacacaaaaaaaaagagaaaaaaacaaaaaaagaaagaaaaaaaacagaaaccagaagaaaaaagaaaaaagaaaaaaaagaaagagacaaaaaaaaagaaaagacaaaaggagaaaacaaagaaacacaaaaaagaaaagaaataagaaaggacaaaaaaaagaaaaacaagaagagaaaacgaaaggaagaagcacaagaacaagaaaacagacgcgcaaagagaaaacaagagcagacacaaagaacaaaagaagaaaaagaagagacgaacacacacaaacaacagaaaacagaaagaaagaaaaagagaagatggaggca

SEQ ID NO: 500075 - DNA, 758 bp, Homo sapiens
  misc_feature (78)..(78): n is a, c, g, or t
  misc_feature (92)..(92): n is a, c, g, or t
  misc_feature (131)..(131): n is a, c, g, or t
  misc_feature (223)..(223): n is a, c, g, or t
  misc_feature (320)..(320): n is a, c, g, or t
agcgggtttatctcgttggggactaaggcgtcggttggcgcgcacgggttctaggctgcaggcagctcgaggacccgngggcccaacccggntctggctggcatatagcagaggcagcaggccgtgccggnggggcatgttgctgtaaccagtggcccaggggatgttacgagtggacagtgcacctggtagggcgggccccgcagggtgaaccatgctgcantggctgtcgggcatcgggtatactccttcgggggttactgctctggtgaagactatgagacactgcgtcagatagatgtgcacattttcaatgcagngtccttgcgttggacaaagctgcccccggtgaggtctgccatccgtgggcaagcgtcctgctggtaccctacatgcgctactggactactcaatccgtcctctatcggacgactacagtcctccttgaggggcgggcgcgaatgactgccgaaggggtcctagcaagtgtgctctatgcctttgacgtctgcggactgtttaaccaatgacatgcacaagctagataccagcaccatgatctggactcttatctgtacaaagggcaggcctgcccgctggagggacttccactcaggcacaatgctggggaagtcgcatgtctgtctttgggggccgtgccgatcgatttggggccattccattccaatcaatgagatttacgtgaaccgcattcgagtctttgaacaccagaaactgaggcttggctggactgtccc

SEQ ID NO: 500076 - DNA, 750 bp, Homo sapiens
  misc_feature (70)..(70): n is a, c, g, or t
  misc_feature (84)..(84): n is a, c, g, or t
  misc_feature (123)..(123): n is a, c, g, or t
  misc_feature (215)..(215): n is a, c, g, or t
  misc_feature (312)..(312): n is a, c, g, or t
gaaatttcgccccgagggccaaaggaggtgctcaatggttgcttgggcttcgattggtcgaagaacccgngggcccaacccggntctggctggcatatagcagaggcagcaggccgtgccggnggggcatgttgctgtaaccagtggcccaggggatgttacgagtggacagtgcacctggtagggcgggccccgcagggtgaaccatgctgcantggctgtcgggcatcgggtatactccttcgggggttactgctctggtgaagactatgagacactgcgtcagatagatgtgcacattttcaatgcagngtccttgcgttggacaaagctgcccccggtgaggtctgccatccgtgggcaagcgtcctgctggtaccctacatgcgctactggactactcaatccgtcctctatcggacgactacagtcctccttgaggggcgggcgcgaatgactgccgaaggggtcctagcaagtgtgctctatgcctttgacgtctgcggactgtttaaccaatgacatgcacaagctagataccagcaccatgatctggactcttatctgtacaaagggcaggcctgcccgctggagggacttccactcaggcacaatgctggggaagtcgcatgtctgtctttgggggccgtgccgatcgatttggggccattccattccaatcaatgagatttacgtgaaccgcattcgagtctttgaacaccagaaactgaggcttggctggactgtccc

SEQ ID NO: 500077 - DNA, 533 bp, Homo sapiens
ttggaccccaggctcaagtacaggggtgcgaactcggattaccacaggtctctgggctcaagcaattttgcactctcaccctctcaagtaactgggactacaggcatgcgccatcacacccagtcaatattatgtattgtttagtaacatgggtttgaccacgttgcctacgctggtcctgaactacagagcctacgtgagccagccaactaggtctcccgaacagctgaaatgactggtatgagccaccgggcctgtccttgagaattattcaatatggccttggaactatcagcattagggatattcaggaatgactagctgagcgtgagtccatataggagacatatgtgttcaagaacttgtccatttgatcgtcaatgctcaagatattggtatcaacataccctataatatactgagaatgtctatcatgagcacagcggagactctacatgcttctataaaagcatggtactgacgtgtagataatatgactgatgttgaccatacactattcactagactggggc

SEQ ID NO: 500078 - DNA, 134 bp, Homo sapiens
  misc_feature (134)..(134): n is a, c, g, or t
agtcgggagaggattcaaatattaaagacatcttaggtcacggagcatcttcccaaggaggttcttccaggaaaacctgggggggacggtaaaatttgattttggccatttggagttttccagttcctacccan

SEQ ID NO: 500079 - DNA, 447 bp, Homo sapiens
aggaaggaaagaaagaatgaaggaaggaaggaaggaaagaaagaaaaagaaagaaagaaagagaaaaaagaaagaaaagggaaagggaaagaagaaattctggagttgagaaatgcaattgacatactgaagaatgcatcagagttccttaatggtataattgtgtcaagcaggatcaagaaatagtgagcttgaagatgggctatttgaaaatacatagaggtgacaaaaggaaaaaaaaattaaaaagaatgaggcttgcctgcaggatctaaacaacaagtgtcaaaagggaaatcaaagagttctcatccttaaggaggaggtagaaagagagcgatggggacagaagtttctttaaagaaatagtaacagataactttccaaacctagagaaagataacaatattcaagtagaagaaagttataaaataccaagcagatttg

SEQ ID NO: 500080 - DNA, 266 bp, Homo sapiens
  misc_feature (56)..(56): n is a, c, g, or t
  misc_feature (170)..(174): n is a, c, g, or t
  misc_feature (183)..(184): n is a, c, g, or t
  misc_feature (194)..(194): n is a, c, g, or t
  misc_feature (203)..(203): n is a, c, g, or t
  misc_feature (206)..(206): n is a, c, g, or t
  misc_feature (209)..(211): n is a, c, g, or t
  misc_feature (217)..(217): n is a, c, g, or t
  misc_feature (227)..(227): n is a, c, g, or t
  misc_feature (251)..(252): n is a, c, g, or t
  misc_feature (258)..(259): n is a, c, g, or t
  misc_feature (263)..(263): n is a, c, g, or t
  misc_feature (266)..(266): n is a, c, g, or t
gttacatattcctgaaagccagactctaatcacacagaggaattttattgtaagtnacatgcaaagcaaattagttcttcaggaaaataaataaataaatggatcaactaagatatactaaacctcaaaaaaccctgaataaagataaaggtaaaaatgtattaataaannnnnccgcttaanntacttaaganagtattaanatnccnnnctttcncttctctacngtcaaagtttcattccccgggggnngtgggnnggtnggn

SEQ ID NO: 500081 - DNA, 1614 bp, Homo sapiens
ctcttagggcagaactggtgtcttcgtatgacaagtatgaagaatatgataatgccataattaccatgcatgaatcatccaactgactgccctggaaaagaagggcaattcaacagactatcacttaccaaggcttgccaactgtggaacgtaatactaccagagcaagtacacgcttctactatagcaacttccaagcactctgctcagtatacaatgactttagctagcataggtagctagtactaccaacggatctggaattcacaactacgatgaccagtcaaaattaattttcagcccaacggccttaacagcacagccttaaccaccctgcgctggaacacagcccggctaactctctgccgattctccacggccttcatccaagcaaacccaattaccgccaaaccgacaacacttccttgctgccaccagttgaacacttccaatcgcggccacaccgagaaaatcctgtctagctccacttacttaaccaatggcaacaagcaaacaaggacacttataattccacgaggcccattccaatgaccggcaaaaagccaagatttcgacacattacggaaagttggcccgtacttaccttggcaagccgaagaacccatcatataggcaacccaaaaaccttcaccttccgagtaacctcgacacccccctacatgggcacactcccacacgcaccccacgcacattactccccggggcgcaaaacaaacacaaacacagaccgattctatcgccacccacagccatataccaaacatatcgcggcaaacgcaaccttccattcccaaataggcgcgcaaaagaggcaaaaacaaactttagctaagagaacccaactataagggcacccgacttccgttcacacattttccccatatcccgaacttctatacccaacacaaacaaacgcgcacggaccccctaacaactccccatacaaaatcaatatcaccgggtgcgctctatagggccggagccaaaccaaagaaactcacaaaagcgcaacaggaccctgaggcacccaaaccacgcacaaaggccgcccccacctgcgccacggcacccccaactatacgggccacacgacaaacaggcacaacaccccaaaagcacccccccaccttaccctaacccaacaccaaaacacacgcagacggacaacaaccttagggcccaccgacaaccactggcccacacaaacaacgaccatccaaccgcttgggcacccgctactgtcacccccatcgcgacacccacaactacccccattcacccacgacaccccggcaaaacctctcatcccctttggacaaacaaacacttaaacaaggacgccacattatggcgaaacgaccgggcaaaaaacaaccacatctgccaccctcaacataggcgccccaacggcaccacaggcaaagccaacacaacgacccacaacgggcccaaacacgacgcagaccaacaaaaaggacaaacaaacaaacgacacgagccacacgagacaaaacacaaaacgagctatggacccaccgaacaaaagagcaggaacaacagccccaccgcataccccggcccacccacccctcg

SEQ ID NO: 500082 - DNA, 359 bp, Homo sapiens
acgcgggggggtgggtaggggagggggagaggaggggaaagctagacctgcagagtgacagaaagctggtcatagatgtctgacaaacctacaagaaagacttgtgttacgatcagaacataactacctgacaacatattcgcacaacgaaacatacgagacaagcaggaaaagagagaagaaacaagctagaacagaagagacaagagaggcaaagaccaagaagacaagacagcaaacgcgcgcaacgagagcagaaaaagacaacacacagagagaacacaagagcagacaacaagcacacaagagcccgcagggagacaaaagcaaaaaagaaaaaagaaagaggaaagcagaga

SEQ ID NO: 500083 - DNA, 200 bp, Homo sapiens
ttggttatagaacgtaatagggtgcagttagtgaaatagtacagatatgatcaaagggaaagatggacaaattaagcacatagatctttcttgttggatgatacgtagacgtgtgtgagtggtgggttgtggtgtgaggggtgggtgggtggttgggtgggtggtggtgtgtgtaggtggggggggtgggggtgggtggg

SEQ ID NO: 500084 - DNA, 630 bp, Homo sapiens
tcaagtgatcttcccgcttcggcctcccaaagtgttgggattacaggcgtgagccactgtacccagccttcggagctattctcaacaactagctgaaaaaaaaaaaaaaaataaaaaaaaaaaaaaactttgttgggcagcgcttctgggccatgagagaaaacagttttataaacaacttctgtttcgtgggcgccggggcccattgtaaggtaacatgtgatacacctggtggtctactaaggttgtttctccaagaggacatcgtgggtacagtgaaactagtgtgctgtggggctttcttccacaactttaaaaaccgccccgggcgggcaaccacgatggtttgtatgaaaaaaatttcaaaaatgggagggtcaacggaggaggccaataaggggggagcatcataccaaaacgggtagcctaaacagaagctggctatgttatcaaaaatataacctcaccattgtgtgtgggtgaaaacaacagattatgatatatgaatactaacagctagcacaaaatagactagtaattatatggatatagttatcagagtagatgtatagtacacatagcaatgaagattagctgacaaatctgcataaacacagatataagatacag

SEQ ID NO: 500085 - DNA, 636 bp, Homo sapiens
  misc_feature (267)..(267): n is a, c, g, or t
  misc_feature (283)..(283): n is a, c, g, or t
  misc_feature (298)..(298): n is a, c, g, or t
  misc_feature (340)..(340): n is a, c, g, or t
  misc_feature (344)..(344): n is a, c, g, or t
  misc_feature (390)..(390): n is a, c, g, or t
  misc_feature (447)..(447): n is a, c, g, or t
  misc_feature (475)..(475): n is a, c, g, or t
  misc_feature (479)..(479): n is a, c, g, or t
  misc_feature (507)..(507): n is a, c, g, or t
  misc_feature (510)..(510): n is a, c, g, or t
  misc_feature (519)..(519): n is a, c, g, or t
  misc_feature (534)..(534): n is a, c, g, or t
  misc_feature (541)..(541): n is a, c, g, or t
  misc_feature (544)..(544): n is a, c, g, or t
ctcgtgccgacggtggtggtgactgagcggagcccggtgacaggaggtgcacagattggtgttggtattaggagatctgcacatcccacaccggtgcaacagtttgccagctaaattcaaaaaactcctggtgccaggaaaaattcagcacattctctgcacaggaaacctttgcaccaaagagagttatgactatctcaagactctggctggggatgttcatattgtgagaggagacttcgatgagaatctgaattatccagaacnagaaagttgtgactgntggacagttcaaaantggtctgatccatggacaacaagttattccatggggagatantggncagcttagccctgttgcagaggcaatttgatgtggacattcttatntcgggacacacacacaaatttgaagcatttgagcatgaaaataaattctacattaantccaggttctgccactggggcatataangccntggaaacaaacattattccatcatttgngtngatggaatncaggttctacagggncacctantgnattaggtaattggggatgatgtgaaagttgaacgaaccgaatcaaaaaaacctttaacagcccaagggcgcccctgggctcccttctgccac

SEQ ID NO: 500086 - DNA, 500 bp, Homo sapiens
ctcacattttaatatgtatatgactcacttgaggaccagtgttaaaatgccgattctgaagggtaggtctgaggtgggcttgaattctgcatttcttttcttttttttcctcatatttttccagttttatttgtatacatacaccatggaatactactcagccataaaaaatgaaataatgtattttgcagcaacttgcatggagctagaggccactatcctaagtgaagtaactcaggactggaaaaccaaatgctggcatattctcgcttataagtggaagctatgctgtgggtacacaggtccaccagagtggtataatggacactggagactcagaagatcagagggtgggagtggggtgaggaatgagaaattacctattgggtacagtgtacactgtttgggtgatggttacactaaaagcccagacttcactatataattcatccatgtaaccaaaaacaatctgtaccccctaaatctattgaaatggaaaa

SEQ ID NO: 500087 - DNA, 233 bp, Homo sapiens
catggtcaggctaggacctgaactggacagtagcagtgggaatagaacataaggaaggatgtgagataagtaatggaggtagaaactcagggtaggactgtgatgttttgggcaacaaaagtggaatgaggggaagggaagataggacatttggcagtggtcattactgctcttttctccccagaaaaatcctggcctttcttaagctgccagggaaatgccagccagatcca

SEQ ID NO: 500088 - DNA, 334 bp, Homo sapiens
  misc_feature (52)..(52): n is a, c, g, or t
  misc_feature (72)..(72): n is a, c, g, or t
  misc_feature (81)..(81): n is a, c, g, or t
  misc_feature (85)..(85): n is a, c, g, or t
  misc_feature (89)..(89): n is a, c, g, or t
  misc_feature (99)..(99): n is a, c, g, or t
  misc_feature (111)..(111): n is a, c, g, or t
  misc_feature (118)..(118): n is a, c, g, or t
  misc_feature (156)..(157): n is a, c, g, or t
  misc_feature (175)..(175): n is a, c, g, or t
  misc_feature (182)..(182): n is a, c, g, or t
  misc_feature (186)..(186): n is a, c, g, or t
  misc_feature (199)..(199): n is a, c, g, or t
  misc_feature (201)..(201): n is a, c, g, or t
  misc_feature (272)..(272): n is a, c, g, or t
  misc_feature (305)..(305): n is a, c, g, or t
aggctgcaaacatgagttgtacttgttagcttaccccaaaataatacctggnataccggacccaatatctgntgattgatntaanctanatgaatacanaccatttcaganaaagatntacaatagaccacatatccaggtcatgaaaattaaagnnttcaggtcacctagcttngtgactnttgnttttctgaccctngnctcttgaaagcctatttaaactggcctctttctccacaccaaaactgatgaaaaggagactgattatgagntaggatttacactgtgtttctctatattaggcntgagggtgagggtgagagagagagaggga

SEQ ID NO: 500089 - DNA, 146 bp, Homo sapiens
cagtatggcgccttcctggaatgatcgtgggctgacgcggacgatgtttttttgcaaaactgacaacctgaaggctgaacagacaacggatgaattctgacgtgaaccaacgagacactccaaatgacctggtggaagtgaggact

SEQ ID NO: 500090 - DNA, 285 bp, Homo sapiens
ctgcgcccccccccccaaagtccagagcctctaggcattgtgatcttctaattagattttcctctctgcttccttgtgaccacttctgttctcctctgccaatgtttgacccctgggggcctgttccagattgccagagcatctcttccttttctttcacataacctagaactaacccagaccatctgattgggtctagattagttagcctaacaattacaaagtaatgcttcttactatgtccgactagcagtgtctgatgaggatgggacagttggtcgacgc

SEQ ID NO: 500091 - DNA, 308 bp, Homo sapiens
atttttaactggaatcagaactggatgttggggtcacgctttgttgtattgtacctcgtgatgacctaattcaaagttgcccccggaaaaggcagattaggtaatataattttttaatggtggaggtgtgtcggggtagaaaggttgctctagggggcatgttgaacaagtgtatttaaaaattgtaaactcttggaatactgtatttatctgctatttcaatgtaaagtcctttgacgtagtgctggtaactgtacagtaatttggtttactaatgaaagttgtgaataaaactgtgaaactagaaa

SEQ ID NO: 500092 - DNA, 609 bp, Homo sapiens
  misc_feature (609)..(609): n is a, c, g, or t
gcggggacgagcggagtcagaggacggagaaactaggaagaggaggagcagtggtctggtggaattatcaggaataattgattcagacttcctctcacaatgtgaaataaatgcaaggttttggggcattgacacttgagaaggcccattctgcaattggacagctgtgtctttgctggggagtatgaagacacctctagggacctgtgtaataatttgacagcacacattgttgaaccatgctgatacagaaggcaataataaaaacagtgctaaaaatataaattgccatacaatgaagaagctcagcatgaccaagaactcttcctgacagagaagaacggacaggagaagaaaacattaggtggggtggacattggcttgccaaataacggcatattgatttctcctattcgacccaacattgatttgtaaactttctacatgaaaatgaagacgaagaagtggtagcttcagccccagataaatctttggaattggaagagcgaagaggattcaaatgaacgacagttcaaaccttgagttgtgaacaggagaaaccaatgcactttggaaatagaagattctggtcctcttattgatataccn

SEQ ID NO: 500093 - DNA, 395 bp, Homo sapiens
  misc_feature (70)..(70): n is a, c, g, or t
  misc_feature (111)..(111): n is a, c, g, or t
  misc_feature (245)..(245): n is a, c, g, or t
gccctttaaaatctttggttctcaaattcaaatgaatttgctgtttgctcaaaattctaagggctcttcnaaattaagtggagaccaattttgttgtaaaacagtccagtnaaactgtgcaaggaaataaaggtaaaattttgggaggtaataataatgtgaaacataaaaatttaataattactgtccaacacagtggaacagcttgtccacaaaaatagtaattactatttattgctctaagnaagattaaaaaaagacccccaaaaaagggaaacttctttgaaaaataaaacatctgttacattaatgtctaataaaaaaattttaatcccaactgcatttcttctgttcccacaaatgtattaaacattcagtttaactggtaaaaaaaa

SEQ ID NO: 500094 - DNA, 395 bp, Homo sapiens
tttcattgattgttttgcgtctgtacccagaagtgggattgctggaccatctctgcccattttaaaattgggaaatgacatgatctgatttaagctatttaaaaatcacttgggcctgggctcggtggctcacgcgtgtaatcacaacactttgggaagccgagacaggcggatcacctgaggtcagaagtttgagaccagcctggccaacatggtgaaacccggtctctactaaaaatacaaaaattagccgggcacggtggctccagcctgtaataccagctactcaggaggctgaggcaggagagttgcttgaacccaggaagcggaggttgcagtgagctgagattgcctcactgcactccagcctgggcaacagagtgaaacaatgtctc

SEQ ID NO: 500095 - DNA, 129 bp, Homo sapiens
caagatgcaaggagaggacatgtcgtgcaaaggcgcgcagtgcagctatcgtgcactactgtgccgatgcgtgccaaggcaggcattagaattcgtcattcgaacatgtggaggccgcagcagtcaggg

SEQ ID NO: 500096 - DNA, 469 bp, Homo sapiens
  misc_feature (14)..(15): n is a, c, g, or t
  misc_feature (249)..(249): n is a, c, g, or t
  misc_feature (264)..(264): n is a, c, g, or t
  misc_feature (343)..(343): n is a, c, g, or t
  misc_feature (360)..(360): n is a, c, g, or t
  misc_feature (362)..(362): n is a, c, g, or t
  misc_feature (368)..(368): n is a, c, g, or t
  misc_feature (384)..(384): n is a, c, g, or t
  misc_feature (386)..(386): n is a, c, g, or t
  misc_feature (389)..(389): n is a, c, g, or t
  misc_feature (396)..(396): n is a, c, g, or t
  misc_feature (399)..(399): n is a, c, g, or t
  misc_feature (401)..(401): n is a, c, g, or t
  misc_feature (403)..(403): n is a, c, g, or t
  misc_feature (414)..(414): n is a, c, g, or t
  misc_feature (432)..(432): n is a, c, g, or t
  misc_feature (458)..(458): n is a, c, g, or t
ggtggcccccattnncagaatttcttggaggtagcagcagctcctgccccaaagtggtgtcctttggcagcccagccccaggctttgtgacagcctagttagggctgcaaaaccatcctgcccggaccacaaaaggaaagttggcggtcacaaagggctcctttgccaggcagtgggaaaccctgggtttggcctcaggaactgggggtgcagtgggggactgccctagtccttgccaggttgccagcnccctggaaaagcatngggggtagccagcttggaacttgccaggccccaaaggccccgactgcctgttggggcaggaaatgcatggacagtgtgntcaaactgtgggcatgngnttgccngcgggaaaggtccttncntgngtgtacncancnanagcatgtgtgngccccttcccctaccccnacgtgaaaacctcaataaactgcccnaagcagcttta

SEQ ID NO: 500097 - DNA, 129 bp, Homo sapiens
aatgatatatttatatagaggttgaagaaataggataatttaatcaatgtggagtgcttgccagggtgcagtggttcacgcctgtgatcctgacactttgggaggccaaggcaggcagatcacctgagg

SEQ ID NO: 500098 - DNA, 320 bp, Homo sapiens
  misc_feature (233)..(234): n is a, c, g, or t
ggaaaagggaaaataagaacatacagtagggaatagatcttgataaattaccttttaaaacaataaatcttgatttatttaaaattgtaatgctattttctatattttttaaattatctagattatttgttcactaggtgatctgggttagcatttttccatttttaagtagtgttcatgtgaatgtttgtgtggatgtaatgtgtgctgtatacacagtctctaatattttnntttgaacaaatagcaaaatgaaataaattactttatgagattgataaagtcctagagaaacagacccactgtagatgttcccaatg

SEQ ID NO: 500099 - DNA, 757 bp, Homo sapiens
ggggtctgcgaccctctctccccatggcggcaagctccctgcgcctctcccgtcgccctcgtcccacgggtctgcttctggtgggagtggggctggtgcgcttaggggagccaaggagatggacaggagccttcctcacagaggggatgaatgccatgtcccctggcccgctcaccttctcttatccggtgttctgccagtcccagctgctccagtccccacctcgtccccctagagacccgcccgttcaccccagtgcctccccgcgctcgttccttgtgctggctgctggccgccgcatttggaggcggagctgctataccgcccgacccgttggatgatcccgagtggcccttcaggtccgaaggaatgctcttggaggaattacttctgtgctggcgcctggaagtctgatgactcgtgggttggagtggggggctggatgacacggctgcctgggcaggcgggtctggcgtgttagctgggttgagctcttagcaagcgccgtaattcacctgccggctgtgccgggcggccggcttgctcccgtgcccctgcgcgaatgacgtcatagccagaagccatgagcaagcatggggccctgggggacggcctcgggatcccccgatccagtgaggacagacgatgctaccgcgagaccctggtggaggtgaagcgatggaggaggatcctacaggaggcgggaccagatgaagggaagaacaagcgcaaaaaataggagggacacttgagaaaa

SEQ ID NO: 500100 - DNA, 697 bp, Homo sapiens
  misc_feature (44)..(44): n is a, c, g, or t
  misc_feature (46)..(47): n is a, c, g, or t
  misc_feature (123)..(123): n is a, c, g, or t
  misc_feature (165)..(165): n is a, c, g, or t
  misc_feature (231)..(231): n is a, c, g, or t
  misc_feature (296)..(296): n is a, c, g, or t
  misc_feature (367)..(367): n is a, c, g, or t
  misc_feature (395)..(395): n is a, c, g, or t
  misc_feature (412)..(412): n is a, c, g, or t
  misc_feature (517)..(517): n is a, c, g, or t
  misc_feature (576)..(576): n is a, c, g, or t
  misc_feature (672)..(672): n is a, c, g, or t
gctgctgctctcatcacttcatccactaccatcacccacatccnannacccctaccccaatcccaaacctactcctttttcccccatctcccacaccccacctttcatacccaccaaaccccncttcaccctcaaaatccactcctacattaacaccccctcccncaatctcacctccctctccaaccaccacatccaccacaatccccaccacctcaacctccaaaaccnccccatccaacactcccaaaaccaatctctccccaccctcaccatccaacccatcccctttcacnacaatcccatctacttcttccaccacaactccaacaacacctcggaggtctaccagggctcccgcacaaancttccattcatttgattcatcacctttncacagcttaagcagagnaacaccctcaaccatcctatcatcatcatccacaccctcctcatcatcctcttcatcatctttcctatcttcctgctgctggacaaggatgacagcaaggctggnatggaggaagatcacacctacgagggcctggacattgaccagacagccacctatgaggncatagtgacgctgcggacaggggaagtgaagtggtctgtaggtgagcacccaggccaggagtgagagccaggtcgccccatgacctgggtgcaggntccctggcctcagtgactgcttcgg

SEQ ID NO: 500101 - DNA, 616 bp, Homo sapiens
  misc_feature (21)..(21): n is a, c, g, or t
  misc_feature (566)..(566): n is a, c, g, or t
actggggcaagtaagcatgtngaggggtctctgttagtttccaagaactgccataacaaagtatcacaaatttcgtggctaaaaacaacagatgtttattctctcatagttccagaggctagaagtccaaaatcaaggtgttggtagggccacacttcctctgaaatctctagagtagcggtccctaacctttttggcaccagggactgtttcttgcaagacgatttttccatggatgggaagggggatgatttcagggtgaaactgttccacctcacatccgagcattagttggattttcctaaggagcatgcaacctagatccctcgcatgtgcaattcacaatggagttcgcgctcctatgggcatctaatgccgccactgatcggacaggaggcagagtcaggctgtaatgctcgctcgcccactgcagcccggttcctgacaggccacaaaccagttctggtccgaggcccagggactggggactcccgctctagaggaggatctctccttgccacttctaccttctggtagtccaggtgtgtctggacccaacctctgcntccttcatcacgtgccattctcccttctgtgtctctgtcttcacatagca

SEQ ID NO: 500102 - DNA, 84 bp, Homo sapiens
cccagccccaaccagacctctctgtacttctgtgccagcagttcgcccggactagcgggagggacagatacgcagtattttggc

SEQ ID NO: 500103 - DNA, 147 bp, Homo sapiens
taatcgagcgaggaggtagatcgagcgaggaggtgtcacctgcagcacaggaagtgctgtgactgggcagctagcagcataatctttgccccaaaggcaaacgagtaaccagctgaagtccccagcagccagagcatcttcctggcg

SEQ ID NO: 500104 - DNA, 404 bp, Homo sapiens
  misc_feature (269)..(269): n is a, c, g, or t
ccagccaattgccgacactgggtccctgtgtggaatcatctttggctgtctgggatattctgtccatcacatcctgtccctgtcactgaagccttggaagtccaggtgcctgtcagtctgaatggttgtcctgaccagtacccaagcctatttcacggcaaggaaattcccttcaaagcactgcttacccaatgcacctccctccccggctcgagttcattcttcaattaggcccaccagacggtttaatagcggtcgtaattttgaantctgcccatggatcccctccctttggcttcagtgctcatgtgtattttatataaaattcccatttcttgcggataaaaaattgttttccaattgttatgcacgatgtttttggtaatgttgtttccactaaaaaa

SEQ ID NO: 500105 - DNA, 106 bp, Homo sapiens
caaaatcttgctgtgatttctgataggaattgcatccaaatctttggtaagaattgacatctttactgtgttgagtcttccaatctatgaacatcgtatgtctcac

SEQ ID NO: 500106 - DNA, 889 bp, Homo sapiens
cccagctgtgcactctccatccagctgtgcgctctcgtctgggagtccagccatgtctgacgagagagagtgtagccgaggcagctgacctggggaagacgcctcttcgcctgctccgaaaacctgaggcagcgagctgaccccagcatccctgcggcctccgaatggtggcctgcctgccgcctgcctgctcgccgcacactgctgcgctgcctagtgctcacctggctttggaggctacgacaaggtgaagcttgcagatgccggctggcagcgcccccggcccctgggcccgtgccagctgactgctgcgtctgcgtggcctgcgggctcaacttcgcagacctcatggctagtgccagggtgctgtactgaccgtctccctgcctctggcctgtcactccgtggccatggagggccgcggggtgtagtgatcgcagttgggcgagggactcagcgaacggaaggccaggagaccggggtgatggtgttgaagccggtcaggggattgtggcagggaagaggtgactagtgccactcgggtccaagaccttcctgaataccttgagggccattgacctttgaggaagctgctgccttgcttcgtcaagttacacttacccaggccataacattgggtcgctctaatgacgctacgagggagaccgtacaggccctggcccaccaggacgttgttgggtaacgaacagttgggctgcaaggggggagaatgatgggggtaattggggattgcaggggtgccaatatggtgcacggatacaggtgggagaagtgttgaaaaggtagatacggaaacggagagctacgggccacggaagtgagcatatagtcaatttaaggggagaaaatggggataaagaattcccat

SEQ ID NO: 500107 - DNA, 530 bp, Homo sapiens
tggaattccagccatccaaaagtttggtttctatccgggtttctcctatgtctgatcataattggctttggattgtttaaaaccaaaacaaacaaaaaattacaaaaaaaaccccacataacaataaacccaaaacacctcggtcactgattcccccccagggctccaaaaagcgcggagggagaacaaaaaaaacgcttgtgtgtcgccgcgcgcgtgtgtgtgcgtgcgtgtgtcggggtgtgcttggcacacacacctctgagtcctttatccgtgagcaagcgggccgaattcgaggcggcgggctcacggggagagaacacccgggggagggacgtgtggaaaaaaagaatttcaacctccagacaaccgcttccaaaataccgtgggcaagggggtggcccctggggggggaaaacctgtctattaaaaccctttccaggtgtccatagcgggcaaaatacagggcatggcacccggtagcgggatgtggcttggccagggggccgggagatctggtccggagc

SEQ ID NO: 500108 - DNA, 1219 bp, Homo sapiens
ggcgtggagaaggtgcttccgcggctgatcgcggatctggtccgccgcgtgcgcgccctgggtggagcaactgaacaggccgggcgactcccagctctacgcggtggactacgagacctttgactcggtcggttctctggagcgcctgtgctgccggtccgggtcctggggcctgacgtccgtccgtcgcagatgccagccatcgttggctgcctgctcggcccgccctcctcgctcgttctgtgcctgggccgctctggatcatcgctgcatggtccttggcctgtggtcacgcatggtaccgtacgcctgtgcctatcttgtgccgtcgctcgagcgcagggatgctgggccgtagctagcgaacgtgcgctagaatacctttgcgcacctacgggtgacaggcccttggttgccaatccatgacccttccagcagtggaagcacctgaggaatgcgagcgcgcgggcgaggaatcgaatgctacgttccaatggtacgcccattgcatgtggacagaggcatggttgccccaaatgctacggagggaatgggaggggccgtttctaccggctgttccaacgctcgcgcggccgggatagaacagcctggcgctccgtttgccggtacacctggctcttcgctccagggcccattgattaatcgctagaaaactgactaggacaagagctgtgagacggaccaagcacctgagggaagccctattgctgtactggtgccaggagtgatacgcgattgtaaccccttgtggattaccccttgggcaagaacagggaaaagacctaagggagggggccaatgggcgccccccgttctagaattgcccagaaaccaggcgggtgggtctttatgggggcctgtgagcggcacgcggggggacctttttggttgaggcgaaaccggtctttttggcggttacaccccgggttttgctcttcggggcgggagggtcacccttccgggcgacgtggtcctggcagggtctggcatcttaaggggggaggagcgtgggggccattcgcacgtgttgctttcctcttgcgctggtggccccccaccccaagttcgagtggccccggcttggcgaaaagccgagagcactcgtccctctcccccttagtggtcctctggggggatccgggagacgtttgaagggacgtacaggaagaagaggtcccgggagaaaaaacagcgccac

SEQ ID NO: 500109 - DNA, 490 bp, Homo sapiens
gtcatctaacgatccattaaacaaacaaacaaacacaaaactattcaaggtttggatcattgaggcaaaattattttgataacaagatgccccgtgtgaatagaaactgagtaatagaaggctcatggccaagtagtcgtatctactaaggagactgaggcaggaggatcacttgagcctcaggaagtttgaggctgcagtgagctgtgattgtgccactgcatatcgtgctgatgacacaggccggaccctgtctcaagaaccgagatgagaaatttatttgagaaggaatagaagccccgtacttgatcccgttgttagaacacatgcagtaaacacacgctagtgtgatgcccgtgagtctgcctcatctctgagagctcatgagagctcatctgagtgtatcttactgtcattactgtaatatccgtattatacgtctcgactgacctgtccgactgtatataagggtatcgaggtcccgtgctcg

SEQ ID NO: 500110 - DNA, 512 bp, Homo sapiens
  misc_feature (480)..(480): n is a, c, g, or t
ggttgtaaagttgtggccatttcttttctcttccttcttttcttttctttcctttcttttttttttttggggacagagattcgctgtgttggcccgggcttaagtgtgatccttcccaccttcagcctctcaagttagcgtgggagatagctgggactgcaggtgggcgccaccagtggcgggctaattttgggttagcatcaagcgtttctaaagtgctggattaaattctaaagggatactctacgggtttaatcttcagtgagatgataattggattggcaacagctttaaaattagttaatggtggtatggggctatggtgacataccctcagatgcacagggggaatagtaatgggtgttcttcaagggatatgtgaattcttagctaaaaatggctgagatggtaaaggtattaatcccttttctttaacttaatacaaattatcttcagtggaagttatggtaatattacggnggggtaatcttagagtgagatcctctggagac

SEQ ID NO: 500111 - DNA, 231 bp, Homo sapiens
  misc_feature (22)..(22): n is a, c, g, or t
  misc_feature (39)..(39): n is a, c, g, or t
tgatgagcaagttttcactcangtagttccagcaacatnttggtgttagagagactatgccctccttctctctctctctcttgccatgtgacatgtctgttccctctttgtcttctgccatgagtaaaagcttcctgaggcctcaccagaagccaagcagatgctggtgccatgcttgtacagcctgcaaaaccatgagcccaataaacttttctttataaattaaaaaaa

SEQ ID NO: 500112 - DNA, 1377 bp, Homo sapiens
  misc_feature (329)..(329): n is a, c, g, or t
gtgagatcctgagcgctgaaggacatcagtggccggaagcttttctagcgatccattacattgacttcaaacaaatcgtctggatgaatgggtgacgcatgagtcggatggacctaaagaagatcctaggttgcctccagagtataagaggcggccaagatctcctccacgtaaggatagcggacttcctgggtcccgtcctggctctccagagagagaggtggcggactcggggcaggccagggggaaagacttggccaatcgccggtccagatagacagtccggattcaagactgctcgcaaggagtcaggcgagggcctatttccncgtggtgggcagaaggccttgaacctagcgcgcatcgtaccttcctatgcttgcgcgtgctcttgacaaggcctcgaacgcagcgggtaccataccgatacacgcggaaacgggtgggagtgtgcgtattcatcctaggcaaatgtccagtgtgtcccagtcgaacgacgaaggctcgctgagaactctcgtgatttatttcccgcgagagatagagaaggcctgctcgcaggtacgggtgcatgttgggcaagtgtcgcatggcccacgtgaccggggataaggccgataaaaagttcagagactctgtggtaggcgcgcaccttggaattgaagggaactccgcccaagggaccaagctcttgagtggcgacactatcccggtagcacgccacacgcaaaaggggcattttgcacttgtgggaaagtcccgtagagaataggttcatggaattccagaatgaggacacaatcggcaaccaggaaccgagttcacgtatcacgagctcggcggaggaaattgaaaacggaaaccagaattttggacgggtttgcagttatggaagggcttgggggcccgagtacaagccaggcccattcaagaggccccgttgggggctatcggttttcgatacgcgcccgtggataaaatccctcaggaaagggggaacagtcatttcaatcgccaacaagtttttggcccgatgggttccccgtcactctaaccagtgtttggcaggaacgttttctttggacccttccaaaaggtaaactgggagccggttaaggtttcttcccaaaagattggtcctatacaaagacggttcaggtttgtgaaatcaccaaatagttggtttgaaccccgtaaacgaaagaggttcgttcccaaaggggacaaacctggagggaacatcttcaccccgagcgcaacgaggggtgtgactcgcccattcgatccctttccatattggaacgaactttcagcatgggcacgcgttataggtcacacccacaggaacgtttacaatctccgcccgaagaaaaccca

SEQ ID NO: 500113 - DNA, 185 bp, Homo sapiens
  misc_feature (145)..(145): n is a, c, g, or t
ggagtaaatcgtgaaacctctgaaagaatcaggcagtcatccttcagcaaaaagcatccccgatgcaggaagacgaatcgttaaacatcataggtcagctctagccgtctcgagaatgcgtcttcttcgagtggaaaacccgagnatagactgatcagattcttcagcgctaagacaatggacat

SEQ ID NO: 500114 - DNA, 355 bp, Homo sapiens
ggggagtgcgtgtgagaatcgactatctccggtagcgagtgactggaggtgctgacacgagtagctatatccacacccacactaagcatgtgggctatatgagcaagaagctctagacgtatgcggaagcaggactctgtgatactcggatctacacactacagaggccttgactgtctccaaccttacgatatgacagcccagagcgtacatgcacccagctatagagctcctgagaccaacagagcattccacgattctgagatatcatcagatgctgagctcgagactaagttagatcacgaactctctgagctgagcttcagagtgcactgtagcatgtggcatacggccg

SEQ ID NO: 500115 - DNA, 154 bp, Homo sapiens
aggcagtcctcatgtgggcgacgaggccagagcaagagaggcatctcaacctgaaagtaacccactcgagacacggaatcgtcaccaaactgggacagacatggagaaaatctggcaccacaccattctacaaatgagctgcaatgtggcatcc

SEQ ID NO: 500116 - DNA, 106 bp, Homo sapiens
gctccaacagacaagtatgatccagccaaatgtcatagtgctgaagtgagagacctgattcatcttagagcttagagatcatccaagcacatttgggccaattggt

SEQ ID NO: 500117 - DNA, 534 bp, Homo sapiens
  misc_feature (144)..(144): n is a, c, g, or t
  misc_feature (383)..(383): n is a, c, g, or t
ctctcatacaccacacgacgcacgacgatgtgtaatacacgacgcgggacacgacgcacatctcccactatctcgcgagtatcgcagcagcggatatcgtctgcacgagcgcccacacacgtgcacgagacaccacagcgcgcnccgtgtctatatctctctcagcgcgcccgcagagagagatgctcgtctgtgccacgaggctctcgcccacagagagtgtgtgtgtgtgctcagggcgctgtgatatcgtgtgcctagtgtgctcgtggcacaccagacgctgtgtgctcttctcaccacacgagacaccacacgtgcgagcacagagcctctgtgatcacgcgcgcctgtgcgctctctttgtagacacagagtgtganatatcacacacgtcgtgtaagaagaggcgctatagggggcgcccctctcgtgtctcccgctgtgatatacgctcgctgtgtcctcacgagagcggagagccccttcagaggcacagagacgcacatctctcacagtcatctctgcgacgtg

SEQ ID NO: 500118 - DNA, 570 bp, Homo sapiens
  misc_feature (14)..(14): n is a, c, g, or t
  misc_feature (50)..(50): n is a, c, g, or t
  misc_feature (56)..(56): n is a, c, g, or t
  misc_feature (108)..(108): n is a, c, g, or t
  misc_feature (126)..(126): n is a, c, g, or t
aaaaacccttcaanccctttgttcaaaacaaaacctgtcctccgaggccncttgantgggcctccatcctgaaaataatgacaacacatagcctaaggaacctccccngttgccaaattaacctgnccttaacccctttaaacctgttcctggtccatgacctcaggcctgaaggttaaggctgaagccccacccccaagaatgttcccttacatttggtgtggtatgctgatgtgcactgggactctacacagagctgatattgcttgtgatgcccatgaatgtgccactgtgcgtgagaatcctctggggaatgcttgtggaaaatgcagacacctgggccttagtttgagtttctgattcaatgggtctgaggtaggctgagatgctgcatctgttacagttcctccaagaggttcagctgcaggcagctcatggaccaactgagaaacacagatttgcagagcgcttgctgtgggccaagaattgtctaaacgctacataagtcattttacgtatcctttaaagtgcgtcctgttatcatctccattatacagatacaaaaaaaaa

SEQ ID NO: 500119 - DNA, 228 bp, Homo sapiens
ctcacagtcacgcatcacagtcacgcctcacagtcacacctcacagtcacacctcacagtccacacctacacagtcagactcacagtcacagctcacagtaaacagctcaaagtccacacctcacagtacaacagctcacagtcatacctcagagtcaaacctcacagaccaaactaacactcagggttgatacctcaaagacaacaccccatggacaaataactcac

SEQ ID NO: 500120 - DNA, 115 bp, Homo sapiens
ctctgaccgacgatatccgctcctcaatctgcccccatcctagaacgtgctggcagctttctccatccgatctgcaatggttcacgggcgctgaggagagggctgaccgactgct

SEQ ID NO: 500121 - DNA, 894 bp, Homo sapiens
cgggcccaacatgatcctttggtcacggtatccctgaaggtgcatcccacttggagtctgtccggactctttggggcctttagcatttccgaggacaatgaatggaagtgcggcaatgaacggcatctcgtgaaaagggctttgggaaagcttcacggttccttccagtggaagaacgatataggcacaaggattcttgcgaacttggcacccttatgatcgccatctctagaaggaaggctggctccgcctcgtcgtatgacagtgttgaggactgtagggctacacaggcaccagagcactttacatccgagagttctgccatcattggtcctagccgtgcgccaccgttactcgtggacctccctagcctcgcgactcccatgtggcactcccaaagaggagcctcgtgccgctagtgctgctcgaccgtgcgcatccgcagaaaggaatgccatcgtgtgtccgtcgtgtctttccactgagtgtcgagcggtggccataggtctaggtcggactaaactctccatgttctcagctatgctcccagcgtcccttcgccactgggtgtccgtcatcatgtggctggtgtgatcatgatagctgcttgttgccctgcctctccatgttccctatgtgagtagtctgaatgtcatggcaaagccgttagtaatccagtgagctacagcttgcctggcagcatccttgtggtgtagataaattagtcgacagcaactcagcactggggacaggaattgcaaagtacggggacatagatgcagacagttgttgagatttggggatagtcgggcttgtgagcggtgcccatttccagaagaagccgttcagcccttctgagtccccggccatatacccacgtgcgcgagttgaccc

SEQ ID NO: 500122 - DNA, 183 bp, Homo sapiens
gaggatccggctgagcagctgcagggagaagagctctggcgcggcgttgtgcgatgctggagcaaggaacagaatcagaagcaggacagagattgttcttctcagcggaatgggagagccaggaggaagacaacctgggagaagaaaggagggagagcgatgaggaagaaatcgccagctcag

SEQ ID NO: 500123 - DNA, 840 bp, Homo sapiens
  misc_feature (122)..(122): n is a, c, g, or t
gatatccgtagtgcatagagctagctgagatgtaagcgtgtccgcactctcggatacccgcatattcagcttgcaagcatggcaatgatacctctactgacctgcaagaacgactggattgntacgacacttcatgagacaggccttgcaagcagctattttgagccatagagtgtgctgaatgagtacctatatgcacactagaggaacttgcgtaaacctagtaaagtggaagatcctcataggcgccattaattcccccactagataagctacggatgtaatacaagagaaccatttgcattccattgactcgattagaattgccttgaattagggtcccttggggccacagcaaactgcgcatatatcccgctgaacatattcttggtagcccaaggtgcactgcgcgtcaccgtaccacatgtacttgcacatcagaattatggagaaacccaggtccgcaaaccgcattcagcacacactttaactacagaaacagcgcatttacgcgctgatcgcctatccgtaactaccgtcgaatgcgaccacattgcgccctaaattcatttaaattggctacgtggaactcttttcgctcacaattgattgtccgcgtatggatacagcccttttggggataccacgaagaagcttaacacgaatgtacattgcacgccaccgttctcgcattggacaagacctgcgatttcaagggcggacacggcggagcatctccttacagcactttccggttgtacatgggagtcccacacggttaaagacctaaatcgacaacgaagattactggcaaccgcgaccattggccttgaacccagc

SEQ ID NO: 500124 - DNA, 401 bp, Homo sapiens
cacgtattgtgataggtatatgaactggcacctgcccagacaggaaccaggcagtaagattagcacctggaaagtgccgaacttcaggaatgggaagaaagacgagatgccctagagatgaagctcaacacagcacgaaaagatcacttaattggcccaaatgataatgacttgggaaaatatagttgttggtttaaagattgtaaactaatatgctggctttatgtatgatacctaatcagagcattgaccagaaaaattgaaagtgttctgaggtacatagcagaggagctgcagattaccagcatgtatgggcgtatatcgttcctcctgagcagaaggccagagtaggtaggaaacagggctggcccacaggcccggacacgctctcacggaaccac

SEQ ID NO: 500125 - DNA, 364 bp, Homo sapiens
gcgagcgtccttaaatatgcggaatcaccatggacggctgggaccctatacacatatactgaaaactggagggtcttcaaggctctcatcgctgctcagtacagcgagactcaggtccgcgtagctctccgcaccaccccattatccatacttggacaaaccaaccgcacccctaaatatctccgcaaatttcctgccggcaaggtcccagcatcagagggtagatgatggatactgtgtgtatgagagcaacgccattgactactatagtgagcaaagaggagctgcgggcacgtactccagaggcagcagcccaggtggtgcagtgtgtgagctaatgctgattcccgatatagtgccccac

SEQ ID NO: 500126 - DNA, 132 bp, Homo sapiens
tttttccctttggcccttttttggggccccttttgacccagttttttccaaaaagcggggtggggccggttcgggttttccggggttttttttgcccccgggtccgcccccgggtccccccccgggttcgga

SEQ ID NO: 500127 - DNA, 527 bp, Homo sapiens
cagattcgaacagtgcccccatagtgtctcttttcacagctggccagaaccggaaatgattcattctcataaattcagtgtgtctcagaacaatcacaacaacatagggagttgtatgactgatacggcctcttccagaaagttttaatcaaagcagtttaattaaggtatcaaaaatatctttgcttactatcaagaagtgtcaaataggttcagcttgctgccaaaatatggatcatttatgaagcaggttcatattttagaggtgttaataaaatcctcatcggaaaagatccaaagtgcaaggatttgattataaacataatttcctagactgaaagtttttggaaaagatgcatggtctgagtcaggccttctggttatattgtgcagtttcaaaagaactatttaaaactcttgaaaactcatgtaaattaaaatcatagggtgaaaattgtatttgttaaaataccttaataatttaaaatgacctgatttcctggaacatttattattccaaaggtgga

SEQ ID NO: 500128 - DNA, 923 bp, Homo sapiens
  misc_feature (217)..(217): n is a, c, g, or t
  misc_feature (310)..(310): n is a, c, g, or t
gcaacatgagagctgaggaaacatgacagcaaccaagtcgtcgatctcgtcaccattgggatgataagcctgtaggacccccactggatgatctcccatcgttggtgaagattagaccgtggcaatgtgaggcactgtgcatcgcgatgtctgaattgattcgggaatgtaacggatgagtgacgtgaggccttgtccggcacaacccgcgattggnagcctttccgtgcacacagacgagcagcgcgtgagagcagcgcaaacgagtcaatgtcgccggaatcagctgagcttaaagtaagacactggnacatttctgttgagaaaaaccatcaactgatcaggacacgatcatcggaccaatcgataaagaaaggagtgttagattcactcttttttaaaagaaaatggaagacgagccacgttagtctccttgcactagagaaaggcttaagaaagtgagatgtattcatgtcgttctagcggtcgatgtgcactgagatgtggagaatgcacttgtgctatttggggcggacgtgtagtggaggtaagcatgagtggtgttcacgtcgggtttggatagttaattggatttgtgttcatagtggtggctatgtgagcctatggagtttatatgtagagaatgagtcgattgagatgcacctgtggttgcatcaaaggcacacaacacattcagacatgtatccctgtggccactattggttagcgtgtgatgctaatgccagcgtaagaaagagcagggtccaaggggagttttttatacaggctcctgagaactgaggtgttgtggtgaagttgaggggggtaatcccaagggtgggttcaacctttcaaggttgagttgcagttttacttttttcaccaggaccaaggaagggggttgagatgtgaatttgggaaaa

SEQ ID NO: 500129 - DNA, 578 bp, Homo sapiens
tgagtgagagggaaacagactacaatcggtcctaatgaaaagggagaaagatggagatatgaagatgactccaattttagttttaatcaaggtactgatttgtggaggtatctttgacacatcagttgacctctgagtttcagattctatacctgtgaaatgttagaataaaaataacaatatcttacaacatttacttgaatattaaatgaagatcacacatatatatggaatatattttataatgtggaaaaggctaaagctgtatatgaactaactcctatatttcataaataagattttgatgatgatgagatttgagattactattactaatattggttaaaagtttgcatttcataacagaggtaaaaattgtaaaagctattaaaagaaaaaccacaattgttcaggagagatacctactgaccttttttagctctcttaaatggattctttttcaacttccaaaggtggatgtttcaaccaaaagccttttaaccccttcccctagtacacaccggaaaaaccagccggtccctttcttacccctggatggagctctttaaactgggcac

SEQ ID NO: 500130 - DNA, 502 bp, Homo sapiens
cagaacagagacgaaaaggctacctctcctaccccagttaagtgttcaaaggggatgtgagggcctccacgaatgcagggaggcagctgtgtaatcctatgtcagctctcttaggaagccccagtacttatatttggcatgcacttgcccttaaaaacttatgatttgtgagtccaggaacaatttactatttttaaaatattttgctgcttctgttctgggtctgaaatcccttttgtgccagatgccagtactgtctacccaattgctccagggattatatgcacagattcagtccccatagggtattcagatcatctgcttctctgaaggagtaaatgtgttttgttcctaggtccagaggagcttgttttccttgtcctttgttcccaccttcccaagaacattacccagcccataagagacattctcagatgaaactctgttttcttgcctcagtcagctctagccttttttttgtaggaataaattcttttttctc

SEQ ID NO: 500131 - DNA, 726 bp, Homo sapiens
gcccacaaaccccatgtgactggttcgaaggacccagagcataaaggtctctcaggaaaccaatgtccaaaaccctagctggcggtacagtcatgctgtgctccaatcccttatccccaggatttacggcgtgcgtttcatggcgcatacgatgcgaggtctctagagtgagttgcttgtatgtgacgatctagagttatcacattcttgttgcaccaccgctggagtgcaatggtcaccattctcggctcaactggaacctccacctcctggttcaagcgattctcaggcctcagcttcccaagtagttgggattacaggcgcctgccaccacacctggctaattttgtatttttagtagagatggggtttctccatgttggtcaggctggtctcaaactcccgacctcaagtgatctgcccgccttggcctcccaaagtgctgggattacaggcgtgagccaccgcaccggcccacttgctttgctttttaagaaaatgtatgtatcttcaatgggttagggactaatatctgcttccccaacccttcaccgcgtacctctttagtgccagcaccttatacatccaggccaaatggtatcacccttttgtgccttatccctcgagctgtgacacacaaatgtcatcttttcagatagtttgggccaccaccaacaagatcggttgtgctgtgaacacctgccggaagatgactgtctggggaga

SEQ ID NO: 500132 - DNA, 313 bp, Homo sapiens
accttcccagacctgaaggatgattaggcacacgaaacagttgcgactgccagtgcatgacatgactgtccaacatgactgaacacctcgcttctactaataatacaaagcacttgcggctgtcgctgatgggcaggcgtgacctgccgagaatcagtgacacatgggcacgcgagtgtcaataggggcctgttgctttccagtaacaaggctttaagctccgcccgagcctcaatgctaaagcagacacacacatgaactgtcccaaagcagctggttcaggagcaccctgagggagagggaccacctatca

SEQ ID NO: 500133 - DNA, 104 bp, Homo sapiens
atgcgtcgggccgggcgttaacgagaaagtttacgccgacactggcctttattagcgcgtatggcctcggccttcgttccccaaggcgtgcgcttcctgttctc

SEQ ID NO: 500134 - DNA, 267 bp, Homo sapiens
  misc_feature (9)..(9): n is a, c, g, or t
  misc_feature (16)..(16): n is a, c, g, or t
  misc_feature (24)..(24): n is a, c, g, or t
  misc_feature (32)..(32): n is a, c, g, or t
  misc_feature (46)..(46): n is a, c, g, or t
  misc_feature (52)..(52): n is a, c, g, or t
  misc_feature (76)..(76): n is a, c, g, or t
  misc_feature (245)..(245): n is a, c, g, or t
gaattcggnacgagtnagaccggnctcatccngaggtgcgaccggnagttgnacaacccttccagacaaagcagtngagtcgagcctcctgtccagatcaggaggggagatagggctcagaggagggggtgccggaaaacctcggtgttcctctcgaaggagaccaggatttcggggaactttgtgggtcgcatcaagggtaccaagtgccctttcgacctacaattcctaacgtgggacttctnctgaggcgcttgtagcggtgaa

SEQ ID NO: 500135 - DNA, 859 bp, Homo sapiens
  misc_feature (211)..(211): n is a, c, g, or t
gagtgtcctgagaggtcaggatcgctgtcagtactatggccgcatgaactatgggacatagagctatgtgactatcgataacatagtggcatacttcccagcattattagacgaatgcgaatgattatgcaagggtacgctcgagttaggaaaacttagtccaagagagacacgctctggacgtgcacaaacgggcttgataggggatccngattggggcccgaaaatggatatgccttagggaagcatggacatgtgcgtaggctttttgccaagagcatgtcgttatccttttcttgatagtcattccttgtgacaaggcgattcgagagatcggtggatttggcatgcacattgaagtcggtcatgctagtaggaagctcgaatattacgctggagagatcccctcgtaaatatacgggataatgaggcatccactaggaaagatcatatgaccctggaaaggcagtccactaagtggtttcgttaacctctctcaaaatagagatattcttacgtctgctaaagcctacttgttctggttttagtcccgtctacacgatatgattcaggttacggatttctcacttccaaggtatcacctatatactattttgcctgcagtgaaaacctggccaggctatacgttccccaatggaattaatccatatttgggaggtcggcgccacacggcgttacccccaaaaaaagccccattctttttaaatacacattgttcccaattggcgttccttgcgagtccccgttggaggtaccacgctaaaccactttggtgcctttaggtagacagaacctaggggaagatcccccgactgcaacattgactagcctttggatg

SEQ ID NO: 500136 - DNA, 130 bp, Homo sapiens
gtccggtctgctccctcttcgactgtggggcgcgctccgacgatagctgtggtcccctgggccgcttcctgttggcctgtcttagtctattttgctatatttggggggtgtgaagtagggaggcagcagg

SEQ ID NO: 500137 - DNA, 629 bp, Homo sapiens
ggcccctggctactgaggagtcgtcttcatcttcagaagaggaggaagtagccagctcccctgagcccccccgatccagtccaaacggcctcggcgggaactacgggagcaaaggcctcaaggtgtgtggggtgcgtgggtgcctggaggctggagcctgtgtgcctgtgtcactcctggttccctgagtcgtgatgaatacgtggcccacatgaagaaggagcatggcaggtcagtgaaaaagttcccctgtcagcctgtgtgagcgctcccttctgctccgaccccagcctgaggcgccatgtgcagagttaatcactgagggctatcgagagctgagtttacccctgcaggtattgctacatgagggcatagaagcgcatcttcagcagccgcctgatcctagagaaagatgtccaggtccggcacggacttgcaggttggggcaccagtgccccatggctcgaggggaccaccttgagctctggggttccagtgccagagcccagggccaggtcggagacgccgacagtcttctgactcttgcagtgaggaggcctgacagacgaaacgcagcaagtccggcaggtgcggactggatctggatggcatggcctctgctgctaccg

SEQ ID NO: 500138 - DNA, 373 bp, Homo sapiens
cagcctgcccctgagccctgttccgagtcgtccctgcgctttccgcacgcgcgcgctcgaggcggcacgaggaagatcgtatcgtatgtcgtatccagaactccatctttcgacgcttgctgatgcagtaaggctgatgacctgcttcctgctggcactgacgatatatccatataagaatcaaagagaaacggaggaagaccttatactgtcaagggatcgtgatgatacgataaaaagaactagtgaaggcgttagaaaaagttgctgcaaggtactgtaattgagcatccggaatatggagaagtcattcagtacagggtgacaagcaagacatatgcagtcctcgtaagatggactgctaaggacgatc

SEQ ID NO: 500139 - DNA, 465 bp, Homo sapiens
gtgaggaatggaaaagtgtttaaagcacagtgagcaagaaatgagtctgagagcagggaggtgtctctcactgaagcacagtgccttcgcgtttcatctgggaataaggtttgtcgcataagagagtgaagtgtttttgtccccgtggatgtaagaggattgttgtagactttagaattgggacttacctaacaagagtataaattgacttgggttgcaagcactgagcactgttacttctatcacgtctctcttttatttctgggatagtaaaacaggctataagtttctatggttgcccaagggcagagcaaggaatatctggtgtttcttgtgatgataatattttaatttgaaatatccctccctcatacaagtgtatgttaccattttaatataattctttgggtatctttccttctggttttgtgaagatttttgtggcatggattgcttgttccgctg

SEQ ID NO: 500140 - DNA, 236 bp, Homo sapiens
attcaccttgagatccagtgagtttgacaccaggctgcccaacatggtggaaccccaatctctactaaaaatacaaaaatttagccaggcatggtgggcgtgggcctataatcccaagctgctcagggggcgggggtaggagaataggcttgaaaccgggaggtggaggttgcagtgggcccaagtatcaagccattgcactctagcctgggcagcccgggccaaaactccatctc

SEQ ID NO: 500141 - DNA, 264 bp, Homo sapiens
  misc_feature (190)..(190): n is a, c, g, or t
  misc_feature (227)..(227): n is a, c, g, or t
tcatctagaggatctcaagtcagcaacagtacgcggcctttatccccattcttctgggatcaagacaattctcctgcctaccagtatcctgagatagacgggaatcacaggtgcgcgccaccatgcctggctaattatttttgtgtatgtattagtagagatggagtttcagcatgtaggcccagcctgntcgtgaacgtcctggccgtgaaggtgatgtgcccacncttggacgttccaaacgtgctagcgattacatggccg

SEQ ID NO: 500142 - DNA, 741 bp, Homo sapiens
  misc_feature (25)..(25): n is a, c, g, or t
  misc_feature (66)..(66): n is a, c, g, or t
  misc_feature (76)..(76): n is a, c, g, or t
  misc_feature (81)..(83): n is a, c, g, or t
  misc_feature (129)..(129): n is a, c, g, or t
  misc_feature (305)..(305): n is a, c, g, or t
  misc_feature (360)..(361): n is a, c, g, or t
  misc_feature (365)..(366): n is a, c, g, or t
  misc_feature (374)..(374): n is a, c, g, or t
  misc_feature (390)..(390): n is a, c, g, or t
  misc_feature (418)..(418): n is a, c, g, or t
  misc_feature (426)..(426): n is a, c, g, or t
  misc_feature (438)..(439): n is a, c, g, or t
  misc_feature (441)..(441): n is a, c, g, or t
  misc_feature (444)..(444): n is a, c, g, or t
  misc_feature (446)..(446): n is a, c, g, or t
  misc_feature (450)..(450): n is a, c, g, or t
  misc_feature (464)..(464): n is a, c, g, or t
  misc_feature (467)..(468): n is a, c, g, or t
  misc_feature (470)..(470): n is a, c, g, or t
  misc_feature (478)..(479): n is a, c, g, or t
  misc_feature (494)..(494): n is a, c, g, or t
  misc_feature (504)..(504): n is a, c, g, or t
  misc_feature (507)..(508): n is a, c, g, or t
  misc_feature (531)..(531): n is a, c, g, or t
  misc_feature (533)..(533): n is a, c, g, or t
  misc_feature (540)..(540): n is a, c, g, or t
  misc_feature (569)..(569): n is a, c, g, or t
  misc_feature (622)..(622): n is a, c, g, or t
  misc_feature (640)..(640): n is a, c, g, or t
  misc_feature (651)..(651): n is a, c, g, or t
  misc_feature (720)..(720): n is a, c, g, or t
tcggattagggttacagcttatttnccagggatggttcgaggaagggagttggggtggggggtacncctttatggntcttnnnaggttacatgagaactggtgatataggtggggtctcaagtagaagntttgaattagtgtttattaacaaacttaatcctttgttctaaaccaggctctagcttaattcaaagataaaggaggggttaaagattaagaaaaatggaatttttttcccacatcaatgatataccaagagaagttaataggtctaaattgtagatgtagggaaataaaaaggtcnaattataattttttataaaaactaatttttttattacgcttaatttttttatttnnaaanntttgaganaaagttttgttttgtngtttaggttggtgtgttgtgaggatgtnattgggtnaataaaaaattnnangtntnaggnttaagtgaatattncanntnagccttannaatagaaggtattanaggcatgggncannatgcctggctaatttttgtattntntgtaganacggggtttcgttatgttgcccaggctgntctcgaactcctgggctcaagtgatctgcccccctcggcctcccaaagtgccnggattataggtatgagcnacagcacctancccaaactacaaattttaatagaattttaaacccaacccactggccaaaaatcactcggtcacgaattnctaatccacaatcacatcagt

SEQ ID NO: 500143 - DNA, 158 bp, Homo sapiens
ctcatttttgcacacacgccctcctggggcccatgaaaaaggggtttgctttcccttcgccttcccccatgattgtaagtttcctgaggcctcctagccatgcttcctgttaaatttgcaaaactgggagtcaattaaacctctttttttaataatta

SEQ ID NO: 500144 - DNA, 509 bp, Homo sapiens
cgcaagatttcccttaagcaacccatgtaaactcatgccccagaaagggatgtatgtcgctgtcccagagaaggctgtggaaggacctatacaactgtgttttatctccaaagccatatcctctccttccatgaggaaagccgcccttttgtgggtggacatgctggctgtggcaaaacctttgcaatgaaacaaagtctccctaggcctgctgttggcactggtcccgcccagaagaaaatgaagctcaaagtccaaaaatttcgtgaaaaacggggtttggcctctcctctcagtggatatatccccccccaaagggaacaagggccagggttatctttggggccaaacggagagtcccccccctgggtggaagaccaaatgctctcgcccggtgccggacttacccctgggtaagaactgccctgctttgtttaaagggctgccggcccaggggcgggctttctctccgagcctgcttttttttttttaaatttctgatgccgaga

SEQ ID NO: 500145 - DNA, 951 bp, Homo sapiens
ttcagggtagagtcaatcgtgcaggccatgaagtcccagttcgagcgggactctgcagtggtccgggatctgagcagtagctgaggacgaagaagaagcatgctggtcagacaggtgcgggagatggatggcagagctggaggacgatgaggaaagcagtcgctcgatggcatgtggccgcccggaatgaagctggagatggacctgaatgacctggaggctcacgtcgactcggccaacaaagaaccgggacgaagccatcaaacagctgcggaagctgcaggcccagatgcaaggactgcatgcgcgagcctggatgacacccgtgcctctcgtgaggagatcctggcccaggccaaagagaacgagaagaagctgacagagcaatggaggccgagatgatccagttgcaggaggaactggcaggcccgcggagcgttgccaagcgccagtgcctagcaggagccgggatgagctggctcgactgcagatcggccaaacagcatgcggcacaaggaccctggcgtaagaggacgaacgcggggtttggaagggcccgaattagccagcttgcacggaggacgcctggcggagcgaccaggggcaacacggcagcttgatctaagaccggttgacgcaaggccaacctgcagaatcgaccagatcaacagcgaacctgaacttgtagcgcagccaggccccaaaagaacgagcatgcgtcggacgcagctggaacggcctgaaccaggcacgcttaaggtcaagcatgccgggagattgacgggccctgttaacgtccacataaacagggcttctattacgcgcccttgaggccacacaatgtcccgattggcacgtacacttgacacagatgacacgcatcgcagggcgagccttcaacaagtgtagtagaacgaacaaaacctacaggatagatcaacggtagaacaa

SEQ ID NO: 500146 - DNA, 323 bp, Homo sapiens
  misc_feature (180)..(180): n is a, c, g, or t
  misc_feature (184)..(184): n is a, c, g, or t
  misc_feature (188)..(188): n is a, c, g, or t
  misc_feature (239)..(239): n is a, c, g, or t
  misc_feature (261)..(261): n is a, c, g, or t
  misc_feature (270)..(270): n is a, c, g, or t
  misc_feature (276)..(276): n is a, c, g, or t
agtttaccgttgccatgtcaatacccagggagttaccgcccctttccgtggcagtaacccaataattaccaccccttccctagaaatttctgcataaaccgccccttaatctgtatgcaattaaaagtgtgtgtgtgtgagtgtgtgtgtgtgtgtgtgtgtgtgtatgtgtgtgtgtgngtgnatanatatatatatatatatatatatataaaactgcaaaactgccctgagctgcncctctctgcctatgggggagcnctgctctgnaggggnagtcacggagctgtaaccctgcctcttcaataaagctgttttcttct

SEQ ID NO: 500147 - DNA, 669 bp, Homo sapiens
ccagaggattaaccggcagaagacaatgcagctaataattatttaaaacactcaagaaggccgggcacgatggatcatatctgtaatcccagcactttgggaggccaaggcaggcggatcacaaggtcaggagtttgagaccagcctggccaatatggtgaaaccccatctctactaaaaatttaaaaactagccagacatggtggtgggcacctgtagtcccagctacttgggaggctgagactatagggatgcataactacaccaagctaattaaaaaaattttttttgtagagatgaggtctcactatattgcccaagctggtctcaaactcctggcctcaagcagttctgccacattggactcccaaagtgctgagatgtgagccactgcacccgaccttctcctgaactttttgtctttacgtgatagagtctcactctgtcacccatgttggagtgcagtggcacgatttcagctcactgcaacctccgtctcccaggctaaagcgatcttcccatctctgcctcctgagcaagctaggaccacagggcacactaccacgcccaattattattatcattatttttggtatatcggggtagatacgggggttcaccgtgtagcccaggctggtttcgagcatctgagctcaggcgatcaactgt

SEQ ID NO: 500148 - DNA, 950 bp, Homo sapiens
ttttaaaatttctgttaaggatttcttcttggactgggtgtggtgcctcacgcctataatctcagcactctgggaggctaaagtggcggattacttgagctcaggagttgagactagcttgggcaacatgacaaaaccccatctctactaaaaatacaaaaattagccgggcatggtggcatgcacctgtaatcccagctatgtgggaggctgaggcataagaatcacttgaactccagaggcagaggttgcagtgagccaagattgtgccactgcactccagcctgggtgacagagtgaaactctgtttttaaaaaacaaaaaaaaaaaaaaaaattctcttggaacccattattgggtttaacaaggtggtgctggttcaatatctccaagatattttggaaaatattttctctagcttaccattctctgggaactacacgtggtacgctcacatcctggcaggcgggccttaaggagcaagaccgccaaactagatggctatcccctataacgtacggcaacagaatcggagattccactgggcccaagaaggtggtccacccatcggggagaaactggtccacgctggcgcagccttgccaaacagaacggtgagcatcccgggcaaacccggtcggcgatagaagcgacagtcctaatcaaattggcaatcaccacctgggccttccgccaacagggcacccgacagcacagcctcgacgccccttacacacccaggaggccaactccaccgagcgagaaaagacggccagccaaccagggcgaatcctctgcccgaaaaccggacaaggatggcctcaccagtggcgcacgacccccatagcgctggcaacgacgttcccccgccagatggggctacccccgcgcagcgcacgcaacaccagctcaaacacagaccacgcgcccgccaggccactggagacgca

SEQ ID NO: 500149 - DNA, 108 bp, Homo sapiens
gcaggacagcagtgagatagagatgtgtgcagcgatgccgtggattaattttttcacttttggtggagacagggtctctctatgttgcccaggctcatcttgaactct

SEQ ID NO: 500150 - DNA, 955 bp, Homo sapiens
gagatgggtcatgagaagggaattctgtggtatgatcggacatgacagctgagagataacccttctacctaggaactccggagtgataacttaccacagactgaaggcaggagaggagtactaagacatgatgagttcaagacgccttggctgaaatgccacagagggtccgtgattacaagtcgtgtctattctgatacttcttactatgggaatacaatcttatccagaattgatgtaccagcctctgtgagtactttgcctgttcacaacctaacgattcaactgctgaataaagaccattagtgacaatctaacgagctgatgagatttgggcagaaatagtcagtgccacgtagtcaatgactacggacggaaagtgctgattactgttctcttcgcttaaagttttccagggcctttttctgtgcccaggctggagtgcagtggaggcaatcttggcctcaccacaatctctcctcctggatgcaacgcaattctcctgcctgaagctcccgagatacctgtgattactggctgcgcaatatcgcggatattctcgtatttagctagagatggggttaaccgtggtcggcaaggctgctccttgaatctcctgaacctcgctgattacgacctgctcgccctccctacagtgtgggactcacattgctgatccactgtgccggccaacctggtacattctgacatccttctgctcaacctctggcaatctctccgtactctgtgcctacctattcagacaggcgacacaccctcttgaatacaaccggctcgattgcttagacttctccactgccacgatacactatcgacacaacgacataagaacgtacatccgaacaccctctcatgacaacaacaatcgacgcctacatataatattcgcctccttacatctcactccgtttctctcacctctactttatctctc

SEQ ID NO: 500151 - DNA, 141 bp, Homo sapiens
gtatgtgctgtctcgtgtaagatcgcgccatcattggtttatgctaactgtgttggatagtaggcctagtatgaggagcgtcatggagtggaagtgaaatcgacatggctaggcaggcggtcatcaagagggggatcctct

SEQ ID NO: 500152 - DNA, 115 bp, Homo sapiens
agtaccatggagcgtctggccacctcgggaatgtacgacttcactttgtagcgccggtagtacctgattattgtcattgctgcctggggcttcttttgctattgaaacttctaaa

SEQ ID NO: 500153 - DNA, 551 bp, Homo sapiens
  misc_feature (445)..(445): n is a, c, g, or t
  misc_feature (460)..(460): n is a, c, g, or t
  misc_feature (467)..(467): n is a, c, g, or t
  misc_feature (486)..(486): n is a, c, g, or t
  misc_feature (525)..(525): n is a, c, g, or t
cccgtttgttcctgtttcataggctcttataggaattttaaagtcaaaatatgctttgagaaagaaataagatccacacatcatgaaagagagagtcgatgacatttgaaattcttttattattcatttttttttttttttttttttttggagatagtatcttgctctgttgcccaggctggagggcagtggtacaatcatggctcactgcagcctcaatcccttgggctcaagtgatcctcctgcctcagcctcctgagtagctaggagtacagggcacgcaccaccatacctgggctaatttttaaaagttttttataggagacagagtctttgcccatgttgcccatgttggtctcgaacaccgggggcttcaagcgatccacccaccttcatccttccaatcaatttttaaccttatatcacattcaccttcctaaggagntatattttaataagncccttgnaggatgttttgaaaatttnctgctgatttcaatgggggaagaggaacattttagaccnactgggggtttatttaacttcatatt

SEQ ID NO: 500154 - DNA, 1096 bp, Homo sapiens
  misc_feature (574)..(574): n is a, c, g, or t
gggaaggaggtgtgaaaggaggtcggatgggactcgaggctgcctgggctgagtgtgtcgtgggccgtcaaggtcacttaggaaagtggatgtgggaatagtaagcattccgctaatacatgaatgatcccgcaaacttctgagctatatctactgagccggtgagctggattggtgcacgagcaactgggggtggaactgtcagcttccctaaaggcacaggccagcatccaagctggtgctggagacggcgagatgggagagagtcggaaggtcaaactgaaaaaggtccaagatcaatatgcccaagtgttaatgtctccaaatgctaggcgggaacaggtggtgtcagctggtctcaccagaaggcatcacattgtgctgggtccagaaggtgacctgatagaagttcaaaggcgcagccgtggggcgtctcgtggaaggagagggcagacggccgagagcactcttgcaccgagacggcgaaattctccttactggaacaaggtaagaagccacgggcaccgatgcagaagattcgagtcccaggtgactgagaacgaggagttctctnggacctgtccacccccgagcggcggacgcctggaggcttgaaggtgggcgaaagtagtctctgggacacggcgggaacacgcctaggcagggcacatgacgggagaagactgagagtaacaggcccactgggggtggcctgggcccggtcaaacgcagccacaagtggacaacagggacagccgattaggcgagcagcaatgcatgcagcactgcgccaaaggtccctggggggcaatggggggatatcgccttggacctacgcggaacgacaacggtacccacgaatccaggacgcgcatcaccgtcctgtgagcgtagccaaaatccatggacggtggggggcacagcgtaccgcgggtggtcaacgacattgcacccaggcatgtcgcctcgcaagaggtgcgaaatggcatggacgcaaggacaggacccaaacagaaaagagaaaatgaagagtaagccaaggggcgccaaagggtaactggtagaggcacccaataagtacctaagtactcacacc

SEQ ID NO: 500155 - DNA, 285 bp, Homo sapiens
tagtgatagcatgttctagaaagtctgattatatccgagtccactttcttctcgaggaggctgctggcagctggccgtgcccatggtagagcgcgatcctgcacgagtaaagctggccgaccattacaaggcgctgcatatcctggtgcacgagctgcaggactttgcagcggccgaggactactgcctgtgatgctcctagggccgatatccatcaccatcgccagcaactctttcatcatcgctgcttgccatctacctgcgtgctggccctactgcccaaga

SEQ ID NO: 500156 - DNA, 228 bp, Homo sapiens
aaaaaaagaaaaaaaagacaaacaaaccaggtaggtggatttcattaaacaatggaggacgggctcccttgtccccggccagggcctgtgagggaaatgtaaagggcatgttccttttaaacaaagccaagtcatcagggccctccttgtgtttgagacgctagagttcgtcaaggaagcccggtttcctatggcgcccgcctagggaagtgaatcaagaatctcagg

SEQ ID NO: 500157 - DNA, 218 bp, Homo sapiens
tgaacattcgtgtccatgtcctccaagctatatacaccgtaatggcccaccataattacccccatactccttacactattcctcatcacccaatctaaaaatattaagacacaacactaccacgctaccgtccctctacctaaatgcccataaaagataataaaattatatacaacacctcgtgaggaaccaataatgtaacgaagaatcttgttcga

SEQ ID NO: 500158 - DNA, 509 bp, Homo sapiens
  misc_feature (284)..(284): n is a, c, g, or t
  misc_feature (318)..(318): n is a, c, g, or t
  misc_feature (446)..(446): n is a, c, g, or t
  misc_feature (470)..(470): n is a, c, g, or t
  misc_feature (483)..(483): n is a, c, g, or t
  misc_feature (495)..(495): n is a, c, g, or t
aagcccattctctcgtttcccatctttaaaccattcttggtaccaacttgaagctccaaatacctggcaggcaccctctggcctctactggatctgtgggccacaagcatatcgacaactgccagctaaatggtcaggggcctgtgtactggggacaattaggccgtccttcttcctaatgcccctaaaacagggagaagccttaggataccccatctatgatgaaactaaaaggaaaagcaaaagaggcataactataggagattggaaggacagtgaatggnctcctgaaagaataattcaatattatgggccagncacctgggcagaagatggaatgtggggataccgcaccccagtttaaatgcttaaccgcattattagattgcaggcaggactagaatcattaccaatgaaactgaggggcctggatctttttggccagnaagcacaaaaaatgagaatttcanttttcaaataggnttggcctagatncccccagccaggaa

SEQ ID NO: 500159 - DNA, 526 bp, Homo sapiens
  misc_feature (1)..(1): n is a, c, g, or t
  misc_feature (137)..(137): n is a, c, g, or t
  misc_feature (139)..(139): n is a, c, g, or t
  misc_feature (142)..(142): n is a, c, g, or t
  misc_feature (154)..(154): n is a, c, g, or t
  misc_feature (157)..(157): n is a, c, g, or t
  misc_feature (159)..(159): n is a, c, g, or t
  misc_feature (181)..(182): n is a, c, g, or t
  misc_feature (193)..(193): n is a, c, g, or t
  misc_feature (195)..(197): n is a, c, g, or t
  misc_feature (207)..(207): n is a, c, g, or t
  misc_feature (211)..(211): n is a, c, g, or t
  misc_feature (236)..(236): n is a, c, g, or t
  misc_feature (269)..(269): n is a, c, g, or t
  misc_feature (274)..(274): n is a, c, g, or t
  misc_feature (277)..(277): n is a, c, g, or t
  misc_feature (297)..(297): n is a, c, g, or t
  misc_feature (302)..(302): n is a, c, g, or t
  misc_feature (313)..(313): n is a, c, g, or t
  misc_feature (318)..(318): n is a, c, g, or t
  misc_feature (344)..(345): n is a, c, g, or t
  misc_feature (368)..(368): n is a, c, g, or t
  misc_feature (405)..(405): n is a, c, g, or t
  misc_feature (426)..(426): n is a, c, g, or t
  misc_feature (506)..(506): n is a, c, g, or t
ntatagaaaagtttgtaaaaaaccaagctggtacggtccggaatatacccgggataccggagggtggggacggcgaagagttggaagccggcgctccgctccgctccaactcggtttcatgtcccgccaaacgaaananaanttcctgcggcantananaatgtcggaccccaaaactcannccaaaggctanannnaatacaaaanaaangcgcaattcatctcaaaaaaaaacncaaaaaatatcaaaaaaatggtggtctggaaanggtanaanaacttccgcaaaatgcatangaaanatggcctacanacacngcaaaatcttccgccgcctcgaaaanntccccgctttcccccgggcccanatgtttggccggtttgaaaactcaataataaaaaaanggcgaaaaagggcaaaaaacntgcttcgcttcactgtgcacatacatgcgctcaaaaacagaccccagctcaaagagttcttccggggtggggaggtgacncgacccttggaggtgtccag

SEQ ID NO: 500160 - DNA, 173 bp, Homo sapiens
  misc_feature (20)..(21): n is a, c, g, or t
  misc_feature (24)..(25): n is a, c, g, or t
  misc_feature (31)..(31): n is a, c, g, or t
  misc_feature (36)..(37): n is a, c, g, or t
  misc_feature (39)..(40): n is a, c, g, or t
  misc_feature (43)..(43): n is a, c, g, or t
  misc_feature (45)..(45): n is a, c, g, or t
  misc_feature (52)..(53): n is a, c, g, or t
  misc_feature (55)..(55): n is a, c, g, or t
  misc_feature (64)..(64): n is a, c, g, or t
  misc_feature (66)..(66): n is a, c, g, or t
  misc_feature (68)..(68): n is a, c, g, or t
  misc_feature (126)..(126): n is a, c, g, or t
agttaaaatggctgggaccnnaannctggcncttgnnannaancntccccannanattgagcanangnagcacatcaaagcagaacatgcagatatgaagttccatgaatgtgaccagtgtaaggngctcttccccacgccagccttgctgcaggttcatgtcaatgtgccag

SEQ ID NO: 500161 - DNA, 1878 bp, Homo sapiens
  misc_feature (228)..(228): n is a, c, g, or t
cggatgtccgggcgctcgtgcgcgcgactacggggtggttgagccaagtaaccaagggccttcgcagatctacttcagcggttagctcgtgcaggtacttgggccactagaggtactcccgttctggtcggatccagcgcctggtctgaccgccggctcaccagggagtccgcacgactgccctcatacctgctatgacagcactgtacttcgtaacgcacctgagtngcgactcgtgcaggagtgtgcagcgaagaaaccctacacaccaaggattgcgcctgagagtcctggctatcgaacggcgtctcggagtactagccactagaggagtctcctcggtgcctatcacatgaacagctattcacccgtcgttgcgataggttctgtgaccatggaattgtatgtagtcggatgcctggattagatggggcgtaatggagaggacaattttgggcccccatggtactgatacctgacggtcgagatatcgactatatgcattgaagcacgcggcattcgcattgcgtgggaaagagaacccctcgttgttgaaacgcctagggtgtcaaaacctggacggggtagaggagaggggctagcacacttatctgccatttcgaaggggagtcttaccatttggaagaaacccagggaacgtggtttgacattggacctttggggtatgcattgttgggacggcatagaagagtggtctacattggagggaggcttgctagagcaactgtaagggaaatgtttggtggacatatagatcaattggtagtagaatcccatgtttgagcaattaccattggggtacataatgggcgagtgacaccatctgtggggaacgtggatgggaggcaggagaatgaggtgggtaggatccagggaaaaggtctcctgcgctgtgttggaaacatatgcggggttgtgggtatggccatcgaccaagatcttatacgcggcgcgacttattggaagggggacagctgtatgggagagagaggttccaaggttgctcacgtttgtgacatttttggggtgttggaaacacggggaagggtatggaaaccaacacgattctgttacttggataagcgaaatttgggattggaggcaggggaaggagaaagatgtccttttgagcgttggtggtgggaggggagaggaaactcaaaacattacataatgtggggaagttcaaagacaaagagccctcaattatggtggggaaagaacggaagggtttgacatttaaatagataaaaagagtttataacgggccttccggtagagtacattagggtggtactaggcagaatattatatatgagtgggatgatatgttgtaagattaaacccgatggggttataaacacatactgtgcattgggggcatagggggatggaagggtaggagtatcgatattagcgatttatggtctataacggtgggaacgcacacaccgatccggggtatacagaaacggaatggccatcgggaaccagagacccctccaagaagaaaagaagagtagggacccgcaccgacacaaacaccaacaatagaccaagagaacaacaaacagaacctaaccacaaagacaaagaggagacaacaccaagaagaagcgcacgggacggaacaaaaaatccagatcgccgaagacagaatcgcaacaacgtgttccacaacaagagtgcaccataaagaggagaagaaagatagagcgcaacgacaacgaggacgcaagagcaccagcgaccacacagacgagaacaaaagtcgaaagtaaagaacaacgacagacgaaaagcgcatacagtgaacgagaacgtagagacatccaccacgagaggctaaacagagaa

SEQ ID NO: 500162 - DNA, 161 bp, Homo sapiens
agagacagggggtctcactatgttgcccaggttggtctcaaactcctgggctcaagcaatcctccctccttggcccccagaagtgctgggattacaggcatgagccaccgtgccaggctggacccttttctgagtcagtattccccttctgtcgtcttctc

SEQ ID NO: 500163 - DNA, 190 bp, Homo sapiens
  misc_feature (154)..(154): n is a, c, g, or t
tctaggtactctaataggatgtttgaaagaagcttccactctaataggatgaaaaaatgatcatttattgacatcattctcgtttcgtggtgggggctccacaatccactataaagaagattccgctctgaccctaaattgtctactttctttnccactttgctctgacataaattaggggtgtcattct

SEQ ID NO: 500164 - DNA, 926 bp, Homo sapiens
gcttagagcaaagggtgagaggggcagagtggggctaaggtggacgaccacagcactgatgtgacggacccatcagccaggcaactggacctggtgcgatccaggaagactttctggaagaggtgacgtggctgcgtaggtacgaaaggataggacccagagagcaagaggacgataatatctgtaaggatgactggactggggattcgatgagtagtagaagctgggggccctttcttctagagaccgttggggccccttctgtgggcatatgtcaggggttcaacaacgtgttgcgctcgccagcctctacacactctcctcagttctcagctagtcgttgacggaaatcgcaggcgtcgcgtctcagccaggtcggtgttccgtctcgttgacgctgtctgcagagtgggctacactgctttctaggctagggctgtgtggggaagctcttgcctcttaatggaacctcctgcaccctggtgtagctctagtagcgttagtaccgtgtgtcctagaaataggcggttgcgcctctataagtgtggtgcttggccaagtgtactgctgagtattgccccgatgactgctggtagcactgcgtctcctttatcgtacttggctaatggggggactcagtgaagagcatggaggactcgtcctagggtaacgagtatggcaatgtcatccacttcggagttccctgataattgagaaatcgactccaaaggctgcgtccgttgagcgacaagaaaggggctacttgaacggcataccgatcctgagaaagaagtgcactggtcaagatggtggtgaagcccgatctaactaggggcctggcgttgtcgactcgatacccacgacgctggggcctgggatctcgccagtgttaacacgcaagtcccatggcgtctttcaacttcccg

SEQ ID NO: 500165 - DNA, 385 bp, Homo sapiens
caaccacccggaggggggggctttggaaggctatctatgtccggtcaggatacgcacgagtttcctttttgctgatgcccccccacataatgatgagggggaggaggcgtgttggggcccccctgactggaactgccctcctaatacttaatatttgtgcgggacctctcttctttttttccaggggagatggcctttccattttttacggcccgcctcactgactggattctacaaaatggctcagccgataccttcacttcaaacttaactctcatgttcattctaaccatagccagttctgggggcttgaaaacggggcaccctgcaaattagggagattgcaagttggggctgctgcccgaaatgcacttatttggggata

SEQ ID NO: 500166 - DNA, 248 bp, Homo sapiens
cgagtcagttcagagacgagcagaaaaaaaacagcaatgccagtaaagctacagagatcatcggtggagaaaaatacacatcacttagaacagggttatactggacacacagaaggctcaaaggcaaagttggttaaactgaatctctgatgctggaaccggcataaaccaaacaggtattaaaggtttctttggcatttgattgttatttaacttttttttctgttttttttattttatattggggt

SEQ ID NO: 500167 - DNA, 694 bp, Homo sapiens
ccgtaaacctttctttttggggattgaaaagggggggtctcggaaaattggggagtgtttctcagtcctccccccccccttcccgtcccggaggaagttgggaagctgaacttttgcaaaaccttgtgctgcgtttcctcccgtgaaaacgaccactttggagagaatgaggggtagaagggggggggcccatttggggcatggaaaggagaattggttttccctctggagaaaaaactaaattagccccgggggggcccggacctccggttttttgccgggggttgaaatagtttaggggtgggggggaaataaaattttaatttcctccgggccaaaaggccggctttttacccccccggttattaagggggggtgttccccgtttttttgtttaaacaggggggaaaaccccccaggggggggaaaattttccttttttccccccccaaaaaaaccccccccccttttggtttttttgggggggcccccttttaaaaagcgaaccaactggggggtttccgggactttggtttccaaacaaaaaaggcaaaagggtgggaaccttttggggcccccccccccaaccccggggggccaaatttttttcggggtggaatatgctttaaggaaaaatccgggcccaggggaacttgggggaaaaaaatttttttattttttttttttcccttta

SEQ ID NO: 500168 - DNA, 425 bp, Homo sapiens
  misc_feature (249)..(249): n is a, c, g, or t
gacaagaagcctaagaagtccacctggaggtttcatttggaccttactcatccagtagaagatggaatttttgactctggaaattttgaacagtttctacgggagaaggttaaagtcaatggaaaaactggaaatcttggcaatgttgttcacattgaacgcctgaagaataaaatcacagttgtttctgagaaacagttctccaaaaggtatttgaaatatcttaccaagaaataccttaagaagaanaatctcccgtgattggctacgtgtgggtccgcatctgaccaaggaagacttacgaacttccgtaatttcccagattaagtccaagatggaagatgggttccagaagtcctgaaggacctaaattgggcctccggcttggtaataccaatggaaaggtatttctaaaaggaaatttt

SEQ ID NO: 500169 - DNA, 1004 bp, Homo sapiens
agcgggctagtaaaataaacagctaaagctttgcagtcccccaagaagaccacgaagtcctgggagtaatacaaaggttcctgaaattgaggtcaccgtggaagggcctaagtaacaacgaagtcctcaagatcctcagctgttctgaatccgcccagatcgccagagtaacggttctaagcgttcggcttcaagcgcacgagggagagagtgttccgtttgaggcctggaatgccggaagaatcacggacctaaagacagaaagttgaacaagtctcgttcaactgagaagactgtggggaagctcttggccttaaagcaaggctgtgaaggtgccgatcgcgtaatttgagtctttcccggaagactgttagtgtggaaggcttaccgtgagggtgtgccatgtccgaagaccatcgactttggcagttccgaggctggagaagatacgtcagaagacgagaaggcaaaagttaagttcatcattaaaaagcccgaaatgtttgagacggcgattaaggagagcacgtcctctaagagccctcccagaagaagtaaagttcatcgaccaaatgttaatactacgtgcatcaggtgttgaagaccttaacatcattcaggtgacaatgtccagatgatgataatgagaagatctcgtaacagttgaaagagctagagagtaagagaacaagtgaatgacctctttagtcggaaattggtgaagtatggtatggggttgtcctgtgaaacgttccctacaggaccagtcacacattaaccctgggtgtgctggtggtagatggtatgcccccggggggggtccaacggaaggccccaaggtaccaggtaaaacagctgcaagtagaaagaccagagaatccgcagagtttacaaatgcagggcagtagaaccgtaccaggactgtgaaaaaacagggtgacacaaggagatcaaaggccacggaaacagaacagggaacagcaagggaagacaaccaaccaact

SEQ ID NO: 500170 - DNA, 212 bp, Homo sapiens
cttattctgcaagacacgggatctatatcaaccgcctaagaattatctcccattccgattaaatcaccttccacccttatctacacaagtcaaagtacgccctcggtctttacttctcttccttctctcctttatgacattaacactattctcaccagacctcctaggcgacccagacaatttatacccgtagtccaacccctttaaacacc

SEQ ID NO: 500171 - DNA, 400 bp, Homo sapiens
tgggcggggggggggggggggccctttacaaaaaaaggggggggggggaaaaaaaaaaaaaaattgttttttttaaaaaaaaagggggggcaaaaaaaaaaaaaaaaaaaaaaaaaaacccccccccccgaaagaaaaagggggggggttttttttttaaaaaaaatttttttattaaaacccccccccccccagagaaaggggggggcctccccccccctttttccccagggggggggttttttaaaaaaaaaaaaaccccgggaaaatcagaggaggaagtttctcaaaaaccccacgttgttttttgggaaaaaaaggccccccccggggtcgggttaaattttaaacccaaaggcagagccggaattttccaagcaaggtccataaaggtaaaaga

SEQ ID NO: 500172 - DNA, 722 bp, Homo sapiens
attgggtgaacaatggctagggggaagtaacctgtaaaagtaggctatacatttattggtagtttcaaacctcctcgcgggcgttcttgaacatgtcatggacttgcgttatgcagcagaatgaacggggtcaacgtagtccagatgacagcatgggcagtcaggaagcctcaaaactgattcatctctgcctgcaggtgccatgatagcagtgatagctcaactgctgagcacacgtactatgcagtagatgtcgatcatcagtaacatgcattcgtgccatctgtagtctgggtgacactgtgacatatgcatacctgtcagcggcgttgaggctcatggacattgaagacgatggtaacaatgctgaggctgacgcagcagcctcaaatgataagtgaatgccggcggtatctgcacatgtctggattccggctctgctctccgtagctggtctctggctctatgggcggggtgcagtttttatactgggatactcagtcttctggctccctcgtgcataaagcggagcatccttctctctgctgatggcagctttacatactgaacactcctgccgttctgctcgtgtcttcagccactcatgaagtcatgagcgtcagtacagctgatcacacacgctgtccacagctttgcgagcagtctgcatccatatatcacatcagaaggtcgcgagcgctacggtacgctctcgatttggt

SEQ ID NO: 500173 - DNA, 150 bp, Homo sapiens
acttgtctactgcattgtgcttcttaccataggtgctcaggctatagtggctatccggatgacgtaggcatacatgtcattcgctcatcaccgctggtgatcaagccaagtcattgtcactgcaggcatgcagctatgcttgctacgaca

SEQ ID NO: 500174 - DNA, 150 bp, Homo sapiens
ggaatgaacccgctagtcaggtggaaatgttgtttatctggcatctagtaaagcttaaattgtatcaaactacagcaggccatgagatgaacccttttcatcttcccagtatctcaaacacactagagatcttcccccccgtgaagattg

SEQ ID NO: 500175 - DNA, 286 bp, Homo sapiens
tcgatcggccggcccagattctgtggagtattcctttttccttccccctcctccactcctacgcccactcccatgcttgggagaatggggctgggacatgcactgagtgttgcacttttactttaggtagggaggcagtgttgaggtgagccatggaggtctagacactggagccttagtccagactggctacaactacctaactccccgttctagcttccctaaaggtcgatgtccagcacacaagttatctacactttccacgcactagttctctacaatttca

SEQ ID NO: 500176 - DNA, 357 bp, Homo sapiens
  misc_feature (7)..(7): n is a, c, g, or t
  misc_feature (25)..(25): n is a, c, g, or t
  misc_feature (33)..(33): n is a, c, g, or t
  misc_feature (83)..(83): n is a, c, g, or t
  misc_feature (122)..(122): n is a, c, g, or t
  misc_feature (140)..(140): n is a, c, g, or t
  misc_feature (187)..(187): n is a, c, g, or t
  misc_feature (210)..(210): n is a, c, g, or t
  misc_feature (339)..(339): n is a, c, g, or t
  misc_feature (343)..(343): n is a, c, g, or t
gggccancccgggctttctccggancagagcancgctgctggcctggcagcccaggacttctccgtgtacgtgcatccccagntaccgccggggcgggcgggccgccagagcagctttttanaatccagagacagaaaanaaaatctagatgcaacagcgaaacaaagaacccatttccttcctggnacccgtttctgtcccctcctttncctgtccgcctgcccggcatcatcagcccttctggggcgtgtacctctcactgcctgccccaggaccagaggcctgtcccccttccctccccaccggcccgggggagacctcttcacacccaaagatanattntacaagatgaaaaa

SEQ ID NO: 500177 - DNA, 1429 bp, Homo sapiens
  misc_feature (211)..(211): n is a, c, g, or t
  misc_feature (1429)..(1429): n is a, c, g, or t
taaagatgggagtctcactctgtggcccagctgggatgtggcagggggttggatctcgggctcaccacaatctctggcctcccaggttcaacgcagattctcctaccttcagcctcccgagtagctggggattacagggctattgtggccaataccgcccaggctaattcttgtggatatttttaagagataaaagacgggggatttcacncacgtgttggcgccaaggcggtggctcatgtagaacccttctgtagaccctcaacatgtgactccactcacccctctcaggcccccaccaacacggtgccgtggctcaacatgtgcactgtgagggcctcacctgtgcccacctgctggcgctcgtggcgctcaccggcttccacccctctgctctcaccacttaacacgcatctctgtgaccactctcttaacctgcgcacaccacgccttcctcgtgcgcgctcacacatacctccctccctctggcgggatgcgaataagcaacgggcgcgcgcgacacagagcgcaacccacccccggcgcacaccaccccgccggccactcacacccccctcccacccccacggcgacccacccacaccacaccccacccccacgcgaccccaccccactacacacccccccactgcaccccacaccgcgcccacccaccaccctgaccccgccaccaccacgcggcgccaatccgagcaccgcaaccccggccacaacacgccaactccaccccatcacacacacccaccacacaccacaccaaccaggcccacaacacaacacacacccccacaccacgcgagaccgcaccacaacacccagtgagacagccaccacaacaggcacgccccccaaaacacccaccccccacgaccccccccgcggcaaaacccaccaccgccgccaccccccggcggcacccaacccaacaacacacacaccgccggagcaacacacacacccccccacaccacccaacacccaccagcacaaacacacacggcccccatacccccccccaacccccctggcacacaacctacccgcgccaaccaccaccccaccccaccaacaccggcaccactcccacccacctcgcggaccaccgcgcgcccccccacccaccccccacgccaacccccccccacgctacacccaaccgcgcccacccgccccatcacaccccagcacacaacccacaccccccaccggcgggcccacaaacccccccgcaccacccccgcgccccccggacccccacccccctccccccccacccacccaccgccccccccccccaccgcgccacacaccaccccccacacaacaccaccacccccccccccgccaaccccccaccccccacccccccctcccccctccccgcgaacacgccccacgccatcagccn

SEQ ID NO: 500178 - DNA, 239 bp, Homo sapiens
cggcgatttagaggacccctaaattacgcagtctcaatgtattcttgtagtacttcaaaaatggcctaatacagatggatagttgcaaatattatctcacattctatgggtagtctcttcactatgttatttcctttgcaatgcagaagatttttaacttgatgtgatcccatttgtccactttggcttcggttgcctgtttgtcaggtattacacaagaaatcttggcccactccaat

SEQ ID NO: 500179 - DNA, 424 bp, Homo sapiens
tgctaacgggtgattattagagcgaaggaatggaccacgagacagaaataaacttgataaatgattactcttatggcaatctagacatgagatcaagtaggccagcatttagacttgtgagaaaagtccatctaggtatggttgcattactcgtattcttttctgcagatagataatgagtgtaaccgaaggcaattgtgcttcttttgataagaagctattcttggtcatatcaggaaattccagagaaagtccctcctatggcaagtttacttagcgctggtgtacttggtgacggccttggtgccctcggacacggcgtgcttggccaactccaccgggcagcagcaggcgcacggccgtctggatctccctggacggtgatggtcgagcgcttgttgtaatgcgccaggcgggaagacct

SEQ ID NO: 500180 - DNA, 485 bp, Homo sapiens
  misc_feature (8)..(8): n is a, c, g, or t
  misc_feature (42)..(42): n is a, c, g, or t
  misc_feature (58)..(58): n is a, c, g, or t
  misc_feature (122)..(122): n is a, c, g, or t
  misc_feature (265)..(265): n is a, c, g, or t
  misc_feature (291)..(291): n is a, c, g, or t
  misc_feature (407)..(407): n is a, c, g, or t
  misc_feature (445)..(445): n is a, c, g, or t
  misc_feature (456)..(456): n is a, c, g, or t
  misc_feature (474)..(475): n is a, c, g, or t
ttttaaancccatatacgggttcaaactccccttcccccctnccccccaccaaaaaanataaagcggggcacgccggtgccttacctgtaaaccctagcctaccctaagaggctgacacganaggtctgtcccgggtaacagagcaagacactgtcctaaaaacaaaaaccttttgttcgattattaaagactgaagaaagggcccaggcgcaatgggtcatgcctgtaacctcagcactttgggaagccgaggcaggaggatcncttgagcccaggagttcaagaccagncctggcaacacagtgagaccccatctctctacaaacatttaaatattagtcatgcatggtggtgcatatctgtaatctcagctacttgggaggctgaggtggaaagatcacttaancctgggaggtcgaggctgcagtagccatggttgtgtcnccatattctancctgggcaacagagcaanntccttgtctc

SEQ ID NO: 500181 - DNA, 825 bp, Homo sapiens
  misc_feature (15)..(15): n is a, c, g, or t
  misc_feature (25)..(25): n is a, c, g, or t
tcgtttagttactancggatccccncttttgtcaaacaatcatgtctatctgaatggagctctcaagaacatgccattgactaggaagactggactggaaactcattttaaacacacccatgacaaactctccacatctgataaccatcgttaacgcaaacaaacgccccatgaacggcccaacgactgaacacctacctgaatcacaatacataacacaacaatacaatttttttgacaaactacccagacaacaaaccgcctgaagacatacatcaccacacacaccacacagaaactaaccacctccgcccaccgttcccttatcccccacccctacgccatctcacaataccaaaaacacactcccactacacacccaccaaccacctcctacaacactaacactaaagcccccagaatccaccaaccccagaaccaacaccgaccaaccaccccaaaaatcaccacctcttcctccatgaataagcccagacccaccgctacaacacaacccgacctactaacaacaaaaatacaacactcaataccacacagataacccacgaacctcaacttcagcacaatccaccaccctctaccatagacacaaaccgccatcaccgccagccgccaacaacgacaaataccccacaaaacacacaaccaccgaacaacaaactaccacaaaccacccaaccaaatcccttcaaaagcaccctacaacacacaaacaacgcacacaacaaaaacccaacacgccccacacaagctaacatagccagatagaaaacaaacaccctaacaaaaccagccctcactccg

SEQ ID NO: 500182 - DNA, 344 bp, Homo sapiens
  misc_feature (126)..(126): n is a, c, g, or t
  misc_feature (222)..(222): n is a, c, g, or t
tggccaaatagtccaggtttgacaagcccacaggtaatgagtctctagaaagatgaagttattgagaagctagtttcaaattagctccaattttatttacatgttaacaatacacaattttatctnctatccttttcattcaaaggaaaattaaaaccatactctgttagtgtgaacttctgtttctgaactttccagttttgttttttttttttggttacnggatctcattctgtcacccaggctagagtccaatggtgtagatctaggctcactgaaacctccgcctcctggctcaaaggaattctcccacctcagtctcccaagtaactggcactacaggc

SEQ ID NO: 500183 - DNA, 148 bp, Homo sapiens
tctagaggatcccacgtagctccctcggacagctgtaaaggaagagtctctggctctttagaaatactgatcccattggagataccacgctgcatgtgtccttagtagtcatgtctccttaggctcctcttggacattcttgagcatg

SEQ ID NO: 500184 - DNA, 108 bp, Homo sapiens
ttgatctagaggatccctgctgcttgactatttgtggagcactggatcacttgcggcgtcatcgcgctggcacccacgtcaaacatgtggtagttgactttgtcacct

SEQ ID NO: 500185 - DNA, 130 bp, Homo sapiens
tcgcgggacgaagaaggaggagctgctgaaacagcttggacgacctgaaggtggagctgtcccaggtgcgcgtgcactaagtgacagggcggtcggggcctctcaagctctctagagatccgagatcgtc

SEQ ID NO: 500186 - DNA, 1805 bp, Homo sapiens
tttctgctgctgtttgtgtatatttgtttgtgttgtcgtttttgtgtttgtcgttgtctgtgtttttgatgtgcttggaggcgatgagtggagtggaggggagaggggggaggagaaaggggaaggagaggagggcaggagaagttggtactggtgctagtaggtgtgattgtgatgttgtgttcagtcatttgttcatagatgtgcgaattatgatccggttgggattgatgaggaggaggctccttgttaatcagatgtgcggtgttccgcgcgctcactattcattgtgctgctcaattgttgcgcgcgtgttgggggatgatatatcgccacaacgagtgggtggtgtttttggcacgcagcacatttattattagttcggtgctgccagccgctcgtcgtggtgcgtcgtgtatcatctcctcgtgttttatttgtcctcccgctggggatgattgtggcttcgccggggggacgctccctggtgtgttgtttctcctccggcgccacgacggtctgtggttgtttgttaatatcgccgggagcacaccaccttccttcctccttcttgggtgagggttgattctcctccaccatgcctggggttttttttcttgtcgggtcctctgataattgttggtcgccgcgcgccccagccagtctcctcttgtttgtggtgaaagagtggggggccaccgcccgcgtctgttttgttgaggaggaagcgcaccaggcaggaggccagccaggttgtttgtattcgtcgatgggtggggtgcgctcctttgtgggtccccctgctcttacaaagacagctggggggagggaggacacaaacacacaccgcggcgcgggtgtgtgggtggttgttgcgcgcacgacagacacaccagcgctcgtggtggagcagaagagatgtatgcagctctgtagtgtggggatcctcgctctctcgtctcaccaccgggggacgggcagcactccttctttttgtgggggtcagcggcgcccgctgcctcatcacgctctgtttgtgtggatggaagacacgactctctcacaagaaactgttgtttttcgtcccacatatcgccctcagcgcgctctcccgcgcacgaccgacgcgcttctgtcttctagaaaagagagagagagagagatgagtcttttgggagacacccgcgagaggagactccacactccgtctgttgtctcgctctgagacgactgtgttgagaccccctccgtgggagagaagagaagcgtgtgtgccacccgaccgcccgcttctgtggtgatatatctcgccccgcacttctcctctctctctctctgagggagcgcgcggagctctccgcccgcccacactctcacaggggagagcctttctctgtttgaagaggtctcacacgcctgtgaggcgccacaccccacaggtgggtctctcctccacacccccccgtgtgttaggcgccgctgagagaggcgtcttttggccggggctctcctgaggacaccctgggcggtgtatgtgggcgccacggtggcgggcgtctccgctgcccccctgccccttcgctctggcgccccgaagatcttgtgagaaagtctctggggagccccgtcccccactttgtggagggggcacacatgttctccgtctggtgctccccaaataccccctttttttttgggggtaaagaaaagggcccgcaaaaaacacaaaaaattgtcttttttgttataaaagataaagaaaaaaatgggtttttgattaaatagggcccccgcttttccccaca

SEQ ID NO: 500187 - DNA, 357 bp, Homo sapiens
gctgaggtgggtagatcacctgaggtcaggagttttagaccagcctgggcaacatggtgaaaccccatctctacaaaaatacaaaaataagctgggcatgatggcgggtgcctgtaatcccagctactcgggaggctgaggtgggagaattgcttgaacctgggaagcggaggttgcagtgagccaagattgcaccattacactccagcctgggcaacggagcaagactccacctcaaaaaaaaaaaaaaaaaaaaaggacggcctttttccccggttttaataaaggggaaacccccgcccaaaaggggtaaattgcctgggggtacccttttaagtggaaggaacggtgggattt

SEQ ID NO: 500188 - DNA, 404 bp, Homo sapiens
tatttaacgggctggtttaatttaaatgggctggatctatgtaatcacagaggccagtattgtacagccaatggcccgaatgccaaaaaaggtcacagggatgcggagaatgaggatttggcgcgggtggctcaaaaaatacggtgaatctaaaaagatcgatcgccacttgtatcacagccggtccctgaaggtgaaggggaagggtgtcaacaacaaggggaatctcagggaccacattccacaagcggacggcagacacggcccgcaaaaagctccgggctgaccaggctgaggcccgcaggctctaacaccagggaagcacgcaagcgccgcgaaaagcgcctccgggccaagaaggaggagatcatcacgacttcacccagggaggtgccgacggtggg

SEQ ID NO: 500189 - DNA, 226 bp, Homo sapiens
taatataccaagcactggaacattaaaagatagctttttttgtcttttctttttttgttttgagacagtattgttctgtcatccaggctggagtgcagtggcgtgatttcagcttactgtaacctccgtctccagggtttaagcaattctcatacctcagcctcccaagtagctaggattacaggagcatcccagcacgtattttcagtagagacagggtttcacc

SEQ ID NO: 500190 - DNA, 804 bp, Homo sapiens
ggagacgagggtgatcggaacctcagagacgcccatcatcatcgtgggcaacaagcgggacctgcagcgcggacgcgtgatcccgcgctggaacgtgtcgcggacctggtacgcaagacctggaagtgcggtgtacgtggactgctcggccaatgtacagacgtggctacatcgctgcgtgctcttcagtgagcgtgcatcatgagcgtcggctgcgcccgttgcaatgcacgtgcacgctgccctgcgcttccagggcgcgctgcgccgtgaccgttgcgccttcatgtgacgcctgggcgcccctcgggttgcccggttggccgatgcggagggctggtgccgttactgcgcggacttggcgcgggcagcgcggcgggaaatgacctgtgacgtgtccccgggctgagggcccctgcagccaggcagcctcccgggtggacgaagcactatcggcgagagggaggccctcggaaatggcccaggccttgccccttggtcccgcggtggctccctgggggacaggccggcttccagcggctgtattaggttgcagtgtgcccggggccggacccgcgggggtttgcccaaccacgccgtatggcggcgatgggcggcttcgagcgtggcatggagcgttgggggttggcgcagttgccggccttgtgccgggcccccccagttgttctcctcccagacgtggggtctggcttgggccggggtcttcctttcgcggtgttcggccccacccaagcgtggggggcgccttccttgtttcacctacctccgagccccttgcagtgc

SEQ ID NO: 500191 - DNA, 415 bp, Homo sapiens
  misc_feature (328)..(329): n is a, c, g, or t
ccaagagacaacgcaggtaactctccaaataaaaccacttgagaaaagccatctactccaatgcttccagcaatcgtctcggaaaaaaaaacaagtctacggtctgcatctcttggaatctgcagctgctgaactgcagagtgggtgcacgtggggaggagtctgcgggcctcaggatggggacttcaagccaggcttgttaaagtgcccgagtgagcgccccgcgggaatccaaaggggagcgactgggttgtttcccctgggtagttttgttggatgggttggtttccttgcccgtcgcttcttacctcctgggatagcgcaaggnncccccgaggcggcgaagctaaacacaaggcaagccgggttggttttttccagaaactccccaagaacgccggttgtcctcgctttc

SEQ ID NO: 500192 - DNA, 290 bp, Homo sapiens
aaaaacagacatctggtgacacttaaataacatattagtttcatcccttctatcacaagaaatatacaaattctaatgtgaaagacaacagtgactggaagttttttcccagcaggctacctagaacatccctaaatgttgtaacttatatccgtccacccagaatcacacataatcacttatgctgtaatacctgccatatccatttatttgcattagaaaaacaattcacattcctctctgaaaactgataagctttataaagtggagttgagaaatctagacaaaag

SEQ ID NO: 500193 - DNA, 287 bp, Homo sapiens
aaagctcagcaggcaagagagaacatgaaaagaaaggaagagtaagtactgccagtcttctgtaaagtcagatcattcagtctaactgaaaacctcagatatttggactcataaatatgggacctcggaaacagtatgaagcttaggaattgactaattattagatattccatatttatttcttccctacctaaattatattaccaccacgggcctcagtttgagaggtacagcttcttaatataaagtcatttcagaccagattaaattaggattatcagcaggga

SEQ ID NO: 500194 - DNA, 212 bp, Homo sapiens
agcacggggtgcctgtccttgccctggcatgtacttacctgtgtgactggaggtgacgatgtcgtaccctatgcggcctacagtttctcatatacaacaatgacagagcaagactatgataccttaagttcctcaagttttgtgacattttgtgaattatttctatgagccctctgctgatgtagatgtgctattattatacgagcgcttcc

SEQ ID NO: 500195 - DNA, 218 bp, Homo sapiens
  misc_feature (21)..(21): n is a, c, g, or t
ttctatataattttacgttgnagtgctaataaagacgtgtctttctgccgcatctctgtttatttccacatacaacatttgtttaaaagacattggtatcagctgggcatggtggcgcttgcctgtggtcccagctactccggaggcttaggtgggatgatcatttgagcctgggaggcagaggttgcactgtgctgaaatagttccactgcactcca

SEQ ID NO: 500196 - DNA, 226 bp, Homo sapiens
cctttttaaaaaaaccccctttgcccttttgctagattgtaaaaaatttttttagaaggcctaaaacatgtttttccttcaaaagctaaacttttcccagccttttggatttttgggttggcagggggggatttttaaaccggaatttggtttaaaaaaaatttgggggtaaaaaatgtgaaaaaaactttggggtttccccttttaaaataaagggttgttagta

SEQ ID NO: 500197 - DNA, 164 bp, Homo sapiens
tgtttgtggggatccatatggaaagtcagttctcgatgtgggcttctagcttggccaaagttataataaggataagcctttggtttggatgggcataacacgctattataagggttaaatgggcctcatccgggcagtcagcactaatggttctgtgaccatac

SEQ ID NO: 500198 - DNA, 320 bp, Homo sapiens
  misc_feature (89)..(89): n is a, c, g, or t
tgaaggaagaaccgttccaaaatttttcctttttcccaggaagccctgggcccccaaaaagggagacagttttgtttaaaaatttaaantggccccccagttgcccggcccggttatgcccgtccggaaggtttataaaaaggaaaaagctcgagttttccttgaggaaaaaaaaaatttcaaaccctttgttagtttccgtatggcccgggccaacgcccggttttttggcataggggcaaaaaaagccaaggaacccccagaacaggatttttaaaaaaaaaaataaagccctcttgggggtttggaatcagtgggca

SEQ ID NO: 500199 - DNA, 282 bp, Homo sapiens
cccccccccccttttttttttccccaagacggggggtaccccccccctccccctgggggggggggggggccggcctttttcccggtgggggccccctttgggggtttttccccccccggggggggattttttttttaaaaaaaattaacccccccggccggggtttttggggggattttttaaatttttttttttttttttggcccgcccccaaatggttttttggggttttttttttccccggggtttttccccatttattttggggcccccttttcccca

SEQ ID NO: 500200 - DNA, 132 bp, Homo sapiens
  misc_feature (82)..(82): n is a, c, g, or t
  misc_feature (119)..(120): n is a, c, g, or t
catcatggacgaggactactacgggagcgcggccgatgtggggcgacgaggctgagcggcggccagcaggatggatgattcntgtgagaacggagagcgaatgaatgcgggaggcttcnnagcaagcaaatg

SEQ ID NO: 500201 - DNA, 785 bp, Homo sapiens
  misc_feature (785)..(785): n is a, c, g, or t
ggacgcgtgggtcgacccacgcgtccggacccacgcgtccggacccacgcgtccgagctgcttgggaggctgaggcgggagaatggtgtgggcctgggaggcagagcttgcacgtgagccgagatcatgccactgcactccagcctgggcaacagagtaagactccgtctcaaacagaaaacaaaaaaaatccagggcaagcgccggagcggctcactcgcggcagcgcgcgacctcggcgctcgctcgggacaagaacccttccgcatcggaaacgccgggcccagagccaccatcccacaccctcccgacatacccgggcaaaactcagtcaaaggccataaaagcacaacgcaaggcagcctcctcggggcacggcagagagaccctacgggacccatcactatcacaactccactaaacaagcgggacacaacgggggagaaccactggcaccaggaaccccacaacccagcaacacttaccaacccaataacaaaacaaaatacaacaccagggcgacacaccacacaacaaccgagcgagcagtggctaacccgcacccccccaagacccgcggccgcgcaactacagggggcccgggcgcccacaactagcgcgaccacaaactaacccagcgcgagaccgcgccgcaacagccgacacccccaccaaaacaacagcaacacagcgaggaagacaacaacaaggggagcaaagacaggacaaacaccccaccgacacgacacacagcgaacacccgccagagacgagccaaatacccn

SEQ ID NO: 500202 - DNA, 182 bp, Homo sapiens
caggaggatcgattgagcccaggaatttgaggttacaaagtttacaaagctatgattttgctgctgcactccagcctgggtgacaaagtgagaccttatctctattaaaacacaaaaaaagcaataaggtccataatcaatttatcacttatggtaatggtaagagatcagggggatcctct

SEQ ID NO: 500203 - DNA, 313 bp, Homo sapiens
ctcacattcagcatctgctttaccgttatcgtctcgtgctccagtgacattcgtacagctcgtccagtgtgtcagccagtgcattgttaataagtataacaatcagagcaatgacctcagcatacgtgagtgttggtatacatgcttgtgctcttgagactatcggctaatattagacagcatcctcgtaagaagcctttgcatgatggcccctgagtgttagagtgtccgtagtcacacgagtcgcagttggtgctcataataagtaagtatctctaacgtttcactcagtacttagtacaggcaagttcat

SEQ ID NO: 500204 - DNA, 293 bp, Homo sapiens
  misc_feature (6)..(6): n is a, c, g, or t
  misc_feature (27)..(27): n is a, c, g, or t
  misc_feature (49)..(49): n is a, c, g, or t
  misc_feature (82)..(82): n is a, c, g, or t
  misc_feature (92)..(92): n is a, c, g, or t
  misc_feature (104)..(104): n is a, c, g, or t
tggttntccaacggggggctgcagcancctttccttacatcccccaccnagccaggcacccagggtctgaatttctccacancatgggcaanacctgttactanctgatttttttcataatggccaccgtgataattcattgtggtatttatttgcatttctctaatgactagttatgatgagcatccttcatgtgcttgttgggcatttgctgtcttctctgagaaatgtccattcaagtcctttgcccatttttgaattgggttgttgattaacaaagttattaggatatt

SEQ ID NO: 500205 - DNA, 285 bp, Homo sapiens
atcccagtcagttacacaaaaagagcagtggttcatttctagatgttggatcttcagataaattctgccattttcatttcagcttcctgaaagtcagggtcggcttgtgaaacagttgttaaacaacatgctaagtgtgaaatgtcaaccctcactctaaactttccctgttcagcagcatcagcatgcaagcacttcattgggttttatagtggatttctgatttaagatagtccattgaagacagggcagtttgaaagttgttgtgtaacaagattgggtacg

SEQ ID NO: 500206 - DNA, 179 bp, Homo sapiens
tgggcccaaacttacgcgatagcgtagaggtgtttgtagtattctctgatggtagtttgtatttctgtgatgttagggtgttgattttagatctttcctgctttctcttgtgggcatttagtgctataaatttccctctacacactgctttaattttggaatggagtatcgcgtcagtt

SEQ ID NO: 500207 - DNA, 631 bp, Homo sapiens
ctacaccctgagggcgtgctggtgctagagccacagccctggacgtcgagtggcaagagaaagactcttacagaaacgatctacaggaactactaccgaatccacttgaggccagagcagttcagtgcctacctgacatccccagacgtgggcttgtccagctatgagcttgaggccacaccgcacaacacctctaaaggcttccagcgttctgtgtacctgttccacaaggcccgaaccgccagacactaagtggaccgctaaacagaaagtgtgaagaggctggcctcgctgatcataaggacctgggggaagaggaaagtgttccaaggactttccttgctgacttcacagcctcctccctatgcctatggcacctgcgcagcaaggctggctgtgctggagtcaccatgatcttgctatgccccagactaccaggctcggatggatggactgtgtgctgacctctgatctcttatggcatgtgaggtgagaggatatctgctctagccctttactccgattctcccaaggagagagagttccatttctactaggacattgtacctaggtctggtgcctagctgcgtttcagtggaccatggatagagggactgagggtaagcggggt

SEQ ID NO: 500208 - DNA, 396 bp, Homo sapiens
aattgactggccgagtggataggcgtctgtgagacggtatgagggagtgagtaggagtacactctcggtgggatctggcccagcatggcagttcatagtccgtgattgcttatcttactgcaagtgtctttgaccctccttatcacctggttcctctgttgggcccaaaggtcgggagtaggagacagtatcccaggctgacaagggctggccctttaccttgggcaccttgttaatttggagccgggtgcccattcccgcacctttgccctcccaggggttggtagtgtgggaagcccatctcagttcctgtgacttcatgtctcaaaccaaggatgagcgtctggtctctgctatgatggtggtatccgaggcctttccctgcccagtctggtg

SEQ ID NO: 500209 - DNA, 878 bp, Homo sapiens
  misc_feature (563)..(563): n is a, c, g, or t
ggcacgagggagagagagagaaatagagagagagacagagagaggagagagagagagagagagagagagagagagacagacagagagacaggagacagacacagagagacggagagacagagagagagagagagaaagagagagagagagagagagagagacaggagaaaaaaaaactccggtgtgggctcccattcctttaaaagggtcgccacccactcgaatgtgccaacgcgttgatacttcataagaggacttctccccaagaggggaggggagtcgtctgtgcgctcttctccacaagagcagcatagtacgaccacggtgtggacaagcgaaagagctggtcggctagtataatcgttctatcgctgtactacggcgccggcgcactatcaggagacatctcatcgtgtatcttatcaggaggaaaagcatgtttaatcgtcagcgccgggctgctgtcacgaggctctcggtgctgtgccgaaagccgccccgactagtgctgcagtacgctgtctcttttcctcctcctctcattatttttgtgagagacaacngactgtttgatcatcccccgggggagggggtgtgccagctgctgtctgtgaggagtattactgcatactcaccgatgtcgtatgacatagtggtggttgagtgctcgccgtgtgttgtgcgtgtcagctggtggtttgtcatcatagaaaacgcgattaacacaatgactaatggaggactggcgagacgacagcaggccaagaatgatgtctttaagcagatcactgcagaggaagcactccgtgagaagagggagagaaagcagggagaagagggaaggcaattgaggttgggatccctcatataaaaacaga

SEQ ID NO: 500210 - DNA, 214 bp, Homo sapiens
ccgaattactcctataccacagccacagccatgccagatctgagccacgtctgtgacctacaccacagctcacggcaacgccagatccttaacccactgagggaggccacggatggaacccgcaacctcatggttcctagtcagatttgtttctgctgcgccacaatgggaactcccctccttccttattttttaacactgccttcaatcctgc

SEQ ID NO: 500211 - DNA, 141 bp, Homo sapiens
ccagctggtaccccgcctacctggtcgcctttaaattccagctgttccgcaacctcgcattgtggcagcaggcgttaatggttatggttctttcactggcagtagatgtcattgttttttgggctgaattcctggtcatag

SEQ ID NO: 500212 - DNA, 100 bp, Homo sapiens
agcgaagacaatgcgcctacatcatccacaaccgcgtacttttcgcggaaggaactaccctaggatcaaccgtccacaaccttctaaccgggaaccaaac

SEQ ID NO: 500213 - DNA, 116 bp, Homo sapiens
ctgctttgcttgtgggaaaagcatctgtacaaatccctaatgcactgacgattctacagaacacttgactctgctcctcaaaactgcacaaggtaacccaaaacaaagaaagtact

SEQ ID NO: 500214 - DNA, 369 bp, Homo sapiens
  misc_feature (218)..(218): n is a, c, g, or t
  misc_feature (223)..(223): n is a, c, g, or t
gtgctctagatgatcccggctatcacataatctctgcttttaggagcatgcagtgaatgaaagtaggctggagaaaggaaggtgatagcacaacaagaagcaagctagtacggagtggtgtgtccgggacttcacccggtggcactaacaggctatttatttaataaactttgctttgcttgtgtctttctttcctctctgttttttggaattatttngtttngtggaatattcaagacacaattctttatgatggaaaatgaatgtgttagccttcagtcaatgtccaggggttcttgttggagccttagaatgaccactaaaggaacgcaaagaaaagtgtctttgcaggagaagataatgtgatag

SEQ ID NO: 500215 - DNA, 469 bp, Homo sapiens
agctcggacccgcggttatgtcttacggaactaggaaagaggggctggtcttcctgagttgaaagcccacattgtcaagtttaattttaggtgtttgtgggagggtagaccagagggaaggggacacagcagggaccctgctcagggagacagtgcttggcgttttgagagtgggcgggtcaggactaaaagtgcagttaaggaggacagtgtaatgggcaggagggtgagtgagggagacagcgtaagacataaccgcggccgcggttatgtcttacggatctcaactaaacttattgtggtaatcatatcacaatatgcacaggcatacttcagagacactgcaggttcagtttcagattactgcaataaagtaaatatcacaataaagtaagtaacatgattttttggtttcccagtgcagataaaagttatgtttacactccgtagccgtaagacataaccgcgg

SEQ ID NO: 500216 - DNA, 423 bp, Homo sapiens
agattccaagcaagcatagaagatctggtcatcagttcttccatatgtaattgaagtcatcatcaaggttcctgatcggccattctggctgtacataagcttcacatgcctctagtcctgtgtgacaggacactgaacaggtctgggtcagcgttaaagcatgcggcagcaaggatgggcttgtcaggcgaggttctgatcaccgtcacaagctgcgcaagcacatgcagtatagcagcctttcctgatgagagatagaaaagagtcacgattggcagcttcctgtcacaacaagtcaaaggtcttgaggacaggagcatacaaagcacacgaagccaaatgtcgttcaggcagggtgaagtactacacacacatgccatcgtagcacataatcagtgcatagtgcaagtgagcagttggccg

SEQ ID NO: 500217 - DNA, 104 bp, Homo sapiens
caagcaagtgctgtgaaataacatcatcttagtcccttggtgtgtggggtttgttttttttttttatattttgagaataaaacttcatataaaaaaataaaaaa

SEQ ID NO: 500218 - DNA, 898 bp, Homo sapiens
  misc_feature (523)..(523): n is a, c, g, or t
  misc_feature (620)..(620): n is a, c, g, or t
  misc_feature (623)..(623): n is a, c, g, or t
  misc_feature (648)..(648): n is a, c, g, or t
  misc_feature (655)..(655): n is a, c, g, or t
gaaatatattatttcctttattcctttcagcaatccatgagatagctattataatcctcatttcctacatatggaaacagggccaaagaagtcaagtcaaataatctaatccagatttagagagttggagattggtagagacagactagaaatcaagatttatctaaatcaaaatctatgctcttaaccatcattttgttagtctgaatcggtgcaacctaactcaataacataacccaaggttttatactgaactgtgtttggtatgattgtgagatgtcaagaccgtcttcccacaggcacacagaatgagaaatcctggctatattgctgttaccatcatgctttctatagaattggcttttattatgtttctttgctcctttataaattctcaatgatgtgactacatttttacattattaaagcaaatagattggcccataactagggaaatgaatagagatggaaaagtaaatgcttggcattccttaagccctgggtaagtgtttatgctcaatanaatgtaaataatattactgaaagaggctgtttatatgggagtaatggtcagtgacaacactggagagaccaggtagggaccggttgtgaccatatcntcntttatgttcttgatgacagcatatntgattgntctcaggttaatctttgtgcggaattcctgacctaacctcttttcactgggacactttggccagtgtcctttctccctggatcttttacacctgcgttacctcggaggccagcttcttggggattcttcgcatcctttctggtctgggtcctccacgtgggtgcccccgtgtgggccacgcttgaatgctttggggtccggggcacggctcgaccccgggggggggaaccccggagttgaatg

SEQ ID NO: 500219 - DNA, 859 bp, Homo sapiens
agcggattgaataagcgacccggcctcctagggggtcgtcgtggtccagacagtttagcagaacagcctccgcggctccggggagaagcaagtatgttaaggatacctgtccacgacaggccttagtaggcctttctacgctctcctaacacggactgtgttcgaacacactgccacagcagcaagcacaccttgacttgaacgtatttgttgacctggtcagtctgtcatggtggaaccgggaacgacgtcctccaagcttgtgcagacaggttggcatgcagatccctcgattctgttatcatgaacaggttgtcctgttgctggcaacactgcaggatgtgccttgttgaacattgagaaagcccctaacggttgctacgctgcttgtgccatgccagtcaatgacacgggttggcaatatcctaacacacactccgaacacatccacacaagccagggcaggtgtgcatggcagttcttattcagccaaatccacacatgcgactgtcctcatcttgtgaccagggcaggtgcaatggtgatctgcagcgaaccagtcccatgcatgtccggcacacatgcataggcagccgcatcttctcacaacgggcgacagccgtgcctgtgggaccgcacccagacaccataggggccccacacggctaccagaccacctcatactcaaccacacggcttgctacttacacgtggttaccctcgccttgcaatttcacgcgtctatgcaaacgtgacgcacctgccccgggcagtacgacatcaaacacgcgcgacaacccaatacagccagcagggcacccggacatcctgccaccgctggggcaccctcccagcttgc

SEQ ID NO: 500220 - DNA, 355 bp, Homo sapiens
ggggggttttcaaatttttttaaaaagggggttgggtccccaaaaggggaaagtgaaatttgcttttgggcccggggggggacgcccccagcttcctttggggggggaaaaagttggccttttgggtgacattccaaaaaaagggccaaatttgcccccccccttttgccccgggggggggggccccccaaaggggttttggaagggttccccctgcaaaaccctttgggcccccaaaaattaaaagcctttttgatccagggggggtagggcccaaattttgaggccttttaaaacccctgaggccggggggccaaaaaaaggtttcctttttaaaaaaaaccttaaattttta

SEQ ID NO: 500221 - DNA, 134 bp, Homo sapiens
ttctagaggttcccgtagcatttcagcaggacagttatcaatataacaaccccctgcgataacccaattaccaaacgccccgtcttcgtctgatccgtcactaattcacatgcagatccgtacttcgtccgtat

SEQ ID NO: 500222 - DNA, 425 bp, Homo sapiens
caccacttgggatgaggcaggtatcactagaggtcaagagttcaagaccagcctggccgccatgttggtgaaactccatctctattaaaaatacaaaaattagccaggcatggtggtggatacctgtaattccagctacttgggaggctgacacaggagaattgcttgaacccaggaggcggaggttgcagtgaggcaagatcacaccactgcactccaccctgagcaatagagtgagactccatctcaaaaaaaaaaaaaattacctgtggtggtttgcacttatagctactcgggaggctgagttgggaggatcacttgagcccaggagtctgaggctacagtgagccatgatcacacccatgtactccagcctgggcaacagagcaagaccttgtactcaaaccaataaatatataaagtca

SEQ ID NO: 500223 - DNA, 310 bp, Homo sapiens
gttgactcggttcacctagacaaagagaaacagactgaaccaagacactcagtgccacctcaggccccgggtcacgccaggattccggacccgtcagctttgaggttgatgatgacccagacgttgacgtggccctcgtgttggaacaatcttgtccatcccctacaaatcgaaggtaaggagtccctaaatggacggagccaaaccaagttggacaaaggagccgacccgtgagtccgttgttctcaggtcgcacaccatgtccggagctgacctgagtggcctacgacgctgtcggtgacatcgagcc

SEQ ID NO: 500224 - DNA, 183 bp, Homo sapiens
accgtccgctaatgaactgcagtacacggagcatagcttcctcacaggagccaggacatgtaaggagcttgcttggctcagaccgcatgccttccagtacttggccaggctcatcacacacacccagcagtcccgaaaatcacactgtgccacaggcgtgctgacagtctgagtacggacccc

SEQ ID NO: 500225 - DNA, 726 bp, Homo sapiens
  misc_feature (120)..(120): n is a, c, g, or t
tagctaattgggtaatacctcaacttcaatgaaattgaggaaaattgggatttaagaagcttgtcttatgtgagaattaaaccccggtctttctattcctgatgcccttaaaacagctangtaacaaaacaagttcaaagaggaatgtttgaaagaaaagacttgaatttcaaattggcaagacagaattgttcactaacgctggccttgtgatttgaaatggccaggtgagaagatggtggctacccttatttaacaattctatcagcaactcagttttggttcttggtagtgatatacgttaagattttagcaggaaaatttagtcattgagcaatttgttcttttggtcacttgctccttttaaagacaatgactgggccagactagaaattcttgaaataaagccaatgccagagaaacggagaagatcgactttcaggaaaaaaaaaaaaaaaaaaaaaaagggctggtcctttgatttagagctgtctgaggacatcccgaaagctggcacacctaactttccaaaatttcctagaaattggggaagcaggacaggtaattttgggagacacagaggactagggttggggggagtagacaactatgacaaagcagccacccttaccttgttctttttattttcttattttttaataaccataattaggttatcgtgaagatactacattttcaagaggaggttattggcatggggatcct

SEQ ID NO: 500226 - DNA, 116 bp, Homo sapiens
gcctcgaggacccgctgactatttgtgttggggttttttgggtctaaggtacttctcttattctttaaatggtccttgtaaatttttaaattctgctaactttagcttggtaatca

SEQ ID NO: 500227 - DNA, 627 bp, Homo sapiens
  misc_feature (311)..(311): n is a, c, g, or t
gggggcttcatgaagcctgggaaggcccgttggttggtgctggacaagaccaagcaccagctgcgctactccgaccaccgtgtggacacagagtgcaagggtgtcatcgacttggcgaaggtggaggctgtggcacctggcacgcccactatgggtgcccctaagaccgtggacgagaaggccttctttgacgtgaagacaacgcgtcgcgtttacaacttctgtgcccaggacgtgccctcggcccagcagtgggtggaccggatccagagatgcctgttggaagccttagccttccaaccctggccggntggtttggtttcggttgttacccacccataaggggtggcaaggccggcccggcccatgttaacagcccgggccttggacagaattaaggcccagagccccaggcaatggtgtgtaaagcccccgtccccgccccgccccggccggccggccctaaattattttggcgtcacagctgagcaccgtgccgggaggtggccaaggtacagcccgcaatgggcctgtaaatagtccggccccgtcagcgtgtgctggtccagccagcggctgcaggcgagtttctagaaccagagtctatataaagagagaactaacgcc

SEQ ID NO: 500228 - DNA, 2076 bp, Homo sapiens
  misc_feature (400)..(400): n is a, c, g, or t
  misc_feature (1147)..(1147): n is a, c, g, or t
  misc_feature (2076)..(2076): n is a, c, g, or t
atatgaccactgattatgtcagcatgtagcgctggatgacagcgggcgaggagacccgcgagaggagctgtgcagtactgtagaaatggggattccagcggagacaacgggtggtaccggcatcgagtgggcgaggtgagccagcaggccccagggatccgcagaatgagagagaacgtcgcgaccgccggccgcagggactcgagaaccggcatcgcggaaagacagaggagggagtactcagcgcatacggatgataccgcggggcgtgtccaaagtgtactacagtaaatgcagtgactatgtgctggctgtgatgcgccgtattcgtacttcttctttcaatccaagcgcggtccctttcaaaattggacactaactggagacactttattccganctcgggtgactcccaagggtgatcgcgtaatacttgcgaggagcaggtggaagtcgatcccaaagacggattctccaatagcctggagccggcggaagtaacacgccatgcatatccccgatggtgtactgcctacggacgcaggtcattttccaatgtgcttttctacaccgcgtcgagtcttgggctttcacggataactcggcgggagcaccttaactgatttcttgggccatatacccttggtgcgcctatacgttcgcctaggatcccacgcattggaacacgcacaaattcgaacattagctttgggaacgcagggccttgccccaatgtccacatggaaggacagcgttaacccacgtgctacatctccctggtggggaaaaccgcgcctcttttgcaaaactcacgcattcccttacctatattgcgctggcatacagcgggcgcgttaaaagcgagtggccaaggggcgcacccatctgagaagccactttctggctccccagggcgcgcaccagaggcacgcaatggggcagcgcgcacgttgtagccgggacaggttcggagaacgattgctctaggctcgccaattaacggacttgcttggagtacccgcctgcgtatacttggacctcaaaatacgcacgccttcacactccccaagcgctagcggcacatcttggcgcacacatctcgaccattcctcgggccacctcgtgcgctggacccgtgacacggaantgcgcgacgttcgacacgaacaacgatgcttcgtatgtattcgcccttctatacctacaagatcttctgacatgctcacgctggaactttaccctttgactcatccgactacgcgggccacacgggctcgggcgacacagaagtaccccttcgagcacgacacttacccccaacgatccaacagcgacgtaacatgaactacactgaaactctctggtaagcgtcaccaccggagaggtcaagcaagcgggcgctcccagaccacgcacatgacgagtagaacaggcccacgtaacgacacacacgccatacacgagacacactcgcagacacgagacgcgtcgagcgccacaccagcaggcaaacacgcagcaggggcgggcactaacaaccacacgcaggaggggcgacagcacagcacacagtaaaacacagaacagcagcagcttgcagagagctcaaaccacactgacaccaaaccaaacgacacacagccgagcagttacagaggaccgaggaagaccactccagaggcggcacacaaatgctggtcagctcgcataacacccgcaccgcataagagagcacaacggtacagtatgcaatatctagcagtcacaataccactaacagtcacggaacacagaacagtagaagagtaccacccaacacaacactactccaatagaaactcacaccaaatagcacataacctacacacatagcagcagacacataatgacaactaaataccaaatctcacaagccacgcataacacagacgacaccaacctcacacacacaatcaggacgcagacacagcagccgccagaagtcccggcgacatacctataagtatcacagtccaaacccacaacatcaccaccaagaatgccaacacaccaaatgaggtcctagcacatcacaan

SEQ ID NO: 500229 - DNA, 102 bp, Homo sapiens
gcggagttaaaaaagatctgaagttgagccaactcctttactcagttcctatatgtgttttgtgtcttgctgagaattgaggaagagtgtaattcaatgcag

SEQ ID NO: 500230 - DNA, 268 bp, Homo sapiens
cgagtgtattcgggggagaagcttcgagaacaagttgaagagcgcctgtccttctatgagacttgagagataccaccgaaagaatcttgatgtcatgaaggaagcaattgttcaggcagaggaagccgctcctgagattactaggaagctgtgagaaacaggagaaagaaacgctttaaagaaggaaaagaaacggctcgctgcacttgccctcgcgtctatcagaaaacagcagtagtactccaaaggggtgtgaagagatgagtga

SEQ ID NO: 500231 - DNA, 1521 bp, Homo sapiens
  misc_feature (1)..(1): n is a, c, g, or t
  misc_feature (712)..(712): n is a, c, g, or t
  misc_feature (1082)..(1082): n is a, c, g, or t
  misc_feature (1084)..(1084): n is a, c, g, or t
  misc_feature (1096)..(1096): n is a, c, g, or t
  misc_feature (1105)..(1105): n is a, c, g, or t
nctcacgacagcgctgatgctctgtgggcttttgggctacgatagtacctttttcaagatgcggtcgttgctgcgtcgtttctccggtgttgttcagcacccccgcgctccggcttctggcccaaggtatttctgctgctcgtggtcctttattgtgcgtctgcacagtattctttctctttgtcgcccctgggggcttattccccgcgtgtctctcccccagaagttggtccggggttatgctctgccccggtgttcctcccccgcgcggggatatggtggcaacgtcccccaaggtgttccccgtcgcaagattgctgcttaaatggtgtttcttggggggttttcctacaccccgctccccggcacgatttgtagaggttgggcacttgtcccttggaagaaattgggagaaacgaagaaatttggaaaaaaaagtggggaccacaatccaagacacgtggtgcggtgtcagaacccaggaacactgggtccgttgtccaaatacttccgttgtgaacggacccccctgggtatgttctcccccccccccccctgggtgaaagaagtggaggttatagcccctgccgcgtggttgggaagcgcacaacggtggaacattttggtccacccacgccccccccagaatatggtttaaagttgggaattcgcaggaacacatgtattagcacggcacttcactgtgaaggtntttgagaagaatcgtccccccacatttttgggaaatttgtgagatgagacattccccacaattcgtgccgttgccttgtcgttgtgtttaaatagttgtggaataatggcttgtaatagccacgcgtgaagcacccctgttatatgggcacgcacaccaaaatgttatggcggtctatatataataaaatgggtgaacacacatggagacactcgagtctttgctttcaataaaatgtctacactctttgagagctgcctcgtgtctctccacttgtgtttgaatgtgattctcggagggccacagggtgttggctctccaccacaggtgaaggctctctatagccacagggcgtcggcgacacactctnanagagaggtgtgnggggagacncacagagagagattgttctctctctaatgtccacacacactctcacacacacttctctgggttcacgagaagtgtgtataactctcttcacatagtctctcttgcgcacactcccacagagctctgtgttatagagattagattataggcggtgccactatagagttaaactctcccactttaacacaaactctctgtgctctagaaatttgtggggagaaaatttatgaaaataataattgaccacggagttattggaaaatttgttaataaatgagatgaaacacttttgtcacataataagaattcactatttacttcttaataacacatttgagataaaagtaaaggcactggttgtggttaatttggtttatttttgttcccccagttataataaatcataaaacttgtta

SEQ ID NO: 500232 - DNA, 910 bp, Homo sapiens
  misc_feature (344)..(344): n is a, c, g, or t
  misc_feature (590)..(590): n is a, c, g, or t
  misc_feature (616)..(616): n is a, c, g, or t
  misc_feature (618)..(618): n is a, c, g, or t
  misc_feature (626)..(626): n is a, c, g, or t
  misc_feature (638)..(638): n is a, c, g, or t
  misc_feature (640)..(640): n is a, c, g, or t
  misc_feature (649)..(649): n is a, c, g, or t
  misc_feature (651)..(651): n is a, c, g, or t
  misc_feature (657)..(657): n is a, c, g, or t
  misc_feature (666)..(666): n is a, c, g, or t
  misc_feature (672)..(672): n is a, c, g, or t
  misc_feature (674)..(674): n is a, c, g, or t
  misc_feature (680)..(680): n is a, c, g, or t
  misc_feature (682)..(683): n is a, c, g, or t
  misc_feature (698)..(698): n is a, c, g, or t
  misc_feature (701)..(701): n is a, c, g, or t
  misc_feature (706)..(706): n is a, c, g, or t
  misc_feature (710)..(710): n is a, c, g, or t
  misc_feature (718)..(718): n is a, c, g, or t
  misc_feature (741)..(741): n is a, c, g, or t
gggccctgttggttcttccgcgctggagtatccagataggcgacacgccggcgggcggtgaggcgggaatggctgctgtactgcagcgcgtcgagcggtgtccaatcgagtcgtgcgtgtgtgggctgtaacccgggtcccatgaccctccaaggcaccaacacctacctagtggggaccggccccaggagaatcctcattgacactggagaaccagcaattccagaatacatcagctgtttaaagcaggctctaacttgaatttaacacagcaatccaggaaattgtacgtgactcactgggccccgagatcattctggaggcataggagatattgtgtaaangcttcaataatgacactacctatgtgcattaaaaaaatctcccaggggaattcctcagagagaagaaattataggaaatggagagcaacaatatgtttatctgaaagattggagatgtgattaagactgagggagccatctctaagagttctatatacccctggcacactgatgatcacagtggtctactcttagaagaggaaaatgctatcttttctggagatggatcctaggggaaggaacaanggtatttgaagacctctatgattatntnactcttanacgagttttganantcaaggtgntnttatanttccaggantggcangnattcananngtgagtaaaatcaanaanacttntcanagaatttngagagcggaatttacttattcgngggacttggaactatcaggatggttggaaaatattaaagagattctgggaattacgagggggacaaatctttctttggagaaaaaaacaaaacattggggcgcgcgagttaaatttggggcccagtagagaatggtagactggatggtcaaaagggggcgcaaggttga

SEQ ID NO: 500233 - DNA, 221 bp, Homo sapiens
ctgatcttagtaatcagccacttttctgactgctgtcatgaagtcttcctgtactacaagaatcatgatcagcacgaattgcgaactatacctgcttcagtgacaaaccatttctcagatctgctccattaaatgccatccagaaagcttcacaattggcttcataactctatatcaccaatgctgttgtaagtgggacctgcgatggattttcagttatg

SEQ ID NO: 500234 - DNA, 1695 bp, Homo sapiens
tgggaacaaaaaaaaaaatctaatgggggaaatttcaaaaaggggggcaccactttgaaccccccctatagatgtggcgggcgcccccccttgttgcccaataggcgccacatcgtgggggtttgtctctgggcccccacatccctctttgggtagttagcccctgtttttcaccccccctctttgttttcaatttctcctccccctttgagactcttgtggagaaaccccctctctttcttgtgaaatagtgtgggtgtctcttctcgtgggcgcgcgccaagaaatatcttgagaatctgtggcgccctggccacggaggcgctctccaaacccatcttgtcgctcctctgtagtactcgacggcaatctagagggcgcgagatatgtgagcacatatatatataccttgtggccacaatgtggtaacacccgttggcacacagagtgtcgcccggtgaggagtttctctcacaaaagggccactcctcgaatatgtccccagtgtgtgtgcgagcacccctgtgtgtactcccccccccaccacaacagagagacacaaacctatcttctttgtttgtggaatcgcggcgcatatataccagcgtgtgaaaacgagtgtgtgtgtgtagcccaccccgcacccacgcgcgtgaatatatttgtggtgaacaacaccacaatcttcttgtgtgaccacacacaaactgtgttttttataccacccccatcgtgatcttctcatatataatagtggaggagaacacacaaaaaatttctgcgggcagaacaccactctcaccacgaagaggaggatcctctacaagaagaagaggaaacacacacgacgctggtgtagcctacccatattaacatcctacccatgccgttgttgagtcacccccccccgatggtgttggtttgctcccacacacaaacgaggggcggaagaaaaaccatcacttctacccaccaattgtggtgggcccccctaatttattcaccccacaccccccacaagttgtccatccaacaaacagacgtgccgcaacactctcttctgtggggcactactcgaagggggaggaaaccccccactaccgtgaggactacaaaaacacgcgagaacacaaactctaggacggagaccgacacacgcagcgcagtgttgttgtaccttcttaaaccaaaacaccgccggggcgactaaacaccacaacgcggcgcgagcgggctcggtagacggcccccccctaatgtgtgtgacaacaccccaaggaggactatcctctcacaggaagtaggaaaccagccacatatactgaatagaagcaagcaaacactatcactacgaagagagaccactaatacttgtaacgtgggtgcgggcgcagccaccaacacactgagctgttacatctaacgaggcacgaacgaggtgatcaacaaaagatgtggtatcctcctgcaccccacagtcttttttgccacacacgggggacaatactgcgcggggccccccactagtgagaggaagatcctaataatctcagaaaaccaagattcatcaaatatcatcatcatgcacatcaaacactacaaaacaacagacaaaaccactccagcaacatactacaatagctaactgatacacaatcacagctacacaccgacagcatcaactatccagacgac

SEQ ID NO: 500235 - DNA, 1084 bp, Homo sapiens
gtgagactccgtctcaaaaaaagaaaaaagaaacgcacagtgggagccaggcacagtggctcacgcctgtaatcccagcactttgggaggctggtgtgggcgggtcacttgaggccaggagttcaagaccagcctggccaacatggcaaaaccccatctctactaaaaatataaaaattagctgggcatgatggcgtgtgcctgtaatcccagctactcaggaggctgaggcaagaaaatcgcttgaatctgggaggcggaggctgcagtgagctaagatcaggccactgcactccagcctgggcaaaggagcgagactctgcctcaaaaaaaaaaaaaaaaaaaaaaaaaaaagagacgcggggggcgccaagagacacaataaacccaggaaaaaaaggcccccacaaacagaggccaaacacaacaaaagggggggaagtgtgtcttcatctttccacaaatatataaactatgtgtgaaccgcgcgggaatgtgtgggcccggcttccacacggggcaaattccttatagcattccccttctcccccgtgggggaacgtcgggggaaacccccaagagccgccgaacccagggacacgagagagcgggggactccccacagcacgccgaaaattcccacacccaaaagggagccacacccagcaccgcagaaggccaggaaaccccccccctggggctcccactcccaaaaaccccccgcggcaaccctatccccccgaagagcgcgcgccagacccgggaggacaaccacgcggtcacaacccatcaaaacacaaggaaggagccggccaaccccaacaccgcgcacaacagcgcggcacgcccaaagcccctaccatccaaaaacaccccgcgccagcgccataagcaccgaacaaaaccgcccgtaaaaaaacccccgcggcccggtgggaccacacgacaagggggggcctccccaccgggtgtcaccccagacccagaggaaagcgcaaccatgcgagccgacaccacgaaggaccccctggagctctgaacacccatcggggaaccaggagaaccaacgccgtaaagcaaaact

SEQ ID NO: 500236 - DNA, 345 bp, Homo sapiens
  misc_feature (101)..(102): n is a, c, g, or t
  misc_feature (109)..(109): n is a, c, g, or t
ccagcccggggggaaacccctaaaaacccgattaaaaaggggttgctgtccccaggggggggctttgtcctcataaaaagggccagcgattccgagggggnntggggcnccagcttttatcacacgccgaccttttttgggccaaaattgtggggattttttaaaaaaggaaaaagcaagaaagaacccctggggtttttagtttgggaaaaattaggtttcaaatttttccattttggaaaaaatcatggggggggattttgttaaaaatttgggaactctttttttttttaaataaaaggatttcctttaaaaaaaattaaacccccccctttgtagggccca

SEQ ID NO: 500237 - DNA, 710 bp, Homo sapiens
ccggggttccgcggtggaggggtgctatacttgggatgcagtgcgctggtggggactggcagcaatcatgccctgggagctaactgtagagctttggataatgcttttgcaagtttgtacagagaatgtggaagtatcatctgagggtttcattgaccatcctgcatgcctccatcattgcccttcgtggctggccgcagatcttggctggcatgagtgcttaggctttaccgttctgagccagttccttcaatgggatatttgcatagcatccccttcagccaacaagcatgaaatggcttacctcgggaggcggtaggaactacatggaggttactcaattgccagggagaatgtagtagatgcgtggatgtccaaacatgtccaaggacagtatcggtgaagttatggtgccactggatgtaaggaagtactctggatggtatcccagcctgtaatgggtcgatttgaaaatgcccagcttggaagagtatggcttttccacactgtcaatgggaaacggttacaagcctcttgcaagatatcccaatgaatccaaaaaccatcaacattggtacaatggcctagtaatagtacactgattgagccaagcatcgttacaaagcaacgtttaggatgacctagtattgcgcgaattcatgacccatggatatttccatgaacgtaatcctcggaaacctggacctggt

SEQ ID NO: 500238 - DNA, 1649 bp, Homo sapiens
gcaggagcacctcaggcaagctggcaggctgagagacttcgacagcaactgctcggaacaggactgacgcgactgacacacactgcttaagcaaaccaaacacactatgtcagccagcactgactctgacactgcatggctctcgctgcctacgcactacacacgactgaccacgcgccgcttctgcctctctccctacacaagcactggcacacacgcactgaactgctcgcacggcaacgcactgtccacggaacgcagcaacacgcacaggcaaccgccagctgcacccctgcagcaagcacacgcaggcaacgcaacggctgcacagcttcacggccggcggcacggcacacacgacgcgcagacgccgcacagcctctccacgactacgccccacgcttgcgcacccctgcgcacactcccacaccgctgcgacgcagctgaccggacacgcacacaaccgcacgcacacgcccccacgcccacacacacgacgccacgcagcgccacgcaccctcccctgcgcgcacaccacgcgcgctttcgcacttaaaccgcccggccacacgcggcacacacgcacgcccttgcgccacatacaccgtcctaccccagcacgcaccggaacagccctgcccccgtacccacagcctactcggcacagcccccccgtggaacactctcctactgcaggcgaacctcgacgaactcgtcctgctatagcctccacgcgaacaccgactccgcactgcgcaaacggaacgcgcagccattctcatcgcgccggcgccgggcaccaagcaaactccccccccgacccctggcccacccgcccccccccccgccactcccccctcccccccaccccgcgaaacccacccacagcacccccacccaccccccacccacaccaaacgcctgccgccccaccccccctcaccccccgcccaaccctcacggctcagcaccacacacgcctcgtcaaccccaccacgcaactgcaacccccaaaccaccgagcccctccacacagcctccacccggcaacaacaaggcgatcggggacccgacacggccaccgctacctaccctcccatagcatccacgcccacacgcaccgcatcgcccccgtggcaaccctcccgggagcaccgcctggacggcccctcatcacacatctccggcctccccccccgcacccactccccgaagacgccacttacgaaatggaacgaaaacgcgaccccgaacacccccacgcgcccgccacagccacgcagccacgagacagccgaccgaccccacaacacactccgcaccacccacaccgaggcacgccaatcctctcaacactcaaaagcacccggccccccaaagcggagaccccagcgaaccacgaagtcgacctacacaacacgggcaaacaactagtgccccaccccgatacaccacccagacaacctgcgcaacgcgacccgcccacgccccagcgcatgacgacccacgcggatcctccaccataatcccccaactggacaacactccaagcaaccataagtaaagcaaagacaaaaagacaccgaccgctacacctaccagcccgtaaccgaccgactgcgacaggacagcaacgcaaccaccccacg

SEQ ID NO: 500239 - DNA, 677 bp, Homo sapiens
ataaaggcgataaatattttaaagcacggaaaatatgaacaagctattcagctgctatactgagagctattagcttgtgccctacagagaagaaatgtcgacctttctacattttatcaaaacggagctgctggccttttgaacagttgcaaaaatggaaagaagtggcacaagacatgtacgaaaagctgttgaacttaatcccaaatatgtgaaagcgctctttaaacgtgtcaaaagcccatgatgaagctatgacatagtaacgaaggaactgtttagaagatgtcactgcctgggttgtatagttgaggaagggttccataacattcaagcaaagcatgcggttagccgagtaaagcttcgttaaactccttgggaaaggagaaagccatgatgaacatatatgaagaatcgtgagacctcgtgatgccatctccaaaagttgtatctaaagtctatactttcagttgttcgtatatgctacgagaatgaatatctattttcaccaagtctcctatgacttagaaggagagaaatctgatgaagattgagacatggaaggggaggctttagtaagtgaaagaaaattctggatagcttaagaggccaaagcagtatatggaagaagaaaatctaggataaaatcataagtgaatgctcgagaagaaatagat

SEQ ID NO: 500240 - DNA, 360 bp, Homo sapiens
gtaccgctctcgtgagactggtgatactaaaaaattacaaatacacatagtacaaaaaaattacttatttgctttaatctaccataataatttcaaaattacattagcaacattttcactaaaaatatgataaattaaaacagtaattgtattgcaggtatttttattcttggtatatatccatgagggatgtacaaatatattactatatttaaaaatacttgaagcaattcctctttcagtggttaaaccatctactcatacacagttttagattcaattgtttcattttgctttatatttttaaagttttaaattttgttctaattttacattataattacaacaaaacatttacag

SEQ ID NO: 500241 - DNA, 301 bp, Homo sapiens
gttgggggcaagggtccctgcctaaactgtttacgtcccctgggaaggggacccaaggattaattggctgtgaaggatcctcccttagactggcaaaggaggaggcttagcaaaaggagtcatcatggaggaacggtgagaacatggaaccggactccaaaatgacgatttaaaaacccgggagcgaaaaaccaaggccaggttttgggtgtagggcccaaaaaaacaaaacagcccaaagccccaggtgcctggcctggcctagacctttggaatttaaattaaaccatttggagttgga

SEQ ID NO: 500242 - DNA, 509 bp, Homo sapiens
  misc_feature (15)..(15): n is a, c, g, or t
  misc_feature (21)..(21): n is a, c, g, or t
  misc_feature (80)..(80): n is a, c, g, or t
  misc_feature (108)..(108): n is a, c, g, or t
  misc_feature (148)..(148): n is a, c, g, or t
  misc_feature (159)..(159): n is a, c, g, or t
  misc_feature (210)..(210): n is a, c, g, or t
  misc_feature (225)..(225): n is a, c, g, or t
  misc_feature (277)..(277): n is a, c, g, or t
tgtttataagtattngattcntaatacccatattttggagttttagaggggaaattataggcatatggttagccatttancagatatcctccccccatataccaaaangggtagtaattttgctgaatgttttatgttgaagttattnccaaggtattncatggatatgcccatgacatatttggaaaaaatagaaggaattgatttttncaaaaaggttaagtnccaaaggtaggtagtttagtctacagaaataagttagtcacttttggctttnctaatttgtactgtaacattcttttattttgttttaaatatatgtttctcaagtaaacaatttaggtaattttccatacctttttctttctgatgcagacttcaggttaattaatattttactgcatctgatgatgtattatatgtttgaagcctagtgacttttaattttgatgttcttgtgatttcatatgttgtattcttcaagcaataaaattctgatgtgttttata

SEQ ID NO: 500243 - DNA, 351 bp, Homo sapiens
tttttttttttcctttaaaaaccccggggcggtttcacctttcggtttttttctttggccgggggggggtttaaatttttttccgggaaaaagtttttcccttttggctttttttggttccctttttaaaaaatttttttcaaaaaaagggggtggggccggttgggattttccgggattttttttaccccggggtttccaaaaaagggggccaatgggccaaattttttagaggtttttttttttttttccccccccctttccggtttttttttttttttttttcgggttttgggaagggggggttttttttttttttttttttcgggggatttttttccctttagggga

SEQ ID NO: 500244 - DNA, 163 bp, Homo sapiens
ctaaaggcacatatgccatcatgtcactcaatcctagcaacaattcgcagagcaggtgtgctactgcctcatatgcaagataagggaatgaggctgcgcacgatgacgtcattagcccaaggtcatctagcattgtaacagcgagctggtacaggaccttatg

SEQ ID NO: 500245 - DNA, 1004 bp, Homo sapiens
  misc_feature (137)..(137): n is a, c, g, or t
ctacttctcgcgttcgctgtgtcggcgcgctgtatggttgtgagcaagtgtcgctacggtgtggtgcgcaatgttttgtctcgccggggtgtttcttcctggttggtgtccagatgctgttcccggtgtggcctgtnttaatgggttgtgcgtggcctttagcccgcggcttcgggttgcgcgtggacgctcgctgattgggcttggggtaccccgtggaccgctgcggtttttcccgcgcggcggcactattggtcctgggttcccccggggttctaaggttatatcatggatctcggacgcttcctccggggggccatcaccagttggttgtgccttcgtgcttttttggaacctaggggtaccatccttcgtcttcgttacacggccacgaggggcccactttggggcgagtggagtttgcctgagtgcgctgtggcagtctgggcgcactatagcgcagccagttgtggagggtgtgagccccccgggctccaggatgctgctgccaccagatcgggcgccgtatttgcctctcctaggaggggcggctcattcccgttgttgccccctttattgcccggggcgctcctcctctgatcgcactgtgcgtgcttccccccgatagttgccattctgcctcggttgttgtccgcccggctgcggtcactttaccggcttttttatgtgcgccccaacgcctcttttcggcgcatccctcgggttagtccccgcgttagtcttggggtcatccctatagcgcttatcggctccacccatagtggcttctccttcacctccggaggggccccatgtttacttttgttgtagacacccgtaatcgatagacgtggtttgcacgacaagtaggagagaaacctttcatgcgtgggacgcgcaaaacagcactatgagtcgagaggagaatacgccccgcccttaacccctgcggggcggacacgactgggagcccccccccctgccccctgaacccccacatgtca

SEQ ID NO: 500246 - DNA, 151 bp, Homo sapiens
tagatgtctagatcaaagaagtgtgaaagagcacagatagcatagcgaaggtcacttcaaggacctggagaaacaagaacaaaccaaaccaaaacccagcagaaggaaagaaataacaaaaatgggagcagaactaaataaaactgaaaca

SEQ ID NO: 500247 - DNA, 90 bp, Homo sapiens
  misc_feature (43)..(43): n is a, c, g, or t
aggtatagtgttccctaatcatgtacttgtgaagcacccggantttttcatatagtctaaaagctagaagaacaagagtgtatttcgtgg

SEQ ID NO: 500248 - DNA, 616 bp, Homo sapiens
ataatctggatgtcctggatgactatgctacacatattcctatagcagtgctctgatctgaaacaagcatcgattctttgggatcctctatctgctatgtagtgaagacagcacagattgaaagtgcgtaagagacacatactctgcttgatataaacaacagcttttgacatgctgtgtaacactagaagagactattaaataaaggcatacttagttaattatatcagtatgacatgcacatactgcatcttgtcctggataatgatcgcatcagagacacatacaattagacttattccctagtctgaagcaatcatatgccatcttactagggtatatatatcagtctctcatatgacattcgagaactcattatgcgagccgctcataaagaccactgatggacatctcattctgacgtagaatgacacttcattatcaagtataaccctgtatgagagatgctataatgaaaggtcaggcgctatggttcatgcctgcgaagtcgaactattagaagcatatgcagagatatcatgctccgtcgctgccatgagatatgcttgaggatcatgacgctccgtttctacttggattcatgcatatccggccc

SEQ ID NO: 500249 - DNA, 80 bp, Homo sapiens
ccgaagaaaaaaaaattgaaaaaacccccccacaaaatattctatcccccccccccccaaaaaaaaaggggggccctctc

SEQ ID NO: 500250 - DNA, 219 bp, Homo sapiens
ggtgtattggaacatgtcctgtgcccctatcttctcggagaccacgcttatcaaccgtgtcgtgtgacctccacaccttggatattgtgcgatttgtgagcgccgctcgagcggagttggtaacatgttgggttttttcccacccatcatggcctaagatgttccagttttctcagtgtacgcagcctgtgagatagatgattatggcacgcaaaagga

SEQ ID NO: 500251 - DNA, 174 bp, Homo sapiens
  misc_feature (101)..(101): n is a, c, g, or t
ttttttcccccctttttttttccccccccccggccctgggggaaaaaaaaccaggggggttttttttttttgggaggccccccggggggtttttttggggntttttttttaggggttcccccccccgggttttttttttccccccaaaaccttttttttttttttgggggggga

SEQ ID NO: 500252 - DNA, 281 bp, Homo sapiens
  misc_feature (123)..(123): n is a, c, g, or t
  misc_feature (135)..(135): n is a, c, g, or t
  misc_feature (173)..(173): n is a, c, g, or t
  misc_feature (199)..(199): n is a, c, g, or t
cggcacgagttccaaattacctcatccaaatccattctcctgtttcttttctctcaatcatacctggtatcagcttgaagctccaaatacctggcaggcaccctctggtctctattggatttntgggccacaggnctaccaacagttaccagccaaatggacaggggcttgtntactcagaacaattaggccatctttntttttgcttccactgcaacacaaggaaaccttagggtatcctgtctatgatgaaattaaaggaagaaacgaaagtaatgtag

SEQ ID NO: 500253 - DNA, 764 bp, Homo sapiens
tttctcagaggtacccggctgtcggcaagttcgtcagtgagtggatgattttgtggagttaaatagagctacattggagagagaactctgcatgaccggaaccatattaccaatctgatgagcagatgctggcatcttggctgccaggatcagtgggcctgcggagaattgagacatgaacaacttatgctcctgatgccaaacatgttcctactctttcctctaactgtggagaggacattctggagtgacatgatggactccgcacagagcttaataacctattcatggactctttatcttcaagccgaggacggaaaaatagccatattccaggctaagccagacatccagtacgcaccacatttggagcaggagcctacaattttgggagaattatctgtaagcacaatgtcctatctgcacatgagaaattcacatgcgcacaggagtcttcttgaagatggaaaaagtgatggcgccttaagatgcctgtctcttaactgtgggcggactcaaacacgactcttgtactctcggcgatggtattggtgtggatttgcgggcaacctgtgctacaaccggggagcaacccgtgccatctgagatgctcgctatccatggcgaccccggagcttatgaatgaacaaaggccaaccttattcccctcctgccatgcgtggcgggtggccagacgtaacacttgagagtattgaagacacacggacctttccctacacagagaatgctcgcctttcagaaat

SEQ ID NO: 500254 - DNA, 150 bp, Homo sapiens
aggacacaggattgcttcgatgaattagagacctaatcagtgttagctacgctcattggattagtcggttaggattgcggtctaacgatctatggcttgttatcagcttggtcactgctgtgcgtcgaactccggtgtgtttgagcactc

SEQ ID NO: 500255 - DNA, 759 bp, Homo sapiens
tgcgttcaacatcgtttaccttgggaaccaggtcgatcgcgaaggtgtttaccgatacccgcatgatttatcatgaaccatctctgacgatgccgaagggttgaacccctgtaatgaatcaatttcggggccgcggtgtaagttgacggggtttgcggcccatggtgtctgctcaatccatggaagccccttgccgagatacgctaagatttcgatccagacacgatacctgctaccactgttatgagggcactgtatcgtcttccttgggccaatagaataccaggtcccaatcggggacgtattcagttgcttttatagtacagaacaaccgggactaaaagaataagactagcactgctatgataacccatcttccgggaagggaggccaggatgcctcagtgtttaaatgacatgctcaagaatgaagtccaaagacgggaactcatgctgcgccctctaggcaggagccacgcgcggagtgtccaagactagcctgtgcttgggaaaggggcgtgtggaaagagcacggcttccaggagagaggccccctaaacccgtcttggccgggtaataggcctgggtcccactcacccatgccggcagctgtcaccatgtgatcttattcttggatacctgggagggggccaatgggggacctcagggggaggccccctctggaaatgtggttcccagggatgggcctgtacatagaagccaccggatggcacttcccataccgacggagagtattttg

SEQ ID NO: 500256 - DNA, 422 bp, Homo sapiens
gaaactgatctatctaaacacagatcaggtcaggtcactcacctcctcagaaatcttcagtagctctatcattaaccacacagggggttcctaactcgcggtctgggcatgggaggacctttcccggccggatcccggcgatcatcttgtcctgaaatatatactcaggccagggctcaccccttctttacaatggcgggggcgggctcaagagaggcaaacagccatctctctcattcttatcttcccggtcaagacttcacataggtggacggatgctagactatgatgatgagtctccggtgaaagtttctaagtagaactctctcagggtttctagaagcgttttggttgaagaaaatatggtggggagagcgggattttaaagtggtggagctctgggtaaacaaaattatgtgtgc

SEQ ID NO: 500257 - DNA, 572 bp, Homo sapiens
tgaggtagacactagagcgatccccccttcggattacctcaacacaatgaggctcactcacccaccacattaacaacataaaaacctcattcacacagagaaaacaccctcatgttcatgcacctaattggaagcgccaccctagacaatatcaaccatgtaaccttccctcatacacattatcactcttcacacattctaattactacatgactatcctcagaactcgctagtcgcacttaatccaagacctacgattttcacatcttcatagtaagacctctaccatgcacgacaaacactataatgacccacacaggtgcactgacgtaggtggcctgcagatcatgttagcaggttaggctgtacggccagaggctataaggttgcaatgcagtaggcatgatggtttcgcataataactcagtatggggataaaggggtgtaggtgtgcctatgtggaaagcaagtgggctcagggcatttttcatcttagacgcgaaagcctataaatcactgcgcccgctcataaggggatggccatggctaggtttatagatatagggtggttg

SEQ ID NO: 500258 - DNA, 1031 bp, Homo sapiens
  misc_feature (162)..(162): n is a, c, g, or t
ggagtgcagtggtgcaatcatagctcgttgccatctcgacctcctgggcttaagcgatcctccccactcagcctcccaaatagctgggaccacagacgtgcgctgccttgccaggctaatttaatattttttttttccccacgcgacagtggacgaactgcnttctcaaaaaaaaaaaaaaaaaaaaaaaaaaaaaagaggggggttcttcacacgaaacaaaaaaacagttgtgtggtgcctccccagcggggtgggggggagtgagagggggtgccacagtttaggaaaggagagtgtgtgttctcccacattttttctttaaggttattaggggaccttcccaaaaaaacctcaggggaggggcatagtggtgggtgtgggtgtgggagacaagaggaattgggtggtggagacgggcggggtgatttcacccacactcttcttatttcagggggggggaaacagacaatggcgcttttggaaggaagcgggtttcaacggctctcaacagagttgtgcacgcagtgtggaacgaggggatcagaactgtgcattgtgacagcattttgattggacgagtgttgcagacagagggacaacgagggtttacaggggacaacagggtgaagaaaccaggcaaccttcttttctctggggggtggggtacgccaccagctgccggggggtaccacaaccccggggggggggtggccccacacattttgtcttggcgacacccgctgacagagttggggaactgtattattaaggacaatatgagagacttaagtgggcgagtcaagaacatgggggatgaaaagagactctgtgatcaccagatatgagaagacaccaagatttcccggtggagacattttgggcccggtgggaactctttgggacacgtggctacagaacaggtttttctggaagataattttacaagggagggtggacgggaagaactcttctgtgaaaggggagacttaactggggttaaatgtgtgcaagttagagagtacgggtag

SEQ ID NO: 500259 - DNA, 455 bp, Homo sapiens
cacgaggggcaattgaatgtttattcaaaacatatctgaacctcaatggtctggaaaatgcttaaattcatgaacagttgcaaaatttgtagcttcggaagacaatgaaaccagacttcttggtaacattttatagtagtctgagattttctcattgtactgtctaatgagatatctacatgtctattgttttttaaggctgtggtgaatgtcgagttatgcctgtgctttggccatcattgctactgggcaaagtctgttctctaagttataccccttcattaacaacaatgtaatgctagatgctgaaacaaataaaccccaaattccttgtggcttaacataatgtaaatttatttctcactcatatcaagctgaagtggcagctggggctctactctctgcagctcacagggacccagttttatgaaacactcagtgtccaaaatcactca

SEQ ID NO: 500260 - DNA, 355 bp, Homo sapiens
ggacttgtcacagctgccaggagtggtattgatcaatgtgaggctctgggtattgcttcctttcaatttgtctcagagctagttgtagtgagtcattctgtcttatatgatcgtgtatcgtgaaccatcagtaatagtgttgtcaggctagccaaaaagggttagaggtcttgcgggctggggaggttgcaggagcgactacatgtgcactacatgtgcgtctcgttgacttgagcaatcttgagcaatagcggtgttttgtaactttttcctaagactggtgaagttaagttttcttgtctctctttatgcactccttccctacctgctattattcatatacagaataagagca

SEQ ID NO: 500261 - DNA, 145 bp, Homo sapiens
actctttttggtgttttatattgataattgttgtgatgaaattgatggtccctaagatagagtttacacctgctaggagagcaaagacctcaaaagagcaatgacctcaaaagagcaaagaccctaagagagcaatgacccctaa

SEQ ID NO: 500262 - DNA, 325 bp, Homo sapiens
agcccatcgcactgctggccagcaccgtgattgatcaactgctggcgcagatcgctggcaatgccccgatttcccattgcctttctcttcatgtccggccgggcgaaagcactcaaccccatgaggagactcttgatgcgcgcattcagtaaaaccctggcagctgtgctgctgtgcggtgtggccagcctggcccaggccgccgataccgcgatttgctacaactgcccgccggactgggccgactggggcacgcaactcaaggccatcgccgccagtaccggggtgccaagtgcccctggacaacaagaactccggccaatcc

SEQ ID NO: 500263 - DNA, 624 bp, Homo sapiens
  misc_feature (262)..(262): n is a, c, g, or t
ttataatctcgtcagggaatatcacaggtgcatatactttcctagttaatgtactggagcagcaagacgtgaaactgcttgaggagcccatggcaggacgacagacgcagcccaagcagagacagaagaatctgatgatgaagctgcagtagaggaagaagaagaagaaaagaaaccaaagattaacaaagttgcccaaactgtctgggactgggaacttatgaatgatatcaaaccaatatggcagagaccatcaaaagangtaggaggaagatgaatacaaagctttctacaaatcattttcaaaggaaagtgatgaccccatggcttatattcactttactgctgaaggggaggtacctccaaatcaatttaatttgtaccaccatctgctccacgtggtctgtttgacgagtatggatctaaaagagcgatacattaagctctatgtgcgcgtgtattcatcacagacgacttcatgatatgatgcctaatactcacttgtcagggtgtgtgactcagatgatctccctgaatgttccgcgaagctctcagcacataactgctaaggtgataggagagctgtcgtaaacgctggcatgatcagagatgctgatgataatc

SEQ ID NO: 500264 - DNA, 4428 bp, Homo sapiens
  misc_feature (2842)..(2842): n is a, c, g, or t
  misc_feature (3016)..(3016): n is a, c, g, or t
  misc_feature (3438)..(3438): n is a, c, g, or t
  misc_feature (4220)..(4220): n is a, c, g, or t
  misc_feature (4222)..(4222): n is a, c, g, or t
  misc_feature (4224)..(4224): n is a, c, g, or t
  misc_feature (4226)..(4227): n is a, c, g, or t
  misc_feature (4230)..(4231): n is a, c, g, or t
  misc_feature (4233)..(4233): n is a, c, g, or t
  misc_feature (4236)..(4238): n is a, c, g, or t
ggagagtgggccttaccagaagaaatggttgacaatttaccaccctccaacaattgcatactgggccatattcttcacaggctagctgaaaaatctcttcctcctcgagcggaatcaacaacacctgaattaccttcatttgctgttaaaggatgcttattggggaaaacattaagtggaaaaactaccattttaaggtctctacaaaaagactttcctatacagatactttctattgacactcttgtccaagaagctatccaagcatttcatgacaatgaaaaagtcagtgaggttctaccaattcagaaaaatgatgaagaagatgctctaccagttctgcaagaggagattaaagaaagccaggatccacaacatgtattttcagctggtccagtttcagatgaagtattaccagaaacagaaggtgctaatgctgataaaacaccaaaagctgaagaagtcaaatcaagtgatagtttcttaaaactcactacacgtgctcagcttggtgcaaaatcagaacagttgctgaagaaaggaaagagcattcctgatgtgctgcttgttgacatcatagtaaatgctattaacgagatacctgtgaatcaagactgtatcctagatggttttccaatgactttaaaccaagcacagcttctggaagaagctcttacaggctgcaatagaaacctcacagaagtggaaagaaaaaaagcacaaaaatccacattggctattgatcctgcgacttccaaagaaatacctcttccctctcctgcatttgattttgtcatattattagatgtttcagatacttcctcaatgagtcgcatgaatgatattatagctgaagaattgtcctataaaactgctcacgaagatatcagtcaacgtgtagctgctgaaaaccaagataaggatggagaccaaaatttaagagaccagatacaacatagaattataggcttcttggacaactggcctttattggagcaatggttttcagagccagaaaatattttgataaaaatcaatgctgaaatagataaggaatctttatgtgaaaaagtaaaagaaattcttacgactgaaatagcaaaaaaaaagaataaagttgagaagaaattagaagaaaaggaagctgagaaaaaagcagcagtttccctggctgagcttccacttcctacacctcctcctgctcctcctcctgaaccagaaaaagagaaggaaattcatcaaagccatgtgccttcaaaaactcctactgcaaaaggaaaacctcaatcagaagccccgcatggtaagcaagaatctcttcaggaaggaaaagggaagaaaggtgagaccgcactcaaaagaaaaggttctcctaaaggaaaatcatcaggaggaaaagtaccagtaaagaaatcacctgctgactctacagatacatcacctgttgcaatagtgccacagccacctaagccaggatcagaagaatgggtctatgtgaatgaaccagttcctgaggaaatgcctttgtttttagtaccttactgggaactaatagaaaattcctatataaacaccatcaaaacagtactcaggcatctgagggaagaccagcatactgtgcttgcttacttatatgagattagaacaagtttccaggagtttctaaagcgtccggatcacaagcaagattttgtagctcaatggcaggctgatttcaactcccttcctgatgacctgtgggatgatgaggaaacaaaggctgaactacatcaacgagtgaatgatctgcgagaccgcctgtgggacatttgtgatgcccggaaggaagaggcggagcaggagcggcttgacatcattaatgagagctggttacaggacactcttggaatgacaatgaaccatttcttttccctgatgcaggcagagctgaaccgtttccaagatacaaagagactccttcaagattattactggggaatggaaagtaaaatcccagtagaggacaacaagagatttactcgaatccctttggtccaactggatagtaaagacaattctgaaagccagcttagaattcctctagttcctcgaatatccatttctctggaaacagttacacccaaaccaaaaacaaaatcagtactgaagggcaagatggataactccctagaaaatgttgagtccaactttgaggccgatgaaaagttggtcatggacacctggcagcaggcttctttagcagtatctcacatggtggctgctgaaattcatcagaggcttatggaagaagaaaaagaaaaccagccagcagaccccaaagaaaaatctcctcagatgggtgcaaataaaaaagtcaaaaaggagccacccaagaaaaaacaggaagacaaaaaacccaaaggtaaatcaccacctatggcagaagcaactcctgtcatagtaacaacagaggaaattgctgaaatcaaaaggaaaaatgaactgagggtcaaaataaaggaagaacaccttgctgccttgcaatttgaagaaatagccacgcaatttcgacttgaactgataaagacaaaagcattggctcttcttgaagatttagtaacaaaggtggttgatgtatataaactcatggaaaaatggcttggtgagaggtatttgaatgaaatggccagtacagaaaaattaactgacgtagctcgctatcacattgaaacatctacaaaaattcagaatgaactttatttaagccaagaagacttcttcattaatggcaatataaaagtcttcccagatcctcccccatcaatacgtcctccacctgtagaaaaggaagaagatggtaccntgaccattgaacagcttgacagtcttcgagatcagttcttagatatggcacctaaaggcataataggaaataaagcatttactgacattctgatcgatttggtgaccctgaaccttggcacaaacaactttcctagtaattggatgcaccttacccaacctgaattacaggaantaacatctttattaacagtcaactccgagttcgtggactggcggaagttcctgttagtaacctcaatgccttggcccattcccttggaggaggagctccttgagacccttcagaagttcaaggctgtggataaggagcagttgggcaccatcacttttgagcagtatatgcaggctggtctgtggtttacaggagatgaagatataaaaattccagaaaatcctcttgaaccccttccatttaataggcaggagcatcttatagagtttttctttaggctatttgctgactatgagaaggatccaccccagcttgactacacacagatgctgctttactttgcttgccacccagacaccgtggaaggagtctacagggccctcagtgtggctgttggaactcatgtcttccaacaagtcaangcttccattccaagtgcagaaaagacctcctcaactgatgcaggtccagctgaggaatttcctgaacctgaggaaaatgctgcaagagaagaaaggaaattaaaagacgacacggagaaaagggaacagaaggatgaagaaatccctgaaaatgcaaacaatgaaaagatgtccatggaaacactactcaaagtgttcaaagggggaagtgaagcacaggactccaatagatttgccagccacctaaagatagagaacatttatgcagagggcttcataaaaacatttcaagacctaggtgccaagaacctggagccaattgaagtcgctgttctcttgaagcatccttttattcaagacctgatttcaaattattcagactataagtttcctgtacacatcatctatgtagtggaaatgatagtgtgtgcaaaaggttgggcaccacttccatcaggaaaacagtgtgcaagatggagaaactaaggacaaaccccagagaaactggacaaacccagcagaagaaaggaagaactgcaactcagaaatcacataaccaccaagcaggtctggaccacacatgctaaatgtgcatccactatggcgagtcccaggcctttaacagcagggactaaggagggcagaggctgacaccaaccccctttcatactgtagcactacatccctctcagataccagtttaacacgaagtctccctgtttgactcctgtgagttgtgtattgaactacaaagtgtttgctgagttgaaaataaaagcgcntncncnntgnnanaannnagattgtgtatcttgacttctcaatgatagcaagttacattttgcagttttcttcctatacccacaaatgaaactattcagacttaaatatcttcctgtgtgcctaaacgtttttgttttaagttgctgatccttttaaatattaaattattaattaatattaaaattaattttattgcctgtattagta

SEQ ID NO: 500265 - DNA, 347 bp, Homo sapiens
  misc_feature (325)..(325): n is a, c, g, or t
gggctccccagcataccggggggtgtgtaaggtgtggactaacccgccgccaccaccctcggttccagcaggctcggcatgaatctgggtgcactggcacctctttttcacatgggccacagtttcagtacttcagcctcaggggggtccctgatgtatatctagggtgtaactcaagcccagttggagattggggagtctcgggtgatcacatctggtctcggcggtaggaatcaacagagggagacgtcctctacataaaagctccaggtgaaaagctactcctagtcttaacatgggcagtcctggtgtcactgtcttcggnccctgatgggagcccaaggggt

SEQ ID NO: 500266 - DNA, 1396 bp, Homo sapiens
  misc_feature (1319)..(1319): n is a, c, g, or t
ggagagtgggccttaccagaagaaatggttgacaatttaccaccctccaacaattgcatactgggccatattcttcacaggctagctgaaaaatctcttcctcctcgagcggaatcaacaacacctgaattaccttcatttgctgttaaaggatgcttattggggaaaacattaagtggaaaaactaccattttaaggtctctacaaaaagactttcctatacagatactttctattgacactcttgtccaagaagctatccaagcatttcatgacaatgaaaaagtcagtgaggttctaccaattcagaaaaatgatgaagaagatgctctaccagttctgcaagaggagattaaagaaagccaggatccacaacatgtattttcagctggtccagtttcagatgaagtattaccagaaacagaaggtgctaatgctgataaaacaccaaaagctgaagaagtcaaatcaagtgatagtttcttaaaactcactacacgtgctcagcttggtgcaaaatcagaacagttgctgaagaaaggaaagagcattcctgatgtgctgcttgttgacatcatagtaaatgctattaacgagatacctgtgaatcaagactgtatcctagatggttttccaatgactttaaaccaagcacagcttctggaagaagctcttacaggctgcaatagaaacctcacagaagtggaaagaaaaaaagcacaaaaatccacattggctattgatcctgcgacttccaaagaaatacctcttccctctcctgcatttgattttgtcatattattagatgtttcagatacttcctcaatgagtcgcatgaatgatattatagctgaagaattgtcctataaaactgctcacgaagatatcagtcaacgtgtagctgctgaaaaccaagataaggatggagaccaaaatttaagagaccagatacaacatagaattataggcttcttggacaactggcctttattggagcaatggttttcagagccagaaaatattttgataaaaatcaatgctgaaatagataaggaatctttatgtgaaaaagtaaaagaaattcttacgactgaaatagcaaaaaaaaagaataaagttgagaagaaattagaagaaaaggaagctgagaaaaaagcagcagtttccctggctgagcttccacttcctacacctcctcctgctcctcctcctgaaccagaaaaagagaaggaaattcatcaaagccatgtgccttcaaaaactcctactgcaaaaggaaaacctcaatcaggtgattgacagaatgatttataatcctnttttcagtttcttatttttactcagtaaagaattataaattatagtctatctacattcagactttgggcaactttca

SEQ ID NO: 500267 - DNA, 473 bp, Homo sapiens
attgcgagatatcccaaaggcatactgtctcatcgatattataggggtccatcacaacccacatgtgtggcggatcctgaggtgcatgcctaccccattcaacagcacacaccccatacactctaataaagtgtgtgtctacgaccaccttccgctttgacccagagaacagcaaaggggaggtcaactctggcttatattcctttatccgacagggcccaggcactgccatacgggcaggcgttcgccatggaggagatgaaagtggtcctggcgttgatagctacagcgccactgagttacacaggctggaacgcagtggcgctgtaccagctcactgcaggactcacaactggggtcaagccatgatggcacctcagcctccaaagtagccgggaccacaggcgtacacccccacaactgaatcctttacaacttattaagagaagaagtctagctgttgcccaagatga

SEQ ID NO: 500268 - DNA, 3982 bp, Homo sapiens
  misc_feature (2842)..(2842): n is a, c, g, or t
  misc_feature (3016)..(3016): n is a, c, g, or t
  misc_feature (3438)..(3438): n is a, c, g, or t
ggagagtgggccttaccagaagaaatggttgacaatttaccaccctccaacaattgcatactgggccatattcttcacaggctagctgaaaaatctcttcctcctcgagcggaatcaacaacacctgaattaccttcatttgctgttaaaggatgcttattggggaaaacattaagtggaaaaactaccattttaaggtctctacaaaaagactttcctatacagatactttctattgacactcttgtccaagaagctatccaagcatttcatgacaatgaaaaagtcagtgaggttctaccaattcagaaaaatgatgaagaagatgctctaccagttctgcaagaggagattaaagaaagccaggatccacaacatgtattttcagctggtccagtttcagatgaagtattaccagaaacagaaggtgctaatgctgataaaacaccaaaagctgaagaagtcaaatcaagtgatagtttcttaaaactcactacacgtgctcagcttggtgcaaaatcagaacagttgctgaagaaaggaaagagcattcctgatgtgctgcttgttgacatcatagtaaatgctattaacgagatacctgtgaatcaagactgtatcctagatggttttccaatgactttaaaccaagcacagcttctggaagaagctcttacaggctgcaatagaaacctcacagaagtggaaagaaaaaaagcacaaaaatccacattggctattgatcctgcgacttccaaagaaatacctcttccctctcctgcatttgattttgtcatattattagatgtttcagatacttcctcaatgagtcgcatgaatgatattatagctgaagaattgtcctataaaactgctcacgaagatatcagtcaacgtgtagctgctgaaaaccaagataaggatggagaccaaaatttaagagaccagatacaacatagaattataggcttcttggacaactggcctttattggagcaatggttttcagagccagaaaatattttgataaaaatcaatgctgaaatagataaggaatctttatgtgaaaaagtaaaagaaattcttacgactgaaatagcaaaaaaaaagaataaagttgagaagaaattagaagaaaaggaagctgagaaaaaagcagcagtttccctggctgagcttccacttcctacacctcctcctgctcctcctcctgaaccagaaaaagagaaggaaattcatcaaagccatgtgccttcaaaaactcctactgcaaaaggaaaacctcaatcagaagccccgcatggtaagcaagaatctcttcaggaaggaaaagggaagaaaggtgagaccgcactcaaaagaaaaggttctcctaaaggaaaatcatcaggaggaaaagtaccagtaaagaaatcacctgctgactctacagatacatcacctgttgcaatagtgccacagccacctaagccaggatcagaagaatgggtctatgtgaatgaaccagttcctgaggaaatgcctttgtttttagtaccttactgggaactaatagaaaattcctatataaacaccatcaaaacagtactcaggcatctgagggaagaccagcatactgtgcttgcttacttatatgagattagaacaagtttccaggagtttctaaagcgtccggatcacaagcaagattttgtagctcaatggcaggctgatttcaactcccttcctgatgacctgtgggatgatgaggaaacaaaggctgaactacatcaacgagtgaatgatctgcgagaccgcctgtgggacatttgtgatgcccggaaggaagaggcggagcaggagcggcttgacatcattaatgagagctggttacaggacactcttggaatgacaatgaaccatttcttttccctgatgcaggcagagctgaaccgtttccaagatacaaagagactccttcaagattattactggggaatggaaagtaaaatcccagtagaggacaacaagagatttactcgaatccctttggtccaactggatagtaaagacaattctgaaagccagcttagaattcctctagttcctcgaatatccatttctctggaaacagttacacccaaaccaaaaacaaaatcagtactgaagggcaagatggataactccctagaaaatgttgagtccaactttgaggccgatgaaaagttggtcatggacacctggcagcaggcttctttagcagtatctcacatggtggctgctgaaattcatcagaggcttatggaagaagaaaaagaaaaccagccagcagaccccaaagaaaaatctcctcagatgggtgcaaataaaaaagtcaaaaaggagccacccaagaaaaaacaggaagacaaaaaacccaaaggtaaatcaccacctatggcagaagcaactcctgtcatagtaacaacagaggaaattgctgaaatcaaaaggaaaaatgaactgagggtcaaaataaaggaagaacaccttgctgccttgcaatttgaagaaatagccacgcaatttcgacttgaactgataaagacaaaagcattggctcttcttgaagatttagtaacaaaggtggttgatgtatataaactcatggaaaaatggcttggtgagaggtatttgaatgaaatggccagtacagaaaaattaactgacgtagctcgctatcacattgaaacatctacaaaaattcagaatgaactttatttaagccaagaagacttcttcattaatggcaatataaaagtcttcccagatcctcccccatcaatacgtcctccacctgtagaaaaggaagaagatggtaccntgaccattgaacagcttgacagtcttcgagatcagttcttagatatggcacctaaaggcataataggaaataaagcatttactgacattctgatcgatttggtgaccctgaaccttggcacaaacaactttcctagtaattggatgcaccttacccaacctgaattacaggaantaacatctttattaacagtcaactccgagttcgtggactggcggaagttcctgttagtaacctcaatgccttggcccattcccttggaggaggagctccttgagacccttcagaagttcaaggctgtggataaggagcagttgggcaccatcacttttgagcagtatatgcaggctggtctgtggtttacaggagatgaagatataaaaattccagaaaatcctcttgaaccccttccatttaataggcaggagcatcttatagagtttttctttaggctatttgctgactatgagaaggatccaccccagcttgactacacacagatgctgctttactttgcttgccacccagacaccgtggaaggagtctacagggccctcagtgtggctgttggaactcatgtcttccaacaagtcaangcttccattccaagtgcagaaaagacctcctcaactgatgcaggtccagctgaggaatttcctgaacctgaggaaaatgctgcaagagaagaaaggaaattaaaagacgacacggagaaaagggaacagaaggatgaagaaatccctgaaaatgcaaacaatgaaaagatgtccatggaaacactactcaaagtgttcaaagggggaagtgaagcacaggactccaatagatttgccagccacctaaagatagagaacatttatgcagagggcttcataaaaacatttcaagacctaggtgccaagaacctggagccaattgaagtcgctgttctcttgaagcatccttttattcaagacctgatttcaaattattcagactataagtttcctgatattaaaataattctccaaaggagtgaacatgtacaaggaagtgatggagagagatcaccttcaagacatacagaggaaaagaaatgaagacaaaagagtgtgatttttttaattctgcaataaatcttccaaaaattaaatgtgaaaa

SEQ ID NO: 500269 - DNA, 4865 bp, Homo sapiens
  misc_feature (2842)..(2842): n is a, c, g, or t
  misc_feature (3899)..(3899): n is a, c, g, or t
  misc_feature (4321)..(4321): n is a, c, g, or t
ggagagtgggccttaccagaagaaatggttgacaatttaccaccctccaacaattgcatactgggccatattcttcacaggctagctgaaaaatctcttcctcctcgagcggaatcaacaacacctgaattaccttcatttgctgttaaaggatgcttattggggaaaacattaagtggaaaaactaccattttaaggtctctacaaaaagactttcctatacagatactttctattgacactcttgtccaagaagctatccaagcatttcatgacaatgaaaaagtcagtgaggttctaccaattcagaaaaatgatgaagaagatgctctaccagttctgcaagaggagattaaagaaagccaggatccacaacatgtattttcagctggtccagtttcagatgaagtattaccagaaacagaaggtgctaatgctgataaaacaccaaaagctgaagaagtcaaatcaagtgatagtttcttaaaactcactacacgtgctcagcttggtgcaaaatcagaacagttgctgaagaaaggaaagagcattcctgatgtgctgcttgttgacatcatagtaaatgctattaacgagatacctgtgaatcaagactgtatcctagatggttttccaatgactttaaaccaagcacagcttctggaagaagctcttacaggctgcaatagaaacctcacagaagtggaaagaaaaaaagcacaaaaatccacattggctattgatcctgcgacttccaaagaaatacctcttccctctcctgcatttgattttgtcatattattagatgtttcagatacttcctcaatgagtcgcatgaatgatattatagctgaagaattgtcctataaaactgctcacgaagatatcagtcaacgtgtagctgctgaaaaccaagataaggatggagaccaaaatttaagagaccagatacaacatagaattataggcttcttggacaactggcctttattggagcaatggttttcagagccagaaaatattttgataaaaatcaatgctgaaatagataaggaatctttatgtgaaaaagtaaaagaaattcttacgactgaaatagcaaaaaaaaagaataaagttgagaagaaattagaagaaaaggaagctgagaaaaaagcagcagtttccctggctgagcttccacttcctacacctcctcctgctcctcctcctgaaccagaaaaagagaaggaaattcatcaaagccatgtgccttcaaaaactcctactgcaaaaggaaaacctcaatcagaagccccgcatggtaagcaagaatctcttcaggaaggaaaagggaagaaaggtgagaccgcactcaaaagaaaaggttctcctaaaggaaaatcatcaggaggaaaagtaccagtaaagaaatcacctgctgactctacagatacatcacctgttgcaatagtgccacagccacctaagccaggatcagaagaatgggtctatgtgaatgaaccagttcctgaggaaatgcctttgtttttagtaccttactgggaactaatagaaaattcctatataaacaccatcaaaacagtactcaggcatctgagggaagaccagcatactgtgcttgcttacttatatgagattagaacaagtttccaggagtttctaaagcgtccggatcacaagcaagattttgtagctcaatggcaggctgatttcaactcccttcctgatgacctgtgggatgatgaggaaacaaaggctgaactacatcaacgagtgaatgatctgcgagaccgcctgtgggacatttgtgatgcccggaaggaagaggcggagcaggagcggcttgacatcattaatgagagctggttacaggacactcttggaatgacaatgaaccatttcttttccctgatgcaggcagagctgaaccgtttccaagatacaaagagactccttcaagattattactggggaatggaaagtaaaatcccagtagaggacaacaagagatttactcgaatccctttggtccaactggatagtaaagacaattctgaaagccagcttagaattcctctagttcctcgaatatccatttctctggaaacagttacacccaaaccaaaaacaaaatcagtactgaagggcaagatggataactccctagaaaatgttgagtccaactttgaggccgatgaaaagttggtcatggacacctggcagcaggcttctttagcagtatctcacatggtggctgctgaaattcatcagaggcttatggaagaagaaaaagaaaaccagccagcagaccccaaagaaaaatctcctcagatgggtgcaaataaaaaagtcaaaaaggagccacccaagaaaaaacaggaagacaaaaaacccaaaggtaaatcaccacctatggcagaagcaactcctgtcatagtaacaacagaggaaattgctgaaatcaaaaggaaaaatgaactgagggtcaaaataaaggaagaacaccttgctgccttgcaatttgaagaaatagccacgcaatttcgacttgaactgataaagacaaaagcattggctcttcttgaagatttagtaacaaaggtggttgatgtatataaactcatggaaaaatggcttggtgagaggtatttgaatgaaatggccagtacagaaaaattaactgacgtagctcgctatcacattgaaacatctacaaaaattcagaatgaactttatttaagccaagaagacttcttcattaatggcaatataaaagtcttcccagatcctcccccatcaatacgtcctccacctgtagaaaaggaagaagatggtaccntgaccattgaacagcttgacagtcttcgagatcagttcttagatatggcacctaaagagtgctctgagaactgctttcaaaggccttcaccttcgacctgtgatgccttctcaaataggagacaggaagtggcttcatggattacaggcagccctccagaactttctcaagggatatcctgcaattgttcggcaactgcactcagcaggcagaggcaaaagtgacaccagtcaaaagaaacccaaagaacttctggagtcccttctccaagctgacattgttaaatttgcccacttcttgttggatgtcatgaatgtccttagcattctgtcctgtgtcaataagaatagaaattcctcaattgctgacatatttgccactttagagtcaatgctggaaatgctccaaatgtatcaaacaagactagggccaaaagaacgcatggtggattcagccacacactttcatggtaactgcctcagagggaaagaaaacatttctgctgtgagaaacattgttttaacacatcttatcaagagacttcaaggctgtttcagagatgccagccaaaatgtggtgagggctaccgtgattggaagttttaaattgtggcccacaaagataaatcaagaatttggagaaaaagaggtatccatcctgactgcacattatgaaccagtattagaagctgccaatgtgaaacttagtgaagtggatactgaatggagcatgttgaaattagagatttatgccagatttcagaacattcgaaaattgacctgggattttgtgaattccatttacttacacaagtatccaaatatcctgacactagtcgacctagtgttgacccttcctgcaagttcagctgaagcagaacatggctttagtcagatgaaatggaccaagtcacatatgcatgcaaaaatcaaggctgaaagcataataggaaataaagcatttactgacattctgatcgatttggtgaccctgaaccttggcacaaacaactttcctagtaattggatgcaccttacccaacctgaattacaggaantaacatctttattaacagtcaactccgagttcgtggactggcggaagttcctgttagtaacctcaatgccttggcccattcccttggaggaggagctccttgagacccttcagaagttcaaggctgtggataaggagcagttgggcaccatcacttttgagcagtatatgcaggctggtctgtggtttacaggagatgaagatataaaaattccagaaaatcctcttgaaccccttccatttaataggcaggagcatcttatagagtttttctttaggctatttgctgactatgagaaggatccaccccagcttgactacacacagatgctgctttactttgcttgccacccagacaccgtggaaggagtctacagggccctcagtgtggctgttggaactcatgtcttccaacaagtcaangcttccattccaagtgcagaaaagacctcctcaactgatgcaggtccagctgaggaatttcctgaacctgaggaaaatgctgcaagagaagaaaggaaattaaaagacgacacggagaaaagggaacagaaggatgaagaaatccctgaaaatgcaaacaatgaaaagatgtccatggaaacactactcaaagtgttcaaagggggaagtgaagcacaggactccaatagatttgccagccacctaaagatagagaacatttatgcagagggcttcataaaaacatttcaagacctaggtgccaagaacctggagccaattgaagtcgctgttctcttgaagcatccttttattcaagacctgatttcaaattattcagactataagtttcctgatattaaaataattctccaaaggagtgaacatgtacaaggaagtgatggagagagatcaccttcaagacatacagaggaaaagaaatgaagacaaaagagtgtgatttttttaattctgcaataaatcttccaaaaattaaatgtgaaaa

SEQ ID NO: 500270 - DNA, 406 bp, Homo sapiens
aaggatcagaaacctagatggacgagtaccacaggagtgctatagctgatcagtgacctgcatctgtgaaaggataaaagtaaaacaacaagggtggataacaaacgtctcagaccagccacagttaaagacataatagaggccaggcacagtggctcatgtgtgcaatcccagcacttgggaaaaccaagcagggcggataacttgaggtcaggagtaagagacctccctggctaacatggcaaacatcctgttcttgaccgggtgcagtggcgcacatttatcatcccaaaagctttgggagactgaggcggttgaatcacttgaggtcatgagtctgagacgaccctaatcaacatggtgacatccatgtctctactaaaaaatgctaaattagccaggcatg

SEQ ID NO: 500271 - DNA, 1332 bp, Homo sapiens
  misc_feature (612)..(612): n is a, c, g, or t
  misc_feature (935)..(935): n is a, c, g, or t
tctgtacatttcttcagatcttctgatgaaccaaattcctttaatttgtcatgtcaaacttgttaatattttcctttgtgatttatacttttttgtatcttaagaaatcactttaaacccagcctgtaagaatcaaagggtgcaggtgctcccgacagtcctgcgaggctcgccggtccctggctttccatgcttgggcaactgtttcacacccttttctcgccacaaacccctcctcccaaagtgctgggattacaggcgtgagccactgcgcccggccccaaattatttttgtgacctgagcatcaccacaaaagagatccagggaccagcctcactcagggtctgccctccccgtccatgcccctgctgctgaacccaagtcagagatggtttcaggtgcctttgctgggatacagtgacccttgatatcccaaaacttggaacgaagcagattcctatcacctcacataccccgctgtgatcgctgaccctaggaacaaaatccatattgcctggcatagggctggctctgtcctgacgggggggtcaccccaggagtgagagccagctccacattgggagggtggccctcacactgatcgacataanaagggaaaccaatggacactgcccttgtttattcttattgaaaactcaggctaggccgggcgcggtggctcgcgcctgtaatcctagcacttagggaggctgaggccaggcggattgcctgagctcaggagtaagagacagccttgggcagcacggtgaagccccgtctcaactaaaatacaaaaaattcaattagccgggtgtggcggatgtgtgcctatggtcccagctgctcaggaggctgaggcgggagaatggttgaacctgggagtcagaggttgcagtgagccaggagtcgcgccaatggcatgccaagcctcagntgacagagtgagactggtctccaaaaaacaaaaaaaccaaacaacaaacaagacaaccgagtcaggcgggaccatcagacactacgacacagcgcggcacagaaacaacaaccacgcacagggaacgcaggggacccacaagacgataagtagccacacgtgcgacacaacgaagagctacaacgacagaagagacccggcggcacagagacacaacgcagggcgagcattaccaagcacagaaacacacgcaccggcgggcgtaacacacgcggaggactggtggacacaacccccaaaacgagaccgcaggacgacataagaggaggagtacacaaacagacggaagcacactggcgagagcagagagagactcagaactacccccacacacccg

SEQ ID NO: 500272 - DNA, 1220 bp, Homo sapiens
  misc_feature (465)..(465): n is a, c, g, or t
  misc_feature (1220)..(1220): n is a, c, g, or t
ctacataataggccaagaacaaaagccagcatccattcctcactccaccactttgtctattttcagtgtgtgtcattgctactactgaaagacgatgtgtgaacactttcctcttctcattatataagcagcagtggctcaggaactttacgagagctgcagtagaccgtagacacatgcctcatttcatcactactaccatttggtagacccatcgagtcccaagggttattcagctctccagcattagagaggtgccagttgcttgcctgatgaaacccaaatgcacgacttaatcgccttccattgtaccccaacagttgtctgtcatagaatcattgcttaactacctggactctgagcttctggccatgtggggtgtacgagcgcccatggtaaactgcgcgccacgccgaacgtctgtgggacgaaaaggcctcctgaaaggtaaatagcgccgcaggngttacctttcctttttataatcggtaagggcgctccctaggtggaagggtactgtaggaaaggcagcacctaatgggccccttcggtggctcaacaagcctacgttgggctgctaagggaccataatcccccgcctggcttacgtgctatgacccttaacattaagaatattgcaaccaaaaagacaattttcatgtccccacgtgggcacatttgcggatcgggaccaactttattgcccctcggataaggatcccccgcaacgcccattatcctccctggaggggaacgccgcgtttggcaagttgccccattgggccatagcaataattccgaccccttctagcaatacccactttggcggcgcacgagagcgaacgtaagagggatttccgacgacacgtttcgtacggccttataggaggctcacttcacaaccgaccccttagtctttgtggcgaacctctacgcccgaaggattcccctgtagggattgattggtacaccccaacgagagggtctgagacaggcaagcctttcccacgatttaacctttggccaaatgagacacgatagcttctggggaatcgagagaattacacagcacacactttttagagggaacccttattttaggtaaattgtgccttccacgttgaacatcctggtaaaacacttttagtatgtacaaccttcttaccaatattcctctggggtgagaaaaaagacgcgactactgtgtatgcaagcactgn

SEQ ID NO: 500273 - DNA, 154 bp, Homo sapiens
ggtgatctacgaggatctccctagaaaacagcttgtgaatacagtccccgtggcatccctgtgagggtgacgttagcattaccccacactcattttatgttgcctaagcattgcgtggccttcctgtctagtctctcctgtaagcgaaagtcaa

SEQ ID NO: 500274 - DNA, 103 bp, Homo sapiens
tatcgctgataggcatgcggtacaaaaataaaatggatatggaccaaacgaaaaactgacctataacagagatgcaaagaattttaaatgggaggtctcgtag

SEQ ID NO: 500275 - DNA, 1732 bp, Homo sapiens
  misc_feature (50)..(50): n is a, c, g, or t
  misc_feature (304)..(304): n is a, c, g, or t
  misc_feature (1198)..(1198): n is a, c, g, or t
agttctgtgacgctcctctccctcctttgtgtgggcgtactgtcgctgtntcttgtcttatgattgatgcccccctgctagtgtcgtcgctctcgtttgtgttgactcccgtctctctcggaacgctccccctttgctggtgggcttagctggtgtgttagaacataccacgtgttttcttcctcccgcctttcttcgccctcatctgttgcgccatttgtcccgccgtgtgtttacacccttcctctgtgggtcacctctttcccattcgctccgtatggcggcctctttgtttcttcatcgnctgtcgatcctcctcgtgtttggggacaccccctctttttggcggggcggtcttgcccctcggatgtttttgctgcagatcatttttcttcctactcgggggtttctcctctcctgtctggtgtagttgcaccgcctagacggtgggggcggctatcataccacctccttttttccgatgctcctaattagattctttttatgttgttggaataagtgccgcgcccgtcatttttgtggtttcgcactttgtttcctctctcctggtgcaccacaccgggggggggcattactaccacccctcgcttgttcctctattatgcactctctccggctgggtatgtgatgatatttcatgccttctgtggtggtaggacattcccccctacctatttgttgaacaactcatacttctgtccccccaacaatggtggttgtgttgtaggatcccgcgcggcattgttggtgcccccacaccctgtgtatcgctatatggtatttttttcgtcccggtgggggggtctcccccccaccgatgtgttggtcgtcttctatgattccccccctctcgtggggtcgtgatagccgcgttgttgtctgtgttctccttgtgtcccccgtcgagtgagttgctttgttggtgtagatcaacgccctctcgttgagcgtctcccctcgtcgatggttttgtactcccccctctccccgcagttctttttcattgcgtcgccgctacgccacctggggtgtgctcccccctcttcttgactacgctcgctgtgtgttgtactcccccccccctccttgtcgcgggtgtcttctcatctctctctctgaggggtctctgtgtggcggttgaacacctgtgcttgcacacgtcaccctcgctgagggncgtctacccctccctctttggaccctcctctcgcccccccttcctcactctcggtcttcccccgcagggcctctacattagcggaagaggcacccctgcgcgagaggttgtgagcggagactttcgagcgcgcgcccgcggagttttcacactctctttctccctctctcgggcgcacgtgtgttgcgatctctctcagaggtataccacctcggttatattgtctcgggggcgctctctgggacacctcccaccgccacatggcgcaccggacccctctctgtttacaccccacggttcccctctgtgcgcctctggctcagcgcgcaggtggagcgcctctgccccaccacaaaaggtctcccacttttctcacgctgccccacatcaccccctctcacacctccccattgtggcacctagctgggacacacggtttcttcctaagaactccctcataaccccctggaaaatttttttatttttatttttttggggccttaactataaaaaattgcttttggccttccttta

SEQ ID NO: 500276 - DNA, 517 bp, Homo sapiens
gggtgcccggcattgtgtgcaccggaccttttgtggtctgggccatccagcccctttgcctttttctagagtgcactcggagccacgaggacttcactgtgggccatggtgtgtagtgttctccccatcaacagcccggccgacatggttttttccattaatggggtccaggaccccgggccccccagggcctacattcttcagagggagggggggtggatcagtgggtttcaggggatgaccctcccccccgaatttggaggggtttgggttttgggggatgtttttatccgccaggacttttccgtttttgacaggggaaacaaccaggggggggtggcccccgtgggttaagcctaagtttttttagccccccccccaggaagttttggcctttgtcctggggccccttttaagggatttaattttcccggctgttttttcccggggggggggggggttttgggcctgttccctgttctcccaaaaagggggaattaaaacataaccccctgga

SEQ ID NO: 500277 - DNA, 186 bp, Homo sapiens
caggttaaatccatggcttactatatatatacactgtcaatgaaacattcacctctatttaattttccttgacaaggggaggcgtctaaaacaaatcaccagatcattaatgcaacccaaaaatcaacttatgtctgtgatggcttgacacctatcccacattccattggatgttcagactttgct

SEQ ID NO: 500278 - DNA, 987 bp, Homo sapiens
  misc_feature (36)..(36): n is a, c, g, or t
  misc_feature (42)..(42): n is a, c, g, or t
  misc_feature (219)..(219): n is a, c, g, or t
  misc_feature (247)..(247): n is a, c, g, or t
  misc_feature (268)..(268): n is a, c, g, or t
  misc_feature (509)..(509): n is a, c, g, or t
  misc_feature (515)..(515): n is a, c, g, or t
  misc_feature (544)..(544): n is a, c, g, or t
  misc_feature (567)..(567): n is a, c, g, or t
  misc_feature (586)..(586): n is a, c, g, or t
  misc_feature (624)..(624): n is a, c, g, or t
  misc_feature (672)..(672): n is a, c, g, or t
  misc_feature (736)..(736): n is a, c, g, or t
  misc_feature (739)..(739): n is a, c, g, or t
tgagacagcacacacggcgcctggcatgggcgctgngtctgngccctggggtgtgtgtcctggggccttgccttacaatggcacctgccccgcaggactactgcgggattcccgagataagccctatagcagccctgtcagagcagaggagagggcacggcaatggtggcttactctctactctcagacaagctgattaaagcagagacgcacccctgnggaggagaatattttctgtaacttattntgaaagctcatcctgagtgtncaaacctggcaactcctgtttttttgcaaaatattctcattatgagaaatttggaaaacacataaaagtagataaaggaccaaaaagacaccaaagccagctcttactcatcttctggagagcttccttccggccttgctttgctccccctgtgaattgtttcaatagttgggattgacctggaaaacaatttcatacaactcctgggaggcctgcctgtgtcagatgtcataaatgcgtntaattntcatggcacacacaccagtttggcatggngctccagtgtctgggtggaccgngtctggtgaggcactttgnggctcagcagcagcattcgcgccacacagccacgggtnatggaggcacagcagccgggcacccatatctgccgtcctaacgtcctngtcaaggtaagacgtgacccatctgcagtccaccgtcaacaaacaggatttaacccataacctnccnggacttgagaccttttccaaacttcaacactgaaacttatttggccttacttaaaatgactcacttaaggggattaaaaggccaaccacgataagggataaaccgatgaaatttttaccacattcaatattttctaggggggcccgtcccaattccctataggagccgatcaaatactggcggctttcaagccgcctgggaatctcgggtaccacttatgcttgggaaatccttttcacgtgggaacc

SEQ ID NO: 500279 - DNA, 104 bp, Homo sapiens
gctcgactgaactgtggggtcgacgggaggggtgccttttacatgttcagtgtgaacaccgagcgctcgtccagggaaggctgccatgcacggcgtggtcgacg

SEQ ID NO: 500280 - DNA, 628 bp, Homo sapiens
  misc_feature (230)..(230): n is a, c, g, or t
taaaaggtttactatgtttaaaggaccaaggggttattattaaaaaaaatttaccagaggaaatttggaaatcaataacaattaaaagcaagaatattctccccaataattagagaaatacaattaaaaacaaaggtgaaatgtgttatttcacacaagtcaaactggacaaaacaaaattatttggactattacttaccaataggtgtaaagtgtgggtgttcacaatnaaatactcgtctggtcatatggaaaaaaaaacaaaaaaacaaaaaaaaaaaaacaaaaaaaaaaaaaaaaaaaacaacaaagagggggggcgggaaaaaaataaaccccgaggaggggggcaccaatatgtgggccaacccaggtttttggtcgaacaaagggccgcccacataaaagcgagacgctaaataaaacccagcaccgacacggccccacggtgaaaacaacacgtgcagcgggggaaaccaccaccacgcgacgaacatcgtgagaagaaccccccaacattcggggggggagcacacatgagcggcgacaccccaacaagaaaaataacgccgccgacgaccaacaacatacggcgaacagttgaaacacgaaaatccggcggaaaaat

SEQ ID NO: 500281 - DNA, 555 bp, Homo sapiens
  misc_feature (54)..(54): n is a, c, g, or t
tggtgaatcagaaactgaatgaatgactgctaaactctccgtaccatacaaggncgctaaggtaaacagacatgctcattgaaaaactgtagaggaatctgataaaaaaaatcctaactaaaaataccaaagacaaaaataaaatgcacaccagagagggggcacctcccctgaagtgtctgccttaagcggtgccctgacatgtgtagctcccacccccactgttattgtgtagtttcaaagagaggccccacccatgtctagtgttaggagtttgtgtctgtataaactactgagctcaggacgcacagacatagttcaacacacacactacaggttagtcgaagcgatcatccagctgaagcttgtgagaagtgcactgcttcatatgtgtgggagcagctgctgctgcgtcgctcagcagcgagcgagcgagcaacaacatcgtgcgagcgacacatcaccaccctccgctgaatattttacaagtgctactccatacggcgtgacatatattattcctcatcttttaaagagagcggttaaaacgtgagt

SEQ ID NO: 500282 - DNA, 129 bp, Homo sapiens
gctatatatcctaacagcaggaggggagatacagaggcaggaggcaggaggcagaaaaggcatacccagaaccacagttgatgaggcccaaactaaatgtgacaacagtggagacagtacgtattccaa

SEQ ID NO: 500283 - DNA, 1190 bp, Homo sapiens
  misc_feature (445)..(445): n is a, c, g, or t
  misc_feature (456)..(456): n is a, c, g, or t
  misc_feature (459)..(459): n is a, c, g, or t
  misc_feature (468)..(468): n is a, c, g, or t
  misc_feature (470)..(471): n is a, c, g, or t
  misc_feature (478)..(478): n is a, c, g, or t
  misc_feature (485)..(486): n is a, c, g, or t
  misc_feature (500)..(500): n is a, c, g, or t
  misc_feature (503)..(503): n is a, c, g, or t
  misc_feature (505)..(505): n is a, c, g, or t
  misc_feature (516)..(516): n is a, c, g, or t
  misc_feature (519)..(520): n is a, c, g, or t
  misc_feature (537)..(537): n is a, c, g, or t
  misc_feature (548)..(548): n is a, c, g, or t
  misc_feature (550)..(550): n is a, c, g, or t
  misc_feature (561)..(561): n is a, c, g, or t
  misc_feature (805)..(805): n is a, c, g, or t
  misc_feature (818)..(818): n is a, c, g, or t
  misc_feature (866)..(866): n is a, c, g, or t
  misc_feature (868)..(868): n is a, c, g, or t
  misc_feature (890)..(890): n is a, c, g, or t
  misc_feature (949)..(949): n is a, c, g, or t
  misc_feature (999)..(999): n is a, c, g, or t
  misc_feature (1117)..(1117): n is a, c, g, or t
tttggtcttttttttctttcgtttttgttttttttctgtttggtcttggtttgttgtgctcctgttttgttttgttgtttttttgtgcagtttctttttggatattcctggttgatcttgtgtgattgcttttttggctttattctgtattgctctactttctctcttttttcttcctgtttgttttttttttggcttctcttatgtgttgatatgtacctttgtttggtgcttatttttaagtctgctaatggcaattaccttatgcatgtacatttcccagactttcatgaagctgttgaggtcctatgtgcaattatgcagctatgttgtcgatatattttatcatctctctctatagtctccttttcttcataacatagatactgacatgataggaagctctcagcttagggttatagagatatatattttagattatagnacatggattcnaantgactggancnnattggcngacaccnnactggtaacctgcnatncntctggtgttanccnncaggattgttccactanaatttattttncnaaaaatttacntcacattattctatgtaagtgatgacttgtcagtgttccaggtgtatcttagctaaaactagagaatgccctaacttagatggtttttgaagcctatacaattggtattgtttgacccttaagcttttacatctcttagcatggaggacgaagaaagctgtacattgttgcttgagagtctgtacatttagtccagatttgtatttgcactgtcagtatggcaaatgagtgaaaaatgtttaanacactattggatnttttatttcctttttttgattcacgcttatacccgggctgcaaacctncncatttatgttcctcgaccacantggggatttttttaaatgtctacattctttctaataaactgttggaacgacttcttggnctgtccttttaagtgtctggcttactgtaatttttatgtatttaccattnactggaatggagtttatttgaggaagaatttgggattattcctctgtttgaaaaaagaggcttgctgtaatgtcacaggaaaccttttaaaagtggatctgtaatagcatatgtagancacttcagcagttggaaaagttaagtgttgtgtgatttgatttgcatattaagctaaatgtgttgtcctccta

SEQ ID NO: 500284 - DNA, 686 bp, Homo sapiens
  misc_feature (445)..(445): n is a, c, g, or t
  misc_feature (495)..(495): n is a, c, g, or t
  misc_feature (613)..(613): n is a, c, g, or t
tgttgtggcgcccctgttgtcgcgttagttgggtgtcctggtgtgttctcgggccgcctgtgtggggtgttcttcgtttgtccgcccccccttgttttttttttgtctggtcctgccgtttttcttttttttctcctttgttttaggaggacatacacatcttagttttattctccatccgattctacaccacactttctctctccaactgctgcaaagtgcatctactatatgctattactcgatccacttcttacaaggtttcctgctgacattaccagcaagcctcttttttccagacagcaggtactaatcccaaattcttccgtcaaatctactccacttccagtaaactggtaaactcacataacaactctaccagtcaagcccagacacttacactgtctacattctttctaataaactgttggaacgacttcttggnctgtccttttaagtgtctggcttactgtaatttttatgtatttaccattnactggaatggagtttatttgaggaagaatttgggattattcctctgtttgaaaaaagaggcttgctgtaatgtcacaggaaaccttttaaaagtggatctgtaatagcatatgtagancacttcagcagttggaaaagttaagtgttgtgtgatttgatttgcatattaagctaaatgtgttgtcctccta

SEQ ID NO: 500285 - DNA, 943 bp, Homo sapiens
gactgcattccagcctgggcgaagagcgagtctcaaaaaaaaaaaaacaccgatgtgggcatgtgaaaagctccgggaagatgcagaaccccttggggaaccagagggaaccatgtgggtgcaggaaggcccaccgaaaatttctaatgggtcttacgggtcgtgggaggaacatcagtgtgggaacgatgaaaaatcattattgctaaaaagaagagggttaaaaggctgagggataccctaaagctcgtggtaaattgaattttggacgtgagagaataggagggcttataaggttcatctttcaattaccacaaaattgattcttagattatttggatagatctctggggttacaaacggggattttctatggatagaagcgggaattgcagtgtgagtgcgcataggagtatagaacattttaaaaagagattgaagagccagactagtgagtttcaagggtgtacaggtcttggaccctcttttgatgctgaaaaatcgtggaattaataggtgggagaatgagatactggttatcctttctaatgggacattcttttaaggtttttgggagacattcaggaatcgaataatgtcagagtgtgaaacacatggatgttggggtaattatttgaatgttggtgggattaagatcattggagtaggaatgtgggtgaatgacgggtactaaaatttagtgtgatagcagagggagtggggtgagataaagagcagatcacaaagtatgtggcagctaggaaacgagtagcctttctggaaagaagattgggcggcaagagtaggtcgataagggaataaaacattggattgggggctggaacaagaatggtagaaatatagcacgaggagctttggaataggaaaggacgtataaagaaatcgggggggctaagagggaatatcgaaaaggggtatggta

SEQ ID NO: 500286 - DNA, 495 bp, Homo sapiens
tgtactagggattacaggtgactcccaccgatgcctggctagatttcggtagttcatgagtagagatggggtttcagcatgtaagccaggctggtctcagagctcctggcctcgagtgatctgtcatccttggctggtgattacagatgtgagccaccacgcccagcctcatttttttgagactgggccagggaagggggcagtgggccagtgactgtctctctctgttgcccaggctggagtgcaggatcgtgatcatggcccattgcagcctctacctcccgggctcaagcaatcctcccacctcagcctcccaagaagccggggaccacaggcatgttccaccacacccagcttatttttggtcaagatggggtcttgccatattgcccaggatggtctcgaactcctgggttcaagcaatccaacccagcgttcccaaagttgctgggattatgttgcgaaaagctgagtgtcgggtactacgctttggca

SEQ ID NO: 500287 - DNA, 1072 bp, Homo sapiens
  misc_feature (7)..(7): n is a, c, g, or t
  misc_feature (160)..(161): n is a, c, g, or t
  misc_feature (608)..(608): n is a, c, g, or t
  misc_feature (631)..(631): n is a, c, g, or t
gcctatntggttgcctttttgaaacccaacctgtgtccaatccaatcccaaccgtgtaccaattatcccaaaaacatccagctagcacgccgcatacgtggagaacgtgcttaagaatccactatgatgggaaacatttcattctcaaaaaaaaaaaaannaatttctcttcttcctgttattggtagttctgaacgttagatattttttttccatggggtcaaaaggtacctaagtatatgattgcgagtggaaaaataggggacagaaatcaggtattggcagtttttccattttcatttgtgtgtgaatttttaatataaatgcggaggcgtaaatctttagatgagtattcagtgttcaacttgcgtatttaacgaatcattaggattttctcataaatacacctgttaaatttttctggacaatgccagcatttggatttttttaaaacaagtaatttcttattgatggcaactaaatggtgtttgtagcatttttatcatacagtagattccatccattcactatacttttctaactgagttgtcctacatgcaagtacatgtttttaatgtgtctgtcttctgtgctgttcctgtaagttngctattaaaatacattaaactanaaaaaaaaaaaaaaaaaaaaaaaaaaaaattttgggggggctgggccacttggaaaaggtttcaaaaccaattcgtgttttggggcgccaggggcccaaggtaaggtggtatcggccacacttgggcaataaggctggtcccaaagaggaacccggggcactatagcataggggggtggggattctcacacccaatataaaaaaacgcgccggggggagaacagcacggggttcgtggaacaaaaatcccaagaagcggagcgtccagagggacaaatagcgaggacattataaaaaagaggggtttcaaggaacgagccgtagatataaaaatactcgccccccgccgtggtggaatgaaaacgcgacaagcggacggcgctagtataacgagacaggacacaagaacaagaagacaacagcgaggagcaagcgtgagag

SEQ ID NO: 500288 - DNA, 540 bp, Homo sapiens
attatggccgggggccataactgcgtttagacttcccgctgcgctaagtggcatataggctggtgtataccttgttacagacgctggggaacataaagtagcctctgttgtgaggacgagcgagttaaggcatacattcattttatactgtgaccggttcaggagcacatcttgcaaaaggcctcttttcattcattgtttctggaaaggaaagatctatcaagattgttttacattgaatatatgataggttttttaatgagatattagttgaaaaagttgtggaggtctaacaaacggatgctcgaaccttgcaaggtaagtgtatgataaaatgacagtttttgaagacaggtcaataggaggaatatgtggactgataacattagtagaatccttgaacttgaatgtattagacttaaatgctgatgtaaaactgaaacatgattggtcagagattatcattaggtagggttaacatgaatagtcgggaacgatataatatgcttacgttatgcccaaaagcatttgcatggaata

SEQ ID NO: 500289 - DNA, 247 bp, Homo sapiens
  misc_feature (154)..(154): n is a, c, g, or t
taattctgcaccacagcccgcactggcggatacggattcaaatccaatttagaaaatcacttcctgatgtggtatacactaaacaccacactgcagccaacccagtccagccttggttgtgaggcagtgcccggtgccttgtccttgctgaggncacaatgagtcagactgcgcagaacagctgtgggtctgcaagggccctcctgggcttgccccagtgagggttgggttgtgtggtcttgtgaag

SEQ ID NO: 500290 - DNA, 682 bp, Homo sapiens
  misc_feature (81)..(81): n is a, c, g, or t
  misc_feature (183)..(183): n is a, c, g, or t
  misc_feature (213)..(213): n is a, c, g, or t
  misc_feature (234)..(234): n is a, c, g, or t
  misc_feature (394)..(394): n is a, c, g, or t
  misc_feature (467)..(467): n is a, c, g, or t
  misc_feature (532)..(532): n is a, c, g, or t
  misc_feature (535)..(535): n is a, c, g, or t
  misc_feature (556)..(556): n is a, c, g, or t
  misc_feature (569)..(569): n is a, c, g, or t
tttttttttgggctctaaagggggtagagggggtgctatagggtaaatacgggccctatttcaaagattttaaggggaatnaattctaggacgaggggcatgaaacgggggttggctccacagatttcagagcatggaccgtagtataccccgggtcgtgtagcggtgaaaggggttgggttnaagacgtccggggaatggcatctggttttnaagcctaaggtgggggacagntcatgagtgcaagacgtctggtgatgtaattattatacagaaggggggcttcaatcgggagtactactcgatggtcaacgtcaaggagtcgcaggtcgccgggttctaggaataaggggggaagtatgtaggagtggaagattagtccgccgaagtcggngtactcgtaggttcagtaccatggggggccaatggattggatggtaagggagggatcgtggacctcgtcggtnatgtaaaggatgcgtagggatgggagggcgatgaggactaggatgatgggggcaggatagtcaanggnttctattcctgagcgtctganatgtagtatagtnagtggtgggagtgtccggaacagggcataccgggactaggaagcaggatacggaccatgattcatgaagggggtgaacatgaaacggtgatagatcttctatgatagggggaa

SEQ ID NO: 500291 - DNA, 387 bp, Homo sapiens
cctaatcgagcggtgaaaatcgacagcaatgccgatctcccaggcggcggaacgataccggctcctgaatttcccgatttgtttaatggtactactgtcgggccgaatgaattgaaagagtatcccaatgtggggccagggcgttacaacccgattcgtgtgctgttaccgcaaggccttgctaacgttggcctgaatgacacgattgaagtgactttcaaggggttccggaatgttgacggcagtgatggcgcatcaccggttgaactgcccttggcggatatttgtttcgctaccacacttgattaataccgaagatctggacttggagtattacgaggtctttgtccctgagcggaatcactatgccatctgtactcgcggcgc

SEQ ID NO: 500292 - DNA, 739 bp, Homo sapiens
gagctgcacctcctccaccacctgttcccagggccgtggtgtggaccacctcgggggcttgggtacgtggtacaccagtaaggggagccatcaccagaggtgccactgtgactcgagggtgcccaccccactatgtgaggggtgctccagcaccaagagcacggacagcgggtttccagaggatacctttgggcctccaacttcttggacagaaacatttgaagactatggatatgatgatacataggcagaacaaaagtaacgaagggctacggaagggctattaacagccagagtcaagggggacctcagaatattatgatatggacatgggggaaggtcaagattcttatgaagcttatggccaggacgacttggatattgggacccaggccgtcggttgaaggccccttcggtggataggccagtgaaggggagcataccagaggagcaccaatagtggacggtttttaaaaacacaaacattggggggaaaattatcaggttatgaagcaaagtgggtatagatttctggtatctcgcgaggatccgtgtgggcttaaaccgaagaaaagacaagtaaatggtctaaaggtgtttgccttcgggggtccctttttttcccaattttatgcaattcttaattctgcattcggacttctgaatgtgagattttaaaatgcgtaaactacgattggaatctcgaataatttcagggggtagaagcctctttggggaa

SEQ ID NO: 500293 - DNA, 920 bp, Homo sapiens
ctccttcacaagaaaatattgcatctgtcttgaagaaaattaccatacagagtctaagattgatcgagacaagtcttttatactttgaggaacacagtggactacataaatcagtctgttgtactcaggccaatagctgtggaaagaaaattatttgaaaacttacgagcaagatggttccatcttttgccctagaagcaattgaagtgtcattatacctaataagtgtctccataacatctcttaatagatcacacttaggggcaactcatggaggggtcttcaaagaccttgcaagtaagtactaactatggagatatcggctaagttcaatgcttgtctgagaggtcactgtactttcactgtaagagcagttatgagctgtatcttacattgatataagaccagagtccactaagatgtgaaacccagtctgtatctatagatagaagattgactgaggaaggatttgaataatcacttgtacaggtcttaggggaagcgagtgcatttgaaatctcttgaggtgacaggcttgtaatggtcatattttgtagccatggagattggactaatctcactgagcatgttgggccattatccagtcctgtctgccatggtgtttactataccctgtataagctaagaatggtcttcctgcagtcttttataactcgggtgtggtgaaaagaaaggtcataagtactagataatgccattgacgttgaattattatcactaattccagcgacatatcgctttatttggaactagctattactcatctgtgtatattattgagtctggggctgctttgaaaatgagttcgttgccatacgacgattggttaaggccctacaaagccctaattatttactggctggttttggcacaaaaaaagtttgtccactcctctgttt

SEQ ID NO: 500294 - DNA, 970 bp, Homo sapiens
ggggagccggagagatcgcgcgccttgccgtcaatcggagcctgtgagccgagaacgagccatgtggctagaaatcctcctcacttcagtgctgggctttgccatctactggttcatctcccgggacaaacgaggaaactttgccacttgaagatgggtgagtgggggccaggcacgaggtccgcagccagggaggacagacagcgatccgccctttcaaggtggaaacgtcagatgaggagatccactgatttacaccagaaggatcgagtaagttccgttctcaccccatcgttatggagggacagtctgcttccacatagtggcgttcaagctccaacatacctgaagaacagtcatctcctagctggcggaatgaatttgacctggaagaagcaggtggagattctcaaccagataccctcgagcttcaagactaagcattgaatgggctggacagtccacttgcatccacgtgaagccccgcccagcgtagaaccggaggacataccccgaagacccttgctgatggtgcacgggtggcaccggctctttctacagagttgttataagatcatgccactcctgactgaccccaagaaccatggcctgagcgatgagcacgtataagaagtcgatctgcccttccatcctggctatggcttctcagaggcatcctccaacgaaggggttcaactcgagtggacaccgacaggaatcttttacaaggctgatgctgcggctgggcttccaggaattctacaatgcaagggagggggacctgggggtacctgatctgactaatatgggccagaatgggtgcccagacaggtgaaggcctgcacttgagatggctttggtagcaggcaagttcgtctacgctgacctctctgggacaggggtacgggaggttacttgggctcactgaccaggagtttggagctgatggaaccggcaggaaaaggtatcc

SEQ ID NO: 500295 - DNA, 800 bp, Homo sapiens
aatagaaaaaccccccaaccctaaggtttttaaaacccaaaaactctccctttttttgaagcccacagtttagttccaaccctttcttttcacttttcgagattggcgttctaaaattatacttcaaaatgtgggtaacgttcagaaatctgcccaggggcttacccccttgtaattttcaagttttcccaaagtggcccacaccttctgtttataatgaagaatttcaggagcactccacctttgtttaaatcgtccttttttttctgccccattgtccaattccttctaatcagaaaagcatccccacttatttcctccgcgtctctgtcgtctaataaacgccttagcatggagtttgcacctcggggtcatgctttccaccaggtacttttctcatctctcaaaacattatctcattgtctcttcagtggtgaacgttcctcctatcatccagttagtataggccatttatgttccaaaccttcttaaaacgtcaatatttccttatacaaccaattataatctaggccaacagtccttaaattgagaagatatctatgactcatcttgctctatgccctccctgattttccaagctggcgtatctttgatcattttccagtgtccctcgacccgatagccaccacttcagcctctaaatctaccagtccttaaaattcagcaggcctggtgcatatgtgtgtcaagcatcatttataaagtatgcggtcagtgggtcacttatgacctaatgttttcttccagcctggacaacatggcaagacccctgtctctac

SEQ ID NO: 500296 - DNA, 164 bp, Homo sapiens
tgccatcactgtcatatgtatactggcctagtgatcaagtctaaccccaggtcagctactccttctatgtgtgacccaggcaagggagtccccctctgggtacacttctgttctacgtgaaggcagtgctcggtcaagtcagtgtttgtccaaaaatgagacat

SEQ ID NO: 500297 - DNA, 151 bp, Homo sapiens
aacatgcaacggactgatcagacgaagaggggcgtttggtattgtggttatggcaggcggttttatattgaatattgtctgtgattaaattgatcctccctaagatagaggagacatctgctaggtgttgggatcagtccgttcgcatgtt

SEQ ID NO: 500298 - DNA, 467 bp, Homo sapiens
  misc_feature (27)..(27): n is a, c, g, or t
tgacttgcccaaaaaagaaagcagaanaacccacccccaaagacgttcgaaagagaagggggaaatctgggggtctgccccttcctttagaaaagccgaggttcagggtgagagcccctctgagcggtccttggttgagctagcggagcggggaggctcccggcgcccctgcgatgagacccccaccctcacgccggctgcgccccgggacctccgcgaggattcgtccggcgggcgcgcgagcgagcggggtctcttcgggtttcaagcggccccggggccggcgcctcgtgaccctgccggactctccctccccgcgcggcagcgaagcgcatcaccgaggctggggccgggctcaccgtggggccagagcccgctcccagcaggatctcggcgaagaccagcccccgcacgccagcccgccgggtggaagcccggggcaccaggacaggcccggaggcggccgc

SEQ ID NO: 500299 - DNA, 1624 bp, Homo sapiens
  misc_feature (767)..(768): n is a, c, g, or t
tggggctctagaagggggtaaagggggtgctatagggtaaatacgggccctatttcaaaaattttaagggggaattaattctaggacgaggggcttgaaacacgtggtggttggctccccacagaattctcagaagcctatgtgcaccggtagtttataccccgcggctcggtgttagcgggtgaaaaggtggttggcgttaagaacgtccgggaaatggctatcgtggttttataagccctaagtggtggggcaccagctctcagtggagtgtgccaaaacgtctcgtggtgtgaagtgtgtaattatttattacgaaatggtgggggcttctcaactcgggggagttacctactctcgaagtgtggtcacacgtctcagagggagtctcgcgaggtctcgcgcgtgggtctcatagggaaatataaagtggggggaaaagtatatgtgatagagagtgtgtgaaaaattatagtctccgccgcgaaaagaactcggggtgtataacactcagaagaggtgtctcacgtatacccatgtgtgcgggtggggcccacatgtgtgcattgtggagagtgggcacacgagggagaggagggacactccgtgtgtgacacccctgcgctcggtgggttctagtgtgtcacaggaggagcagtgccgtactaagaggaagtggggagagcgggcccgaaagtgagagggacacttcagggacagtgaaagtggcgcggagcccagggaaataagttctccagaaagccggnntacccataaatttctcgcgatgagagcgcgccttccgggcagacagtgggtagagtacaaatccaagacttaaagactaacgggagtgcggcagcacgcgggttccggggcacaccaggcgggcgcactaaccgggggacaccttaagagaaaacggaccagaaataagcgcgggcaaacacaccgtgcactcaagatgaaaggagggcagggagaaaccacccactggaacacacggcgggggaactaaaaagacccccctcccactactgggaacctaggggcgcgaacacggatacagccgggtcttcggccaaacaaacctctctataagtaaagaccagaacaaccggggtgccaaacggcggggggtgttacccccggggaactcctgtgaggcacaaacgagggggaacatcaccggagacaagcgggcgaggcacacacggaagcaacataacgacacgtccacaagggtcccacccacacaacatgtacacacgtgtgtctgcggggagcaaaccctgggtggagcaacacaacgagggggcgaacaacatccgcgggagccgcgtggatatcagaacagcggcggtgcaacaggggggcaactcaccagggtcgcaaagggtgtgtttatggtaccccccaataaaacacaacgcttttacaacaggcttgtcgagcgacgagcgaggagggaccaccacccaactgagggagggaagcggagggaaccacccacaaacaaagacgtatgatatcaccgggcggaactgtacaacgcccctcttaacgaaaaaatacaacgcggagtcaagcatgcaccaacaggagcagacgacacacaacacag

SEQ ID NO: 500300 - DNA, 343 bp, Homo sapiens
attcagaagctgcccacatgagaagggcatgacgtcaccagactgtttctggactgggagaccttgaggctctaggagtatttctgacacctacactggttcctcaggtaccgggacctgtagtggaggattgagcccactgagcatctcactgtacaggtaagagaagggaaagctggatccacattccagcctggaatgagccagacactatcctccccaccctctgtctcacccacctccctgcttcggcttcacggccacctcaccaggaaggcttctgcatggttcttggccttgccaaggccctgctcttgaaaggcaaaggaggggaaaagggaaa

SEQ ID NO: 500301 - DNA, 366 bp, Homo sapiens
gagatagcaaagaaacatataaaacaaaattacaaatgcagtgccagatgttcatttattactcttaatgagaatacattaaaactaccattttaaaagttgaagactggccaggctaggtgactctcccctgtaatcccactttggaaggccaagacaggagtatcacttgagcccaggagttcaagaccagcctggccaacatggcaaaatgccatctctactaaaaatatttaaaaaattagctgggcgtggtgcctcatgcacctgtaatcccagctacttgggaggccgaggtggaagaatcgcttgaaaccaggaggcagaggttgcagtgagctgagatcaggccactgcactccagcc

SEQ ID NO: 500302 - DNA, 102 bp, Homo sapiens
ggtgctgggaatacggaaccatttgctctgggaaaggctgcggtgcgggatccactcttggaaccttgccctgtttgatcctcagctacgcatgcgccatat

SEQ ID NO: 500303 - DNA, 98 bp, Homo sapiens
taccccctggaaaaattggactttctggagttatttaacccctatggtcagtatttttgggccttaatgataatttaatataaatttagcttttctta

SEQ ID NO: 500304 - DNA, 299 bp, Homo sapiens
tggaaagcacaccctctgagaggcgaaccatcccaacaggatacattactacagtatgttctatagaggtgaaccatcccaacaggacacattactacattactacaggatgatctatagaggtgaaccatcccaacaggatacattactacagtatgatctatagaggtgaaccatcctaacaggatacattactacagtatgttctatagaggtgaaccatcccaccaggatacattactacagtattatctatggaggtgaaccatcccaccaggatacattactacattactaca

SEQ ID NO: 500305 - DNA, 216 bp, Homo sapiens
gatatactaaaaccatacatgttcatatattattagcattcccctaatcattgaaatcaatacacaattcaatcatactctattgtattcatatttattttatattaccactcatgttttatagtaaataatcattctgtcatattcacctatttcctgcagccatccaatcatgcacttatttccacccacacttcagcctatgtttatacatcc

SEQ ID NO: 500306 - DNA, 345 bp, Homo sapiens
  misc_feature (7)..(7): n is a, c, g, or t
aaaaagncaccccccccccggcccttttgcttccctcccatcagtttgggtgacaggaagaaaccacccctcaaccccacaagggttttgtgttccttttcacgcaaaaggggctttttatataacccaatgtgggggtttaggggctttttgataatggacagttttttgtgaatttaaatttatttctttttatatttttagggcccatttcctttttaataaggttaaaaagaaaaaaaaagtctagcgaaaaaactcctgtttttgccatgtgatgttccccaagggcagctgtagaaaagggcttgtccggtgttgaataaaaaaaccccctttgataga

SEQ ID NO: 500307 - DNA, 373 bp, Homo sapiens
  misc_feature (238)..(238): n is a, c, g, or t
  misc_feature (266)..(266): n is a, c, g, or t
  misc_feature (272)..(272): n is a, c, g, or t
  misc_feature (284)..(284): n is a, c, g, or t
  misc_feature (287)..(287): n is a, c, g, or t
  misc_feature (296)..(296): n is a, c, g, or t
  misc_feature (322)..(322): n is a, c, g, or t
  misc_feature (335)..(335): n is a, c, g, or t
  misc_feature (348)..(348): n is a, c, g, or t
  misc_feature (351)..(351): n is a, c, g, or t
  misc_feature (361)..(361): n is a, c, g, or t
agcatcccctgggcagtctgagcttcctcgagctcgcctgccagcctctagttcttcctgtgctccttgatcacctgagctgcctccggttctatttggtcctctccttcctgtaaggcttccttttatgttttgtttcaatcccaaatgtcttaatgttttgcagtgtgtatgggtttgagccccttgttcattctccttcctttttcctcccgcttccctctccatgaagtgattntgttgacaataatgtatactgcgcgttnttttcnctggtttatctncanaaatttttntgggcttttttcggtgttaaattcanccctgcgctaaancggggatgttccnttnaataaaaaancagtgtggttta

SEQ ID NO: 500308 - DNA, 398 bp, Homo sapiens
cacttttcctggcctataaagtcgaactttaagggattcctttgctcctgtatctgataccaggctgtgagaagcagccaggtcacctcttgaatgctttgctgcttagaaatttcttctgccagatactcttgatcactctcaagttcaactttttacaggttcctatggcatgaacaacacaatgcaggcaaactctttgctagggcataacatgatgacttttactccagttcccaataaactcctcatttccatctgagacctcattagcctggctttcactgtccatatttctatcagcattttggtcaaaattatttaaccaagtctttaagaagttccaaacttttcctcatcttcctgtcttcttctgagtcctcggaggttattggcat

SEQ ID NO: 500309 - DNA, 204 bp, Homo sapiens
  misc_feature (17)..(17): n is a, c, g, or t
  misc_feature (29)..(29): n is a, c, g, or t
  misc_feature (108)..(108): n is a, c, g, or t
  misc_feature (139)..(139): n is a, c, g, or t
  misc_feature (164)..(164): n is a, c, g, or t
ggagagcagcacgcagntgaaggcagagnggaatgacaccgcaagccaaggaacacggagcattgctgggaccaccggaagaagccagaagacaggcctggagctggntttccctcacagccccagaaggaacccaccntggtgccaccttgatttcggacttntggccttcagaactgggagagaataaatttctgttgcttt

SEQ ID NO: 500310 - DNA, 2280 bp, Homo sapiens
ggcacgagggcgcgggcggcggtgacatcacggccacggctggcgggaggggcggcggcgccccgcgcacatcacttcctcggcgcctccccgggggaggacgggcgaacgaggcgcggacggacaggcggacagcagggcggacagcagggaggacagcagggcgggcagggggcggacggccacggcgcggggggcgctcccggctcccgctcccgcgtccccgacccatggcgggcccggccccgcccgcggccgacgagctcccgggcccggccgccaggcgcctctactccaggatggaggcgtcctgcctagagctggcgctggagggcgagcgtctgtgcaaggcgggcgacttcaagacaggcgtggccttctttgaggctgctgtgcaggtgggcaccgaggacctgaagacactgagtgccatctacagccagctgggcaacgcctacttctacctgaaggagcacggccgggcgctggaataccacaagcatgacctcctgctggcgcggaccatcggtgaccgcatgggggaggccaaggccagtggaaacctgggaaacacactcaaggtcctggggcgcttcgacgaggctgccgtctgctgccagcggcatctgagcatcgcccaagagcagggagacaaggttggggaggcgagggccctctacaacatcgggaacgtgtaccacgccaaaggcaagcaactgtcctggaacgccgcaaacgccacgcaggaccccgggcacctgccgcccgatgtccgagagaccctgtgcaaggcctccgagttctacgagaggaacctgtccctggtgaaggagctgggcgaccgtgcggcgcagggcagggcctacggcaacctgggcaacacccactatttgttggggaacttcacagaggccacgaccttccacaaggagcgcctggccattgctaaggagtttggagacaaggcagccgagaggagggcctacagcaacctggggaacgcccacgtcttcctggggctgctttgacgtggccgccgagtactacaagaagacgctgcaactgtctcggcagctcagggaccaggcagtggaggcgcaggcctgctacagtctgggcaacacctacacgctgctgcaggactacgagcgcgcggccgagtaccacctgcggcacctgctcattgcccaggagctggccgacagagtgggcgagggccgggcgtgctggagcctgggaaatgcctacgtgtccatggggcgcccagcgcaggccctgaccttcgccaagaagcacctgcagatctcccaggagatcggggaccgccatggggagctcacggcccgcatgaacgtggcgcagctgcagctggtgctcggccgcctgaccagcccggcagcctcagagaagcctgacctggccggctatgaggcccagggtgagttccagggttgtgggggggtcttgctccccacaggcacggaccgcatcaggagctgcggaggggtgggatcgaggccaggccagcatggcggaggtggcagccgccagaaaatggcgcctacaagccagttcttcttggcctcagggacagcacaggcctgaggttcaccctgagcccttcccacccgcatcctgagtggcgctgcagggctgctggatgaaggacaggaggtggtcgcctgttgccccactggctgctccagggcctccacccccacctccccctggagccctcggtgcagggagggcttctgtcctcagacccaagtaggagagggctgctgggaggcgagagggcatcagccagagggctgggctgggctgggctgggctgggctgtgggagccctatgtgcctggggcagtaatcaggcaaggcccaaggccatgcgaggccaccgtggtgacctcattcatggaccgctggtcgtcccatgccggtcagcagtgctgcagacacaggacagaacgtcccctgcaaagcgaaaagactaataggtgccaggggggtggtgccaggttgggccgacttcctgaggtggctggcaggtgggtgaggggcaggcttggggggagcagctgccccacccatgtgtcccccactcccaaaggtcttgagtttgccagcccccgagaagggatgcctgcctcccagaacgtacctggtgccccccaggcctgctaaggaccaggctgggaacaccaggcttggatgtggtgctgggctgccggagtttctttttcttatcttatttttaataattaaatgtttttatag

SEQ ID NO: 500311 - DNA, 132 bp, Homo sapiens
gcgtttctagaggatccctctactcgcgggtgctgaggtggtgggtcagcatggatccgatcctaggtggtgggacaaacaccctttggctaatgctactgcgtacgctctggctgctgagtacaccttgta

SEQ ID NO: 500312 - DNA, 297 bp, Homo sapiens
attgtataatgcctgaagtgctctgtatgcctgtcttcagctcacaatggagagcaccggtgtgagatcacgtgagctccggctacaagtgcatggcctggccgccatgcttcatcgtcatctcagaccttcgtccagggtgtctaacatgctcacggccaacaaacaggtacagtcaactagacgagtaaaccagaggacaggagagctgtccttgaccaaaataactgggagcgggaggaatgtaatttcatacccttcaccaaaaaaaaaagggcgaggagatgaatgtacggt

SEQ ID NO: 500313 - DNA, 2064 bp, Homo sapiens
  misc_feature (1818)..(1818): n is a, c, g, or t
  misc_feature (1887)..(1887): n is a, c, g, or t
  misc_feature (1915)..(1915): n is a, c, g, or t
  misc_feature (1992)..(1992): n is a, c, g, or t
  misc_feature (2007)..(2007): n is a, c, g, or t
  misc_feature (2013)..(2013): n is a, c, g, or t
  misc_feature (2020)..(2020): n is a, c, g, or t
  misc_feature (2027)..(2027): n is a, c, g, or t
ggcacgagggcgcgggcggcggtgacatcacggccacggctggcgggaggggcggcggcgccccgcgcacatcacttcctcggcgcctccccgggggaggacgggcgaacgaggcgcggacggacaggcggacagcagggcggacagcagggaggacagcagggcgggcagggggcggacggccacggcgcggggggcgctcccggctcccgctcccgcgtccccgacccatggcgggcccggccccgcccgcggccgacgagctcccgggcccggccgccaggcgcctctactccaggatggaggcgtcctgcctagagctggcgctggagggcgagcgtctgtgcaaggcgggcgacttcaagacaggcgtggccttctttgaggctgctgtgcaggtgggcaccgaggacctgaagacactgagtgccatctacagccagctgggcaacgcctacttctacctgaaggagcacggccgggcgctggaataccacaagcatgacctcctgctggcgcggaccatcggtgaccgcatgggggaggccaaggccagtggaaacctgggaaacacactcaaggtcctggggcgcttcgacgaggctgccgtctgctgccagcggcatctgagcatcgcccaagagcagggagacaaggttggggaggcgagggccctctacaacatcgggaacgtgtaccacgccaaaggcaagcaactgtcctggaacgccgcaaacgccacgcaggaccccgggcacctgccgcccgatgtccgagagaccctgtgcaaggcctccgagttctacgagaggaacctgtccctggtgaaggagctgggcgaccgtgcggcgcagggcagggcctacggcaacctgggcaacacccactatttgttggggaacttcacagaggccacgaccttccacaaggagcgcctggccattgctaaggagtttggagacaaggcagccgagaggagggcctacagcaacctggggaacgcccacgtcttcctggggctgctttgacgtggccgccgagtactacaagaagacgctgcaactgtctcggcagctcagggaccaggcagtggaggcgcaggcctgctacagtctgggcaacacctacacgctgctgcaggactacgagcgcgcggccgagtaccacctgcggcacctgctcattgcccaggagctggccgacagagtgggcgagggccgggcgtgctggagcctgggaaatgcctacgtgtccatggggcgcccagcgcaggccctgaccttcgccaagaagcacctgcagatctcccaggagatcggggaccgccatggggagctcacggcccgcatgaacgtggcgcagctgcagctggtgctcggccgcctgaccagcccggcagcctcagagaagcctgacctggccggctatgaggcccagggggccagacccaagaggacgcagaggctgagcgcggagacctgggacctgctgagactccccctggagcgggagcagaatggagacagccaccattcaggggactggcgggggcccagcagggactcgctacccctccccgtgaggagcaggaagtaccaggaaggccctggacgctgagaggaggccccgggagggcagccactccccgctggacagcgccgacgtccgggtgcacgtgccacgcacgagcatcccgagggccccgtcttcggacgaggagtgcttctttgacctgttgaccaagttccagagcagccgcatggacgaccagcgttgtcccctggacgatggccaggccggggctgccgaggccaggcngccccacacctggaggacaggatcgcccagcctcgatgacggctcgcccagaccgaggaattcttcgancctcatcgccagctcccagagccgcggnttggacgaccagggggccagctgtgggcagcctgcggggctgcgaatcacccacagcaatgcagggcactccgaggncacggtgaagccccngaccgngggacantcttcanatgctgatagtaccagcctccagacgatgacgcgtgc

SEQ ID NO: 500314 - DNA, 103 bp, Homo sapiens
ttgtgcagcacgtggctaagatcgcggagatagaagcagagatggctcggactcaaaagaacaaggccacagcacaccacttagggctgcttaaggctcgtct

SEQ ID NO: 500315 - DNA, 2163 bp, Homo sapiens
  misc_feature (1917)..(1917): n is a, c, g, or t
  misc_feature (1986)..(1986): n is a, c, g, or t
  misc_feature (2014)..(2014): n is a, c, g, or t
  misc_feature (2091)..(2091): n is a, c, g, or t
  misc_feature (2106)..(2106): n is a, c, g, or t
  misc_feature (2112)..(2112): n is a, c, g, or t
  misc_feature (2119)..(2119): n is a, c, g, or t
  misc_feature (2126)..(2126): n is a, c, g, or t
ggcacgagggcgcgggcggcggtgacatcacggccacggctggcgggaggggcggcggcgccccgcgcacatcacttcctcggcgcctccccgggggaggacgggcgaacgaggcgcggacggacaggcggacagcagggcggacagcagggaggacagcagggcgggcagggggcggacggccacggcgcggggggcgctcccggctcccgctcccgcgtccccgacccatggcgggcccggccccgcccgcggccgacgagctcccgggcccggccgccaggcgcctctactccaggatggaggcgtcctgcctagagctggcgctggagggcgagcgtctgtgcaaggcgggcgacttcaagacaggcgtggccttctttgaggctgctgtgcaggtgggcaccgaggacctgaagacactgagtgccatctacagccagctgggcaacgcctacttctacctgaaggagcacggccgggcgctggaataccacaagcatgacctcctgctggcgcggaccatcggtgaccgcatgggggaggccaaggccagtggaaacctgggaaacacactcaaggtcctggggcgcttcgacgaggctgccgtctgctgccagcggcatctgagcatcgcccaagagcagggagacaaggttggggaggcgagggccctctacaacatcgggaacgtgtaccacgccaaaggcaagcaactgtcctggaacgccgcaaacgccacgcaggaccccgggcacctgccgcccgatgtccgagagaccctgtgcaaggcctccgagttctacgagaggaacctgtccctggtgaaggagctgggcgaccgtgcggcgcagggcagggcctacggcaacctgggcaacacccactatttgttggggaacttcacagaggccacgaccttccacaaggagcgcctggccattgctaaggagtttggagacaaggcagccgagaggagggcctacagcaacctggggaacgcccacgtcttcctggggctgctttgacgtggccgccgagtactacaagaagacgctgcaactgtctcggcagctcagggaccaggcagtggaggcgcaggcctgctacagtctgggcaacacctacacgctgctgcaggactacgagcgcgcggccgagtaccacctgcggcacctgctcattgcccaggagctggccgacagagtgggcgagggccgggcgtgctggagcctgggaaatgcctacgtgtccatggggcgcccagcgcaggccctgaccttcgccaagaagcacctgcagatctcccaggagatcggggaccgccatggggagctcacggcccgcatgaacgtggcgcagctgcagctggtgctcggccgcctgaccagcccggcagcctcagagaagcctgacctggccggctatgaggcccagggggccagacccaagaggacgcagaggctgagcgcggagacctgggacctgctgagactccccctggagcgggagcagaatggagacagccaccaatatcacgggtgcacctgggctggtggagcacccgagcacgggacactcgcgtagcgcccttcacaccggtgcaacgggacggccaggcgaacggttagcccaaggggaacacggggcacaccgggacccgacattgggaggcaaggggcaagggggccccacccagggggcgaacggggcacaaggcaccaacgttcccaccgacttggcaccaggcggccggacgatcccgggattgcacgtgccacgcacgagcatcccgagggccccgtcttcggacgaggagtgcttctttgacctgttgaccaagttccagagcagccgcatggacgaccagcgttgtcccctggacgatggccaggccggggctgccgaggccaggcngccccacacctggaggacaggatcgcccagcctcgatgacggctcgcccagaccgaggaattcttcgancctcatcgccagctcccagagccgcggnttggacgaccagggggccagctgtgggcagcctgcggggctgcgaatcacccacagcaatgcagggcactccgaggncacggtgaagccccngaccgngggacantcttcanatgctgatagtaccagcctccagacgatgacgcgtgc

SEQ ID NO: 500316 - DNA, 771 bp, Homo sapiens
gaggctttggctgggtgaggcggtcagacggcggcgtgtaggacgctccgggagtccccggtgtctggtgtggccgccatggcatgcagcccagtgcagcggggtctccttggagggtatatccctgagagtcttctgaggaagcggagctccagagggaagccatgacagcaagtcctggacaacttgggatccctcccacagtgccacgggggctgcagagctggacctgatccttccttcgaggcattatggaaagtcccatagtaagatccctggccaaggccctatgagacggctggagcgagacgaagctggaggccgtgacgagacaacaacctggagctggtgcaggagatcctgtctgggacctggcagcagctggctgatgcagagcaagcacagacagccgagacttgtgcccacatcctccaggagccccacttccagatcccatcctggagacgcacgactctgtggcctcacaagacctatgagacaccaacaccacagacctggcctggacccatacgtacagcaacagacatgtacactcccgaatgctgtgacgcattggttggtgcactcccgaatgacagcccggagacacaatcttgaggtagtaacggtacacgcagttcgacgggcggcgatgctgggtcgatacgagcgccatccttgcaatggtagcacattctaggttcacgcaaggcctgccgacatggttggtacatccatcaggaggataacgggcaccatgtggcctgaccc

SEQ ID NO: 500317 - DNA, 806 bp, Homo sapiens
  misc_feature (560)..(560): n is a, c, g, or t
  misc_feature (629)..(629): n is a, c, g, or t
  misc_feature (657)..(657): n is a, c, g, or t
  misc_feature (734)..(734): n is a, c, g, or t
  misc_feature (749)..(749): n is a, c, g, or t
  misc_feature (755)..(755): n is a, c, g, or t
  misc_feature (762)..(762): n is a, c, g, or t
  misc_feature (769)..(769): n is a, c, g, or t
tgcggtgtctggtggacgggccagtgcctggcagaagcagctgtgccgggcccaggacccggaggatgcggtggggaaaccaacttaggcccccatggcactgggggcggcagagggagagccaggccctcatgtgcatgtgcacacctgggagacggagcggggctctcgctgggtgtggggccagacccaagaggacgcagaggctgagcgcggagacctgggacctgctgagactccccctggagcgggagcagaatggagacagccaccattcaggggactggcgggggcccagcagggactcgctacccctccccgtgaggagcaggaagtaccaggaaggccctggacgctgagaggaggccccgggagggcagccactccccgctggacagcgccgacgtccgggtgcacgtgccacgcacgagcatcccgagggccccgtcttcggacgaggagtgcttctttgacctgttgaccaagttccagagcagccgcatggacgaccagcgttgtcccctggacgatggccaggccggggctgccgaggccaggcngccccacacctggaggacaggatcgcccagcctcgatgacggctcgcccagaccgaggaattcttcgancctcatcgccagctcccagagccgcggnttggacgaccagggggccagctgtgggcagcctgcggggctgcgaatcacccacagcaatgcagggcactccgaggncacggtgaagccccngaccgngggacantcttcanatgctgatagtaccagcctccagacgatgacgcgtgc

SEQ ID NO: 500318 - DNA, 145 bp, Homo sapiens
ctgcccccgcaagacgaactctacctagcacaacaggctcttctttgattcctgcgtacggcttcttcactaactatatactagcgggggcagcccccgcaagacgccgccgcgatgcgctacgtcgcctcctacctgctggctg

SEQ ID NO: 500319 - DNA, 586 bp, Homo sapiens
ggtggaagtgacatcgtctctaacccctgcgtgccaatccctgatgcaccgccgtgatgcccaggtaagacaggtcgacctggaagtccaactacttccttaagatcatgcaactattggatgattatccgaaatgtctcacttgtgggagcagacacatgtgggctccaagcagatgcgcagatccggcatgtcccttcgcgggaaggctagtggtgctgatgggcaaggaacaaccatgatgcgccaaggaccatccgagggcacctggaaaacaacccagctctggagaaactgctgcctcatcatccggcggaatgtgggcttgcgttcacctgaggaggaccctctagctgagatcagggagcactgttgctggccaataaggtgccacactgtgtgcccgtccgctgtgtgccacttggcccatgtgaacgtcagcctgtgccagcccagaacactggtctcgggacccgagaagacctcctttattccaggctttagagtatcaacactaaaatctccaggggaccaccatctgtaaatcctgacgtgatgtggcaaggctgatcaagactggagacca

SEQ ID NO: 500320 - DNA, 210 bp, Homo sapiens
tctagaggatcccttatgcatatttattgattgatgcagttcttgaattatacctagaagcaaactgaccagcggatcagcagaaaattaacagcaggaaaaaaaaattagtatacatgtcttatctagagaaatgaagaaatttttattgcttttatcatttaaaaatcatttgtgaattcctctttaagagaaaccgtcgaattcgag

SEQ ID NO: 500321 - DNA, 267 bp, Homo sapiens
attcgcggtcgagtcgacgcttagagaggaaaagctggctctggtcaagtagatcatggcaggatgaattccaactcacttttttacaactccaactactatgtgtatcttcgttactttcactttcttacaacctggccagaggcattttttaaatcaggcccagtatcagtattctttttgtgtgtgccaatgttgatatcacatccctatgaagttgaaaaataaagttaattttgaccgtcagacagattgaatgaagaagaa

SEQ ID NO: 500322 - DNA, 203 bp, Homo sapiens
aggatgctctcgaattcgctccctcgatggtcatagcttggtggcctagatgtgaagatagtcctccgcaaaaaaatctcaataaaatctgaaataagtcaagtgtattgagcttgcacttaaacggaacttgcctgtgaatttcgaggtttggtataaatagcgtgaagtggaaaaccaggctctccaggaatgggaaaact

SEQ ID NO: 500323 - DNA, 702 bp, Homo sapiens
atatggattagatatgattggctgaaattaggagattatgacctctgctccagaagaagtctttctgactctggattatccaggacatacctccctggccccccgccctctcttggtaacccgcccaggattaatggaatatcttgggttttatttccccgggagctttagagaaatgaggttataccgagctgactccccaaagccccaaagttacttgggccccgctttgggttccagatatatcaaaggggtattaaatgatgcatgaaattggcgctctgttttattttcgataaatccatagccccctttatgtagcccctggatgatccacataattgggaaattaccctttaaaaaaaacctgagtatccttcgcctaggatttttatctccccatggttatatcctgccatccagtggataattttgagagtcgtgttccagaatataacattgagaattttcagagttgttgcaaatcccgacttgttggaaactaataataatatcgtgacctggatttctatacgatagtgtttgtgtttagaagatgggtagatattgccgataagactgtttttcagaatcatgttaactattgggttgtgaactgaagtagtcccgggtttgccttgaacccttaccttctacctttaccccaaattaaccaattaaaacctgtatttaatgttgcca

SEQ ID NO: 500324 - DNA, 542 bp, Homo sapiens
gtaaacgggagacggtttactgaggaaagtctactaatcagaaacctctttactggtgagtcgatgttattaaccaggagacagctataactagtggactttctagatatacatgaaccaataaactccttatgtgattctaatccagctccgacttcggtttactcgctgactatacaaccaacagatccctaacctatacattcatcatacttagcccattcctaccttccctcaggatagcacagggaatacaggtaaggtcactacagatttcttggttccactaaagcccaggctatcacgctgacaaaggtcagaggcagcaaccaggtactaagtacactgggtgactcagctgtctgtacagaggagaatggacttccttaggaaaagaatagccaaatgagaagcacgtgcaccgaacggcctctactaggcaaagataacgtaggggtctcaacactcttccccacagacctgtctcatgggggtgtcgcttctgggtctatatgctcctggcatcaggaacctagacccac

SEQ ID NO: 500325 - DNA, 904 bp, Homo sapiens
tcccctggctttagaatccggcagattgcagtcctgtggcagctgagttagtgtatgactatgaggtctacgtccctacgctacgtaccgtgaaggtacagtcactcgcctcaagtagaatcaatactcaggaagtgttgcaaagttcgctttgatgaattgtcaatcgaatccatgtcctatcgtcaagagatcttaaagaatctcctgaccagtgcagtacgattaaccatgaatttactgcccagtttcataacacgcagtatgcctattttggaatgttgtttataccatgaaccagtactgtttaagtttgatacagaggcagttagacaaagttgagcaaagcctagtcgagtaccagttgtcaaaagatatcctagtgcaaactatatccatatcgctcttgggtgtcagattgtatctgtgcttctaacaagtgttttcaactaaactacctcaagtgctctcgggagattgggcattgggggtagcaacccggattttggcttggacagtcggcggaaaattcgctgaaatctcaaaaccatgccgattggacgcaatatgggggtaacacctggcaaagggtcccagaaaactccagctggcccccacgttcgattcatccccgggggtttcaccctcacacttccttttagcaacgataacaagtctttctccgaacggggccttcgaaacgccgttgtctttgcacatctccttcaccctggcgggacgggggatggtggggcgatcctccaggttcggcccattctcaacgcagtgctctgccaggagaattggattcggaagaccttaggggtagggtataaacccgacgggatacgagggcaccaacacggggaaaaaagtcctgcgttgcaacttgatcccacctgag

SEQ ID NO: 500326 - DNA, 1308 bp, Homo sapiens
gtactgtgcgtgtgtaccagtgtgaagatcaggaagcgtgtcatccatgatgtcatgccgaggcttggggatagtacaagggaagcagttcaggtaactgacgaattggtctgtaagaactagtacgacaatatcaaagggaaaagggaccataaggacttagaacttagataatcctcaaatggatagggaaatcaacaagaaatttataagacattgttaaaaggtaaacaaatgagatgggaattatagagaagaatataatagtatgatagatcacatatgaagggatacacatgaagaaagaccgagttgagagcaagagtaatgatggacgagcgatttaatcgtgtttgttattaaggcaacagttacaagtgtgattgcaagggataccgtagtagagccttagaggacctggtgtaggaatagtaaagggctccaattagttacgtgtgaaaaaaaaaggataaacaaaccgggtaagacgttcgtattatattgcgagagcaatccacgatgtaagtgtccatgtgtctacgtcgaagggtaatatcctgggaagaagcaagggggaaggaagaatgtgtgaggggacaaaaattgagtggtaacgacgcgaagggaaacgataacgaggatggaaacgaagggaagttggggaccagcggtcgaacgtagcgcagtacaaagtaagacgcaaagggttggccatacgcgttcgaaagagtaccaaggccagcgacggcatgcacagaacatgagatgggcgccgtacgacgtatggagggattcggtcgaaaacagaggttacgccagaaaattccagatgcgagatccaacggccgagtacggaccaaggaaattggggaaccggaaggacatcgcagcagtcgatggaaccagtggacgtagcagcggtgataagagatggaacttaaaggcgggggacacagaggggaaaacaccacacaagcagcacgcacggacaccatagcgtgaccacactgccctcccacagaaggttaccaacactaggtctccgtcgacttggatcacataccacgagctgtggcgataaccgtagggaacacgcgaagcggcgcgcacaggcggacatcccacgcaggcaagcctcgccacttagcgagcaacaccgccgataccacaggagagatgcacgccagtcccaacctcagagacacaagaatggggacaagcgacgaacacgggagggacagaccaacaagaataaaacagggcacagaggagacgcaggaaaagcagacaagaggcacagcaggaaac

SEQ ID NO: 500327 - DNA, 133 bp, Homo sapiens
agctttttttttttatatactcagaaatatctgcttccgcttttgtttttaagttttcaatattcatcatttcctcttttagtctgttatgactttccagttacacagtaagtcgattatatggtgcaagctt

SEQ ID NO: 500328 - DNA, 226 bp, Homo sapiens
tgttattttaccctcaaagaccaggtagtgaagtggtaccaggaggggtttcaagcagaggttaagaagagcctcaatcgggcgggcatggtgacaaacatctgtaatcccagctactcaggaggctgaggcaggggaatcgcttgaacccaggaggcagaggttgcggtgaaccgagatggcgccactgcattccagcctgggcaacagaccaagactccatctc

SEQ ID NO: 500329 - DNA, 357 bp, Homo sapiens
actgggaaatagccgacgtcgctgtaatatttagcttagaaaaagacatttattttactaggctgatgctaccgtttctgctccctgcctgtaaaacccttctttcccactgtagctgctcttcttttaagagcattagcagatgaaataaacctttggtagctagtctggaaatattccatcatttggatatctttttttgggagaaaaatttcaaaacaagcaaactacaaacatttagagtctgatctgcccacgggaaatacagtatttaaaaatacatgtttgacacataaagataaatactgcatgatttcaattaaagcagtcaaacttgtaagagttagatattgattg

SEQ ID NO: 500330 - DNA, 307 bp, Homo sapiens
  misc_feature (43)..(43): n is a, c, g, or t
ctgtgctcagaggatcccttccggtgttatcgccacctgcctnaacagcatcaggtgcctctaagcgggcctgttgacccagcaaatatgagcccaacaggggagacgctggctctgcagcctctcaggagaaggcggtctgagaaattggggttaatatgccttgttccgtgcttgagcgacagctagttaagtgcatgggttgctcggcacataggccatctctcaccagttgcacattagacccacttataaagtcaatcgattcgaaccaattagcaagaagataaggacaccggaaataagg

SEQ ID NO: 500331 - DNA, 269 bp, Homo sapiens
tgatacaccccaatcacgacaactaccaggtttgtggagcaggctgaggctctgaaggccaagggcagtcaggtggtgtgctgtctgagtgtaaatgatgcctttgtgactggcgagtgggggcgagcccacaaggcggaaggcaaggttcgggtcctgtgtgatccccctgtgggccttgggaaggagacagaatttattactagatgattcgctggtgtccatctttgggaatcgacgttttcaggaggttctccatggtggtatag

SEQ ID NO: 500332 - DNA, 382 bp, Homo sapiens
aaaaaaaaaatccctgtttcctgctttccaaaatggagggccttaacatcaaccaaagttcaaaacaaaaacaaaacacaggagctagctgggcgcggtggctcacacccgtggtcccaacattttgggagaccaaggtgggaggaatgcttgagttgtaggagttcaaaccagcctggcaaatatggcaagaccccatctctctaaaaagtaaacaaaaatcagccgagcatcatatcacatgcctgtagtcccagctactctggaggctgagatgaagactgcttgagccagggagggcaaggctgccgtgagccaagatcacaccaccacaccctagccagggagacagagcaagactctctctcaaaacaaacaacca

SEQ ID NO: 500333 - DNA, 676 bp, Homo sapiens
gagcaagtctatgaatgagggacgcgggggaaactctagcgccaggcatgtctcatgtaacattgcacgagccacattgcggagtacacgaccagtctataaattgttgacagttatacattatatgcgagtcatactcgcgagaaaggagacactttatggctttcctttgggagattcagctcttaagggatctcactctaccagtgagctgctaactaaaggcaggctgctgaagtatatagcatcaatcccacaatggcacaccttgcttcagatccataggatgagcccccttcttgagccctgtatatgtgagcagcttatttatttagatgcatttcatggcaccagaccctaacgggcagctaggtatttcactggagaccacttactccgctgagctttgctgtgtattttttttttcgcatgatttatttgaacttcaaagaaagatggcgagatccttgcacttaccagtgtggacggaaccaggctagcgttttctttgcctgggtgggcctctacaaaacggtttacctttgttatagggcatatgataccttaagcctcaattcccaggcaagagaaacatgctttttagcaaaggcttgccaggtaaacgcgctgtcttttgtttgactaaaacaggagggaccctgcttcagcaaggagt

SEQ ID NO: 500334 - DNA, 169 bp, Homo sapiens
accgcgagtgtcatgaggatgattgtatgtgatcacgtcagctgtctacagatggccgttttaagccgtatgaagtactcgttacaagttcccccattttaccttgtccgaaaaccagaacaagccttagcgagttagaacagtgatcttggcctcgatgccggggtac

SEQ ID NO: 500335 - DNA, 557 bp, Homo sapiens
tagaatttacttagagtcaaagtgactagatttaattacaaaaagtatttggtgtataccgttatacactcattaacataggggtcttatggacagaggtcctatgtactttaaaagaatatgtaggggctatagacttttttgccctctacctcccttctccatttcctttggaagttaagacatttaagggggagaataaggtgcatatgcgagtggggttcgtttaaaaaaaattaggtaaatacatatataattacaataacaacagttggtagttctctaaaatatttaattatgggtaaatcagaaaaggcccttaaatttgggcatctggttgaatgaatgtgttaaggatctcttctgtgggtggttctctttatactgaatgctgtcaatattatgtgagcacttactgtggcgaaccatgtggcttttcaaatatttctatttaatcctaaaaaactcctgggaaatgggtataattcccattttacagatgagaaaatgtgtccttgtgtagaatacccatcatgtgatagcttctgtgcatatta

SEQ ID NO: 500336 - DNA, 120 bp, Homo sapiens
gcttttgaaaatgctaacgagagactactggacattatgtcagaggaggggaacagtgacggaggtatagtagttgaagatgtagagatattagctaccaaaactctattaaacaaacaa

SEQ ID NO: 500337 - DNA, 472 bp, Homo sapiens
tcctttataatttttaagggatcaaaacaaagcatctaaaaccgcagtttcgggaaaaaccactggttctggccggtctggtatctctcttcaaactggacctgggcctcccgtcgggcctggcgttaaaagagcaggatctctgaagacatccttatggacagacagtttggtccaggggggatatccacagagtccctggggggcattaggtggattggtgagttatacactttcacaaaaagatttaatctttggatctctgggcagatcttcttcttggcccatgggcagctggtcacttggcggggggtacgcgggtcaattccagccaccaagagccagtgggcgtggagagggggcgaaccgggagggtgccaatcatcagagtggtctcttcagcgaagtgaacgaggcttgggcgttcgcgggagaataggcgtctccagcccgagggcacagagccacacac

SEQ ID NO: 500338 - DNA, 383 bp, Homo sapiens
tacccctaataatgagagcccaatggcgatgacttcgccttaagtggacgtcggttaaacacaagataataaaatactctgagaaattgggtatgtaaattttactttcaacgggataaaacttcaaataccataacaccaaagcattattatactcaccagtatttttgtggccttttagaatataaagtggccttggactgtccagagacaaaatgcatatattgtggtcatttccaccggcggcaattaggccatgagggtagatgtcacttgagggtatgacgcatacacaagatacaaacattggatggccactcatacagtgcatctctgtgaagctcctgtttgcactggaacgacatgataagtaatagatacat

SEQ ID NO: 500339 - DNA, 907 bp, Homo sapiens
gctttccaacttggccgctgcagaatggtctcccgcaaagacggctggcgagaagacacaacggtgccgttctgccatcaacgacggtggtaacccgagaatacacccatcagacattgcagcaagcgtcgatccatggcacgtgcgcttcacagaagcagtgctacctcgtggcagctcacaagagattcggaagtttgcccactgacgggaggatggcaaacttcgcaggactgctgtcgccattgagtaactcacgcgctacaatcacaaagcctggttctgtgtgcccaagaaggagataccggcaactgttgccactaacccgaaagtgccagtgttgtccggcctgttctcacgaatataccgcttacttgacggattgtccccgacttcacaccatacataaacgctataataagctttctgaggtttgccctaagtgatagcccttgttgtaccctaccttttccataaagattcgttaccagcatccaggtccacacgttgttgcgcaattgcacgaacctaaaattcggctgaactcgctgcaggatttccacaacttacacggtttcctaacactagcttacccaaaagaatgagcgaccttgactccagaaaacccactacaagaaagagcatccattgttgtgcgggggcgacgcgaacctttagggggccctccccgtgaaagaaaaaaccttttttactgaaagaaagcccttagtctgtttatttgggacgcctctgttgtgcaccccctatcatgagagtaggcgcttacaacacagtagcgctaacttaagggcagggttcgccccaaaggaagacttcgcgggtgcaagtgcataacagaggggggagggaaggaattcaacttcccgaatggtcaaaagatacggcg

SEQ ID NO: 500340 - DNA, 92 bp, Homo sapiens
gatcagaataggccagagtggatcatctccgaattggcttgttacacgtactctatggtagctgtacctctgtatgacaccttgggaccaga

SEQ ID NO: 500341 - DNA, 326 bp, Homo sapiens
  misc_feature (272)..(272): n is a, c, g, or t
cttgtacccaattcagccaacaaaaatgcaaggagatgtttgggctgacgctgtaatagtttacagatatctgtaaagttgacaaaagaagttttcttggttcctactcggacgacttgtggaggtttcatgacaaatttccttttctcccctgcaaccatatctgggttcttttccctcatggtgttgaacactcgattcagcggctcatcgtatgtgtagtatctttctgagcctccaaagcagggcctgtctgataacagaatgggctnccatcatctaattttctttttgtaggtataaataaaaaacctgttgacgttaaa

SEQ ID NO: 500342 - DNA, 323 bp, Homo sapiens
aggacaggaatccagctcggagctcctattaagatgactgttggccgggtgcagtggctcccgcctgtaatcccagcacttcaggaggtcgaagcgggcagatcatgaggtcaacagattgagaccatcatggccaacatggtgaaaccccgtctctactaaaaatacaaaaattagctgggtgtggtggcaggcacctgtagtcccagctatttgggaggctgaggcaggagaatcgcttgaacccgggaggtggaggttgcagtgagccaagatcgcgccactgcactccagcctggtgacagaacgagactacttctaaa

SEQ ID NO: 500343 - DNA, 288 bp, Homo sapiens
gccagaggatcccagtggaagatgtgcatgtctctcagtttaaatcaagagctagaaattattatgtttagtgagaaaggcatgaaagctgagggaggccaaaagctaggcctctgcaccagacggtcagccaagtggtgaagaatgcaaaggaaaagttacagaaggaaattgaaagtgctactccagtaaacacacaaatgataagaaagcaaaacagccttactgctgatgtggagaaagttggaggggtctgaatagaagatcaaaccagcacattcttccaag

SEQ ID NO: 500344 - DNA, 317 bp, Homo sapiens
ctgatgtttgcctgcagaaccatgagctgattaaaccttttttttttttaaataaattacccagccggaggaatttttttatagcggggcaagaatggcctaatacaggctgttacaagggaaaaattctttttttttttttttttttgaaaagggatttaacttgcccttaagcttggagggcgggggggaaatttggtttaattgaaccctccccctccagggtaaagggaattttcttgcttaacccccccaagagcttaaaataacaaagggcccccccccccccgggttgttttttgttttcccacaaaaaa

SEQ ID NO: 500345 - DNA, 131 bp, Homo sapiens
  misc_feature (11)..(11): n is a, c, g, or t
  misc_feature (93)..(93): n is a, c, g, or t
gcggcacttanaggtggggagcagagaatatcttatccaacatcaactctggccagatttgaactcttcaatctcttgcactcaaagcttgtnaagatagttaagcgtgcataagtggcccgccaatcgaa

SEQ ID NO: 500346 - DNA, 229 bp, Homo sapiens
tcctggccacattctgactcatgcatcgtccacccctggcgtgaactccctagccccgctgctgtcggctctgcttccaatcgctacaacgcggaccgtctgcgtcaacggccccataggtcctcccgacaaccactggattgtcagatcactctccgatgtgtcatctcaccatgccagtaattgtgctgggagactgcctctccacaattctttcctgcaaaacgaa

SEQ ID NO: 500347 - DNA, 81 bp, Homo sapiens
cccacgcgtcgcggacgcgtgggtcgacccacgcgtccggagggagcgagcaggcgaagccgcggtaggacggggtgaaga

SEQ ID NO: 500348 - DNA, 105 bp, Homo sapiens
ctaacgacattgatgcattcttcaggaaagtacgaggcatactaaataagcttactcctgaaaagttgacaagctatgccttgagctcctcgaatgtggggttca

SEQ ID NO: 500349 - DNA, 210 bp, Homo sapiens
caatgtgaaacgcagctggcggcacgtcgtccttcttgggtgcgaggagcacgccatcaagttggacaacaccgagacaatcaccgcgcagcacatgccgcggcgtacgtatacaagactcaatctaacactccctgttcggtcttctgaatcgctgaaacagcacttggctgagtcgcgacaggccggattaaagccgaattcgatttg

SEQ ID NO: 500350 - DNA, 280 bp, Homo sapiens
agggagtagtgaccagtaagattcgtacaggcaagcgaggggctgtccgtgatccgtagcacggagaatgggcgacccaggggtccaagaacactcgctgggctcaacatagtcctcgacacaggactgagaaagaaagtgtctcctttccgggaaagcacatgtaaacagtaaagggcctgaatctcttctaaaccaataattgacctctaggcacccaccataatactgctaccttcaggcagaagacactgctctatgtaagccaatcaccaccaag

SEQ ID NO: 500351 - DNA, 329 bp, Homo sapiens
ccagcgatgccagccagggtcaaggtgacggggatggctttaaagatcgccagcgtagccagggtatagaggatgagggcgaggtcggcgatgaggccgggcaggccgtagaccaggaccataaagatcatgacggcagcgatgccgacaccaccggcgatgactgatttttcgatggagtcttgaccgagggtcgctccgaccgagcgctcttcgaggatgcggacgggcactggcagcgagccagcattgagtttttgcatcagatcgagggcctgatcctgagtaaagctgccggtgatctgaccgcgcccgccagtgatcggctc

SEQ ID NO: 500352 - DNA, 223 bp, Homo sapiens
ggggggggggcccccccccccttttttttccccccttaaaaaaccgggggggggccccccccccgggttttttttttgggggggggggggggaaattttttcccccgggacccccttttcccctttgccccttttttggggcccttttaacccgtttttgtcaaaaaaacgggggggggggggccgggtttttcccgggtttttttcccccccccgccccgca

SEQ ID NO: 500353 - DNA, 133 bp, Homo sapiens
cacgagggcggtcgcaacggttcttccctgggcggacgatggagagacaaggcaggagggtggtggtgtgcgacacgctaccgggtttgtgaagtgtggatatgcacgctctaactttccagaatacatcttc

SEQ ID NO: 500354 - DNA, 676 bp, Homo sapiens
acccccaaatggaatcagggcacattgctcggctacgccaaccacctgcatgataatgatcgttggcccatgggcgactcgggcgcgggcgtggccttgccgccgcgttttgatgctgcgcttgaactggtgccttgcagcttgccgctgacgctaagccagcagcaggacaaggccatggccctgggcatgatgcacgacttgcagccgcgggcgccgttcaagcgccgcgtgcgcaggtggttgcagcaattattggcgggccgtagtccatcgccttacggagagaatgaattcttccgcaaggcggtgcgccgccatgaattgctctgggttttaaagcaggattgagaccttattgaaggcaggcttgcagggcctgccgccccttttttttgccgggctgcgtgcccgcagccagattgcagcatggagagttatgaaacctcgtttcaaggttttgcagttacagccggactacaacgtcaagacccacgacttcgccgacctcggcgagcagatcgtcaaggccttgccggctgaacgtttcgaggtcacatccgggtttctcagcggccgtccgctgcccggccagcccttgagcgtggctgaacactcccattacttcgagctgccggaaaagtccctaaaaggcatccgtatcggcgccatgtgg

SEQ ID NO: 500355 - DNA, 300 bp, Homo sapiens
tcatcgagctcgcaccgtagacacttacggtgagactccatctcaaaaaaaaaaaaaaaaaaagaaaagagccaggcagcccactgctcaaacacagaaatgcttttcatgcttttaaaggaaaacccaatttaattaaaaaacaggtggggctaaggagggtgaaaaggttaaaaacgtgaaaaattttctgtgcaggacaggaatttcccaagctccattaatctcacttctcaccaccgtctgatatctctcccctttctctctttcccttgttcccccctgttaacccccaaacag

SEQ ID NO: 500356 - DNA, 122 bp, Homo sapiens
tcgtgtactgcgatgcccatagaaaatacctacatgcgattactctagagcaggcccgtcatttgtagccatcaccagtgacagccacgacctgcctgtgtgaaatctaggggatcctacta

SEQ ID NO: 500357 - DNA, 301 bp, Homo sapiens
aagcccaaaaatttttccccggggtttgttgtaataacgccccccccttttttgggggggggccccccccggggggggggccccccccccccccggggttttttttaaaattttttcggcgccccccccggggggcccccccgggttaagaccccccccccccttttccccccgggggggggcccccagggaagggcccccccccccggaaattttcccgggccaaaaaggccgggccccaccgaatggcttttacaggccttcacttggaagcgctggggtttgctcaaagcgaacagtt

SEQ ID NO: 500358 - DNA, 245 bp, Homo sapiens
gtcgattagagcatccccctcaagactggcccgcgatgactggcactctcctggccctagctgagtgccgtgcgggccacattgcaggctgcctctgcctggagaacttctcctcgcaggttgtggaacgacacaataagccggaagtggaagtcaggagtagcaaagagctcctgtgacaacctgtgaccatcagcaggaatgagaaggataaggttctgattgagggctccatcaactctgtc

SEQ ID NO: 500359 - DNA, 890 bp, Homo sapiens
ccgtgctctacgtattagctgacttctcgctgcggtcgtgcgaccgccgtctgtgctacccctcctccctctctcggttgcccagcgacaagacttcgtcaactggggactcgcacccctcggttcgtccccgtgtgtgtcatccctattggctgctcttgctcctacaggcctgtgtcccactttttgtgggagcgcccccgattttcttgcccccagattagggttcctttccggtgcccacataactcccgtggtttctccccttctcccgcggggggttgtcttctccccgtcgctcatacaaactatcctcctgttcgttgtcttactgtccaccaaggtgggtatttcctcccccccctcgggtgcttccgggtctggtggtctcgcgagtgttgttcaccaccagaatgtttggcaaagaggggtgggttttgaacccccctgctccccagaccggatgagtcttctccttctttctgggaaacgcgacaccagtccttcgtcgctctccgcactccatccccgcaggcatcaccctcggttcctctctctcccgcgcatggagtgatatctggcgcgcctccgcccctctgtctgtctctccgatgatgtttcaccatagttcttcattgcggtgcgggggcgccaggtgcgttctcgctcacacacttcactccaaggtgggtgtccctccttcctagaagcggtacggtacggctcctccttggagagcgtcgttgtagaacccccccttttcagcacacctcttttttgtctgtctactcccagaccccccctctccccctgcggtcctcctctccccccctgtctcggggcccccccccccctataaaaacacccgagcccctttttttaaacaggca

SEQ ID NO: 500360 - DNA, 296 bp, Homo sapiens
  misc_feature (1)..(1): n is a, c, g, or t
nagatgtctgtggtgcgtgtgtgaaattcaggtgctagaagctactagtagaaaaaccaaaaggagagctatatcttaccattctgtccatttcgggagcttgtcagtgtgtcagtttttcctccccgaagacactccttccccaagtagttgtaggaagataaaaaacctgttaccagataacaaacactgaactcctatttgaccagaactttttcctctcgagatagttttttctttttaatgaaaaatgcataggaattggagattggttgtctcacacagccatttaggta

SEQ ID NO: 500361 - DNA, 929 bp, Homo sapiens
tagccatggaggctagaagcactggtgcccctggccatgatagtgaccatcttcctgctcctggtggacctgatgcaccggcaccaacagctggcgctgcacagcatacccgccaggtcccctgccactgcccgggtctgggcaaccattgctgcatgtggactaaccagaacacaccatactgcttcgagcagttgcggcgccgcttacggggacacgtgtacacgcctgcagctgtgccctggacgccgagtggtcgtgctccatgggctggcggcgtgcgcgaggcgatggtgacccgcggacgaggacacggacgaccgccgcatgcagcccatctaacaggtcctgggcattcgggccgcgtacccaagcagcgtgatcctagtaggaagcataatgggcccgacgtggcgcgagcaagagcgcagactatcctccgactagtccacactatgacgcaaaactaggcgtccattgcggcacacgcaaagatcggcactggagccacgatggggctgacacccagaggaaatgccagaccctgcgcatcatggatgagccgcgcattacagccggcacccaagggccccggaccggcccacaatatacggcccccaaccgggagacccctaatggaccaacaaggaccggctggacagccacaacgccgctgacactacggacaccattccacagtccaaccactggcgcaggtgacagcccacgctagcatccgcaggagtcaacggcaacgacaacccccatccgaactatagccctcacgcgcacctgcacttggaccccatacgacgttccaaggcacacgggcaaccttcgcaacgggacgcgcaagctaccagcggacactgcccattcgccgacaacaacgagcacacttgacaaatgacatgggcccccgcgacaac

SEQ ID NO: 500362 - DNA, 927 bp, Homo sapiens
ccactcctgatccttaccttggtggcagctgctcttggtgcccccttgatgatgatgacaagatcgtgggggctacaagtgtgaggagaattcgtgtcccctacctaggtgtccctgtaattcatggcaatacctacttctgtgcgtggcatcccttcatcgaagcggaacagtgggtggcgtaggtcgagcaggccacgtgcgtacaaagtcccggcaattcccgaggtgagaactgggagatgcacagacaatgccggaagtcctggaggggaatggagcaggttcatgaatcgcaagccaaagagtcatccgcgaccccaaatacgagagtgaagaagctgaacaatgacatcattgttactcaagctctcctcacgtgcagtgatcaacgcccgggtgtacaccagtcctactgctgtccacctgccactcccaagccactggcacgaggtgcctcatctctggctggggcactgactgagagctctggtcgccgactatacagaatgagttgcagtgccttgtgatgctcctgtgctgacgcgcggctatagtgtgaagctcctaccctggaaagagttatcaagccaatgtactgtgtgggcttccttgaggaggcacggatcatgtcaggctgattcatggtgggccctgtggtctgatggacaggtccaggagtgtctctggggtgatgggtgtgccaagaagacagctggagttacccagggctacacctagtgaaggttagagcgcaaggtgcatagaaagccagagtttagccaacaaaaggacgggcccgcaaaaaaacaaaaatttgggccggcccaagtatacacggcgcagaaaagacagtcaacggacggtcacacgggcacacaaggtgctcaacgacacgcggggcgaagagcccaggatagcgactac

SEQ ID NO: 500363 - DNA, 211 bp, Homo sapiens
  misc_feature (41)..(41): n is a, c, g, or t
  misc_feature (84)..(85): n is a, c, g, or t
  misc_feature (93)..(93): n is a, c, g, or t
  misc_feature (100)..(101): n is a, c, g, or t
  misc_feature (111)..(113): n is a, c, g, or t
  misc_feature (128)..(128): n is a, c, g, or t
  misc_feature (154)..(154): n is a, c, g, or t
  misc_feature (156)..(156): n is a, c, g, or t
  misc_feature (191)..(191): n is a, c, g, or t
caactacaaccagcaatttaagattactattactttaaganaatcaatttcatagtattggttttaaatctttttaagtttttnnaatacganctatttnnataggttctnnntcagaagtaaaattntgtacatatatacatgtacatatctntntagtttgggttcatttctataacattttgtaaganaataaaagtttgagcacctg

SEQ ID NO: 500364 - DNA, 292 bp, Homo sapiens
agccgacgccaggttaggggtcgtatcagagctgcagccatcagcctatgcagagcatagccatgagggatctgagtcgcgtccatgacctacaccacagctcacagcaacgccggaatccttaacccactgcgcaaggccagggatcgaacccacaacctcatggttcctagtccaatttgttaaccactgagccacaacgggaactcctccaagtattcttaactataatcaccatgctgtactgttagctctccaaaacttatttgtctcataactaaaagtttacacc

SEQ ID NO: 500365 - DNA, 905 bp, Homo sapiens
  misc_feature (902)..(903): n is a, c, g, or t
gacggatatgcgcgtttatcgtctgcgcatgtgcaagtcaatcccactttccggcttctccctgttagtgttgctggtgcagagggttcgcagctcaggaaggagggagccccaggaacaggatgtcccaccgtaagaactgctctcgtggacagaacagagacctcctcaccagggcttccaaactagatgcagaagaacccagaataggagcaggtcttgattgcccaaccagcgggcacttcttcatccccttgccagagagcaccagactgggtgatgtcgccacgatccagaagccatcacatgatgtgtgacactgaacactgtgggccaacttgcagaaggtggttactcctttacggttctccacactctttcaggagcccgcagaaaatgaacatatctcaggcatcagtgtcattcacggacgtgactatgaattcagccaggaggagtgcagcaaatggcccctgtgcagaagactctgtacagagatgtgatgctgcgagaactacagcacctcgtctcagtggggtctgctgttgcaaccagaggtgacccttcaccgttggagcagagagagcctggttctcagagggagggattctcaacctgagtcccaaagtgagttactgcgcagagaagacataatcctgcacgaagtggtcagacccaggcgcttagggggacacgctaatattgcagactttttaaagctaggcacaaggcgtcacaatataaacgggcccgacaccaaaaacaaaatgtggggcccccgaaattacactgtggccggcaagagacaggcattccaaacggatgggcccaaaccgcgggtaccaggtgtgtagaacccccgcacgcaaaaaaaaaaataaaagaaacacacacaaacaaanngg

SEQ ID NO: 500366 - DNA, 109 bp, Homo sapiens
gtaaataattcattttaataattattatgatctgaatggtctttgtaattttcttcttgaaaacccagattatccaaagagagaagacagaatcattataaatcccagt

SEQ ID NO: 500367 - DNA, 143 bp, Homo sapiens
cgatctgaggatctatggtctctcctcaaggggcatctgtccaccatgcagtgccctagcttagagctccctcaattcccctggcaacaacccccactctgttgctgacttgaggagtcttgtgtgcaatttgcttgtgaaat

SEQ ID NO: 500368 - DNA, 163 bp, Homo sapiens
  misc_feature (8)..(8): n is a, c, g, or t
ttatctanaggtccctggcaggctctctacctggccaggctctctcccggtcttaccccatctcagccgggggtaacttcagtggttcatatggtcctacagcaactcaaggccatcatggcggcgtccgcttccgtcaagtcttcacagaaagctggaagca

SEQ ID NO: 500369 - DNA, 975 bp, Homo sapiens
ctatgtgggacactcgacgttaggaacccactgtaggtcaagttagaagggccgctcttgaatcaggatcagactatatcccttctgtgaattgctactcgagccaggctatctgtagcctgggtggggagcccagataatgtgaggctggtaggagggtattggaaaagtgccaagaaatgccaagctttggttcgtcaccactataaaaagtttatgaacatgtcagagggaatggatgatgtgatttgtgaggtcttaactcagataacccggtttcttacttgtataggcttctttctcagaatgccagggagagtacatgcagggattccatctaatcaccctcagcactctttctctggtcctgctggaatagatttcgatttcctttcttgattttaggagcctcagtctgctatctcctttggtgggtaccaccactcactcgcttgatatcttctactccctttgccattcaccttgcgttacgactgagcacgggagttagatcttggtcgacctagctcttctattcctcactgtgtaccccacaaacaagattagtcccaggttaacaaagaacctactggaggtaacactgcggagagcaagctgtcggactctgggcatggtgcctttccccattaaacataaggtccccctggcgtttgtatggtaacccataagcaacccccattacctttcgctcctctccagaaataaatcatcttccctttgtataaatggctcagcattccgcatcctgcttgaacttggcacacttggctggcacggtacgcgactggatgacttggccgttcgtcgccgccccttagaacaggtctgggacacaggtgttccacccattgtggcgcgatcactagtcaccacacaaaacccaacacatgggaggtcaaaatatacagaggcaccaacaacccagcactaacaagccaactacagacaaaaacg

SEQ ID NO: 500370 - DNA, 104 bp, Homo sapiens
ccagattagccatgtggatggatggatgggtgggtggctgagttaggtggataattgaatggatgagagtataaacacttgcttagctgagtggatggaggggt

SEQ ID NO: 500371 - DNA, 685 bp, Homo sapiens
  misc_feature (83)..(83): n is a, c, g, or t
  misc_feature (89)..(89): n is a, c, g, or t
gaacagatcagcaaatttaaaagaaaaccaaacagctcttttagaaatgaaacactaatgtctcagtggacatatttggtgcnagttanatacagtagaagagagaaacagtaaataggaagattaagaacttacccagtgaataggaagataaaaaaatttcagataaattattacagagaataacgtgggaaggcagaggacagaataagggacgcggaagatggaatgagggctaacgtacatttgatggatgtcccagaggcagaggaaacaatggctgtcaaggagtaggttggggttttcagaactggtgaaatatactgacctacagacagggagccctgaagccgcctggcagaacaaaggaaaagcaacccccacctgcaaactacagatgagcaacaagcaggcagtggcttcctggacagatgcggtgctaggagacttcacctggctctcaggagcaacgacagaagccagaaacagtgatgtgctgtcacacacctgagcaaactccactgaactaggatactaagccacggaaagaacagtcacaagggatggccaaataaagacattctcaagtaaacaaaggcggacagtgtgtcactgatccttgtggtgggaattccaggagcgtccttcaagcagaaggcaagcagcagagggctgcgcgtgagtg

SEQ ID NO: 500372 - DNA, 110 bp, Homo sapiens
tacagcaggagcagctgtggggccagctgcaggatctggactccaggctccgtgctgggagctcagagtttgattcagagcacaacctaacaatgcaatgaagggcacag

SEQ ID NO: 500373 - DNA, 109 bp, Homo sapiens
aacaaacctgcacgttgtgacatgtaccctaaaacttaaagtataattaataaaaaaatactcttctaggctagcataacccagactctaaccttaaggtaaataatta

SEQ ID NO: 500374 - DNA, 590 bp, Homo sapiens
  misc_feature (83)..(83): n is a, c, g, or t
  misc_feature (89)..(89): n is a, c, g, or t
gaacagatcagcaaatttaaaagaaaaccaaacagctcttttagaaatgaaacactaatgtctcagtggacatatttggtgcnagttanatacagtagaagagagaaacagtaaataggaagattaagaacttacccagtgaataggaagataaaaaaatttcagataaattattacagagaataacgtgggaaggcagaggacagaataagggacgcggaagatggaatgagggctaacgtacatttgatggatgtcccagaggcagaggaaacaatggctgtcaaggagtaggttggggttttcagaactggtgaaatatactgacctacagacagggagccctgaagccgcctggcagaacaaaggaaaagcaacccccacctgcaaactacagatgagcaacaagcaggcagtggcttcctggacagatgcggtgctaggagacttcacctggctctcaggagcaacgacagaagccagaaacagtgatgtgctgtcacacacctgagcaaactccactgaactaggatactaagccacggaaagaacagtcacaagggatggccaaataaagacattctcaagta

SEQ ID NO: 500375 - DNA, 489 bp, Homo sapiens
  misc_feature (83)..(83): n is a, c, g, or t
  misc_feature (89)..(89): n is a, c, g, or t
gaacagatcagcaaatttaaaagaaaaccaaacagctcttttagaaatgaaacactaatgtctcagtggacatatttggtgcnagttanatacagtagaagagagaaacagtaaataggaagattaagaacttacccagtgaataggaagataaaaaaatttcagataaattattacagagaataacgtgggaaggcagaggacagaataagggacgcggaagatggaatgagggctaacgtacatttgatggatgtcccagaggcagaggaaacaatggctgtcaaggagtaggttggggttttcagaactggtgaaatatactgacctacagacagggagccctgaagccgcctggcagaacaaaggaaaagcaacccccacctcctcaaacgcagagaggacaaacgcagagaggatcagcaagcaggagtatgacttccttggtcaacgcgagaacagctcctattcaagtcctctctgcgtttg

SEQ ID NO: 500376 - DNA, 129 bp, Homo sapiens
atagctgtgtgtgcgcacactgcagtccagctactctgaggctgaggcaggagtattgcttaacaaaaaaaaaccccagggcagattttgcccactgcactccagcctgggcaaaagagcaagactcca

SEQ ID NO: 500377 - DNA, 111 bp, Homo sapiens
  misc_feature (28)..(28): n is a, c, g, or t
gggcgcggtggcagacgtcacggaggtngacgactgcgggggtccgactaccaaaaggcctcagtctgaagaaaaatagattcatagaaaactctggccgccccccgaatg

SEQ ID NO: 500378 - DNA, 239 bp, Homo sapiens
  misc_feature (27)..(27): n is a, c, g, or t
  misc_feature (211)..(211): n is a, c, g, or t
aggatcaggtataacaccacagcttanacaaacacactcacaactcctcctcatcctaacaatcacacactcaaggttactctgcagcttgcatcatctccgagattaataccaaaaattctccattgacggcccaaatttgtgtctgagcgctgtttccgcaggcattaaatgtcacgcatgcattagtaatccctccaacgccgagcantgagctgtgataatgtttcagtcgacgc

SEQ ID NO: 500379 - DNA, 675 bp, Homo sapiens
atcggagcaagcaggtagacctgattgagcagaggtcctaaattccattcccaacaaccagatgaaggctcacaactttctctatctgtacagctacagtgtgtactcatatacttaaaaaaaaaaaaaaaaaaaaaaaaaaaaaaaaaaaaaaaaaaaaaaaaaaaaaaaaaaaaaaaaaaaaaaaaaaaaaaaaaaaaaaaaaaaaaaaaagggggggccccccccctcttttttttctccgggggctccctttctcgccccccccgtttttttttgcacggggggcctccttattgggcttttttttatcgtcgggactgcgcgcccacgtgctgtcttcacgcaaagagtggcacgggtgtgagggacgaaacgaggggctccgggtggggtctcttctgttggctgaaggagagtctcttcttttctcggggcggggtggcggaccacaacaatttgtcgcgcggccaataactctcttatcttaatatacggcgaagcgatcatataatagagaaccgcgctactcaaagagtgagccgacggatccttcctataacacaatcctttttgttatgggagacgagtgctgttgtgaagagcgagcagcggggagggagacaacacatgagccgacaccgcgccatataatatatattgagcgtggagtga

SEQ ID NO: 500380 - DNA, 388 bp, Homo sapiens
  misc_feature (305)..(305): n is a, c, g, or t
  misc_feature (326)..(326): n is a, c, g, or t
gtttagattagaatatctttcccaattgttacagtgacatatatgctgcaatatttaacaactggagtattagccacatgggttattttttcaactctgtgtttagaatttttttattgtgtgttatttaaaatattacatatgcagctgggagaactacacctttgtgcacatagatttatatattaatttgtagaaaatattttctttatatatttccttaccatacaaggtgccttgttcatccaggaaaactttgtgttttggtatttttggaacaaggcaacacggggcacccttccagnacgtattgccttttctcaagntatacgtctgaccaagtgtataaatgttacacttactttcagagttctttttagatctaaag

SEQ ID NO: 500381 - DNA, 832 bp, Homo sapiens
cagctactgaggaggctgagacaggagaatggcgtgaacccgtgaggcagagcttgcagtgagccgaaattgcaccactgcactccagcctgggcgacagagcaagactccgtctcaaaaaaaaaaaaaaaaaaaagcagttgctattaacaccactcagtatttgcttcaaaaatattaaagaacatacacaccattgagagagaggtacagtgacatgggttcacacttaacgggttgggatgtacacaggcaaaatcatttggagacatccttggaaatgtgtctctaaagccttggatctagtaatggtccaggctttctaacgaaactttgaaggctgtgtaccaagatttacttatgaaactccatttacgctttgttaacacactctaaggcaaggggatggcttagttgaatgaaccggcggtgtatgcattgaccagactccactgttgacaatgtgcatattgtcgtcctgtggaagcattgtcatcacgtatgatcgcatctcgtgacctaagacacacagtaaggctgctggcggggggtcactcctggtaatcccgagcacctttgcgcagggccaggcaaaagggattggccttagaacccgcgagttcagaacgaatctgggccaacatagactcgctatgtggtttcaacattcttcttcgacagacagaaaacgccccataggtagtcacggtacccatatttgagctccctccctgggtcaccccttgggccgacatggccacggtcggtctaaaacgggaactgtgcccaagcattgtgcaacgcaacatagtggcgcaagggggcttcacaa

SEQ ID NO: 500382 - DNA, 304 bp, Homo sapiens
ctgagcattcgcgtgggcatcaacctggcggtatccggtgcctgggtttcagcctcggctgatgctcatctacacgatcagcacgcggcatgtgttctcacagcgtcgcatggcggaccgcgccatgaatttgcgctgttccgtgatcggtggagcggggctgctgctgaccgaggccctgctgtggctgctggtccggcagatcggagtcgcgccgctggcgccaagctcggcagccctgtggtcgttcctcttcaatttcgcgttgccaagagcctgctgttcacctccttgaaccccaccc

SEQ ID NO: 500383 - DNA, 731 bp, Homo sapiens
gctccagtgccatggcgccctccaggaagttcttcgtagggggaaactgggagatgaacgggcggagagcagagtctgggggagctcatcggtactctggaacgcgggcaaggtgccggccgacaccgaggtggttcgtgctccccctagtgcctatatcgacttcggcgcggtagaatctagatcccaagatagcggtgtggttgccgcggaactgctcaattgaagtgagtaatggtggcttttactggcggacgatcagccctggcatgatctaagactgcggagccatgtgcgtggtggtcctggtggtcactcagatgcatgaagaggcgtgtcttctgaggcgcagtcagatcgagctgaactaggcgcagcaaagtggccactgttctggcgtgagggatctggagtatcgttgcatgtgggagaaggaggatgaattggaagggaatgtgtgagaagagtgttgtcgagcatgacaaaggtcatcgagataagtgaaggatggagcaaggtcgtctgggctatgagctgtgtgggccatgggtacaggccaagactgaatacccaataggtccaggaagtagcacgagaagctccgaggatggctgaagtccaggcgtctctgatgcggtggtcaggagcacccgtatcatttatggaggctctgtgattggggcaactgcaaggagctggcagcagctgatgtggatggttccttgtgggtg

SEQ ID NO: 500384 - DNA, 539 bp, Homo sapiens
tataataccacagagccagctatacatggagacagtgtttataattactctaatgaatctccccaagaattcggggattggagttaaaggggataattatggtagggtatggggccagtgagtacagagtgctgacttggtcaggtatggagattaaatcacatgggagtctaaacttgtcctcttgctgctgagtcggttcctcggcaggggccacaaaaccagattatccaatttatcaatctgggtaagtgccagcttgattaagccatcaagtacagggtctgcagaaatatctccagcactgatcttaggttttacaaccatgttatgtcatccgattagcaatcttgggagttttagaatcttgcaagcctccagttggttagactcctaaagcatgattttgtaatcttgttgggtaattttgttagtcctaccaaggcagtctagtcctcaggcaggaagggggttacttttgggaacggggtgttatctgtctttgtttcacaactaaaaatattaactaagttctccca

SEQ ID NO: 500385 - DNA, 1149 bp, Homo sapiens
ttattttgttatgcatctctggatgtgtccgttcctttgccagttgattctaattgtcgtctcaatgtttctcacccttttagcttcatggctattttctccgttcacggaaattgttggagttcttctttccctgcatttttgtatcgttaaatcgcgtctgtttttctgtacaatacttccccttttttgtaattaacctgtatcttgcctgtgcgatactatccgtggggttccaattataactgcaacttcatatggcatcctgcggttgttcctaccatcgaattgtatgtgcctgactaccgttggtttttgtttgccccttgtctttctcacagctatgcagttcctcatattattaatcagtggctgcctgttctcgtatcctgctgttcctgttactgcattatcagccctcaatgaagcagagatcgcctggtcaaagcatatctcttccagttgcgcctcttctccttggtggtcttcttaagctacagactcttccacaagacagtctacctgcagtcggccctgagcagctctacttactgcagagaagttcccttcaccgcatcccgtcgcctgccccactgaaggctactgcaggtcactgagttgcctgccatccaaaggggatgggcgggattggaagaagctgtggcagctctttctccctgttcacctcaccgcctgccagggaaggcaggacccgctctgccaagggccctctgcgtattcccttctctctgaggcaattgaaatttttgtctctggtgcacgtaaggcagaatgttccctgacaccagtgctagctggattctctaacatcgaccgtgagtctgaaaggaccacaggttatttctgcagctatttctctagcactttgccagtccctgtgcctggaatgattggaacactctttgtttttcatccctgatgccactctacccttaccacctttccatatctgccttctaccacccttggatgaatggattttgtaatctctaagctgattgtcattttgtgaatctgttaaccttctagcttgtctgttctcgatgaaacacatatcatatggatcactgggacggtaaaaggcgtgtcccagttgctccaggtcacatccccatagtagccagttac

SEQ ID NO: 500386 - DNA, 421 bp, Homo sapiens
  misc_feature (4)..(4): n is a, c, g, or t
  misc_feature (126)..(126): n is a, c, g, or t
accnacaaagaaggccaatttaaacttaatcccatgaattagagatgatgaaaagggtttggaaaatttgttgtgccccaaatttccatgcctgaaaatgtaatcccctagtgttggaggtgaagnccctggtgggagttgtttgggtcatgggggtggaccctcatggcttggtactgtcctcatgagagtatgatagtgagtgagttctcaagagatatgactgtttaaaagtgtgtggcacctcctccccatcctcacactctttcttgcctcctctctcgccatgtgagatgcctcctcgctgttcacctgctgccatgattgtaaacttcctgaggcctccccagaagccaagtagatgcaagcattatgcttctgtaaagcctgcaggaccatgatccaattaaatctcttttct

SEQ ID NO: 500387 - DNA, 122 bp, Homo sapiens
ccttcagagttgggtgaggcttcctgcagcatcaccgggggtcgtagggagctctggatgggaggaattcaatttccctgtccctatcatcacacccactgaccccattgacagagaaatgg

SEQ ID NO: 500388 - DNA, 607 bp, Homo sapiens
caaaagacaacagaggaggtattaaatcaaaaactacagctaaagtaacaaaagaattatatgtaaactcactcctgttccctttctatttccccaattaaaggtgctgctggtcaggaagttccacaagataaagcatggctataaaagtgtggtctgaaccccaagttagagaaagtgtggacttggaacaggaaaacagtgataatgagcatttggttgacaacatgaagttccattacttttagaggaatctgatcttcgaaggatccccaggtgtaaagactacaccccttgaggcgaccgacagaatattaaccctgtaacatctaatttcagatgaagaaatgtcattgaacacagttacaggagaaccaaaaactatcagttccagtgagaaacaaaggataaggcgtaattcttctgacagtgctagtagataatcctaagcctaataaatttgccaaaatctaagcaatcagcagactgtggactcaaaattcagatcctggatgaatggctagcaatcctcaacagaggtgcccaggatgaggtcacagttcttcttcagatactgctattcaatgaaattcatacaaaacataag

SEQ ID NO: 500389 - DNA, 431 bp, Homo sapiens
  misc_feature (319)..(319): n is a, c, g, or t
  misc_feature (359)..(359): n is a, c, g, or t
agataaaatgtaaactgtttctttaaaattggggcttcaactttggaatttcacagcgtgctaaaataacagatttctcagaagtctttcagcaagataaacattattaaataacttatttatgaaagtattaaaatgcttacatttgaacttgatggctaacttacaaagattctctatgtatcaaatgtaacttactgtgactaaacttaatttaatatttactctataaccaaatgaaatatatttaaaatatattgaatattttatattgttatatcctgacaagattataatattttaatgtactaatatttcngtaattatatctaaaatattattttattatattgcctaanaataaacatttgttaaattggagctggtcctttttttccaaaatggaaataaattttttttggattgtaaaa

SEQ ID NO: 500390 - DNA, 978 bp, Homo sapiens
gagcgaaagggcatggtacaggctggcactgtacattggactcctaggcgagggcacgcctgcatccaggacccattgatcgatgccatgaagcgtaggcctcaggaagagtgtatagggccgcaaggatcagtgcaagcagcatcacgcgtagcatcgcagaatcacatcgggaaattccgcggaaagagacatgcgtcggcacgggattcttgcatcagctcatcaacacgttctagcatttgggcacctccgctacagtgcacctcaagtgtgcgaggatgacaagaaggaccgtcgagagcactaggcgcgcataacaattcatcatgcaagcgaatccacgacttgggcagtagcacgagtagatacgtggtgtcgaggaattctcttgattgtgcgaaccttgttcgggccggtaaggaggagaaacaatacataggtgagttggctgcttgggaacgccttgacgatgacgcgttggcgcaacacgagtaggtaaaagggagagatgaaggacgacggaaaagtgccacttgggttggataacgcgtgggggagagttggcacgcaacaggagacttggcccgccttgagcaacacccattcgaacttttgatgcccagattagacccccaaagcaacactcgatcgggtggctcgtgacacggtgagcattagaggacaaagcacccttaaagtttaatatggtagcatttagtaagtaccattaccggaaggggagttgcaaccccggaccgccatagagaatagcacaagcggaagagatagacatatagacacagataaccacttccagcacagtgcagagctacccgtgagcaaacgaatcacagacaccccagaaagtgtggaacacaaccgcatcatcgcattacacaaataggaccacattggcaaagagccagttaggttcgccacatataacagttatattagcccactactagaacaaca

SEQ ID NO: 500391 - DNA, 110 bp, Homo sapiens
cggccctcctagccgccagcacagtcagcgccatcgggttgctcgggttcgtcggtctcatcgtgccgcacatcatgcggctgatcgtcggaaatcgccacgtcatcctg

SEQ ID NO: 500392 - DNA, 1380 bp, Homo sapiens
gcgcgagcggacgcggcagcgcctctgtctcgctttttcttatttttcccccctttcccctttctttttgtttttttgctgtttcttttctcccctcccccccttgcacaatattcccctgggagggggctttcaccggggcagggggcagagccgggtctacacccagggggtagtaaccacgcgcccgagcggaggcccgcaaatgagggaaagcgggcagccacaagcacacaacaccgggcgcctcgagagcggcgacgcgcggccggacgagagacagaggagagacacgacaggggaaaaaaaaaaatcaaagcgagccacgcgagcacgaaaagtgagagaagacgcaccgaggtgaccagagaaccgacaaggggcaggggcacgaggtaagaccacagaaagcgcaagtacaccacccacaagacagccagaggggaacgcaagaaagagacgacgatacaacggaaggacagggagcccgaaacacaagacacacgaccacagaccgacagggggacgacacccaacctgcggcggcgcagcacatgggcgacagcgcacgcgcaaggagtggtgacaaacatgggagaaacaccaccagaaggagaggaccgccgaggggcaacaccgaccaaagcagaagagtataacagcgaacaagacggcacgaacacgcgcagaagagagcgagcaccgcgagtgacgaacaacgagggagcaccacaagagagagcagacagcagacgaaacacgcccggcagccaagacgcaaaaacacgagggagcagggaaactagaacagagcgcacagacaacgaccccacaaacggacaactccaacagacgagaacacggaagacggaagaggacaagaagaaagagaggcaacaagcaagggacagaaccgggtgcccaccgacggacgacagggcaaccgaacgcacaaaacccacggcaaacagagaccgacaccgccgacaaccacacaacaagacactgaccgacaaaaacaggcgagaaccacgcagcaagcggcagaaaccacgggccaccacccagacagcgtcacgccaaaggtagacacccccaaggagacagaatgcagaaaaaaatgtgtcaccaaaacgaaaaggcaggcacaaagcacacaggaagacaacacggagacaagcaaaggagcacaagccaaggtagaacaccagacagacacacgggaggagcgtcggagagagaagcgacacaacacaaggcagacacagcgaaaatcaggacgccagcaggacgaagcaggaagccacgagcaacgaacaggcccaacgccggagagaggccgacaaaccagagggatacacacagcgaagcgaagacgag

SEQ ID NO: 500393 - DNA, 291 bp, Homo sapiens
gcttcattaggaagatgctatttgagtaaagaactttgaggacttcaaggagttagtcatgtgggcaactacacaactgcattggaggcagagggaacatttactctaaagtccttaaggcaggaaaattccaagactgatcaagtaacagcaggagagcgtgtgcagacgccttgggccaagaatgttgaatacattactgaagggagccaagggtgggaggtgatccgagagagtgaatttttcctggtgtggatcagggccggaatttcccgggttgtgttgtgtgtc

SEQ ID NO: 500394 - DNA, 697 bp, Homo sapiens
  misc_feature (185)..(185): n is a, c, g, or t
agtttgggccgggccaatgtgaaaatgactgaatgaaacagtacaaggtcaggggctcagtaaaatctgtttagagacagactaattccgtcatagctaccctagtgaaaagaaaaccaccatccattgataacgctttatatagagtttataaagcaattgtgttttgtaatataacgaatcanggatgttattgtatattcgactgcccaactaaagaactctatagtgagtgtgacattcccagcccagcatattgtcagctgctcgtttcatatgctatatgatatggctttctttgcaagtgcctatttttatgctaggcatgttaacatcagggatttgagtgtggaacaactcgaatgtctgttctcttggtaagccccttgtaatgatagagccaaatcaggctgccagactatgtagaaattcatcatccagttactaaatcagaaatccacacatcccactacctttatatatcgcctaggagcagagtactcatcacagcttgctaaatcccatataacgctatgtatgggtatgtaagtaacaatactgtccgcatttacggtttcattcaaacactcttgctgtatatatcctcaatgatttatgtattgacatcttcaatcatgcttctattgtcctacctttattacagacatgtcatttgtatcgcctgcatgctcatttt

SEQ ID NO: 500395 - DNA, 767 bp, Homo sapiens
  misc_feature (244)..(244): n is a, c, g, or t
aaaaaaattagaaaggttctgtcttgcacttgtgcccatgggccatataaatccgagacgctccaaaatataaatcctgttggtttgacttaacaacacaacccttgtaggccttgcatggtagggttccaggagaatttggaccaacagaaaaggagccaatggacaccaagttaaaaggttttgctggccaggtatggtggctcacgcctgtaatccaagcacttgggagggctaaggtggncggatcacctgatgtcaggagttcaagaccagcctggccagcatggtgaaaccccatctttactaaaaatacaaaaaactagccaggcgtggtggtgggcacctgtaatcccagctacttgggaggctgaggcaggagaatctcttgaacccaggaggcggaggttgcagtgagccgagatcgctccactgcactccagcccaggtgacagtgtgagactccatctcaaaaaaaaaaataagaggccgggtgcggtggctcaagcctgtaatcccagcactttgggaggccgaggcaggcagatcacgaggtcaggagatccagaccatcctggctaacacggtgaaaccccgtctctactaaaaatacaaaaaaattagtcgggcgtggtggcggacgcctgtattcacagctactcgggaggttgaggcaggagaatggggtgaacccgggaggaagagcttgcagtgagccgagatcgcgccactgcactccagcctgggtgacagagccagactccatc

SEQ ID NO: 500396 - DNA, 218 bp, Homo sapiens
  misc_feature (153)..(153): n is a, c, g, or t
  misc_feature (178)..(178): n is a, c, g, or t
ctaggcccccttctggaggtgaatggtaaccgggatagcaccatgggaatgtacttaatgccgctgaactggacacttaaaaatggttaagatcgtagattttggccaggcacagtgactcacgcctgtagtcccagcactttgggaggacanaggaggtggatctcttgaggccagnagttcgaaagcagtctgggcaacatggtaaaaccctgtgg

SEQ ID NO: 500397 - DNA, 113 bp, Homo sapiens
gtgagtgctggtacctgcaccccggtgtgctggcccggatcttccggaagtcgggtggcttgaaaatgcagcccaaacgcgggtggtacacctccatctagaggctaaatacc

SEQ ID NO: 500398 - DNA, 791 bp, Homo sapiens
atggtggttgttccctttgtagtgttccctctttttatttgctctggagcccctatttgtcctcttgttttcacgttatttggccttgtggtctctcttgatttcctcacgtctgtcattttgttgttgtcacgctgtgtcttggctcccttttgagttcaggtattggcctagtgatgtactctactctcttcttcttctctgtactcctcttgttttatgtgattcccctaggtatcttttgtacccttgatttatgtacgtgtagatgtccttctactctcccgtagtctctattgtctatgtactatatgtctcgtgtatttctgtcagttccgttgtcctatggtcgtgtctctactacttgtctcctcatagtctgttagtctgtagttttcgttaggccgtctagtctacccatagttccctgtcatggtagttgatagtctgcaatcacttgtttgattctacctagtacttttatgcaagtatcatcaggcttatacccatcatagctgactcctagtgtggaacatccgggctggtctttgtagtggactacgtaggatggggtctggggtaaccaccacccagccacaggcgctgtcagcctgcccacctcaccttcccgctggactatctaccttaaccagcctttcatcttcgtactgagggacacagacacaggggcccttctcttcattggcaagattctggaccccatggggcccactaatatccctagcttaatattccaatacctcgtagctagtaaacccgagggacagtac

SEQ ID NO: 500399 - DNA, 197 bp, Homo sapiens
agatctctaatttcttaatgcaaacatgtaccttacaacaccctacaggtcctaaaccaccaaacctgcattaaaaatttcggttggggcgtacctcagagcgagaacccaaccttccgagacattacatgctagagacttcaccgagtcgaatgcgaactactatactccattgatccaataacttgaccaacgta

SEQ ID NO: 500400 - DNA, 452 bp, Homo sapiens
cctcgccctgcgtcggcatccatccagtacatgcatcctgagggaggagcgctgaggcctgagcgtggacagagagctcatcatcgagtcgtgcgacgcctcctcggcctcggaggagagccccaagcgggagcaggactcaccacccgatgaagcccagcggccacatggagtgccatcacgggaggagactgagcgatccgggcccgaggagctgtagcgccaatgccaggacggggccgtggccgcagccagggtatacctatcctacgagctaaccccctcaaaatgagaccccagaactggaccccgagctgccccctggagacggagccctggagcctgagacgcccatgtagccacggaagcctgaacgaagacgtcgagttccaaccaaagtcctgcggacacaaagggccctgggaccactaggtcctggcgaccccgcccca

SEQ ID NO: 500401 - DNA, 242 bp, Homo sapiens
acttggggtgggtgcatcagagaaaacctctcagagagagtccatttcttcaacagtcaacaattatttatcgaggagcgacactgtgccaggcacggtgctaggtgatagacatacatcagttaacaaaactgagggaacatctaacccttatggagcttaactcataatggggagggagtggtgagagtgataatagacaacaaatgggtacataatatagcaactggtagtaaatggta

SEQ ID NO: 500402 - DNA, 1628 bp, Homo sapiens
agtgaggcgaattctggaggctgctgcatgcttacttgaagaccgacgactttatctggtgtggcgacacgagtgacactttggtctgagcatcacagttagtactgcaccctgttgtggctctataagccaggttctagagccttctattccgccaggccgttacccaataaccaaccgctggtatcctcagcctgcgattaaccagtcgccagatatccagggctagtctatggcgccgaacgctcgaatacctggtgttcacgatagattggccccaggttttgactggctggtcgaggctttgcaagaaggaccctaatgccttagcatagcggacaccacgctaccgggccatcccacgacacgcgctacccacggcgcaacgccgacgcacaggtcacgacacgcccccccaggcggcttagaaggcgaggacacgcgaagggcagcaccagcacagcggcggcgctgcgcaacctagcctctcccttcgaaccggaccgcgacccattcggcgctggcacctcggtcagacgccacgagccccctcggctttggcactgtgccctcctcatcgcgtccccacccggccccgccccttctgcgcgcctccaccccttgcccccaagacgaagtttttacccctttcgcgcgcgccttcgcgcctgtctggaccctcttctccgcccccgccccgagtctcctctcccagtgtctgtagctccctctcccccctcctcatcgcgcccgccctcactgtgcccccgtctttctcctctgcgcacagccgccgctctctggagctcatagcgacgacgcgccttgtgcggtcccccctcgtctcggttaaactcctccaaccgtcatttggcttttccccctctgacactgaccttctccccgccctagaccctcttcacctacaggcctgtccagttctctcgctcccgtcgcggcctgttgcccaccacccctcttcgtgctatactctcgaccgaccgcacattgccctgcgcccccgtcagtacctcgcctttatcttggggaccacctcctaaacgcagcttctctttctctgcgcgtctgtgcactcccgctggcccccgcagcatgcgcctttccgcaggcagtccgcgcactagccaggccgccctcccgcgctctattcctcttgccggccacctgctttctgcgtcatggcgttgacccttatccactgtccgtacaccactccacaccaaggcgtcacccccccatatgctaccccacccccatgtccccccatccactcaccactacctctacctcccccacaccaccatccccctccactctccgcctcctccacttctctctacctacccaccaccacacactcacggcccaccgccactcatccatcacctcctccactcactcccctcaccaccccacccataactccacacgacacaactaccacctactacactctaccacccgctctctcctactctgcccccgtccctcgcccccataccctccctcccctcctacccccgcagctccgtctccctccctctgctctcccctactccttctctcgccttctcccttttttcttccctccccccctccctccctct

SEQ ID NO: 500403 - DNA, 269 bp, Homo sapiens
cccctttgtttcccccggcccgtttttccttaaagccttttttttttttaaggggaacccggaaaggggaaatttggcaattttggaaaaggttccaaatttcctttgggttttttaatttaaaatttttttttgggggttttgggttcccgggtaaagtgttgggatttttggttccggggggttcccttttaattttgggagggcttttaaaattttttaaaattgggcctttttttccctgggaccccttttttggaaatttttta

SEQ ID NO: 500404 - DNA, 720 bp, Homo sapiens
ggcaaggattccgtgcctttgtgacagactgggacacagtgacagcacggtggctgggctgacgctgctggctgttggggtctactcagccaagaatgccacgcttgtcgccggccgcttcatcgaggctcggctggggaagccgtccctagtgacgggagacgctcccgcatcacggtgcttgattgtctgctgcgcgaccccatccaggtcacgacggcggctcctcacgtcgaccccaggaccgcgctggagggtgttgtgctcagtcccagcctggaacgccacctgggtgcgcgacatcgccatagcaacaacggaacacccaagatagaaccgcagcctgtacaggaaccaaatcctgatgtactgggccaccagtgcaccgggaagacgctgtttgccaagaaactcgcacctgcgactcaggcatggacctacgccatcatgacaggcggggcacgtgcgccccatgggggcgcgggaaggcgtgaccgccatgcacaagctctttgactgggcaactacagccggcgctggtctcctgctctttgtggatgaacgccagactgccttccattcgcgaacgcgagccaccgcacgaagctcacgccgcaggcacatccaggcgccaccactgaacgcccttcctgttaccgaccggaccacgcacagcaacaaccccagtcacgtgtcacacggaaggatcaacgtcctgct

SEQ ID NO: 500405 - DNA, 283 bp, Homo sapiens
acagacgttaccacagcccactatgtgaatgtactgttatctctgttggttaaaatatagagccaggtgtggtggctcacacctgtaatcccacgcactttgagaggctgaggctcgaggatcggttgagcccaggtgctggagaccagcctgggcaacaaagtgaaacctgtctctgcaaaaaatacaaaaattagctgggcgtggtgatgcacacttgtagttccagctacactggggctgaggtggagggtcacctgaaccggtggaggtcaaggctgct

SEQ ID NO: 500406 - DNA, 221 bp, Homo sapiens
ggaagaagctgttcacggagacccccaatctgtcggaaacgtacttactcatgcgaataccagtccccgtggaacgctctaagatctcgagcctcatccagacacactcagcggcgatccaggtccagaacccccctgataagccgacgtatgcccagatctcgaacttcaacagtcagccggaggcggtcaaggtccaggctttcagatgactcgacaaa

SEQ ID NO: 500407 - DNA, 331 bp, Homo sapiens
cggcacgaggccaggcgagagaaaatgccatggcaacggcatcaggatgctatgctgctcttgcactgaagatttaatgggagccgtatctgattacccgagctcaggcctgccctgccctgtccagtccagcccagcctggcctaccctacccagcctcttccccagcccagtccttggccattagcatatcaccagagaggtcagcactttacaattatccgtccagagggctggctggtgggaaggacttgccccactgttccctagaacacttgtgtttctgctgttgcaccaggttttattttaggttttgacgatttaggtgcca

SEQ ID NO: 500408 - DNA, 614 bp, Homo sapiens
  misc_feature (120)..(120): n is a, c, g, or t
  misc_feature (472)..(472): n is a, c, g, or t
ctggaatgtgctgtgtgactgagggtaagatcatctacctctctgagctttagggtcctcacctgaaccgaagattacatcactggtggcctcatggggctgatggagaggacacaaagntgtctctgtcatggactctgcctttggagagagggagaattccactggggtggcatcatcttcagcagcaacaaactctatctatctatctatctatctatctatctatctatctagtccatttatctatgtaatctatctagcttccatgtgctgagcttcacccagccagaccttgtcagatgccaattgacttatctccttacataagaacgtgtgtatgagaaggagctagactttcaaacaagtggcatggataggccctgagacctcatggagaacgagcaacggatggttattctgtacattcatatacccctactgtgcgcctagctttgagcgaggggatggngaactgcgggagctgccctggaacgcagttctcctatagagctgccgatgaagcttacatgcttcttttctgtcgctctgagatggatacacggtgaggatacccgcgcctgagcccgttggtgctattggccgttgctcag

SEQ ID NO: 500409 - DNA, 395 bp, Homo sapiens
gtcactgcgtagcggtgagcggggttgcaccactgcactccagcctgggcgactgagtggagcggaactctgtctcaaaaaacaaacagaggttttttaaaatcatcagctatcgtcagtgtcagtgtctgtcctgtgtggcccaagacaactttgctcctttaaatataggcagggacgtcacaggatgggatatccctggtttataccaagaaagagaacaccccacttttgcaattgcctgaaaagactaccatgccatctgaacaccttgtgatttctaacttctgtgctttttggtagcagtggactcccagggtgactctctgagggatgtggtaccctttggaaggaggttgcgggtcactacggatgatccttccggagtgacatat

SEQ ID NO: 500410 - DNA, 365 bp, Homo sapiens
  misc_feature (283)..(283): n is a, c, g, or t
tcacactatctgtgcccatgacagaactactgggataccgagaggcgtttataccatagccgccccgttttaagagtactgccccaagcactattgacccatcacaaactactggacccatcacaaactactggacccatcacaaactactggccagtagtttgtgatgggtgatctagatcactattccgtctctgctggggaagcccatcacaaactactggacccatcacaaactactggacccatcacaaactactggacccatcacaaactactgganccatcacaaactactggcgtttgtgaagtctcaacgacatcactatttccactcttctggggaagcccatcacaaacttctt

SEQ ID NO: 500411 - DNA, 412 bp, Homo sapiens
gcatttttatttccaggttaaaatgttagcacactaccctataggcatcagagaacatgaggggatttaaaacaattaaactagtcccagtatgaagaacggattagaaggagaggcactagagtcagggagacgaattaagagatgttctaacagtgttggcatttggtaacaagatctgcattagtgtgatctaaaggggagtgaaaagtagggatgagcatgaaattttcagccgaagattaattacatggaaggtcaggattgaaaatccagattttggagtcaagaggcaatacttgaaaccaagagaccctgccaaaggagagaggagggggctccagcgcaagctctgctgccccttggcaaggcagtgtgtgggggcgcggacggagaccgagacttcagcttc

SEQ ID NO: 500412 - DNA, 341 bp, Homo sapiens
  misc_feature (3)..(3): n is a, c, g, or t
  misc_feature (32)..(33): n is a, c, g, or t
  misc_feature (259)..(259): n is a, c, g, or t
ttngaaaacccgtttcaaattccagctcggtnnccccagtagtttgtgatgggtaatctagatcactattcgtctctgctggggaagcccatcacaaactactggacccatcacaaactactggacccatcacaaactactggacccatcacaaactactggacccatcacaaactactggacccatcacaaactactggacccatcacaaactactggacccatcacaaactactggacccatcacaaactactgganccatcacaaactactggcgtttgtgaagtctcaacgacatcactatttccactcttctggggaagcccatcacaaacttctt

SEQ ID NO: 500413 - DNA, 172 bp, Homo sapiens
tcggtaccggtgtcatcgatgcactgcaccagtcactcctatgctataaggctctgtacttctgtaaggtttttctttcacgtaagtttctctaagacggacaattgttcacattttaacatacatgaaattaggatgcttttttttttttttttgggaaatggagcctcgc

SEQ ID NO: 500414 - DNA, 412 bp, Homo sapiens
cttcagcctgtttagtgctctacaatcatcatattctctgagcatgcgtgataaattgtaggcatccacaatagatgtccagcaattatgtatctgtgactggccgctacatatgacagattcaaaatgagaaaattaattaccattctttgtatacacagatacttatttatgagtgacgtgcagttagttatacaatcagcctgggcgacagggcgactctgtctcaaaaaaaaacgtcatccatggtgaatgactgtacaaacggcttataaatacgtgtaatattaaaatatatcttaactgaaagttacagtgacaaaccaaataagttacagatttaatgtaaccaaaattcatgtacatggacaaattacgggacatttaatactgctggtgtaggggataacat

SEQ ID NO: 500415 - DNA, 219 bp, Homo sapiens
  misc_feature (137)..(137): n is a, c, g, or t
acattgtgaagtagtgcactacttatgaggatcgtgctggatacatcgaaaagtgctggacagatcacaaactactggacccatcacaaactactggacccatcacaaactactggacccatcacaaactactgganccatcacaaactactggcgtttgtgaagtctcaacgacatcactatttccactcttctggggaagcccatcacaaacttctt

SEQ ID NO: 500416 - DNA, 121 bp, Homo sapiens
gatctggaggagctctcatcatggtacagcagggcgtcagtttatacacagctcttgggacggtccgcaccggtgctcaccgtgtcgacggacacttgtaccagggaggcatgcaccgcag

SEQ ID NO: 500417 - DNA, 178 bp, Homo sapiens
cctgcttccaagtaggtcacagtgaccaccacggaaagggcaaagctccctgccctgtgccctagagctagtacagcctgagctagtagcaagtagaccctacataggtacataccactgaagagaggcctactatccagaccccaacagccactagtaggaggagaggaacacctaa

SEQ ID NO: 500418 - DNA, 822 bp, Homo sapiens
  misc_feature (397)..(397): n is a, c, g, or t
atggcacatgcagcgcaagtaggtctacaagaggcttacttcccctatgcatagaagagcttatcaccttatcaggatcacgccctcataatgcatattgcctgtatctgcatttccttgagattcctggtattgcccatgtgtcccatagatccacttcaactaacaaaagagcataacttgaattacttaaacaatctccagaacagcatcagggacaatatgaaaccgggcatgaacatatgcccttgcaccgccaatcatgcctagtcgcgtcaatcggtcggctcgccatcccttacgcatccttgacataacagaacgaggtccatcgatcgccatccccctataccatcaagtcgaattggactccaagtggttactgacaccctagcgnagatagcatccgaggtacgggtcggatcgtaaatcatatcaattgccgtgacagtacgttccgcacgccaatttagtatccttaggtaaaccccaaggtcggatcgtgacgaaacatcacatgtggaccgcttgtgagctaaattcggaagttagttagcttgcgctcgaatcttggaggatgccctcactcgacttacgggtaattagattgacactttatctacttccatcacagggacggttccgtctgcctaacttcctagtcgaaggcgtgttcttcaccccaaccaattggagggtgcctttgaaacagcaagcaattgcacattcttcccctgagaaacggattcataataacgcaaaaccaattttttcaacctgggttaatcaacggaaccggggggggttaataacttaaccggg

SEQ ID NO: 500419 - DNA, 151 bp, Homo sapiens
ggagtagttatatctaaggaataatcctgccatatttcttggctctgacctgatgggacgaagatgcatcttgttcccatcagttaaattaatttgcagaagaaacccttgccgactctactaatagccttgctgatgggacgaagatgcg

SEQ ID NO: 500420 - DNA, 761 bp, Homo sapiens
gcacgaggagcggcctcctcctccctggtggggcctgtctgggtgaagcccctctgttcccgcctgacttcagtgaaagctcaaggtgcacttggctgtttctacagcttcggagttcccagctctgcccaagttggtgccagcgagctgtgacctcagggcagtcactaacctgcccaggcgagtttccctcctgcccaattaccctagttctctgaccctccaggactgccacagagcaagatcttcactgcgccttctcttcactcccagtgttctttgcatggcctcagcatttattggagccgctgtctgattcattttggattcatctcgtgcactgtgcaatatgcagtggctcttcagagccagcacaatggaggtgacccttctccccgtgcaccttccagagattaacacgtaaacaaagaaataaacacagattccaactgtgatgcatgtggtgaagaaagaactggggcccagtatttgttgacctttcagtgttctgcactcccaagggagggccacgtggtggggatggaacacaggcatggacagtacgtaccttcctcctttagcaaacagggatgatgggcgcctgtgattagtccacacaaaagcattcgggagggtataacactcaaatgtaatattagtggcgtggcaagattcttccccattgatgaccattagtgtgctatttttgttttctctatgaagaagaaaattaaaatttttttcattgcaaaaaaaaaaaa

SEQ ID NO: 500421 - DNA, 283 bp, Homo sapiens
gggggggggggagccccccccccttttttccccccccccaggttttccccgggggggccccccgggggggggggggccccccccccccctttcccttgggccccccctttttttttcttttggggggggggggggcctttgggccctttttcccccctgggccccccccctttttggggggggggggggggggggccccgggggttttttttttttttttaaaattttccccctttttttttgggttgggccctttttttccccccctttttttttttgggga

SEQ ID NO: 500422 - DNA, 703 bp, Homo sapiens
tccaataaaaaaaaaaaaaaaaaaattaaaaaaaaaaataaaaaaaaaaaaaaaaaaaaaaaaaaaaaaaaagaaaaaaaaaaaaaaaaaaaaaaaaaaaaaaaaaaaacctggtgggccgcttgggccaagcggtttttagattgggccaggttttggatgggggccgaatttggggctaattgggccattcccccttatggggggcggtttaaaattaaatgggccgtggtttaacaaggtggggccgggaaaaccctggggtttcccaaattaaaccgcttggaagaaaatccccttttggcaagtgggggaattggcaaaagggcccgaccggatggcctttccaaacagtggcccaccctaatgggcaatgggaattggaaggggtaaattttgggtaaaaatcggggtaaaattttggtaaaatcagttattttttaacccaatgggccaaattgggaaaaaccccttataattaaaaggatttccccgaaatgggtttaagggtggcccaatttggaaccaggggcccattttaaagaaccggggcttcaacggtaaagggggaaaaaccggtttatcagggcaagggcccattaggggacctatcccctaattaaggtttttggggtccagggccccgaaaggccttaaaattggacccttaaggggccccccctttgtttgccggggccggcct

SEQ ID NO: 500423 - DNA, 596 bp, Homo sapiens
agaagaaacaggaatatagggagatgtccaggatagactgtttaaggaaataaagcaagatacaaaataagtgtctacagtgtgctgtactttgcataaggagggaaattaagattatatatatctgcaaaatgaaacactagaagcacagactagaaatgaatgaattgggggtgaggggcacccagcagtagaaatgacatgtctaaagatacttttcatacttttttttttgagaccgagtttcgctcttgttgctcaggctggagtgcaatggcacaatcttggctcactgcaatctccgcctcccgggttcaagcaattctcccgcctcaggttcccaagtaaccgggattactggcacccactgccacgcccagctaatttttgtatttttagttagtagagatgggtttcactatgttggccaggctggtcttgaactcctgacctcaagtgatccacccgcctcagccttccaaagttctgggattacaggcgtgagccaccgcacccagccatccaccttagtttccacatctgtaaagtgaggctgataatcaccttcctgtttggattgttgagagaaaacaaat

SEQ ID NO: 500424 - DNA, 126 bp, Homo sapiens
ggtctgcaactctagttctacgactatggacaccagcctttggttttccatctgttcgagatgcctcttctctgtctcctatcagatagaaatggcgtcctgtgctgctcgcttcatactagcaga

SEQ ID NO: 500425 - DNA, 370 bp, Homo sapiens
gttgaaaatccccctttccccccgggggggcccgcttgggaattattaagcccctggttgccttttttgtttttcccccctttattttctgccggggggtatgggcttaaagccccttttggattgatgaaaacccggatgggggcccatctttttttaaacccccatgcaaaaataaaaattcccttgttcaaagcttttttttgcttttggggttaaacctaccctttgaatggggagcggggggtgggggggcctttttaaaaccagttcccttcctgggaccgcccccaaaacccttttggggctaaaaagggggggaaagtctgggaaggctttttttttttttaaagttttcccccccaaccca

SEQ ID NO: 500426 - DNA, 149 bp, Homo sapiens
ctggtccctccttctttggttatgatggtgcagcctccccagccatgcagaaatggtcaagtccaatcaaacctttttcttttcatcaaatggcccagtctcaggtatgtcttaggaagtagtctcttggcttcggtctggtgaaagag

SEQ ID NO: 500427 - DNA, 415 bp, Homo sapiens
  misc_feature (2)..(2): n is a, c, g, or t
  misc_feature (43)..(44): n is a, c, g, or t
  misc_feature (247)..(247): n is a, c, g, or t
cntcatcagtcactcgcatcactgattgacccagagcaactcnnttgtcctgtaagctccattcattgtaagtaccctatacaggtgtaccatattttatcttttacactgtatttttactgtaccttttctatatttaagtatgttcagatacacaagtacttattgttgtattacagtcgcgtgcagtatttggtatagtaacatgccgcacaggtctgtagcattggaataataggatataacntgtatagctcataggtgtgtagtaggctatatacctaggtttttgtaagtacgctcttgtgatgtacaaacaacaacgaaatcacctaatgatgcatttctcagaacatatccctgtcatcagtgtatgattgtattgtattttcattgtgagtatcataaaatgcat

SEQ ID NO: 500428 - DNA, 175 bp, Homo sapiens
atctctgcccactcttcctctgcctcccacctcttcctctgcctcccacctcccaagtggctgggattacaggcatatgccatcatgcccggctaatttgtatttttagtagagacgaggtttcgccatgtggccaggatggtttcgaacccctgacctcaagtgatccaccccg

SEQ ID NO: 500429 - DNA, 190 bp, Homo sapiens
  misc_feature (48)..(48): n is a, c, g, or t
atcgagctcggcccgaattctaattacgcacaccaaccaaccaaaaancaaaaccaacaacaaaaaccaccaccaccaccgcagcagccaccaaaacctaccttgaacctatcccctagaatgcccctcacaacctcaccgcaggccccaggctctccgtgtccctctccattccctccggcctcccttc

SEQ ID NO: 500430 - DNA, 793 bp, Homo sapiens
taggctaggtacgaggctgggtggtgacggcctcaacgtggagcgatgggaggcttgagaagaagaagtatgaacgaggctcggcaccaactacatcacccggaacaaagcccggaagaagctccagctgagcttggctgactttaggcggctgtgcattctgaagggcatttatccccatgaacccaaacgacaagaagaaggttaacaagggttctacagcagcccgaacgtgttaccttatcaagatgacatcaggtttctcctcgcagcggaacccaatgttcaagcaaagttcgcgtgagatacaaggtgttcgtccggtagaggctccggaaggcttatgggaagagcgaagtggaacacgtgtagagcgtttacaaggacgaataagctccaactacaatagctcgaccacagtcatcaaggaacggtaatccctacgttcatgcggatagcccatgcagggacgcgtggcgagctgaatgccctcgtccaatgtagctgtccggtgttttccgacgccttccctgcgtgacttggctaagttgccatcgtgcagacgcattcaagctggtgccggcaggttctagtgtggagttcatgcactacagttatcgctgccgcgtgcccgtgcgcaaggtcttgcctgtccatcaaaggcatttactaccaggccgaggtactggggcagccatcgtgtggatcactccctatgccttctcccatgaccacccgaagacgtggactacggggtcatggcacttcagcgagttctacagcacgctgctgg

SEQ ID NO: 500431 - DNA, 425 bp, Homo sapiens
acagcaattcaacatcacaataaaaggattatacactagaatcacacgggatatattcctggaaggcaagaatgcttcactataacaacatcaatcaatgtaatatgccacagtgaaagacaaacaccatacaaaactcaacacccttttatgatttaacacaacactccctaactaggaatccaaggaacttacctaaacttaacaaagtccacacataacactcccacagctgacatcatactcaattgtgaaacaatgaacgcttactcttcaagacgcggacgacggaccgaataccttctcttcccatttctatcgcaaatagtgctgggagtcctagccataccaactcagccagaaacaagccatatcaggcatctaacttgaaaacggaagaagtgcaatcatacctctagcatata

SEQ ID NO: 500432 - DNA, 244 bp, Homo sapiens
  misc_feature (162)..(162): n is a, c, g, or t
  misc_feature (244)..(244): n is a, c, g, or t
gaccggtctgacagcttcctgaggtgatggtctgtggcctatggtgctgtctgtacacaatggggtgagtcttgtcttgttgtgggagagtctttgtgtcatggaaattgcgggtcttcaagctgtctcatgagtctattctcgggaaagtctgtttcattnggcaagagtcccctgtgctccctaggcacgacgtctatggtctgtggtgagagtatgtgatgtcaggacagctggctcgacn

SEQ ID NO: 500433 - DNA, 1008 bp, Homo sapiens
gccagcctggggtatacagcaagactctgtctccaaataataatacaaattaggctgggtgcagtggctcaagcctgtaatcccagcccttagggaggctgaggcgggctgatcacctgaggtcgggagttcgagaccagcgtgaccaacatggagaaaccccatttctactaaacaactacacaaaatcagctgggcgtggctggcacactgcctgtaatcccagctactcaggaggctgaggcacggagaattgcttgaacctgggaggcggaggttaccggtgagcccgagacttgtgccattgccatgccagccttggacaagtaacgagcaaaactctgtctcaagaaacaaaaaaacaacaaacacattaaaagggaaaatctttgacaacctttagtgagagagcaatcattcgttctacaccatgtgagaacacaccgcgtattgcgcacggcaggggcacacaaggagccatcttcgcgcgtgtcacacgtgtgtgacacgtttatcacacggtcctcgtggtgcctacactttcgcccgatatctcaaattgctgtcccttcggaggggggtgtcacctcattgcgcacttcctacgcgtgggcccctgaggatctgcaacccgcgtgtcaacacggtcttgggcccacacaccatttggtgcgccacctctcttttactacgacgatgtccatgagcaacagattactggcgtaaggggatcgtggggggcacacatgggtgcccacatcgtgtattgttataagctgcgctagtgtggaggccgatccagggagaccgacaaatacaagagggggccaatattcgagggaaacaaccactaaacttgtgctcgtccaccacgttgacgacaccgtgcgattcatcgcaacgactgtgctcctcacaggcgggaggataatatgcaaaaaaagcggttggttgtcccgcctggacgtgtggcccaatttggtgatacagaaatgcagcggaggtggc

SEQ ID NO: 500434 - DNA, 113 bp, Homo sapiens
aacctcgggagccgggagtattaaccctccgggagaccttaacctccgagagccttaacctcgggagccttaacctccgggagccttaacttgatgccagcacaccctgtctg

SEQ ID NO: 500435 - DNA, 943 bp, Homo sapiens
acttgtatattaaaaaaactcagtaagcagtaatttcaagaaactggagatagctagggatgatggctcatggctgcgattcccagcactttgggaggctaaggccagaggatcacttgaggccagaagtttgaggccagcttgagcaacatagctgtctctacaacaactacaacaaaggttggctgggcatagtaatgcatgcctatagtcctagctagccgtgaggctgaagcaatcctcccacctcagactctcaagtagctgggaccacaggcatgtgccagcacacctggctaattttgtattttttgtagagatggggtcttgccatgttgcccgggctggtctcgagctccagagttcaagcaatccacccgcctcagcttcccaaagtgctgggattacaggcatgagccactgagccaagacctttcctttccttttctttttcttctcttcttcttcttttttatatctggagaatggagtcctcgctctgttgccgaggctggagtggggagatgtaatctgggctcgctgaaacctcgggctcctggataccaagtgattctcctggcctcagatttccaaagtagctgggattcacagatggcggcccaaagaaggctctccgcaagattccagaagtggtctacttgaatccataagtactagggctcgtgagaaaaccctggaatcccagtgatggcgcgaaaggggttccaacggggtggcctggggaagcaaaaaatcatgtgtccggtggaaaactgggtggaatccattagagaacgggaaaaattttcggaagtccacagaggaagcgggactatagagaatcgtggagcatatctcagaagtgtgtccagaagcaatatgaaaaaggcacaggaatggactacaacgagaaaaacgatggtgtgaaaaaaaaaacttgaaa

SEQ ID NO: 500436 - DNA, 110 bp, Homo sapiens
aagctccattaaagcagggaccttgtctgttttttttgctggatctattccccacgctttatgatggtgcctggcccatagtaggccctcaataaacatttgttgaatta

SEQ ID NO: 500437 - DNA, 166 bp, Homo sapiens
cgttcagaggatccggtctagggtagaaactggtgtctggtcggagtgatctgtgagaaggcgtctgtcacgctgttatctcatgatgctgctgtaacagtgattttagtttttcatttctcaaataggaatactacctttgaattcaataaaattcactgcagga

SEQ ID NO: 500438 - DNA, 101 bp, Homo sapiens
cacaaacgttaccctggctatgaaggaaggtctggccactccccttccaccctcagctccacccagttcgcgagctgtgtggccaggagtgcaagttgggg

SEQ ID NO: 500439 - DNA, 578 bp, Homo sapiens
tgatcccttaattggtctacgatacgtatcagtatatcctaggtagagtgcctattatgggctccaggccgtcgagcccctggatcgccctccggagcacagaccacttctggagagctgctgcccagtttgaatgtgcctggagcgcgagcctcttccctgatatctcgattgtgagcgccttagggaaatccgcaggacccgggtaggagaattacaacgacgccacttgacaactcttaacagagatgcttcataacttagatttctgtgacatattggtgatcggaggggacttggacccaaggcaggagtgcttggagctcaaccacagtgagctccaacaaagagacctggatgccactaaattctactgcaggctactcccatctacggtgtgggctcccattgagccgctattgagcagggtgctacatcaaatccggataccgcaactggcgtccggcttccctttaggccccgcgttaccggattaagtgctcagaactcaatggggcgctaacactagcaatgagttccaacttggaggtcagcatcccgtcatcgaagaaccaatt

SEQ ID NO: 500440 - DNA, 329 bp, Homo sapiens
  misc_feature (135)..(135): n is a, c, g, or t
  misc_feature (208)..(208): n is a, c, g, or t
  misc_feature (230)..(230): n is a, c, g, or t
aagacagagtttcactcttgttgcacaggctggagtgcaatggcgcgatcttggctcaccgcaacctccgcctcccaggttcaagcgattctcctgcctcagcctccccagtagctgggattacaggcaggcgcnaccgtgcctggctaattttgtacttttagtacagacagggtttctccatattggtcaggctggtctcgaactncctacctcaggggatccaccgnctcaacctcccaaagtgctgagattatatgcatgagccaccgtgcccggctggcctcagcttttctatctggaacaagaggtggggcaggctgggcagg

SEQ ID NO: 500441 - DNA, 495 bp, Homo sapiens
agacacaaggctgagattatcaccaataacatccagacctcagataggagagggagacagtcctggggccacagagaagtgaaaaaaccagaagcagataataagagaatgggactttctatttatttattttgagagagaatctcactttctatctgcagtgcccctcccagcaatctgcccaggaccacactttcccaccaacttatggtttctacaacactggaaaaagtaagatcaaggtggacaaccagcttccctaccaccgggggttttctggcaggagatctatccctgcctcaacggacaggaagcatcaggaacacccaaagggagaaatatccctgaggacagccagaaacaaaggaagcagagaaggactaccatccccagtcctggaaactctgctccataaattagacaaaggagatgccatatcagagtggcagttcagcagcaccatgctgtggagattagttccacaggtacccgagg

SEQ ID NO: 500442 - DNA, 796 bp, Homo sapiens
tgtctgcacagctgaggcattttattttaccattaatttagaagtgagagaagggtcagtgtctctcccttctaaattaatggtagaataacatgcctcagctatgtagcaaagggaatgggtctgccagattcttccttctgtcagtaaaagctggcaagcaggaaaaacaaaacaaaaaaagaagaataagggcagggcgcccactcgagagagcagtagacccggcacgcgactcacacacagcaccctcacgccggccacacactaacacgcgcaccacacagcaccagggcgacgcagccaacacacgctctgcctacagcagaccaccgacggcgcgaccaccccacacacagaccgcccaagcacatcaataacaacacacttttccaccaaatctccaacaccaatgcctgacatccaactacaaactctactcaccatcacaactacacctcttcgccacaccctatccacccattcaacacatctacaccactatccctctcaccaaccctctaacaccaaatcactcgccgcaccacactctacttcacatccaagggtcacacgaccacccgcccacccactttgaacactcacttctccatcgacagcaatggtaacaagcaccacccatgtcagtgggcaccacccccaacctcggggcaccacacgaacaaaaccctgtactctgcacatacgcaccaccccacctccacaccccaccccgccacacacaccacacacaccacgccacccacgatcaaccgcacgacaacccgcacccgaa

SEQ ID NO: 500443 - DNA, 276 bp, Homo sapiens
ctctctgggttcacacaattcttatgcttcagcctcctgagtagctaggcctaacgggtgtgccaccgcaccaggctgatttttgtatttttagtagagatggggtttctccgtgttgaccaggctggtctccaactcctggtctcaagcgatccacctgcttcagccttctaaagtgctgggattacaggcatgagccactgcgtctggcatatttcttatatttttaatagagacgagggtcttgctatgttgcccaggcccgtctcaaactcc

SEQ ID NO: 500444 - DNA, 433 bp, Homo sapiens
actctcagcattttccagttcagttggtaacaatagcatccttgtaattattcaggattatagcccaggagtcctcttaaattcctctttttctcccacggtttagattccatctgttgagcaattaggctggctttcaacattatcccaaatccatcccttcacaccatctccattgtggccatactacttcaggccaccttcatcgctgtcctggatgacagtgagggcctccttacttgtttcccttcttatagtctgtacatacataacaatgataggattctgtaaatatgttattcctatgcccaatcctccacggccccccaggtcactgtgaattggctccagcattctcagataacatgaccttccttctgttcctcagacataccaggtacatatgtctggatactttggggaagttatacca

SEQ ID NO: 500445 - DNA, 193 bp, Homo sapiens
tctccttttggggatgctctttgctgtggtgcctcctgcatgatattagagaactcagctggagtgagatgtgatctcaagtcatataagatacatagtaggaactgagaaaggaattatcttgaataagaacccctccacccgtcagttctagatgaggctattggtgtatgtagctagttgagctgtgctc

SEQ ID NO: 500446 - DNA, 660 bp, Homo sapiens
  misc_feature (601)..(601): n is a, c, g, or t
taacttttaaaaacctggatgtttatttcccatcaaccattttcccatgctgcttaagagcctatgcaagaacagcttaaaaccagtcaggggttgcctcctacccatttcaggggcctgagcaggggagagctgcaaaaccagtctctccggtggacaggctagagcgcctccagtctctcacgtagggaattgtgctagaaataggcacaagagggcaccgtgtaccacctctctcgagaacccagtctctgtgcacacctctcgagggcgtggagttaagacagtgtgaacacctccgagagagagacggggaagacaagtctccacatctccacccctgtgagaaaactctctctctcctgtgtggtcctccaacgtgacgcatctctctcagcagacagcagacagaagaccctgtggtctcatctcttatattctcaaaactctctctctctccgagagaactcctctgtgtgtgagaagagtctcacgcagatctcacagcgcatgtgtatcctctccaccatgtgtgtgtgtgtgtctccacgcgggaagaacattgtgtgtgcgcccaccacgcaatgtgtccccacagaanacttctcgcccgaagcgccaagacatctctcaacacacaaattcataacccacacctgt

SEQ ID NO: 500447 - DNA, 137 bp, Homo sapiens
ttagaggttccccgggttaatctttacctggcgcaggcgcggccagtcgctgcagccagcctttgttgagcccccgctgggcatggcagcgcgatcgccgtttttctcgttgacggtatggctgtcgccgaactgcg

SEQ ID NO: 500448 - DNA, 212 bp, Homo sapiens
gtcagataaaggtaatcacggagatactaggataccctcataggtaaggtaccagtagaaatagtactaccaggcaaactgttccttcacgtagcctcgggacttgagagactagcataggccatcatagacatagaaggtagggcacatatctatgtctagccagctaccgggtagctataggcatagtaggaccatacctatactatggc

SEQ ID NO: 500449 - DNA, 229 bp, Homo sapiens
tcggtttcgcctcagagcgagtgttctgagggcacgaggatggatggcggaagggggagagagagagagagaatgatcttgcgagagagagcgcacgcataagagaaatcaatagggcgcatgtgccttggatgtgtcaatctctgaagtcacacaatgtcacttttgctttattctatccatctgaagagagtgactaaatccaggccatacgaagggggatggacac

SEQ ID NO: 500450 - DNA, 134 bp, Homo sapiens
  misc_feature (11)..(11): n is a, c, g, or t
tagaccgcttntgtgttcgagttctaaaaaggatgtattacagagggaaaacagtacatatcggaaaaagacatgctagtaacaacaaagaagcattagctgaaacattgataatgcctggttttatgtaaagg

SEQ ID NO: 500451 - DNA, 582 bp, Homo sapiens
tagaggatccccccttgcatggtgctgacaggcctcaagaaaggagaactagtaattgaaccgtttcatccaggcccatccccagatggatcatgattcgctggaatcgaagcgaccacgtctggaacaggtttctgatcctcatttccagcgtgtcagtgctgcggtttcgcctttagttgcacccgctgccagaagggttaggggcttctgcagatcgtaagaaggatccagcattcggaggcaaacttgatgctccatcctctccaattccggggcccccatgtggagttgatcaaaatgcttcaccttcaaagctctcacaggaagcgttaatacagagtatggatcgtgtagatcgagaaattgcgaagtagaacaacagatccttaaagctgaaatggaaacaacaacagcttgaagaagaggcaggtaaacctcctgagcctgagaagcccgttgtcccctcctcctgtggtgcagaaccaccgtaggtatagtccaagtgatttattgatgagacatcggcaaacaagcagaagacgctcataaaaattttggaaggtctttggccaaaaggtt

SEQ ID NO: 500452 - DNA, 793 bp, Homo sapiens
ggtgagctcagttcacaggtgccatggtgtgctatgtgtataccacagggctgtgatggagcctacgtaccagctgtttgtacgagacggcagtctccagccagtcctaaggcagaagtcctgtcgaggcatgatctggctagtctgggctccgtatatgtgcccgatggggagcactggcttatcctgcgtgctttccatgccactgagtttgtcgcgtagtggaaccctcggtcacacgagaaagctgcacatcgtcaactgttggtgcgaggtgcaccgttcaggtgggcattctctgatactgacgagctggccatggtctttgcttacctcaaggatgtggggatgtcatgctgtacagggactctgtggatggcttgcatcccggtcactcaacagtgatatctccgaggcagtgtgtctgacataggtcctgggagactcaacttggtgtaaagacgtgtgtggtcagcccatatagccctgttggcctgaattatagtgaagtgcccatacttcctatgcagccttgatgagcctgagagacctggccatgtgaggggcccgagctgtgatctgaacattgtgaatcacatgtaggtgaggacagctactgttctgtgttcctaggcaacatccctatcaaacgcacgggtcgtcaggcccaggcagctcacagcatgtaatgtaatgcagtatctcctcggtacgtagctgtggcctgtgtgcgggcaattggccgccccaggtggccctcaggatgctcaggcagggcctgacctgcccatgt

SEQ ID NO: 500453 - DNA, 178 bp, Homo sapiens
cgtaaagagcacgttacaaattacccagaccgatactagaatacttactggcgagttcatcattcatttatttttagagacagggtctctagtccaggctgaagtgcagcggtgtaatcttggtttactgcagcctcaacttcctgagctcaggtgatcctcccacttcaccctccca

SEQ ID NO: 500454 - DNA, 1045 bp, Homo sapiens
  misc_feature (332)..(333): n is a, c, g, or t
  misc_feature (371)..(371): n is a, c, g, or t
  misc_feature (498)..(498): n is a, c, g, or t
  misc_feature (530)..(530): n is a, c, g, or t
  misc_feature (532)..(532): n is a, c, g, or t
  misc_feature (547)..(547): n is a, c, g, or t
  misc_feature (554)..(554): n is a, c, g, or t
  misc_feature (578)..(578): n is a, c, g, or t
  misc_feature (613)..(613): n is a, c, g, or t
  misc_feature (628)..(628): n is a, c, g, or t
  misc_feature (648)..(648): n is a, c, g, or t
cgggcggggcgcaggcaggctgcacctcagagcggcgggagcagcggcgggtccaggaaacccctggggcgtacgggtggccccgggggggccgggggcggggaggcgggcggccggcaccgccccggccgacaaaagtcccttcagttcagccggctgcaggggaagtcccggcgcccggcgaaaccaccctcccgtgcagccgagcccagccgctctccggccgccgtccccggcggccccatgccccgatgccccgcgggggccatggacgaggggcccgtggacctgcgcacccggccaaggccgcggactcccgggcgccggctgcnntccgaagcgcccgctggcgcgccctccccggagcccgncgtccccgcggcgctgcgggccttgtcgtccccctggaccctctgcgcggcggtgcgactgccggcggtccccgggccccccacggctggcccggccggagggctttactaccccggagcttactgnctttgtaccccactcgggcatgggctccccgntnctctggtgaactggntacaccntatacccatgatgtgcccccatgnaacagcccctttctgctgaacatcgccatggcacncgtgcagatgagganggagacacgcctctcatatngctgtggtgcagggtaccatgcaggtgtgcaacggtggtaaacttcttccagcagtggggccaggagctccacattctaaaacaactacgggagacaccgttccacctggttgggataacgcacttaccgttaggagccaggcaatgggatacggtggtgccatgcccatgtgggctgagcgcgatggccagaagggcgccactggggtggaacacggcccgcttgcagggacccgtgggaagacacccgcgctggccaggggccagaataataggaccccgcggaggagacacggagaaacgcgagtagaaggggagaacaagcgacagcgcatacaagacggagacaggagaagaaagaacgcgcacacagcaagcagcacgcagatgaagagcg

SEQ ID NO: 500455 - DNA, 194 bp, Homo sapiens
ttagaatatcatgataaggtaacacttcacgcaacaggtatctctgtggccgttgcttcactattcctttggctgttgctggtttgttcttgacaatgatcgtgcgtaccatttctgttggtttgacgcacggtgccgatgcgctgctaaagttggtactatcgtgcaatttaacgttaccacttgattggtat

SEQ ID NO: 500456 - DNA, 96 bp, Homo sapiens
tggcgtccggggggtggtaaaagaaaagaaagcagaaggtttatcagggttttggcttcaggggcttaggacaaattaaaagtcacctctggtgcc

SEQ ID NO: 500457 - DNA, 286 bp, Homo sapiens
ggtgactctacaggatcttattctgcaccacagccgtggagcatcgtgactgtgcatatactggtggtcagattccctgatctctggatctggcgaattcaagtcgaactgtttacgcaaggttctctgggatcttctggaggttgccccctaagatttcccaaattgaaaaggcacccggtcaaaaccttttcctctttctggggcaaccctctcagggaataccaacggcttccatctggcagaaaaccagggaggctgctttttcttttaccccttgagtcgg

SEQ ID NO: 500458 - DNA, 962 bp, Homo sapiens
  misc_feature (109)..(109): n is a, c, g, or t
  misc_feature (132)..(132): n is a, c, g, or t
tataaatttattcatgtacaatttggttacttgaatgttaaagaaaacatgttttgactatgggagtcaactcaacatggcagaaccattttgagatgatgagtacaancaggtaggtgaaacagcttaagnaattccaaaaaaaaaaaaaaaaaaaaaaaaaagaaaacaaggtggggttggggcccttgggcttagaggggacataccccggggggattagaaaggggtgttcacaccctttgcgggcaaaaacgcgggcttgggagagcgtgtgtgggggagcgatgtataaaagaggagggtgggccccttttattcttgtgtggggaacaacaccttggggggtgtaaaaacctctccaaaagagagcgccgattgagggtcgtgtgtgagacaccagaagttgggcgaggacggctgggggggggagcccaagcgcccctttctctcccccaattttcctcattgtgtgtagaatattctctccatataataaaacccggggtatattaaaagaatatattatgtgcgtagccgcatggtgtagccacaggagctttcattcaacaggggcgggggggagcacggggggggctgttacgtcttcgagcaaaacaacttttgcgacaaagagcgacagaggtttttggagagaaagatttttggagggggacggggaacacgctgtggcgcgcagggtttacccacggtggttattccctaaccaggctctccgacaatattttgcaaccgcgtatttataactagaacgggtagaattttccagcaggggcgcccaaagtattttttaccacagacacattggcttgtgacaacatttggggaacccgttctaaattttttccccaggcggttaaccttataggtagagaaatatactttgagcggttcagggcaccacacagttgacaataacgtgccctggttatccccttcat

SEQ ID NO: 500459 - DNA, 468 bp, Homo sapiens
  misc_feature (2)..(2): n is a, c, g, or t
  misc_feature (112)..(112): n is a, c, g, or t
gntcgacatcaaaatactataaatacatatttctatctataggaaaaaagactagaagagccataaaatatcaacagtcattgcttctgagtagtgggacttcaaatgaatnttaatctattttggacttttctgtatgatccaatttttctacatagtcatacaacagaattgatattaaaaacagttttggttgggcatggtggctcatgcctgtaatcccagcactttgggacaggtggattgcttgagcttcagagttcgagaccggcctgggcaacatggcgaaaccccatctctacaaaaaatacaaaaattagctgggcatggtggtgtatgcctgtggtcccagctacttgagagactgaagtagaaaggatcgcttgaggctgggaggtggaggttgcagtgagccaaggtcatgccaccgtgctccagcctgggtgacacgagtgaaacccctttaaa

SEQ ID NO: 500460 - DNA, 165 bp, Homo sapiens
gatggtggttgtaaggtgaaaacgggtaactcaaaggtaaaaagccaagatggggaaggccattgaaggccaaacccgttacgtgagaggaattgggacggtatttcccatctgtagatgtattagacgaaaggagatgtaacagaggaagtagtcagagtgcta

SEQ ID NO: 500461 - DNA, 591 bp, Homo sapiens
tggctgaaggggatactcacctggctgaaggcctgactgtgattccccctacccccacaaggcgatttttgaccccctgagggctgctctagagtgactcaggcccctgaagctgtcccagggaggtccccgctgcatcccaccacccaagctgtgcctcatggatgtctgatgtttatgcagccctgcctgaggcggcgctgcatgctgagagacctggggtgccaggactgcttactcactcttcctgtgaccttgtgactgtgatgttgtactgagcttggatgctgatgtctgcttggattttgtcctgctgaccttggtggttgtgaactgagttgccttgcagttccctgaccagctatttgggagatgctgtggctgtggctgcactgacttggatggatgactgacagtggtcaaagatgttcattctgtggtgacacagcctacggcagctgctgcgtggatgtgctgggtgctgagcaagctggagctcatggctctcatacatttttggccctgccgtgcttaaggcccctccatgccctgcccacttgcccggtttgccttttcgttgcttttcggttc

SEQ ID NO: 500462 - DNA, 154 bp, Homo sapiens
tagctgacataatcatccagtccagtgtgcagtcaggcgtaatgaacatctgcatgtagccactatagacaattatgaataaataatagtgataggaacactgtgtacatttttagtgtgcacatttacatttctctgggctatatttatacac

SEQ ID NO: 500463 - DNA, 226 bp, Homo sapiens
gattacaggatctccagaggagtggggcggcttgcttcccgtgagctcttggtctactggggagagctgcaacccagtgatgggtgggtgcagaggtcccatgggaggtggtctgcagccccatcccaagcatggccctgggggccggatggttggccatggtaggactgggcccaaaagctgggtctcttctcgctgttcccctcctctctgctcctggggtgtc

SEQ ID NO: 500464 - DNA, 619 bp, Homo sapiens
  misc_feature (11)..(11): n is a, c, g, or t
  misc_feature (166)..(166): n is a, c, g, or t
  misc_feature (177)..(178): n is a, c, g, or t
  misc_feature (192)..(192): n is a, c, g, or t
  misc_feature (205)..(205): n is a, c, g, or t
  misc_feature (212)..(212): n is a, c, g, or t
  misc_feature (233)..(233): n is a, c, g, or t
  misc_feature (240)..(240): n is a, c, g, or t
  misc_feature (294)..(294): n is a, c, g, or t
  misc_feature (296)..(296): n is a, c, g, or t
  misc_feature (302)..(303): n is a, c, g, or t
  misc_feature (309)..(309): n is a, c, g, or t
  misc_feature (311)..(311): n is a, c, g, or t
  misc_feature (333)..(333): n is a, c, g, or t
  misc_feature (351)..(351): n is a, c, g, or t
  misc_feature (358)..(358): n is a, c, g, or t
  misc_feature (366)..(366): n is a, c, g, or t
  misc_feature (368)..(368): n is a, c, g, or t
  misc_feature (370)..(370): n is a, c, g, or t
  misc_feature (372)..(372): n is a, c, g, or t
  misc_feature (374)..(374): n is a, c, g, or t
  misc_feature (377)..(377): n is a, c, g, or t
  misc_feature (380)..(380): n is a, c, g, or t
  misc_feature (384)..(384): n is a, c, g, or t
  misc_feature (387)..(387): n is a, c, g, or t
  misc_feature (392)..(392): n is a, c, g, or t
  misc_feature (406)..(406): n is a, c, g, or t
  misc_feature (415)..(415): n is a, c, g, or t
  misc_feature (418)..(419): n is a, c, g, or t
  misc_feature (421)..(421): n is a, c, g, or t
  misc_feature (426)..(426): n is a, c, g, or t
  misc_feature (430)..(430): n is a, c, g, or t
  misc_feature (432)..(432): n is a, c, g, or t
  misc_feature (437)..(439): n is a, c, g, or t
  misc_feature (444)..(445): n is a, c, g, or t
  misc_feature (451)..(451): n is a, c, g, or t
  misc_feature (500)..(501): n is a, c, g, or t
  misc_feature (504)..(505): n is a, c, g, or t
  misc_feature (508)..(508): n is a, c, g, or t
  misc_feature (513)..(513): n is a, c, g, or t
  misc_feature (519)..(520): n is a, c, g, or t
  misc_feature (530)..(531): n is a, c, g, or t
  misc_feature (618)..(618): n is a, c, g, or t
tattattatcngttttctacaacacgtagagttgtcaaatagcttaaagacaaggacaagtatagacccttctagaatcagataactcctagaagggtcttctagacaatctgtagtgaagttaagtaataccttcaagatttcacaactgtaaactcgatctggnattcaaaccanntctatatgtttctntaaatccaggctnttttttntgtatcaagaagcttttggantggaagngtgtttttcagcaggaattgtggtattggccaaccatcaccccatttaattaanantccctnncctcangncctacagcaatgtactgaggancttcagaccctcaattanccatttnccatcttnananantnttntcnatgnttnaagtnttcccttggaaatnttgaagggnttnnancttantctnanccatnnnaaatnnccaaanagtctcaagattcccactgtatcctgtgccttggagcaggcaaggagannatnncanccctngccccnntcacttcttnnctttggcagttccgggacaggacgctggtacaccggattatcccttcatcgtgtagccgcttccagacttctctctccagcttgaant

SEQ ID NO: 500465 - DNA, 175 bp, Homo sapiens
ctagcggatcccttccacggtagatttatacctaaacagacagatgacttcaaaaaagacttttgtgcctctctgtgtatgcttatatctgaattgacatttttttcctttaaagccaggcagtggttcatgccagtaatcccagcactttgggacgccaaggtgggcaaatcta

SEQ ID NO: 500466 - DNA, 279 bp, Homo sapiens
  misc_feature (171)..(171): n is a, c, g, or t
taccgtctgttagaagaggcctccaagaaaaaagataaaggacattcatcttcaaagaaatctgaagattctctacttagaaactctgatgaggaagaaagtgcttcagaatctgaacattggaagggtccactaccagagtcagatgaaaaatcacaggaagaagaattngatgagtattttcaggatttgtttctatgagacgagagagagaagccttcgctccttaatgtgaaacttcatgaagttctaaacttcatgcaatttgaaattccatat

SEQ ID NO: 500467 - DNA, 241 bp, Homo sapiens
  misc_feature (133)..(133): n is a, c, g, or t
accttcttctctaccagttctctgccttccacgccgaaagcttaggactctgtagagaagttgtgcttcagaatctgaacattggaagggtccactaccagagtcagatgaaaaatcacaggaagaagaattngatgagtattttcaggatttgtttctatgagacgagagagagaagccttcgctccttaatgtgaaacttcatgaagttctaaacttcatgcaatttgaaattccatat

SEQ ID NO: 500468 - DNA, 120 bp, Homo sapiens
ccaagatatgaggaattgagctaaaggacagtattccagttactgaactttcagacaagtggacctttatgaaagtcatgatctaacgttctggacaggtttctgtctatgtggtgaaca

SEQ ID NO: 500469 - DNA, 224 bp, Homo sapiens
aaacagcatgtgttttatctcacctggtcccctagaggtgatcgggcaagaccgcgcagtcgtcctggtattcacaccgtccgtccaaatcagtcgactgaagaacaccatcaaatctttgaaacaacagaagaagagcaagtggaacatcagctggaagaagtaacgtgatttcgtttcctcgcgacatgactgctgagtttggggggcactcagacatagag

SEQ ID NO: 500470 - DNA, 160 bp, Homo sapiens
catagccatacttgagctgtattggtgggcagcacctccgcagaatgcaatggtgtaagactatggatgttttttaaactttggcacattgatctatctaaacctggcggagagaattctccccacactgtctcatggagagactccaaacttgcagatg

SEQ ID NO: 500471 - DNA, 1613 bp, Homo sapiens
taaaaacagtctcactccggtcacccaggctggaggccagtgttcacgaatcacagctttacgtggtaaccctcaaacctcctataaacctcaagcagatccctccgggccctcagccttcccaagtatagctaggacttacaagcatgtgtgtgccacccacactggttttcattttatataaatttttgtgtggtagcaagtgggggctctcggcatagtgttgtgcccaggcgtggctccgtgaacatcctgtggccctcaaggagaggcccaataaatgtgaagtgaacaacgagcttaacagaatattaacatatacagtgcacacttataaaccgctggtgtgtgtgcaccctttgtgaagacattaatgtatacacccccatgtggatctcaaaacaatgagaaagtgcctattaaactctttatagcccaaaaacagtggacactaatattaacccccgtgtgtgtcctcaaaaagtgtgggctaacacacacacatattttgagagatatctcaacatgtgtgtgtgagatgcccacatgtggaaccgttttgggtatcttaaagggggagagaagatatccaagtgcgcaagagtgaggagatatgtgtgccgcacagtgtgccaccacaacttcccgataatataacatctgtgggaggagcgtagaggcgcaggccctcacaagagaggaatgtggggcgccccccaggagcaaggcactcccaacaagtgagtgcgcccagaaatatgctctagaacaacagcatgtgaacgacaatcgtactgacaacaaggaggcgtgcacaaatccggtgggacaaaaaaagccgcacaaacaagaagcattccgcggaggatatataaaataacggcaaaaataaaccatgttgttatatacaccaccaaaaacaggggagacaaaaaacaccccgtctggcggagcaaacagcacaaacacgaagaagagccacaattcccggaagaaacacacctgggttggtaataggtggcccccacaacgaatcacaacgagtagtaatatactggcagtggagacgaggaccccccggtatgtgggtggcacaacggcacacacactatcggaacaccacaagtgaggcaacacacacactttatcaattataggagggcgcagagaaaatcggcaccccagtaggtggcagcccattgcggagggtcacacaagcaattacatacaagaagacaacacacaaagggaaggacactctaccaataggggaagaactgcgaggagttacaacaagaaacaccagcgtagtagacaccaaacacatcctgtgtgcgctctacacacagcctccttagaaaaagcggaccacaaggaggaagggccgggcaccacaacgtaacttgctagaagagcgtcctgcaacacaacaaggcgccaacacagacgaggaagctaaccaccgaccacaagagccggagcggaaagataaaaagcaccaacaacagataagaaattgcgagagacagacatacaaaagtaacacaagccaccgacaaaaatgagtaaagaacagagaactcacgtccgcggccaacaacgacgtgcatgca

SEQ ID NO: 500472 - DNA, 1107 bp, Homo sapiens
  misc_feature (157)..(157): n is a, c, g, or t
  misc_feature (196)..(196): n is a, c, g, or t
  misc_feature (201)..(201): n is a, c, g, or t
  misc_feature (204)..(204): n is a, c, g, or t
  misc_feature (247)..(247): n is a, c, g, or t
  misc_feature (341)..(341): n is a, c, g, or t
  misc_feature (348)..(348): n is a, c, g, or t
  misc_feature (390)..(390): n is a, c, g, or t
  misc_feature (415)..(415): n is a, c, g, or t
ggtattcgggccatttcgcggatgaagtgcctctgatactgctctgccctagcgtagactcgtgaccttgacagaaggtcgtaggtacacgtgcgcgttgcctacgctttcattgctagcgacatagcatatcgctctattctacaagaagacgaanattagagatatgttgtgtcccacgcgcccctcattaacnaggcnacngcccaagcgacaccggcatgccttcaatatgggcttaagcatnaactcgtccctcatacgcacggtatcgcgatgagcgcaagtgcacctacctctgtcagagtagtggatatctccaaacacggaaccagacctgntgaaacntccgactgaaggtgcagcagcatcgacgtgcattcatgatgntccttgacaatgaatcctctggacntcaatcatctagatactccaccaaacacttccgtgtatgcaaccacgcatttggcaagactcggaaatatgccctgagaggttgttcgcgagaaaaaggatagcacagcagccataccatagcaggttccctacttcggataactataggacaaagctcacttctcaacctgtgcattggttgctacatggccagagggtaaaaagtagaaggctagttgtaacctggcctcccgatcataggcatacgtgtacgtcatgcggctcagtactcaagtatgaacggagtgtaggcgcctgaattaagaccttgcgcacgaactggtgcattggcccaaacttgcccattgggttctgggaaatcgagtgctagcgcgttacgtaaacccatccatgggggtgaaagaagacccagtgccctgggataaaggcttgatgaaccaacttccatctctgtggcgaaatggctactgtggcccatggaaatgatttttcccttgtgacacttggttgtgggcatgaagtctcccattagataggcttcaggcccggagtttatgtcccagccgaaggaacccgaagttccagaacactcccagtgtacacataatggcggaaggagagagaggggcacatccgctaaaggaagtgtactactacaacatacgcatggcaagtgcacacgcggcccgg

SEQ ID NO: 500473 - DNA, 281 bp, Homo sapiens
cgtgggactctacagaggtaaatcagggtatacactgaatagagaaccatatggtgcaaatcctacaggacgatcttttcgctgttcgaacagaataaagagtatcaggtacccttgtgacgataatgtacagtagttcccaaatcactgtcgactagcggtgagtgtaaaaaccttcttggtctctggctcacatatggtgggatgagcaaggagtatatgcacctcttcattccatgacttacctgagggttgcattgattagggcatcatgtggttcc

SEQ ID NO: 500474 - DNA, 488 bp, Homo sapiens
gtcggccgagtttcctgcccaactaaaaaaacattgagtacttttagcatatttcgaccaagcaacaagcttagggggggatttttattacaagcatgaggaacgccgtatggcctttcgcccatatataccctgggtatgtatacttgcaagtgttaaaggttgccatcggttgaaaccataagtgtctctggccatcaaagtgatcttgatcacagcagtgcttttgcgaaacaattatttattggctgaaagagctcttctgaactgcgtccttctaatttttgctcagaatagaatggaacaagtttaaattccacggaaatatgaaggcacttcctttttttttaagaaggaagttgctagacgactccttcatcacactcacttaaagcactgagaagagtatctgcaaataaaaggtgcccaaccttttaaaaaaagaaggaacataccctttgctgctccagagtaggcctatcttttta

SEQ ID NO: 500475 - DNA, 101 bp, Homo sapiens
tgagtcggtaccgttgtgccttcgcaaagggaatgtatatattacacatgaaaaatgaaaatggtaacagagtttcagaaagcgagcagcggttacagggc

SEQ ID NO: 500476 - DNA, 151 bp, Homo sapiens
caatgggaggtggagggacaggctcagcctcctcattgtttaaatgaggcctaaatgtgtgaagtgcgatttttgcttttgtgtaccccccccaccccattaccacaactgcctttgtgtgtttgtgtcaataaaaaaccaaaccctggga

SEQ ID NO: 500477 - DNA, 179 bp, Homo sapiens
gtatctagaggatcccttcgactagccgacagtacaaatgaagtcgacctgagggattttaaaaacaacaaacaaacaaacaaaaaacacaacacccaagcctccttctccagtccagaaggagagcgaaaggttcactgtccagtccactaagacagcacctgtcgggctagtcgggg

SEQ ID NO: 500478 - DNA, 252 bp, Homo sapiens
ccggacactgtcccctcgatcgttttagcgcgaattctgtcgagcgggacataactgcacactgtcaaagtgctccttatcatgtttacggcttcgatcccggtcccgtgtccgtactcgtagtcatagtacctgccattttgcaaaaatgtcccgtccatcattccgagctcgatttcatccgtaggacttgtgtgtccagtacgtgttccgccatgggtatcctctctagtctacctggcgtcgtgctca

SEQ ID NO: 500479 - DNA, 333 bp, Homo sapiens
atctgaggatccccctccagtaatgtgtgcccaccagaagtatgtccgacaagcctggcagaaggcacgacatcaagtacaaccatggagcagccacacggatgggtccaggaaggattgaaagccagagaaccgcgaaagccaagatgacagatgttgatcgtttaacagttatgaacgcgaagtaaattgaggaacagaataatcctgaatgaagtctacaagcttcaactcgcagctctcctgagagcttctcccaagtatcgcgggagccggtcgtggcggccgctacgagcccccgggcttgggctgccctgggcacacattatggag

SEQ ID NO: 500480 - DNA, 1349 bp, Homo sapiens
ggcacgcaagctgctattcctggggctctgatcacggctgtctatttatagcgctgggcgggagccgcctcacatacgacacgcacgagaggctgccctgctgcaatgtcacctgtcgtcactgcctctgcacgctgcaggcacctgcccactaccgcagcaggactgcaggggccttgcgccccaccagcgcacccccacggcccttgcgccgccactgctctcgcacccctcggcacaccacgtcgccccggccacactggcgccagccacccacggagccccccgtgcgcgcgcctcgccgctcccctgcaaccctcggcgccgccgacctgcacactccccctgctgccgcaccccgcccccgccgctgcccccgcacgcctgagcccctctcgcgctcgcacctacccctctcacgcccctgcgactggccccaccccgcggctgcgctccacgccccgccgcctcccaacgccccaccctcactgccccatggccccgcacactgcggccgcatctctgccctatccgccgcaccctcctgcagcctgcgatgcgcctgcgcacctgctgcaaccttcccaccacgccaactcccccaccgccctccacccctggcccgcgacactcctcccctgcgcgcgacccacacctcttccacagcggccctggccctttctccgcccccatcgccactcggccccaccacacatggcgctcacttgcccgctgcaactcgcgccctcgtcccacgtcccccctctcgctctcatcccctgcccctgcttacccctcccagccccccctgggccgcggcgcacggctgcttctccccccccccggcggcccccccggcccccgcggccctccttcgctcccgccccacgagcgcaccccttctctacacgcccttcgaccgcaacgccacaccgcactcccgtccctcccccgcgacccggcgggccgtccccctcccctatcccccctagccgccactccaccccgcccttggccccggacgccagttcggggccccccttgacgcccacgacgcgaagcccacgccgagagccccaccaggggcccacaccggacgcacagcacgcgaacgccaccaacctaaccttacgagaccacgacccggaacacggaccaccgacgcccggcacaccccctaccacgccgaacgtaccagcaccgaacccgacgcaccttaccccccgacgaccgcactgtgggaccgttcaacactctacaaccggacgaggacacggactacgagcctccacacactacgaacgcacacggccacgcactaacaccccggcgcccgacttaacagactg

SEQ ID NO: 500481 - DNA, 565 bp, Homo sapiens
tcccggggccgtctgcgggtaatgaccgcctggagccaagaccgagtgaaagaatgcataacatccggggagtgcgcctgccccccggcactacttcggggcatccgccggcaccggcgacctgtctgaccatcatgacatcatctccatgaagctgttccagctgatggtggagcacacgcctgacgaggagagcatcgactggtccaagatcgagcccagcgtcaacttcctcaagtcgcccaaagctcccccgtttcttctcccccagacaacgtggacgaccccacggggaccttccgcagcgggcccctgacggggtggcgggtgttcctgctgttgctgtgcgctctcctgggcatcgttgtccgcgccctcgtgggggccctcgtgttccaaaagcggcaggagcggcccaaggggttttaatgagtggagcctccgccggggcctgcccctgggcccaggagccggggtgaactttttttgtgttccgggattatgggagaggggcaccccgccgtgatttcttaaatggtttttattgtttattaaagtattttca

SEQ ID NO: 500482 - DNA, 682 bp, Homo sapiens
  misc_feature (44)..(44): n is a, c, g, or t
  misc_feature (64)..(64): n is a, c, g, or t
  misc_feature (66)..(66): n is a, c, g, or t
  misc_feature (69)..(69): n is a, c, g, or t
  misc_feature (73)..(73): n is a, c, g, or t
  misc_feature (76)..(76): n is a, c, g, or t
  misc_feature (78)..(78): n is a, c, g, or t
  misc_feature (83)..(83): n is a, c, g, or t
  misc_feature (89)..(89): n is a, c, g, or t
  misc_feature (115)..(116): n is a, c, g, or t
  misc_feature (126)..(127): n is a, c, g, or t
  misc_feature (132)..(132): n is a, c, g, or t
  misc_feature (143)..(143): n is a, c, g, or t
  misc_feature (149)..(150): n is a, c, g, or t
  misc_feature (154)..(154): n is a, c, g, or t
  misc_feature (170)..(170): n is a, c, g, or t
  misc_feature (188)..(188): n is a, c, g, or t
  misc_feature (350)..(350): n is a, c, g, or t
  misc_feature (423)..(423): n is a, c, g, or t
  misc_feature (470)..(470): n is a, c, g, or t
  misc_feature (506)..(506): n is a, c, g, or t
  misc_feature (513)..(513): n is a, c, g, or t
  misc_feature (538)..(538): n is a, c, g, or t
  misc_feature (605)..(605): n is a, c, g, or t
  misc_feature (675)..(675): n is a, c, g, or t
gccccaaagccaaaaaagccaaaaattatttagagaccaaagtnaattgatcaactcatgaatntngtnatangcnanaaatnaatatnaactattaaatacaatatagaaaagnncacagaatcnntgggncagaggggggngggggnngttncagtttgctgcattcnagtttgttatcttagggnaacaaactgaggagtcttgtggtccctctagacccctagatcacttcccagtgcatatgagtcttcccccataaggcaccttgtcgcaagcattaagatcggctccatgttcggccagacactccacgatgtcgtggtagcccctggcagaggctgtcaggnggggcgtctctccttctcggttcttgatgttcaagttaaagccggcttcacaaagggctttggccacagagtnatagccgtgccaagcagcacagtgcaggggggcttcttcttccttgncctggatattgggatttgagccgaagctgcacagtnactgagncacgtcagcatggccatagcgagcngccacgtggagggccatctctccagacttgtctttcacatccaaagggcatttgttctcactgaganattttcaaggtatcgacgtggccatgccgagcagcccagtagacggcattggacccgcccttatcctggncatcgat

SEQ ID NO: 500483 - DNA, 175 bp, Homo sapiens
tctttcgccaggctgtattgtgctgttggtttggagcagctgctgtgttgcacctgctgttgttgctgcttgcgttgccggagttaagggcaacgtggcagtgtgccgtgggctgggctgaattccctgctgagccaatgttgaaaccggagggttgggccgtgcttccaccagt

SEQ ID NO: 500484 - DNA, 453 bp, Homo sapiens
  misc_feature (6)..(6): n is a, c, g, or t
  misc_feature (216)..(216): n is a, c, g, or t
  misc_feature (262)..(262): n is a, c, g, or t
  misc_feature (269)..(270): n is a, c, g, or t
  misc_feature (321)..(321): n is a, c, g, or t
  misc_feature (326)..(326): n is a, c, g, or t
  misc_feature (328)..(328): n is a, c, g, or t
  misc_feature (342)..(342): n is a, c, g, or t
  misc_feature (427)..(427): n is a, c, g, or t
  misc_feature (443)..(443): n is a, c, g, or t
ccaaancccagggaagtaagatgtaaattgaagaagcctcacacgtaaaagaaatgtattaaggtaggtaggagctgcagttcaagaggaagacacttgctgagtgaaggaaatgaatctttgactgaagccgtgccagaagccaggggaggcccatcccccaccagccagcggtttcctggagagggtccctcagccccacccaccatcccaagngctttctctccaaggcctatccaggaagccagttagtaaacttccnaatttcnngagtcaaaaaacatgagcgcaactcttggaagggacaattaagacagaccnacaancnagaaaggtctaagnaatggttaagttttcaggaatcagcaactttttgaccctcaatctttagagaggctaaaattcttcgcagaaagaagaagaaagnaaggaacaaaaatctnaaaacttgaa

SEQ ID NO: 500485 - DNA, 162 bp, Homo sapiens
  misc_feature (2)..(2): n is a, c, g, or t
  misc_feature (122)..(122): n is a, c, g, or t
  misc_feature (124)..(124): n is a, c, g, or t
anttcggcacaggtggggattgaaaagcacctccacccctaccctagtgatgtcccctgaggacccgggtgatagtacagtcaatattgtcagtactttgctctgattgaagggtgtagaancnagttaccaaaatttctatttcaaaggaaaccaaacctt

SEQ ID NO: 500486 - DNA, 207 bp, Homo sapiens
catgaccattgcttacgatagaagagatcaaacttgtgagtaagttactgtgtgagttcgcttgctttttttgatttttttatgagacacaatcttactctgtcacccaggctggagcgcggtggcaccatctgggcccaccgtagcctctgcctcctgggttaaagtaattctcctgcctcagcctcccaagtatctgggattaca

SEQ ID NO: 500487 - DNA, 1057 bp, Homo sapiens
tcaaacacacttttattttcttttttccctttcccttcacattacagaacttcctccacataccacatttctggcagctataaagctcactgtgagtgtgtggccgggtcaaccattttactccctaaaacctcgtgtgtgacatctcaaaatatgacagtgtgttattatccataaaaattatttcactaaagcccagcggctattattaagcctttagaaccctgtgtgcaattaacaccactataaaagagaaggcacaagaacccccatccctacagtgttgtggaatcgagggtgttctcaacgcggctcccatactcgtggcgaacgtgtgtacacgtggtgtctacaaggggccagacagaagagcaaaagaggcagatatacttctcagagaggacacgtgaaccccatattgactcgtgggacagcccacgtatatagtgtatgtgtgtaaaccccaaaagtgtctctagtgtttacccaaacaaccacactttatctctcacagagggggttggttcctctcaatatataatctctatagaagatgtgtgtagagagtcgtcccaagactgtgttttcttcaccgaacaaaaaagtggacaaagagaaacagtgaacacaacacacccaacaagaacaattttatcaccataccgtggggtgggggaacggatatatatccccataaccttccaatttacctatatgtgtgacacgcggtgttgctgtggtgggaaaatttttggagagaaacattttacacctattgcggtgttcacccacaaaaaaaaaacaatacgttgtggtacgttccaacggagagataatctcacaacttcatcccgagtggagaaaccatttttattactactacagaggcgatttgtgggaggccagcttgagaaattaccccaatgattagaacaactttcttttgggcagcaaaatctttccacaaaacgcgtgtgtagcatcaaccaatcgttctttatattacacccccctatgagtgttggttcttgtgtggttatagaagcggaagagagca

SEQ ID NO: 500488 - DNA, 155 bp, Homo sapiens
agaaacccataatatataagagaataaaaacatagatatactatttgtatatctgacttcttgttagctctatggctatgtgtcatgatcagtggtcccatgaggacacagtggcactagtgggcaaagtttctcctctgcctgcgaacctttta

SEQ ID NO: 500489 - DNA, 969 bp, Homo sapiens
gcctagcagcccacctgctgccgccggctatgttaccatcacaccccgggaggagccgcagctgccgcagccggtcccagtcaccatcaccgcaaccatgagcagctgaggccgagacccagcatgctgatgtgtccacaccacggtgtgacgcacgaccctcatccgtagctatcatcatatccgctagtgcctcggcgacagacggcatctgagagataaactatgtatacactgctgcgctcagctatctctccactaactctcgactctgcacgaccggagtcaatcggactgtcctttcacggctgagacgtcaccgcaacgatgattacgtggcacactacaagaacactgcacatccccgtcggttcacagacactgctcatagacttactaacgcgaccgattgacgacctagcagacgcctactcaaccagtactcctggtccacacgcgccgcacacgacttccggcatatcaacgccagcaacagtggctacagaccttcacaatcaacaccaaccaccaacaccggcaaccattctaacatttatcacgagatagctcagaaactcaagcgtgagcacgcgactctgaccgccaacttccacagactctctcgacacacataccggtaccaacaacagtggagtagaacacttagtgccgaagcctccaagagctttactaacgaccgtgcgccgcgcagccagcgcattagtcaagacttctttccgcacattgacaccacaaggcgcatccacatacacgaccctccgtcaacgagacttagagcccgacagccgcgcttcgtccaaacgcacattcaatgcagaagaagacctactctagacgaggctctaacacagctactcaactcgcaaccccgcttcccgagacaatatacgttacaacgacttactgataccggagatcgactagcatcaacaatctacaagtctacct

SEQ ID NO: 500490 - DNA, 912 bp, Homo sapiens
actctcgttctcgtgttttctgttgttttgttttgtttctttgttggtgaaagagacagaggggaggacgtagcgattagtgggccaggggagggaggaagggggagggagcagagggggaggcagtttacgacggtgccatgcccccctctctggggcccccctgtttcgtcccgtgtgtatggcccacgcgagagtgtccttgaaaggcttaatatcgcggtgtcataatggtgcttccccccggtgacgcagtcgtgtagcacatgttggccagactggcctcttttgagacctgtctccgcacccctccggggtattatgttggacgctcgccccctcgcgcctagtatccgtcggtgttcaacgcgcactcgggggggttcacccaaggggccgcgccatgcagtgttgggtacaggtttgctcctctttgccccttggggtctatttccgggacttcattcttcttcttgtattccgccagataaatctgtacgccccgatacaatggaaaagaccatttcaaacggttcctttgtcacgtacaacaaagccgttggcgcccccccacgcaagtgtatctagacaccatggtacaaagtagtagtttccccaatttttcccacaaaggatagtccacacgctagctggagcccgcttatcccccgataggggcttgggggatacgcagtggtggcgctccaccgtggctttgtgcccacgccgcgaatgaccccctcgctcttcaataataatgacaggaaggtatacaccactgtgtcaattttcattgtgaatatgcggagaatgagtctcccctagggggcgagacacagcgctaatcacatctttcatgtatctgaaaataagagggacccacacctgtctcatcaatagatacaagaaaat

SEQ ID NO: 500491 - DNA, 340 bp, Homo sapiens
  misc_feature (224)..(224): n is a, c, g, or t
  misc_feature (244)..(244): n is a, c, g, or t
  misc_feature (296)..(296): n is a, c, g, or t
  misc_feature (331)..(331): n is a, c, g, or t
  misc_feature (338)..(338): n is a, c, g, or t
ctcagcctcctgagaacctgggattgcagcctcccgagaacctgggattgcaggcacctgctgccatgcccagcgaagattttgtatttttagtggagacggggtttcaccatgttggccaggcgggtctcaaactcctgacctcgtgatccacccgccttggccccccaaagtgctgggattacaggggtgagacaccacgctcggcctttatatatattttnagagagggggtctcattttnttgcccaggctggtcttgaactcctgggctcaagcaatcttcccgcctcagnctctcaaagtgctggggattacaggcaatgagccnaccgtgncc

SEQ ID NO: 500492 - DNA, 160 bp, Homo sapiens
gaagaaaggcgaagaaattgaacctcgcgcaatagatatagaacccaagggagagactgaaaatttataacccagcataatatagcaagggctaacccccataccctctgcataatgaattaaccagagataactgtgcaaggagagccaaagctaatga

SEQ ID NO: 500493 - DNA, 241 bp, Homo sapiens
caaaaactcctatgggcaagtagctaacgcagtagtagagtcttcaataaatccaagaatatacacctactgacaatttgaatacagatagcccccgactatccctaattaatcattacggcggtcctaagaaaccaacaaaatagaaccgcacgtcctaatatcaattattccatgctaatgtaataccgagcaaaggcctgctttgaacactctaatattttacaaagtaaaagtcctg

SEQ ID NO: 500494 - DNA, 262 bp, Homo sapiens
gtgtcatgcaaataactccagcagttatgacattaaaacatcaatatcaggtcggacgtggtggctcatgcctgtaatcccagcacttggggaggccaaggtgggcagatcacttgaggtcaggagttcgagaccagccaggccaacatgatgaaaccccatcttgactaaaaatacaaaaattagccgggaatggtggtgtgcacctgtagtcccagctacttgggaggctgagtcaagagaactgcttgaacccgagggg

SEQ ID NO: 500495 - DNA, 196 bp, Homo sapiens
ccgagatggcgccactgcactccagcctgggtgacagagcgaggttctgtctcaaaaaaaaaaaaaaaaaaagaaagaacccaaggtgttgacggtagatggggagtatttaagggtttcccctctctttatctgaattggtcaacaattttcttaaacaaacacgttattcctggtgtcactcagacacaggtag

SEQ ID NO: 500496 - DNA, 318 bp, Homo sapiens
atgcaataacctcccccccgtgggaggcggtgcggttacacacgatgccgcgacgcgtcgaggcgtctcgtagtcaatttttggagcacaaccagcaaccatcagagcgccaccaacaattgccgtgaaagaatttagaggcgcaatcgccttcatatctgtgccttctggctagcctttgtagaatatatattaaagtatatggaaggttgagcgctcctgcaatcgcatgtccctcatggacgtgcgcaaagatcgttggcatcaacattagaaaggcgcgattggaggccggtatcttcaggaggttattggcat

SEQ ID NO: 500497 - DNA, 296 bp, Homo sapiens
taccacttgcaccttacgtcacagcatctttttccaaaacaattctaaagttctcaccatccgatgtgtcatacccaagtattggtggtttttggatctgtcctccatctacttcgttgagactttacccattaatttccagagtatattcataagcaaaaacagtgatagcgtctatatttatggtgcgctttagtcttagcagctccaacatagaaagtatctttgcccacgtaatatgaacatccacgtcttttcttatctcttcctttccatctacatatacaactcgttag

SEQ ID NO: 500498 - DNA, 196 bp, Homo sapiens
tattctctgttgagctctacttgtggtcattcccgacctacctcccctccaggctggtctcaaaatcctctgacctcgggtgatccgcccacctcggcctcccagggtgctggggttacaggtgtgagccaccatgcctggccaagatggtgtttatgttaagctattgtgcaaaaaaaaacttttgtaaagaaaa

SEQ ID NO: 500499 - DNA, 584 bp, Homo sapiens
  misc_feature (10)..(10): n is a, c, g, or t
  misc_feature (432)..(432): n is a, c, g, or t
  misc_feature (448)..(448): n is a, c, g, or t
  misc_feature (465)..(465): n is a, c, g, or t
  misc_feature (471)..(471): n is a, c, g, or t
  misc_feature (477)..(477): n is a, c, g, or t
  misc_feature (491)..(491): n is a, c, g, or t
  misc_feature (505)..(505): n is a, c, g, or t
  misc_feature (514)..(514): n is a, c, g, or t
  misc_feature (550)..(550): n is a, c, g, or t
cgcatgctgntggtcccagctacttgggggactgaggcacgagaatcgcttgaacctgggaggcggaggtttcagtgggctgagatcgcgccactgcactcggacctgggcaacagagtgagactctgtctcaaagaaaaaaaaaaaaaaaaggcaatgaccaacatggagaaaccccgtctctactaaaaatacaaaattagctgggcgtggttgtacatgcctgtaatcccagctactcgggagactgaggcaggaaaatcgcttgaacccaggaggcggaggttgtggtgagccaagattgtgccattgcactccagcctgggcaataagagtgaactccgtctcaaaaaaaaaaaaagcaaaaatatcactacttgaaggccaggattccagtatctgctttaatcagttcttttgcctgccccaaanttacattatgacacantgggacacctgggctgncggganttttantaaaggatgatcgnccctcttatgaganttagtttanagataagcttatttaaacgtaaaggtatgtttttanctaatttatgtaattcaccccaaaaaccacaatt

SEQ ID NO: 500500 - DNA, 463 bp, Homo sapiens
  misc_feature (69)..(69): n is a, c, g, or t
  misc_feature (73)..(73): n is a, c, g, or t
  misc_feature (82)..(82): n is a, c, g, or t
  misc_feature (87)..(87): n is a, c, g, or t
  misc_feature (95)..(95): n is a, c, g, or t
  misc_feature (150)..(150): n is a, c, g, or t
  misc_feature (159)..(160): n is a, c, g, or t
  misc_feature (162)..(163): n is a, c, g, or t
  misc_feature (171)..(171): n is a, c, g, or t
  misc_feature (182)..(182): n is a, c, g, or t
  misc_feature (190)..(190): n is a, c, g, or t
  misc_feature (195)..(195): n is a, c, g, or t
  misc_feature (199)..(199): n is a, c, g, or t
  misc_feature (215)..(215): n is a, c, g, or t
  misc_feature (265)..(265): n is a, c, g, or t
  misc_feature (274)..(274): n is a, c, g, or t
  misc_feature (320)..(320): n is a, c, g, or t
  misc_feature (322)..(322): n is a, c, g, or t
  misc_feature (343)..(343): n is a, c, g, or t
  misc_feature (346)..(346): n is a, c, g, or t
  misc_feature (451)..(451): n is a, c, g, or t
cagtaattcagacatatctcaaatgttacattgatgtcatcaatattacaaaaaaggaaaaaaaaagtnagangcaacactnaagancaccaganacccagcgcacacctaaagtagaccatgcttctttccttccactgccaggttatngtcccgggnngnnccccaccncctcgctttcntcctccgntttcnctangcagtctcgtgggggnatctaggctttgttgtcgctctcctccttctcgaactccccttgttcgtnggcggtggngtcctggtactgttggtactcggacaccaggtcgttcatgttgctntnggcctcggtgaactccatctngtncatgctctcgctcgtgtaccagtgcaggaaggccttgcgccggaacatgggcgtgaactgctcggagatgcgcttgaacagctcctggatggccgtgctgttgcngatgaaggtggc

SEQ ID NO: 500501 - DNA, 181 bp, Homo sapiens
gtgctgcggtcgactctagacggactccccgcaatggtcctgtcggttacggcagtccacgtatctggtacatagaccattggccttatatgggcaaatgtaagtggtttctatgaaacaaacatatttagttcactattatatagtggggttatattaaaaccaaaaaaaaaaaggggtc

SEQ ID NO: 500502 - DNA, 146 bp, Homo sapiens
aaaaatccctgaagtcttttcgaatgtgcaatgtatgacctgtgctcttgaaatacacttttcaggaaatcagcacaatatctaatttcccctacccttttcgtgcctaccctctctgtcactaaaattcaaatgagctattattg

SEQ ID NO: 500503 - DNA, 1100 bp, Homo sapiens
ggtggtctcctgtagtcccagctactcggggggctgaggtgggaggatcgcttgaggccaggagttcaaggttacggtaaagctataatcatgccactgaactccagcctggacaacaaacccagaccccatctctgcaaaaaattaaaaaaaaaaaaaataggcattgatggtggtcctcctgagtagctggaactacaggtgcccaccaccatgccttggctgattttggtgtttttagtacgagacggggtctcactatgttggccaggctggtctcaaactcctgacctcaggtgatctgcctgcctcggcctcccaaagtgctgggattacaggcctgagccaccacgcccagcctaattttggtatttatgggtagacacagggtttcaccatgttggccagttggatcttccaatttcctgacctcaagtgatcttgcccaccttggcctctcaaagtgctgggattacaggcgtgagccaccaatgcacagactcttttatgaatatataatactatatatactattatggggaaaacaattgtggagtttctaacaacctctgtgatacatctcacaggcgtgggaacgtgtcgaaagggcgacagtgaaactcttcacaggtacaaccatctgtggacacacacctacagcgagcagcttctccaggggtcacaacagggttgataacacccgcggggacaaaaagccacccaccataaaaagaccagccaggggagcaacacacaccagaggagggtggaccaccaccgagtgaacacaacaccaacgaccacaaataaaacggaggaacatattggccgagcaacacaaacgcgggggggctacccacgaacaactagtggggcgaaagagacagtgaaagagcaaaggcggggagcaacatgccgctgaggacgcccccaggagaagtgtgtggggggaaccaagcgcgcgggaacaacacagtgagaaaacacgcccacaaaaatgcagtgggcggacaactcgacagagaaaaaaatgtcaaacacgagggacatgtggaggcgagcaagcggcgggtgtgcaacccaacagcgagacacaccaa

SEQ ID NO: 500504 - DNA, 769 bp, Homo sapiens
ctagtagaggcccgtgtatggaggccgggacggagatgggtgtagtgcgtgaccaggcctgagctccctgtctctcctcagtgacatcgtctttaaaccctgcgtggcaatccctgacgcaccgccgttgatgcccaggatagacaggtcgatcctgcgaagctccaactacttccttaagatcatccaactattggatgattatccgaaatgtttcattgtgggagcagactaatgtgggctccaagctagatgctaagcatatccgcatgttcccttcgatgggaaggctgtggtgctgatgggcaaggaacaccatgaatgcgcgaaggccatccgagggcacctggaaaacattaccctagctctgggagcaaactgtctgcctcataatccggggcgtaatgtcgggctttgtgttcaccaaggacggacctcactgagatctagggacatgttgctggccatataatggtgccagctgtctgcaccgtgtctgtgctgcctattgcccctactgttgaagttcgacgtgtgctcagcctccagatacactggtctcgtggcccgataagacctcctttttccaggctttcaggtatcaccgatctagaatctccaggggccaccattgcacaagtcctgagtgtatgtgcagcttatcacgcctggagactaagtgggagcaacgaagccacgctgtgacatgtcacattcccccttctccttgggcgtcatccgcaggtcgcctgggcgttaaacttaggtg

SEQ ID NO: 500505 - DNA, 183 bp, Homo sapiens
  misc_feature (21)..(21): n is a, c, g, or t
  misc_feature (163)..(163): n is a, c, g, or t
aaccctgacgtcatgacgcantcagaaagtgcagagatgagtcttcctcctcagaagcatttggtagaattccatagagcatgtctgtgagtgactgatcccacatgtatgttactaagccccaaacgaacttcaaactggtgtggtgcacgtgcctttattnccagctacccgggaggctgc

SEQ ID NO: 500506 - DNA, 276 bp, Homo sapiens
cctttttttttttgggccaaagtgagggggttccacccagggggaaacaacccaatcctttttttccttgttccaatgggggaaaaaaaacccaggacccaaggtttttggcagggggtttgtaaatttccaggggtcccacccccccccccgggcccggccccaacttgggtagtttttcctgcatggggaaccggaatttttggtttgggggttggattttcccctccccccccccctgtcccttttgggaaaaaaaaaaatttttaaggccca

SEQ ID NO: 500507 - DNA, 175 bp, Homo sapiens
  misc_feature (107)..(107): n is a, c, g, or t
  misc_feature (175)..(175): n is a, c, g, or t
ccttctgagcctgttcataccatccgtactgtttcccatattggccaggctggtcttgaacttctgacctcaggtgatccgcctgcctcagcttcccaaagtattgngattacaggtgtgagccactctgtacctgaccagataatctttaaaaatctcctcaaatctaccgtgn

SEQ ID NO: 500508 - DNA, 144 bp, Homo sapiens
tacaggatctcttttcagaagacataacacttagctgaattttgacatgctgggcacgggaatgagatttgaaaacattgcgtgtgtcaggttgtaagtcttgagcaggtccttgagaaaagccctccaccagtgctccatctt

SEQ ID NO: 500509 - DNA, 371 bp, Homo sapiens
cgtgcagattagcatctgggccactgccgaattcatgtcctggatgtgtgagggattgcatcatgcacacgtggaagcacgacgaagggcaaagagatgacatcgaatgcaagatgacgcccacaaagaatccagaagatctcagatggtagaggacagaggtctacgtcgactgctgttagttgctcaggtatccatcctgtgttccctaatctccggatttctgatccaagagtctttgagagctatgtcctaggccatccttgcatctagaaatggaaaccatgggtgtggcaccaggcatggtcaaccctgcagtgattcagctgcacaaaggggtagtccagagcttagatagctgtctgatgtgg

SEQ ID NO: 500510 - DNA, 436 bp, Homo sapiens
agtcagctcggtaccttccaggttgattgcaggcatagtaagaagctggctaaaaccaccaaaagcaagatggcgacaagaggacaagagtgacctctggttgttctctctgctacactcccaccagtgccatgccatggcagcttacaaatgccatggcaatgtcaggaagttaccctatatggtctaaaaagaggaggctgctgggtgcggtggctcacgcccgtaatcccagcaccttgggaggctgaggagggcggctcatgaggtcaggagatcgaaaccatcctggccaacgtggtgaaaccctgtctctactaaaaatacaaaaaattagccgggcgccgtggcaggtgactgtaattccagctactcaggaggctgaggcaggagaatggcatgaaccaggaagcggagcctgcaatcaagcctggaa

SEQ ID NO: 500511 - DNA, 682 bp, Homo sapiens
ctatggaggaaagagatccatctcacagcttggccacctgaacaccctggggacagctgaccaggcgtctgggctagtagtctaatctggcagggtggtgtcttgtgaatgggaaggactgttaaatccagctgccagacacccctggacgggagaaggagagacggttggaccaccatgcagcggttcctgcagtgtcctgatgcttctagctgcacgatacgtggtacgtgctgagtggccacccatcaggccccgttgagagccctcaccagatgaggagaaacgtttgagtggtggagctgcacaattctcataacgggcccagtgtatccccgacggcctcagacatagctgcacatgaagatgggacgagagacgcgtggtcagcattcgtccaaaggcgctacggcacggccgtgcggtgtggggcgcacaacaaggagcgcgggcgccgtgcgcgcagaatctgttcgccatcacagacgagggcatggacgtgccgcttggcctatggatgagaagtggtctaccaacgagcgtgagcactacaacactcagcgccgccaactgcaagcccaggccagatgtgcggcactacacgcaggtggtatgggccaagacagagaggatcggctgtggttcccacttctgtgagaagctccagggtgtgaggagaaca

SEQ ID NO: 500512 - DNA, 167 bp, Homo sapiens
  misc_feature (124)..(124): n is a, c, g, or t
actcctactgtgaggtaacttgacggacgtactgctaatgactttagcgtacgctgggtagtggtttacctccaccctcaacacggccgtgctaatgactggactaaagactgtgacgacgacntgacggacgaccggactaaccgctctagatgacggtgacacga

SEQ ID NO: 500513 - DNA, 580 bp, Homo sapiens
ggtgagcaaaaggatgttgtgagccagaccgagtccctcagagctgccgttcatcaacttacctgcaggccgatgcagtgcgggaggaatcatcaacgttggccaaccctggctccaatgcaggtcggttgtcctgtgtccttccattcacatgtagcacccacaggtggggcatgatccaggtaggtgggcctactcatgtggtgcccactagatctgggccccagaggtgggcaagacggggcatgtttggacagaagtcagttagagcacatggcggcggggcgccatcacccatgctgaacgacgaacccaggggaaccgctagagaacagaaggtgtaagcactggagttatcaaagataagggcccacagggggttccctgtatataagtgaaaacgtgaacaacctgttaggttctgtaacagttagaacattagttcgttgtgggacattttgtctttggtttggggggacttgattttgggcttgaggttctttagacatttgtgggactcgtttgaagggattctctccaaaattgggaaggttggaagtttgttgaggggggttgaacg

SEQ ID NO: 500514 - DNA, 106 bp, Homo sapiens
aaatgcacacaagattggccaaacacacgttttcaagtagtgggtttccttcagagcatgccagtagtggataagtttccctagaaagtcgaaggagattacgaat

SEQ ID NO: 500515 - DNA, 691 bp, Homo sapiens
  misc_feature (309)..(309): n is a, c, g, or t
gctcttccgccagtacctgcgtatccgcacatgtccagcccaaggcctgactatggagctgctgtggctttctttgaggacgacagcccgccagctgggcctgggctgtcacgaaagtagaggtggcacctggctatgtggtagaccgtgttgacactggccaggctacctaactccatacagcgtcatccatcacatctttggcttcaatcttctctcgacaagcggtagtgataggttgcgcatgtgcgttgcacatggtagaaccatatggaaagtcgactgcatcacccgtgttgcatgagtccnttcacacggcatatcttgagtggtctacgatctatgccacgggtgcccaggacttgaagtgcggtcagcattccagtacctggaagtctgtgacggcaggctgaacgtgtggacgggccatccggtttccccaggaaccatccacatgaccttgtgtgcctgatgaggacggtcgggggtcaccaagggcatggagctgttcgtgcagcggcctgagttccacgccctgagggcaggctttgccctggcatgagggcatagccaatcccactgatgccttcactgtcttttatagtgagcggagtccctggtgggtgcgggttaccagcactgggaggccaggccatgcctcacgcttcatggaggacacagcagcagagaa

SEQ ID NO: 500516 - DNA, 229 bp, Homo sapiens
gacaacctaattacgcaaggttagaccatgtaaaagaagaaaaccttctttgaatattctatagatattaattaagtcacaataaaatcttatcaacattgtagttggattttttttacggtgaaataacaagaaggtcaatgaagactggtttcttagcatgtttgaagtagtgacaaaagtctcaaacataataaatattaatatttagcactgactggcagccaac

SEQ ID NO: 500517 - DNA, 324 bp, Homo sapiens
  misc_feature (27)..(27): n is a, c, g, or t
  misc_feature (32)..(32): n is a, c, g, or t
  misc_feature (156)..(156): n is a, c, g, or t
  misc_feature (163)..(163): n is a, c, g, or t
  misc_feature (222)..(222): n is a, c, g, or t
  misc_feature (241)..(241): n is a, c, g, or t
  misc_feature (279)..(279): n is a, c, g, or t
  misc_feature (319)..(319): n is a, c, g, or t
tgctggaaaactgaccttgcatcttgnaaagnaaaagactccaggatgaccttctcccagaccacccagaccccaagatggtgatgctgctgctgctgctttccgcactggtctggacctcttcggatgacggacaaagggacaagacatttcatncttgggnaagtgaccccaatcctccggtgcaggagaattttgacgtgaataagtatctcgggaagnatggtacgaaattgagaangatcccaacaacctttgagaatggacgctgcatccagnccaactacttcactaattggaaaacgggaaagattcaaantgtta

SEQ ID NO: 500518 - DNA, 835 bp, Homo sapiens
tggttatgagctcacgagaagcacgtggactcctagatttcgcatatagatggactaacgatcgagtgtaacttgcccgattctcatcctctatacccttattagtatcccagaccgctactcgtttcaccttttagtcccaccgtggcgaagagggtgagataagcctcgggtgatacgcatctggagggccaagaaggctcgattcatttgctcgtaggcgagttcatgtatccgattcctgctatgacccgcacgaacggtgacatgacacaggcagcgagattgtagaacggccggcgtaggactatgtcattcaggtgagcacagtaactgtcgtgatcatcaagaataggcatagatggtcatttatcagcttagtcaccacttatactctcctcggaatattctcgcaccccccggtatgcgcgtgcatacgcggaagaacctgagtttaagggagcatttgtctacccgctgtggagtgattacataagattttcccctgtcaaatgtgagcccatcacgtgacatgtgctgatggggccgatctatttgtcaagacagttgcacaacgtttgcatcggtccgcaccgggaggtcagtgtgtcctcctcgtcgacattgagattcgatgatcccaatacgtagatggtattcctacttgtgtaccgtggggaaactacgtgatttcaggaatagtgccttgagctcggttttgtgtcagcatctctgctatctataaccaccatatggagcaggtccaatgaaggaagcatggggttacccggaatcgtagtccaatggagtcgtcggtggttatcttgatcacagg

SEQ ID NO: 500519 - DNA, 308 bp, Homo sapiens
tttatcaacatctttttcccccctttccccggggggccccagtacaatgtttcaggagccccctttgccccggttttccgcaaccccggaagccctacctctttttctttgggaaagggttaaggtacacccccgctgtgcccccctctttcccccaaacccccgcccgtgtttttgtgggtaccccgtccccgaaccccccttttgggttgggcccccttttaacccccgggtaactgtccagtcctggtggggacctccggtttttctttttaaaatgccaaataaatgtttttttttaccatgga

SEQ ID NO: 500520 - DNA, 849 bp, Homo sapiens
tgcagtggctcacgcctgtaatcctagcacttcacgaggctgaggtgggcggatcacttgaggtcaagagcctggccaatgtggtggaaccccgtctctactaaaaatacaaaaaattagctgggcatggtggcagtcgcctgtaatcccagctactctggaggctgaggcagaagaattgctcaaacccaggaagcggaggttgcagtgagccgagatcataacactgcgctccagtctgggtgacagagcgagactccatttcaaaaaaaataataattgtaaaataaattaaaaataaataaatgaataaaattaatgtgattcaacataaaaattactaaaaggctttttttttttttttttggcttcgtggaacaaaccaccttgatttctgaagcactcttttgacacaaaagggtgagattcacctggggcccctgtaaacaaaaccgagaaggagaacttcgggctctcccgaccaggcgggactttcaggagccggatttcaaaattccagaaaatggggacccttataccaactgacgatttctccttccttcttgaccaactgttcgcctttccactctactccggtggcgttcccacatcctcgtcctctcacacgcttcgggggcacccctgggggacgcccctcttaggaacaagcgatcccgcgggtctccggcttctcccatccggtccgcgtggaggaaaacgcaccccgcatcttttctgcacacaagcgaagcccggagtcttcgtctccctctgcggttttccccttaaagtccttgggggggcgacaccgcctcctgctaacggcggggcgcatctccctgggtcgac

SEQ ID NO: 500521 - DNA, 176 bp, Homo sapiens
cgagtcaggttcaaggactggattataccataaactcacagttaggatgcaggaaaacaaacctgggggtgggaaagtgtgggtttaaaagccttttaatagttgacattttactaaatgcatttcagcagttattacaaagagaggagaacgacagagagaaagagaacgaaagg

SEQ ID NO: 500522 - DNA, 206 bp, Homo sapiens
cttttttgccccccccccctggggccccaaaaaaaggttttttttttagaaagggtttttggtggcggggggccccctttaaaagggggaaacctttttaagtttttcttaaaggggtttttcccccggggggccccctgggtttttttaaaaatggggtttttttttttttaaccccggtttttaaaaagttttcccgttgggga

SEQ ID NO: 500523 - DNA, 349 bp, Homo sapiens
ccacgggcctcaaaagctctccaaatatccatttgcagattctagaaaaagagtgtttccaaactcctcaatcaaaggatagtttcaattctgtgagatgaaagcacacatcacaacgaagtttcttagaaagcttctgtgtagtttttatgtgaagatacttcacattgcatcacagtactcaatgggctcagaaatatccccttgcagatcctacaaaaggactgtttcaaaactgctcaatccaaagaaagtttcaactatgtgagatgaatgcgcacgtcacgaagacgttcctcagaatgcttctgtcttctttacatgtgaagaagattcctatttcaccata

SEQ ID NO: 500524 - DNA, 175 bp, Homo sapiens
atcacgagtagacaggatggtcttgatctcctgacctcgtgatcgccgcctcggcctcccaaagtgctaggattacaggcatgagccatggcgcccggccgcttctcggtcttgaggtgcttttttttgagacagagtcacccaggctggagtgcagtggtgtgatctcagctca

SEQ ID NO: 500525 - DNA, 635 bp, Homo sapiens
  misc_feature (187)..(188): n is a, c, g, or t
  misc_feature (497)..(497): n is a, c, g, or t
aggggaagctatcacaggacgtagcgcggggcactttgtttccttgcccctccgaagctcactgttgcaaatacccccaagcctttgctctaggccagatcttgtttggtgcaggtgatggagaacacagatgactcgggcatgggtcttggagatcttctgttcaaattttagggcggaggctganncacagagcgcccacgttagagaggggctctgatagagagctaggaggcccgttcttgatcattgatccattgcagtccaaacttgctggcctgaccacaaggtagtgtctatgaactcacaggcagcctagactcatccacatgtagacttttgtcccgcaatgaaggctgaggagcggcgcctcaatcatgacaccgatagccctccccccctacatcccatttttggttatagggctagtttccaaatatggctaacctcgaaagcaaaggggacaaagaacataaaccaaaccctagccacaaaantttcaaagaaagctccacattctgaaacccgggacttcttctaaactgggaaagtgcaagaaactctctcctgtagcccgcggtaaccccgccaaaaaccttgaaacatttataaagttaaacgcggccaaaaagcct

SEQ ID NO: 500526 - DNA, 241 bp, Homo sapiens
aaaattccaggggccccccccgggcccctttttttttatttgggggtcttttttaaaaaaaaacccgggggggggggatcccttggaaaacccggggtgaggggaaaggggggatgccccacttttggggttttgggtcccggtcccgggggttatgggggatttcccccccccccccccccttttttttttttttttaaaaaaaaccaaaatgggaaaaaaccccaggggcccgggccca

SEQ ID NO: 500527 - DNA, 353 bp, Homo sapiens
accccccccctaaacccgggggggcccttaattttaaaaaaccggtttttagtttccccccgggggaaaaagaataaaaaattgttgggaattttaaaaacccgcccccgggaaaatgggcaaaaattttgttttaacaaaggggcccattttttttggcccccgggttttaaaaaaaaaaaaaaaaactttgtttttgccgggggggaaattgggggggggccaaaaaagcaaaacagcaaattgggttttcccttttggtgttttttttccccgccaaaattaaaaagggaggccttatggaaaagggcccattaaaaatttttggtgggttttttaattaaaaacttgga

SEQ ID NO: 500528 - DNA, 102 bp, Homo sapiens
tccgagaggtagatgattgagtacagagttgaaattctatgtcattacgcagcaaacccgtccttaagtcagttaggattgaagtgccctggtggaaaagta

SEQ ID NO: 500529 - DNA, 1449 bp, Homo sapiens
  misc_feature (951)..(951): n is a, c, g, or t
  misc_feature (1070)..(1070): n is a, c, g, or t
caatagcaatattggggaaaaagagtcgggggacaagacacccgagagcaacgttgggtgtgtagggcggaccggaccgggcggggtggtcgcccgcacccagaatggttggaaccagcaccaccgggtgtgggagaggaccccgaagggcctctcccccgtgtggttttctccacacagcggggatcacaacgataagttgtatgggccggccgaacaggagaagaatggggcaacgaacagggtgccagcgaaatttgctcggggaagggtgaagaatttggaataaaccacccgacgagacgcggcttttcgcccagagagaacttttgtctgggattaaagcccccggaatgtgggcccacagacccgggtcgaaaatttagttgtgctggaggattccccggcgtttgagaaagaccttggggtgggggcagataaaggaagtccccctacccccccgggggctgttaccctttggaggacaattttgtgcgaaagagggtttatatttttaaaagccgctcggaggaataaaatttcttgttgggcgttatattatatttcgtggtggcgccacaaaaagccgtggtaaagcccggtcacagatgttgtaagccttttgtcctgggagattttttcacaagaggtagaacacccgctgtgaaggcgtgtaacacgtggggaagtccctcccacttttagccggccccaatgtctgtgttggataaagaaatggtcacgcacatataaagggagttttcccccctctctgtgagagaccacatttcccaccgtgcccctcttgtgtgcccaccacaaaaagagatgggtcttttcttgcgccaagagacgtgggagatccccccgcgcgtgggaccacaataagggatttttaagacttgtgtcgaaaaatggtttcacgggagacttctacaagacgagggcttnttctgcagaagagaagtcccgccacgaatggcgtgaaaaattttctttctaaaggagggatatcatcccctatgtgtactcttgtggtgaagatggggtgcacttccacgaggactatngagttgttaacatgtctgactacacaccccactgagagaagaccgcccttttttctcacgaggggagtgaataaagcgaccccaattgtaaaaagagtgttacgcaccgcgagaggagtttgtcttgcttttataagaattagcaccactttgtgctctgataacgaacgagattccctctgaaaagggggaaaatgacagagcaacccagtatattctgaaaaggtttattattccacccaaaatgcttttaaattgttataatgtttctgttataaaaaaggaccacctttgtaaaaattaccgcttaaagataatttttttaaaagaagaaatgatttaatgaattttgctttttaaaaaataaattgggggatta

SEQ ID NO: 500530 - DNA, 257 bp, Homo sapiens
aacgccagcggcagaaagagctgcagagcaaataccgacggccgcggggctctccaggcggagagggcacagggcacctggacgaatttgacttatgagaccaacactacacttgaccctgcacggaatccacactctgcctggactgactagactgcttagcagctgaccaccctggaacctgtgagggccaaacagcatagcgaagctgagctgtggacctctcggtcaaatctgcgtctgcgagggccctgtgc

SEQ ID NO: 500531 - DNA, 271 bp, Homo sapiens
  misc_feature (13)..(14): n is a, c, g, or t
  misc_feature (198)..(198): n is a, c, g, or t
  misc_feature (208)..(208): n is a, c, g, or t
  misc_feature (232)..(232): n is a, c, g, or t
  misc_feature (250)..(250): n is a, c, g, or t
cgtttccttaagnnatattctccagcaagccgggcccgagagctgccaacgaggcctcggttgaatacctgcaagaggtggcccggatccgcctctgcctcgacagactgcagatttcctctcggagcctgagggaggccagagatggccaaggagaagcagtgctacctgcagcaagtcaagcagttctgtatccgngtggagaacnactggcaccgggtgtacctgggtnggaactcatcagccagcnggggattggagttcgttcatg

SEQ ID NO: 500532 - DNA, 937 bp, Homo sapiens
  misc_feature (494)..(494): n is a, c, g, or t
gagagcttcatctacccttccatgtgctggatccgggactctctggtcagatacatcaccaacctgggcctcttcagcctggtgtttctgttcaacatggccatgctagccaccatggtggtgcagatcctgcggctgcgcccccacacccaaaagtggtcacatgtgctgacactgctgggcctcagcctggtccttggcctgccctgggccttgatcttcttctcctttgcttctggcaccttccagcttgtcgtcctctaccttttcagcatcatcacctccttccaaggcttcctcatcttcatctggtactggtccatgcggctgcaggcccggggtggcccctcccctctgaagagcaactcagaacagcgccagggtctcccatacagctcgggcagcacctcgtccagcgcgcatctaggctctcacagcccatcgtgcccatgtgatgaagcagagatgcggcctcgtcgcacactgcctgtggnccccgagccagggccagcccaggccagtcagccgcagactttggaaagcccaacgaccatggagagatgggccgttgccatggtggacggactcccgggctgggctttgaatgggctggggactactcggctctcactcagctccacgggactcagaagtgcgccgccatgctgcctagggtactgtccccacatctgtgcccacccagctggaaggcctggtctctcccttataacccctggccagcctcatgctggggggcaggcctggatcttgaggtctgggccaccctaatcctgtgccctgcctgggaacagaaagggcccatggcctgctctcgaggaccccgaggccccggcacccgggcttaaccccgtggaccagggaagggccgcgacactagcaaaccgggagagcctgccaacacacagccactggcgcc

SEQ ID NO: 500533 - DNA, 756 bp, Homo sapiens
cggcttgtgtattgagtctgtggccgacttcgtgttcctggtctctgcagcagccgtgatctgcttacgtgtgagtgtcttatgggtatgtttgtgccatggtgatgcctgaatatcaaacatcttcagctggcagctcccaccaggacttatctcagaaaattgcttgatctgcctggtgcctggagctaggcaacgggtgtgtgactaacgaaattcatgcaagcatggagagctgttgtggaaattgtgtgaaagttgtactgtggatgaggatgtacgtacattgttcagatgttggtatgtggctgaaatcaatgacaatttaatgggatgctttagatcagtgcattaatggcgctgcaagaggagttgcgttcatggcgcagccgtgtgttagctgcatgtcatcctcgatgcttcccttatgccctggcatggataatgaatagataaagaggccgggcgccaagtctcatgccaatgcttgttggcaaatatgcgtatcgtgatagcatggtgcagatcatattagtcaccatggacctacagtgctttctcaagattcaggggctctttttgatatacccagtagacaagtttgtatgcatgagccggcgtgtcctaaagtggataagggagaatatctctgcaatggaggaaactggcactatatgtctcacctgaatgctggtggagcttaaatattgacctccattgcatacacggctgaattgtggctttgcttgattcaca

SEQ ID NO: 500534 - DNA, 473 bp, Homo sapiens
  misc_feature (41)..(41): n is a, c, g, or t
  misc_feature (309)..(309): n is a, c, g, or t
  misc_feature (374)..(374): n is a, c, g, or t
  misc_feature (388)..(388): n is a, c, g, or t
  misc_feature (430)..(430): n is a, c, g, or t
  misc_feature (469)..(469): n is a, c, g, or t
ggaagcaggcgggcaacaccctcagagtccctgtgtatgancaccagagaaaaatgatccttggaggtaggagggagccaaagattgtgagaggacgagtggcctctgcaacggatcattgaatactatggtcctgccacttgggcagaggatggttcatggggttatcgcactcccatatatatgccaaatagagcgattagactacaagctgttctagagataatcactaaccaaactgcctcagccctagaaatgctcgcgcaacaacaaaaccaaatgcgcgcggcaatttatcaaaacaggctnggccctagacttacttatttaggcaggaagagggttgcgggctgtgggtaagttttaacatcttnccaatttgcttgtntttaaccttagggcatttattgggagaaggaggttttttggnaattcggttttcaaaaccttcaggaaaagttaggccccntgtt

SEQ ID NO: 500535 - DNA, 155 bp, Homo sapiens
gctatgggacggcgcggactggagcttccgcgcggtggcttcactctcctgtaaaacgctagagcggcgagcttgttacctgcgtctctgacctgagcagcgacaggggaaagcggcgagactgactgcaccgctacaccatccagtcgccagct

SEQ ID NO: 500536 - DNA, 854 bp, Homo sapiens
ctgggtgtgctcctgtgctcctgcgtgtgcgtgacagagtgctggctggctggctgtgcatgaagctgtgctgtgcgtgctggctgtgctggctgtggagccgagtgaggaggttcctggacgctgcttaggaacctggggactcagtgagtgccctgcgccctgagctgctcagctccagagtgcgtcatggcttgagtacgtggaccctcctgcaaagacctgaccaacaacaatcacccttgaatgatctagaacatgctcaagtctggcctgcaatggaatgacatccccagcgaacaagagtgacggagatcactactggcatgttgcctggtttagcttccttggagagccacaacaagctggacaaagacaacctctcctacattgagcacatctttgagatctccctgccgtcctgacctactcactactggtggttgactacagaacccgttgtgctgaagatctctgagtgaggatgatgctggacacgcaagctaacccgtatccccagtgccaatgaatgtacaaagacattatccggcagccctctgaggacgagatcatcaaatttggctcccccaccgaagaactgcctgagcaaggggcgaggacgaggcaggcaggttggaccttcatcagaccactcacttcccccatcctccaggagcacggggccacgggcacgccaccatctaccacttactaacctggttcctaacccccttactgtgctgcgtgtgtgtgcgtgtgccgcacgcttctgtgctgttcgctctatattgtctacacccactctagttcctcttcttaagggccatggggggtcaggcgcttaggggatgtgg

SEQ ID NO: 500537 - DNA, 235 bp, Homo sapiens
acccggtgaagtagattcctctctggacattatacatcactgttaatgcttctctcatcaacctttcaactatctttatctctttaattactgcagacgagctgataccgaggtgactacagccgatttgccccctactgaagcgacgcgagacccctgcaaatgggacagccccccagctcatgaggcctggctattgcaatatttactagtagaggaactctatagcaagatg

SEQ ID NO: 500538 - DNA, 275 bp, Homo sapiens
  misc_feature (11)..(11): n is a, c, g, or t
cccccccctancccccggggggggggggggtttttttttaaaaaaaaccccctaagggtccccctttttttttttggggccccccgggggggtttttttcccccttttttttcccgccccccccttttaaaaggggggcccccttattttttcccccccttttttttttttggggggggggggggtccccccccccccttttttttttgggggggggggggggccccctttgggtttcccccaaaaaaaatttctggggtttttcccccccccca

SEQ ID NO: 500539 - DNA, 303 bp, Homo sapiens
ttgcgcagcaaacttaatggctcatctaaacgagctagaatctaactccggtctgttatgttcacaccgataatcatgtaaattagatgataatgtcgtcttatacaatcagcaatcccccctctaccaaggctgtgccacaattctctaaaccagtggttaacaaacagacctaatcatctgcatcacccatgaagttccttagggtgcagatttccaggaccttcccgccacctacctaagtcagtatatctgagtttaggtttgggcgtctgtaattttatttgattgtttaacctctgg

SEQ ID NO: 500540 - DNA, 124 bp, Homo sapiens
acctgggaagaaggcctgaaaaaccagcttagaggagacacccattctcttagaggtgcctggggtatctgaggcagaagtggtagcagcagactccttatgaggccaccggggattctttaga

SEQ ID NO: 500541 - DNA, 318 bp, Homo sapiens
ggggggttttttttcccccccgggccttaaaaaatggtttttaagggggggtttaattattttttcccccccccccggggggggcttgcccccctgggggaattttcccaggcccccctttttgcccttttttaaatttacaagccccccccccccccccctttggggggggggggttttccccagttttccctttaggggttttttggccccctttttcaaacccccccccaggttttcgtggcggggggtccgggccccccttggggtcccccctagggttttttttcccaaaaaaaaaagttttttttgggggga

SEQ ID NO: 500542 - DNA, 400 bp, Homo sapiens
  misc_feature (165)..(165): n is a, c, g, or t
cccaggcagtggctgggaagtgagggagagaagcgaagagctgcgggtggtggtggcgagccctgaataccacgacaccgcagcgtggacctctgcagcggggataccatccacaccccagagccgccacggcataccccccttccggctcgtggggtctccctngaatttcctcctcagctgtggccccctggggttccttggcttctcgtcgttctcttcccttccaattccattcatcttgaacactctctggagatctattgatgctatccctgacaaccaaaagtttaagcagttgcagagggagctctctcaagtgctgagcccaggggcagatctacatccagcctgataactaagccgatccaggtaccctgcctgagagccgcgagaccct

SEQ ID NO: 500543 - DNA, 126 bp, Homo sapiens
ttagtgatagctcacagcctggggatcatctacagagatctgacagctgagaacatactacctggatagaagaggggcacattaagatcacagatattcggcctagagtaagcgcaggccatatga

SEQ ID NO: 500544 - DNA, 220 bp, Homo sapiens
ggccctttttttaaaaataaaaatgggggttatttttattttttttttgtaaagtgatttttggtcttctgttgacattcggggggatcctgttttgccctgggtacaatgtgagatcggggggttttcctaatgttttcccgtggcttggggattgtacacgggaccagctcccgtaatgcattgcctgtaacaatgtaataaaaagcctcttttttta

SEQ ID NO: 500545 - DNA, 984 bp, Homo sapiens
gcccggcactccccgccaggtcttgctgccggggtcttggctgacggggaggccagtcctggtgagggaggctcaggtctgcgcctctccctcaagaagaccccggactccccgacaggccaggtgcggtggatgggccaaaggccagacccacatccttgcccgtcgattgtacctagctatcccctatcggaggtaagggctatcgcggtcgtggaccagacttgcagatggagacagacccccgagacacgagccccgggcccccggcttctgtctggacatgcaatcgagcctagattaatctagcatttacagaagaaaagcaaagaacaacgagagcaagaaacggttctcaaaaccaagaggcagaggacgagcaaatgcgaagagacagtgacacagaaacaagggaagcaagacagacagccacgcagaacgcaacactcagaccagcacggggacagacagatgcaccacgaacagagaagacagagaaccactccaaatcgaagacggccccaccatgaaaacacaggacggagacaacaaacccggaagagagaacacaggacagtacccgagcgagagaaaaacaggcaagcaaaggcggcggagagggaacaagcgaataaacagacgcaagccggaaccgcgcgatgcacaagacgcgcgaaccacacgggaggagggcaaccgagagcccacacgaccccccgtcagaaagagacagagcaaccaggcaacagccgaacaacacaacacaccaaacaagaaacaaaacaacaacggaaaaaaacccacacacgacaacaacccgaagtgcaacagcacgccacgaaagcgcgcaaacagcgaaatcgacaaaacgatcagacgtacaaaaaccagcagcgaacacacagcgagcaccaccagccagagcaccaggcccgagaacatggcaaaaaccaggcccgggccagacaccggacacctacgcgg

SEQ ID NO: 500546 - DNA, 906 bp, Homo sapiens
  misc_feature (267)..(267): n is a, c, g, or t
gatccgctcgcacttccaggacgtgttccgtagtggtgcggggcacacacaccctgcacgccacacgatccgacccgtacagggtggctcgtgagccgcagccaggacacccctgccttcgggccagctctgcctgctggcggaggccccgttcgcaggcaagcgcactgacttccgggagccttccatgccgtggtcgcaaagcgctgaaatggttgcagccaggcggtgcgggcacgcgcgcgcagtgtcccacggccatggtcncacgactgccaccccgcctagcaggtcaccatgtacagtcatcatggcccaacagaccgaaggtgcaccacgtacgatcgtcctggcactcggagcttcgacagactatcgaggcatgtcctcccatggtgtgggaggcgcacgggcggcaccctcggggccccacggcgccgagctgcaagggcagcgggctcactggtgtggggagtgcgcgcggtgcccggggcgcgggtcgccgccggggctcaggcgagcggcccgaaggcatcgaggtgccctgcctgctgggcatctcggcgaggctctggtgctggtggcgccggcgacggcgcgtgtgttccaattgcgcctgtcgcgacgtgctggcgctggatccttctccgagcagcagctggacctgtaccacggcgcggggaggcgatcacgctgcgcttcgacgggtcccccgggcaaagccgtgggcgaggtggtggcgcgcctgcagttggtgagccgtggtgcgagacccggaagttgggtgccccgaggaaggtcaggacggctgggttcgaggtggaccgcgagggattcgacgcacgtgggagggttccaattcggcgaaagggggctttggggccgggggacccacctggggtgtgg

SEQ ID NO: 500547 - DNA, 217 bp, Homo sapiens
taattattcgacgtaacaatggtggagttggtaggtgtgcccaggtcaagatagtggggctaggctgcagctgcacagctggcagacaatggggtacgcactagggtgacagcatggactgtggaaacgaggaggacagatatagcgtcatggcgaagacaacgaagcacaggaccatgcctaacagcactggaagaaggagctgacgcttccctca

SEQ ID NO: 500548 - DNA, 1189 bp, Homo sapiens
gacgcggacgtggtcgcaggcggcaacgtaacttgatcgtagcccgtggaagtggtgtgcgcactaagtcacgagtcgttgtattgcttgcttgcacgacacgtgttgtttgtgccgccccccctccttactctctgtgggtgagtgtttttttcctcccctgcttcctgctcgtcgtaccactcttgttgtggtgcgcagaggatctccgtttggactactctagtcggctctatagtggctctacaattgttgttgctccgggatagtatatcttcgtcctgttgggaccctctgcctcggacggccttctactcctgtggaggccgcgcttccaagcgttgtcccggaattccttttctcaggatccggggtggggacgtttccacccgattttctgtgaccctgtctactgggcacagattgttccggctctaggcttctgctgagaaatgtccactttcttaagggccccttgagattgggcccacgaggccgcttccgagcccgtgggcccacgtgggcctttaaccacaatgtcgccgtgtcgtgggtccgcggctggcgagtacatggatgctcgtcacagcccagcggccctcagtgtactcccctctgacgcacgttgccccccccatatttgtcacacacacacacacacgcacactactcacactccgatttgacgttatccaactcccgcccttgcccctgatggctcccttggggtttgcctgcccccccccctgggcccccgagtatggcaccccggacacagcccaccggtggaagtcactttctgaatatggagttggccattggaagcttattctttttgttcacctggagagagagagaactggttaccggtaatctgtgtctattatctgagttttttttattggtcttgtggtctttttaccccccctttcccctccctcccttgaaggctatcccctctgggaaggctggtgccccactgcccccttatcacggctcacaccccacgtctgatcacggctgagttttgtaatgtatctattctgttataatgcttgtttacttttaactaatcacgatctttttaccacgtatccactttattattgtaattgctttttatgagaaagaattttattagtacatgtttatatatgccacccatttaaatgtataaattagtgtaaga

SEQ ID NO: 500549 - DNA, 2703 bp, Homo sapiens
  misc_feature (2288)..(2288): n is a, c, g, or t
  misc_feature (2295)..(2295): n is a, c, g, or t
  misc_feature (2308)..(2308): n is a, c, g, or t
aagcggcacgaggctcgggttgtgccaccgctggactcccgtgtccctccgcgcaggcgggcggccccggagcgctggtgccggcagaggcggcgacggtggcgcccctcctcatcatgaacagaggcttctcccgaaaaagccacacattcctgcccaagatcttcttccgcaagatgtcatcctcaggggccaaggacaagcctgagctgcagtttcccttccttcaggatgaggacacagtggccacgctgctagagtgcaagacgctcttcatcttgcgcggcctgccaggaagcggcaagtccacgctggcacgggtcatcgtggacaagtaccgtgatggcaccaagatggtgtcggctgacgcttacaagatcacccccggcgctcgaggagccttctccgaggagtacaagcggctcgatgaggacctggctgcctactgccgccgccgggacatcagaattcttgtgcttgatgacaccaaccacgaacgggaacggctggagcagctctttgaaatggccgaccagtaccagtaccaggtggtgctggtggagcccaagacggcgtggcggctggactgtgcccagctcaaggagaagaaccagtggcagctgtcggctgatgacctgaagaagctgaagcctgggctggagaaggacttcctgccgctctacttcggctggttcctgaccaagaagagctctgagaccctccgcaaagccggccaggtcttcctggaagagctggggaaccacaaggccttcaagaaggagctgcgacaattcgtccctggggatgagcccagggagaagatggacttggtcacctactttggaaagagacccccaggcgtgctgcattgcacaaccaagttttgtgactacgggaaggctcccggggcagaggagtacgctcaacaagatgtgttaaagaaatcttactccaaggccttcacgctgaccatctctgccctctttgtgacacccaagacgactggggcccgggtggagttaagcgagcagcaactgcagttgtggccgagtgatgtggacaagctgtcacccactgacaacctgccgcgggggagccgcgcccacatcaccctcggctgtgcagctgacgtagaggccgtgcagacgggccttgacctcttagagattctgcggcaggagaaggggggcagccgaggcgaggaggtgggcgagctaagccggggcaagctctattccttgggcaatgggcgctggatgctgaccctggccaagaacatggaggtcagggccatcttcacggggtactacgggaaaggcaaacctgtgcccacgcaaggtagccggaaggggggcgccttgcagtcctgcaccatcatatgagtgttctcaccaccacttatgcccctagaagggaaggggagagggaaacgtgccctctgtttgatccttgttttgtgacattttttttttttttttttttactcaaagttaacctacctgtaactttttaaaaacttgtaaaataactgaccctcccttcctgtccgccctcttcccctctaatgctcacgctcccaacacaaggtgggcagggaggcaccattcaggaacctggaccaaagctgacgaggctgggccaagccagggatggggccacagccagaaccccgagccctacttccaggttctggttagctcagccccagcccagcccagctgctctgcccagagctgggtgagtggggagacacctcagagccccgcaaaacccactgaccggaggcaaaaggcagtggggctgggggtagttttccatggtcacagagaactagtggtggctctgagaaggggaggacctctgggctttgattccatctccttgtcttttttctttgtttttagagacagggtcctgctatttcccaagctggagtgcagtggtgcgatcatggctcactgcagcctcgaactcctgggctcaagcaatcctcctgagtgatcccatttcttaatcagtgtagccccaagaaggctggggctatttaccagggtagaaaaaggagcttacctcccacctttggtcctaagtccctgccccctccccttcacaccataactaggtaacagtttgataactagggaagaaagcagaacagttaagcagccgccacatccccgctggctgggggcctcactccaggaaggggctggactggctgtcctttccagtggcctggctccgctgtgtggatggggagatcggggccagagcaaaagggggaaaanaaccccnccccctttggggnggttgaaggagcagaaccctggtgaggaagctccagtcctgctctctacccagcccatcttgcctccatggtgcctctggaggcctctgggcctcctctaacaggggctggtgggcaccaagagccaatggagtagacccctggctggtaagggccaagtcccaccggttgcttctgggaaggggtttctaacactagtctgtgtgctgtggttcctggggtgccctccactgccctctgttcagtaacagggccttgctaatcgggttgtcactcaacaaaagtgctttggatttaagttactatcctggctttgcccaacctcagcaacctgtaagactgataatgaaataaatcatgttaatcctaaaaaaaaaaaaaaaaaaaaaaaaaaa

SEQ ID NO: 500550 - DNA, 518 bp, Homo sapiens
  misc_feature (1)..(1): n is a, c, g, or t
nccggatcttatggcgctggaaaagggggcagaggtagtgtagcctcagaagaagaggcaggcccaggtacagagccatccactccctcggggcggagagtggcctaaccagccagtgctgagcagacatgagtagctacaggaggggccaggtgggttgatctctaagctgcaaaaacttgtgctgtccttgtgaggtccctgcctgtgactggtggcctggttgccttcctgtgcccagaaaggaagggggtattggctcctcccaagacacgttccctttactccactccgtacctgtggattctcccatcaggcaatctggttctcctcttaaggccagatgaagatgttccctataaaagattaccaagtaaggtaagtgatgtgaaatgctcctgtccctggccctaactcctttcctagacccagccctggatcaggcaggtgttggatcactaccccaatactttaccacgtaggtttagtttaccctatttccctttaccagaggcttg

SEQ ID NO: 500551 - DNA, 449 bp, Homo sapiens
gtatactaccctcccagactaaatcaggaagaaatagagactctgaacagaccaataacaaccactgagattaaaacagtaatttaaaagttggccaaaaaaaggtccagaaccaaatggaatcaaagccgaactccatcaggtagttcaagaaaaattggtacaatcctactgaaactataccaaaagatagagaaagggaatcctttttaagtcattcaatgaagccattatcaccctagtatcaaaaccaggaaagggcacaacaaaaaaagaaaactatagaccaatgtccccgaagaacacagatgcaaaaatcctcaacaaaaaactagctaaccaaatccaccagcacatcaaaaagataatatatcattgtcaagtgcgtttcataccagagatgcagagatggcgtaatatatccaagtcaacaaatgtgatacctccta

SEQ ID NO: 500552 - DNA, 3034 bp, Homo sapiens
  misc_feature (221)..(221): n is a, c, g, or t
aagcggcacgaggctcgggttgtgccaccgctggactcccgtgtccctccgcgcaggcgggcggccccggagcgctggtgccggcagaggcggcgacggtggcgcccctcctcatcatgccgtggcagctgtggcttggcccagacacagagacccccacctccaaagaggacgtccttagtaggtgccaagcattattagagtgaggccagtcccagaancggaggctcctggcgcgccccgcatgcctccagcacgtttacctttccgaagtggcaggaatggggaaagcgcacgcttaggagagcttcagacaagcttccctcttcctcctccacgaccagaagcggaaaggtgctcccggaccgaaagggaaagaaggtccagcactgccccgcttgggaaggcacccacaaccagtctagggactaggggtaaggccggcggggagcccgcgaatgacctgggctgacatctcttcccctccttacacagaacagaggcttctcccgaaaaagccacacattcctgcccaagatcttcttccgcaagatgtcatcctcaggggccaaggacaagcctgagctgcagtttcccttccttcaggatgaggacacagtggccacgctgctagagtgcaagacgctcttcatcttgcgcggcctgccaggaagcggcaagtccacgctggcacgggtcatcgtggacaagtaccgtgatggcaccaagatggtgtcggctgacgcttacaagatcacccccggcgctcgaggagccttctccgaggagtacaagcggctcgatgaggacctggctgcctactgccgccgccgggacatcagaattcttgtgcttgatgacaccaaccacgaacgggaacggctggagcagctctttgaaatggccgaccagtaccagtaccaggtggtgctggtggagcccaagacggcgtggcggctggactgtgcccagctcaaggagaagaaccagtggcagctgtcggctgatgacctgaagaagctgaagcctgggctggagaaggacttcctgccgctctacttcggctggttcctgaccaagaagagctctgagaccctccgcaaagccggccaggtcttcctggaagagctggggaaccacaaggccttcaagaaggagctgcgacaattcgtccctggggatgagcccagggagaagatggacttggtcacctactttggaaagagacccccaggcgtgctgcattgcacaaccaagttttgtgactacgggaaggctcccggggcagaggagtacgctcaacaagatgtgttaaagaaatcttactccaaggccttcacgctgaccatctctgccctctttgtgacacccaagacgactggggcccgggtggagttaagcgagcagcaactgcagttgtggccgagtgatgtggacaagctgtcacccactgacaacctgccgcgggggagccgcgcccacatcaccctcggctgtgcagctgacgtagaggccgtgcagacgggccttgacctcttagagattctgcggcaggagaaggggggcagccgaggcgaggaggtgggcgagctaagccggggcaagctctattccttgggcaatgggcgctggatgctgaccctggccaagaacatggaggtcagggccatcttcacggggtactacgggaaaggcaaacctgtgcccacgcaaggtagccggaaggggggcgccttgcagtcctgcaccatcatatgagtgttctcaccaccacttatgcccctagaagggaaggggagagggaaacgtgccctctgtttgatccttgttttgtgacattttttttttttttttttttactcaaagttaacctacctgtaactttttaaaaacttgtaaaataactgaccctcccttcctgtccgccctcttcccctctaatgctcacgctcccaacacaaggtgggcagggaggcaccattcaggaacctggaccaaagctgacgaggctgggccaagccagggatggggccacagccagaaccccgagccctacttccaggttctggttagctcagccccagcccagcccagctgctctgcccagagctgggtgagtggggagacacctcagagccccgcaaaacccactgaccggaggcaaaaggcagtggggctgggggtagttttccatggtcacagagaactagtggtggctctgagaaggggaggacctctgggctttgattccatctccttgtcttttttctttgtttttagagacagggtcctgctatttcccaagctggagtgcagtggtgcgatcatggctcactgcagcctcgaactcctgggctcaagcaatcctcctgagtgatcccatttcttaatcagtgtagccccaagaaggctggggctatttaccagggtagaaaaaggagcttacctcccacctttggtcctaagtccctgccccctccccttcacaccataactaggtaacagtttgataactagggaagaaagcagaacagttaagcagccgccacatccccgctggctgggggcctcactccaggaaggggctggactggctgtcctttccagtggcctggctccgctgtgtggatggggagatcggggccagaggcagaaccctggtgaggaagctccagtcctgctctctacccagcccatcttgcctccatggtgcctctggaggcctctgggcctcctctaacaggggctggtgggcaccaagagccaatggagtagacccctggctggtaagggccaagtcccaccggttgcttctgggaaggggtttctaacactagtctgtgtgctgtggttcctggggtgccctccactgccctctgttcagtaacagggccttgctaatcgggttgtcactcaacaaaagtgctttggatttaagttactatcctggctttgcccaacctcagcaacctgtaagactgataatgaaataaatcatgttaatcctaaaaaaaaaaaaaaaaaaaaaaaaaaa

SEQ ID NO: 500553 - DNA, 309 bp, Homo sapiens
cacgacggtcactcgacgtataatatgtgttaggacatgagactagagactggccgatcatataacagatacataaaacaaaaataaaaataaaaagcagagagtacctatggagagagtagaagtcctgctatcctaggtgcacagtgctctatgtaccctaaaagaggaaagaaagatacacaccacgagaatagtagtaggaagcaacagtagcaagtagtagcaaagcaggaaccctacaagcctagtactacctagggcatccatacgcaagtatagctatgtactaagtactagtacctctac

SEQ ID NO: 500554 - DNA, 338 bp, Homo sapiens
gcctctacccggcccccgggggcctgggattgtttccgcccctgggcctaaaaaactgttctttatgggtggttttgatgattgtacacctcagcccgggggtgccctccccccctggggaattttgccaaggcccccttttatgccatttttaagacctaaaggtacctgcccccccccctttggaaggggggtgttttcccccagtttccccttcaggggttccctgccccccttgtcaagaccccccccagagtttccgtgcaggggattcaggccccccctgtgggtcccccatagggtttttttcccaaaaaaataaagtgaatttggggtga

SEQ ID NO: 500555 - DNA, 2920 bp, Homo sapiens
  misc_feature (221)..(221): n is a, c, g, or t
aagcggcacgaggctcgggttgtgccaccgctggactcccgtgtccctccgcgcaggcgggcggccccggagcgctggtgccggcagaggcggcgacggtggcgcccctcctcatcatgccgtggcagctgtggcttggcccagacacagagacccccacctccaaagaggacgtccttagtaggtgccaagcattattagagtgaggccagtcccagaancggaggctcctggcgcgccccgcatgcctccagcacgtttacctttccgaagtggcaggaatggggaaagcgcacgcttaggagagcttcagacaagcttccctcttcctcctccacgaccagaagcggaaaggtgctcccggaccgaaagggaaagaagaacagaggcttctcccgaaaaagccacacattcctgcccaagatcttcttccgcaagatgtcatcctcaggggccaaggacaagcctgagctgcagtttcccttccttcaggatgaggacacagtggccacgctgctagagtgcaagacgctcttcatcttgcgcggcctgccaggaagcggcaagtccacgctggcacgggtcatcgtggacaagtaccgtgatggcaccaagatggtgtcggctgacgcttacaagatcacccccggcgctcgaggagccttctccgaggagtacaagcggctcgatgaggacctggctgcctactgccgccgccgggacatcagaattcttgtgcttgatgacaccaaccacgaacgggaacggctggagcagctctttgaaatggccgaccagtaccagtaccaggtggtgctggtggagcccaagacggcgtggcggctggactgtgcccagctcaaggagaagaaccagtggcagctgtcggctgatgacctgaagaagctgaagcctgggctggagaaggacttcctgccgctctacttcggctggttcctgaccaagaagagctctgagaccctccgcaaagccggccaggtcttcctggaagagctggggaaccacaaggccttcaagaaggagctgcgacaattcgtccctggggatgagcccagggagaagatggacttggtcacctactttggaaagagacccccaggcgtgctgcattgcacaaccaagttttgtgactacgggaaggctcccggggcagaggagtacgctcaacaagatgtgttaaagaaatcttactccaaggccttcacgctgaccatctctgccctctttgtgacacccaagacgactggggcccgggtggagttaagcgagcagcaactgcagttgtggccgagtgatgtggacaagctgtcacccactgacaacctgccgcgggggagccgcgcccacatcaccctcggctgtgcagctgacgtagaggccgtgcagacgggccttgacctcttagagattctgcggcaggagaaggggggcagccgaggcgaggaggtgggcgagctaagccggggcaagctctattccttgggcaatgggcgctggatgctgaccctggccaagaacatggaggtcagggccatcttcacggggtactacgggaaaggcaaacctgtgcccacgcaaggtagccggaaggggggcgccttgcagtcctgcaccatcatatgagtgttctcaccaccacttatgcccctagaagggaaggggagagggaaacgtgccctctgtttgatccttgttttgtgacattttttttttttttttttttactcaaagttaacctacctgtaactttttaaaaacttgtaaaataactgaccctcccttcctgtccgccctcttcccctctaatgctcacgctcccaacacaaggtgggcagggaggcaccattcaggaacctggaccaaagctgacgaggctgggccaagccagggatggggccacagccagaaccccgagccctacttccaggttctggttagctcagccccagcccagcccagctgctctgcccagagctgggtgagtggggagacacctcagagccccgcaaaacccactgaccggaggcaaaaggcagtggggctgggggtagttttccatggtcacagagaactagtggtggctctgagaaggggaggacctctgggctttgattccatctccttgtcttttttctttgtttttagagacagggtcctgctatttcccaagctggagtgcagtggtgcgatcatggctcactgcagcctcgaactcctgggctcaagcaatcctcctgagtgatcccatttcttaatcagtgtagccccaagaaggctggggctatttaccagggtagaaaaaggagcttacctcccacctttggtcctaagtccctgccccctccccttcacaccataactaggtaacagtttgataactagggaagaaagcagaacagttaagcagccgccacatccccgctggctgggggcctcactccaggaaggggctggactggctgtcctttccagtggcctggctccgctgtgtggatggggagatcggggccagaggcagaaccctggtgaggaagctccagtcctgctctctacccagcccatcttgcctccatggtgcctctggaggcctctgggcctcctctaacaggggctggtgggcaccaagagccaatggagtagacccctggctggtaagggccaagtcccaccggttgcttctgggaaggggtttctaacactagtctgtgtgctgtggttcctggggtgccctccactgccctctgttcagtaacagggccttgctaatcgggttgtcactcaacaaaagtgctttggatttaagttactatcctggctttgcccaacctcagcaacctgtaagactgataatgaaataaatcatgttaatcctaaaaaaaaaaaaaaaaaaaaaaaaaaa

SEQ ID NO: 500556 - DNA, 168 bp, Homo sapiens
atagataaaaaaagagaaaattaaatctcatgtatgcacagaaggaaataaagagtagaaatcaaagaaaataaaagtagctaaaaatatagtagtagataacaatcaatgaaacctaaagctggttccttgtgaattttgatattatgataaatctccagccagaca

SEQ ID NO: 500557 - DNA, 505 bp, Homo sapiens
  misc_feature (220)..(220): n is a, c, g, or t
  misc_feature (245)..(245): n is a, c, g, or t
  misc_feature (272)..(272): n is a, c, g, or t
  misc_feature (337)..(337): n is a, c, g, or t
  misc_feature (359)..(359): n is a, c, g, or t
  misc_feature (375)..(376): n is a, c, g, or t
  misc_feature (391)..(391): n is a, c, g, or t
  misc_feature (395)..(395): n is a, c, g, or t
  misc_feature (422)..(422): n is a, c, g, or t
  misc_feature (443)..(443): n is a, c, g, or t
  misc_feature (459)..(459): n is a, c, g, or t
  misc_feature (475)..(475): n is a, c, g, or t
attttttttctactgccgtgttgtctagtccatgctggtgaactcatcaatgcaattttctttaaaactctgtgggccctatatcagattagtccaacccattagaacaaaagcaacttctataaatattgagacattccctttctacctttggctaagaattggggtgctatagataattcccaaaagattatctagcctacagggccgatgaggtcanagctctgaagtcattctaaagtctntcacaaaggatcttacagcctttgatntttatttactcactcctgggacccactgtttttactgttgggcacggttccggccttttctcatnctttttccctgaagatccattntatgatgtggaaattnnctctttgcctggcangttnattgggggtgtggggttaccccgatancttcgtaaatttctcggtaantctattggggtcaatnaggctggttcttcccntggtggtggaatattttggttttcccgcct

SEQ ID NO: 500558 - DNA, 2612 bp, Homo sapiens
gtcggggcccttttggaggaagtttcttgcaaacgaggacccggggctccggggtcgacttccagttttcttgaacagaggcttctcccgaaaaagccacacattcctgcccaagatcttcttccgcaagatgtcatcctcaggggccaaggacaagcctgagctgcagtttcccttccttcaggatgaggacacagtggccacgctgctagagtgcaagacgctcttcatcttgcgcggcctgccaggaagcggcaagtccacgctggcacgggtcatcgtggacaagtaccgtgatggcaccaagatggtgtcggctgacgcttacaagatcacccccggcgctcgaggagccttctccgaggagtacaagcggctcgatgaggacctggctgcctactgccgccgccgggacatcagaattcttgtgcttgatgacaccaaccacgaacgggaacggctggagcagctctttgaaatggccgaccagtaccagtaccaggtggtgctggtggagcccaagacggcgtggcggctggactgtgcccagctcaaggagaagaaccagtggcagctgtcggctgatgacctgaagaagctgaagcctgggctggagaaggacttcctgccgctctacttcggctggttcctgaccaagaagagctctgagaccctccgcaaagccggccaggtcttcctggaagagctggggaaccacaaggccttcaagaaggagctgcgacaattcgtccctggggatgagcccagggagaagatggacttggtcacctactttggaaagagacccccaggcgtgctgcattgcacaaccaagttttgtgactacgggaaggctcccggggcagaggagtacgctcaacaagatgtgttaaagaaatcttactccaaggccttcacgctgaccatctctgccctctttgtgacacccaagacgactggggcccgggtggagttaagcgagcagcaactgcagttgtggccgagtgatgtggacaagctgtcacccactgacaacctgccgcgggggagccgcgcccacatcaccctcggctgtgcagctgacgtagaggccgtgcagacgggccttgacctcttagagattctgcggcaggagaaggggggcagccgaggcgaggaggtgggcgagctaagccggggcaagctctattccttgggcaatgggcgctggatgctgaccctggccaagaacatggaggtcagggccatcttcacggggtactacgggaaaggcaaacctgtgcccacgcaaggtagccggaaggggggcgccttgcagtcctgcaccatcatatgagtgttctcaccaccacttatgcccctagaagggaaggggagagggaaacgtgccctctgtttgatccttgttttgtgacattttttttttttttttttttactcaaagttaacctacctgtaactttttaaaaacttgtaaaataactgaccctcccttcctgtccgccctcttcccctctaatgctcacgctcccaacacaaggtgggcagggaggcaccattcaggaacctggaccaaagctgacgaggctgggccaagccagggatggggccacagccagaaccccgagccctacttccaggttctggttagctcagccccagcccagcccagctgctctgcccagagctgggtgagtggggagacacctcagagccccgcaaaacccactgaccggaggcaaaaggcagtggggctgggggtagttttccatggtcacagagaactagtggtggctctgagaaggggaggacctctgggctttgattccatctccttgtcttttttctttgtttttagagacagggtcctgctatttcccaagctggagtgcagtggtgcgatcatggctcactgcagcctcgaactcctgggctcaagcaatcctcctgagtgatcccatttcttaatcagtgtagccccaagaaggctggggctatttaccagggtagaaaaaggagcttacctcccacctttggtcctaagtccctgccccctccccttcacaccataactaggtaacagtttgataactagggaagaaagcagaacagttaagcagccgccacatccccgctggctgggggcctcactccaggaaggggctggactggctgtcctttccagtggcctggctccgctgtgtggatggggagatcggggccagaggcagaaccctggtgaggaagctccagtcctgctctctacccagcccatcttgcctccatggtgcctctggaggcctctgggcctcctctaacaggggctggtgggcaccaagagccaatggagtagacccctggctggtaagggccaagtcccaccggttgcttctgggaaggggtttctaacactagtctgtgtgctgtggttcctggggtgccctccactgccctctgttcagtaacagggccttgctaatcgggttgtcactcaacaaaagtgctttggatttaagttactatcctggctttgcccaacctcagcaacctgtaagactgataatgaaataaatcatgttaatcctaaaaaaaaaaaaaaaaaaaaaaaaaaa

SEQ ID NO: 500559 - DNA, 2496 bp, Homo sapiens
aagcggcacgaggctcgggttgtgccaccgctggactcccgtgtccctccgcgcaggcgggcggccccggagcgctggtgccggcagaggcggcgacggtggcgcccctcctcatcatgaacagaggcttctcccgaaaaagccacacattcctgcccaagatcttcttccgcaagatgtcatcctcaggggccaaggacaagcctgagctgcagtttcccttccttcaggatgaggacacagtggccacgctgctagagtgcaagacgctcttcatcttgcgcggcctgccaggaagcggcaagtccacgctggcacgggtcatcgtggacaagtaccgtgatggcaccaagatggtgtcggctgacgcttacaagatcacccccggcgctcgaggagccttctccgaggagtacaagcggctcgatgaggacctggctgcctactgccgccgccgggacatcagaattcttgtgcttgatgacaccaaccacgaacgggaacggctggagcagctctttgaaatggccgaccagtaccagtaccaggtggtgctggtggagcccaagacggcgtggcggctggactgtgcccagctcaaggagaagaaccagtggcagctgtcggctgatgacctgaagaagctgaagcctgggctggagaaggacttcctgccgctctacttcggctggttcctgaccaagaagagctctgagaccctccgcaaagccggccaggtcttcctggaagagctggggaaccacaaggccttcaagaaggagctgcgacaattcgtccctggggatgagcccagggagaagatggacttggtcacctactttggaaagagacccccaggcgtgctgcattgcacaaccaagttttgtgactacgggaaggctcccggggcagaggagtacgctcaacaagatgtgttaaagaaatcttactccaaggccttcacgctgaccatctctgccctctttgtgacacccaagacgactggggcccgggtggagttaagcgagcagcaactgcagttgtggccgagtgatgtggacaagctgtcacccactgacaacctgccgcgggggagccgcgcccacatcaccctcggctgtgcagctgacgtagaggccgtgcagacgggccttgacctcttagagattctgcggcaggagaaggggggcagccgaggcgaggaggtgggcgagctaagccggggcaagctctattccttgggcaatgggcgctggatgctgaccctggccaagaacatggaggtcagggccatcttcacggggtactacgggaaaggcaaacctgtgcccacgcaaggtagccggaaggggggcgccttgcagtcctgcaccatcatatgagtgttctcaccaccacttatgcccctagaagggaaggggagagggaaacgtgccctctgtttgatccttgttttgtgacattttttttttttttttttttactcaaagttaacctacctgtaactttttaaaaacttgtaaaataactgaccctcccttcctgtccgccctcttcccctctaatgctcacgctcccaacacaaggtgggcagggaggcaccattcaggaacctggaccaaagctgacgaggctgggccaagccagggatggggccacagccagaaccccgagccctacttccaggttctggttagctcagccccagcccagcccagctgctctgcccagagctgggtgagtggggagacacctcagagccccgcaaaacccactgaccggaggcaaaaggcagtggggctgggggtagttttccatggtcacagagaactagtggtggctctgagaaggggaggacctctgggctttgattccatctccttgtcttttttctttgtttttagagacagggtcctgctatttcccaagctggagtgcagtggtgcgatcatggctcactgcagcctcgaactcctgggctcaagcaatcctcctgagtgatcccatttcttaatcagtgtagccccaagaaggctggggctatttaccagggtagaaaaaggagcttacctcccacctttggtcctaagtccctgccccctccccttcacaccataactaggtaacagtttgataactagggaagaaagcagaacagttaagcagccgccacatccccgctggctgggggcctcactccaggaaggggctggactggctgtcctttccagtggcctggctccgctgtgtggatggggagatcggggccagaggcagaaccctggtgaggaagctccagtcctgctctctacccagcccatcttgcctccactgccctctgttcagtaacagggccttgctaatcgggttgtcactcaacaaaagtgctttggatttaagttactatcctggctttgcccaacctcagcaacctgtaagactgataatgaaataaatcatgttaatcctaaaaaaaaaaaaaaaaaaaaaaaaaaa

SEQ ID NO: 500560 - DNA, 106 bp, Homo sapiens
agcaaccccaggcagactgagtgaggagcgccagcttgctccttagaaaccttgccctccctgggagtgatggtaatctcttcttgaatggatttatggtcctttg

SEQ ID NO: 500561 - DNA, 2318 bp, Homo sapiens
aagcggcacgaggctcgggttgtgccaccgctggactcccgtgtccctccgcgcaggcgggcggccccggagcgctggtgccggcagaggcggcgacggtggcgcccctcctcatcatgaacagaggcttctcccgaaaaagccacacattcctgcccaagatcttcttccgcaagatgtcatcctcaggggccaaggacaagcctgagctgcagtttcccttccttcaggatgaggacacagtggccacgctgctagagtgcaagacgctcttcatcttgcgcggcctgccaggaagcggcaagtccacgctggcacgggtcatcgtggacaagtaccgtgatggcaccaagatggtgtcggctgacgcttacaagatcacccccggcgctcgaggagccttctccgaggagtacaagcggctcgatgaggacctggctgcctactgccgccgccgggacatcagaattcttgtgcttgatgacaccaaccacgaacgggaacggctggagcagctctttgaaatggccgaccagtaccagtaccaggtggtgctggtggagcccaagacggcgtggcggctggactgtgcccagctcaaggagaagaaccagtggcagctgtcggctgatgacctgaagaagctgaagcctgggctggagaaggacttcctgccgctctacttcggctggttcctgaccaagaagagctctgagaccctccgcaaagccggccaggtcttcctggaagagctggggaaccacaaggccttcaagaaggagctgcgacaattcgtccctggggatgagcccagggagaagatggacttggtcacctactttggaaagagacccccaggcgtgctgcattgcacaaccaagttttgtgactacgggaaggctcccggggcagaggagtacgctcaacaagatgtgttaaagaaatcttactccaaggccttcacgctgaccatctctgccctctttgtgacacccaagacgactggggcccgggtggagttaagcgagcagcaactgcagttgtggccgagtgatgtggacaagctgtcacccactgacaacctgccgcgggggagccgcgcccacatcaccctcggctgtgcagctgacgtagaggccgtgcagacgggccttgacctcttagagattctgcggcaggagaaggggggcagccgaggcgaggaggtgggcgagctaagccggggcaagctctattccttgggcaatgggcgctggatgctgaccctggccaagaacatggaggtcagggccatcttcacggggtactacgggaaaggcaaacctgtgcccacgcaaggtagccggaaggggggcgccttgcagtcctgcaccatcatatgagtgttctcaccaccacttatgcccctagaagggaaggggagagggaaacgtgccctctgtttgatccttgttttgtgacattttttttttttttttttttactcaaagttaacctacctgtaactttttaaaaacttgtaaaataactgaccctcccttcctgtccgccctcttcccctctaatgctcacgctcccaacacaaggtgggcagggaggcaccattcaggaacctggaccaaagctgacgaggctgggccaagccagggatggggccacagccagaaccccgagccctacttccaggttctggttagctcagccccagcccagcccagctgctctgcccagagctgggtgagtggggagacacctcagagccccgcaaaacccactgaccggaggcaaaaggcagtggggctgggggtagttttccatggtcacagagaactagtggtggctctgagaaggggaggacctctgggctttgattccatctccttgtcttttttctttgtttttagagacagggtcctgctatttcccaagctggagtgcagtggtgcgatcatggctcactgcagcctcgaactcctgggctcaagcaatcctcctgagtgatcccatttcttaatcagtgtagccccaagaaggctggggctatttaccagggttaagggctcccggagggttaagggctcccggagggttaagggctcccggagggttaagggctcccggagggttaagggctcccggagggttaagggctcccggagggttaagggctcccggagggttaagggctcccggagggttaagggctcccgggggttaagggctcccggagggttaagggctcccggagggttaagggctcccggcgggttaagggctcccggagggttaagggctcccggagggttaagggctcccgg

SEQ ID NO: 500562 - DNA, 160 bp, Homo sapiens
gcaaacccactccaccttaccaccagacaaccttagccaaaccaatttacccaaataaagttataggcgataaaaattgtaaacctggcggcaatagtatatagttaccgccaagggaaagatgtaaaaattataaccaagccataatatagcaaggact

SEQ ID NO: 500563 - DNA, 135 bp, Homo sapiens
ggagtgacagagagaagggtggttacggagaatgaagaaagcctgaagtataaggaatctcagaccatttgtcattgcgagtggcaaaagttgtctaagtctctaagtatattgaacatcgaaagtgccatttat

SEQ ID NO: 500564 - DNA, 1985 bp, Homo sapiens
aagcggcacgaggctcgggttgtgccaccgctggactcccgtgtccctccgcgcaggcgggcggccccggagcgctggtgccggcagaggcggcgacggtggcgcccctcctcatcatgtcgtccctggggatgagcccagggagaagatggacttggtcacctactttggaaagagacccccaggcgtgctgcattgcacaaccaagttttgtgactacgggaaggctcccggggcagaggagtacgctcaacaagatgtgttaaagaaatcttactccaaggccttcacgctgaccatctctgccctctttgtgacacccaagacgactggggcccgggtggagttaagcgagcagcaactgcagttgtggccgagtgatgtggacaagctgtcacccactgacaacctgccgcgggggagccgcgcccacatcaccctcggctgtgcagctgacgtagaggccgtgcagacgggccttgacctcttagagattctgcggcaggagaaggggggcagccgaggcgaggaggtgggcgagctaagccggggcaagctctattccttgggcaatgggcgctggatgctgaccctggccaagaacatggaggtcagggccatcttcacggggtactacgggaaaggcaaacctgtgcccacgcaaggtagccggaaggggggcgccttgcagtcctgcaccatcatatgagtgttctcaccaccacttatgcccctagaagggaaggggagagggaaacgtgccctctgtttgatccttgttttgtgacattttttttttttttttttttactcaaagttaacctacctgtaactttttaaaaacttgtaaaataactgaccctcccttcctgtccgccctcttcccctctaatgctcacgctcccaacacaaggtgggcagggaggcaccattcaggaacctggaccaaagctgacgaggctgggccaagccagggatggggccacagccagaaccccgagccctacttccaggttctggttagctcagccccagcccagcccagctgctctgcccagagctgggtgagtggggagacacctcagagccccgcaaaacccactgaccggaggcaaaaggcagtggggctgggggtagttttccatggtcacagagaactagtggtggctctgagaaggggaggacctctgggctttgattccatctccttgtcttttttctttgtttttagagacagggtcctgctatttcccaagctggagtgcagtggtgcgatcatggctcactgcagcctcgaactcctgggctcaagcaatcctcctgagtgatcccatttcttaatcagtgtagccccaagaaggctggggctatttaccagggtagaaaaaggagcttacctcccacctttggtcctaagtccctgccccctccccttcacaccataactaggtaacagtttgataactagggaagaaagcagaacagttaagcagccgccacatccccgctggctgggggcctcactccaggaaggggctggactggctgtcctttccagtggcctggctccgctgtgtggatggggagatcggggccagaggcagaaccctggtgaggaagctccagtcctgctctctacccagcccatcttgcctccatggtgcctctggaggcctctgggcctcctctaacaggggctggtgggcaccaagagccaatggagtagacccctggctggtaagggccaagtcccaccggttgcttctgggaaggggtttctaacactagtctgtgtgctgtggttcctggggtgccctccactgccctctgttcagtaacagggccttgctaatcgggttgtcactcaacaaaagtgctttggatttaagttactatcctggctttgcccaacctcagcaacctgtaagactgataatgaaataaatcatgttaatcctaaaaaaaaaaaaaaaaaaaaaaaaaaa

SEQ ID NO: 500565 - DNA, 403 bp, Homo sapiens
agggattaatccgggaacaggctttcctcagagacaggcctcaagttcggaggggcaagcccatacatctggtaagcagacttctagcaggtacctgatgactgcgggaggaaggggatgcatgggtgtccccatctgtccctggtgagaagcaaggctagctctgccttccacatgcttctcaggatgccaagaggcctaggaacccagaaacccccttgtgaggagctgtgtactgctggggtgcagggcagggcatagctcctgccccctggcctaggcatgctgcttgctcggccatccccagttcctcctctaccccaacgcttgctggcttaggccttgccctggaacatggaggccctgcccgggcctggggcctagtccagcagccaccaaagtc

SEQ ID NO: 500566 - DNA, 235 bp, Homo sapiens
cgatttcccatacagagtactcccacgcttcacttctttgatcaccaccactgagtccacctcacacagtcccccaaggcttcacttctgtgatcaccaccacgaggggatcacctcacacagtactcccagttttcacttctttgattcgccaccactgaagaacacctcatacgcgtactcccaggcttccgcgttcatcgactcagaagcagacagaggaccactctcacag

SEQ ID NO: 500567 - DNA, 2148 bp, Homo sapiens
aggctggtcttgaattcctgaccttgtgatccacccacctcggctcccagagtgctgggattacaggtgtgaaccaccgcacctggcctgagaattttaactttttattgctctaaagttgccattagtttgaccaactaaccaatgaatgagctgtagtgggttgctggagaggtgatgcttagtgtccgagtgttttgcactgggcctcggtggtcctggtggcggatgttggtatgcccctgctcccctgccctgactgcacccgttttctcccggcagtcgtccctggggatgagcccagggagaagatggacttggtcacctactttggaaagagacccccaggcgtgctgcattgcacaaccaagttttgtgactacgggaaggctcccggggcagaggagtacgctcaacaagatgtgttaaagaaatcttactccaaggccttcacgctgaccatctctgccctctttgtgacacccaagacgactggggcccgggtggagttaagcgagcagcaactgcagttgtggccgagtgatgtggacaagctgtcacccactgacaacctgccgcgggggagccgcgcccacatcaccctcggctgtgcagctgacgtagaggccgtgcagacgggccttgacctcttagagattctgcggcaggagaaggggggcagccgaggcgaggaggtgggcgagctaagccggggcaagctctattccttgggcaatgggcgctggatgctgaccctggccaagaacatggaggtcagggccatcttcacggggtactacgggaaaggcaaacctgtgcccacgcaaggtagccggaaggggggcgccttgcagtcctgcaccatcatatgagtgttctcaccaccacttatgcccctagaagggaaggggagagggaaacgtgccctctgtttgatccttgttttgtgacattttttttttttttttttttactcaaagttaacctacctgtaactttttaaaaacttgtaaaataactgaccctcccttcctgtccgccctcttcccctctaatgctcacgctcccaacacaaggtgggcagggaggcaccattcaggaacctggaccaaagctgacgaggctgggccaagccagggatggggccacagccagaaccccgagccctacttccaggttctggttagctcagccccagcccagcccagctgctctgcccagagctgggtgagtggggagacacctcagagccccgcaaaacccactgaccggaggcaaaaggcagtggggctgggggtagttttccatggtcacagagaactagtggtggctctgagaaggggaggacctctgggctttgattccatctccttgtcttttttctttgtttttagagacagggtcctgctatttcccaagctggagtgcagtggtgcgatcatggctcactgcagcctcgaactcctgggctcaagcaatcctcctgagtgatcccatttcttaatcagtgtagccccaagaaggctggggctatttaccagggtagaaaaaggagcttacctcccacctttggtcctaagtccctgccccctccccttcacaccataactaggtaacagtttgataactagggaagaaagcagaacagttaagcagccgccacatccccgctggctgggggcctcactccaggaaggggctggactggctgtcctttccagtggcctggctccgctgtgtggatggggagatcggggccagaggcagaaccctggtgaggaagctccagtcctgctctctacccagcccatcttgcctccatggtgcctctggaggcctctgggcctcctctaacaggggctggtgggcaccaagagccaatggagtagacccctggctggtaagggccaagtcccaccggttgcttctgggaaggggtttctaacactagtctgtgtgctgtggttcctggggtgccctccactgccctctgttcagtaacagggccttgctaatcgggttgtcactcaacaaaagtgctttggatttaagttactatcctggctttgcccaacctcagcaacctgtaagactgataatgaaataaatcatgttaatcctaaaaaaaaaaaaaaaaaaaaaaaaaaa

SEQ ID NO: 500568 - DNA, 306 bp, Homo sapiens
gctgctagcggaccttcgtaatatgtacacacctaaacagacctttttcaagataatgactgactctctccaggatcatttaaattccaaagagaactacctacaagttaattctgtccctgatcagtcattctccctagcaatcatttattacccctcatctaatctaatcccaaagcctaaatctaataaaatacttctaaaatctgcgaccctaatggcctcccacactcaagcattccacttactttgtactttagagaggcctaaattttgttacactagaggcacagctaatagatgttt

SEQ ID NO: 500569 - DNA, 2149 bp, Homo sapiens
aagcggcacgaggctcgggttgtgccaccgctggactcccgtgtccctccgcgcaggcgggcggccccggagcgctggtgccggcagaggcggcgacggtggcgcccctcctcatcatgaacagaggcttctcccgaaaaagccacacattcctgcccaagatcttcttccgcaagatgtcatcctcaggggccaaggacaagcctgagctgcagtttcccttccttcaggatgaggacacagtggccacgctgctagagtgcaagacgctcttcatcttgcgcggcctgccaggaagcggcaagtccacgctggcacgggtcatcgtggacaagtaccgtgatggcaccaagatggtgtcggctgacgcttacaagatcacccccggcgctcgaggagccttctccgaggagtacaagcggctcgatgaggacctggctgcctactgccgccgccgggacatcagaattcttgtgcttgatgacaccaaccacgaacgggaacggctggagcagctctttgaaatggccgaccagtaccagtaccaggtggtgctggtggagcccaagacggcgtggcggctggactgtgcccagctcaaggagaagaaccagtggcagctgtcggctgatgacctgaagaagctgaagcctgggctggagaaggacttcctgccgctctacttcggctggttcctgaccaagaagagctctgagaccctccgcaaagccggccaggtcttcctggaagagctggggaaccacaaggccttcaagaaggagctgcgacaattcgtccctggggatgagcccagggagaagatggacttggtcacctactttggaaagagacccccaggcgtgctgcattgcacaaccaagttttgtgactacgggaaggctcccggggcagaggagtacgctcaacaagatgtgttaaagaaatcttactccaaggccttcacgctgaccatctctgccctctttgtgacacccaagacgactggggcccgggtggagttaagcgagcagcaactgcagttgtggccgagtgatgtggacaagctgtcacccactgacaacctgccgcgggggagccgcgcccacatcaccctcggctgtgcagctgacgtagaggccgtgcagacgggccttgacctcttagagattctgcggcaggagaaggggggcagccgaggcgaggaggtgggcgagctaagccggggcaagctctattccttgggcaatgggcgctggatgctgaccctggccaagaacatggaggtcagggccatcttcacggggtactacgggaaaggcaaacctgtgcccacgcaaggtagccggaaggggggcgccttgcagtcctgcaccatcatatgagtgttctcaccaccacttatgcccctagaagggaaggggagagggaaacgtgccctctgtttgatccttgttttgtgacattttttttttttttttttttactcaaagttaacctacctgtaactttttaaaaacttgtaaaataactgaccctcccttcctgtccgccctcttcccctctaatgctcacgctcccaacacaaggtgggcagggaggcaccattcaggaacctggaccaaagctgacgaggctgggccaagccagggatggggccacagccagaaccccgagccctacttccaggttctggttagctcagccccagcccagcccagctgctctgcccagagctgggtgagtggggagacacctcagagccccgcaaaacccactgaccggaggcaaaaggcagtggggctgggggtagttttccatggtatggtgcctctggaggcctctgggcctcctctaacaggggctggtgggcaccaagagccaatggagtagacccctggctggtaagggccaagtcccaccggttgcttctgggaaggggtttctaacactagtctgtgtgctgtggttcctggggtgccctccactgccctctgttcagtaacagggccttgctaatcgggttgtcactcaacaaaagtgctttggatttaagttactatcctggctttgcccaacctcagcaacctgtaagactgataatgaaataaatcatgttaatcctaaaaaaaaaaaaaaaaaaaaaaaaaaa

SEQ ID NO: 500570 - DNA, 1922 bp, Homo sapiens
aagcggcacgaggctcgggttgtgccaccgctggactcccgtgtccctccgcgcaggcgggcggccccggagcgctggtgccggcagaggcggcgacggtggcgcccctcctcatcatgaacagaggcttctcccgaaaaagccacacattcctgcccaagatcttcttccgcaagatgtcatcctcaggggccaaggacaagcctgagctgcagtttcccttccttcaggatgaggacacagtggccacgctgctagagtgcaagacgctcttcatcttgcgcggcctgccaggaagcggcaagtccacgctggcacgggtcatcgtggacaagtaccgtgatggcaccaagatggtgtcggctgacgcttacaagatcacccccggcgctcgaggagccttctccgaggagtacaagcggctcgatgaggacctggctgcctactgccgccgccgggacatcagaattcttgtgcttgatgacaccaaccacgaacgggaacggctggagcagctctttgaaatggccgaccagtaccagtaccaggtggtgctggtggagcccaagacggcgtggcggctggactgtgcccagctcaaggagaagaaccagtggcagctgtcggctgatgacctgaagaagctgaagcctgggctggagaaggacttcctgccgctctacttcggctggttcctgaccaagaagagctctgagaccctccgcaaagccggccaggtcttcctggaagagctggggaaccacaaggccttcaagaaggagctgcgacaattcgtccctggggatgagcccagggagaagatggacttggtcacctactttggaaagagacccccaggcgtgctgcattgcacaaccaagttttgtgactacgggaaggctcccggggcagaggagtacgctcaacaagatgtgttaaagaaatcttactccaaggccttcacgctgaccatctctgccctctttgtgacacccaagacgactggggcccgggtggagttaagcgagcagcaactgcagttgtggccgagtgatgtggacaagctgtcacccactgacaacctgccgcgggggagccgcgcccacatcaccctcggctgtgcagctgacgtagaggccgtgcagacgggccttgacctcttagagattctgcggcaggagaaggggggcagccgaggcgaggaggtgggcgagctaagccggggcaagctctattccttgggcaatgggcgctggatgctgaccctggccaagaacatggaggtcagggccatcttcacggggtactacgggaaaggcaaacctgtgcccacgcaaggtagccggaaggggggcgccttgcagtcctgcaccatcatatgagtgttctcaccaccacttatgcccctagaagggaaggggagagggaaacgtgccctctgtttgatccttgttttgtgacattttttttttttttttttttactcaaagttaacctacctgtaactttttaaaaacttgtaaaataactgaccctcccttcctgtccgccctcttcccctctaatgctcacgctcccaacacaaggtgggcagggaggcaccattcaggaacctggaccaaagctgacgaggctgggccaagccagggatggggccacagccagaaccccgagccctacttccaggttctggttagctcagccccagcccagcccagctgctctgcccagagctgggtgagtggggagacacctcactgccctctgttcagtaacagggccttgctaatcgggttgtcactcaacaaaagtgctttggatttaagttactatcctggctttgcccaacctcagcaacctgtaagactgataatgaaataaatcatgttaatcctaaaaaaaaaaaaaaaaaaaaaaaaaaa

SEQ ID NO: 500571 - DNA, 674 bp, Homo sapiens
  misc_feature (93)..(99): n is a, c, g, or t
  misc_feature (106)..(106): n is a, c, g, or t
  misc_feature (108)..(108): n is a, c, g, or t
  misc_feature (110)..(110): n is a, c, g, or t
cagcctccgacccaggtggtctggagcctgccgggagagtggtggcatctgagaggctggtcgtggactgtggttgggggaggtgggagctgnnnnnnncgtgtgncncntctcctgtgccggcgtgggcatcccccggggcagtggaacgcgggcgctcctccagcttccgagtccagccagcctggcgcggggcgcccccgagacacccgaggagtccgttcctccctggttacgtggactgtggatgctggtctcttgtggcctcagcgccgtgcggaggttgaatgcgtacctgcggaggtcgcatcgcagtgccgtgagcgaggaggaggaagggccatgagccgagtcttgcaggaatccgatgctccaaagctctacactcaagggtggcccttgggttagggtgaagatcccctgtctttatcctagattccacaccttggtgtgggttactgggtgcaggatgaactgtcgctcgagaggtgctggaggtagtcggttgcgagggtgcgggcatgtgcgaggaggccatgctggctgtgctgcacacggtgcttctgcaaccggacacaggcaagttccactacaaggaagtgagggccacctactccattggcaccgtggggcacccaggattgttgactgtgacttcatcgattcacttatgg

SEQ ID NO: 500572 - DNA, 435 bp, Homo sapiens
catgaaaatgttttgtgcttcatactcacaagtgcaattgtgttaattctgcaaaatttgccgcataactctgcctgtattcttagcatttttcctttgagagatttctcagcacatcatctttggactatgtggaattggaaatttacttagagtcaacaacaagtacaggaaagtcagttcttagtcaagagttaggtttccaaagacagtggataaaataaaaaattaacatttgatgtacagttaagattatacgtgcaaatcccctcatcattcataaagtttagcagtcagtcttaccgtggctcaccaggtccaatccatacttcttcctccacgattggagcagagggtgattttttttctgagcaactgatgaagtcatttagagaccatttgcagtagaaaccatgtgtactagagaccaatcat

SEQ ID NO: 500573 - DNA, 581 bp, Homo sapiens
tggggctggagcaatcctcccttctgtgcctcccataataaagtgctgcgattacaggtgttagccactgtgcccagccgccaaatttttagctttttaactcgtaataacatggcttcacaagcacactgtagagctgtacctttttttttgagacagagccttgctctgtcacctaggcttgagtgtactgccgtggtcttgactcgctgcaacctgcgcctcctgggttcgcctgattctactgtctcagactcctgagtgtcttaatttgcagacatctgccaccaggcccaggtactttttgaatttcagactagaatgaggagtcctgttagtctggatgcaggacgatcaggactgcactacggttgcctgccgcagagtcatactgtatcactttcttccatcagtttagcggccgccacctatattactcctgctgcactaatctattatgcggcgtgatatcctagttcccttcctttatctggattctatatatcgcgtccgctccattaacagcccagacctacacctccatctgggcaactggggacgtttactcacctctcttgtcc

SEQ ID NO: 500574 - DNA, 495 bp, Homo sapiens
  misc_feature (37)..(37): n is a, c, g, or t
  misc_feature (62)..(62): n is a, c, g, or t
  misc_feature (65)..(65): n is a, c, g, or t
  misc_feature (68)..(69): n is a, c, g, or t
  misc_feature (72)..(73): n is a, c, g, or t
  misc_feature (75)..(75): n is a, c, g, or t
  misc_feature (90)..(90): n is a, c, g, or t
  misc_feature (96)..(96): n is a, c, g, or t
  misc_feature (98)..(98): n is a, c, g, or t
  misc_feature (115)..(116): n is a, c, g, or t
  misc_feature (168)..(169): n is a, c, g, or t
  misc_feature (182)..(182): n is a, c, g, or t
  misc_feature (188)..(189): n is a, c, g, or t
  misc_feature (213)..(213): n is a, c, g, or t
  misc_feature (215)..(215): n is a, c, g, or t
  misc_feature (217)..(217): n is a, c, g, or t
  misc_feature (258)..(258): n is a, c, g, or t
  misc_feature (279)..(279): n is a, c, g, or t
  misc_feature (490)..(490): n is a, c, g, or t
tccaaaactttgaaggctttaagcgttaaagtgggtntggggcgggggggtgtggggttccntcnttnnttnncncttcctgtggggttngttggngngtccccggcgggggggnnggccccgggggggtgggggggggggggggccggggggggggggggcgggggnntccccggggggtnggcggnnggtgtgggtgtgagcgggggggcngngnccccttggggttttccgggtgggatggggagtgggaacgangcattcctgtgtagtcttcanccaattccaagtcaagtagaggcagggaaagcagggtgacaggccgggtgtgcggaaaggagaagcgggtcttctgggtccctgtggtcagggagaacccgcttcctcagctcctggacgaagcttcaatgatttcctctttcactttctgcaattccttcttcacctcttccagaagctcctgtttcaccctctgtaggtccgagtaatnactgg

SEQ ID NO: 500575 - DNA, 150 bp, Homo sapiens
tgttacgatgccagtaccgatctaaaagtatctccagtgaatatggctcatcatccattatactttgcatggcatatatatcactggcaagactcgggtccttaaaacggaaagcagtccttgacctcgaaatgctgtaagtcatgtggc

SEQ ID NO: 500576 - DNA, 193 bp, Homo sapiens
  misc_feature (168)..(168): n is a, c, g, or t
ccttcattaaaagtatcatttacaggtattgacattcacagggagtatactaactaaacctagactggagaaatgcataaattcacgctttgcaaccctcatcccacccccgctgcctcttggcctctcctgtgaacacatccttcccctcttccctctgcttcctantccatctttcactgctggttcttcc

SEQ ID NO: 500577 - DNA, 342 bp, Homo sapiens
cacgattctttgctatgtagcaatagtaactgcaacagagtatgagagtcaaagatatttgtatcaatatgaattgagattaattatccaaaatatttcaatcatctacagaatagatgtttgaaagttcacaatactctggaataaaatattttctacataatgtaaagcaaagcattatttgcaaacgtgtaaatacatattgtcccatgagaggttttccattataacttcagagtaattaaacatacaaagaccaatcccttgctaatctttctgttcaaattgcttaattatgagagcttctgtgttcattgtaagacagaaagataagcgggtacc

SEQ ID NO: 500578 - DNA, 653 bp, Homo sapiens
tgcgtgtgggtagatggatacagaatgatctcctacccacacctccagccagaaggaattattcagactgtggagggggagaagggagaggatgtggccagggacgaggggtcagggagcccagaggatgcagcaggactggctgtaaggattcaatgctggaaatggaaagcactgtatgaattttaagcagcaaatgaattaaaactgaaaacttagatggttgcaaaactgtgggagggctggagaagggcagtcaggggcagccctggactttggtttggaaggtcatgcctgttgatatgactcagatgtgcggaagctgctgctgccactggaattgccacatacctgtgaacctggtagagcagatgctagggccgctccagctgcagctcggtggctaccacctctcttcctccttccccacctcatgggggcatgtttacctatagaacctcattcatagcccagatcctagctgcaaaggagtctgggaaagatgactgcttagctttccaacttccctctgacagaataagattcttaacctgggagtgagtgtcccagaggcccaggagagcactcagggcccctccaagaacctgcctcgacattcaaccagtaggccaaaccctaggggcttgcttgta

SEQ ID NO: 500579 - DNA, 822 bp, Homo sapiens
gagagataccagatccagtcgtacgatgattgccacaaaggaaatttattagaaagagaagctaagcaccatgatttagcgctggaaaggataacgcctaggtactgtgacaaatgcaggttgtgttacgatcaggactacacatatctgtaaactgttaaaccccaccgccttgaagcaggaagaagaagaagagaaggaacaacagctgacagtctaaaggttgtatagcaagaagtcctagacaactgagaacccgtttttctggatgggtgctgtcaatgctccgtccctaaagtcaggaagtagcttgctagtaagacactacctttgaaagtcctttgtgatacgtggacgagatgcccctggggcagctagaacgccatacacattcaagggcaaagcgagtgaagtggtctctgtgctcccaaactacaatcatctttaattcaggagataacgggggtcataaggactttttagatccattacacacagtactctggaaaggactgtcaatactgtgaaagagaaccccaagagagaacattatgaacagtctggaaggaatgacttatgccatgcccactgaaaatgcccatcatggttacagaaaaagctgtgaaaggccaagcaagcccaaaacaaaaatccgggggcaggggaacacccggcgccgactgttggtggccataactttcataggattacaaaacgaaggtcacatcaagggacaatcctgaaacacgatgtgcggactgtgggcaaaaaaaagtgggggtgtgcacagggcgtcaagacacacttccagcagccaacaac

SEQ ID NO: 500580 - DNA, 1021 bp, Homo sapiens
tgtgttatttaccgactctaaactaagtccaagaaacagaactatatagcagaatacatgcgcacgcgctagcgctttaaacataatttctaaattcgttccctccagtgctccgaccacaagtatttgtaattacaaattgttgatatttcacggtccatcgctccactcccagtgtcaattacccctccatccgggattgtacacagctcccaacactcggttggcgcgctcaaaagaatgccgtggtccgtgatgtcccacagggcaagttaactcatgcagccgccccagctatttctcctacctaggggccgccctcgggtttcctcgaccacccaagtgtcgtccggctcccgattgcgccccgtgggtgctctggttgcttcccagggcacgcccctggtcagagccatctggtgtttcacactctcctccaggtggccatagagagctctccccgtgcttggttgcagggttctagcccccttcacaaggcaggggggctcctttctttcacacaagaaggcggagtgtgccgccccctgtatgtggtcgccttcgctcgctctttcaaatggtcagcaagccttgaacccccctcctggtcctcctggtcgcgcgccccatttacatatgtgtgacgcaatgttttctccccggccattccttcaggagggggagtatgtgagtgggcttgcgtactccgagaaagtacgccgctggccctgtctttcgccgccttctgtatggccccccggttatcctcctctctcgcgttcagcttctctctattgcgcgccttctgggtgacccctctcctcagctatgcatcctgggtgttgatgatgtactccctcttttaggatgacccacaggggatccagaacccccacgcatgcgccttcctcctagccagcccctgtttctatggggggtagtcagggaggggccacacacattttggggggaaggtcggggcacacccaatacaagcaggaacccccccgacatgaacaaa

SEQ ID NO: 500581 - DNA, 774 bp, Homo sapiens
gatttgccgaggacaccaaggggctaagtctccgagagtgcgaggggacaaatcgcgccaaaatggtcagaaaaaccaagggccacatcgccaagcagcaagtagccgaggacaccgacggcgacaaaatccggcctcaattgggtgagcacccccggggtgctgtagatgccccacgaaggggcgccacacccgcgtgcccactcttccatgggaagccccataaaggaggggccagaggccgcgcccaattctgggagagggatctctatacacgccgagcggggccagccaacacgcgctatgatcacgcgacgtgaacacggccggcgaggagaccatcgtcctcgcaaggcaaccctcgctagtaaggctcgcctcctcaagtccccgctggttccaggcctgttgctcagcagtcgcactcacacagggtcccacagaccatgccacgaagagtcggcggaagtgaatacagagggtcacaagagaactcttctgagagagtagtactccggatctcacagaagtagtctccagcaccgtccgccgcgcccacaggaggggtaccaccccaggtgcaatcctgctcgagtccatgggcgcccgggcgaggccacaaatggtcctctccaggggacagcagggagcgacaacctggcatcgcgctttagagcgcactgagccaccaacgggcccctcggtgcacagcctctatgtggcagtgttagacgagaagaaaaaaaaacaacacggccacaacaatgccagaca

SEQ ID NO: 500582 - DNA, 658 bp, Homo sapiens
  misc_feature (619)..(620): n is a, c, g, or t
  misc_feature (647)..(647): n is a, c, g, or t
ccttgaaagcaaaacctttttggacccccaattgttcccggggccccccccgggggagagagaaaacccccccgcctttaaaaaaacccttttttcccccccccccggggggttttgggggttttttttttttaaacaccgggggtcttttttaaaaatttcggcggcggtgttttttttggggggggggcgccccttttctttttgggaggagaaaatattccccccccccccaccccccccccgggggggggagggagggagaaattttttgtgtgtttcccccccccccagggggaggtgttttttttttttttggtgacaaccccccccctcccccccccccagaggaggggggcccccccctcattatttttttttttttaaaaaaaaaaaaagggcggcgggggtgtttttgtttcccccccccccccccttttaatttttaaatataataaaaaaaaaaaagggggggggggggggggaccaccccccctccttctcttttttttttgtgggggggggggggggggagggtttttttttttttattataaacaccccccccccccctcttttttttttgggggggggggggggggaagaaaaaaaaaccccnncccccccacaattttttttttgggggntagggggggag

SEQ ID NO: 500583 - DNA, 933 bp, Homo sapiens
atgtggtataacaacagtgctggccccttcttgctgactggcttcttgggctcagaggcagttcactaccggatctctatgtccttctttgtcatctacttctccatcctttttggaaatggcactcttcttgtcctcatttggaatgatcacagcctccatgagcccatgtactacttcctggctatgctggcagacacggaccttgggatgacattcactacaatgcccacagtcctgggtgtcctgctgctagaccagagggagattgcccatgctgcctgtttcacccaatccttcattcattcactggccattgtagaatcaggtatcttgcttgttttggcctatgactgtttcattgccatccgcacaccactgaggtacaactgcattcttaccaattcccgagtgatgaacataggactgggggtactgatgagaggttttatgtccattttgcccataattctttcactctactgctacccatattgtggttcccgtgccctcttgcacacattttgcctccatcaagatgtcataaaactcgcctgtgctgatatcacgtttaatcacatatatccaattattcagacttctttgactgtctttttagatgctctaatcatcatcttttcttatatactaatccttaagacagtgatgggcattgcgtctggacaagaggaagctaaatctctcaacacttgtgtctcccatattagctgtgtcctagtatttcacatcactgtgatgggactgtcattcattcacaggtttgggaaacatgcacctcatgtggtccccattaccatgagctatgtccattttctctttcctccattcgtgaatcctatcatttatagcatcaagaccaagcagattcaaagaagcattattcgcctattttctgggcagagtagggcttga

SEQ ID NO: 500584 - DNA, 296 bp, Homo sapiens
ccagaagctgactcttcccttctgtgtactctccctaaatctggcagtttataaatacttaaattaccccagtgtatattttaaaattcagttttctttttcttcttttagacggagttacgctcttgtagcccagggtggaatgtacatggcgtgatctcagctcaccacaacctctgcctcacgggttcaagcaattctcctgcctcagcctcccaagtagctgggattacaggtatgcaccatgcctaattttgtatttttagtagagatggggtttctccacattggtcagg

SEQ ID NO: 500585 - DNA, 183 bp, Homo sapiens
agggggcccccccccccccccccccccccccctccccctttgggggggggggggccccccggggggggccccgggggaaagcccccccctggctttgggcccccccccccaaggggggtttttggggccctttttttttaaattcgggcccgttttggggttttttttccccttttaggggga

SEQ ID NO: 500586 - DNA, 820 bp, Homo sapiens
agtatgtgctgactctaaaacgttcggagctccgtgaactcagacatcatgaattgcgtttctttgtactatggatattgaagtctctactttctatgctcttctattatgcctctcaatcaacatgtgtagcatagtgttcagttgacctaacatgcatcacacatgcatgccaatcattagcatgtaagatgattccgcagacttattgtctcacacatacctgtggaaagttgcagagtgtcgctgtctacttaattaatccaaagtgagactaggatctacattcacttagtgcatgcactttccttacaatcaagacttaaagaaaacgacaacatcattcaggacagctcatcaactagactctgatttcaatagacgagatcctatacatcaactcttgatatcactccactgtaatgtagatctattctaggaagcaaatacttaatggactgagacgtcgtggcttaaccttcgaagttcacaagcgaaacatgatttagacgtacatggatggaaaactactgcaaggcgactcaggatatattaacgatattgtactcaagcataattcgtaatatcttgcatagcataactagtgtactcttcacaattattgatcaacgattcgtttataccttgacatactaggaatgagtttgacccaagacattgaaagtgagcagctgccatgcgaacccttgacaattgaccacggtgtcaaatcctctgtatatcactggaaaagaattcgtcatggacattgacacatatggcgacatactcagactatgccttactctataaatccttg

SEQ ID NO: 500587 - DNA, 177 bp, Homo sapiens
cgagccggtaactagtacggcgcagatgctggactatcggcttaggcaggtcagaaaggtccagggctctgagaagggagtgtgagccacgatgcgatcctaatataacgcggtatagctagcgcgctatagagcaagatagaggcttggataacaggtagaacaatagaaaacaac

SEQ ID NO: 500588 - DNA, 263 bp, Homo sapiens
caagtcacaaacagggccttgtctagagctgacattgaacacagatgggtgcgtattatttatcttctggatggcagagaatagtaacagttcggagcaccaatgggaacattgcttcctgagagttcaatcagcaacaaagttgcatgggtgagctaagtgtgtatcatgcgaatatgttatattagcggacattaatacaaatctagagtgcgacataacatctttgaattttatattctcacttaacaaatattggacta

SEQ ID NO: 500589 - DNA, 1063 bp, Homo sapiens
ctgttcgcctccgtgctttagcacgtgctacactcctctcagcggcgctaggggctgccgctcagcttcttcaactcacgctggcacacaccttgtactagctgaacactgtctctacactgctgcggaaacactcctgccttacgacaacatctaccaaacgtacaactcgctgctcctctctcatagcccgggaagtggctaccagagcagcaaactggcacaccttagacttcggcaaccaacaagtcctgtaaaccgtggctctggttgtgccacaagtggaacacctggcatgcactacaggacgcctgcaagaacggccccacagaacgcggcactctggtgcgctggcgttacttctcacttctggcctggtggggccaacatctttcttggcgtgcaacacttaccacactgcggtcgcgtgctgcgggctcgacaaccacggactcgcactctcacaccttacacctcgctcttaccacggcacccaaaccaaccaacacaacacacacaacacaccacacacacccacaccacacttgtgcgctcgggcacacgcgcccacagacgacgcccctcacagacagacacgggcttctacagagcaccactctccggcgtgaggaggcgcagcggggcgcccacaaagtagcgcaaaaagacagcaccacgtggggccacaatacccggtggcccacaaagagagagaaccactccgggggcgacaacatccgcagaccaacgaacgggcgcccggcgcgacactcctcctcccacacccagccaacatatcacaaaacaaaaccggcggcgcccgggggggggggaccaacaccaccggcagacagcggttgttgtgtgagagacgaaaaaatctcaccacaaagagtggggggagccgtgcccggcagggcagagcgagcaacgactacacagaggggggagagcatgatacataacaacacgagggggggacggctcacagaggcgaaaaggcctcagaagaaaataaaaaatacgcggaggcgcgaaccagcggagggaaggagaggaggaa

SEQ ID NO: 500590 - DNA, 846 bp, Homo sapiens
gcctggggcgagagcgggtggctgagccgggacctctcgtgagtatctcggaacccgaggagaacgcggcgtccggggctatggctgtgactctggaccacgagcgcttattatcggacgagtgaggagactgtagagtaatgggcggaaaggaaaccgcactgagtatgccaacagtcgatgccatggttcgtatcgaggtagggtgtggagtgaagaaattgtcttattgccaagattcaaagcgtggtcctctacagactatggctctttgagttagtgaactaacctgatacctatcatgtgtctctctgtgtgatcgacaaagatcaatcttctattgtggccagcgatacgtacagaacgtggagttcttgaacagcagagttggccaaccaactaaggggccaagtgagaactgctgaagtggcaggcccctggccgagtcacacgtggctcggtacgagtaaaggaatgacaaggtaagtaacgtagtacggcttttgatcagaaccactgcagttgaaggcccagttaaaagcatagaaggcgaatgaatgggcgggagaggatggcgacggtgtgcagggaagggacaccatttccctggtagcagttgcatggaaggccgctcggcaatggacttggctcaacaaaagaaggctttggacgggaatagataatcggcgcagtaagtggtgatatacgcatcgctgtgaaccggagtgctgggggagccccacggctaattgaagagaatgccatggcaagcatcatttctgacgccttccaacggtattcttcctggaaccgtagtccaaggaaagacttggatgccggtgacaa

SEQ ID NO: 500591 - DNA, 1696 bp, Homo sapiens
aagcggcacgaggctcgggttgtgccaccgctggactcccgtgtccctccgcgcaggcgggcggccccggagcgctggtgccggcagaggcggcgacggtggcgcccctcctcatcatgaacagaggcttctcccgaaaaagccacacattcctgcccaagatcttcttccgcaagatgtcatcctcaggggccaaggacaagcctgagctgcagtttcccttccttcaggatgaggacacagtggccacgctgctagagtgcaagacgctcttcatcttgcgcggcctgccaggaagcggcaagtccacgctggcacgggtcatcgtggacaagtaccgtgatggcaccaagatggtgtcggctgacgcttacaagatcacccccggcgctcgaggagccttctccgaggagtacaagcggctcgatgaggacctggctgcctactgccgccgccgggacatcagaattcttgtgcttgatgacaccaaccacgaacgggaacggctggagcagctctttgaaatggccgaccagtaccagtaccaggtggtgctggtggagcccaagacggcgtggcggctggactgtgcccagctcaaggagaagaaccagtggcagctgtcggctgatgacctgaagaagctgaagcctgggctggagaaggacttcctgccgctctacttcggctggttcctgaccaagaagagctctgagaccctccgcaaagccggccaggtcttcctggaagagctggggaaccacaaggccttcaagaaggagctgcgacaattcgtccctggggatgagcccagggagaagatggacttggtcacctactttggaaagagacccccaggcgtgctgcattgcacaaccaagttttgtgactacgggaaggctcccggggcagaggagtacgctcaacaagatgtgttaaagaaatcttactccaaggccttcacgctgaccatctctgccctctttgtgacacccaagacgactggggcccgggtggagttaagcgagcagcaactgcagttgtggccgagtgatgtggacaagctgtcacccactgacaacctgccgcgggggagccgcgcccacatcaccctcggctgtgcagctgacgtagaggccgtgcagacgggccttgacctcttagagattctgcggcaggagaaggggggcagccgaggcgaggaggtgggcgagctaagccggggcaagctctattccttgggcaatgggcgctggatgctgaccctggccaagaacatggaggtcagggccatcttcacggggtactacgggaaaggcaaacctgtgcccacgcaaggtagccggaaggggggcgccttgcagtcctgcaccatcatatgagtgttctcaccaccacttatgcccctagaagggaaggggagagggaaacgtgccctctgtttgatccttgttttgtgacattttttttttttttttttttactcaaagttaacctacctgtaactttttaaaaacttgtaaaataactgaccctcccttcctgtccgccctcttcccctctaatgctcacgctcccaacacaaggtgggcagggaggcaccattcaggaacctggaccaacctcagcaacctgtaagactgataatgaaataaatcatgttaatcctaaaaaaaaaaaaaaaaaaaaaaaaaaa

SEQ ID NO: 500592 - DNA, 312 bp, Homo sapiens
tctctagtcaatgttgacattagcatagagttttcgtacaaaggcacttgttcccatgtaaccaatcgctccacacattatccccaaggctgagctaaataccgccgtatatccaaagtaaaatgatgaccgaaataagccatacatctttgctgtgaaaaaataggtagtaaaaggaatacatgtgaacatagattgcagttgacgcagcatgcagaggttgcagtgtgctgagactgcaccactgcactccagcttaggcgacagagccagactgtgtctcaaaaacaggaaagaaaacaaaagaaaatt

SEQ ID NO: 500593 - DNA, 703 bp, Homo sapiens
  misc_feature (86)..(86): n is a, c, g, or t
  misc_feature (96)..(96): n is a, c, g, or t
  misc_feature (99)..(99): n is a, c, g, or t
  misc_feature (105)..(105): n is a, c, g, or t
  misc_feature (108)..(108): n is a, c, g, or t
  misc_feature (134)..(134): n is a, c, g, or t
  misc_feature (138)..(138): n is a, c, g, or t
  misc_feature (144)..(145): n is a, c, g, or t
  misc_feature (147)..(147): n is a, c, g, or t
  misc_feature (149)..(150): n is a, c, g, or t
  misc_feature (162)..(164): n is a, c, g, or t
  misc_feature (167)..(167): n is a, c, g, or t
  misc_feature (172)..(172): n is a, c, g, or t
  misc_feature (174)..(174): n is a, c, g, or t
  misc_feature (177)..(178): n is a, c, g, or t
  misc_feature (180)..(180): n is a, c, g, or t
  misc_feature (182)..(182): n is a, c, g, or t
  misc_feature (184)..(184): n is a, c, g, or t
  misc_feature (193)..(193): n is a, c, g, or t
  misc_feature (200)..(202): n is a, c, g, or t
  misc_feature (208)..(208): n is a, c, g, or t
  misc_feature (218)..(218): n is a, c, g, or t
  misc_feature (222)..(223): n is a, c, g, or t
  misc_feature (230)..(231): n is a, c, g, or t
  misc_feature (233)..(233): n is a, c, g, or t
  misc_feature (237)..(238): n is a, c, g, or t
  misc_feature (242)..(243): n is a, c, g, or t
  misc_feature (247)..(247): n is a, c, g, or t
  misc_feature (250)..(250): n is a, c, g, or t
  misc_feature (254)..(254): n is a, c, g, or t
  misc_feature (257)..(257): n is a, c, g, or t
  misc_feature (260)..(260): n is a, c, g, or t
  misc_feature (262)..(262): n is a, c, g, or t
  misc_feature (265)..(265): n is a, c, g, or t
  misc_feature (267)..(267): n is a, c, g, or t
  misc_feature (269)..(269): n is a, c, g, or t
  misc_feature (272)..(272): n is a, c, g, or t
  misc_feature (274)..(274): n is a, c, g, or t
  misc_feature (281)..(281): n is a, c, g, or t
  misc_feature (283)..(283): n is a, c, g, or t
  misc_feature (286)..(287): n is a, c, g, or t
  misc_feature (293)..(293): n is a, c, g, or t
  misc_feature (295)..(295): n is a, c, g, or t
  misc_feature (301)..(302): n is a, c, g, or t
  misc_feature (304)..(305): n is a, c, g, or t
  misc_feature (308)..(308): n is a, c, g, or t
  misc_feature (310)..(311): n is a, c, g, or t
  misc_feature (314)..(314): n is a, c, g, or t
  misc_feature (317)..(317): n is a, c, g, or t
  misc_feature (320)..(322): n is a, c, g, or t
  misc_feature (324)..(325): n is a, c, g, or t
  misc_feature (327)..(329): n is a, c, g, or t
  misc_feature (331)..(332): n is a, c, g, or t
  misc_feature (339)..(339): n is a, c, g, or t
  misc_feature (341)..(341): n is a, c, g, or t
  misc_feature (343)..(343): n is a, c, g, or t
  misc_feature (354)..(354): n is a, c, g, or t
  misc_feature (362)..(362): n is a, c, g, or t
  misc_feature (364)..(364): n is a, c, g, or t
  misc_feature (370)..(371): n is a, c, g, or t
  misc_feature (375)..(377): n is a, c, g, or t
  misc_feature (388)..(388): n is a, c, g, or t
  misc_feature (392)..(392): n is a, c, g, or t
  misc_feature (399)..(399): n is a, c, g, or t
  misc_feature (403)..(403): n is a, c, g, or t
  misc_feature (409)..(410): n is a, c, g, or t
  misc_feature (415)..(415): n is a, c, g, or t
  misc_feature (424)..(424): n is a, c, g, or t
  misc_feature (431)..(431): n is a, c, g, or t
  misc_feature (437)..(437): n is a, c, g, or t
  misc_feature (439)..(439): n is a, c, g, or t
  misc_feature (442)..(442): n is a, c, g, or t
  misc_feature (449)..(449): n is a, c, g, or t
  misc_feature (459)..(459): n is a, c, g, or t
  misc_feature (461)..(461): n is a, c, g, or t
  misc_feature (466)..(467): n is a, c, g, or t
  misc_feature (469)..(470): n is a, c, g, or t
  misc_feature (472)..(472): n is a, c, g, or t
  misc_feature (475)..(475): n is a, c, g, or t
  misc_feature (477)..(478): n is a, c, g, or t
  misc_feature (481)..(481): n is a, c, g, or t
  misc_feature (483)..(484): n is a, c, g, or t
  misc_feature (489)..(489): n is a, c, g, or t
  misc_feature (520)..(520): n is a, c, g, or t
  misc_feature (527)..(527): n is a, c, g, or t
  misc_feature (531)..(531): n is a, c, g, or t
  misc_feature (533)..(533): n is a, c, g, or t
  misc_feature (543)..(543): n is a, c, g, or t
  misc_feature (550)..(551): n is a, c, g, or t
  misc_feature (555)..(555): n is a, c, g, or t
  misc_feature (580)..(580): n is a, c, g, or t
  misc_feature (598)..(598): n is a, c, g, or t
  misc_feature (608)..(608): n is a, c, g, or t
  misc_feature (613)..(613): n is a, c, g, or t
  misc_feature (696)..(696): n is a, c, g, or t
agccagttcgaaccccgctcccgctccgcttcggttctcgctccttcggcccttgggctccaaacaccagtccccggcagcgcgtngcgcattgcntcnccccgncancaggatgccgggaaccgagaaggatngagnggaggnngngnntgggaagaagannnagnagaanangtnnanangngggtggaangaggagnnnaagtgngtgaaggaanaganngggaagnngnaganngagnngagngangggnggnggngnagngngnggngnggggggngnagnnagaagngnaggtgnngnnagngnnagnagnggnnnanngnnngnnagaggcngngngggaatgtgtncgtggcgngngagtgnntggnnngtgagagcgtnaagngcgggtncagngatagnnaagcnattgtggangggaacntgaagngnatnttgggtntggtgtggangntgatnntnnantantnnatntnnatgcncgtgtgggaggatgaaggggatgatgatgcnaagaagnagangngaaaggaganggtggtnnggtngattgagaagaagatggggtagttngggatgaggaagtttaangagaagtggnagagnggaaaggggtgggaggggtggtagagaggtgtggtggaggtgtgtggggagagtgggaatggtgggagggggagaagggtgtngataatg

SEQ ID NO: 500594 - DNA, 1694 bp, Homo sapiens
aagcggcacgaggctcgggttgtgccaccgctggactcccgtgtccctccgcgcaggcgggcggccccggagcgctggtgccggcagaggcggcgacggtggcgcccctcctcatcatgaacagaggcttctcccgaaaaagccacacattcctgcccaagatcttcttccgcaagatgtcatcctcaggggccaaggacaagcctgagctgcagtttcccttccttcaggatgaggacacagtggccacgctgctagagtgcaagacgctcttcatcttgcgcggcctgccaggaagcggcaagtccacgctggcacgggtcatcgtggacaagtaccgtgatggcaccaagatggtgtcggctgacgcttacaagatcacccccggcgctcgaggagccttctccgaggagtacaagcggctcgatgaggacctggctgcctactgccgccgccgggacatcagaattcttgtgcttgatgacaccaaccacgaacgggaacggctggagcagctctttgaaatggccgaccagtaccagtaccaggtggtgctggtggagcccaagacggcgtggcggctggactgtgcccagctcaaggagaagaaccagtggcagctgtcggctgatgacctgaagaagctgaagcctgggctggagaaggacttcctgccgctctacttcggctggttcctgaccaagaagagctctgagaccctccgcaaagccggccaggtcttcctggaagagctggggaaccacaaggccttcaagaaggagctgcgacaattcgtccctggggatgagcccagggagaagatggacttggtcacctactttggaaagagacccccaggcgtgctgcattgcacaaccaagttttgtgactacgggaaggctcccggggcagaggagtacgctcaacaagatgtgttaaagaaatcttactccaaggccttcacgctgaccatctctgccctctttgtgacacccaagacgactggggcccgggtggagttaagcgagcagcaactgcagttgtggccgagtgatgtggacaagctgtcacccactgacaacctgccgcgggggagccgcgcccacatcaccctcggctgtgcagctgacgtagaggccgtgcagacgggccttgacctcttagagattctgcggcaggagaaggggggcagccgaggcgaggaggtgggcgagctaagccggggcaagctctattccttgggcaatgggcgctggatgctgaccctggccaagaacatggaggtcagggccatcttcacggggtactacgggaaaggcaaacctgtgcccacgcaaggtagccggaaggggggcgccttgcagtcctgcaccatcatatgagtgttctcaccaccacttatgcccctagaagggaaggggagagggaaacgtgccctctgtttgatccttgttttgtgacattttttttttttttttttttactcaaagttaacctacctgtaactttttaaaaacttgtaaaataactgaccctcccttcctgtccgccctcttcccctctaatgctcaactgccctctgttcagtaacagggccttgctaatcgggttgtcacccaacctcagcaacctgtaagactgataatgaaataaatcatgttaatcctaaaaaaaaaaaaaaaaaaaaaaaaaaa

SEQ ID NO: 500595 - DNA, 188 bp, Homo sapiens
  misc_feature (165)..(165): n is a, c, g, or t
atgtgaggcttttgtggaactccatgtgcagaaattggacctgccatgtgaaatttacctggcagcaaaatgatggcacatctaaggaaaaggcccaggctctagaagacctggctggtaagacgccagcattaaataccaaaatagcctgcaaatctccacaancatgacccatgtggacaccccag

SEQ ID NO: 500596 - DNA, 274 bp, Homo sapiens
gcgccttatcctggacccgatgcagaaggaccccacgaggacaacagcgaacacttaaagaatcctgtaaatagcacagaagatccagaagctgatggatgtgggtctgcttgccacttcggtgatgacttgttcatccccccgttcccttcgccctcatgtgaacaagaggacgctgggaccgcggcgacgccgcacggcgcgcacaggggacgacccggggcacagaaggcctcatctctctatatttgtccataaccccggggccgagtca

SEQ ID NO: 500597 - DNA, 1316 bp, Homo sapiens
ttccagtctcacccttttcaaacctgctctccacccagtgccatgatacagccacgacatgcccctagaagggaaggggagagggaaacgtgccctctgtttgatccttgttttgtgacattttttttttttttttttttactcaaagttaacctacctgtaactttttaaaaacttgtaaaataactgaccctcccttcctgtccgccctcttcccctctaatgctcacgctcccaacacaaggtgggcagggaggcaccattcaggaacctggaccaaagctgacgaggctgggccaagccagggatggggccacagccagaaccccgagccctacttccaggttctggttagctcagccccagcccagcccagctgctctgcccagagctgggtgagtggggagacacctcagagccccgcaaaacccactgaccggaggcaaaaggcagtggggctgggggtagttttccatggtcacagagaactagtggtggctctgagaaggggaggacctctgggctttgattccatctccttgtcttttttctttgtttttagagacagggtcctgctatttcccaagctggagtgcagtggtgcgatcatggctcactgcagcctcgaactcctgggctcaagcaatcctcctgagtgatcccatttcttaatcagtgtagccccaagaaggctggggctatttaccagggtagaaaaaggagcttacctcccacctttggtcctaagtccctgccccctccccttcacaccataactaggtaacagtttgataactagggaagaaagcagaacagttaagcagccgccacatccccgctggctgggggcctcactccaggaaggggctggactggctgtcctttccagtggcctggctccgctgtgtggatggggagatcggggccagaggcagaaccctggtgaggaagctccagtcctgctctctacccagcccatcttgcctccatggtgcctctggaggcctctgggcctcctctaacaggggctggtgggcaccaagagccaatggagtagacccctggctggtaagggccaagtcccaccggttgcttctgggaaggggtttctaacactagtctgtgtgctgtggttcctggggtgccctccactgccctctgttcagtaacagggccttgctaatcgggttgtcactcaacaaaagtgctttggatttaagttactatcctggctttgcccaacctcagcaacctgtaagactgataatgaaataaatcatgttaatcctaaaaaaaaaaaaaaaaaaaaaaaaaaa

SEQ ID NO: 500598 - DNA, 1201 bp, Homo sapiens
aagcggcacgaggctcgggttgtgccaccgctggactcccgtgtccctccgcgcaggcgggcggccccggagcgctggtgccggcagaggcggcgacggtggcgcccctcctcatcatgaacagaggcttctcccgaaaaagccacacattcctgcccaagatcttcttccgcaagatgtcatcctcaggggccaaggacaagcctgagctgcagtttcccttccttcaggatgaggacacagtggccacgctgctagagtgcaagacgctcttcatcttgcgcggcctgccaggaagcggcaagtccacgctggcacgggtcatcgtggacaagtaccgtgatggcaccaagatggtgtcggctgacgcttacaagatcacccccggcgctcgaggagccttctccgaggagtacaagcggctcgatgaggacctggctgcctactgccgccgccgggacatcagaattcttgtgcttgatgacaccaaccacgaacgggaacggctggagcagctctttgaaatggccgaccagtaccagtaccaggtggtgctggtggagcccaagacggcgtggcggctggactgtgcccagctcaaggagaagaaccagtggcagctgtcggctgatgacctgaagaagctgaagcctgggctggagaaggacttcctgccgctctacttcggctggttcctgaccaagaagagctctgagaccctccgcaaagccggccaggtcttcctggaagagctggggaaccacaaggccttcaagaaggagctgcgacaattcgtccctggggatgagcccagggagaagatggacttggtcacctactttggaaagagacccccaggcgtgctgcattgcacaaccaagttttgtgactacgggaaggctcccggggcagaggagtacgctcaacaagatgtgttaaagaaatcttactccaaggccttcacgctgaccatctctgccctctttgtgacacccaagacgactggggcccgggtggagttaagcgagcagcaactgcagttgtggccgagtgatgctaaccaggatgggtgggatggatgttcatacctggcttttcttagcgcggtcagacctcaccaatatagtcgagcctataattcttaccaaggacctgagcagcgctagctccgcagtttcatagtcatcgcccacaagtcctg

SEQ ID NO: 500599 - DNA, 949 bp, Homo sapiens
aagcggcacgaggctcgggttgtgccaccgctggactcccgtgtccctccgcgcaggcgggcggccccggagcgctggtgccggcagaggcggcgacggtggcgcccctcctcatcatgaacagaggcttctcccgaaaaagccacacattcctgcccaagatcttcttccgcaagatgtcatcctcaggggccaaggacaagcctgagctgcagtttcccttccttcaggatgaggacacagtggccacgctgctagagtgcaagacgctcttcatcttgcgcggcctgccaggaagcggcaagtccacgctggcacgggtcatcgtggacaagtaccgtgatggcaccaagatggtgtcggctgacgcttacaagatcacccccggcgctcgaggagccttctccgaggagtacaagcggctcgatgaggacctggctgcctactgccgccgccgggacatcagaattcttgtgcttgatgacaccaaccacgaacgggaacggctggagcagctctttgaaatggccgaccagtaccagtaccaggtggtgctggtggagcccaagacggcgtggcggctggactgtgcccagctcaaggagaagaaccagtggcagctgtcggctgatgacctgaagaagctgaagcctgggctggagaaggacttcctgccgctctacttcggctggttcctgaccaagaagagctctgagaccctccgcaaagccggccaggtcttcctggaagagctggggaaccacaaggccttcaagaaggagctgcgacaattcgtccctggggatgagcccagggagaagatggacttggtcacctactttggaaagagacccccaggcgtgctgcattgccaacctcagcaacctgtaagactgataatgaaataaatcatgttaatcctaaaaaaaaaaaaaaaaaaaaaaaaaaa

SEQ ID NO: 500600 - DNA, 402 bp, Homo sapiens
ctagaggatcccgagaagaacagaaggggatcagggtctggaaaggccttcggacagaatgagagaggaattttctaaactccagaacaagacaagctgacagtgctggaaggagacattctggatgagccattcctgaagagagctgcaggacgtctcgggcattaatcaaccgctgtattcatggatgtcttcggtgtcactcacagagagtctatcatgaatgtcaatgtgaaaggtacccagctcctgttagaggcctgtgtccaagctagtgtgccagtcttcatctacaccagtagcatagaggtagccgggcccaactcctacaaggaaatcatccagaatggccatgaagaagagcctctggaaaacacatggcccgctccatacccacacagc

SEQ ID NO: 500601 - DNA, 459 bp, Homo sapiens
gtacattcaaaagactcaggttggaaatagacttcttggttaaaaaaaaaagaaaaaagtatcaccaaaaggtcctttttaaaaatgaggtttatttcaaggctactcagctcctaaaagacctgcatatttaccttttacttccttcctccaggttttacctcccaagatcaggaatttcaacaaccccccaagatttcagactcatttcttattgggttttaaacgacaacaaagaacaaaagccagaccacgacaaaactcacaaagcaaatcacacagttgtgggattcagcgccacccccgcgcgttacatttgggcaacataaccaggattcctttcaacagacgcttctggaaaatgctgtagtattcctaaatgaaggcccctggttttttcaagcctcaaaatcacctactcaaagaagcagactcagaaccccaggtttatagaccttg

SEQ ID NO: 500602 - DNA, 956 bp, Homo sapiens
aagcggcacgaggctcgggttgtgccaccgctggactcccgtgtccctccgcgcaggcgggcggccccggagcgctggtgccggcagaggcggcgacggtggcgcccctcctcatcatgaacagaggcttctcccgaaaaagccacacattcctgcccaagatcttcttccgcaagatgtcatcctcaggggccaaggacaagcctgagctgcagtttcccttccttcaggatgaggacacagtggccacgctgctagagtgcaagacgctcttcatcttgcgcggcctgccaggaagcggcaagtccacgctggcacgggtcatcgtggacaagtaccgtgatggcaccaagatggtgtcggctgacgcttacaagatcacccccggcgctcgaggagccttctccgaggagtacaagcggctcgatgaggacctggctgcctactgccgccgccgggacatcagaattcttgtgcttgatgacaccaaccacgaacgggaacggctggagcagctctttgaaatggccgaccagtaccagtaccaggtggtgctggtggagcccaagacggcgtggcggctggactgtgcccagctcaaggagaagaaccagtggcagctgtcggctgatgacctgaagaagctgaagcctgggctggagaaggacttcctgccgctctacttcggctggttcctgaccaagaagagctctgagaccctccgcaaagccggccaggtcttcctggaagagctggggaaccacaaggccttcaagaaggagctgcgacaatgtaggtggcaggttggggccttataagcccaccttgctgggcacagggtgctgcgggcaaggacatcattgtactcaacggtgggccgaagcgcggaggcagaagaggtccctcacggggcgggcagccggctcccgtggttcctggggtgggcccttggaccc

SEQ ID NO: 500603 - DNA, 707 bp, Homo sapiens
agtgagactccgtctcaaaaaaaaaaaaaaagaaaagaaaataggctttactgggctcacagttctgcatggtatacagaagtgtagtaccaaaaatcttctccgggtgcggcctcaggaagcttacaatcatggtgaaggcgaaggcgaaaaaggtgaattcacacagcaagagttaggagcaacagagagaaggttggttggagggtcccagactttttaaacaaccagattctcattgttgacactatttgagcaagaactcactttaccaccaaggggagtggtgctaaaccatttcagtgagggattccacccaagtgatcccgttcacctcccgccaggccccaccttccaacacgggggagttccctatttcagctatgagaaattgggcgggggcacagcaacttcccaaacctattattaaggagtctatagtcacaaagaaaacagcaaaacacagtaggccaagttttggcccatattattggacacaatcttaagtaaacctctaaaatcaactttcacaaacagtattggcaaaccaattttcaacaaacgagtggaacctaatattgcaaagacccaagatagtcccaacaaattacaattttataagaaataaggccttagaagcagtgtcgtccaagtggaaattaaaaaagccttaataagtggcatcaactggcaacgagggcaaaggt

SEQ ID NO: 500604 - DNA, 104 bp, Homo sapiens
gtgttggcaaacgcagttaataaagcaatgttttctgtgcatagggagccctttgcactcctcgtgtgtggcaaacgcagttaataaagcaatgttttctgtgc

SEQ ID NO: 500605 - DNA, 706 bp, Homo sapiens
ccccccctgtgggtggtcgctcccgccagactaggggtttctctcgtcgggagtagtcagttccggcccctattaacggccgtgttctgcgcctttgtgagggtttcctctcacgacccggtggggttcccccccgtcctgtctctttctccctctcggagggtcccttgtgcagcctctgtacccggggaggttatccgggtgcacgccttgtatgtttcgtacctcccaacctctcttcccctgagtcacgcgggcttcttgccctcttctggcgcgcccaactcctccctgcgtgtggggcccccctgtgtggacgttctcaacgaggttgttgtaggcgccccgtgtcggtttcttcaaaaagactgttctcctgtctcgtcggctgcgggcgattttgggcatcatctctctcagctacatggggatcatgtgtgtttctatgatagctaccacggtccgacagcgttcttgccacaggggcggggattcctctaatcgccccaagaggcgtcatgcaacacctccgcgtgccccccgtctaatgagagcacacacacgacaccaccggcgcggggacgatgtggtggcccacgacccccccagggcaccacgatcgcggcacgacgacggggtggtccatcccccgcagcacacttgaaaaacaactgcgtgggcttcgccccacaaatgaacagagaag

SEQ ID NO: 500606 - DNA, 120 bp, Homo sapiens
cctaccaagatgagacctgttcatgaacatcataaagatccccgaaatacttaaacgccttatgacttccaggtgatgactgagccccccataaatccagtaatagggtatctctgaaaa

SEQ ID NO: 500607 - DNA, 985 bp, Homo sapiens
  misc_feature (68)..(68): n is a, c, g, or t
  misc_feature (166)..(166): n is a, c, g, or t
  misc_feature (177)..(177): n is a, c, g, or t
  misc_feature (179)..(180): n is a, c, g, or t
  misc_feature (206)..(206): n is a, c, g, or t
  misc_feature (222)..(222): n is a, c, g, or t
  misc_feature (229)..(230): n is a, c, g, or t
gaggtcaggtggcgtttgctgtggcggctaggcccgcgtgcgctggagacctccgcgctggcccccgngagcctcctgccctggcccggcgctgcggctctgccgcggcggcagcatgggtggcccccggggcgcgggctgggtggcggcgggcctgctgctcggngcgggcgcctngnnactgcatttacaggctgacccggggntcggcggcggggcgancgcgagnntcgggatacgctcttcgaagtccgcagaagacttaactgatggttcatatgatgactgttctaaatgctgacacaacttcaggaaactcctttacctgctggagtcaacggaggatcctgtaattattgaaagagctttgattactttgggtaacaaatgcagccctttacagttaaccaagctattattcgtgaattggggtggtattccaattgtagcaaaacacaatcaagcattccaaccagagtattagcgagaaagctttaaatgcacctaaataacctgagtgtgacttgttgcacaatcaaatcacgataaagatatagcatcagtcaagttatgtgagggatgtctctactggtactcttgaactatgatgtgcagtttggtggactgacattagtagacgaacattgatgtaacaatgaccagccaggagagttgcttcgaaggttagcgttagagactgtccaggtgtacataactggaaattggaaaggaaggtgaagttttgaagtgatattagagttgtgtgaaatccagcagaaagaggactgacggtggcaggtggattcattgttacgtattccgttaagtgaagggcagatagaaaggagagttctgatgagagcgagaggatcgagataatagagtgtctgagatgaggcattaatggaagacatatagtggagtgatggacgagaagtgagagagtgcggagtagagttagtcacaggagaaggagagagttgga

SEQ ID NO: 500608 - DNA, 175 bp, Homo sapiens
ctagaccagcttattgctacctccacaaacaggcagtggagtttggttggtagtattactgttggtggatggtggtggttggtacgtattactgttggtggtgatggtggtggttggtagtacttaccttgttggctggtgactggtggttggttggtagtatcacctgtatgtg

SEQ ID NO: 500609 - DNA, 668 bp, Homo sapiens
ttatcagtgtaaaggagtgtgccttcatggccgcaacacaagggttgacccttcctcctgcaatcatcgctgagcttatgcctctcgaggtacaaatgaactttatacacgagaactttttactagtcttaacaagagaactaggtgtagacattgacagaaatccttaactttctggcatggttcgaagtataaataaatttggacagctaccataaacaccactggtataccaggcaacatcctccagagtactgggatacctgaagtatgcgtcacaaatcttgactataatcaagtaagcttttttcataaccagtttctttgaaatgatcttctgcagcttaaaaccttaacacatgacactatagtactggtctcacaattttttacaagtctacttgaaacacaatattatcctaaagtaagctgatcaagacatgagaaattaaacaacacaaaaagctcaaggtaatacccctgagttcttaacacacctcaaaatccaaaatgctaacatatattcattactacttgggacacttaaactatacaagggtcacagaggaacccttagcattcacgaataactaaaataagttacacaaaatttttatgactcatcaatactcacaaagatataacaaatgttgagtcaaacacataga

SEQ ID NO: 500610 - DNA, 287 bp, Homo sapiens
ggcttggattaagcctaaggcaataataattacaggagttataaactgaggtacaatcaaaaggtttcaacactcgtttattttcagtttcaggacactacaaagaatgcatatcagaatggaactaaaaactgagacccaggcacgattaagttcatctaacgtacagctctgtacacaggtaaccttatgcagcacattgtgcacaacgtatggtaccgttcacatttgcagccattactgaagatactcatgtagaagctaagcaacaagttagcatacagtat

SEQ ID NO: 500611 - DNA, 150 bp, Homo sapiens
cgtataaattacagaaaactattttaaaaggtttgacaaagattccagtcccgaagttgaccagtcggtagaagctcggtttcccaattgaatatcgaaagtaaagtagcacagacctcggtcaatacttggaagggtgaacctttctag

SEQ ID NO: 500612 - DNA, 375 bp, Homo sapiens
tggcacgagattgaaagttatgttccaaataactttccgttgtttaccaaatttttttagacttggtcatcatcaggaagcatttgtaaaaataaaaatttcccccaattattggcccatttgggacttgttgaatcaatttgataggattaatttccagtgaagctgtgtttacagggcattccaagtgatttttatcaggaagtgtgaaaaacactcctgtacaaaatgggttaatttaaaattttatttaataagtgaacaattaatgaagatttcccctgtttacttagggtatttacccagacccatcgatcctgagttggggaaaagattttgaaattactgttttccaaaaaaaggggctccctttta

SEQ ID NO: 500613 - DNA, 172 bp, Homo sapiens
  misc_feature (102)..(102): n is a, c, g, or t
  misc_feature (110)..(110): n is a, c, g, or t
  misc_feature (134)..(134): n is a, c, g, or t
  misc_feature (137)..(137): n is a, c, g, or t
ttcatgtgggctcagaggggctgtgaggaccactgcacagttggtcggtttgttgccactgggagcaggctagggccagagggctccccaggtgcccagttngcatacantcaaaggctcctgctccacccacntgnaagtcccttctgcgaggaatggatggccaatccaa

SEQ ID NO: 500614 - DNA, 220 bp, Homo sapiens
gtgttgcttaatgtaacaagtttaatctagaagtacgtcttaagatctcctagtatattttttggagaaaaaaaaaagccaaagaaacaaaaccagagtgttggaaatgctcacctccaatatatgtatacactcaaacggatcaatgggcatggtttctggacagtggctgctgttacaccagcaggttattggacagactggacaccgtgtgccatgg

SEQ ID NO: 500615 - DNA, 392 bp, Homo sapiens
ggagctcggtaccgctgtatgtgcgactcttgaagtgtctggatcagctgatctgcctgtgtaactttacttcacggctgaggacagtcgttctcagtttgtcatgagctgtgaagtgtgaaaatgggaacgcatccttggatcttaggtgctgctgacctactttcccaaagcaaaatgttttaaaattcaaggctgtctggaacgtggacaatttccaaagcttccttaggcaggacttttctgtgacttcctcgcgcacgctgctttccctgccacgaagcgcttggtctgcttactaaagacacgtatcctgattgtacagaaacgtgggcaggtccagcagtgccactggagagctcccagagaagcgcactcagaaggaagtgcta

SEQ ID NO: 500616 - DNA, 307 bp, Homo sapiens
tctagcggatcttatcagctgcccgacagctgactggtgcagttaaggaacagagttttaaatttcatttttttttttaagatggagtctcgctcctgtaacccaggctgtagtgcctggtgcaatctcggctcactgcaacctccgcctcccaggtccaagggattgtcctgcctcagcctcctgagtagctgggataacaggcgtgtgccacccatgcttggctaattttggtattttgggtagagacggggttcagcattttgttgaggctggtctcgaactcctaacctcgtgatcctgcctg

SEQ ID NO: 500617 - DNA, 246 bp, Homo sapiens
atctagaggatcctgctcggaggtgggtctgctccgaggtgcccacgaaatttaatgcaggttggtagttaggactgtggttgaggtactgttgcattataaattaagctccataggggtcttctcgtctgctggtcatggcccgctcttcacggggcaggttcattcactggtaaaagtaagagacagctgaaccctcgtggagccattcatacaggtccctaattaaggaacaagtgattatgc

SEQ ID NO: 500618 - DNA, 255 bp, Homo sapiens
ttatctccccttatccccagaatgatggttttggaggtgtggccttttggaaattatgaggtcgtgacggtgcagctctcatgcataggattaatgccattataagaagaagcacaagagagatgctctccctctgctatgtgaggatacaataaaaaggcagctgtctacaagccagaaggccgcttcaccagacactgtatctgccagctccttgaacttggacttcccggtctccagaatagggtttcgatg

SEQ ID NO: 500619 - DNA, 479 bp, Homo sapiens
gggggtttaaaatgtcaaagagagaacgtggtgggtcttttggggccaaattccggatttccttgggttttcgggtaggagctgtaatcaattgtgctgacaacacaggagccaaaaacctgtatattatttccgtgaaggggatcaaggggcggttgaacaaatttcccgctgttggtgtgggtaaaatggtgatggccacagtcaaaaaaggcaaaccagagtttagaaaaaaggtacatccaccagtggtcatttgccaacgaaagtcatcccgtaaaaaaaagggggtgttttttttttttgaaaataaggcaggagtcatagtgaccaataaaggcgaaatgaaaggttttgccattacaggcccagtagcaaaggagtgtgcaaacttggggccccggattgcatccaatgttggcagcattgcatgattttccagtaaatttgtaaaaaataaaaaaaaattaaacccttta

SEQ ID NO: 500620 - DNA, 707 bp, Homo sapiens
cgccgctccgccgtcgcgtttctctgtcggcgcgcgactggaagaagagatcgccgcgctggtcattgacaatggctccggcatgtgcaaagctggttttgcttggggactgagcgctccccgtagccgtgtttccttccatcgtcgcggcgccccagacatcagggcgtcatgttggcgtcatgtggccaaacaggactcctactgtgggcgatcgagtgcccagagcaagcgtggtacttctgaccctgaatgtaccccattgacgcatggcatcgtcaccaagctgggactgacactggatgatagcatctggtcaccactaactcttctagcaacgagtctgcgcgtggccccggaggagcacccagtgctgctgacctgaggacccctctctgaaccgccaagggccaaacagagagaagatgactcagattatgtttgacgaccttcaataccccggccttgtacgtggccatccaggccgtgctgtccctctacgcctctgggccgcatcattggccttgtctatggactctgtagtagcggggtcacccacacagagtgcccatctagcagggctacgcacctctcgccaggtccatcctgacgttggacctggctggcagggactgacgaatacttagtgaatatcctcatgagcaagttacgttcacaccgacgtcggaaattttgcgattcctgcc

SEQ ID NO: 500621 - DNA, 226 bp, Homo sapiens
ccccgtcctctccgccctaggcaactgctaatgtactttctgtctctatagatttgcctctctggacatttcataaaaatggtatcatttaatatctggtcttttgtgactgacctctttcatttagcatagcattttcaagatgtatccatgttgtaggatgtatcagtacttgattcctttttattaccaaatatgccaattaaaattccatcgtacagaaaaa

SEQ ID NO: 500622 - DNA, 601 bp, Homo sapiens
tccttaacttggcttaatggttgggggggtgaaaataaggcctggggcttgaaaaactcatggtcataaagttataaacggggaaacggggtcaaaaggcttaaaaccaccttgtcttcgcccattcttccctttctggtggattgaggcgggacaagggccggccccctgttgctggggcctgggacgcgagggctctcagagcttggagaaggtgacggtttccagtccctgtgtcctcagtcgtggcctggaccgatttcacgaggtctggggtctgcagcattgctcagtgtcccaggacgccacgttagtttgaggctctcggccaccgattggtcgcgggaattacagcgggttgaccttggtgctctgcaccgccacggggcctcttgcgtggaaactctcggccgccagcgctaaggcagcatccagcttgacctctttgtctgggaacccccggttgaccagcccattgcccagggcctcgtcagccatcatcttgcgggcggtgaaggccagctcgttgaccaggctctggtccccgatgaccttgggcaggcgctgcagtgtccctacatcggaagccaaacccaggtcc

SEQ ID NO: 500623 - DNA, 370 bp, Homo sapiens
  misc_feature (1)..(1): n is a, c, g, or t
  misc_feature (365)..(365): n is a, c, g, or t
ntctttttcgagcccatggtgccgatcgctatgcgggaagcctgtagagagcagactatctgcatagagctctaaatgctccaggggaaagccgttggaacccccctttcatttaagggaaatttaacccccccaaaaaaattttggtaaaacaccttttatttaagcccttttttttaaaaaaaaatttttttgaaaaaaaaaatttgaggggcaaaggggggggggccccggtggagtccacaaaattttttcgggaagaaaaattttttctaagggggccccaaaaaagggggaacccccgtaaaaaaaaccggggggggaaccccccccccggttttcgggggggggggggtttttttttnccccc

SEQ ID NO: 500624 - DNA, 1035 bp, Homo sapiens
  misc_feature (503)..(503): n is a, c, g, or t
tttgcgggataatgtaaaaaaaaatatgaaatgacgggaaagaggaacagaggaccatgacaacagtcgtggctgtattttcttcatcccttatacctggttcgtcagtgctgggaccgcgttgcggcaatcgagcgtttcccccggcggccaagcgctgtgggacccgacaccgttttattacttgcgacgccttgaagttgtcttgccttgggcaattgtgggcctgttcacttcggagggttttccgataaacccttcttgcggctatcaccggtccaataccgaaaccacggttccaataaaaacctgtcttggggcgcgcgggaaaaaatcaccaaattttgaacagaagcggtaataacctcttccaaaaaaaaaaggcggggatctttctcccccgcgagagattgaacgtgttgccccccagttacgccctcgtcgcaggagggttttcacatctcccgcgaccgctttattcttaaagggcctcccaatgagancccacccttcttgtcgcgcccgcagtccagtggtaaggtcctcccaacccctgtctccatacaacaggcttctataacgcccccttcggtttgggctaaaacaaggcgggtttcggcccatttcaaccaggcaccccctcacataatatgccttttgtgaaatataacgcgcatcttctcggtgtgtgtataggtgctctcctcttattcgtggtgtgccacgactggtcaagtaaagcccgacataaatattgcgtgctgcaccgccgcgatgttgaatcctgaataaggaaccaccgcgggaggtgctcttctgcttggaataatatacgtccacagacggatcgcgcacactcggttatttctttagtgctcccagcaagacgttctaagacgtgtatgactcgtgtcccgctgtcaggccccaaacaatgctgggctgccctgctgtgtgcgcacactgcgagagggcccacaggtttttgaaatagtttaccaagagcgggacaaaataccccttcccaacaataac

SEQ ID NO: 500625 - DNA, 142 bp, Homo sapiens
caagtaatctgagcttccctgacatgcccaccctggacacatcccgttcagcctcatctgtgagtcagcactgtggtgaaagctgcagtggcctgatgtgcaatctcaggaagcacagagtccaacaggaccatgaattctt

SEQ ID NO: 500626 - DNA, 342 bp, Homo sapiens
atctgtaccatgtgatgatcagtttttccattcttttttggttgcctgtaccatgggtcatacctatgaaatcattgacaaacttatgtcatgattttcccccatattttttttctgggtttacagtttaagtggttatatataggcctttgatccattttgagctaattttggtatatggtgttaagtgtccaacttcattcttttgcatgtggatatccagttttcccagtataattggttgaaaagattctactctccccacgaataatctgggtacttttttgaaaattatttgaccatatatgttagggattatttacggggctccctggacacgaa

SEQ ID NO: 500627 - DNA, 148 bp, Homo sapiens
  misc_feature (56)..(56): n is a, c, g, or t
  misc_feature (75)..(75): n is a, c, g, or t
  misc_feature (144)..(144): n is a, c, g, or t
aatcttaaaggttgtcttcataactttcagcactcagagtttacataagtaagccntgggtttaccctacccacnttttcccttatttttaaaatatctattccccaaccattgtctttagtaagtcactaaaatgacagtcantcag

SEQ ID NO: 500628 - DNA, 965 bp, Homo sapiens
gcggggttctcgccggtcctgcgggtcgctgctcgtgctgtgggttagcagcaccctgagcggagcggaagagctgcccgccgccgcgtaaccccgaggcctgagactcctggcctggcctccttgtggcccactgactgcctgccccgctggagcggacccatgggcctgagtgttttgtgtgctggggcctcaggctgagcgctggctgcagcctgtcccccatcgtctgcgccctgcgggcctggccctccccgtggaaggacctgcgggcttcgtgggccccacgctgtgggtgtgctgactcctgccacacacacatgctgtgtggcctgcggtgccttggggcgtgcagcacagccattctgctcgggctgcgtgatgctgaccccgctctctgtgcacctacttttgctgcgtttggtgctgagcctgaagtcccaggacatggcggctgagtggtggaaagatggtgtgaattggggtgggcagatacaaacttgaaagccaacatggacccgggttggcaccttaatggccgcctgcgcctttgcctgcagccccgctccctgggtcacccgaaggatggagcatggagctctatccgggcggcagaagcacccgagccacgctggagcgaaaacgggtccctctgggcaggagaaagctttgggcccttggcttggagcacgagtcacggagaccaccgccaagcgcctggcactgtagccaagatcccagcgtcgcctcgcaccgttctaagactgttagcgcgatcctcaccgttggccgagccataagccagaattgacagtggggcacgcggcgctcacggtggcacagggtactgccgtgtacgccaatagagacacgttcccaagtagtgggttaggagcgcaggcgccagcgtctgacctagacagaactgcagagtcttcaaccgtgcacgcccacagcacacgctg

SEQ ID NO: 500629 - DNA, 759 bp, Homo sapiens
gtctgcactggtcttcactaactcgttaccgtggatcttttgacttcatttatttcattgtgtaacgacatctatgaatgcgttatctaccttgcctgctcctatgccacagtgtacctgatctacgctgaaatttaaggcaatctacgatggaaatcatgataccttccgagtggccggtttctggtggtccctgtgggaggcctctctattgtattgagtgtaagtctgcgattttcgtctcgctcttggagactcctctggtagcttctccttctacctggagtccgtggctatccttccgtagctgtttatgatcagcaagactggggaggccgagaccagtcagccatccactatcctgttcttcctggagcctcttatcgtgtctttcgtactcttggtcaatctgtgatctggcgcttctactttgagggcttctttgacctcatatgctagtggtggccggcgtattccagaccatcctatactgtgacttcttctacttgtacattacaaaagtactcaggggaaagaagctcaggtttgccagcataagtgccatcataccatcaccagcatctgtccttcagggtgctcggacagaattcttaccacagctgaggcctaagatgcttgatccggacacctcatgacagcttaactctgtcgtatgctgatagtcatcagtggctctgtaaaaacgcataggaaaacgagcccgaaaggtctcttgcttaatgcagtcttggccttatc

SEQ ID NO: 500630 - DNA, 362 bp, Homo sapiens
actacgaagcatgctggaatggtctggggctgaagaatctctttaggcgagtcttccatggcacctacttgaagaacttctgttcaatagccaggcttctggggaccacgacgtgcaaacaggtctcttcagtttgcagtcgaagaatcacttatcctgaagctgccaacagatgagctcatgacacccctcacagaagaagaagagaaagcaccgattgtgggctgcacactgcaggaagattcagctgaagaaagataactcttccacacaagtgtacaactaccaaggcctgcgaccacccagagcgcccctgtgacaggagctgcccctgcatcatgactcagaatttctgtgagaag

SEQ ID NO: 500631 - DNA, 156 bp, Homo sapiens
ggtaccccgtgcttagttgtgtggagcgattgtctggttattccgataacgaagcctcacgaagcctcataatcgagaccctgagcggatcctactagcagctcgaccctgcaggacactggcggagtcttgggcgactggcctgttcgtttttac

SEQ ID NO: 500632 - DNA, 438 bp, Homo sapiens
aaaaaaaaaaaaaaaaaaaaaggtggggggggtggcgcgggggaaaaaagtttcaattcaattcaccccttggagtcttctctgcccctgaaattaactctaagtccttagagtaccaaaattaacctgcagagggaccacgaattgttggttattttgaagcgctaatttttaggatccccctcccatccaaaacagggatgaatagttgaggaacaccggagcgggccctggcccttctcggaacgttgcgctgacctaacatgacgctggtccgttcaaacgtcgcagttgtggcccacacagagcccagtctgttccagaggcgcgccctgcacccctctgcctgcccgaggtcttccctcccctccgctccccagaaacgcacccactgagacatgtgcggggagggggcacgcttactcccacatcccgccc

SEQ ID NO: 500633 - DNA, 573 bp, Homo sapiens
ggatgcagggccagtgtcacagagctgtgcaggccagtggagctgggcctgtcccacaaaacattcttcccttctaggactctgggcttataataggaggggctgcatgtgagggtctctgagatgccttcaagggcttctccccatagtctagtctattagcacttggttccttttgacttatgcacatttcttcagcctgctagaattattccctggaaaaatgggccttcttttactatcacatgtagcaggctgcaaatggttccaaatatttacgcttggcttcccttttatatacaagttccaactataggccatttctttgtccatgtatatgtgataggttgttagaagcatgcagggcacatcttgaacattttgctgcttagaaatttcttctgccagataccctaaatcatcactctcatgttccaagttccacatatccttagggtcaggagcacaaggagccaagttcttagctaaggtcattagcagaagtgatctttgctcctattcgcaatcagttcctcattgccctcttagatctcctcaggctggacttcactg

SEQ ID NO: 500634 - DNA, 157 bp, Homo sapiens
  misc_feature (150)..(150): n is a, c, g, or t
ctacagcgttaagtcctgtgactcatgtgatcctataccccagccttctgaatagctagaactattggcgcacgcatccacacccagctaagtttttaaattttttggaggccatgcacattcggctcacacctgtaaatcccagcaccnttgggag

SEQ ID NO: 500635 - DNA, 427 bp, Homo sapiens
  misc_feature (232)..(232): n is a, c, g, or t
  misc_feature (269)..(269): n is a, c, g, or t
  misc_feature (403)..(403): n is a, c, g, or t
ccgagcccacacatgtactgggagaaggacgggatggccctggacgaagtgtgggacagcagccacttcgcgctccagccgggccgcgcgaggacggcccgggcgagctggcattgcgcatcctggcggactcggatgcacggattccggcagtctacgtgtgccacgcccgcaacgcgcacgggcacagcagcaggcgggggcgctgctccaggtgcaccagccccccganagcccgcccgcggaccccgacgaaggcccccgcgccnggtggtggagcgctcaagtgcgcgcctaagaccttctgggtgaacgagggcaagcacagccaagttccgctgctacgtgatgggcaagcccgagcccgagatcgaatggcactgggagggccgcccgctgcttncgggaccggccgccgccttaataa

SEQ ID NO: 500636 - DNA, 958 bp, Homo sapiens
gatttttataatctttaaagtaacctaattagtaatacagattacttttacaaagaaaacatgaaactcaggtttacaaacaaatcctaccaagcctttaggggaaaaaaaaagttaatttcacattagtactgcatttcattgattataaaaacactctccccccaagcacatacatattctgtcatctctgaaattgagttgaatcttaaattgatggtgttttacaatctctcttggtcattgtcattgttaaacagtttttttaaatcattctgagtttggaatgtgtgctgtatatctttttttttttttgggagcatggatgtctcactcttgtcgcccaggtctgggagtgttcgcatgtgacgccggagatcacggccattggcatctccagcctggggcggaacagatgtcgaggactacttctcaaaagacaaaacaaaaacaaggcgccaaaataaaagggccatctttacgcgccacaaaacaagatttttctcggagaagaaacccccctcaacagccgcgcaatacccccgggtgtgcttctgagcggagaccacttctagaacaaaaccctctctcaagcgcttcttttacaacacccgcggtcttgcgacgcggcacaacaacccgcttctatcctgggcgacttttgtttttttttccacacacgtgtgatgaaaacatccgccggtgttgacgcatgcggaacccaccgtgttagacacagcacgagggtcggggcgccgctcaaatgatgaatgtcggcgctaatgttgctccaacacccacacacgcagcggctctccacagacgttctgcggaggtcgcgtacccacgtggtactcgtgtgtcggaacacatcacataggctctcccactttgggtgggtgctaccaccattctgtgccgccaaacacattcaacatcataatctcgttgcggcgct

SEQ ID NO: 500637 - DNA, 194 bp, Homo sapiens
aagacgaactgctggcgcacctgtgacacgtgcggcatcgactgcctggccccgacgatctgctgatcaccaagtggcgccaccgaggccatgcagatcgccctgcggtctgtgcggcgcggccgggcgacaccatcatcgtggaatcgccggtgtacttcggcttgctgcaggccatcgagcacctcggcatg

SEQ ID NO: 500638 - DNA, 781 bp, Homo sapiens
  misc_feature (192)..(192): n is a, c, g, or t
  misc_feature (234)..(234): n is a, c, g, or t
tcctccattaaactttttaattggggtcccaaattcctgggacaaattttgggccaagtggttcccattaaaaagtcctgttttaaaaacctaataacttaaaacggccaccacgcaaaaagagaaaacaccaagaggtggtcccacgaaaaacattcctcctttctccttctcgtgaaggaggtttaaacngaagtggctatgtgtttcatccaatttacaccgagctctctntatcactcacttaacactttaaagttgtgggccccacagtgtggaagcacaacacgagttctctgtgagacacgcgttctctctcccacccatctgtgttttaacagagatgtgggtgggtggggcaggagttattaagggcgagataaatatattcctaattaaggctcttctctagagaggtctattctctggggcgcaagatcttggggtgagacctcttggcccaggtctccacaggacaaggctcttttctgttggtgtgcccactcctgggtctttctgagatgagcaccccacaacgggaaaaatctgtgcgtctgtgctctctcatttattcaccgagaacacagcgacaaaagggagacccacaaagagggcgtgtgaggatataggctctgtagaaagaaaggctctctctctaagccacacacagtgttgggcgtctttgtgcccagagagaaccccattttctcaacccaaagtgtgggcgagggacatctcaccccagagagtttttcagaaaaaattttttgggggggcccat

SEQ ID NO: 500639 - DNA, 255 bp, Homo sapiens
ggatcaggcgaaaacgttctgtgctggtacttgcgaaagcaagcacagaggggcagcccttcttcaccacagccggggagctctggtggaagacggtcttgcatatgcacacctaacctgtggtgtcaaactcagaggggaagatgatgtcgtgatgctggcagatctggcagatgaagctgcgctgggtgcacaggtcgcagtgataaacatgctgggaggcaaatacaatcagggccttaaggaatccttcat

SEQ ID NO: 500640 - DNA, 872 bp, Homo sapiens
gggaaggaggtgtgaaaggaggtcagagggacttcaggctcctgggctgagtgtgtctgggcctcaaggtcacttggaaagtggatctggaaaagtaacattccctaaaatgaagatcccaaatttactttctctggccgtgagctggttggcagagaaatgggggtgggtgttcacttccctaaagcagaggccagcatccaagctggtgctggagacggcgagtgggaagagtctgaagtcaaactgaacaagtccaagatcaaaatgcccaagtttaattttttccaaaaccttacaggggaacgttgttttcattggttcaccgaaaagcttcatttttttgggtccaaaaggtggaccgtgaaagctgttcagagcgccgagccctctgcgtctcctctggaagagaggcagaggccgaagctcttccccgaacggaaaattctccttatttaaaagtaagaagccacgggaccgtcaaattcattccagtgatgaaagagagttctctggagcttccaccccgacggggacgctggagtctgaaggtggggaagtgtctctggaacggtgccgcacacgttaccgggtaaacacgggacagctgaaattacaggtacccttttggtggacttggggtcaagagcaagggtcactcatgaacggtgactgggaccgaattgactgagacggccacgatcacacggggcagtgggtgtcctggactacaaagaacgtccgactgccctcctcttcctagcacgaacaggtgagactctaggttggatccagttcccgtcgtgccactgtccagctctcaccaacacagaagtaaccagccctgctgtcgtgctcatatatatatttcc

SEQ ID NO: 500641 - DNA, 118 bp, Homo sapiens
ggccctgtagaggatgtcttgtccttccccaccaccaagaactacgtcccgcacttcgacctgagccacggctctgcccaggttacgggccacggcaagaaggtggccgacgcgactg

SEQ ID NO: 500642 - DNA, 292 bp, Homo sapiens
  misc_feature (124)..(124): n is a, c, g, or t
  misc_feature (129)..(129): n is a, c, g, or t
gcccaaaaaaaatgacatgaatctttatttttccctgccagcttcaaggaaaaaaaattttttttacaatttgcatgagggatttttttaattgtatggactcatggttgtaaacccaaacgtnctggnccgtgcagagaaaaggagcaaaaaaccaagttttctgtttatcctgaggctttccccaatgttcccctcctgtgagccaaggaggcaaactgcccaagcttgtaaatggtttgtctttaaaatggacataagtggaacctttaataaaatgaggggaaatgga

SEQ ID NO: 500643 - DNA, 252 bp, Homo sapiens
tcccccggattaaaaaaaaaaaaaaaagaattccccttggtccccttaattccttttttttatcttcccccccccccttcccttttttcccccccccttttcccagggggttccctttgccatatatttcggggaatggggggccgggtaaacccgccctaacctgttttttcctaaggttttggggtccaaacccccggttttaaaaaaaaacgggggggggccttaaaaaaaaaaatcttttttttttta

SEQ ID NO: 500644 - DNA, 876 bp, Homo sapiens
tgcctgcggctactcaatgagatcctcgctgactttgactgagatcatcagcgaggatcggttcctggcagctggagaagatcaagaccatacggacagcacctacatggcatgccataccggcctcaatgactctacctacgacaaggtgggcaatgacccacatacaaggcactggcctgactttgccatgacagctgatggaccagatgaagtacatacaatgacgcactccttacaacaacttccagatgaagatacgggctcaactatcggccccgtggataggccgggcgtgataggggcacgacaagcctcagtacgacatctaggggacaataccgtgaaccagtggaccagcacgcactggacaagcacctgctgtgatacaccgaccgacatccatggatcaaccacaacgacatgtaccaagagtgcatggctgacaaacaatgatacacagactggagtgccagcgagccgatgagctacacaggtcacaaggggacaacaaggcacgagattagattggagccttagctatcactcaaaatgcgaacgagcctactccagcatcagtacagtcagaactgagaagggactaatgtgttcgcccagagcaaccacatgagacctccaagaagtgtacaatcagggaaggagacatgcctacacatcaggacggcatagcccgcgaaggcctgctgccgtggcatcataccccaaaatgaacatccactacccgcacgacactgaggcccatgccaacatgaccttgataacattagcacacacccctagggcacgtcaacctatagcacaccattccagcgccccctgcctcggccgaggacacagcacctactcgcccaaagc

SEQ ID NO: 500645 - DNA, 427 bp, Homo sapiens
  misc_feature (42)..(42): n is a, c, g, or t
  misc_feature (67)..(67): n is a, c, g, or t
  misc_feature (80)..(80): n is a, c, g, or t
  misc_feature (85)..(85): n is a, c, g, or t
  misc_feature (105)..(105): n is a, c, g, or t
  misc_feature (128)..(128): n is a, c, g, or t
  misc_feature (157)..(157): n is a, c, g, or t
  misc_feature (269)..(269): n is a, c, g, or t
  misc_feature (319)..(319): n is a, c, g, or t
  misc_feature (322)..(323): n is a, c, g, or t
  misc_feature (415)..(415): n is a, c, g, or t
tccccatgaaggcattcagagtccacctgcagacagcgagancccaggaaggaagttttctgctgtncccaagcaccttnaagtnctctcagctcgccgaggagnaccgctagagcgccttcccggtngagccctctgtcccacagggagcggggancagctttgctgggccctacctgcatgcccagcttacccctcattctcacagcacagatgaggttgagaccatgcagtcaatgcattgcttaaggtctcttatttacaaaaanaaaccttaaacatagtccgctgtcattcagacattcagagaatggttggncannaacaatgaccaagtattgcttggcttaacttgaaggcctgctgtctccttctgggggtcagggacgcagctccaccctcaccactagcccancctgcccgtgga

SEQ ID NO: 500646 - DNA, 210 bp, Homo sapiens
  misc_feature (191)..(191): n is a, c, g, or t
acctaaattatataaaaataagtcagtctcgttgtattctcttatgtacttcattgacctataagattctctaaaatacaccctttgctctatccattgaaaagatacatctactgtcctacgtaatattattttttctgaacacttaagaatgaactgaatcacttcacaattatcctagagcatacctnttttctgtgcccatttcaa

SEQ ID NO: 500647 - DNA, 132 bp, Homo sapiens
caggatcttacccgactagcccgacaggatcccctacctgcacggacacactgactgagtatgcctcgtgggagtgactactgtggcctgccctgccacaccaccacctaccgcctagcccaacctgcgtgg

SEQ ID NO: 500648 - DNA, 490 bp, Homo sapiens
  misc_feature (82)..(82): n is a, c, g, or t
ctaggtctaagaacgataaagggagtgagaatctccctcgccgaaagactaaggtttcctcctcaccgttcgtcggaggagngttagtcgggacctaagggtaatccgtttggtgatctcgatggaagaaagggttaatattcccttactcggtatgttaagtgatgtggagacggagaagtgacagtcctgcctactgttggaatagtaggttaaagggtgtagatattgatcttggtaggcaaatccgccgagagagtcgaacctgatagtatgtgaatccttcgggtgcagcaatatggacgtaagcaggctcccaagaaaatccgctaaacgttaatagcatatcgacccgtaccacaaaccgacacaggtagttgggttgagtatactaaggcgctcgagttagccgcggttaaggaactaggcaaattgggcctgtaacttcgggataaaggacgccgtgtggcgacacaacggccgcagagaa

SEQ ID NO: 500649 - DNA, 243 bp, Homo sapiens
gagcaaagcatccacagaagaggctctccatatgtctttgtaagacctagacaatatagagattatgaagctgagttaacaatgggaccactgaacttctttccaatggaaaactcacggcccagtcccacaggaactagagcgcataccaaacaacgatgagaaaggaagggccgggtggctctaccaaacagttcaggtccactagagtaatgaagcctggtgagaaagcgaactcctgaa

SEQ ID NO: 500650 - DNA, 405 bp, Homo sapiens
  misc_feature (20)..(20): n is a, c, g, or t
  misc_feature (34)..(34): n is a, c, g, or t
  misc_feature (135)..(135): n is a, c, g, or t
  misc_feature (139)..(139): n is a, c, g, or t
aagtgccccagttgttgaanttgtctggttaccnatccttgtgaacaaaggagggtttttggtctttctttttaatgggtctgcaatttcagagaattactgtataataaaaactggagtgttggctgggtgcangtcntcacgcctgtgaatcccagcactttgggaggccgaggcgggtggatcacaaggtcaggagagcgagaccatcctggctaacatgatgaaaccccgtctctactaaaaatacaaaaaattagccgggcgtggtgcggtcgcctgtagtcccagctacttggaaggctgaggcaggaaaatggcgtgaacctgggaggcagagcttgcagtgagccgagatcgtgccactgtactcaagcctgggcaacagagcaagatgccatctta

SEQ ID NO: 500651 - DNA, 909 bp, Homo sapiens
gctttgcgaaggcgcggccggaggacacacaggcagtggacttcgtctggctccgcacgactgtgactgaggtctgctagagcgctttggtctctcctgtgcacagatatggcgatacttgccttgaatggacagaacgcatgtgcgtcagtctgcggacacgaagaggcgacaggtctcgcaaacgacgcaagatctactcgtagctggggtgttggaaccatgtcggatatggccgtgtgctatcaacattctggggaatagtctcgggcgtgtatgaatcctggcgtcgttgtggatgtttggggacagatacagccttaaaatgggagaaatgactggatctgcagactatgggagcttatggctctcagacggcctaatcagttgttgggcacgataaacgattattctgcagaccacgccaatgactaagatagtgctggtaactgcgggagtccggcagtgcgagaggtggacgcagtccgtggtcatctcgggtgcacagaattgttgactgtctgctgttgcatgattcctcagatcgtgcactgtacaggctcctgattgctatcataattgtggttgtccaggccacgtgggatcgattctgacgtatgttactggagactaagtgggattacccaaaagcgggtgaagggaagcggaggcaaccggatgctggtagaattcgatagctcgtgggcggaacgtgggtttcagccagcgggcaggacgtgtggggggaaaggcgaccaatgggcggtcgcccgggtggacgggccaggggcccgggtggaccgcaggaggcgcctcgcggaggaagacgccaagggggagggcaaccagaaggaacggccggagggcacgagccaccagcagcgccgcgggagaaacgcaaaacccaag

SEQ ID NO: 500652 - DNA, 1291 bp, Homo sapiens
tatggggggaacatctgtttttattggaggcaccaaaacaaaaggagggccccaagggggggtgtggggcgtgggggcaagagactgggcgtggaattgggggcgcaggccaaaacccgagaatgggcgcaaaaaccccaaccccacaaaggtctggccctgagaagtgcgcatggccgctggtccgccaggggacagggggaacaacaggggaacaggaggttctacacgagggctgggtgggacaaacctcccctccccacaaatgatgggccccacaaaaagccgacacaagggcacaccaggtggacacgggaaaccccaggtaacaaaaggcacaggaaaaaaatcgctctcatgtgagacacggggacacacctgtggggagacctctgaggacacactatggtcacacaggggagatatggaggcccccgagatgtgtggaggcaccggaaagagatccaccaggagagaacctctaggtcctcatatacacggaaagtgccccaccaaggagaaggcacaatatgtataactccacaccaccaaaaacagtgtagaggagacactggtgagcccccccacctgtgggcggggaccaaaagcgcaacgggggcgcaagtggcgacccacaggtgtgggcacgagcgcgacaagagggcgagtgaggagacgcacgtaaaaaccgggggggagcacccaaagggggcacaacaaacaatatacaagagcaaacgaatagaaggagaaagtaaccacaggggggtgacatccacccaactataaccaagtcggtgggggggcatctatcacacgacaagaaagggggggagggagggagcaaatataccaactacacaccattgaaaaaactcgagggggaagaaaaaacaccagggggcgagacaccacgagaggctactgtagcaggacaggcaacaaagggcgaagccacaaaaacaccctgaataaacgaagggtgcgctggtcataagaaaaggaactacagagagatagtatacgcatccgaggagaaacacacaaagatgatgggtgtagagaaaacgatgtggcgccaagagaaacactcagctaaattaggaggaggcagacattcaggaatattgtggcacaaacaaaaatgttgtcgtcggaacagatagtatagatgatgccactttgtggagtacgcaacaccaaaacttatgggatgcattctggggggatatgggggacaagcgggagggaaaaaagtggtctgtcatctaagtgtgtgggaccaaactgc

SEQ ID NO: 500653 - DNA, 250 bp, Homo sapiens
  misc_feature (168)..(168): n is a, c, g, or t
gacccgcacggtagctttgtcactaagcccacgctgggactggttggattccaaggaccaagtcatgggacccggggtttcctacttggttcggtacatgggttgtgtggaggtcctccagtcaatgcgtgccctggcgttcaagacccgtggctcaggtccgcaggnctgccttcagtctggtgtgtacggctgtgcggggtgctaaggggtcgacagggatggacgacaatgccctgtagactgtcct

SEQ ID NO: 500654 - DNA, 484 bp, Homo sapiens
ggctcagaggtcgtacacctgttccaaccgtgctgacagaatctatcgttttcacgcctttaagaatgaacgctgatataacggccacgagcgcctgggcgatgaacgtgacggcaaaggtctgaggcggccagaggtgcatcgttccggaaaccagcataggaccaaccacgccagctatcactcctccccccataaccagcgacagggcccgggcccggcgttcgggcgtaacgccatccgttgcggcaaaacgaaagcttagcgcgaccgccgcataggcaccgcccataaatgcagcaatgcagaacagcaggaatgagccgatgaagacggccagagcagccgtcagtccggtaatgacgcctgccccggtgccgaccataaaggcggccttacgaccatttgtccgcgccagtgaacctaacggcaagatacaggccgccatccccagaaacaacatggtgatgggaagagtggcagc

SEQ ID NO: 500655 - DNA, 140 bp, Homo sapiens
tcttctactgcatggatatgattcactttctatgagacagatataatcatatgatgtgttcaaggtctctcctctcagaggagacagcagatctgttgtacctcgtgacatgcgcgtagagggtacgagtcgatcgaatc

SEQ ID NO: 500656 - DNA, 750 bp, Homo sapiens
  misc_feature (16)..(16): n is a, c, g, or t
cgcccaatttgtgtgnaaatttaaaccccttgagcgccttgaactttataggcggttgcccacttaattgtgtgcggtaatcgcgccactgtcgtgggcccaggagagatccccgtttcgccgcgaccactgttattgacccgcgaagtaatggttgttacaaccacaggacatgttgtgttaaacacttatgtgggaaagaggatccccccttaatggtggtcgacagcccaattggtgaaatttagaccacgccaccacaacatccaaggggtctcacactccgaaaagcacaaccacaggtcccctggtaatatgatattttaaaaacggtatgtgtaatattgtaaattaattaaaaaaagttatatggaggtccctttaactttcttggagcccctgtaaatataccgctgcctggtgtggtatcctgggccgcttaccaaagcacgttagctgacggctatatttccacaatatattcccctagataatagtttgctcgctgctacctcttgggcctctaaacccaatgcccccccgttgtggtgatccaatacctcttctcgtgattaaaagagaatataatataaataataggtatatcctcaattttttgtcatcaaaagccgaatttttttgcatctactttctaaataataggttgttaaagtttaacgcccacacccccttacataattaacccccccccccttttaaaaaaaagaaaattttacacaatggggaaaa

SEQ ID NO: 500657 - DNA, 158 bp, Homo sapiens
tttacttttaaatatttagtccatataacatacaattatgccttcataatttcgggcctgtgtatgtacatgatgatacaagaaagcccaagacagctattagggcatggagagaaaacagatggcactattgtttttcaaaatccgttgagaagctt

SEQ ID NO: 500658 - DNA, 986 bp, Homo sapiens
gatcgtctgtttgagcgctattgtgaggatggcgaacgtggactggccatgataaagtcagagtcttcggaataagcgcacgccagcggtgtccgctgtcttgatctgagtgagtgcatcgtgaagttgctgagaatacggtctccatcgagatgcagatgtctctgcttgcttgcctgatttcagatgattgcgctcaaggatcagcgtcgagcagcatcatccgagggtccagagtaagaatatgattcggtgcaaaaaactcggtgcgaggtatgataacgcgattataggatgtataaagcggcgaacgggggatagacttgacccagacagatgatagcgaagcattgggagaatgtgctccagtaccatgcacacgtcgtgagagggtagaacacaaactgaagcaatgagtaggcattgctagtgagcaagatggcgcggtaagaagtagtgtgcattacaggcattacccattgcatacttggagggtattcgctacaagaattgagtcattatacgaacgaccacaaggtccttactggatatggagtggtagcgatgggcaacatcgaaaagctcaataagaatacacttgcaagtcggacaggttattggggactcctctgacattggctggaattagtgactttgacaaagacatattaggcaagcttctacgtgcatgctgctgttgactgctgcacgcccggtcagagtgtggtctgtggcatgggtctgctacttgcggctcccgaggggtgtcccgatgtaccctgggcaccggcttgggtgctgctgccaccttttgggcttgcacacctttcctggcagggattgctccaccagggaaccctgggacccccaccgttttgtggccggcaattcttccttgccaagggcgcacccatttggtggctccttctcgaggcacccaagggctcgtttccaagagggcgctggagagccttctctggacgact

SEQ ID NO: 500659 - DNA, 334 bp, Homo sapiens
  misc_feature (129)..(129): n is a, c, g, or t
catccagcacatggtcagcatggacaggacagcaagaggctaaccctctgcttatgtggaagctgaccccaagccacccttcacctggacaggatgagagtgtcatgtgtgcttcgcctcctggccctnatctttgccatagtcacgacatggatgtttattcgaagctacatgagcttcagcatgaaaaccatccgtctgccacgctggctggcagcctcgcccaccaaggagatccaggttaaaaagtacaagtgtggcctcatcaagccctgcccagccaactactttgcgtttaaaatctgcagtggggccgccaacgtcgtgggcccta

SEQ ID NO: 500660 - DNA, 454 bp, Homo sapiens
  misc_feature (95)..(95): n is a, c, g, or t
agtgttgatcagtttactagtatttttccaaacctgaagaatggtgaaagtttgtggtacagtgtggggaaaacagtaagtgtgggccccggggncggccggcgagcccccccgggcttgccggccccccgcaccaagagggggttggagtgtgtggtctctaaggcactgaatttcagtctgttctccatccatcagtggatatgtgagatgcaatgcaggggtgctggcctgtccctggtaatgagcgaggatatgagcaaagcagtgagtacagcctggaattccagctactcaggaggctgaggtacgagaatcacttgaacttgggaggctgaggtttcagtgagctgagatctggccactgcactccagcctgggcgacagagtgagactctgtctcaaaaaaaggattctacgactatgattccaagagtgtaaaattccaagatgt

SEQ ID NO: 500661 - DNA, 723 bp, Homo sapiens
  misc_feature (7)..(7): n is a, c, g, or t
  misc_feature (81)..(81): n is a, c, g, or t
  misc_feature (93)..(93): n is a, c, g, or t
  misc_feature (104)..(104): n is a, c, g, or t
  misc_feature (120)..(120): n is a, c, g, or t
  misc_feature (238)..(238): n is a, c, g, or t
  misc_feature (255)..(255): n is a, c, g, or t
  misc_feature (265)..(265): n is a, c, g, or t
  misc_feature (276)..(276): n is a, c, g, or t
  misc_feature (320)..(320): n is a, c, g, or t
  misc_feature (377)..(377): n is a, c, g, or t
  misc_feature (415)..(415): n is a, c, g, or t
  misc_feature (494)..(494): n is a, c, g, or t
  misc_feature (502)..(502): n is a, c, g, or t
  misc_feature (523)..(524): n is a, c, g, or t
  misc_feature (576)..(576): n is a, c, g, or t
  misc_feature (588)..(588): n is a, c, g, or t
  misc_feature (606)..(606): n is a, c, g, or t
  misc_feature (654)..(654): n is a, c, g, or t
  misc_feature (673)..(673): n is a, c, g, or t
ttctttntcttctgacatgtgctgggttcgggccattagctgtgccgtcgacaatagccccattcaccccattcataaatnctgctgctacangaagggaacancggctctcccagaaanggatccacctggaacacgagtcacctccaaagaactgcgactgtttgaaaatctgccaagaagaaaaccactcaataaaacctggataacccaggcccggaaataatagcaggatgtngtacttcaagaccctgnacaccctgtngatcacgaacntcccgtcataactcaagaaggcaaacaaccacgggtcaaccgangaccagtccacggcatagacgctgtcctcgtgctcctcgtaggtggcgatcacgttntcctgcaggggctccttgctcttctcttcagaacggtngtcctcctggtcactgatgtcatcctcgtctaccaagtcgccgaagcctccgacgagatggacaccatgttggaaaggntgactctnctgtcactgctgcccgtgagnnccagctggtcatgagagtggttgtagcggacgttccacacccagtgggagtnttcctccagggncttcacgggttcggtganatttcgggtgtcccagaacttcaccttacagtcgtctccgcagctggncaagtagtactgcttattnggattaaagtcaaggtcccgcaccagctgtccgtgggcattctctatgca

SEQ ID NO: 500662 - DNA, 161 bp, Homo sapiens
gtgggggcggcatctaaatagtaaaaaaatatgcaaggggaggtataaataatattatatgctggggtatcagtgactctagaggtaaacaaggactggagaaaaatagacaattctgcgaggaaaacacctgtcttgggactcacgccgaggtgttttcc

SEQ ID NO: 500663 - DNA, 951 bp, Homo sapiens
ggtgcatccagaatgtccagcatccaggaggtcctgaacggtcaacctctctatctatacaagtgatacaatgcatagggggctggctcctcccagaagctggatggaggctcagatgcgggggcagtgacaggtgagtcagctgctcttgggtgccgggagagccattcagtacaaccgccgtatgtgtcacagcgagtgggttctaggaaagtgcggagtttagatcatgctgtacagatacatcgatcagagcgctaagatgaaacctcagcctagaactcataggactgactgactggaaaggagggtttagtgtctgcttctatccacttatactatagtctgctgtgcgtccactgaggtcacatatatgctgactactaattgccttggggtctttgcagagggtgggggaactgaacccccgtatgacaccttggccttgtcctcagaatgatgagacaacggggagttaacatcttgtgaaagaagcccggagcgaggatatgcccagggggctgccagtcgtgggatatgcagtgcaaacgcatacaacgcttccggggctacaaaagacgagacagcctgagaaccttgcaacagataatcgggggaattaacaaggcacacaacacgaccattgacagtgggtaaaactgggaaatgtggtagagatagagactgaggttccaccagagttgagccaggcgaggcaccgaaccgtgtgacccgaggggagcacaacccgcacttgtacctccacaagggggcgggtattacaggcacaggcccacgggccgagatgagaccacctatagacaccgactcatggggggaataacggaaccaaaaagaacatgacagagaacacaaattgggcaacaaaggaccccagatatattgcacaagcaagggtaccgcaatgagcggaaacaggaaacaaagaaa

SEQ ID NO: 500664 - DNA, 161 bp, Homo sapiens
gcccatggagaaagcaaatgtaaaactggataagaaaatttttttggcagttcagccctttccctttttccccctaaatttttttttaaattacccagggaacccttttaactttccagggccctttgcccttaaagtcttttccccttgatttgtttcca

SEQ ID NO: 500665 - DNA, 124 bp, Homo sapiens
ttcgatgtgtgccagagttattgtacaaccacaggtgcgggcagttaaaattcttgccaaatgccgcgttgatagaacacttttctttttagatttataactcaaagcagcaatctttgaagca

SEQ ID NO: 500666 - DNA, 146 bp, Homo sapiens
tttggttggtttttaaatcataaaaagttttggtacaaaaagtgagtggttttttttcttcatttaaaaacaccagggtgtggtgggggagggagtgcaaacaaataacaaaaaagagtgctttggtaacatatattttccctgtg

SEQ ID NO: 500667 - DNA, 144 bp, Homo sapiens
tttccctcccaacaaaagccctggtttttgggttggagtgcagcacccccaaccaggttttgagctccttcccaggagcctttagtaaagacacgccactccaacccacacccctgcatttgttcaagctacctcccggggcca

SEQ ID NO: 500668 - DNA, 422 bp, Homo sapiens
gagccactctcatcgaggagatgcacggtccgatgcctaggacgctctctagagcaccagggctactggacagcagccgatgagagctgctatagacccggaatcacgcggaacagaaggtctgcacgagccagcacatcttgcacggccgattacgccataccatcttgtgcttgctgaccatgcatgcggagtaatccgtagcgagacatacatccggtatggtgctgatagcagaatgccacagtactgtacactcacgggtcatatgggactggagtgatacatgctgttggagatgatgcatctgcgacactactggtgacatgattttcattagcggctcgagctctgagggttatcctgagcctgctcactgcaatacgcctcactgtttacgacactacctgctcgaggacttt

SEQ ID NO: 500669 - DNA, 128 bp, Homo sapiens
  misc_feature (77)..(77): n is a, c, g, or t
gaatgcgtgtaggcagacttggttctacagtgagccttctctctgcgcagtgagtctcaaaggagccaattaaaagngggtgaagatgttcttccttcaatatgtaggccgggcggtgtgggtttcac

SEQ ID NO: 500670 - DNA, 173 bp, Homo sapiens
cctatcatatagtaaacccagcccatgaccctaacaggggccctctcagccctcctaatgacctccggcctagccatgtgattcacttccactccataacgttcctaatattgggctattaaccaacaaattaaccttttaccattgtagggggtggtacaaggggaaggcac

SEQ ID NO: 500671 - DNA, 118 bp, Homo sapiens
cttacccttctagcctccctcttccagtttaaaagaatgcttgtaattacatgggctctcctagatactccaggataatcttgtattaaggtcagctgatgggcacacattatgaacg

SEQ ID NO: 500672 - DNA, 1004 bp, Homo sapiens
acactacagcttttaaacagttccgacttcgaatctgactatcgtcgtatcccctaatctcattcaatttcgccatagaagaggggtaattatgagacatctctctcagtatcttggtgctgactctcactgtcgataatgcacattatcgtcatgtctggttctggtattctggaatgcttaccagaagcatttgtgtagagcctcagtatcccttggggctagtgcccagaggcactcttatgttctcgctgatgtactggcacgcaccgcatgatgtgcatcagtgatagccagacagcagcgtttgattattctctttaaaaacgttgtgttcgtccacaggatttaccattagcatccgaatctgattgcctaagggccagatatctctagcgaaatatgagggccattttataaggcagagtctcttctaggtccgtcccttttatttgttatcaagcgtagcgtaccaaacgtaaaaggcaataccatcgacatcatggatattctctgaacacctggaacgtatcattgcctttggctggctgtggaaggacatgctcattcaagtccccaatccaaacacctttggaatttcagcagcgatgtggggatcatacttgaggccaggatttgacacagaacactgccggagaaggccccagtttcgaaagttgggcctcagttttcccagaattgtcctgggtgccataagccgctattagattgtcgatgaatctactgatgcaatgtgtagcagcctaaaacaactgctgttggtaccgttaccgaatttgctgtaccaagcgatagaatctcggggatatgccataatgtcgccctcttcacgatattactgccttgaaatattgaaagccgactttcagttgaacccaaaaagaaagccatacaacggggaagcacagttaaacattcgaacgacgtttcgctgaactccaaacaaaaaagcaaaattgccgctcaaataacactcgcgacct

SEQ ID NO: 500673 - DNA, 257 bp, Homo sapiens
aattgtatcttaagaacataccatgaaaatatcagtgaattgtcctgatgattccctgttagttgatttaaatcctttctgaataaagatcagcataaacagtaactgaaggagcatgtatagctctttccttcaaattcaactagagccttttcaaaaagacattttgcctgctagtcagatacatttacatttatgcggaatcttttaaataggagacaattcagaaactgggtcacaggcctaaagttcaggag

SEQ ID NO: 500674 - DNA, 136 bp, Homo sapiens
cggttaaatccaaaacggcagaagcctgaatgagcttaatagaggggcatgtgctgtaggccagcgcaaccctgtacgactactacaaccccgagcgcagatgctctgtgttttacggggcaccaagtaagagcag

SEQ ID NO: 500675 - DNA, 448 bp, Homo sapiens
  misc_feature (386)..(386): n is a, c, g, or t
  misc_feature (401)..(401): n is a, c, g, or t
  misc_feature (429)..(429): n is a, c, g, or t
  misc_feature (446)..(446): n is a, c, g, or t
tgaaattttccattgcaggcatgtttgggcaagtcacctgtgtagtctgtcttatctatgaggctgtgggcatgtcttaggcaagcccccctgtgcaagttcccatatctgtgcctgcagcttgatttttcaggctgttcttttgtttaaaagaattctaccgagaacccaccctaactgcctgcctgactggtttcttcctttctcctctctcactccttctccagatgaggaaacaagatcagagaggggacagtgacttgccaagttcacactgaggatgagtccaccctgtgaccctcccctccttcaaaagagggacctttaccaaaggggattgttcattcgggggggcccttcaaacatccatattaggtgatggacantttggggaaggaggntttggaccaaaacccaaggaaacaggantcctaaggttttttaantt

SEQ ID NO: 500676 - DNA, 431 bp, Homo sapiens
acaattgttatatataattaaaagtcagaatcttaggtgataactgtcagacctctgagcacaagctaagccatcgcatcccctgtgacttgcacgtatacatccagatggcctgaagtaactgaagatccacaaaagaagtaaaaatagccttaactgatgacattccaccattgtgatttgttcctgccccaccctaactgatcaatgtactttgtaatctcccccacccttaagaaggttctttttaattctccccacccttgagaatgtactttgtgagctccacccactgtctgcaaaacattgctcttaacttcagcgcctatcccaaaacctataagaactgatgataatccaccaccctttgctgactctcttttcggactcagcccgcctgcacccaggtgaaataaacagccatgttactc

SEQ ID NO: 500677 - DNA, 572 bp, Homo sapiens
  misc_feature (172)..(172): n is a, c, g, or t
  misc_feature (181)..(181): n is a, c, g, or t
  misc_feature (184)..(184): n is a, c, g, or t
  misc_feature (200)..(200): n is a, c, g, or t
  misc_feature (205)..(205): n is a, c, g, or t
  misc_feature (212)..(212): n is a, c, g, or t
  misc_feature (215)..(215): n is a, c, g, or t
  misc_feature (221)..(221): n is a, c, g, or t
  misc_feature (226)..(226): n is a, c, g, or t
  misc_feature (231)..(232): n is a, c, g, or t
  misc_feature (244)..(244): n is a, c, g, or t
  misc_feature (248)..(248): n is a, c, g, or t
  misc_feature (360)..(360): n is a, c, g, or t
tctagtaggtcccccgtgcagtactggatgtgctggatcaacgggaaaagtgactgcgcatgactggggcccagctaggctgccaggacttgtgctcaccctctggctgaggagctgtctggctgctttccatccagctgggagtctggcaggcccttttttttttttcttngccgaaccntgnagggttcctctctaanggagnatgtgcngcngtgctnggggnatgtnnctcccggggtgnggcngggcggctctcacatacagaggcggaggggccaattcgttctcggccacagggatttgcctcatggtgtcccaaaaacaaatcgcagccagtttttccagaaatagaaaatncggcggtcggaggttaaatactccaggtaagtaagtttggggagggaagaccatttttagtgttgtgaagcctcctgatcaggaaaccagaaataccacttttatggaccatgaatgtgtgggttcttgactctgaggggcatttggagtcaatcagcgtagggggatgtcaaaagcaggcaatccttgtagccgagagaaataaaggcttc

SEQ ID NO: 500678 - DNA, 413 bp, Homo sapiens
accccatgctcttataaaaatacaaaaattacctgggtgtggtggctcacacctgtacgttccagctactcgggaggctgagtgcacaagaatcacttgaacccaggaggtggaggttgctgtgagccgagattgcgctactgcactccagcctgggtgacagagcaaaactccatctcaaaaaaaaaaaaaaaaaagcgggcggtaacgtgtttgctcgcatattatattggttatcccaataacctggttttgtggatccagacgctctgggaaaatgtattaccagcatgaacctaacatttctgtcactcgaattcctttctctcctccccaccaccaagagtcatatggtttcaggctgcgacattcatgtccataggggttgccttgtacacagatcaaagaaacag

SEQ ID NO: 500679 - DNA, 149 bp, Homo sapiens
atagctctccatgctttctctatgagttgacagctgggctgaatgctgatccagctctgattcccatcttctcattttctgcggacatcttcatggttttgtaactttcatgttgaaccatgctctgtctcccaacgagtccattctgt

SEQ ID NO: 500680 - DNA, 410 bp, Homo sapiens
cgcaggggtgctctaaagttctgagtttccatctgctccagcgtttcacgcagatcggacgtcgcctggtcgatattgtgctgcatctcttcgtgataagcagccagcgacattggcatcgagttgataccgtttttcagcatatccagctcgccgagcataaatccttccacccggctgtcgagttgcccgcgacggatgcggtcgacggtattcaccatgttgcgaatcggaccggttacatcgcgcattaagcggcagccaaaaataagcgcaataccggtacaaaacagcatcatcacgctggaaataaagatctctttatattgctgcaagcgaaccgattttagatccaggtccagcgcaatatatcccaacatattttgactatttgtgggcatcgctacttt

SEQ ID NO: 500681 - DNA, 737 bp, Homo sapiens
cacatctgtaatcccagaactttgggaggccaaggtgggcagatcatgaggtcaggagttcgagaccagtctggccaacatgatgaaaccccatctctactaaaaatacaaaaattagccaagcatggtggcatgcacctgtaatcccagttactggggaggctaaggagaatcgcttgaacctgggaggtggaggttgcaatgagctgagatcgcaccactgcactccagcctgtgcgacagagaccccggttcaaaaaacaaaacaaaacaaaaagataggccgggcgcagtggcttacgcctgtaatcctagcactttgggaggccagggtgggaacgatcatgagatcaggagttcgagaccaacctggctaacatggtgaaaccctgtctttactaaaaatacaaaaattagctgggcatggtggtgtgtgcctataatccctgctactcaggaggctgaggcaggagaattgcttgaacccaggaggcagaggttgcagtaagctgagattgtgccgctttaccccagcctgggatgacagagcaaagactccgtgctgaaaaaagacaagacaaccacacaaaacaaaaacccgggggggcgggaggggcccgcgaaaaaggttctaagaacagggcgagggacgcgcgcgcccacatgggcacgggacacaggcgcaaacggggacccaaggaaacccgggaacacgagacaaaggcaaggatctccaa

SEQ ID NO: 500682 - DNA, 598 bp, Homo sapiens
agcgggttcttcttgttggcctacctgaatacatgctgaagaatgtcctgaggaccctctgtcagtctgggtacagatatgctatagttcagtggcacatggtatgaggagagagctgcctgcagagagcgtgagtcctgatcccttgtcccagggcaaaagagtttcagaggaagcccaactccactgggcggtttttcaggacctggagaggagaaggagatgaagagtgtcatttactggtttcctcagttatctcaagaggtccacgtctatctctctcatgaagcgtaagcactcctctgactcagaacactcagttaactgaggtgctttttaaacagagatatggatttagatcatggagcatatcctctcacccgtgaccagtagccaatattgcagaacagctgacagaaatgtggtagggatgctgcgtgactacctgggcattactctacagagctggatcacagaacctaacttcattagcatcatagtctaatgagataactagtgagtgcaataaatacttgatgactacgaataaagtcagcaaagaaaacagacaaagaaaaaaaaaaattcttccagggcg

SEQ ID NO: 500683 - DNA, 790 bp, Homo sapiens
ggtgctggattacaggcatgagcacctggcctaatttgcctggttgttgtttgagtcaggatctccctctgtcgcctagtacagcggtgcaatctcagctcactgcaaactccacctcctgggctcaagtgatcctcccacctcagcccctggagtagttggggttatggcgtgcgccaccatgcctcgctaatttttttattttttttgtagagatgggttttccccatgttagcccaggctggtctcgaactcctgggctcaagtgatctacctcggcctcccaaagtcctgggattacaggcgtgagccatcgcacctggcccaattcgccatttttaaatgatgaggttggtcatttttcctatcaattggccatcttatatgtggtttatgtgttgtcgacatttttgtccttttcaaaggggactaggaaagctagcaacagaaaaatgggcgtttgttgtgacttctgaaagtcagggactcgaagggagacaggagctttccggagagggccctgctgtggggggacctagactggagaccagagggagggctgcaagcctggtttacagatacacgtaatgggaatggttctgtgtgtttcctcgagtattgttgagtgcctactaagtgccagacaccatacctggtgtctcacctgtgctcaggtctttagggctaaggctgtacagtactaaccatccattgtcaatgcgaatgaggccaacgctactgggcacagaaccattagtgagggtcccaaggccagcctgtttgcaccctg

SEQ ID NO: 500684 - DNA, 449 bp, Homo sapiens
tacgggcagtgaatcgagctcgtgtaccggggttgcttggtttggcagtgcagtggctatctcagctcactgcaacctctgcctcccagcttcaagtgattctcctgcctcagactcctgagtagctgggattacagatgtgtgccaccatacctggctaatttttgtttttgtttttgttttttttgagacggagtctcactctgtcgcccaggctggagtgcagtggcatgatctcagctcactgcaagctctgcttcccgggttcatgccattctcctgcctcagcctcctgagtagctgggactacaggcgcccaccaccacgcccggctaattttttgtatttttagtagagacggggtttcaccgtggtctcgatctcctgaccttgtgatccgcccaccttggcctcccagagtgctgggattacaggcttgagccaccatg

SEQ ID NO: 500685 - DNA, 606 bp, Homo sapiens
  misc_feature (139)..(139): n is a, c, g, or t
cccctcccccccatattgccaagattttatgggaccgcgggcctttttgcccccggcctgggaaccgtgggcccatgggcactttcatatgcccccccaggtcctttagtcccagggacccccagagcacccccaagcntggggttgagtggcagaaagctcccccttctcccctgctccaggaggtttgcagggagctcaagcccttggggagggggatgccttcatgggggtgcccccacaatttgttttatcccccccagccgggccccggcctttatgttttttgtaagataacccgtttttaacccaaagccccgggctgtaaataagccccgggctgctgtaaatccaggaaaaaaaagctttaggtgggagcggggctgggaggaagggatgggcccccccttcctgggcaccctttccagcccccgggggggttttttttcctcccccccttccccatggacataaactgtccctttaggaagaagcccaatgcccgattttgccctttaaatttggggattttcctggatttataggatgggccttttttgattaaaatatttaatatattgaataaaaaatagccctgtggttgga

SEQ ID NO: 500686 - DNA, 652 bp, Homo sapiens
  misc_feature (240)..(241): n is a, c, g, or t
atcaggtgggtgttagtggtttcctgggtgtattgtctggtctcctagtaggtctggtgagaatagtacaaggattagtaggattagtattataaataaggcccctagaatgtctttaatagtgtagtatgggtgaaatggaattttgtctatgtctgatgagattccggtagggttgttggatccggtttcgtgcaggaataggagatgtacggctgcgagggcggtaatgatgaatgnnaggataaagtgaaaggcgaagaatcgtgtgagggttgctttgtcgacggaaaagccccctcagattcattctacgaggtctgttccgatataagggatagctgatagtagatttgtgatgaccgtagctcctcagaatgatatttgtcctcagggcaggacgtagcctatgaaggctgttgctataacggtaaatagtaggactactccaatgtttcatgtttctaggaatatataggatccgtagtataggcctcggcctacgtggatgaataggcaaataaagaacatggatgctccgtttgcatgtaggtagcgaataactcatccgtaatttacgtctcgacagatgtgtgtaactgatgagaaagctgttgttgtgtctgatgtgtaatgtattgagtctcacgga

SEQ ID NO: 500687 - DNA, 185 bp, Homo sapiens
catgcaggatccccctcctaggcaccagacaattataccctagtcctaccccttgaacacccctccccacattaagcccgaatgatatttcctattcgcctacactaattctccgtatccgtcccttacaaactaggaggcgttcttgcgctattactatccatcctcatcctagcatagaatcg

SEQ ID NO: 500688 - DNA, 1004 bp, Homo sapiens
acaaacatggaaaaacattccttgttcaaggataggaagaatcaacattattaaaattgccatactgcctagagcaatttatagattcaatactattcctgttatactaccaatatcattcttcacagaattagaaaacaaaactattttaaaattcatatggaaccaagaaagagcccaaatagccaaggcaatcctaagcaaaaagaacagctggaggaatcatgctacccgacttcaaactatactacaaagctacagtaatgaaaacagcatggtaatggtacaaaaacagactcatagaacaatgaacagaatcgagagcccagaattcatgctacacagctacaatcatctgatatttgacaaagtcaacaaaaataagcaatggggaaaggactccatattcaataaatggtgctggaatacctggccagcatacacagaagactgaaacaggaccccttccttataccatatgcaaaaaaaacaattcaagatggattaaaagacttgaatgttgttaaaaaacttaaagccaaattaaaattttaaggcaggtttaattggagcaatgaactgatatgcaagtcgggcagccccagaatcacagcaagattcagagaagactccaggatgctcgtggtcagaacaaatttatagaacaaaaaagggaagtgacgtacagaaaatccgaaatgagtacagaacaactggattggttacagtcatcatttccttatgtgacccttagcagatgagtggtgagtatggtgcggattggcacactgactatgtaagactggtacctagtaagtgtcgactgtactatagtagggggagtcctcacgagacaattgagaggatctccagcatagcaggtaagaacaagagtaacgggagacagagcaggaaagagagtaagaaacacaacaaaaggggaacgcaaacaaagaggataacaaaagagacagacgagatactttatgacgggacaaagacgc

SEQ ID NO: 500689 - DNA, 276 bp, Homo sapiens
  misc_feature (179)..(179): n is a, c, g, or t
  misc_feature (252)..(253): n is a, c, g, or t
cctagggtcagttttgcaggtggtagccatttaccaagatagttgtaggtaagaagggcagatttattagagaaattgtgaaaatatgttgcagtgggcagctcagcagagaaggggctacctgcaaagaggcgagggctggaggaaagttttatagggtcctgcgtgaagggtgctancagtgtggacatgaaggtcacttgtgccctgcaggttgtttgtgattagctgtctctaacaattgttcatacnnaataattgttccattattgttct

SEQ ID NO: 500690 - DNA, 913 bp, Homo sapiens
  misc_feature (281)..(281): n is a, c, g, or t
  misc_feature (291)..(291): n is a, c, g, or t
  misc_feature (329)..(329): n is a, c, g, or t
  misc_feature (331)..(331): n is a, c, g, or t
  misc_feature (333)..(333): n is a, c, g, or t
  misc_feature (458)..(458): n is a, c, g, or t
  misc_feature (480)..(480): n is a, c, g, or t
  misc_feature (673)..(673): n is a, c, g, or t
gcttctgctggcgagggctttccgcagatgtgccgctcgcggctatggcgaggtgcgctgagcaggtgtcggcgctcggctgccgggccgatagactggacggaaagccttgcgtccgagtctcgcgtggctcctggcccccgctccgagctatgagctacggccggaccgcgcttccctgactgtggacgggtatgactcttcccactctacaggtgtgactaagcgtagagacgtagccgctaccgtcagctcctgacacgctgaggcgcgtcttcganaagtacaggncgcgtcggcgacgtgtacatcccgcgggatcgctacancnanggagtcccgcggcttcgccttcgttcgctttcacgacaagcgcgacgctgaggacgctatggatgccatggacggggccgtgctggacggccgcgagctgcgggtgcaaatggcgcgctacggcngcccccggactcacaccacagncgccggggaccgcaccccgcaggtacgggggcggtggctacggacgccggagccgcagccctaggcggcgtcgccgcagccgatcccggagtcggagccgttccaggtctcgcagccgatctcgctacagccgctcgaagtctcggtcccgcactcgttctcgatctcggtcgacctccaagtccagatccgnacgaaggtccaagtccaaggtcctcggcggtctccagatctcgttcgcggtccaggtcccggtctcggtccaggagttcctcccccagtgtccaacgagggaattccaatccagggtcgcgatcgaaagagtcaccccaagtctcctgagtaggacgagcggtggtcttttagaaactgagtattcggaaaaggggtaaacggagacttggggaaaaggacccattatcacatgagaaaa

SEQ ID NO: 500691 - DNA, 907 bp, Homo sapiens
  misc_feature (275)..(275): n is a, c, g, or t
  misc_feature (285)..(285): n is a, c, g, or t
  misc_feature (323)..(323): n is a, c, g, or t
  misc_feature (325)..(325): n is a, c, g, or t
  misc_feature (327)..(327): n is a, c, g, or t
  misc_feature (452)..(452): n is a, c, g, or t
  misc_feature (474)..(474): n is a, c, g, or t
  misc_feature (667)..(667): n is a, c, g, or t
ggacgcgtgggtcgacccacgcgtacggcctttcccagtgtccccacgcggaaggcaactgcctgagaggcgcggcgtcgcaccgcccaggacgctgagagacagccaggcagccatagttcagcaggaggctaccaggagccagccacgacagatgcaatagagcgaagcaagcatgcgcccgcgacccggagagatgagagtagtgacctccctcaagggtggacacactgacctaccgcacctcgcccgacacgctgaggcgcgtcttcganaagtacaggncgcgtcggcgacgtgtacatcccgcgggatcgctacancnanggagtcccgcggcttcgccttcgttcgctttcacgacaagcgcgacgctgaggacgctatggatgccatggacggggccgtgctggacggccgcgagctgcgggtgcaaatggcgcgctacggcngcccccggactcacaccacagncgccggggaccgcaccccgcaggtacgggggcggtggctacggacgccggagccgcagccctaggcggcgtcgccgcagccgatcccggagtcggagccgttccaggtctcgcagccgatctcgctacagccgctcgaagtctcggtcccgcactcgttctcgatctcggtcgacctccaagtccagatccgnacgaaggtccaagtccaaggtcctcggcggtctccagatctcgttcgcggtccaggtcccggtctcggtccaggagttcctcccccagtgtccaacgagggaattccaatccagggtcgcgatcgaaagagtcaccccaagtctcctgagtaggacgagcggtggtcttttagaaactgagtattcggaaaaggggtaaacggagacttggggaaaaggacccattatcacatgagaaaa

SEQ ID NO: 500692 - DNA, 937 bp, Homo sapiens
caggggactgtgtccacactgagcggggttaccttacagagccactgagaatgatatatataatttcttctcagctcttaatcccatgccagtacttattgaaattgtggacccgcatggcagagttgccggtggagcgcgagattgtctgaatttgctactccatgaacgatgctcgtggccacgctcatggcatatataggactaaagcttaattattgcatactaccagtataatgttgcagctctttcttataattctaattggtaaggaacacagttgcgcgagtgcttcaccgcactccactagctaatgtgagaaacttgtcttgcacattctacaggcggcgttgcaagtggtggcgcttatggtagcccaaaggatgggagcgagatagggcttatccaacacagtgctaggttagtggaggtcctgctagaccagaaggtgagtgatgctggatggaggtggatatgggaggtacagagcagtatgcagtggtctatgaccaaagttctagcaggaagtctccagggactatctagtctaaaccttgctggagggtagagaatgtgcattaacatagcttgtccagatataacagagctgtacattgtgtggggatgttgcactacgaatgggagggggtgtgacgtatatcccagtattcgatggtaagtcggacagtatatttgattctggttcacgcttgggccagttactactataccaaatgcttgcattctcctgtgtacgaaagacgagtgagtgaaccgttcgcatacagggttggaatcctggtccggtagtgggaggtgacattgttctaaaacttcacccggatttgacacggaacgttgctcgggctttataagtccttggccaactggacagatagggcccgtatatagaggggccggagggtaagatggcatc

SEQ ID NO: 500693 - DNA, 655 bp, Homo sapiens
ggccggttttcagaggtggagtccagcctcaaccagtccttctgctcccgccgcctctgcgcctgcctggtggccacgaaggccaaaggagatctatctaaatatccccgaccagccggacacactgtgcttccagaattcgtggagctgccccaccgtacgtctatgctgtggggagaggctctgaggccatggctgagggctctgtgctggtcagtgctattctgaaggtcaatggcagcaagcgtgatgaagcgatggtgcccctgaggtcctggagcactattccaggcattccggagtcggtgctgatagaggcccgtgggcctgtagccagtggatctagtcgacacccagtggaggatgcccaggaagcacgatgccagtcaggaggcctccactgaggagcccagtggcgagcaggcccaggaggaagacccaggctgattcagcccttcccactgctgtccctgggtccccggcgtgagccgtgtgtgagtgacagcacccagtggtcgaccctgtactgtggacaatggtgcacctggaacacggcgtggtgtatgagtatgtgatcacggaggcgtcgggtggcatgtgctggagaagatcgtcgcccgctcccgtggctgtttttggtgtccatcggcaagat

SEQ ID NO: 500694 - DNA, 108 bp, Homo sapiens
ctttagagttcccccatggttctcacattcgtatatactagtgcagtcattcaaatcaacccatggagcaatgaatgaaatgtaagtgagggcgacagcccacacagg

SEQ ID NO: 500695 - DNA, 350 bp, Homo sapiens
  misc_feature (1)..(1): n is a, c, g, or t
  misc_feature (47)..(47): n is a, c, g, or t
  misc_feature (67)..(67): n is a, c, g, or t
  misc_feature (71)..(71): n is a, c, g, or t
  misc_feature (80)..(81): n is a, c, g, or t
  misc_feature (87)..(87): n is a, c, g, or t
  misc_feature (104)..(104): n is a, c, g, or t
  misc_feature (114)..(114): n is a, c, g, or t
  misc_feature (147)..(147): n is a, c, g, or t
nttctcagagccctctttcggtgatgtttgcattcaactcacagtgntgaacctttctttgatagtncagntttgaaacnntctttntgtagaaactgcaagtngatatttggncctctctgaggatttcgttggaaacgggataanccgcacagaactaaaacagaagcattctcagaaccctcttcgtgatgtttgcattcaactcacagtgcttgaacctttctttgatagtgcagctttgaaacacttcttctttgtaggaaacttgcatttttacttttccagttatttttattaagttatttatttataggaggacagagtctttgctatgttggcccaagctg

SEQ ID NO: 500696 - DNA, 524 bp, Homo sapiens
atcgggactccatgcccacgtcgtctgggtttagtgctccaaggaggtgccaccccatcccgtgggccctctcctcgcccatctcttcatcctccccgtgcggagagcctactgggggacccagatccccaccccccacaccttcctctgcaaggtgaccggccgctgcggctctgtgctggtacgcctcatccctgcacccaggggcactggcctcgtctccgcccctgtccctaagaagctgctcctggtggctggtatcgatgcctgctacccctccgcccggggctgcactgcccccctgggcaacttcgccaggccacctttgttgccttttttaagacctacagctacctgccccccgccctctgggaggggactgttttcaccaagtctccctatccggggttcactgaccacctcgtcaagccccccaccagggtctccgtgccgcggactcaggctccagctgtggcttccccatagggtttttatacaagaaaaataaagtgaattaagcgtga

SEQ ID NO: 500697 - DNA, 228 bp, Homo sapiens
  misc_feature (37)..(37): n is a, c, g, or t
  misc_feature (47)..(48): n is a, c, g, or t
  misc_feature (50)..(50): n is a, c, g, or t
  misc_feature (69)..(69): n is a, c, g, or t
  misc_feature (77)..(77): n is a, c, g, or t
  misc_feature (97)..(97): n is a, c, g, or t
  misc_feature (101)..(101): n is a, c, g, or t
  misc_feature (105)..(105): n is a, c, g, or t
  misc_feature (107)..(107): n is a, c, g, or t
  misc_feature (112)..(112): n is a, c, g, or t
  misc_feature (118)..(118): n is a, c, g, or t
  misc_feature (123)..(123): n is a, c, g, or t
  misc_feature (133)..(133): n is a, c, g, or t
  misc_feature (136)..(136): n is a, c, g, or t
  misc_feature (149)..(149): n is a, c, g, or t
  misc_feature (156)..(157): n is a, c, g, or t
  misc_feature (168)..(168): n is a, c, g, or t
  misc_feature (177)..(177): n is a, c, g, or t
  misc_feature (183)..(183): n is a, c, g, or t
  misc_feature (199)..(200): n is a, c, g, or t
  misc_feature (221)..(221): n is a, c, g, or t
agcacaggccatcttgttggacactgtcactttgggncttggcaggnntncacagaatcacatcggtgnatttattngtataatattgtgaatattnggangttntnagtgngttgcnctttnagaagttttnggngtgtggatcgctnggttccnngaaagaagatntgccccggncccttngaaagattgtgaattnnagagatagaggccttaggatnccttctc

SEQ ID NO: 500698 - DNA, 879 bp, Homo sapiens
gagagaactaggtctcgagatttctccgaatgtatatttttccttaggtaggcaaattgttaaatccggcccatatgcacttctgaaagcttgaaacacaccccaaaaacagcacccccgggacctgggggggcaaagtgggcaccccccgataaggtataatgctcaataataggggtgcataagggtgcgtgataaaataccttagggtgttcaacaaaaacacgtggacgagtctccaaggggtggtcgtgcgaggccaactatcgcaggcgggacaccggggtctcaaaaccacctccgagggctgtccactatgtcccagtgtggccgtgaagtctcccgacacggtcatagcgaggcctggtacgtgggggccgaggaattctcccaatgaaaggggccccgtcaaagcttgtggacgcccacccagtgtggtccatttggggagaaactcccggtggtggccctccaaaaaaaatcgcggctatgagccgtcacttcacagaagagcctctgtgccccaaccgaggtctgtgcacaacaaatttacagcggctgtccatatcgaggccataatattctcccacaaagaccaacacacaacaattgttgggacatctcaacatgggggggggggtaaaaaatatttttctatctccctctctgtggccccccggggggggcccattccctgtttgaaggttctgcggcgccagagagtcgaacctccaggtctcaaatatagcgctctctgtgcgcccaagacagactcttgcgggggctcccccaaagcgtcttccactactcaccctcggtcggaacgagcgggggtgcccccccacccccgtgctgtcgcactgtgtttggaccccccat

SEQ ID NO: 500699 - DNA, 132 bp, Homo sapiens
cactcggtaccaggtcggctatctgtaatgcccaactaaatactaccgtggccaccataattacccccatactccttacactattcctcatcacccaacaaaaaggctgggatagtaaggcaggaggttgag

SEQ ID NO: 500700 - DNA, 660 bp, Homo sapiens
atgtaggagcttatagctataaacttccctcttagttctgctttcgctgtatcccacaggatttggtatattgtgtttccattatgtttgtttcaagatatttttcaatttccttcttaatctcttcatcgacccactagtgactcaggagcatattgtttaatttccatgtgtttgtatagttcccaaaatgcctcttgttattgatttataattttattccattgtggttcagagaagatacttgatataacgtcaattttttgaatgttttaagacttgtttggtggtctaacatatggcctctacccttgagaatgatgcatgtactgaggagaagaatgtgtattctgcagccactggatgaaatgttctgtaaatatctattaggtccatttggtctatagtgtagatgaagtctgatgtttctttgttgattttctgtctggatgatctgtccaatgctgaaagtggggtggtgaagtcttcagctattattggattgaaaattatctttctctttagctctaatatttgcttttatgtaataaggggttccaatggctggggcttatatatgtttaactggtttttcccattgctgaaatggccccctttatttataaggaccctctttggcttctaaatttttggccggaa

SEQ ID NO: 500701 - DNA, 114 bp, Homo sapiens
  misc_feature (94)..(94): n is a, c, g, or t
cggcgactctcgagatccccttgaaaccctcacagagctgatgtcaccctggtctgggcacactccagaaactgtttgatctcatagaggcagnctgctactgctggatgggga

SEQ ID NO: 500702 - DNA, 410 bp, Homo sapiens
gcggtcctgtgtatatttctgtgcacacagctctatattcagatctttttctcttcacttacacgccacgggtatgacacaaccacttcctgggcacatggcttactcttcaagctgtgggtgtggcttcctggccacatgacacgaacccgtgaatgccctcggaggccatggcagctcttcttggacttccctgggcccatgatggtgcgtctaataccctttggctcttctctatgcgtgcccattggagagaaagggaccgggaccctacaccttacaccaaccacaccagtttaaatgggcttagaggccaagaagatatgggaactaacactctgaataaaccttttattagcgctcataccttctagccccctcttcgctaggccctctctgccttttccctt

SEQ ID NO: 500703 - DNA, 218 bp, Homo sapiens
tacataagttatgggtgatgaaatagaaagtgaagcaaaaaagaatcctttctcccggaaaattggaactaactttttgagaactggagggacaaagacaagaaaaccgaaagaagccagctgaagaggaagcgagaaaacgtttagaagaagagaagggtgcgtttgaagaagccaggggggcaatggtcaatgcagttgaggatggtccggcccgg

SEQ ID NO: 500704 - DNA, 159 bp, Homo sapiens
  misc_feature (55)..(55): n is a, c, g, or t
  misc_feature (118)..(118): n is a, c, g, or t
  misc_feature (148)..(148): n is a, c, g, or t
  misc_feature (152)..(152): n is a, c, g, or t
ctgctctcaccgcccgtgtggcaggctgtcctctgaaggacagagtcctcttctntcgtgtccctaagcctagcaggcagtgggaatgaacgggcagcccggttgctgggcacccatntccccagcctagccggtgtgtggaggattncagncctttag

SEQ ID NO: 500705 - DNA, 476 bp, Homo sapiens
ggccgggcgcagttgggtcacccctgtaatccctgcctttggaggctgaagtggtgacccatgcgcccggccaacatgatgaagcccacatctctactagaaacacaaaaaattagccgggcgtggtggtgggcacttgttattcccagcttctcaggaggctgaggcaagagaatcacttgaacccgggagagagaggttgcagtgagctgagattgcaccactgtgcttcccaagcctgggccaaccaaggaaatgagaacttccggtccttcaaacaaacagacaaacacatagtatcataacaaacaaacaaatctttttgcgcccgctcacgggcccccgtgaagaaagcgtttttgtacaacacaatttgttggggacaccggcgcccccggtgaggttccgtggaaccacttgggccatagagtgtttccaaggggaacacccgggcatgacaggggtggattacacac

SEQ ID NO: 500706 - DNA, 455 bp, Homo sapiens
gtaatctacgtataactgaaaagttatattctctgttttttaattatataatttcattaacatccccgctaggagggacatttaacctttatctctctcactacaggctaagccagtgatgcaaatgctttaaacgactctgtctttgtcttcgggtgttgcttttatgctacagaaaccctatgttgattaacttgtgtggtcagtagctgggctgttttttaacacctatgccatgctgactccaactcttaatttgcatgctctgtttagccatatcccctcctcctaagaacccaatatagccatgaaatcttttgtctcaattcagactattttgcagacttgtaaaagaacttgcagactgcggacctctagtaggctcttgcatggacatagacgctgtatgactgcagattaaccaacacgtctcaataaaggaattctgcttgtta

SEQ ID NO: 500707 - DNA, 169 bp, Homo sapiens
aattacgactcgagttagtacccaaacacctgggggcacaattgatatcattaacacgtagcacccttcagcaggaccctataaaactttcctccagcccttgcctctttgcaggtagccccttctctgctgagctgcccactgcaacatattttcacaatttctctaa

SEQ ID NO: 500708 - DNA, 357 bp, Homo sapiens
ttcctgcatggttgactcttgatggatcccgctcccgacggggtgtttgaaaatcatacttaaaacgtcataataaattgtgtaggaggatgtccagcttaggacctgggtcatgagccaggccacgctcgtggaagggggcctctgcatgttcagaggatcactgctgtcatcaccgtcatcctgggagtcgcagttattttgccatggccttgattgcaacagctgcctcctctgtcatggcagacagcaccgtgatcaggatctcttctccacagtcgtacttctgctcaatctccttgccaaggtctccctcagggagacgaaggtcctctcgtaccaccccgtcgggtggag

SEQ ID NO: 500709 - DNA, 157 bp, Homo sapiens
ccttcaacatctcatgcctccttccaacatctcattcccctatccaacatctcatatccccaatatctcatctcaccttccaacatcccatctcacctccatctctctccctgtgcaggccatgagatgttggaaggaggcatgagatgttggaagg

SEQ ID NO: 500710 - DNA, 146 bp, Homo sapiens
ggcctgtctcagaagaggcatcatgcaggttttgcagcgggatctgctctgaagagggcgaagaagagagagtcagacatttgcctgaaaaaattaaggatgacccagcagctagaagaatatgcagtggccatggttttattgaa

SEQ ID NO: 500711 - DNA, 86 bp, Homo sapiens
ggatttgctggtgcagtacaactaggcttaatagggaacatgtcactgttattcgtggtttaaaagctggggctaaaaaaaaaaaa

SEQ ID NO: 500712 - DNA, 194 bp, Homo sapiens
tccgattactccagcccaagggcccagcgtcctatatgctatcatctcccttgcaaactttccagccatgatctctgaaaaaaactcatccacactgagctggggctgattggaattcattccagggagagttgcattttgtcaaacactaatgttaaagaattgactctgaagaatagattgtagacaggatg

SEQ ID NO: 500713 - DNA, 494 bp, Homo sapiens
  misc_feature (450)..(450): n is a, c, g, or t
acgcacctcctcctcctcctgagaggagctcagcggaagaagggcaagcgtattaagctgatgaaagcagtgaagaagaggagggcgctttttagagaaggtcattgcaccaccaaaggctgctggagaaggtagtaaagcagggctgtcaccagctaattgccagagtgaccgtgtgaatctggagaagtctttgctgatgaagaaagcagctctccccactttcggttctgggcattgcacagctgaagaggtgtttgcatctgaagatgaatctgaagaaagctcctcactcagtgcagaggaagaagactcagaaaatgaagaggctattagaaaaaagctttcaaagccttctcaagtgagcagtgttcagaaactggggccacagaacttcattgatgagaccagtgatatagaaaatttactcaaagaggaagaagatcacanggaagaaaataatgattccaaagaaacgtcaggtgccctcaagt

SEQ ID NO: 500714 - DNA, 276 bp, Homo sapiens
ccacgcgtccgggaatttgaatttggggtctacggatgttccattcccccccccggttggtataactgcacatcaggttattcggattttattttatttttttctttttcagccgttattcaggcactgctccccgattaggtaataggcacctagagccatgggacaacctttcccccccctgctatgttgtccagcatagtagcacgtggtaatttaaatttaatgaaaagtcaataaaatttaaaattaactttctcagtccaactagctata

SEQ ID NO: 500715 - DNA, 678 bp, Homo sapiens
  misc_feature (509)..(509): n is a, c, g, or t
  misc_feature (580)..(580): n is a, c, g, or t
agcagtgtctcacacctctaatcccagcactttgggaggccgaggtggacagataacctgaggtcaggagttcaagaccagcatggccaacatggtgaaaccccgtctctactaaaaatataaaaattagctacgcatgggccgggtgcggtggctcatgcctgtaatcccagcactttgggaggctgaggcgggcagatcatgaggtcaggagatcgagaccatcctggttaacatggtgaaaccccatctctactaaaaatataaaaaattagccaggcatggtggtgggcgcctgtagtcccagctactcgggaggctgaggtaggagaatggcatgaacccgggaggtagagcttgcagtgagctgagatagcaccactgcactccagcctgggtgacagagcgaaactccgtctcaaaaaaaaaaaaattaacttggcgtggtggtgggcgcctgtaatcccagctactcaggaggctgaggcaggagaatcactagaagctgngaggcagaggttgcagtgagctgagattgtgccagtgcccttctgggcaacacgagtgaaactctgtctcnaaccataatattaaattaaggtgcttctttatattgttggtcgaattgaattaaattttgttccagtacaccctatatttaatggaatttggtgtgct

SEQ ID NO: 500716 - DNA, 231 bp, Homo sapiens
  misc_feature (4)..(4): n is a, c, g, or t
  misc_feature (18)..(18): n is a, c, g, or t
  misc_feature (33)..(33): n is a, c, g, or t
  misc_feature (142)..(142): n is a, c, g, or t
  misc_feature (154)..(154): n is a, c, g, or t
  misc_feature (178)..(178): n is a, c, g, or t
gccntgatgctgggcatnatagcatggactgangagacgcagaagaacacgtgacctcttgagctctctgggtcgcctggaaattcaagccattttcagtccatgcgagggagagaacttcccttttccctctgctttcccntcacagtacagncccagagaccactggaggacatgngaggatgacatgcccaaacttgtgccctctgctgctcaaaagggagaagagct

SEQ ID NO: 500717 - DNA, 123 bp, Homo sapiens
gtggcagcgccgcctttatgcaggctgaacctgaccctgggtggactccctgctctctgccgagcgcctttctcacccctgggtcccaccgcccctcccccagccttcctgacagcaggggag

SEQ ID NO: 500718 - DNA, 354 bp, Homo sapiens
  misc_feature (29)..(29): n is a, c, g, or t
  misc_feature (285)..(285): n is a, c, g, or t
ctttgacgaggcccatagccatttcctancccctaatttatgtagtggatacattataaatacaaaaaatttagcccagccgtggtggttcatttctgtaatcccagcactttgggaggccaaggcaggtggatgacttgaggtcaggagtttgagaccagtctggcctacagggcaaaaccctgtctctaccaaaaatacaaaaattagccgggtgtggtggcacatgcctgtaattccagctcctcaggaggctaaggcataagaatcgcctgaaccttgaancggaggttgcagtgagctgagatcgagccactgcactccagcctgggtgattgactgagaccctgtctc

SEQ ID NO: 500719 - DNA, 172 bp, Homo sapiens
cgtgggaataagaaccttacggttctgccggatgaggccggacctgcaccgccaagctgaccgacccgcgactcctctacatcggcttcttgggctactgctccggcctgattgataacctgatccggcggagccagaccgtgacggctggcttgcatcgccagcttctata

SEQ ID NO: 500720 - DNA, 215 bp, Homo sapiens
actaccaatgcaatgggcatatccaggtccatgttgcaaatcccatgcatggtgagtgacactctaaaccttattacagatagatgtttcttctgcttgtgtatatcaccattaaacagagttcaagatgacttaattgttcaaccatcattgtttttcctcggcatgattgattttttttttaatttctgttattagtcctgataatgtgatag

SEQ ID NO: 500721 - DNA, 220 bp, Homo sapiens
  misc_feature (191)..(191): n is a, c, g, or t
acgcggcacgcggtcaaaggaagagctagcctcactgcttgtaggtagaaggaaaaaaggcactaaggttgcaaaaccttctcatttcagagagatgccaggatcctaagtgcctgccaagacttaccaattcgtaaggaataagctggatggatggcatatactgatccctacgattactgcattggtgnctggcatccgcaaaatggtatttattaaa

SEQ ID NO: 500722 - DNA, 248 bp, Homo sapiens
tttaggggaacatggagaaagaaggagaccacataccccaaagcgtgttgaagttatgtgtcatgataagcaacatgtaaactgatatggaaattaatactagctacagacatatatttttccctatgttgagatctctcttttgtaatgcttttcatgttactgcctagggcggtgctgagcaccacagccaagtcttaatacaacttgacctgaattcaacaaaaaccaaacacccaacaaaggga

SEQ ID NO: 500723 - DNA, 326 bp, Homo sapiens
cctctcccaatggatgagaaattgctcccaatggacaagaggcatgtctggttcggcgagagcatgaccgatggcttccagttcgagtatggcggccatgggctccgacccctgactgctgtggccatccagcctgaccttcctgcgcctgatgtccaccgagggcctcccagaaagatcacgctaccacgtagcaggaacagcgtcatcctacatgtgcccagctgacgtgtctaacctcaagcaaggccctgctcccttccagggactccacggagcatcggagatccgcgccgagggcaaaaagccgttttcaaccctacagg

SEQ ID NO: 500724 - DNA, 282 bp, Homo sapiens
tcatgtcacaacagcctttgcagcatcagcaggcagcagtcagttattcagcaaggcaacaagtcttcaagccatcatttaacagtactcattcaacaggcaacacatccggtgggggagggggggccgccatgagccacattcaacaggaggtcaagccacagacaacaccagccaacaatagcacagtcaaatccactaatccctcagtgctttcatccctaatcactagactagtcaccaaaacctcaggattctccggctgggcccttccgatataag

SEQ ID NO: 500725 - DNA, 551 bp, Homo sapiens
  misc_feature (32)..(32): n is a, c, g, or t
  misc_feature (138)..(138): n is a, c, g, or t
  misc_feature (141)..(141): n is a, c, g, or t
  misc_feature (150)..(150): n is a, c, g, or t
  misc_feature (158)..(158): n is a, c, g, or t
  misc_feature (171)..(173): n is a, c, g, or t
  misc_feature (204)..(204): n is a, c, g, or t
  misc_feature (206)..(206): n is a, c, g, or t
  misc_feature (210)..(211): n is a, c, g, or t
  misc_feature (372)..(372): n is a, c, g, or t
ttattcttcattttatctcatactttgtctanattttctttatatttttatcctctcacaacccaccagttgggggagattacatcacttctttctccatggggagggtgcttacagggcactaagttcgggatcctnggncttgcaggncctgctgnagcctgagatgtnnnctagggtcctgaggttgcctcctcctttccngncccnnccttggcacctcccaagactgccaagggccctaccatggccccacagcccccagggctggcagttccatctaggagggtgcctctaggccccactctcaggctaggatggagaggcagatctgggcctggtgaggtgacctgcttctggaggggcagggcngcacccgagagcagggacaggtgcccgaacacagggtctccaggacgtagcgcccccccgcatacttgaatgtatgtgcgtatttatgctcacgtctgtgccatgtgtcaatgggtcctttccaacccaagaggtacattgtttttctgtttttcctgaaaaataaagtcggccaagtg

SEQ ID NO: 500726 - DNA, 112 bp, Homo sapiens
aggtcctgagatagcttcctcaagatctggaactaacgccagtagcatgtggatgcatggagactggaagaacattccaacttggacgcgttaccatgagagcatatcctat

SEQ ID NO: 500727 - DNA, 229 bp, Homo sapiens
tatttgaagttccggggaacatgtgcaggatgtgcaggtttgttaggtaggtaaacatgtgccatggtggtttgctgcacctatcagccatcccttaggtattaagcccagcatgcattagctatttttcctgatgctctcctccgcacaaccccgcactccatgacaggcaccagtgtgtgttgaaaagaagccctttttcaatgaaattataatttagggtcgacgc

SEQ ID NO: 500728 - DNA, 165 bp, Homo sapiens
ctaggacaaacctcagacctaacggtggtggagaacccataggggagttgctggaagcctatcaaacgtgactttggttcctttgacaagttaccggagaagctgacggctgcatctgttggtgtacaaggctcacggttggggtaggctatgggcgtacgggca

SEQ ID NO: 500729 - DNA, 303 bp, Homo sapiens
  misc_feature (10)..(10): n is a, c, g, or t
tgaatgggantgtaaagtagttaagaagttagatattatggtaggagtagagttgtttggatgagttgggatgtgatgtttattattggaggtttgggatttgtaggttaggggttgggtgagagtgttggtgtagaggttagttgtatgagtgttgaaatgttttatagagagggtaattagggatataaaaagttaggatattttgtgtatgatgaggtggagagagatttgtgttgtttgagtgattagtttggggtggttgaagtaaggatgtgttattggttggagaagtagggagtt

SEQ ID NO: 500730 - DNA, 874 bp, Homo sapiens
  misc_feature (870)..(870): n is a, c, g, or t
  misc_feature (872)..(872): n is a, c, g, or t
ccgaaggttggccgggattggttaacttggcccaagtcctggaaacttcccagccctccaaaatggggaagttaattaaacggttccttattaatggtcaaagcctaaggcttctcctattagcacacaccaacaaacaagaaccacggggggaacctcccagggggagaaaagctccagaattggatttgacaacggaatgtgggtccaaaagctccaaaattaaatggttcggggccgtgactaattcctatattaccgaatgaattaaccgacaaaagtataggtccaggtatagactctcaggtgaaccaagtacccgcaagtggaaaaacctgtgaaggaccacaacacacatgtgaaggaaagccctaagtaccctggtgtggggctttggggcggaagaactatacggcagaaaattggaaaaccggaagggttcccgagccttccccagcaagtaattaaatcaaggcatgtgttccttggttacctctccttccctattattccttgttaaacaaaattgggtgatatcaaattattcacttaaccatttttaaccaaccttccaaccaaatttttaaagggggttaccgagttccaagggggacatattaaaaattaccattccaccatttgggtggggggccaacccatattaaccaacccaatccatatcttcccaagaacatggggttcgccttttttcgctcttcaaattttttgtggggagacatgggcattttcccgcgatcccttaatattgggccccgggtttggtttcgccatatgggcgccccaattccatagaggggtcccacatgggggttatcccccgggggacccgtggtgattttgccccttggncncc

SEQ ID NO: 500731 - DNA, 642 bp, Homo sapiens
  misc_feature (642)..(642): n is a, c, g, or t
agtggaattatgtttagatttgaattcatctgcgaagcattcaaatcaaagctaaaagcctaaatgtgaaatgctaatgacaagcctgagaaggtaaactgtgaatcttcatttctatcattgatctaactttagatattggagcgagtatatttaggtggcattgcttcaatcactgtcattattctaaccctactcctacttaaattttaagctatgaggcttatcccaacagtaacatcttcacaaatgtactctcaaggcacaacatgtcctaacattctagcctctcccaccacaccccatatcgccctcactgcgccccctagcgctcgccccccctattgttatctgtgtatttcattaaatatgatccgcctcttatctcatgacctcttcttccttatatagcttgccaccctctcaaccaccttccaaccccctcccccctctccccccccccacttctcacctcccacaccccctctatccctccctcctacccatacattctcttctccttttttctccccccccccccctcttcccctatcaaatcttccccccatctcacctctccccccctccccctctccccctcctaccctctctccctgcctctcacgtcactcccttaccccn

SEQ ID NO: 500732 - DNA, 363 bp, Homo sapiens
ggatctacttgcctctgagtgcatagtctgagaagatgtgggtacagactcagatactgtagctgaggtacaggtacaggtatccaggtctcccctctctcctgctctggatgtgggctacagactcaggtgtcatcactgaagcctgtgtaggggctctggaccctggacaccctcctttggccatcctcttcctcacagagggtctgtgtgattctgggccacaggaccaaacagctctgaggaaggagttgggaggcaggctgacctcacaatgaatgctgacgagctgcaactgggtttgttttcctttctcgcctcccttcttccctgattaataaagtctataggaatggtttcaaa

SEQ ID NO: 500733 - DNA, 152 bp, Homo sapiens
agcatgtattgaaagacttatattttaggctggatgcagtggctcacgtctgtaaacccagcacttcgggaggtcgaggcgggaggatcccttggggccgggagttcgggaccagcctgggcaacatggtgatgcctcccatctctacaaaa

SEQ ID NO: 500734 - DNA, 421 bp, Homo sapiens
gactctaaggatcccccacgccacgagtcatagacatttgtttggggctggaaaagtattttggaattttttccagcatggtcttcagttcttcacatatgagcttgacaagtccattctttatgttactatatgaaacaccaatcatgaagattaaggctggtgggttgggaggcttactcttctcatatagaatcattccatatttatcctttttgtggctggcttattttacttagcataacatcctcaacattcatccatgttgtagcatgggtcagacttttcttcctttttgaggctgaatgatattccattgtacgtatataccacattttgcttatccattcttcttccatagacacctggttgcttcctccttttggctattgtgaatactgctgcttctggatcagccatt

SEQ ID NO: 500735 - DNA, 557 bp, Homo sapiens
atgtcacacttacatgctgaagaactcagggatccaatgatacaatgtagggaatttgtttcaaaatattttatggttgatgagtagataaattgatcacgacttgatgactgttggagttggataatggttcagagggattcattatactcacttgtttaatatatgtttgaaatcttcagtaatcaaaggttttaaattttttgaaatacgtatcatgacgaatggcacagttttaacgtttcccttatgtgtaactaacacattatactttttcatttatttagggcttatctgatgagtggttgtgtcccatccaaacatctatcccagtagtcaggaatataacaaagcccctgagattccctctgctgtcagctacctgtgtgtctgttgggatataagccacaccaggatttcaccacccatggctctagcatgagtaatttggaggttgagtgggacgaggaggaaaaatgtaggattctttaccttaatctaggctgtcgttctatggtaatcattaagctttcataatttgtgttggaaaaaaaaaa

SEQ ID NO: 500736 - DNA, 846 bp, Homo sapiens
  misc_feature (38)..(38): n is a, c, g, or t
  misc_feature (46)..(46): n is a, c, g, or t
  misc_feature (66)..(66): n is a, c, g, or t
ggtcgcgccatcctcggcgcgactcgcttctttcggtnctacctgngagaatccaccgccatccgncaccatggtgaacttcacggtagaccagatccgcgccatcatggacaagaaggccaacatccgcaacatgtctgtcatcgcccacgtggaccatggcaagtccacgctgacagactccctggtgtgcaaggcgggcatcatcgcctcggcccgggccggggagacacgcttcactgatacccggaaggacgagcaggagcgttgcatcaccatcaagtcaactgccatctccctcttctacgagctctcggagaatgacttgaacttcatcaagcagagcaaggacggtggcgggttccttattaaactctattgagatcttcccggggatgtgtagatttcttctggggaggtgagtggtgctctgagtagtcaccgatgggcattggtggtggatggacgtggtgtcaggcgtgtgcgtgcagaggagacagtgtgcggaggccattgcgaggcatcaagcctgtgtgatgatgaacaagatggacgggcctgtggagctgcagctggagcccgaggagctcttaccagactttccagcgcatcgtggagaacgtgcaacgtcatcatctccaactacggcgagggcgagagggggccccatgggcacacatcatgatcgatcctggtgctcggtcacagggggctttgggtctggactcaaggggggcggcttcacactgaagagagattgcgagaagttgtgggccagctcgcgccaaggggagggcagtggggctgccgaacggccaagaataaggcaaggtgacaaccgtgcgg

SEQ ID NO: 500737 - DNA, 304 bp, Homo sapiens
tacgcctggtgcagtccctgtaatcccagcttcttgggaggctgaggcaggagaatcgcttgaacccaggaggcggaggttgcagtgagcctagatcgtgccaccgcagtccagcctgggtgacagagtgagactctatctcaagcaaaaaaacaacaacaaaaaaaaaaaaaaaattatatggattctacaactaaaaatttgtacccaagtgcgcagggggctctcagcggctttgtatctcccggcactttgggcaagtgagcgggtgggtgggactcatttaaggggccaggagacttgg

SEQ ID NO: 500738 - DNA, 473 bp, Homo sapiens
tactgcagacaatgcctggctggcacctacatgcggctggcaacaagctggaagctctccacggccatctgccctcatttgggtacccatgccttcatcttcctggactgagcccaccacatggcatggaccccaaggcccggcgcttcctctggaacctcatccttgacctcatcaagacagggccgttccaattggttcgttgcctctcaccacgcgctgtggagagatgtgcgagggcgctgtgcacgcggctggccatcatggtgaactggtcgcctgctggtgcctgggcagcatccagcacctgaagaaccggttttggagatggctacatgatcacggtgcggaccaagagcagccagagtgttgaaggacgtggtgcggttcttcaaccgcaacttcccggaagccatgctcaaggagcggcaccacacaaaggtgcagtaccagctcaagtcggagcacatctc

SEQ ID NO: 500739 - DNA, 1111 bp, Homo sapiens
gagcactgtctggatccacgtgcctcctgggtctcagtatggcgctggtcgctggggttcttatcagttgctgagcactcgctaccgtctgactgggaaggcggccagatcccagtgtgtgagcgaaccgtagctaccggatggcccatgcagcgcaacgacacgacccctggagccagatgcattgggcaagctgggtttatatatgccgacatcggtcctttacgaaacgaggtaggtgcaagtgaaggatctgggttcctacggaagatcccatggactaacacgtgtcgtattgtagcatatcaactcgctccatagaagatctggaaggacaacgagtgctttcctcgagaagaagtgaccaagacgcactgtacagggatcgcatggggctaatcatagtataccactcgagcacttaccatgaaaatgttcacagccgtggcgacacaaatagggcaccactcgtacctaagatacggtggggagggcgcacagtaggtcactgttcggcatgcgactgtgtcgtgaactcgcttcatggggaccagcccaaagacccgtatcggtgcgttgccctttttgacgtgacaacggattggagaaggaaaccttgtggaggcttggtgctgttcgtattgcttgacgaagcccaggagcaactgagtcgaaaggtatggcgagactcgcgggcaagaagatttacatatcggataagcttctcctgtagcatgcatttacaggcgaatttgcaccttaaagtccaaggattgatccagtcggttacccatctgggaatttagtgtgaacagaagggataaaatgttggttggaggccataggttggggagggaatggcacagacagatatggacgcaaagggaggaggcgaaatagcaagtggcagggatgggggtagaattacttaagacatgaggtacgacgaagacacttatgtgggattgtgagggaacagcgtaggacgtagtgggccatttcgtggggggcatttctaaaaatccgaatatggtggttgtaccttgaagtgtttgttatcaccttcaaacttggtaattcgaaataatacagggtacgtgtggggtatggg

SEQ ID NO: 500740 - DNA, 253 bp, Homo sapiens
ccagagactataacagctttcaatgaggtctgtgagtccttgtggcgaattatataaccaaagggtagttttagggttccccaaacttgcaactggtatccaaagtaccggtagtttgtggactattccctgagtttgggaaatatatatgtaaatacataagtgtgataaaatattataatccctgtgagagctggctgtatggatggggagggcccaaagaatggctactctccctgcccgccaacccata

SEQ ID NO: 500741 - DNA, 181 bp, Homo sapiens
cctaaaacctttttattttgtttttttttgaaagaagagccttggggcccccccttcccccttttttgtcccccaactttaaaagtataaagggttttggtttccctgggagggggggggggcaaccaggggtttcctgttcccttactttagacccgttgaataaaaggggcccccttta

SEQ ID NO: 500742 - DNA, 90 bp, Homo sapiens
  misc_feature (33)..(33): n is a, c, g, or t
  misc_feature (83)..(83): n is a, c, g, or t
ctcagcggccccgagccgcagcgtgttgcggantggtagggatgccgaccctactgaggagcagatggcagaaacagagaganacgacga

SEQ ID NO: 500743 - DNA, 160 bp, Homo sapiens
actacaagtctcaaagcagtacaggcagctggatattcacatttagagtctctgactagcctggtgacttatcacactggctcctccctcgttcccacttctaaagtcacctgtccattgccaccagattaagctttctccagccagaacaccgtcgaag

SEQ ID NO: 500744 - DNA, 156 bp, Homo sapiens
cgttatacgaagatgtgcccttttctaccttggtcaatgcgattgaaatctccacatggaaactccacaaaaagagtgtttcaaatctgctctttctgaaggaaggttcatctctgtgagttgaatacacacaccacaaataagttactgagaatt

SEQ ID NO: 500745 - DNA, 121 bp, Homo sapiens
agccggacctactttcacaggggggaaagttaatattggtctttcaagttttttctttagctattgttaccacttgccactgtctccatgttaaaatgccaaaaatgatctagttgttgtt

SEQ ID NO: 500746 - DNA, 152 bp, Homo sapiens
tgatactctcagcactcatggtatgtctaggggctctcaaagcatgccagccatgtctgcctgctctctctcttgcactttagtgtttgttctcttctctgctgtcggaatgtagccttcactgtcatcctctggaaagggagaatcattaa

SEQ ID NO: 500747 - DNA, 380 bp, Homo sapiens
  misc_feature (26)..(26): n is a, c, g, or t
  misc_feature (30)..(30): n is a, c, g, or t
  misc_feature (32)..(32): n is a, c, g, or t
  misc_feature (35)..(35): n is a, c, g, or t
  misc_feature (53)..(53): n is a, c, g, or t
  misc_feature (70)..(70): n is a, c, g, or t
  misc_feature (75)..(75): n is a, c, g, or t
  misc_feature (77)..(77): n is a, c, g, or t
  misc_feature (85)..(85): n is a, c, g, or t
  misc_feature (111)..(111): n is a, c, g, or t
  misc_feature (134)..(134): n is a, c, g, or t
  misc_feature (136)..(137): n is a, c, g, or t
  misc_feature (172)..(172): n is a, c, g, or t
  misc_feature (175)..(175): n is a, c, g, or t
  misc_feature (189)..(189): n is a, c, g, or t
  misc_feature (219)..(219): n is a, c, g, or t
  misc_feature (221)..(221): n is a, c, g, or t
  misc_feature (231)..(231): n is a, c, g, or t
  misc_feature (245)..(245): n is a, c, g, or t
  misc_feature (252)..(253): n is a, c, g, or t
  misc_feature (258)..(258): n is a, c, g, or t
  misc_feature (267)..(267): n is a, c, g, or t
  misc_feature (271)..(271): n is a, c, g, or t
  misc_feature (274)..(274): n is a, c, g, or t
  misc_feature (277)..(277): n is a, c, g, or t
  misc_feature (279)..(279): n is a, c, g, or t
  misc_feature (295)..(295): n is a, c, g, or t
  misc_feature (371)..(371): n is a, c, g, or t
tgcttgtaattgctctatttattaanaaananatnaaaaatgttcaaaaaatnaatgcattcttgttggnatgcnanaaagaggnattatttttgaagatcttttaaaaanattttgacttgttcccccttcananncatttttaaattgtttggatgagggcctcaatgtntanaatgtcaatgcaanaaaaaaaacagagagaagtagtaaaaaaananaaaagcaatnaattggggaaaaanaaaaaannatggncttcacaanaagnaanaananagctttgtaacagggntatacagggttcaactgagagggaaagaggcaccaaactgcctacacaaacccagggatgtaacaagcaagggggncaccccaag

SEQ ID NO: 500748 - DNA, 207 bp, Homo sapiens
gtcgtaaatggcaacatcttccggaatcaaggcgatgagcacggccagaacagcccactgttcgccatcgtctagaccatcgccatcgagccgctgccagttcgcccatcgctcgtcgaacgcatcgacagcgctccacggaccatgcagtcgtgagccgggaatgttctcgcgttttccggctttcgcaccgtcgagaaactcgac

SEQ ID NO: 500749 - DNA, 1046 bp, Homo sapiens
  misc_feature (1046)..(1046): n is a, c, g, or t
gctgttccccaaccttttcctccgagcccctaacaacgccccctcctaatactaactacctgactcctacccctcacaatcatggcaagccagaggccacttatccagtgaaccactatcacgaaaaaaatctaactctctatactaatcgtccctacaaatcgtcctgaattcataacattcgacagacactagaactagtcatattttatatcttcttcgaaaacacacttatccccacgtgggtatcatcacccgatgaggcaagcagccagaacgccatgaactgcaggcacatacttcctattctacaacctagtaggctcccttcccctactcatcgcactaatttacactcaccaaaaccctaggctcactaagacgattctagctcctcactctcactgccaagaactatcaaactcctgagccaagcaattaatatgactagcttacacaatagcttctatagtccaagataccgctttacggactccgattatgactcccgtaaagccccatgtcgaagccgccatcgctgggtcaaaatagtacgttgccagcagtactcttgaagactaggcggctatgggaataataagcctcagactcattctcaagcccctgaaaaaacacacttaggctacccctttcgttggtacttagtccctatgacggcattcattattagaaagtccaatctgacgtaggacaaagaagaacctacaaccggcccattggataaatctagccaatgacaggccacatagccctcgtaggtaacaggaattatcaatcacaagccccctgaagagttcacggggggccgacatttctcagtttaatgcgcccaggggaagttcccatcctacgtgaagacaatgtggactaacaaaaagaccaagatagcagaggacacccacagagggcagtacaaattctcattcacgggatgtcaaccagtcactgcccaaataagacatgggcgagttagagagaggtggataaacacgtatcacaacgagtaatctctggggagaaactcn

SEQ ID NO: 500750 - DNA, 803 bp, Homo sapiens
  misc_feature (317)..(317): n is a, c, g, or t
  misc_feature (390)..(390): n is a, c, g, or t
  misc_feature (404)..(404): n is a, c, g, or t
  misc_feature (421)..(421): n is a, c, g, or t
  misc_feature (428)..(428): n is a, c, g, or t
  misc_feature (482)..(482): n is a, c, g, or t
  misc_feature (613)..(613): n is a, c, g, or t
  misc_feature (624)..(624): n is a, c, g, or t
  misc_feature (675)..(676): n is a, c, g, or t
  misc_feature (684)..(684): n is a, c, g, or t
  misc_feature (689)..(689): n is a, c, g, or t
  misc_feature (694)..(694): n is a, c, g, or t
  misc_feature (709)..(709): n is a, c, g, or t
  misc_feature (718)..(718): n is a, c, g, or t
  misc_feature (723)..(723): n is a, c, g, or t
  misc_feature (741)..(741): n is a, c, g, or t
  misc_feature (788)..(788): n is a, c, g, or t
gctgtacggccggagtcgtagatcaaggctactagcagcccctcctccttgaacggctagctttgcctgtcgcctggtccatctacatggaaactgctctgcctctggaccaggcgaggtggtaggatgagctgggtggggctggtcccatgcttgggcaaagctgacctctccctaggtacactgcagcctgctcccggctcctggtccaatacaaagcgccttcaggcaggtccagggctcagaaatcagctctattgacgaattctgccgcaagttccgcgtgagtgcctgtccttccacccccatggggcganactttcgggcatgggtatggggggccagagggctctggccacctggggcttgctgtcctgagagccccagcanccatgtcacccccnacagctggactgcccgntggccanggagcggatcaaggaggaccggcccatcaccatcaaggacgacaagggcaaccncaaccgctgcatcgcagacgtggtctcgctcttcatcacggtcatggacaattgcgcctggagatccgcgccatggatgagatccagcccgacctgcgagagctgatggagaccacgcaccgcatgagccnccccccacccnaccttgagggccgccagacggtcagccagtggccgcagaccctgagcggcnngtcggcgncagangagcnggacgactcacaggngcgacagangctgntcgacctggagccagccnacaacgccgtcaaccgcgtccggcatgcctgagcccggggcactagncctggcacagaaggg

SEQ ID NO: 500751 - DNA, 91 bp, Homo sapiens
tcgaattcaagcttctaacgatgtacggggacatgccattgcactccaccctgggcaacaacaatgaaactctgccccccgcccgcaaaaa

SEQ ID NO: 500752 - DNA, 121 bp, Homo sapiens
  misc_feature (65)..(65): n is a, c, g, or t
tcagatcttcgtagccaagagaatctcatcatgtatctagccgagatcatgaggtactcatgtcnaccagaactagaagatagtcagcgcgcgtcatgctgtatccacacttcggaggcga

SEQ ID NO: 500753 - DNA, 1317 bp, Homo sapiens
  misc_feature (231)..(231): n is a, c, g, or t
  misc_feature (243)..(243): n is a, c, g, or t
  misc_feature (294)..(294): n is a, c, g, or t
gcttgttggagccctaagaacaccacatttggtgaaagctaaacagtctacccacagtgacgtggtatctgatgaagacccgatcgatgtgtatagactgttagtagtagctctcagtgatccctccaccaacaaggaggcacgggactgctatctgcaggccgtatatcagggatgagtcagtacaatacgtcacgaaacatgaacgaggagatgggccgagaatgcggngctcgcagtggngacgaaacagtaccatgattcgcctccttgatcacttacgtgttcacacangaggagacttttagatgtgttgaaccttcacaacgagtgttggcgcctctctcactccttcgtagaacaaaaactgacaagaagattggtagtagtgcgtgcggacggttcgggtggctcaatggcgcgtgatagagtccacgatgtcgacgtgcccgtggagggacgtcgaggggcccgaggcagagcagtcaagtaggagagctctaggaggagaactcaaaggcatcgctagatcgcgttgggaccaaagctaatgggttggcaaaaaccacgttgtcatcgtcacttaaatcatacagttacaaagatcccaaattctagacccagtgcgcttggacaatttgtgcgcatagtgtaaaggtgacgcaccaaggagaattcaaccttttggtgagcgcaaggggcctttggaatgtcggcctacaggggcacggcaacactttatgcttttgggaaaaaaccgctcggtggtgcaagggaggtcgggggccaacagtggctatagaggcgcgaagagtttacgaaccggagcatcggaaacgacaagttcagcgggaaagcgaacccacattgtgagaacaaaactacctctagcaaacgcacaccgtaagagggagcaacaagcaactcggacgagacaccacaattccaaaagaaacctgtgggctgccaatcccaaagaccatgacaaaagctgcaaacaacttattcgagaaaacctccaacaattaggcacaacagtgggtcaggaaggagcacactcacacgctccgacattttcgcggacagacaagtgagcctcaggtttttgcacttctgctctggcctcatagatctccagtcacagcttaagctcgctggccggacaacgcgattaaggatgatcaacaggggcacatgttaaagcaactaacgcggctatcagtgaactaccatacgcccgacacccagagcgtggcctcattctcccttgggggaccttacggtaagccccggcatcaactatgattggacacccag

SEQ ID NO: 500754 - DNA, 852 bp, Homo sapiens
gtgcagcgggggggcccggaggccctggtggccctgttggatggggaaccgcggtggcttccgcggaggtttcggcagtggcattcgtggtggccggggtcgcggccgtgcgaacgggtgcctgggtgccgagtgccgcgtagctcgcggatggcaggccgaggataaggagtggtatgcccgtcaccacagttgggccgcttggccagggacatgaacgatcatgtccctggaggagatctatctcttctccctgccctattatggaatcaagagatcatatgattctcttccttgggggggcctctctcaaggatgaggttttgaagattaatgccatgtgcagaaatgcagaccctgtgcctggccaagttgcaccaggttcaaggcatttgtctgctatcggggactacaatgtgccacgtcggtctgggtgtaagtgctccacggaaggtgtggccaccgccatccgtggggccatcatcctggcaagctctccatcgtccccgtgcgcagaggctactgtgggggaacaagatcggcaagccccacactgttcccttgcaaaggtgacaagggccgcttgctgggctcttgtgctgggtacgcctcatcccttgcacccagtggcactggcatcgtctccgcacctgtgcctaagaaagcttgctccattgatggttggtatcgatgacgtgcttacaccttcaggccggggcttgcttgcaaccttggcaatttcgcaaggcactttgtgcattctaagaactaagggtactgacccgactcttgaagggactgttctccagttcctatcggggtcctgcactcgttagaccaccaaattctggg

SEQ ID NO: 500755 - DNA, 125 bp, Homo sapiens
taatgggtcgagatattatgctttgtatgtttggatatatcgaggatggaggattattgcataggatgaggtattgatagtaagtagggcaagagacagccatcctagatttgttagggacggca

SEQ ID NO: 500756 - DNA, 472 bp, Homo sapiens
tcacttcgacggtgctgcttgctgtagacctgtacaactcagtgatgtcaccttacctcctgagctgcgtctcctgagtgacagtgagtatttgtgtgcagatttcacctcttgagatttaacatcagtggaaatgccaagacagcaaacaggacaaagagcactttggttcattctaagaactgaatcttggctgggcacagtgtctcatgcctgtaatcccagcactttgggaggccgaggcaggtggatcacctgaggtcaggagtttgagaccatcctggccaacatggtgaaaccccatctctactaaatacacaaaaaaattagctgggcgtcatggcaggcacctgcagtcccagctactcaggaagccgaggcagagaatcgcctgaatccaggtggcggaggttgcagtgagcctagatcacaccactgcactccagcctgggcaacagagggagactgtctc

SEQ ID NO: 500757 - DNA, 461 bp, Homo sapiens
tcacttcgacggtgctgcttgctgtagacctgtacaactcagtgatgtcaccttacctcctgagctgcgtctcctgagtgacagtgagtatttgtgtgcagatttcacctcttgagatttaacatcagtggaaatgccaagacagcaaacaggacaaagagcactttggttcattctaagaactgaatcttggctgggcacagtgtctcatgcctgtaatcccagcactttgggaggccgaggcaggtggatcacctgaggtcaggagtttgagaccatcctggccaacatggtgaaaccccatctctactaaatacacaaaaaaattagctgggtgtggtggtgccagctacttcgaggctgaagtgggaggatcgcttgagcctgggaggttgaggctacagtgagctgtgatcatgccacactgcactccagcctgagggacagagtaagactccatt

SEQ ID NO: 500758 - DNA, 131 bp, Homo sapiens
tggcccgaaacatttacttgttaaaacccaaacattaatatggttggaaaaccctggattaagagggggacatggggaaggcaaagggtggccccatggtggtttccccaaaaaaaaatggggatttggga

SEQ ID NO: 500759 - DNA, 176 bp, Homo sapiens
ttttttttcccccggggggggaagaaaaaaaaacccccccctttttttgagggggggggttttgccccccggggggccccccccccccggtttttttaaaaaattaattagggggttcccccctttttttttttttagggggggggttttttccccgcccccctctccctttttta

SEQ ID NO: 500760 - DNA, 171 bp, Homo sapiens
catttattgtttacttaaaatttctggtggataaacaggctttaactcatgtgcaaataactttatataacatacgtttgcttcatttttttaggcaggattgaaattatccagattttttcttttgcccgggtttcatacttcgtggattcctccccctgttgcttctct

SEQ ID NO: 500761 - DNA, 671 bp, Homo sapiens
tgttccctttgtctctaaaaataaaataaataagaaatacttttccgaaaaatgaatgctaggcactagaggtgtctcctgcttttgctagaggcactggatataaagggggaaacttctagctgggggtagtggctcacacctgtaattccagcactttggaaggccgaggtgggcagattgcttgaacccaggggttcaagaccaacctgggcaacataatgagacctgtctctacaaaaatttaaaaattgtcatcccattctctactggaaaataaaaaattagctgggtatgctggcacgcacccatagtcccagctacttgggaggctgcagtgagagaattgcttaggcctgggaggttgaggctacagtgagccaagattgcgtcactgcagtctagccagggcaacagagcaagaccctatctcgaaaaaataaataaaataaaagtagttaaaatggtaaattttatgctttgtccattttaccataatttaaaaaatggcccaggcagtggggtctcttgaaggaggttatacttaagttgagacctagaggataagaaagtaccagtcaggggaagagtggtccagtcaatgggaaccgcatgtgcaaaggccctggggtgggtgagagcttagtgctgtgctctaggaattgtgagag

SEQ ID NO: 500762 - DNA, 310 bp, Homo sapiens
  misc_feature (46)..(46): n is a, c, g, or t
  misc_feature (58)..(58): n is a, c, g, or t
  misc_feature (63)..(63): n is a, c, g, or t
  misc_feature (89)..(89): n is a, c, g, or t
  misc_feature (94)..(94): n is a, c, g, or t
  misc_feature (104)..(104): n is a, c, g, or t
  misc_feature (124)..(125): n is a, c, g, or t
  misc_feature (127)..(127): n is a, c, g, or t
  misc_feature (130)..(130): n is a, c, g, or t
  misc_feature (160)..(160): n is a, c, g, or t
  misc_feature (164)..(166): n is a, c, g, or t
  misc_feature (183)..(183): n is a, c, g, or t
  misc_feature (210)..(210): n is a, c, g, or t
  misc_feature (265)..(265): n is a, c, g, or t
  misc_feature (278)..(278): n is a, c, g, or t
  misc_feature (281)..(282): n is a, c, g, or t
  misc_feature (303)..(304): n is a, c, g, or t
caagtgccatgttcattgggggttgaagtggtgagtgttctttganaaaccaagtgangaaanagtaaagattaatctgaagcatgcancattncttggctganataaaaagaaaaagccttanntnttnttccttattagctttattttactttatgtntatnnngtatctgggctgagtanagcttaatggaaccttgggagtttgangggtggttgtaaaggaaactggaagaaatagttactaaaggagattcaagctgtnattaaaggaattnatnngaccaagttgcagagcaagcnnagataa

SEQ ID NO: 500763 - DNA, 1248 bp, Homo sapiens
  misc_feature (195)..(195): n is a, c, g, or t
  misc_feature (998)..(998): n is a, c, g, or t
  misc_feature (1248)..(1248): n is a, c, g, or t
gcaaatggcgggatgacagccggtgcggcgggggggcccgggggccctgtgtggccctggggcatggtggaaccgcggtggcttccgcgtaggtttcggcaagatggcatccgtgggtccgaggtgtcgcggtccgatggtacgtgggaccgggagccgaggccgtttggagctcgcggaggctagggcgtaggnataagtgagtggaatgcccgtcaatgctaagtttgtgtgccgacattgtgtctaatggaccatgaaggagtcaaagtccctgcgagggatgatctatctcattctccctgtccctagttacaggcacactcagacgcatcacttgattgtcttgccttgggggcctctgctccaacgggatgaggtctctagagagcattattgctcacgttgccacgaatacgcaagaactcgccgtgtccccgagccaacgcctggcaacacgacgtgctttcgacagggccaatttctcggtttttgcctttactacttgcgcgggaccgtgaccaaaatggtgcgctaaccgatacggtgttgcctcgtggggtggtataagaggggtgtcttacccaacaagggtaggggctaggaggccccactcgggcccaaattcccccgatggagggggtcacctattgctattccccgtggggccccaacaaggcgtccgttccccatttccgatacccccaccggttcgcccgaacattgaaagggccttgaccctagtgggtgcgcaacccagatggactctgtgggaaaacgtcgcccctcagaagaacgttggttcaaccctttgcgacgaaggggctgcggatccggagggcctccgtccttggcagtggccttaccttagtttgcccttaagggtttaccttgctctgttcctaatgttccctccgtagctccacacctccactaatggggggagggccaacctcattgtggggccaggatttcgggggggcaccattccccgtgcnaaacagcgattttggattaggccgctgtttaaaggagaaaatgtgtgcgttacggctcttccatttttgaacgtgtggtgcattgtgggggtataattccgagaatatttgaaaccggtgggcttaaaaccaagcccctttcataaaggcccccagcggtgtgggggcctttgacacaccttttggcccaaaagcctcatttggggcggcaaatacctttattccgggcgcaacatatggtggggcccan

SEQ ID NO: 500764 - DNA, 76 bp, Homo sapiens
acaaagtcatcacaatcacaagcagtttatagttgacatattcttctagatcctgtgtgtaggcacatcttccaat

SEQ ID NO: 500765 - DNA, 391 bp, Homo sapiens
ctgggtcgatcactagacgtatccccgtcataattatcagcacagttattcttggacattactgggaagttcaagttatcaggaccatcagctctttatcccccagcattgacttactaagcatagcgggctctatgctttcacagttcgtgactcagcacacatgcctatcggtgctcctaaatccataacagtcatagtctctgctccatcaggaacagtacatcttcctggccttaatccattatacgcacgcgtgatgtcgtaaatgcttggcaggaagactggcagacagttgctttcattcttcctcaaagtatataccatcagctacagtccaaaattgctttttgttcaaggagatatatgaaaagactctgacaaggactct

SEQ ID NO: 500766 - DNA, 599 bp, Homo sapiens
catggataaggtatttatcttactgctccctaccctagaacccactaactgcttgacaggccctggtgtgtgataggtcccctccctgtgtccacgtgtactcattcaactcccacttatgagtgagaacaggtggtgtttggttttctggtcctgtgtaagtatgccgagaatgatggcttccagcttcatccatgtccctgcaaaggatatgaactcactctttttatggctacatagtattccatgctgtatgtgtgccacattttctttatccagtctatcattgatgggcatttgggttggttccaagtcttagctgttgtaaatagtgctgcagtaaacataagtgtgcatgtgtatatagtagcatgatttataatcctttgggtatacactcagtaatgggattgctgggtcaaatggtatttctggttctagatccttgaggcattgccaccatgaccagctaattaatgtattttcagtggagacagggtttcaccatgtttgccaggctgatctcaaactcctgacctcaagtgatccgccctcctcgtacctccccaagtactgagattacaggcgtgagccaccat

SEQ ID NO: 500767 - DNA, 200 bp, Homo sapiens
  misc_feature (134)..(134): n is a, c, g, or t
  misc_feature (196)..(196): n is a, c, g, or t
ttcactaaagaagaaattggcaagaggaaacctgtaaaggaaactacaattttatgttgttgatagtgaaatggaatggttctgaagtactgacccgtaagaaatagccctatgcactgattagtaaggagganaatttaggagagggaagcaaacttttttttttaatgtctagagttaacatagtctagaattngcac

SEQ ID NO: 500768 - DNA, 395 bp, Homo sapiens
agaggatcccccacctagcaacttccatgcgagacgcatcctcatcgccctcgagaggggggatctcatcaggaactgcagcattgggttcctctgctgccacttcatcttcatcaatacctagacctagcttgatcatgcgatagatgcggttggagtgggtctggggatcctcaagggaaaagccagaagatagcaggcggtttcatacagctagcaccaccaggtccttaacgtgccttatcattcttgttcggccttcagccttctgccgcagcgtctcctctaatggggatagctacagcgggtgatcttccacggtgcttttattggtccaatcagtatattcctatgttaggagatcgtcccagggagtgtcctcgggtctatgcaat

SEQ ID NO: 500769 - DNA, 1062 bp, Homo sapiens
  misc_feature (782)..(782): n is a, c, g, or t
ggattgctgttccatgaagatatttgatgtcagctgctcgattgcccaaatgactgtatccctcatagataaacgatctggtacatctgctctccatacatggcgacaactatgaagtataggttgagccataatgtcgagaaattccatgtgtggagtcaaggcaccaccagttcctgacgatcccgatatgtcatgcatgagatgaggtatctcggtgaaaacatgtcattgccagaggagccaaggtacttgcaaaaacatatgtcccatgttgcaaagggtgaccacctgtgtaaaggcttgactagtaccagtgcataccagatgtgctcatacctatcgccttggatgcgcgtatgtctgcgctgtatgccatgtgtatgggtctttcgagtcttcgagctagtagatcacttaggtgacgagaagtctttttgctactattctcccaatctaatgcgcacttaatagttcaccgtactcgatgtgcacgaggttagacgatagtgacttagagtttcagatagcggcacattctagctgccggaagcgaggaattgtgatcgttggattgcgatggcgcactagaagcaatcgtcgtcccctgcgtcggcctagttctcactttggaagtctttattaccaaagactggctacgtttactcagaatgtgattctaattacggtaattgcctattgatcaattggcatctatttatgggagctcaatatgttaaaataaccccgggtcgagttattcctttgacaagaagactccnacttatggacaggatctgtccctatgcagaccgagtactcccacgtagtcgccctaagtgatccagcaaagcacccaacctggtgcggaagcccgaccgcactgttcacgaacaagtaatcatcccctgcggctaccaccagaaattaaatggacttcattcccaacccttgaaggatgatttggtcgaaagattagagtgggtgaactttttattgaccccgacaggttcccaaagttcctctgggagagtttcctcccttggcttcgcctatctttac

SEQ ID NO: 500770 - DNA, 662 bp, Homo sapiens
  misc_feature (175)..(175): n is a, c, g, or t
  misc_feature (220)..(221): n is a, c, g, or t
  misc_feature (250)..(250): n is a, c, g, or t
  misc_feature (262)..(263): n is a, c, g, or t
  misc_feature (298)..(298): n is a, c, g, or t
  misc_feature (306)..(306): n is a, c, g, or t
  misc_feature (333)..(333): n is a, c, g, or t
  misc_feature (350)..(351): n is a, c, g, or t
  misc_feature (463)..(463): n is a, c, g, or t
  misc_feature (468)..(468): n is a, c, g, or t
acccagcggcaggggggggctgtccaatatataatcctagttaaactttaattttacccacacaaccctctaaatccccttgtaaattcatctgttagtccaaagaggaacagttttttgtacagtaggaaaaaccctcgcagagggaggaaatttttttacgggaggagggganactaaaagcagacaccatataagaaagcgcccaagattaacaccnnttcccaaaaaaaaccaaacatctaacaanaccaataacacnnaataaaaaaaactttatcatttatataaataaacnaatatttntcaaaatctacatataaaacattttanctccactttaatcacanntttaggaataacctccccatctccccaccacacaaccctaaacccttatttatcccacaactctcactaataaaattcaaccacaaactaaatacatccaatcatcgataanagggntataaatacactctcacttcttcctcacactcataccctccacctatctctttcttctctttttccctttcccttcccaccacttaataggctaagtgtcgagtccttggtttctcccttttctatgttttgttttctgctctctgtctccccccctctccggatttcattaaactctcatagtagaatataaa

SEQ ID NO: 500771 - DNA, 160 bp, Homo sapiens
  misc_feature (93)..(93): n is a, c, g, or t
  misc_feature (133)..(133): n is a, c, g, or t
ttatcgtggttcctttcctacctgtcagtgccagggtctttgggtcatccctctagttttgttgtctgcaccttccctgcaggttcctatcgnctctcagatgcgccttcatggtgggtgccaagcccctggncacatgctttcatttcccactcagaag

SEQ ID NO: 500772 - DNA, 816 bp, Homo sapiens
  misc_feature (222)..(222): n is a, c, g, or t
caggatacttcccctatataatggtgggatgtgcgcgacgggctcgccgcggcctccgcctcctcctttcctctgtacacggaatcacgtacttgaaatcgaagcccgctcccgacgtccgatgattagtggaaataaggtaagggtttaacaaaaactcctcgtcagtatatcaatgtctagcgcgccggcgaaccgacacacagaaaacgttagtatttnttgttgtttgtagtgagggttagggagcaggggtcggtcacgccccaaggatccccggctaaacagacgccaactcacaaaaccacccaccacagtatcaagaacctaaaatgagagggaaaaataacattgagacaagaaaaaaagagagaaaaacaacggaaagcggccgacccaaaccagttcgtgaggagaaacggaacaatcggtacagtttccaacaacaagacgaataacgccgtctcgtcgaatttacaccatccctgcgcgcgacatgtgcagaagaaaagggaggtcgacaccgtcacgcggcttcagggtatagagacaggacgaggataaacgtgcatggaccccagccaaaacgcaacctaagaacaatgacgagacggaggtgtcgcggagtaaggggactctagaaaatgaattgaccccgcggtcccgccctctcccgtcaccgcaatcaacaccatcctacctactcctctacgatcttagatgcgagtgtgtaaaccacgcgagcctcgcggacgcatcagcggtggtagatgactaaagatatgtagaacatctaacaaacgtaccacatacacg

SEQ ID NO: 500773 - DNA, 224 bp, Homo sapiens
catcttagaggttccccgtcgaaccctagtctttcacgcgtataccaatgagttgtatatttggtctctacatatcccatatttctcagaggtgttcattctttattttctttatttttgtctgagttattttggagagctggtctttgagctctgggattctttcctcagtttggtcaattctgttgtttattttgacaattctttttttttttttttttttt

SEQ ID NO: 500774 - DNA, 1125 bp, Homo sapiens
ggatcgcgagcccgcgggttggcgcgctggtcgcatgtggctggctcctttctgagcgcatgccgaacctctgaccccggtactccgtttacccctttcccggtgcgccccgtgcggccggctggaggcagaaacagcgagagagcgttaacagcagcagcggcggcgtgctgctccgccgtccgtctccgcgggagcttggagtgcgccctgtgacgcccagatgccgtgatcagcatcttcccgtgcgcaatgatccacagctcccgaacccagcgcggcggcaatcaagctgcacaagaacctcctggtgtcctacgtgctccgaacggcgcgccagctctaccctgagcgagcgctaccgccgagcttctaccgggcgccagcatgcacgcagcaacagcaagcaagccgccccaaccaccagcacccagcaccttagccgtacgcggacgccggcctatccgggacaagctgctgtcccggacattcgggcccggcctccaaactttggcgggcgtgcacggtgggaactgccagtaagaggcgcctgcacagaagacccagaatcacagagacaccgaggaacacccaagcatatagacacacaagagcttcaacaacacaatgagttccaaacagagcgtggcaacattcagaagaacaaaagacattaaacacaataacacgacaagacacccggatgaacacccaaggaaatattagaacagacaaagaataatataaacgagcaaagcacaaagataaatagaaaacttaccagaacacgtcaacgctaacaattgacaatatgataaaagttatactaaaaaagaaaaaacacatagctaaaaagaaagaaaagaaagcacgaacacaatatcactacataaccacgaacgaagcaatcgaggaatgatagaccacaacaaaagccgcataggagaaacgaccccaatatcgagagaacctactattaaaaagcagcaacgaagtgaaaacctacaattacgccacgagatagagacagctgaacgaccaagagagcgccagaagcacccgacgagacgaaaccaacaagaacatacagatctcatccctcgcacaggacgcacgaacacaacc

SEQ ID NO: 500775 - DNA, 675 bp, Homo sapiens
  misc_feature (58)..(58): n is a, c, g, or t
  misc_feature (410)..(410): n is a, c, g, or t
tgtttggttcttctcccccttaaaaaggaaattccaagtcccgggccatgtacacggnatagtccatcaccaacaacctccaaggagaaatgtgccctgaaattcacaaaagggggagctctgcgccaacaaacagtgtttattacagctcactctggaccgctcttctgatcagaaatccagcaaggaagatcctggatttctctcctctacgagctatattatggcaatttcataaccacgtaggaactccctgaggcctgagcatgctgagccattttgggactgttctgtctcatgttatctcagctcttatctatgaagacatcttccagtagtgtccccagacacatcaagtcatgggtcacacctgcaaatggaaggagttcctctatcatttgccaaatganaatgtaataataatgaatgtcatgcaccgctgcagccagcagttgtaaaattgttagtaaacataggtatcattaccagatagttatattaaatctatatcttacatatcataatatgtgatgattaagacaatattaattataataaaggtcacataatctttataaattcataactgtagctataacttgagcttattcaggatggtttctttaaagccataaactgcacaaatgaaaaaaacacaaaaaaaactcctgcagc

SEQ ID NO: 500776 - DNA, 242 bp, Homo sapiens
tgtccagagatacagtgcgcacaataatggctcactataacctacacctcccacattcaagtgaatcctccatcctcagcctcccgagtagctgggaccacgagctattcacctatatataggttgactcttctgctctctcccttctgctgataagcccgttcagtgaattttttatttctgttcttgtgtatttcagttctagaatttccatttgattgttcttttatgatttgtttctt

SEQ ID NO: 500777 - DNA, 309 bp, Homo sapiens
  misc_feature (282)..(282): n is a, c, g, or t
  misc_feature (304)..(304): n is a, c, g, or t
acctgggcgcccgagaatggaatggcagagcaggcgcatccatggcatgagtgagttggtgaccccggacagcagtcgggagaagaaaagaacgctgttgcagttcctctcagatcatttccaggacatccagactctgagagagtacttgctccagaaacagatctcaaaagtcaacagggagaatcgtttgtcaatgctagaggattcccagggtcagcccccaggtttccaacacttcactgtgtggcctgcctgctcattcctttcattttaagagangctgtcacatagctcgggccanctggc

SEQ ID NO: 500778 - DNA, 167 bp, Homo sapiens
agtagagacggggtttcaccgtgttagccaggatggtctcgattacctggccttgtgatctgcccgcctcggcctcccaaagtgctgggattacaggcgtgagcaccgctcccggaagtattcaaactttcatccattagtttgggggtctcacgaattccgctgag

SEQ ID NO: 500779 - DNA, 451 bp, Homo sapiens
  misc_feature (13)..(13): n is a, c, g, or t
  misc_feature (17)..(17): n is a, c, g, or t
  misc_feature (20)..(20): n is a, c, g, or t
tcaattcatagcntgcntantacgaggcgtggtggcctctggcgaggggggcgtgctaatcgaggtgtagggcgcgggcgctttcctggctggcggccggctgcacacaccgagctgttccgggcgggggagcccgcgttgtggcagtggcggcgctccgaggccgcctggtgtggtgcgaggagcggcaggcccgggccgagggcccgtcagggtcgccagcagccgctttcagccactgtgtgtagcgtcctggactctaagagcccagctggtgaagctagacaccatgccttgtgccgcacacacgtacctgctagcacacacttgccctgccttacgggcttgctggcacttccctgcagacaactacttacctggttgcccaactgccaccaaccttgtgccttggctgttggccccacagttctaactacaattctgggagccc

SEQ ID NO: 500780 - DNA, 947 bp, Homo sapiens
cccaagcgtgacggtgcctgcctgtagtcctagctacttgggaggttgagacaggagaatcgcttgaagcctggaggcggaggttgcagtgagctcacgccactgcaaccccagacctgggcaacaagagatgaaaactctggtcttccaaaaaaaaaaaaaaaaaaaaaaggtttttctccaatttgtgttgcgccggggtggtttaccaaggttttaaagggccaccgcgccttatgtgccctcattccctctcgggagaaattttcacacaacctttcccaggttttttcacctggtaatatgcgccggggtttcccaaaaaatttccccaaattttaaactaaggccggttggataaaatctccgtgacacagttgggaaccctcccggtggtgcgcctcttcaccccaattttaaaaagatctgtgggaacacccgtttttgcaattaacctcttagaaagggtccaccctcaggggcctccctctcccaagtaactaaccctggaggggacacgccccatgggggggggttttccccatttcgcccatattactatttaggtggggcccattacgcctggaacgttccccttagaaaaattacgcgggccatcacaatactcccgtggtgggccatgggtcccccacaaccatgagatcgtcgggaaaatcccacccgaggggtggccccaacgacgaaaggacgcggacattaatcaggcaggaccacccgcggcttggcaccaactcgggcacaactcggacccgcggggcaatcggcaatggccccaagtggggccctaccggtaactaccgccgggaaccttgacgcttaaaaacaaacacaaccaatgcgccgcgcccggccccacaaaagatctctacacatggtggcgcgggccaagagaatggaacgcacacgccccagaaccggcagaaagt

SEQ ID NO: 500781 - DNA, 111 bp, Homo sapiens
aacgcatgtatagaggatgcgggtgaactccacgtagtaagaagtagcctatatctatatcaatgggtgcctcccggtacatctcgtccacttacctcctctgtgctgtca

SEQ ID NO: 500782 - DNA, 369 bp, Homo sapiens
  misc_feature (9)..(9): n is a, c, g, or t
  misc_feature (62)..(62): n is a, c, g, or t
  misc_feature (67)..(67): n is a, c, g, or t
  misc_feature (69)..(69): n is a, c, g, or t
  misc_feature (71)..(71): n is a, c, g, or t
  misc_feature (79)..(79): n is a, c, g, or t
cgcggcggnactgacagacgtgtcgggggtccggggcctgtcgcggttgccaagcgctcggntggcntngngtcgcttngccaaggcgtggcaacagtgttgcaaacaggaacccgaggtgttcacttcactgttgaaggaacgagagggcatctgctaaagtttcagattccatttctgctcagtatccagtagtggatcatgaatttgatgcagtggtggtaggcgctggaggggcaggctttgcgagctgcatttggcctttccgaggcagagtttgatacagcatgtgttaccaagctgtttcctaccagggtcacacactgttgcagcacaggtagaaaattatgggcatgccgttttagcaga

SEQ ID NO: 500783 - DNA, 512 bp, Homo sapiens
agagcagaccgtgtgcagtggatgtggaaagtactatgagcttgacctccaggaaatgctatacagattaaaatttcagtccattagcagttactgctgaaagcaagaaatgctctcttaatcatttcaccatccatcttatgaaatgtaatgtcctcttgacaaaagtctgagtaccaagattcaggaaactcattccctacagaacaggtgttcgtttagtcccaagggatgatctaataggctgatttagtcagagacagcctggtgggagactccgatatagaccgtccatgctgtaatttaaagtaccatattaagttggtagtagtataggctaggcttaaaattgcactcctcttgcctccccgctcccttccaaaacaaagaaaaggtgaaaggaactctaaagagtgtcatatgcaggcacatctatataaaagctgggaaagaaatgcatattcctgccatttcccttcgtgtagtaccccagtttaattcaactacctcaa

SEQ ID NO: 500784 - DNA, 236 bp, Homo sapiens
gcagaaccttactaaagtagagggcacaatcagtgtgaattaattcacttcagagatctcaagtcaagggcagggcacggcggctcacgctgtgattcccagcactttggggagggccgagacagagcggatcacctctaggtcggggagttcgagaccagccttaccaacatgggagagaccccatctctactaaagaatacaaaattacctggggcgtggtggttcatgccttt

SEQ ID NO: 500785 - DNA, 1271 bp, Homo sapiens
  misc_feature (439)..(439): n is a, c, g, or t
ggcggatgcgcgcgtgcgctagtcctggaggctagtggtggtggtggcatccgtcgcccgagacccggccgacgggacccctaaagttctgcttctgtcggggcaggcctgccgtccgtgctgccggacgtccctggccggtgcaggccctgcctgctcatggtgctccgtgcccttacgatgggtccaggccgcggaggcaagcgagcgggggtggcttgtccgccgcggtcggcgcaaggcgagacgtcgctatcgatgcgccatgaggcgccccgagggacgaaagcgctcgtgatcgcatcgacacacttgaagataccaccagtagacacctcagacttgtcagcaaatcgaagagaaggcttcggaaatgagttgtaggctggcaacaagctatacgttggatacggaatctagcaacgatggagccacccgngaagagaagttttcgcacttgcatagacattgcagccgttgtgtaccgccagcatgaaaaaactcattgggcctttgctgagattagagagaattcgccagtgcagatataagatagctagtcgactaggcgtgcatgagatgccccggcgtgggcttggtctcggatggagcggatggcagggggccccgcgctgcagtgctgcgcccacgtcgttaccgggtccactcgtcgagggctgcgccccgagagttggtgcctttgggtctcctggcgcaacgtcctttcgaggaccttagcgggttgcgaccccatcttgggaggtggcccgatttcctagcggcacgggggtttagttgacccccgtctccgaaggaaggccatttctccctgcagttcgttgttactctgtgcggggtgagtcggggcgtccttttgagcactttccataaccttctggtgtagtcacttgctcggggtgaattccgttggggcctacccttttgtgtacccccaaggctactgggtcccgatgccgggggtggccctctttgccccgccgagaaaaatccgtgagccaaggcacagtgcgtgagtgtagtcattgctctcgaggcaacgtgttctaaactccccgagagaacacggggaacccaatgcgtgtcccattctgaacccagagagaaatatccttcctttttccttttccttgcttgcggagatgaatagtgaagacgtttaccgaatgcgacttgcgcccacagggcttggggcaccagaccgctctataacatgcacatactttggagattcacgtgtagtcggagctcac

SEQ ID NO: 500786 - DNA, 216 bp, Homo sapiens
ctcttagcgaagtggaggggaaggaggaaagagagacggggatatgtagtgtaactattgacctcccatctgtcctgttctgccccgtatgacacacacacagcctttcctctctgcttaatctcctttcaggttacaaacgcttcttaaaggactgatctaaggccatactccctttctgtctcccttcttctctcctttccccacaagccgcgt

SEQ ID NO: 500787 - DNA, 872 bp, Homo sapiens
  misc_feature (354)..(354): n is a, c, g, or t
gttgatggacttttgggtctgagtgcctgtaaccagattccggaaacgacaggacagggcctggtgatgttgatgatggggatttgaacgggtatgctgaagcttgtaatgcgagtggggtttcctgcgttttatgcaatggctgtagatttcctcccacttctaaagcgctgcctttctgtgacacgcagggagagttcagtctgctagttcgtatggaaacttggggacctcactgtgctgcttgctcttggcagaggatatcatttgagctgtcatagcagaggaccacatttaccagggtgcactttggccaaagaatagtaacctttctaaggcttagttcctctggcntgaccaaaccagtcccaggaggcccctgggttccagtcaaggtcatgggagaggcccaccatggatgaggcctgggggagcagggtggaaattaagtgcccaggtatgttatggatagcctgcagccctctccaatccctaccctccaaacccagtgaagggggacatgaaacaggtgaggcagaggagcaaatgcgggtcaagaattccgaactatacttgacttacagtgcagctgtgatgtgcacattggtgtgtgccacgagacagcatagtgtggtggaaagaaaatgggttttgaacagagtgtcctgggtttgaatctctgcttgcccatgtactagagagtagtcgaacctctctgggcctcagtttcccagatgtaaaatgggaatagtagtacttaccttgcacgggtgctgagagaattccatgagacgacacaacccgtgtaaagtgcctggcataggcatatcacattagggcactcagtaaatgtgatgtcttttctacttgca

SEQ ID NO: 500788 - DNA, 119 bp, Homo sapiens
atgtatacatgagcccattctttctccgccagtattgaacggtgagatcttgccctcatcaaatgaaacactcgtcctttgttcagagcactcttactctttcctcgcggatgcatgag

SEQ ID NO: 500789 - DNA, 393 bp, Homo sapiens
gtcgcgcggtattatgaaatagctgtcgtcatcacagtgcgccgatatgcacgaaggtgggtcatgctgagatcaggcaggagaggctattatttatctatgttcaagagttcctcaaagtagggaagattaaaaagcaagaagagtttctcactttaggcattactcttgcgactttcctttcatccatgttccccgggggattccttgaactcctttgccactgcttcaggcaaatttaggggagttctgctttattctacagtggatggtcccatgcgaggttaatgtgtggggcagtattaggaagctcaatcttgaggccaagtggggagtggacttagagcgtagcagggattgattagagacaggcagctgatgctccagagaggg

SEQ ID NO: 500790 - DNA, 646 bp, Homo sapiens
atgacgggaaatgctgtagataaaatcacatgagcgattcctgagatacaaaataggttatacagcagcagaagacaacacacaacatcaacaatgcatcggcccaggaactgctaatgaacatacagtgccgtgatggctcaagacgtttcgcaaaggagactggagccttgcagatgaggagtgcagtggccagtcatcggaaactgataatgaccaatagagaacatcatcgaagctgatcctcttacaactataagagagctgcccaagaactcaatgttgaccattttatggtcgtacggcattggaagcaaattgaaaaggtgacaaagctcaataaatgggtgcctcatgagctgagtgaaaaataaaaaaattcgttgttttgaagtgtcattctctctattctatgcaacaataatgaatcatttctctatcggatggtgatgtgtgccaaaaggtggattttatacgacaactggcgatgaccagctcagtggctggactgaaagaagctccagagcacttcccaaagccaaacttgctccaaaaactggtcatggtcatagttgggtggtttgctgccagtcagctcaactccagctttctgaatccaggtgacaccattacatctgataagtat

SEQ ID NO: 500791 - DNA, 105 bp, Homo sapiens
acgcaatgaaaagaccagagagactatgtacatgtaattataagctagatcacttctgggactaggttttcccagtgagggatcatgaagtccccaagtgattga

SEQ ID NO: 500792 - DNA, 225 bp, Homo sapiens
tggtttcagctccaaggtcttctatgggtaagtaacaaccctttgttcagcatagaatgtgtccaagtaaggttctcggaaaaagtgtctggtcctatggtctgttgtgcctttcaatcctgtttcgtttgtgtgtaatgcaacaattgaccaccgggaggcacattttaccctgtgtccctcgtgatacaataaaatcccacactcagatacacgcgggttaat

SEQ ID NO: 500793 - DNA, 768 bp, Homo sapiens
  misc_feature (222)..(222): n is a, c, g, or t
gctgagctgggcatcaggtttgcggcactgagccgtggaaaatgagcgagtggatgagaggtactggcctgtgctgtccatggagctccacgagcgccaaagaggtaacctcaagggagcgagagggcctgtgatgcgcctcatagtagctgggcttgctagcatatgatgaatggatgaggcttgcaaggatgaagcgtgacatggctggtcacatgcagncttgccggttcatctgccgtggccttgcaggtgccgcatgcctctgcgcacgaggccagaggcagtgagagccttagagccctcccacatagtgtctgcacactctagggagtctcaacatgcctcatggcttcgcagctgacgttgtctgacacatccatggagcctagcaataagccacgacttaattgaatgcttggttgaatgagttgcaaccagctctcaggggccaaggcttgaggatgcgatgccggctgcatgcagtgcgtgctgaggaagctgctggagtaagctgatggggcacccaagcgagagcactcggtgagtatgaaagcttgatgcttgcgacgtagtcaagcccatcgtatgcagaagttgccacggctgtgccctttgcatcggggatagtggacacaggacgggcgggctgccccttgcagtgaaacgaccttagaatgaggacgccagcaggggaaactcggaagaagccaccaatcgtgagaaatccaaccgagtattacgaacaaacatcatgccaaggcaggt

SEQ ID NO: 500794 - DNA, 382 bp, Homo sapiens
tgaggatccctgcttactgggcgtatggtctttaagaaggggcggccaagcatggtggctcacgtctgtaatcccagcacttcaggtggccaaggccggagtatcacttcagtccaggagttcgagaccagcctgggcaacatggtgaaaccccgtctctacaaaaaattacataaattagctgggcatggtggcagacgcctttagtccctgctacttggaaggctgaggcaggaggatcatctaagcctggggagttcacggctgcagtgaactgtgatcacgccactgcattctagctttggtgacagtgagactctgttttccacaaattaaataaataaaaaagggaagaagctagggagcccaagatgtgtctaaa

SEQ ID NO: 500795 - DNA, 483 bp, Homo sapiens
ctctgtaaactattcctaaaatgtgtatgatatatttgaaaaggcttccattaatataatagctttgcttgcagccttccaatctatgttggtttacctgtagtgttttataaagtgtggtcagaggcccctatagaatgtattgtttgaaagtgtagtgatatatttgtgtttttatttcaagtaagtcattttacctgtatgttcattaatattcatttatatggagtctttgttagaaaggaaattgttcgatcagctatcagcagttttggcccaaggttggtgttggttttccctgtcacgctctccttgtcacaatttctaatgcctcgggtaatgtgccaagtgtacagttttaatgatgtagcctttcaaggcattatgttcagtgtagaaacataggtagtattgcgcactgagctgaccactgtggcaccccttctcggtgtaactgcatttctcattttaattgattgagtg

SEQ ID NO: 500796 - DNA, 227 bp, Homo sapiens
cacgaggataaccacacaaaattagaatgcaagtactcagggaatatgtattgggggacgtgggcacaaaattagcgactattttgaataccacggtggaaatggatcaggtcgattaaaagggatacctcctgcaagccgttctcctcaagattcacattcaaattctactccttcctcatccgttcaatcgagaattccttctcctactgcattaggatttgggg

SEQ ID NO: 500797 - DNA, 213 bp, Homo sapiens
  misc_feature (56)..(56): n is a, c, g, or t
cccctaagatccatgttgaagccccaagtaccagtgcctcagaatgtgactgtatntggagatagggcctttaaaatgaggccagggtgtgccctagtccaatgtgactggtgtccttataagaaaagattaggacataggagagacaccagggatgatgagtgacacacaaaaaaaggccacgtgtggctacagcaagaaagtggacatctg

SEQ ID NO: 500798 - DNA, 430 bp, Homo sapiens
actcgttgcgaccgagagtatgcactcggcatgtctcaaggctcacccaagggttgaacgtgatgaaggtcggattaagctggacgccggcctccttcaggaacgccgacgcttcctcgaccatgggcacgttcatttccttgaagacctggtcgagaacctcctgcttggggaactccaacgcggtggtgatgaaagcaagcccgagctgccccatttccttgagggcgtctttgttctccagaatatgatccacgcgagtggtgaagtcgtacgtgagctcggggaactgcgagtgcagagtccggatgattttcaaaccgtgcttcttggcattgaaaaaatcagcatccgtaaaggtgaggtgagtcattccctgtgcgacgaggttcgccacgtcgcgctcaacgagatcgtcggagaacgaccc

SEQ ID NO: 500799 - DNA, 1537 bp, Homo sapiens
  misc_feature (1509)..(1509): n is a, c, g, or t
  misc_feature (1537)..(1537): n is a, c, g, or t
ggacaattgaagactattactcgttgtctagaacgtgcgcaggtatgcctcttctgaagatctgaaagctgcctaccggaggctctgtatgctctaccatccaagacaagcactatgagacccagtaggctcaaatgtcacatggctggaacgacatgtttaaccgttgttcaccgaggcgttatgaagtgcttagtgacccccatacatccaggggtcgcatctagtgattagtatactgtggaaggagatggagctgtgcacaagtggtaatgcgatgggaggtgctagctgtgaaatggagagtacgataaccccatgtctgtacagattacgcaggcatggagcttgtgaggcgggctgactgaagtacgcagagcagaagacgaggagtacttgcaggcatgctgaaaaccaatatcccaacggtgataacgagtcgagcgtgtgggtaagtacgcatgctcgaccagaaccgatatttcgactcagcctatgtgactgaagggaagtagtgagacgaagtgtggtcccggacaagataggtcgttctcccggcaacggcatgttagagagagtccaacgtaaatactagcactaattattcacctagatcagaataggaagggcgacgcgcgtttgagcaggccgaaacaggtacatcaagagcgaattccttcctactgtgcaaagcaactcattcaacactccacaggaagagtgtgcaatcgtcgtggatggaacggttatacctagttagaccttgtcggcgccatcgagcacaggaagataaagcttacggagcacaacgcgggactgggcggcaagaagatcgagaattcatcggacgaccttgtgaacgacccataccagggggccctatggttacggatctcaaaggcctgttgcaggaaatccttcgacagccaaagaagagagtaattggcgacagaaccaaacagtaggggctacataggcaggagatcacacacccccgcgggagaacatccacgagaccaggagcattagaccaacagtgggcaaaagccacggaaacctaagaaaaaagaacaaccgagaggttcacctggcagagggcgagagcgaggaatcacagagcagaccccagtagagaacaaagcagcaaacggccgggaaaaaactaaaaaagagagggccacctgcatcggggggcgccccagcagtgggagaaaacccgagcacgacaatggacacagaggcagataacagacaagaaatcacaagagacagcagaaccaagtatgcagaagagtcactcaaacgagagccagcttgagaaccgatacagcaaagcagagaaagacaaccctaagagccatacgaagccagcacgagtacaagccaagcacaggagaaactagaagcaaacgaagcggacaagacagacgataaagcagaccacgagataagaacgcgtagagatcgagcacacgaaaagctacacagtatgttgctcgccgcagtatncgcgcgtagtagcgtgagatagagggan

SEQ ID NO: 500800 - DNA, 451 bp, Homo sapiens
cccgggctgcaggaattcggcacaggatagtagtagtagtagtagtgtagtagtagatatatatagatagagagtgtagagagagcgagcgatttaccggcgtgattgtgtgctcttccccttgcccctttctcctttctgccctttgtcgctccccctgctctctcctacctctttcctgccttctcctctgttactcgctcacctccctctcccatcctatcctgtgctcgctcctattcctttcctcttctacactgttcttcagacttcgtccacttccccttcgcatcttaccgctccgtccctgatgtgcctcttgtccccttattcctcttgactcatgcctcctactcctcatccacactcgccatttcacacgcttctgctttccatgctctcacactgtcctgtggcttcatacttcctggtcatctcttttctcactgtt

SEQ ID NO: 500801 - DNA, 106 bp, Homo sapiens
gatcctttaggcacattcgactaggctcctacagaaaacgggaaaccgtcttaaacacatttgccaatccctgggacccgctgttaccaggaacatatgttgttct

SEQ ID NO: 500802 - DNA, 100 bp, Homo sapiens
cgaagaagcacccaggagggctaatgatgaaggggcagcagtcaccagagcgcccaccgggcacacccccctctgtgctgtccacctcctcatgtgctgt

SEQ ID NO: 500803 - DNA, 152 bp, Homo sapiens
ggctgattagaggatcccgaacgggtgatgcggtgcttcgggagagggtggggtggacggcagcagcaggcaggcgcacagtgagccacacccgtgggcagcgatgtcgccgtgcatgccctccctgccaggcagtctggcgttccatcctc

SEQ ID NO: 500804 - DNA, 851 bp, Homo sapiens
gctgagtgccgcgttcgcgtagtctcgcgcgccgcgtccactgcgcgcttcgctctccgccgcccgaggcccgctgcgctcgccatgtcccggccaccgccaccgcgggtcgcctcggtgctgggcaccatggcagatggtgtgcgcctgcatggactgcgccctgccagcgccgctggcctgtgctgcgccgtttcttggagcgcgtgtacacacccgaacctggacactggccttcatgtacatgcgaccggccatgtcctgagaccatcctgggctggcatggggctcgggctgtgtgcggtggcgactgcagagtgaacaattgccaacaaggccaacccttgggatggaaaatcactaaagcctgacagtgtccggtcccagtttggagcaccgtcacttgaagaggctgacagtgtccccaagtgggacctcttctacctaccacgacaccttgacacacggaaacccagagtggcaagcagacgcttgcattgccttgacagaaggaatggaccaggagggcaagttcgatggaagctttgggcctcatacacgaactatgctaagctgcggacagtgggccagaggatcttgaacccctcatgccaaggagcccaactggcttaggaatccattgacccaatagttgttaccaggggccattgtaaaccaccgacccaaacaaacacacgggcaacggttggaaaaacggacagccacctttccccctgtgccatccagggcaaccttttgagaacttgaaagggatacctaatggccgtaacaaacgccatcttggacatggcgtgcgccctgcttaccttggaaaacgtaacaaagatctg

SEQ ID NO: 500805 - DNA, 175 bp, Homo sapiens
gactcccgtttgtggttgcgcactgttcagccgatcatggaggaaatcagtcgtgacggttgaagagcgccgctgcaacattgggtgcatcacgctttcagacaatctggcgtgtgcttctgcccagcttgcaacctgccgttctgaccggctttgcgctcgcttttgcgcgtgg

SEQ ID NO: 500806 - DNA, 400 bp, Homo sapiens
tcggtctcggtacccgtcagacgctgaactatgtggaattggaagtttacttagagtcaaaaacaagtacaggaaagtcagttcttactcaagagttaggttttcaaagacagtggataaaataaaaatctagtacagtcaagattatacgtgcaaatcccctcatcactcatacagtttagcagtcagtcttaccgtggctcaccaggtccaatccacacttcttcctccacgattggagcagagggtgatttttttttatgagcaactgatgaagtcacttagaggccatttgcggtaggagccctgtgtactagagaccaatcaatgcgcccccatggcagcatttccacctctctccctctttgttcttgccaagtacacatagttcagcgtctga

SEQ ID NO: 500807 - DNA, 193 bp, Homo sapiens
gacaacacattctcctaatctttgtatatctggaaacatctttatgtcgcctacatttttgacgattagtttggccagaatacagagcatattggcttgatatttttttcttttacgaacttacgagtatgtcctccccgttgtctcctagttacccgactttttctagatgagaagtcagctagttgaaatt

SEQ ID NO: 500808 - DNA, 769 bp, Homo sapiens
acagtgatatgactgcatctttaagaagtgaccattatactgtgtatatatatataaacacacacacatatatatatatatatatagtactctaatactgcaagaaggtttttaaaacttcccactttattttttatacacattaatcagatatcatttacttgctgcggttgcaactatgcacttgtataaacgccataatgtgggagtttatatcactcattcgtgtgttacctgatggaagtcgcatgtcatgtataagcagttactgtaacaagaagtctacagttccattatatcagttcacctaatgcttcactgataggcaatttttacccattttgaatgccttaataaaatttcttctacaaagtctcagccctgtcgtgtcattaaaaacacaaaaaacgcgtttaccagctcttaggatgtaaactagctttgtggaagataactcgcgcacctatttatacacataaatagttatatcagtgtcagcctatttgataaaaccaagtgtcgtaacaagtattcagtggatatagcaaacaactattgcatgggtgttggaaactcattatttccttgaatgtcgtctactcatccactacactctttaacagacctccacaattatctgtactaccaggaccacatcacaccacaatcaaaatctatgctcgctccttcacgaaacagatataaacacattgtagggctcacccatttatacataacccatccggcacagaacgcggcaaaggacgcc

SEQ ID NO: 500809 - DNA, 703 bp, Homo sapiens
aaccggggatggcggccctggctttttcttctctctgagatgcgtttccctgccaagttattggccatgctcttctgcatccccaaggctttcgaggaccgattgggtgctcaccgtggtggccgctgtggggcaagccttcgcacccacagcactatgggcagcaccacctcggctacctacttagcttgggggtgctctcttgcctgggctttgtggtcctcaagctgttgaccatcagctcgcacggtggcgtctcttccagtgcctcacaggccacttctggtccaaggtttggaactgccccagtttcactttgcgtttttgtttccgacgcatttcaacaatcacccaagatttcattccttttgcgggaagaacgcttgaaaccaggggagaaacttgctgaaaccgttgaccccccacattgaaattggactctgagatgcaggcgtgtgcccagtgtcagacatcctgtgtgtgatgatatgcactgatcacacaagactgcccctttcctgagaaagctccgggcttcggtgtggaggggtggagtgctgtgatctcgacaacttactttcaaagacataaagcacagatctccgcacaggggatgtgtgtgttcctgatgtaatttgcataacttttctgtagtttgaaatgtttccaaataaatattggcaaggggagtggaaatgacacc

SEQ ID NO: 500810 - DNA, 108 bp, Homo sapiens
ggaccagcgggggggagcagaggtcagtggcccatcagcaatcgaagtccctttaatgtatgtgcgttccaaccggttgtgttcccgcccagacatttgcgcgggatg

SEQ ID NO: 500811 - DNA, 141 bp, Homo sapiens
cccacgtcgcctgtcacccaatatcttcagccgcgcagtcccgaagagtgtaagatgttcgccttcgccaagctcgcctgtcaccgttctctgatccgagctggatccagagttgcatacagaccaatttcttgcatcagt

SEQ ID NO: 500812 - DNA, 234 bp, Homo sapiens
ttatcccaacactctggaggtaggaggagatcatctgaggtcgggagatcgagaccacttacaacatttgaaaaccgtgctactacaaaattagccaggcgtggtggcgcatgctgtaatcccattactcagaaaggctgaggcaggagaatcacctgaacccgggaggcagaggttgcagtgagctgagatcgcaccatttcactccagcctgtgcaacaagagaaactccat

SEQ ID NO: 500813 - DNA, 556 bp, Homo sapiens
cctcttgttgataatttgtgagcttaaactctgttttttgagacttccctgactgattcttataacaaatgaattctcttctaagcaacattcaagaggctcttgtgggataaaaagcattttttatggaaatcaacggtatttacaatgtcaatagctgatgtatttttgtggatccagtaaattcccagtctctcaaaagaaatcatttggaaatctgtttattccaatagaaaacatttcttttatgttgttcagtttgttcagtttaaaacttttggggaataacttttcctcaaacatttggtgatttgtggggtttgggccatctttaaactggaagattcctaatgctgttcgtggatgaatgtcagttttaagggttgtttgaaagaaagggcagtcaaagaaggtttctgatcgcggggacctgggcttcatttgattttttctaaaaatttgaagtgggaaataaaaggggggtatttgttttttacgcccccatgatgcaatattttaaagggattatttaaaaaagttccatcttgaggcttag

SEQ ID NO: 500814 - DNA, 310 bp, Homo sapiens
  misc_feature (111)..(111): n is a, c, g, or t
gagctcgcgcgcctggacatcagcaaacaggatcagttaactattgcatttatatgtaccgtagctttgtattcaaaaattatctatagctaagtacacaataagcaaaancaaaaagaaaggaaaatttttgtagtagcgtttttaaatgtatacttttaggaccagtgggggcttataattaagggcctttattttatttgggaggtgacttttaggacatgaaaatgaaagacaattggggtagtttttgaattatgtacatttgcataaattctttcaatttggggcagatttaattttttccttt

SEQ ID NO: 500815 - DNA, 593 bp, Homo sapiens
ttgtggaatgttgaagagtctgtctgggcccgaggttccctatactgaagtaagtaatataaggttggatgaaagaagaagcccagttttaagtaagtttgaaagtaaagtagaagacttgaaatttcctactaataataagtaacaaatgaagatttcaaaaaataagtgttttagaaaactaaactatttgttaaggaaaggtattctgaatctgttctaaacattaacataacttcctctaatatattgaaagagtaattttatagctcttatgaaaaaatattgatttttgtgataaaaacttcaaaacgaaatagattgctaggagttcatgcctaatattgtttacaggtagaagtctaaggatagtacctaaagcaaaagtagattccaaagatggatattgaagtttatttcaagtagaataagcacatttcaataatataattttaaacttgcaaatcaagaaggtagcatgttgtgtatttatgtatatttatgtacatatattcatatgtatacatgtatatgaatatctaatttttgcatacctggaaataaatgtgtgtgtctgtgtgcaaaaaaaaaaa

SEQ ID NO: 500816 - DNA, 367 bp, Homo sapiens
  misc_feature (91)..(91): n is a, c, g, or t
  misc_feature (270)..(270): n is a, c, g, or t
  misc_feature (296)..(296): n is a, c, g, or t
  misc_feature (298)..(298): n is a, c, g, or t
  misc_feature (322)..(322): n is a, c, g, or t
  misc_feature (324)..(324): n is a, c, g, or t
  misc_feature (356)..(356): n is a, c, g, or t
ccgagatctggctgggcctcaacgacatggcgggccgagggcacctggcgctggacatgaccaggcgcccgcatcgcctacaagaactggnagactgagatcaccgcgcaacccgatggcggcaagaccgagaactgcgcggtcctgtcaggcgcggccaacggcaagtggttcgacaagcgctgccgcgatcagctgccctacatctgccagttcgggatcgtgtaaccggcgggcgagggccgtggggggcctggaggagggcagganccgcgggaggccgggaggagggtggngnccttgcagcccccatcctctccgngngcttggagcctctttttgcaaataaagttggngcagcttcgca

SEQ ID NO: 500817 - DNA, 648 bp, Homo sapiens
ggatccccgtttccaagcggagatgctggcagactcgctggagggaaggcagcagtggctacagtctacatctggtgaaatgagcttggctggcgttgtacttgcgtcatgattgcctctctcactttctcatactggatggatgtgtggcattcacgcaacagaatggggaagatgatatgaataaatgaagaactagtgaatggatactgaagagaaatatatggggtgtagcgattcgtgtaatgccctgtgtatatacgaaaggcaggttcgtgtagacagaacatatgtggggttgtcatgcaacagcagtagtactttgggagaaggggaatgagggggtggaggtggagtaggtagaaggaggactttcaagttccagtgcttaaatactagaccgcaaggaacagtctggtctcctttagtgaagaaatcggatgctcatttgctgttctacatgcgaccttctccaaaatcttaacaaattctgtgaaagatatggcactgtccccatcctgatcagcctcctgaatggtcctgtatgcgatgctgcccagctgctcatctgagatatttactccgaccatcatgcgtagcagctgtaacagctcatcacgggagatcttttcatctttatccgaatca

SEQ ID NO: 500818 - DNA, 486 bp, Homo sapiens
  misc_feature (27)..(27): n is a, c, g, or t
acggagctactcgtagtctactgagtnatatataattagccatatatattgatagagagatcatacaggtgtactgcaaaaattggtgatcagaaagttaaacagagtatggaaggctcaattggcagtaattatattccaaaatattattgtaaagggtggatgcaaaaatccattttccacagaaattgtattataaatcacagttaagtttcaaagatggtctataaagtcttaagccagatttgcagtcaacaatatctaagtcgagtctcaccagatgcatgtgaatgttctacctaaacccagcagggattagctgtcagggaggaggactaggtgctgctctgagggcagagcaacatcgtcttgccggtccgtgtcatgcgtctatcactgaacgtttcaagcagtctctggcacataggaggcactcaatatttgtcactggctgactgaccaaatcagaggatgccgcaaccgcaa

SEQ ID NO: 500819 - DNA, 253 bp, Homo sapiens
  misc_feature (86)..(86): n is a, c, g, or t
  misc_feature (91)..(91): n is a, c, g, or t
  misc_feature (146)..(146): n is a, c, g, or t
  misc_feature (148)..(149): n is a, c, g, or t
  misc_feature (156)..(156): n is a, c, g, or t
  misc_feature (158)..(158): n is a, c, g, or t
  misc_feature (165)..(165): n is a, c, g, or t
  misc_feature (167)..(167): n is a, c, g, or t
  misc_feature (169)..(169): n is a, c, g, or t
  misc_feature (175)..(175): n is a, c, g, or t
  misc_feature (181)..(182): n is a, c, g, or t
  misc_feature (186)..(186): n is a, c, g, or t
  misc_feature (190)..(191): n is a, c, g, or t
  misc_feature (207)..(209): n is a, c, g, or t
  misc_feature (213)..(213): n is a, c, g, or t
  misc_feature (216)..(216): n is a, c, g, or t
  misc_feature (223)..(223): n is a, c, g, or t
  misc_feature (225)..(225): n is a, c, g, or t
  misc_feature (229)..(229): n is a, c, g, or t
  misc_feature (231)..(231): n is a, c, g, or t
  misc_feature (234)..(234): n is a, c, g, or t
  misc_feature (241)..(241): n is a, c, g, or t
  misc_feature (248)..(248): n is a, c, g, or t
  misc_feature (252)..(252): n is a, c, g, or t
tgagcacacttatatagtctaccctactacacacactatatggtctagcctactacacacctggatggtctagcctactacgagcncttanatggtctaccctactacgctcctatatggtctagcctactaaactctttatggcntnncctactncncacctangntngtctancctacnntgcncttnnatggtctagcctactnnncggnttnatggtcnancctncntanactcttnaatggcntttnc

SEQ ID NO: 500820 - DNA, 105 bp, Homo sapiens
ggccacagtgtgcatctgaagagctcagtctagtgcagcttgagtctgcatgtgtgggctactgtcatctagtcatgaagatgctatatgtctgctaattactgt

SEQ ID NO: 500821 - DNA, 1240 bp, Homo sapiens
  misc_feature (393)..(393): n is a, c, g, or t
gctaaataggaagggagtatatcataatcagcaactttgtaagcggagatcgaactgttttccatgaacatctagaaatgtttagacacatgtctatggtctttaatcgcagtgtacaccttctcttaatgattagtcacttttctacccactgtcactgtattaaaatagtatgtgtacataatggtttgattggaataagtactagtggagaaagatgcagaaagcgttcgaggaatccatgtgtagtgtattattggggactatggatgcaggtatctatggaatgatgtatatactactttacgtttagtgtgagtaagaggctattgtagcggaaaacagtggacagtttgattgtcaagttgttgcgagacctgttagatgtagagntacttcgaattatgtcaagtttctatgttgtaatgtattattgctaagtatgtgtctgtatttcttacttatattatagtggttttgggtgagagtggtaggacaaaagttcgtctatggcaaccaaaaagtgatcttgtagcaggtaaaatttgtggctagcgcatagaaagagaatagagacacacaggagggacaagggtagagaagcaacaggggagcgtttgcgacgcttggacaactgtagtgggatgaggctaacatagctacaatgctgggtgtcgtcgctgtttggtctgcaattaaggacacacaaaaaaacctcggggaattagacaggccactaagactgtctcctcttacctaaggctcggcgcagagaaaaagcgaactgggggctcgcgcgaaccactcgaattttggtgtagggacttctccacgggggtagtaatgggggtgttgcccgcacactcggttttgtggcccggtttgaaataaggccctcgcgcatcgtaggaaccgccccccaggcgggagagtgcaccggggcgaataatgtaaacagcacattggtcggcatcgcagactatatcgtcctgggggtagaaaacacccgacaagagattggatttagacaggacgcgacaacaggcggcaatttggaacgccattcggcaactccggagagacgggactccacacattccagaggggagagttagtaaaccaacagaatacgaggtgccaacacaaaagggactttaacacaaacatagcggtgagagtatccatacaccaaaggaatccagcatcgtcgcggacacagagaacaccgacatagggaaag

SEQ ID NO: 500822 - DNA, 936 bp, Homo sapiens
ggtcactggcaaggctaaatgatagcagacactttcaattaagcattgcttcccaaggccatgaatgttgagtacatagatcccctccatggatagttttcccagaaaactactctctaagcaggagttctggagtgtccaagaggctcactcatgtcaaaagggttaactcgcgtaaatatataggtcacaatgaattagccagtgaacaaatacttgaacagcatcataatctgaggtaattgagatctcttcataatttgttaatagaacgggaaattgactaaaaggatataccaggacttagaaataatggaaaatttcaccacttgtctgatagagtcattggattaaaagaaatgtacagcattcaaaaaggcagaacaatgacccccatgattaaatacaaatcaaaactccaaattaactagaaagcaaatcaaatcaagcattcagatattcaagatgcaaggggaaggagaaagcacatcatagaaaacattatagagaataaaatgttaacagtaaatgctgtctgcatggatccttcgtaaatttactaaaaccaagtaaacctggacttcattcttcaaagaaaaaaacactttcataaaaccaaaaatgtgatgttcaaggttatgcatttatatactcaccatccaaattgatcaatggttctgcattttcagttgcatagtcagcaggtgttgaattatcaggtactaaatccttgtatttcagctataaaaacaggcaaaaatataatcttgtacaacgtgaaactcaaggtacaatgactactggctatttaccaaaatttaagctgagccaaacatgatttacagggttcgaggttccctttactggcaatggccattaatttccacttttaaagttgttcgcaagactttcggattacttctggcctatattcaa

SEQ ID NO: 500823 - DNA, 169 bp, Homo sapiens
tatgctgtattcagcacttgttaggctgagtgggaccatggtcgctgtcaccaggcacggtatacatttgagtatttctgtagtatagacagcgtttcaacttgttgggcaggatggtcttgatttcttggatctcgtgatccaaccatctcagcttcccaaagtgctg

SEQ ID NO: 500824 - DNA, 279 bp, Homo sapiens
  misc_feature (64)..(64): n is a, c, g, or t
  misc_feature (72)..(72): n is a, c, g, or t
  misc_feature (82)..(83): n is a, c, g, or t
  misc_feature (102)..(102): n is a, c, g, or t
  misc_feature (108)..(108): n is a, c, g, or t
atttttgttaatatcaacagcaaaagcctagtgcattgggagatgtgcaacctccctggaaaantctctttnctcgttctcnnggaagtacttcaggggtgngcctcntgcccaaggagccttctgccacaggtgctcccaccagcccccacctcatccgtctgtttgcagagcctcatctacaggtccccacgctgccttcttttactcactctggcgcttggccgttttgttatttggcttagtctacacttgggcggaagtctgctgtgcacagag

SEQ ID NO: 500825 - DNA, 182 bp, Homo sapiens
gacgctctctctgtggggacttgttgcgtctgcgcacatgtctggagcggtctccccaggatccctcctgaaaggggtcctggggcccttcacggttttctgtgccaccatcggtcacccattgatcgtgcccactcctgaacccccttggctctccagcctggtccacagtctcgagcagg

SEQ ID NO: 500826 - DNA, 159 bp, Homo sapiens
acttttgtatcatttactattatgtatgctatttaataacatttttctttattaatactagaacaaatatattgacctatgagcagtatagatttcaattatcttcttgggttggtctgaggttgctgatggcttcttggcatacgctgctgtacgttg

SEQ ID NO: 500827 - DNA, 108 bp, Homo sapiens
ccagaggagaccagaagaatcttctccggaaggtgtctcgaagtgtgcacagtggtgatgaggggatctcacaggcgtgggcatcacagtaagtcatcaggtctgctg

SEQ ID NO: 500828 - DNA, 131 bp, Homo sapiens
gggtcaagacaccaagggtacctcttacaatgagaaaccaggtcccggccaggtacctcatcctatgtaagacgtgtttcttcctcttcggtgaagttactcgagacccctaggtggtcattactgccccc

SEQ ID NO: 500829 - DNA, 798 bp, Homo sapiens
ggcggcggcgagcagaagcagctgagtgtctcctgatacccggatgtgaggcgatccgtggcgctagtctgaccctccggccaggcaaaaggaagatggtcttggctatagagtttttttttttcaaagattactaaacattacaggagttgataagaagtatcattcatcagaagcattcattcaatcaattcaaccttgaagaaaacaggtggatatataattccttaaaggggctgtgtgactgtgtaaggagcttatttagacgggaatggtctggtcctaatttcctcacagtgagttactggtggctgagacatcgaggtctatattggggggcaaaacctaagggcgagcacaaaggggaattctatcttactagaatattccggttgaccaagggaggttagataagactgaaaccaaagactcagcaaacagggaaagaaccgtgttagccataaggacatgtttcagggtgatcgaagtccaataatgtagacttcagaagaaaaaaggtcttcaaaatttttctcaaaaccaggtcagtgataaataactcctccagtaatagagctaaggctgaaaaccaaataatttcaaaatttacaaaacagatggacctggatcaaatttcttgtgtcaaaaaatttttaaaatatcaaaattttcctcaaattttattcctggtccaagtaagcaggtgttttagattactggaagtttcatgtgtaggatgacgaacttttgagcaagctttggggaagttctcctgtaagggttgaagcgccgaaaaaa

SEQ ID NO: 500830 - DNA, 1605 bp, Homo sapiens
  misc_feature (307)..(307): n is a, c, g, or t
  misc_feature (752)..(752): n is a, c, g, or t
  misc_feature (1400)..(1400): n is a, c, g, or t
ttgtgtgggcggcgccccttttgatgcagactgtttgggcgcttctagcgtatacccgccggtggggacaagcctccgtgtgggtttgcccacaagcgattgagatgttttttttccccgctggggctccctgctgccgctaacgtagtgtaaagggagtgttatcacctgggctctctgcatgctgcgcgtggtcgtagatcacccagatgcccgggtcccccaggggcgcccccctccccgcttggggagtggtgtggggctcccttcctcctgggcgggcgtttcctgtccagagtcgccatcncctgttgtgtgtgaggcacccccccccccgaggtccccttgggtgtttttccagacaggggccccaccaccggaagaggtgtggtgagaattttgcctccacgcccggggctcctagtaatatggtggtcgctcccggtgatgataaatctttggtggtgtggctctgggccctagccattgtggccgcccctggtccgcctcccgccccctcctgggggtggtcccatgggcccgtcgccctcaccgctctcacgggaggtgcccccacacatttggccctcacgggagacttttgtttgccagaagggggggctttttctctggggagagtgaatattcccggcgatatggtttcgaacgcgggggggacaacacccaagggcactacaaggggccacgaagggggcgcccccgcgagaagcgtcttctcgggcgggattatnccacgccgacgggttcctctgggtgcccgcccaaaagcgccccggcgctcaccgccctttgggccccacgacccacacaagagaggtgatgagagataggacccccgggtgagctcaagctcaaactcggcgctgcgctcgtgtgtgagaaaaggagccacttgtggcccacacaagagctatctcacggggggtgctacacacgcccagggccccgccgcgttttcccgggcccccgccccgggctttctctcggcactccacagggagagcctggttgttctccgcgcttgtcgccccggggagatctcaaggcgccaccaggtggggccacactgagaggcctgtcgccgtgagagcctgggcgcgccgcgctgtggccgagagatggccgcgccgtgcacagggcccggcgcctggggagaggtcttctgagggcttctgaccccacggccccccccgacgaaggtcttgggacgccggctctccaagtgttccccgcgcaccctctggaacacttcgacacgttccacagcctctgagagtctctcggagagctctgacgcacagaactctccgcctcacggagccctcgagagcccgcaggggcacacactccttgtcgagagcccggtttcacagagcttntccacgaaggaggaataattgattcgaggcctctcgaagaagagaagcccaagtgttccaaccgccacgtacccacaggtgaaagcttggtggagaacaccggccttccctgagatccccttgtagactgccctccagatgccggagactccccccttccacattacaaaatctcttctaacttaaacaaaaataaaaaaataaa

SEQ ID NO: 500831 - DNA, 345 bp, Homo sapiens
taaaaacacaaaaactagctgggtgtggtggcacatgcctgtaatcccactacttgggaggctgaggcagaggaatcacttgaacccgggatgtggaggttgcagtgagctgagattgtgccactgcgctccagcctggcgacagaaggagactcagtctcaaaaaaaaaaaaaaattgccccagttttgtaacgaatcagcccaaccctaatgagatcaaacacatttttttgtggaaaataaaaactatcttagaggccagcctctggggttaatgcctgtaaggccaacaccttgggaggttgaggaggccgttttgcctgaatccaaaaggggacccgagc

SEQ ID NO: 500832 - DNA, 960 bp, Homo sapiens
acctgcccgtgaagaggcgggcatgacaccagcacagcacgcagcaagcacccatcatggcagctttcaatttcattcaatgccaaaccagtcacctcaaccaaaccccaccaggtcctcacaactaccgaacacctgccattcaacacacatttcaggttggggcgcacctcgtgcagcaagcaaccccaagcctccgcagccagtcaccatgctcaagcacttcgacccagatccacaagcgcacactcactcatcactccaatttgcatcccaatcaacttagcaccaacaggcaacacagttcacccgtcaaggcatcacaccagcgaccaatccatcattcctcagcaggtcccatcatccaaccacctcagcggtattcaagcaccgtcgcatagttggcatccaggcaccatccgcgcatagagtagccaggacacgcgtcatttccaacaagcgtctccgactacctaggtataccacaccgcaatatcacaatgctcccattcaccgattgcaatcgttgcacgtattccacgccaacctgagcacgctcaaatcccccaggggtcctggttacatcgctacctacattcaccttgatacagatagttatccccataccccccatggcttaagcaggacaagcgggacaccaaggaagccaacaaactcaaacggggccataacattagtccacagaacaaaaggccgggacacagtttcacgcccgcgggttaaaaacctggcacgtacttcccacgttcgttcgacagaacctattcacgaccaccatctcactacaccccccaccaagccagccacagcccaaacaaggaaaaacccaggggggcgtctatagaagaaacagagaaagcagccgcgaacgcaaaacggggcgctgcgcgcccgcgcactactacaaacgaagacgacatcacccctggagaacgcggg

SEQ ID NO: 500833 - DNA, 4555 bp, Homo sapiens
gccttcttcagcgatgacccagaactggacaatctgatggtgaaggcaatccaggtcctgagaatccacctgctggagctggagaaagtcaatgaactctgcaaggacttttgtaaccgttacatcacctgcctcaaaaccaagatgcacagcgacaacctgctcaggaatgatctaggggggccctactcccccaaccagccctccatcaaccttcactcacaggaaaccaagagagttgccttctggacctgggtctggggaggagctagaaggagggaggggggcaggcaggaaggggaaaggacggaagaggactctggggctgtagggtctaagctctcagtgtcattgtcacaaaccacgcctccctcactgccaggacctcctgcagaattcccccaattccatgtccggagtctccaataacccccaggggattgtggtcccagcctcagcgctccagcagggcaacatcgccatgacaaccgtcaactcacaagttgtgtcaggtcggtgcaaagactgggaagggtgattgtgggaattccctgggaggagaaagggtggccccgaggcggttccaggggtgggggttgtcctccaccgagggaggggctcccagctcagtttcttgactaaagttttctgtaagtttatagacggttagcgccaagacccaattgtgatggtttagaacaaatttgggtcaaaatctcatgagcccctgagaggaccaagtaaggctgttgtcccttccccgaagcacctcccaccagaggctctgtcctaggctctagacaccatcccccacccacccataaagcagaaagccatagctcgctacccaagggctccaagtagagggtctttacacatgagtgccaaatgaactgggaaccctgcttgccctcgctcctacccactcccatggcaggggaccccaaaactggttgtctcctcaggtggagccttataccaaccggttaccatggtaacctcccagggtcaggtggtcacccaagcaatcccccagggagccatccagatccagaacacacaggtgagtgtgtgtaggtgtgtgcacatgtgcatggtgtgggctagggcacctgtaatcgcttcttatctgccaggcactttacacgggtgactcattgaatcctcatcatcctctaagaggtatcattacccctactttacagataagaagctgggtcttggaaaggttttatcaactcctgggattttgctgcctccctcctggggttacatcaaaggatcctgcacttcctattcctgtctgcagactgagccgctgtgtccctcagtggtagagagtgcacacacaaaggaagagtagaaagatcggaagtcagagtctgggatctgacattaactctgggatctctgataagtcacctaacctctctgagcctcagacttcttattgataaaagggggattaatagcaactgcacacagcctagccaacctacagggctgctgtgagaatgaaccacagcgatggataggaaagtgctttgcaaactgtaaagtaccacagaaatgctgataactacttgacagcttatggcaaattcatatcttctcctgttctctctgcatggccctgtttcctctgtctttctctctctctctctctctctctctctctctctctctctctctctctctctctctctctctccctctctctcccccccttccccatctcttcctccttgtccttcttcccttctcccatcacccaagcctcacctccactctctgaggggctggcatgggctgagagggaaaggtgacctccccagggccctaggaatgagccgggaaaggggctggcagccaagcctgccgtcgctatggcaacaggtccccagccgctgccctcacaggctgctgatgctgattttctctccacgtgccctgaaggttaaccttgacctcacctccctcctggacaatgaggataagaagtccaagaacaaacgaggagtcttgcccaagcatgccaccaatataatgcgttcttggctcttccagcatctcatgcacccctaccccacggaggatgagaagaggcagatcgcagcccagaccaacctcaccctcctgcaagtaaacaactggttcatcaatgcccggaggcgcatcctgcagcccatgcttgatgccagcaacccagatcctgcccccaaagccaagaagatcaagtctcagcaccggcccacccaaagattctggcccaactccatcgctgcgggggtgctgcagcagcagggcggtgccccagggacaaaccccgatggttccatcaacttggacaacctgcagtccctgtcctcagacagtgccaccatggccatgcagcaggctatgatggctgcacacgatgactcattggatgggacagaagaagaggatgaggatgagatggaagaggaggaggaggaggagctggaggaggaggtcgacgagctgcagacgacaaatgtcagcgacctgggcttggaacacagtgactccctggagtagtcgggcagcccagatggcactgatcactgagcaggagaggagtgtcgccgggaggccttcagggtgggggggaaggggacatgggcaggaagcaccgagggagttgggccctagcttccccaaatcagtagcttgaagaaaggcaaaggagacacctgttccttcccaaccaccgagcttcaatgaggaccccagccccacttccctggaactgccgaggactctgtttggcggggccagtcgagcagcctgtgtggaaagacaggagtgagatctggactcaccaaatccctgaggacagatggcacccatggcccccacccacggaaggacttgagttgtttacaagccctgcactgaggcagattggtgctgttcgcagagtaggcctttgcccgggggcagacttagaaggaaggggagagacaaagggggactgagtttcatccccagaagtttctcagctcctttgacagacattcaagggcaggagggagccccaaagcataaccagtggccagaggagtgggagggcctgaggcatcacatcttgcagatcagaatgggatggaatccaccaggctccagctcatccctccaaggccctgtctctgcgcacagcaaccatggacatgggagaaagggatgggagccacagtgcccttcactctctcctggaaaccaactgtaagctggtgggctcaacctgtgggaggttaagaggagtcccttctgggttgactccaagagccaaggagatggcagaccctgggctaggaaccatatggaggtgactttgaggccacagctgtccctaggtgatcacagaacttagctcctttaacaacaggacaatggtttttttaccctagatgttcccaccttcagtgctccacgccctccatagaccttcagagaaggtgaaaccaggttatctgggaatctttccagcccgcaggtcgccacggccatccctttgctcccagcctggctccatcagcctccagcttcctttcttcattctgtccttcagggaaggcagaagaaacattggaaagcatctagtccagtgggaagccaggggttggagaaggtgctacatccctcttcccatcaatatcctaaatgtgggggagggcccagagaatggcacccaagagcctgcggggatgcccatcccacacaccccacccagctgttctaaccctgctatccacagccctggaggaactggggctcctggaaggaggaggaggctctccactgtccaccctaacacataccctcccacccaccttccagacccccttggttggcaccctctcctccggttccctctcaccccatggctgtgaatgacaggacaggtcacacgtgtgttttccattgggtttaatttaatggacgtgcagtttcatttgtaaattgtgcattagccacctccttcagtggcaggatgtgagtggctacctggctcaactggaggggaccccttgggccctctggggcttcccctcccccacctggttggggtagagcaaaaggatggtcactcttccgaggtctccctgaaatgaatgtatttctcccccaaaagagctgatatttaatgttttaataaggatttttgagaaacaaataaccttatttataatctgggtgatccaatcattttttactcccttttgatgccatacatagaggaaagtctagcttttttggcgtgagacttttgcaatgtgcagtgggataaaatgcatttccttttctggttcgtttttcttgttaacacgcgcacacagacacacacacacaccgttccactcaccacctggacaggcgtcccccagcacggacacactggcacacaggtgcccacatctcttcctctcagcccctccacctgcctaatgttatgcaacctccttctgatgtatccaccaaaccagtactgaatgtggccgagacgttttcagtaaatcttattacctaccgc

SEQ ID NO: 500834 - DNA, 426 bp, Homo sapiens
gtgaatgattcagacgagtcaaccttgcgttggcggaacgtccgagatgccagccccaatgacacaaccacattgatatctgcggcagcaggtgccgtcgtcaagggtggcttgtacgagcgctttcgctcaacccgacgttgtcggtggttgcagcagaatttaccgggggttgatttaagctggttcaaagggttgcaaaagccacaaggtcgacatcggttttgaatcctactcgcccaatttttactaccagaacagtcgggtaacagcagtctatacagccgacatcgataagcttcgggcgttgatgccaccgaagttactggccgccgtgcagcccttgcaagttcttggccgggtcgcgggcttgatcgcgtatactgcgtacaccttatgagcattgacttctcttggaatcattca

SEQ ID NO: 500835 - DNA, 828 bp, Homo sapiens
agcagggtgttgtgacgtggtaggtcacacactcagtgctgggctctggaggcacagaagcaaccggcccagctacgcatcagcccttgagccgattcatgtgttcgatcatattcctgagacagtagggtctgtgcaggtaacaaagcaccagtcagcaggaaactcaccaccgggaagcctttctatcaaaacataacttcaaaatcagtaaagtgggccgggcatggtggctcacgcctataatcccaagcttcaaaatcaataaagcgggccgggcgcggtggctcacgcctataatcccaacttcaaaaccaataaagtgggccgggcgcggtggctcacgcctataatcccaacttcaaaatcaataaagcgggccgggcatggtggctcacgcctataatcccaacttcaaaaccaataaagcgggcgggcgcggtggctcacgcctataatcccagcacttcgggaggccaaggtgggtagatcacatgaggtcaggagttaaagaccagcctggtcaacatcgtaaaaccccatgtctactaaggaaaaagttagtgggcatggtggacgcctcgtaatcccagtggccgggaagctgagtgacgagaatgcttgaactgggaggagaggttacagtgagtgagatcatgcatgggttcatgctggtggaacagtaagactgtgtttcaaaacagaaagaagattttaatttttgcacgattttgcgattgttggagatacagttctgggacagataccacaggggagtttatattttgagctatgggccacggtggtttttaaagggaaaacagaaat

SEQ ID NO: 500836 - DNA, 313 bp, Homo sapiens
tttgggggttggggctttttaagctgggggcctgtttccccttttccatggatagggccctggttcccttggtccccctgctcgggttggtaaagttttggggggtttttggggccccggggctgggggggttttggcggctttttggctttttgggggttttttcctttttgggttttggggtccggggggggtggggggtgggggtgttggccttcccccttggggccgggggccccgggggccggggcccgccccctttccccgcccccgggccctcgcccttttccccctccgggtttttttttaatta

SEQ ID NO: 500837 - DNA, 890 bp, Homo sapiens
gtccatttccctccgcgcgaggggtgagtgccgttttttaaatcgcagggcgcggccagccaaccctcgggggtggccgtggaaattgtaggcgccggaggtttctatcaccgggttggttacccgtgttttgcactcacgctgcctgaattacctcacgtggcctttcgctgtggaaagcatggttgtaactcctctccccgggggtactcttgggcaccccgcggcggtgttgtgttcccgccctaatagatgggggactctctctcccccgagcgtttcctctcacgcgcaagagatggggcgcgcctcctcccgggggtgacctcgactttaccaatggtgagggtaatattcacagccccgccctttgtggagatgaatgcggtgcccccttccgcccccctctcgttctatcctctctttcgacatatgttaatctgatacgaccattgcaaccctcgtctctcgcctgctctcggagcaaaacctcttattgtatatggttcgcttctccacaccttgcagataattctcactcccctcaagtgagatgctcctcatataaggtaaatacataagtattcaccgcgctattctctccaataagaggactctctttccaaaacatcacccttctacaacccacgccctttattaccccaacatgtggccggattgtcgcaaccataagggcttgtgctcgccctccgggagtcacccgggggggcactaccccgatgtttctccaatgtacgcacaccacagatcgcggctatgtggtggcgcaggactgactctgcgccctccctcgccctgtatgtagatccatgcggcccgccgactatgattataggtcgcgccccgcctgtgctcccccacatgacaca

SEQ ID NO: 500838 - DNA, 998 bp, Homo sapiens
  misc_feature (998)..(998): n is a, c, g, or t
gctccagcgccgcgcagccatccgcacgacgccggcgcctctccttagtcgccgccatgtacgaccgtgatcctacctcgcagtgtgcgccgagaactacctaccaaggacgtcaggaggcgcgcgcattcaaccgcctagatcaacgctggagctctacgcctcctacgtttaccttgtccatgtcttactacttatgaccgcagatgatgtggctttgaacgaactgttgcgcgaaatactttgcttcaccaatctcagtgagcgacgacgggaacctgctgcgaaactgatcgaagctgcagaatcgaacgaggtggcccgaatccttcccttcaggcatatcaatgaaaccgagactggtgatgactgggagagcgggctgaattgcacattggagtgtgcattacatcttggtctggaacatgtgaattcagttcaatactggaagtgactcaagattggccactgagaataaatgatccccacttcagtggtgactttcattgaagacatcgttacgctggaactgactccaggctgcacaagggcattcaaaggatacttggggtagaccgacggtgagccttaccttgtcgccatagaatgaggaagccgccgcgaacattgctggcctttgggccgggcacttattcttcaatccgtacacacgacaactacactccgtgggcgaagaactaagtagtaatcacagttgcacagcggtcttaaagcccttaccgggtcgtaacagtatatgcgccctctacgtaaagcgcctgatatgggcgggcttggaagttttccccccgtggggtttccaacgccacacaggtgtccagggttgaccaagtggctagttgcgtgccggccagaggtggaatccagcctgtgttaaaccgatatattaattgccgtaacttaaacggttatggttaaccttaaaccccaccaagttccccaacctcttaacaggcattttcgtcgtcccgcaagtn

SEQ ID NO: 500839 - DNA, 318 bp, Homo sapiens
  misc_feature (53)..(53): n is a, c, g, or t
  misc_feature (83)..(84): n is a, c, g, or t
  misc_feature (88)..(88): n is a, c, g, or t
tagaggatccccccggaggactggttccaggacctctgccaataccaaccctntgatgcccaagtcgcttatataaaatagcnnagtntttgtatataagctaagcacatcctcctgtatactttaagccatctctagattatgtatgatacctaatatgatgtagctaatgctatgcaaagttgttatactttctcatttagagaataatgacaagaagaaaaaagtctgtatatattcagaacagatggaatttttccaagttttttttttttttttttgagacagtctcgctgtcgactgcttggattacaagga

SEQ ID NO: 500840 - DNA, 853 bp, Homo sapiens
gtccggccgcgggatggaagttgccgggcggtcgcagtgactccggggcgatcgccggcgagtccgcagtagttctgggccatggaggcggagccgccgctctacccgatgtgcgggggctgcggtggcctctgtggcgactgaggacctgctcggggtcccggacgggcccgaggcccctgcttggacgagctggtgtggcgcgtaccccgaactacaactgaggagtgaggatgtgagctgcctgttacatacctgcctgcaagcgcctttggggctgtgctcaaagaacgtgcttggctgccagtggcctgtggggcaatgctcaccttacggcgtctacgctggccctcctgcagatgcagcttaatcctgcactacgacgagacctaccgcgaggttgaagtattggcaaccatggggcttgccctgaacaatcgagcagcaaaaattgctggatgggccattccaacgttgactcccatcgccgcccttgctcttacacaaccatgtgctcattcaggttttttggaacgaagtggactgatgttccatcgcttgttgggcattctaacgcccgtcgtatggtctacaagcaaactacttgggagcagcctaccaaacacggctatgttgccacatcggatgttgcacccatgggacaattgtccccaattgttggcactcatttgtgggagccttccaatgggggcaaacatacgagttcacccaagtgcatatgcgtcaagaacagtaccgaatgaagtaccatcgcccacgatacaaagggcagcaaggaattggtgtcacgtgggaatagaacgcagcggggcttccgctgggagtatacaca

SEQ ID NO: 500841 - DNA, 320 bp, Homo sapiens
atgatgaacttatagaaaatttgagatttgtttatgaattgaggaagataaacttgtgttatatggccagtagagaatttctggcttgtaaaagggaagattttgggaggatataatcactttattcaaatgtttaaatttttcttggtcattggtcataggagagattaaacttatttcatgtcagtgttccaggggaccaaacaaaagccaacaagtgtcttttaaggtacaaggaggacatctgtgcaatttcagtgtccggtgtaattttttaacaggttattgtgagtgctatttccgaagagttttggaccctt

SEQ ID NO: 500842 - DNA, 178 bp, Homo sapiens
tacgccgatgaatgctgcgttcctggagctcggccaagtacgagctcgtaatacgatggtcgttgtcccatgctataaacatggtctagcccttagggagctcccggtcctgcagtctaaacttctttgagacgatgctgtcggccttggccaatcggagaatcgaatcatctgactc

SEQ ID NO: 500843 - DNA, 389 bp, Homo sapiens
actgcatctgtgcctctagtctttcgacattttgagatacgcatttaacaagtgccccataaacatatgaaaaaaatgctcaacatcattaatcagagaaatccaaatcaaaaccgcaatgagacaacatctcacacacatcagcacttggggaggccaaggcgggcggatcatgaagtcaggagatcaagaccatcctggccaacatggtgaaaccccatctctactaaaaatacaaaaattagccgggtgtgatggcgtgtgcctgtagtcccagctactggggaggctgaggcaggagaatggcttgaacccaggaggcagaggctacagtgagccgagatcgcgccactgcactgcagcctggtgacagagcaagactccgtctc

SEQ ID NO: 500844 - DNA, 371 bp, Homo sapiens
  misc_feature (90)..(90): n is a, c, g, or t
  misc_feature (102)..(102): n is a, c, g, or t
  misc_feature (329)..(329): n is a, c, g, or t
  misc_feature (331)..(331): n is a, c, g, or t
  misc_feature (346)..(346): n is a, c, g, or t
  misc_feature (362)..(362): n is a, c, g, or t
ggttgagggtaaaagtgattttattagtaattcctacttgcccttgtgtatgtcctgagctgaaaacaatccgtgattaagaaatttaanaggtggctgggncgtgggtcgcacgcctgtaatccccagcactttgggaggccgaggcaggcggatcacctgaggtcgggagttcaagaccagcctgaccaacatggagaaaccctgtctccactaaaaatacaaaattagccgggtgtggtggtgcatgcctgtaatcccagctactcggaagtttgagacgagaatctcttgaacccgggaggcggaggttgtggtgagccaaagancngccattgcactccancctgggcaacaacgangggactccg

SEQ ID NO: 500845 - DNA, 311 bp, Homo sapiens
attatattttcttgtgtgacatatctattcaatttttgtgtgtcctccgtcacgcgcctttctttgaagagacaggatctcactttgtcacctagaatggcgtgcagtggcccaatcatagcagcatagctcattgcaaccttgaactcctggtctcaagcaatcctcccacctcagcctcccaagtagctggagacttcagggatgcaccaccacaactagactattttctttaaaaaaatttatgtagagatggggtcttgccacgttacccaggctgatcctgaacgcccggactacacgttcgcgag

SEQ ID NO: 500846 - DNA, 311 bp, Homo sapiens
ctagagttcttctccttaaaatatggtggcagtgaatgctaacaggtatcaactttcttctgatcaggaacagagaagtccttcaggacactcgctttcctggtccttgttatcgctatcatgtaaatacttgttatcggtacacctgtgtactaattataattgattgctatttatgccaagggcgcatttcccaggcatgcctcatctatttactaacaacaaagtatgctcactttatttacatagtgccaaggagtcctcttttttcttctctataaatatagatgtggatgcgcgagacataggaa

SEQ ID NO: 500847 - DNA, 620 bp, Homo sapiens
ctaactgtcttaagccgccgccagttaaatttaaaaacgttcactaaggtatgaatgggttgcagcaccagccacggacaaagaagttatgtgccatttcgcggaaatggatacagtggagaatctttcgcccagttaataggcaaagatacaagaccgtattaagtagttaggggtgcagcatactgacaccagtatcgtgtaatatcatatatagtcagacttgatgacgtctcaccggagtaaccaggatggtttagatctccaagttagtatggatcgtgccgggtccagtcaaagtgtatatactacaggagtgagctctcttgaccgtgcagatgcagggtacatttaacccctactgtctagagctatttttcacacagattttcagtaatccagagcgaagaacggtgtctctgtcacagcagtaaccagtcgccacaacacaggctcaagagatagtcctaaagccgtttgtgaacaggtgataccctaagtgtatgtctccatgacaagctagtaatgtcactgtatgtagagacagtgtctgcatatgataccctggcagatgtagcactctatcattcagtcgagaataatacttcggcttactaaag

SEQ ID NO: 500848 - DNA, 463 bp, Homo sapiens
  misc_feature (12)..(12): n is a, c, g, or t
  misc_feature (150)..(150): n is a, c, g, or t
  misc_feature (154)..(154): n is a, c, g, or t
  misc_feature (214)..(214): n is a, c, g, or t
  misc_feature (233)..(233): n is a, c, g, or t
  misc_feature (237)..(237): n is a, c, g, or t
  misc_feature (241)..(241): n is a, c, g, or t
  misc_feature (249)..(249): n is a, c, g, or t
  misc_feature (259)..(259): n is a, c, g, or t
  misc_feature (279)..(279): n is a, c, g, or t
  misc_feature (286)..(287): n is a, c, g, or t
  misc_feature (296)..(296): n is a, c, g, or t
  misc_feature (298)..(298): n is a, c, g, or t
  misc_feature (312)..(312): n is a, c, g, or t
  misc_feature (318)..(318): n is a, c, g, or t
  misc_feature (334)..(336): n is a, c, g, or t
  misc_feature (338)..(338): n is a, c, g, or t
  misc_feature (343)..(343): n is a, c, g, or t
  misc_feature (350)..(350): n is a, c, g, or t
  misc_feature (374)..(374): n is a, c, g, or t
  misc_feature (376)..(377): n is a, c, g, or t
  misc_feature (391)..(394): n is a, c, g, or t
  misc_feature (399)..(400): n is a, c, g, or t
  misc_feature (403)..(403): n is a, c, g, or t
  misc_feature (453)..(453): n is a, c, g, or t
ctaacgccaganactttacatgctgatcacatttactcctcacaaccatcttgtaagggagacatcatcagtgccatttgaacaaatgaaaaactgaggctcagagagattacaataccttatccaacacgctctccaagaacaaataangtgnaaaaaacaatggatttgaattcaggaactgtttgattccaaatctggaactttctggaanctctgacaaacacacacanacanacanacacacanacacacacancaccattttcttatcttctncctcctnnactccctcnanatttcaccttacanacaaanccaactattatttatnnnanttatntataatntcccacattttaccaattcttttntnncttcattacatctnnnnctttnnctntcccacatttactatatatgatgtgtgtgtgatgtgatgtgtactttccnataattctcc

SEQ ID NO: 500849 - DNA, 137 bp, Homo sapiens
ggtggtgaccacagtggccgaggctgggcctagatggagtgcagttactgtattgttgggaaggggtggtgacctctggattgttactggattgttgggaagggtggtgacctctggattgttactggattgttggg

SEQ ID NO: 500850 - DNA, 102 bp, Homo sapiens
tcccacggtatgagaactgagccttaaagagatgaaataaattaagcagtagatccaggatgcaaaatcctcccaattcctcatcaattcctcatccttggg

SEQ ID NO: 500851 - DNA, 815 bp, Homo sapiens
tatggtggctcatgctgtaatcccagcactgtgggaggccacatgcaggtggattagctgaggtgcaggagttcgagaccagcctcaccaacatggtgaaaccccgtctctactaaaattagccaggtgtggtggcgacatgcctatagagtcccagctacttgagaggctgaggcaggagaatggcttgacactgcatatgtcactaagcacaagccttaacttcacttttaacttttaataacaaataggtgaacttctaccagttctcatccatttctttctgtatcaggtccaaataattacgagagaaaattcacgttacatgtatttccttatgtctagccatatcaagagtatgtcatatgtcacgtaacaatcagagccttagctctatctacggggtacacacctattaggttaacaccagaacactgtacgagtggctaaggagattccatcatttgccctaatccctagaacatgtgtaccactctgtaactcgctagaacctgtatacggtattgtacaataattcacaatgtggcaggtcatcttaaataggattatccgctgtagagagaattaacacttaagcaaattttagctatttcagtaaattaaaacgcacaacttcctgttcctagcattgggtcttgaaaatcaagtctgataagtatataaaatcgtgtctggtttattactggcgaaatgtgattgctttggcgagtggtaaagtccatgacattgtgtatatttaacatttaaacattacacctaagttaactagatatgggaggacgagcgggaaatga

SEQ ID NO: 500852 - DNA, 582 bp, Homo sapiens
  misc_feature (480)..(480): n is a, c, g, or t
gtattgacttggttgtcgcattcacgagcagtacgaactacacagaggagtaatttttaatgtttaaggatttactatgtgctgtacttaagatgtgtcctaaatgtgagtgtttagcctctcccgggctcagaataggtttccgctccagtgtgataccactttgctgccactcgctatccttggtttaggggcattgttaggtacctcaccaaacattagggcaaatgtccctctcactcaggacctccattggctggtcttctctctgggatgctcttggaggcctgggctagcctgtcttcccaaactgcagctgtgaagctcaaagacggagtaagcttgtgaaagggacagtgagatggtgatcagtgtgctgtgtcaggacgagccttcttttaaaacagcatccatttcttcttcacacttcttgcatttgatggccatgccagaatgagtacggtaatcagaactgatgcntttaaagcgactcagggacctcctccttctggttgcttcctgtgcagatgagcgcttaaagggcagaaattggtctcctccccttttgtaatgttagagata

SEQ ID NO: 500853 - DNA, 154 bp, Homo sapiens
acaaacactagccacatgtgatggcacgcacctatagtcccagctacttggaaggccgataaacaatcattgctggacgctgggaagcgcaggctgcagtgagccgtcacaccactgcactccaggctgggtgacagagacagactctactctt

SEQ ID NO: 500854 - DNA, 215 bp, Homo sapiens
cacctgcgtcactcggctcccgagtagctaggactacaggcgtgtcgccaccatgcccagctaatttttgtatttttagtaaagacagggtttcaccacattggccaggatggtctcgatctcttgatctcgtgatccactccgtcttggccatcccaaagtgctgggattacaggcgtgagccaccgtgaccctttgaatacgcgggtgacctt

SEQ ID NO: 500855 - DNA, 179 bp, Homo sapiens
tccgcccggggggggggcgggcggccggcctgtggcctggtgtggcccgtttgctccgcccgggtttttctggtgtgttgccggctcctcggggcgtttttcgggggcctcgggtgtgtggcggtctcggtctcggggccccgcgtgtgtcgtgtgtctctgtctcttgtgtgcgtgtg

SEQ ID NO: 500856 - DNA, 321 bp, Homo sapiens
gcagtatgtgtgtgtatgtgtgtgtagcgatggaggtaggattggtgctgtgggtaatgagtatgatggggtggtggttgtggtaacttaatagtgtaggaagctgactaattatgtaaggagaggtgtcagggttgattcgggaggatcctattggtgcggggctttgtatgattatgggcgtcgtagttaagctcgtgtaacggcggcggtgtcggcagctgctgtagcgttgagagtctggcgcgatgtctcacaccattttgctggtacagcctaacaaggaggccagaaggcagaacttatgctgactacgaatct

SEQ ID NO: 500857 - DNA, 466 bp, Homo sapiens
  misc_feature (1)..(1): n is a, c, g, or t
  misc_feature (3)..(4): n is a, c, g, or t
  misc_feature (6)..(6): n is a, c, g, or t
  misc_feature (8)..(8): n is a, c, g, or t
  misc_feature (15)..(15): n is a, c, g, or t
  misc_feature (20)..(20): n is a, c, g, or t
  misc_feature (22)..(22): n is a, c, g, or t
  misc_feature (24)..(24): n is a, c, g, or t
  misc_feature (27)..(27): n is a, c, g, or t
  misc_feature (30)..(31): n is a, c, g, or t
  misc_feature (33)..(33): n is a, c, g, or t
  misc_feature (39)..(41): n is a, c, g, or t
  misc_feature (46)..(48): n is a, c, g, or t
  misc_feature (99)..(100): n is a, c, g, or t
  misc_feature (145)..(145): n is a, c, g, or t
  misc_feature (147)..(147): n is a, c, g, or t
  misc_feature (153)..(153): n is a, c, g, or t
  misc_feature (155)..(156): n is a, c, g, or t
  misc_feature (162)..(163): n is a, c, g, or t
  misc_feature (165)..(165): n is a, c, g, or t
  misc_feature (177)..(177): n is a, c, g, or t
  misc_feature (179)..(179): n is a, c, g, or t
  misc_feature (184)..(184): n is a, c, g, or t
  misc_feature (189)..(189): n is a, c, g, or t
  misc_feature (195)..(195): n is a, c, g, or t
  misc_feature (201)..(202): n is a, c, g, or t
  misc_feature (205)..(205): n is a, c, g, or t
  misc_feature (234)..(235): n is a, c, g, or t
  misc_feature (244)..(244): n is a, c, g, or t
  misc_feature (250)..(250): n is a, c, g, or t
  misc_feature (257)..(257): n is a, c, g, or t
  misc_feature (263)..(264): n is a, c, g, or t
  misc_feature (266)..(267): n is a, c, g, or t
  misc_feature (292)..(292): n is a, c, g, or t
  misc_feature (298)..(298): n is a, c, g, or t
  misc_feature (300)..(300): n is a, c, g, or t
  misc_feature (304)..(304): n is a, c, g, or t
  misc_feature (306)..(306): n is a, c, g, or t
  misc_feature (353)..(353): n is a, c, g, or t
ngnnananaaaaaanaaaanantnaanaannanaaaaannnaaaannnaaaaaaaaaaaaaaaaaaaaaaaaaaaaaaaaaaaaaaaaaaaaaaaaaannaaaaaaaaaaaaaaaaaaaaaaaaaaaaaccttgtgggccccttngncccagncnnttttanncntggccaagtttntncttgnggccnaatttngggctnnttnggccaattccccctttggggggccgtttnncaattaatnggccgncgtttancaacgnngnnattggaaaaccctggggttccccantttaancncttngnagaaaatccccttttccccagttggcgtaataccaaaagggcccganccgatggcctttccaaacattggcccaccctaaagggcaatgggaaattgtaccgcgaaaattttggtaaaaatccgcgtattttggttaacctcttttttaaccctgggccc

SEQ ID NO: 500858 - DNA, 441 bp, Homo sapiens
ggtctttggactgtgacacgtagcacgggctgtcaggtctgaaacaagtttgtgtgttgttgggcttcgtgaagctactgctttgcgcaggcagcctcaagtttgatattgcaatgtcggcttgacaattaacatggattctaccagacaagtacagcatcgatgatcatcacagcgtcctatgattatggaggaagtggaggacctatagcaaaacagtatgctggctatgactattcgcagcgaaggcagattctgtccctccagacatgatgcagacacaacagccatacaccgggcagatctaccaggcaactcaggcatatactccagattgaactcatgcctttctatggaaacaactttgaggatgagcccacctttattagaagagttaggtatcacatctgaccacatctggcacaaaaaacataacagata

SEQ ID NO: 500859 - DNA, 333 bp, Homo sapiens
taatgaaattatgtcaccagtggggggggcggcggctcatgcctgtaatcccagcactttgggagtccgaggcgggtgaatcgcgaggtcagggagtttgagaccagcctggccaacatggtaaaacccctgtctctactaaaaatacaatacatcagccaggcgtagtggcaggtgcctgtaatcccagctactcaggaggctgaggcaggaaaatcacttgaacctgggaaggggaggttgcagtgagtctccagcctgggtgacagagcaagactcttgtctcaaaaaacaaaaacaaaaaacctgtcttctattgaaccggatagcttg

SEQ ID NO: 500860 - DNA, 256 bp, Homo sapiens
caggatggaccgaagtgtgctgcacacgccgagtgtccagaccattgtcctccagtcctgggtgacagagccgagactccgtctcaaacaaaacaaaacataagacatcagctagctggtccaagcacagtggtgttcacagcgaatagatcacagccaggtagaattcttcatcctttctccagttccagtgcgacgctcgaccagccttaaaaatacaattacacacaagaagttggggcgttcggcgtgtgca

SEQ ID NO: 500861 - DNA, 923 bp, Homo sapiens
  misc_feature (741)..(741): n is a, c, g, or t
tgcgtgagatcctctccttccgctttctagaatatctctctatctcatggtatagtgtctcgtccaagcctctatgctagccctcatcatagatgttgtctgcctcgccatgttgcttgctgtcctctagtcgtggtctgatgctgaccagagagtctatcccggacctattcccgtcctatgcattcacagttggcatcctggttggggggaagaataaacgaatcggcccttagactagacagaccccgattattccagatatgtgctgtcctgtatccccaatagcctgctgtgtaccagcggagagacgggtgcacttgtgagccgctgcttatttagtctcactgtgttatctatatgaggaacaacacactaacgctatggtacacgatcctcagtctgtggtggtggctttcacatcctagagtctggcatacacatccctaggaatacttgcggtctgtgctagtcctatccattccatcagactacagggcaacccgtgatagcgccgttgcatctgacatgaggctcacatccctctggggtttggggtcaatgttcttaaaacttgcatttcatcttccaaccccatagcgttcctctagccctctattctttaccttggtggtaagaactttagctccagggaacttgaggcagaggccctgttgtggtctgtgttgacagcaaccgcacctgtccacgtcatgctcctgaacttgaccaccaaggttngatgccggattcgaagccaggaaggcccagtccctcctctggtctcctcaaagaacgcaaaacattttccaaccaaagagctggtcacaggtgggagcacaagcaggggggccacccgttttccaaaatttcgttcaaagtttcaagttggaatcctggtggtcccacccaaggttgaggcc

SEQ ID NO: 500862 - DNA, 250 bp, Homo sapiens
tccgcatgtaaatggagctgtaccccatgagcgatttcaactctcctcgaactgatcaccgacagccgtggctttgccacgctgtggctcagtcgtgaagccaagaacaacgcgttcaatgccgagatgatccgcgaactgatcatcgccctcgaccacgtgcagggcgatcctgccctgcgttttctcgtcttgcgtgggcgcggcaagcatttcagcgctggtgctgacctggcctggatgcagcagt

SEQ ID NO: 500863 - DNA, 767 bp, Homo sapiens
aaaaaaaaaaaaaaaaaaaaaaaaaaaaaaaaaaagggggaagagaaaaaaaaaaaacccccaagggggccaaattaacggttccccggtgtctttgttacagggtgggctccccataatggtgtgaagtctgcttttatatatatggcaataggacacgtgtggcgccggcgctataaaacaggatgtgagcagtggggaaacacctggctaaccttggggacttctttggtgtaaagggaacacctatatatctctctgtgtgggggtgtgcgaaccattactgtgggcaaaactctctccctcaacgcgaagatctttaaagaagcctctctcatgagggcaacaatctttaaaccttttaaaagagggtgtatataaggggtgtatacaaacaattcctcggtgcgatatattgtggagaggagggggcgttaggagaaaacgtatctgtcgggctaatacgcgtgggatgtatatgtgtctcttatgagggaaaacaatctttttttatatcatacccacggtggacactcaatataggaaaaaaaaaccctgcatccgcccgaaaaagcgcgcgcggatggagagcgcaggaggacgagaagaagagccccatgacgcccgtgccgcgagaccgagtctcagtgaacaattagcgagagcgagcagacagagcaacccacagccaagggacaccggctcgaaacacccgagaggcctaagcggacacgaacccgaggacacggcgctcggcgcggccacaa

SEQ ID NO: 500864 - DNA, 814 bp, Homo sapiens
gtcgagctattctctacgaaccacaaagacatcggaacactatacctattattcggcgcaggacctggtaggtcctaggcacagctctacaggcctgccttcattcgagccgcagcctgggccagccaggcaaccttgctagagtaacgaccacatctactacgttatcgtcacagcccatgcactttgtaaataaacttcttcatgagtaatacccatccatagggtcggaggcttgggtgaactgagcgtagattccgccgtaattaatcggatgaccccgaatatgggcgtttccccggcagtagaacaagcgataagcattctgactcgttagccgtccctctctccgtactcctggtcgcactctggcgtataggtggaggccgggagcaggaacgaggttgaacagtgctagcccgtccgcgttaggcagggtgagacgtatccggtgcgcccaccgcggggaaggtcctgccgataaggaaagcgctgaaaccccactacttctgccgttatcacacttaggcgaggatagtctcccgtcgtaatacttagggggccgaatcgaagttctacagtcaacaaacaatattatcagatattagaaagcccgcgcgctggccagtaatcgccaggtagccaaatcggccccgtcttcgtctgatgccgtcctaaatcacagctagctcctgtacctttctcctatctctcccaggtcctagctgctggcatcagttatatctactaaacaggaaccgcaaaacctcaagagccaacctttccttcgaagccccgggggagggagggagaa

SEQ ID NO: 500865 - DNA, 133 bp, Homo sapiens
ggcctacgcggagacctcggtggtctctgcatctcagtccctgcgagcattgcacgtacgggacctgcggtccgccacatcgatggccgtagaaagcttccgactgaccccacagcctttgcctgctcacccg

SEQ ID NO: 500866 - DNA, 1233 bp, Homo sapiens
tatgaccaatgacactgccctcgtcccgagcgatctagggattgactggcagtgtcatacacggtcccggctgggccgcgagagatgactgctggtgaggcgtctttagcgtgatgggcagggtcgagcgcgccccgcgggagtcgaggcagatgttgcagtgcgcagctgacgtgactgtgccccttgagtgcagactgctgacgagagagcagactgttgcgagtgggtccgctggcgcaactgcacaccgccggggcccggtgtgtaggaacgtacatgcgagactagaggaataagcccgtgagtagggggaccagaccgtgttgggtggaccccctcgaccaatcccgaggcgtacacactagcaggtcggtataggaagatttccagccagactcgactgggattggcgatgcttgggcatttcggttggtgggctgcgaatcgttcttggccctaggcgtaggcggcggcgccggggcacttgagccccaagtggaagtcctcggtgttttgcctgtggcacgccaaggggggcgcccatggctacgcggttggccctggagcataggtcctcgcgcctgggaactttacctgcccactgtggttggaccttgtggtccttggcctctggcgttaagtcctcagagcggcgcttagtgggtgggcgaagagcttgagagaaggacccttgtgggctggccacggggatgcgcccaaagggggattcgggttcgtgttcgcacagagcatcgatctaggtctagtgattgcccgtgtgcccgcttgtggacccgggttttcccaacacttgagtggcctgttgccgggcgcctcctcgcggggggcccctcgggccttgttggccagactcgactctggcggccctccggacttgaattgccctgggccacactggtagaagtccggtgggcccttggcgattggtgctcccctgtggattcggcccctgtgtggcctccccaaccattgcccccggattgtcccggggggcgggcctggcccgtggaggcataggcttgagaaagaacttgtcccgggctacgcggagcttcgtgaagggaacgtcagacggatgtggttggatccacacgtgagggaccctgggaccctggcccgaacgtgtgcatatggccattgtatgctagactccaccctaagtccacgatttaacgacacaccaagggaagttagtacaccatattcacg

SEQ ID NO: 500867 - DNA, 449 bp, Homo sapiens
atttttttatttttgtagggactacaggtgcacaccaccacacccagctaatttttttatttttgtatttttacttttcaccatgtcggtcaggctggtctcaaactcctgacctcaggtgatctgcccacctcagcctcccaaagtgccgggattacaggcatgagccaccgtgcccagcccttaattgctgtctgaactttttttttttttttcaacctgacctgaggcatcaattcaggcacagtataactctgaccagtaagcggaagctaacccaaatgctttccagggctgaggggacatcatgagagttgtggtcatgtacagaagcacagtcccaggggcacaggtggtacccctgtaaacaaagaatttgcaatattagggcacctcaagcaggacatccattaggctgtacaggtgaacagacctcctaccaggggaac

SEQ ID NO: 500868 - DNA, 266 bp, Homo sapiens
ccattgatctcccttacttcctcaccaagactgtatcaagaaaaaaaaaactaaaacacagtatccaaaagtcaaactgggccagacgcagtggctcacgcctgtaatcccagcactttgggaggccaaggcgggcagatcacctgaggtcaggagtttcagaccagcctggccaacatggtgaaaccccgtctctattaaaacaaaaagccaggcgtggtgcacgtacctgtagtcccatttactcaggaggcagaagcaggaag

SEQ ID NO: 500869 - DNA, 692 bp, Homo sapiens
  misc_feature (223)..(223): n is a, c, g, or t
  misc_feature (225)..(225): n is a, c, g, or t
  misc_feature (227)..(227): n is a, c, g, or t
  misc_feature (239)..(239): n is a, c, g, or t
  misc_feature (250)..(250): n is a, c, g, or t
  misc_feature (252)..(255): n is a, c, g, or t
  misc_feature (270)..(270): n is a, c, g, or t
  misc_feature (283)..(283): n is a, c, g, or t
  misc_feature (291)..(291): n is a, c, g, or t
  misc_feature (294)..(294): n is a, c, g, or t
  misc_feature (300)..(300): n is a, c, g, or t
  misc_feature (303)..(303): n is a, c, g, or t
  misc_feature (316)..(316): n is a, c, g, or t
  misc_feature (340)..(340): n is a, c, g, or t
  misc_feature (347)..(347): n is a, c, g, or t
  misc_feature (372)..(372): n is a, c, g, or t
  misc_feature (377)..(377): n is a, c, g, or t
  misc_feature (385)..(385): n is a, c, g, or t
  misc_feature (535)..(535): n is a, c, g, or t
  misc_feature (568)..(568): n is a, c, g, or t
tgtttcctgcaacgatcacgaacatgaacatcaaaggatcgcatgggaaagggtccctcctgctgctgctggtgtcaaaactgctcctgtgccaaagcgttggccccttgcgcatctgtcccggcggggctgaccgatgtcaggtgaaccttcgagagctgttttgaccgcgccgtcgtcctgtcccactacatccagtaaactctcctcagaaatgttcagngnantcgataaacggnatacccatggncnnnngttcattaccaaggncatcaacagctgncacacttnttnccttgncanccccgaagacaangagcaagcccaacagatgaatcanaaagacnttctgagcctgatagtcagcatatngcgancctggaangagcctctgtatcatctggtcacggaagtacgtggtatgcaagaagccccggaggctatcctatccaaagctgtagagattgaggagcaaaccaaacggcttctagagggcatggagctgatagtcagccaggttcatcctgaaaccaangaaatgagatctaccctgtctgtgcgggacttncatccctgcagaatggctgatgaagagtctcgcctttctgcttataacttggtcactgactacgcgaggattccattaagcagcactatttcagcccctaactgcgataatcacgatggtcccc

SEQ ID NO: 500870 - DNA, 839 bp, Homo sapiens
  misc_feature (223)..(223): n is a, c, g, or t
  misc_feature (225)..(225): n is a, c, g, or t
  misc_feature (227)..(227): n is a, c, g, or t
  misc_feature (239)..(239): n is a, c, g, or t
  misc_feature (250)..(250): n is a, c, g, or t
  misc_feature (252)..(255): n is a, c, g, or t
  misc_feature (270)..(270): n is a, c, g, or t
  misc_feature (283)..(283): n is a, c, g, or t
  misc_feature (291)..(291): n is a, c, g, or t
  misc_feature (294)..(294): n is a, c, g, or t
  misc_feature (300)..(300): n is a, c, g, or t
  misc_feature (303)..(303): n is a, c, g, or t
  misc_feature (316)..(316): n is a, c, g, or t
  misc_feature (340)..(340): n is a, c, g, or t
  misc_feature (347)..(347): n is a, c, g, or t
  misc_feature (372)..(372): n is a, c, g, or t
  misc_feature (377)..(377): n is a, c, g, or t
  misc_feature (385)..(385): n is a, c, g, or t
  misc_feature (535)..(535): n is a, c, g, or t
  misc_feature (568)..(568): n is a, c, g, or t
  misc_feature (625)..(625): n is a, c, g, or t
  misc_feature (655)..(656): n is a, c, g, or t
  misc_feature (667)..(667): n is a, c, g, or t
  misc_feature (671)..(671): n is a, c, g, or t
  misc_feature (682)..(682): n is a, c, g, or t
tgtttcctgcaacgatcacgaacatgaacatcaaaggatcgcatgggaaagggtccctcctgctgctgctggtgtcaaaactgctcctgtgccaaagcgttggccccttgcgcatctgtcccggcggggctgaccgatgtcaggtgaaccttcgagagctgttttgaccgcgccgtcgtcctgtcccactacatccagtaaactctcctcagaaatgttcagngnantcgataaacggnatacccatggncnnnngttcattaccaaggncatcaacagctgncacacttnttnccttgncanccccgaagacaangagcaagcccaacagatgaatcanaaagacnttctgagcctgatagtcagcatatngcgancctggaangagcctctgtatcatctggtcacggaagtacgtggtatgcaagaagccccggaggctatcctatccaaagctgtagagattgaggagcaaaccaaacggcttctagagggcatggagctgatagtcagccaggttcatcctgaaaccaangaaatgagatctaccctgtctgtgcgggacttncatccctgcagaatggctgatgaagagtctcgcctttctgcttattataacctgctncactgcctacgcagggattcacattcgcanntatcttagctnctgnagtgccgaatnatacacaacaacaacttgtaagcccacatccatttcatctatttctgagaagttcctaatgatccgctcattgcaggttcctttaagtgtaaccttttgaatccacgcttggtggaacagtcctctctaaaaataaactgactcctagaggctcctt

SEQ ID NO: 500871 - DNA, 195 bp, Homo sapiens
cacggggtattgggcgccggccagggggcgcatgcccagaggccggcccgcgccgcaccccgggacccgggcacactccccccacccccgggacacacaagggacccacggaagctagcgcctggggcatgccacacggtaacgcattccccaccgagcagggatctccgcagccaggtccaacagctggcaccg

SEQ ID NO: 500872 - DNA, 223 bp, Homo sapiens
  misc_feature (16)..(16): n is a, c, g, or t
  misc_feature (36)..(36): n is a, c, g, or t
  misc_feature (63)..(63): n is a, c, g, or t
  misc_feature (67)..(67): n is a, c, g, or t
  misc_feature (131)..(131): n is a, c, g, or t
caaaagacttgatttntaggagaatttacccatctnaactctataacagtcctgaaggattancagntgttctcttccaaatctgttaattcagctgtgtattcccatagaatcttcagctttcttgttgnatttggcattactttcattaatgtagtcgatactgcatcatcatataaggcgtctccggctatattgtctcgttttcaactgtttccagatc

SEQ ID NO: 500873 - DNA, 756 bp, Homo sapiens
gggtgtctttgctgatggtcacatggagctgcaggttgaatccggggtgccgtttagcgattcagcaccatggcggaagacatggagaccaagagatcaagaactacaagtaccgcccctttgtgacagccgacttgccccaaagcagaatcctagactagaattagctgctggcagaactacctggactttcacagcgactgttcggaaggtcaatgaccgctaaaggaggcgatatctctgtgtgcaaatggtaccagcgtgttgttaccagtccctctggcccacatcctgggtcacagagctgggatgagcaatcgggctgtacggcacgtttcccgtggaagatctgaacgggctgcatctccctattcctctgttcctccatgcttctcccagggatggtgaagggggacctggtacccattgatccccaatccgaggatcttgagtcatgacttaccgtggctagtaaaaagactcatgatggaagacgagtgatgtggctgaaagatgatggcgcgctgacgactcgcatgattcacctgatcctgacaagtccagatgagccggcgcgccgattcagcagtcgagagcacggcccaatctcgtgcacgaaactgccaagcgtggtgacacccctgcgtgtagggtccgcccccaaaaacaaccccggggggaaacgcacgcgttaaagacagccgacaggcgcgtgggcgacccgaacgcaaagggggcacagagacgcaaatgtcc

SEQ ID NO: 500874 - DNA, 183 bp, Homo sapiens
catatacagcatcaactcattcacagcataaactattacagaataaactatactgcatcacagggattatgcctaacttcaatacaacacatactcctcactttctccttccagtctcttgtaacattgctagcatttatctctcttcaacagaagcgtgtgtgcacatatgcagtatgtaca

SEQ ID NO: 500875 - DNA, 170 bp, Homo sapiens
caaataatagcaatgtaaaaatggttttttgaccctccaaatggaattacagactcagtagccatattttcccacccccccagtataaatttttgtctttttgctatgggggggactttgcagctgcttttgcagaaatcccaattttcctgtggaataaaaatggtcca

SEQ ID NO: 500876 - DNA, 380 bp, Homo sapiens
  misc_feature (3)..(3): n is a, c, g, or t
  misc_feature (6)..(6): n is a, c, g, or t
  misc_feature (19)..(19): n is a, c, g, or t
  misc_feature (22)..(23): n is a, c, g, or t
  misc_feature (30)..(31): n is a, c, g, or t
  misc_feature (294)..(294): n is a, c, g, or t
  misc_feature (332)..(332): n is a, c, g, or t
  misc_feature (367)..(367): n is a, c, g, or t
  misc_feature (378)..(378): n is a, c, g, or t
tgnatnttagagatggganctnnctatgtnncccgggctagtctccaccgtgcctggcccctctgtggttactttctctggtgaagtcaaacccctcaaagtcatccatgatgattggagtcaacttttttcaaactcctctaaatgttgacatattgacctcttctcaatgaatcactaatgttcctaatggcatctaggatggttaatcctttccaaaaggttttcagtttactttattcagatctatctgaagaattactttttgtaggaagctacagccttgcaaaaagnatttctgaaataataaaacttgaaagtcagttggggcngggtgggccacacctgttaattcaaaggcagtttngggggaggccnag

SEQ ID NO: 500877 - DNA, 760 bp, Homo sapiens
ggacgcgtgggtcgacccacgcgatcgaccactgcgtcggtggccgagtccagaaggagcttggggcccgggctgtttttaccaagcccgatcacgcacctctctcgccccagagcagcgtgacctcctctggtcatgtgagcgagacatgatgtgagcacggactccagcgcggaacaccttccaggaggatggcagtggcatgaaaagatgtgccctcatggctcaggagcctccgtttgcacaagtatgcagccctcttctcacagatgagctacgaggagattgatgacacctgactgagcagcacctggagtctcacgaacgtcaccaaaggtgcccggcacaagatagccctgagcatccaaaagctgcgtgagagacagagcgtcctcaatgtccctagagaaggatgtgctggaacggcgggaacctacgaaactgctctgcacggagctgcagtcagatcatcatcactcccatcatggcctacagtgtcctccaggccaccgtggctgccgtctaccacgacccctactgccaaggatggggcccgggggaaccaccggtgaccaggtgctgagccttcccctagtccaacccgtgacaggactataggcaccgagcgccaaggaccctccagctgtggagaacgtaaccagctccagcagctccagctcccacttgatggcacgtgagccctgcccggatcccagtcaggcgaagggagacatcccccagccagtttacacagggtgtt

SEQ ID NO: 500878 - DNA, 900 bp, Homo sapiens
  misc_feature (176)..(176): n is a, c, g, or t
cgggcaaagccttaccaagctctggcatcacgaaacggtacccccttgtgtcaaacacgaacaagcagccttagatggtggactgcggaactggagcagtccagtctagaaggattccaagtctgggctcaagccaaccctacggcagagtcgtaaacggcatctgcggagaaatngtctatctgggaacaggtcattcagcaagtaaccatagtctaagcaagagctgggcaaaggctgacccaggtttggcatagaaatggtaaccccttgttcagataatgatacaagaagccttagatttggatggggaacctgatctgtccagtctagaaggattccagtgggcaaggtcgtttccactattcctcgtccctggcttggcaagaaagcgaagcctgttctgagagcagcgtgatcatggacagagctccttcagacgcaaagcttcttacagtgaggaaggtacaggcaaagaaaatgagccccagcagaaggtttcacatagtaactcattgagggctggacagagccagaaagcaaccatgcacctcaaacaagaagtgacacctgcgggcatgccgtccctccgaatcaggtgaaagggctgacaaatagttgctagcccataaggcgacaatagtgcacaagttatcctctgaccatataatacgcgtttgatgcatttggcaaaagagcttgaacagccaggagaggtctataccacagtcagagaatcagaattcccaggagagtaagtggagagggaaactgtcgtgtcatcaagcgcaatctctcaggcccttgcgatctccagtttagcaggatgcagccacagagtagtatgcgtgtacctctgggtgctgaaccaaaatgaagaaccaaagtgattagaaagta

SEQ ID NO: 500879 - DNA, 351 bp, Homo sapiens
caggtgaaacaggaagttgccttgtacccaagcctggtgtgacttcagcagtgttgctactagaagcagaaagcatggtctagccaaatataactgagaagaccaccaacagagaaatgagaatgaagatgtgtgttgactcagtcacatgttgaggcccaggaagagacaaaaggataatagcaaaagcacaaatgtcatgtaggacggagaaaggagcaggaagggggtgattccttcttgtctaattctgcttggtgtccttggtaggctaagatgaaagtccctggtttggtggagcttacattcacgtggagaattcaggatatgaagcctgattccaccttgcca

SEQ ID NO: 500880 - DNA, 541 bp, Homo sapiens
caaattcagtaaccaccaggcacaaattcaccaggaacaaccaagcaaggaaggaagaagaagctgatgcaacaaggtgtggtatgacttcatccctcgcccatccccagaagtagcactgagtaaaacaatggagatgacaaaaatattggtaacagtgggccccagtatggacaaaggcactgacgaggtgaccaggccacgtggaggagagtcaaggaaaactcttgggacaacgaagtctttgcttccatctcaggacctcagcataaggaaaggttaaaaaaagtaaaagtaagattcaccaggactaggcatttcccaggtctcagagcagcctgggaaagccaaatcctgcagaagtcagagacacctttgactgtgtctagtgagttctggttctggacatttaatgggaacctagaagagaggggataccaggttccccaacaaagttccgtcaaataattttgtcagtgttcaccagcttgtaaaaacttagtgcgagagctgaaacatctaaataaataatgacatgcaa

SEQ ID NO: 500881 - DNA, 724 bp, Homo sapiens
  misc_feature (286)..(286): n is a, c, g, or t
  misc_feature (306)..(306): n is a, c, g, or t
  misc_feature (334)..(334): n is a, c, g, or t
gagatcttggtgggtggcggggaatactccatataaaatcaattgtggggggggggggcatttttataaaagggcccgaggccgccccctttttcgggggtcccgggggagggaaaggacactttttttttcgtgtttttggaaccccccttgagggaaagtggccggcgatcctttgcccaagagggggttttaaaaaataaaattcccccaagtgcagagacagaggcctttttatcccccgccccccgttttataagggagggggcggccctcctccccaaantgttgcggtttgggggttanaatgggttttccccaagggaggccatanaaaacccttttttcctcggttgggggggggggacccccaaatttcctgcccccatttccatttttgccctaaaggggatttagccccaaaagggggccccccttgtgtttttgttaaagcctgattcaggcgggccagcttttggggggggggaccccgagttttaaacccaaaaccggggcccccaaaggaaggggttggggggtttcccccccccttatgggggggccccccaaaaaattttcccgggtttttttttgccccccggcctgggccatttttcccggcccctttttcccctggggccggcccaaacccccccccctgggccggtcacccccccccttggccggtttgggggggggtaacaaagtttttttccctccttta

SEQ ID NO: 500882 - DNA, 1424 bp, Homo sapiens
  misc_feature (910)..(910): n is a, c, g, or t
  misc_feature (979)..(979): n is a, c, g, or t
caaattcagtaaccaccaggcacaaattcaccaggaacaaccaagcaaggaaggaagaagaagctgatgcaacaaggtgtggtatgacttcatccctcgcccatccccagaagtagcactgagtaaaacaatggagatgacaaaaatattggtaacagtgggccccagtatggacaaaggcactgacgaggtgaccaggccacgtggaggagagtcaaggaaaactcttgggacaacgaagtctttgcttccatctcaggacctcagcagtaagattcaccaggactaggcatttcccaggtctcagagcagcctgggaaagccaaatcctgcagaagtcagagacacctttgactgtgtctagtgagttctggttctggacatttaatgggaacctagaagagaggggataccaggttccccaacaaagttccgtcaaataggatgattatgagctctgagtccattaaaatacagaatgaacatttaagaactgaggaatcatagatgtagaatagtatgtaaatgttataaatcttgacaaagaaaaattaatgtacattgacaaattcagacatggaggaggtaaagtgggataaagacttaagaactaaccgtctcatcattcatggccaggtgtcatgtcacgtcatgtcttaaaattataatatggggaaaaacgctagtgaccaaccttaagtttttccacaatcttttttttccttgaccttaatacagtggttctcaaagtgtggtcccagaccagcaacatcagcatcacctgagaacttgttgaaaatgcagattcttggcccaccccagacctcctgaatcagaaaccctgggggtggggccaagcaatctgtgatttaacaagtcctccaggggattctggcacatacttgagttngagaataactggcttatttatcccttttaggaaccaatgaagaaacatttatctgaagttcagcagccncttcaatttaatgcctaattttttttctatgcattcaaataaagttaaatctaaaacttgtttgctggccgggcacagtgagtcacgcctgtaatcccagcaatttgggaggccgaggcgagtggatcaattgaggtcaggagtttgagaccagctggcaatatggtgaaacccatttctaataaaatacataaattagcgggcgcagtagcatgcactgtaatcccagtactgggaggtggagcggagatgttaaccggaggggagtgcgtgaacgagccgcatggcccaaccggggaagcggatctgttcaagaatatcataccgtccaaacagtggatccccgcgcttggcaatttgagggggaaccccggccgggttaagggaggaaccgctacataaggttaataaaagggcccggccactgatacaggatattttaaac

SEQ ID NO: 500883 - DNA, 1044 bp, Homo sapiens
  misc_feature (530)..(530): n is a, c, g, or t
  misc_feature (599)..(599): n is a, c, g, or t
tcttgacaaagaaaaattaatgtacatgacaagatttataacatttacatactattctacatctatgattcctcagttcttaaatgttcattctgtattttaatggactcagagctcataatcatagatgtagaatagtatgtaaatgttataaatcttgacaaagaaaaattaatgtacattgacaaattcagacatggaggaggtaaagtgggataaagacttaagaactaaccgtctcatcattcatggccaggtgtcatgtcacgtcatgtcttaaaattataatatggggaaaaacgctagtgaccaaccttaagtttttccacaatcttttttttccttgaccttaatacagtggttctcaaagtgtggtcccagaccagcaacatcagcatcacctgagaacttgttgaaaatgcagattcttggcccaccccagacctcctgaatcagaaaccctgggggtggggccaagcaatctgtgatttaacaagtcctccaggggattctggcacatacttgagttngagaataactggcttatttatcccttttaggaaccaatgaagaaacatttatctgaagttcagcagccncttcaatttaatgcctaattttttttctatgcattcaaataaagttaaatctaaaacttgtttgctggccgggcacagtgagtcacgcctgtaatcccagcaatttgggaggccgaggcgagtggatcaattgaggtcaggagtttgagaccagctggcaatatggtgaaacccatttctaataaaatacataaattagcgggcgcagtagcatgcactgtaatcccagtactgggaggtggagcggagatgttaaccggaggggagtgcgtgaacgagccgcatggcccaaccggggaagcggatctgttcaagaatatcataccgtccaaacagtggatccccgcgcttggcaatttgagggggaaccccggccgggttaagggaggaaccgctacataaggttaataaaagggcccggccactgatacaggatattttaaac

SEQ ID NO: 500884 - DNA, 351 bp, Homo sapiens
  misc_feature (17)..(17): n is a, c, g, or t
  misc_feature (71)..(71): n is a, c, g, or t
  misc_feature (79)..(79): n is a, c, g, or t
  misc_feature (147)..(147): n is a, c, g, or t
  misc_feature (220)..(220): n is a, c, g, or t
  misc_feature (227)..(227): n is a, c, g, or t
  misc_feature (256)..(256): n is a, c, g, or t
  misc_feature (310)..(310): n is a, c, g, or t
gacgccgcaaaactgtnccaggaacgtgacaaaggcactggtccttgggacgtcctgctggccaaggaganctaaagcntgtggaggtaggtgtgcccctgagctccagggttcctggagcctcacgaggtcaagggaacccttgtngaactccaccagcggcatctcgggaggaggcatcacccagaaaggcgagagcttggactcggagcctggcggngccagantagttaggggagcagaacaagggcgaggnagggctggaagcatttgctggagccctgcagccgcagctggtagtccatctgtncgttgatgttctgcagagatggcagccccgggctgtgttgg

SEQ ID NO: 500885 - DNA, 354 bp, Homo sapiens
  misc_feature (99)..(99): n is a, c, g, or t
agggcctggggcctttgtttttctgtggcctgagctccccaaagtcctgaggaggagcgccagttgcccctcggttacagaccacacacccagcccttntgggccagcccaaagggcccttcaaaccccaactgtttgggggtttgacttttgtggcctcagcaggacaggccccgggcactgcctcccaaccaaggctggactgggttggctccagtgtggtgtttagtggataccccatcggaagtgattttttaaattggatttgaattcggctcctgttttttatttgtcatgaaacagtgtatttggggaaatgctgtgggaggatgtaaaaattttgtttttccccca

SEQ ID NO: 500886 - DNA, 429 bp, Homo sapiens
cgtttctgcctctcctgcctgtggttcaccagtgccagggcccctggaggtgccgccctcccgagctcgcccttgctgcccagcattcaccagcgccagggcccctggagtgccgccctcccgagcgcgcccttgctgcccggcgttcaccagcgccagggccctggagtgccgccctcccgagctcgcccttgctgcccggggttgtgtgctgccttcacggccaacttggtttttgtttcttgggggttttttgtcctgctttgacaacaacattctgcctgtcctgtatcctactaagggccaaactggacttgttttttatgcttcctcttattattgagatgtaattcacacaaaaattcagcgtttttaaatgtacagctccgtggctattaacaatattcgcggtgcagccatcaccactgc

SEQ ID NO: 500887 - DNA, 527 bp, Homo sapiens
tgctggctgctggctgtccggttcatcacggccaatcagatatgagatggtgtaaggagaagtactacaagaatgacggaatacgagagctgttttacaaaggaactgcagcaatctatgaaagacttccaaagaatgtagagcacagtacgtaatacacttgcgctgctccctctaccccttaccccacaacgtgcaactgacactcccacccagtctctgctccacctttcagcccacgtcacgtgtagtgtccattttgtgaagccctgttgtgccacagagtgtagccaggtccccctgcagctagtcctagtgaacctcaccccgaggccctgcatgggccagcccctccatctgtacttggtccaactgcaactcatcatcggtgactggttatcacaccatcgctggcccctttgggccctgcatgtagtgtgggaggctcctgttagctcctcactgtggtaaatgccacacacctttaagtagataagcagacgatagttatctgttcttttgactta

SEQ ID NO: 500888 - DNA, 276 bp, Homo sapiens
  misc_feature (196)..(196): n is a, c, g, or t
  misc_feature (214)..(214): n is a, c, g, or t
aagactatagtaaagtttgccacattgatttgctctttcatgaaagacttctctgtagaacgcgatgctatttaatgatgtttacccacaggagaacttctttcaatattggagccaatcctctcaaaccttgctgctggctttatcaactaagttgatataatagtctaaatcctttgctatcatttcaatggtncacaggcatctccaccangcattgaattccatctcaagaaacccactttcttttcttttttttttggaaacagcatatca

SEQ ID NO: 500889 - DNA, 138 bp, Homo sapiens
  misc_feature (69)..(69): n is a, c, g, or t
gcataaaaagtgctctctccataaaactcagcacttgagcagatgttgtattatataagcatgccaatntacttatctgccacatacaaagcatccttccaggtgctagtgaggcgcacacacgcttgcagcattggt

SEQ ID NO: 500890 - DNA, 274 bp, Homo sapiens
gctgggccaaccacaagagaagagggatgcacatctcccagaaactattaaatagctgtatctcaactacagtgtcagaatttacgaaccaccaattcaagatggaaatatgcagcgggacgagttatcaaacaggtaacagaattggactaagagcatgaactgtagaactcttacgattacaacgagctccctggaaggacaatgaggcatatggacgcagacagggaacgcagggacaccggctgagcatcgtttacttacaccaacctct

SEQ ID NO: 500891 - DNA, 216 bp, Homo sapiens
gtatgtatatcatcatattatcatcagtggtgtttcttctcaatattaaatcaattctttcaaaaccaacaaaaaagcccaacctgctcacctatttgagatttgcaaattagactaataacttttattgtttctgtatactttgccaacgattaaatgcatcttcatcctgcatcatcctaaaatactcaacatctctatttacaatagcaccgg

SEQ ID NO: 500892 - DNA, 788 bp, Homo sapiens
  misc_feature (19)..(19): n is a, c, g, or t
  misc_feature (67)..(67): n is a, c, g, or t
  misc_feature (72)..(72): n is a, c, g, or t
  misc_feature (75)..(75): n is a, c, g, or t
  misc_feature (86)..(87): n is a, c, g, or t
  misc_feature (100)..(100): n is a, c, g, or t
  misc_feature (110)..(110): n is a, c, g, or t
  misc_feature (113)..(113): n is a, c, g, or t
  misc_feature (131)..(131): n is a, c, g, or t
  misc_feature (134)..(135): n is a, c, g, or t
  misc_feature (137)..(137): n is a, c, g, or t
  misc_feature (142)..(142): n is a, c, g, or t
  misc_feature (145)..(145): n is a, c, g, or t
  misc_feature (154)..(154): n is a, c, g, or t
  misc_feature (159)..(160): n is a, c, g, or t
  misc_feature (167)..(167): n is a, c, g, or t
  misc_feature (174)..(175): n is a, c, g, or t
  misc_feature (182)..(182): n is a, c, g, or t
  misc_feature (190)..(190): n is a, c, g, or t
  misc_feature (197)..(197): n is a, c, g, or t
  misc_feature (213)..(213): n is a, c, g, or t
  misc_feature (222)..(222): n is a, c, g, or t
  misc_feature (259)..(259): n is a, c, g, or t
  misc_feature (267)..(267): n is a, c, g, or t
  misc_feature (270)..(270): n is a, c, g, or t
  misc_feature (289)..(289): n is a, c, g, or t
  misc_feature (291)..(291): n is a, c, g, or t
  misc_feature (293)..(293): n is a, c, g, or t
  misc_feature (298)..(298): n is a, c, g, or t
  misc_feature (300)..(301): n is a, c, g, or t
  misc_feature (325)..(325): n is a, c, g, or t
  misc_feature (365)..(365): n is a, c, g, or t
  misc_feature (379)..(379): n is a, c, g, or t
  misc_feature (386)..(386): n is a, c, g, or t
  misc_feature (414)..(414): n is a, c, g, or t
  misc_feature (420)..(420): n is a, c, g, or t
  misc_feature (422)..(422): n is a, c, g, or t
  misc_feature (451)..(451): n is a, c, g, or t
  misc_feature (456)..(456): n is a, c, g, or t
  misc_feature (478)..(478): n is a, c, g, or t
  misc_feature (481)..(481): n is a, c, g, or t
  misc_feature (490)..(491): n is a, c, g, or t
  misc_feature (540)..(540): n is a, c, g, or t
  misc_feature (547)..(547): n is a, c, g, or t
  misc_feature (563)..(563): n is a, c, g, or t
  misc_feature (569)..(569): n is a, c, g, or t
  misc_feature (594)..(596): n is a, c, g, or t
  misc_feature (606)..(606): n is a, c, g, or t
  misc_feature (670)..(670): n is a, c, g, or t
  misc_feature (675)..(675): n is a, c, g, or t
  misc_feature (767)..(767): n is a, c, g, or t
tacactactgatatattanacaaaaaaaaaacctttagaaaaattatgcacaagacatgatattggntttanacnctggatcccannattttacacactnggaaaaaatnttngactaggcatgtccagtnaannanccagnaantaaaaaaanacacnnaaaacanccacctnnctcaagnggcaaatncagtacntacagcattggcagangtgcgtcanaggtggcagaacaaattcacacaaaccagttgaaganaacacaanaanaaaaccatccagcaacagnananagctntnnatttaacaaaccattcttatttcnaacttcaggagttgatgtttttcccagtccatcttaaaanattactgctttaancacagancagaaaaaaaggacaacatgcacaaccnccaccnanaatcctgttgtagcctagacagtgaaaanaaatnacatcagaagactttaaaaatncancaccctttnnaacccccaaagtgtaactgcacacctccacaaacgggcctcttcctcanaagtcanagtcaccctcacaagntcttanattccattctttcccaaaattcaannnacactaattnatacatcatcctttattccttaaatacccttaaacattttttaaacttttttcaccctcctaanaatcntcaataaactctcttccaaaacttctacatatattccaatatcccattatttttatccttttatttttatcacctcaaaatcactctcaacnaccttctttttaacctctttc

SEQ ID NO: 500893 - DNA, 463 bp, Homo sapiens
  misc_feature (178)..(178): n is a, c, g, or t
gtgagtcacgtctcagtaggaagtagtaatcagggagcatcaggcagctgattgccagagttgctgatagaatcactttgttgctgcagtgggctatcacatcactacataccagggctgatgtataattaccttaaacacagagtggcatttaaccacgccactgtttatgtgcccnaatcagcactcagaggaagctgccttttaaactttaattttttttttaatgataccttgacattgcatgtgactttggctgggaaaataagcctggctgtttgtgcttgatgttataactcaaaggctcagaagtggtggagttggatccagcagccaacccacaatagagctgtcttgacatcctcactggtccagccatgcaaaccagcttctcgtggggatggagcttttctgcttagcttttctgcctttctcttatagtgatgaactcgaaccccgtgtg

SEQ ID NO: 500894 - DNA, 87 bp, Homo sapiens
ctagaagattcagcaaagtacttttgtgctcttggggagttcctacgtccccttgtactgggggatagacggtcagcacaactcttc

SEQ ID NO: 500895 - DNA, 338 bp, Homo sapiens
ccatattaaatccagatctatacaacgctcagccgccgctgttgtcgcgaccaggactgtgcgcacaaacccttatgtcgacagcgttgtgactatggaggatatgaaccagtacagcaatatagaggaattcgcagagggatccaagatacaacgcgagcacgaatcagcaggaggacggtgaaatggttataggaggcttgagctcggataccagccagaacgatctgacagagaacctggctcgatttagcgaagatgtagactgcgcaagtgatgctgctagtgctgatggtttggaactgagagaacactgactggatggccttgagagttct

SEQ ID NO: 500896 - DNA, 474 bp, Homo sapiens
agagctgcctggagcttcacttggtactcccgggcaacctcctctgtgaggaacgtgtggtgaccacggtgctcttgagaccgctcacaaagccagcaaatgaccttcccgtcccgccccctgcgcccaactcgccctccaccagcttctccaccacgccccctacctgccgatcagcctgcacgctctcagcctggtaactgatccggcacccagggcagctactctctccttccgtctagcactggacttacttgtggtcttgcagtgagggcatgcttggcagaagctgctggccgcagtccaggctcaggggttgtgtcaggagttccaggcagatggggcaggtcacctcctcctttacattaaccaggattccagaagccatagtagctattccaccgctacccccgtagtatacgccgtcccagcggcgcccacctcccacccccccccgcacgcgccccaccctcc

SEQ ID NO: 500897 - DNA, 403 bp, Homo sapiens
taatgttttgaaaggaatcttttttttgtttctgggcagtagatcttaacggtgagcttaaaatactcagtaaatcgttttaaacagatgtgctgtcatccaggctttgtttcattcatacagcacaggcagagtatatttagtgtaattcttcagacccctaggattttcagaatggtaaatgagcattggctttaacataaagtcactggctgcactagcccctaacaagagagtcagccttttgaagctttgaaggcttctcttagaagcgatctagctattggctgggcgcattacgtcacgcctgtaatcccagcacttcgggaggctgaggtgggcggatcacgaggtcaggagatcgagaccatcctggctaacacggtgaaaccccatctctact

SEQ ID NO: 500898 - DNA, 289 bp, Homo sapiens
gaccctaaatccaacccccgcatgaccctgctaaggttcacagagttgtgtggatatatggtatccttttatttatcttttttttttgagagggggtcttgctctgtcgcctaggctgcagagcagtgacaagatctcggtacactgtaacctccacctcccgggttcaagtgattctcatgcctcagccactcaagcagctggcattacaggcacctgtcaccactcccagctaacttctgtattttcagtagagatgtgtttttttgtttgtttgttttccttgaga

SEQ ID NO: 500899 - DNA, 144 bp, Homo sapiens
tccttccccctccatacctcgtcccctctctcacaagtaggatgagtgtggcgctttgctatgtgaacccaggaagcacttttttgtgggatgcccggacccatgctcagctagggggtgcagtgttaacaggcgagagtccct

SEQ ID NO: 500900 - DNA, 255 bp, Homo sapiens
actacttagtaggtattctatatagagatttctggtcaacgaggataataatacataatataatttaagccctgcgtagttgggttgattaacaacatccttgttaagtttcccaagcctaatttacagggaaggtcttgaagggtgggggagggaatcaactttgtaggcttcagggagggtttgagggtctaacaattgaggccaaagaatttgttgccacctgcacgttccactccctggggtgaacagagg

SEQ ID NO: 500901 - DNA, 340 bp, Homo sapiens
  misc_feature (325)..(325): n is a, c, g, or t
gaaaacaaattaaaaatggcagtagtaagtccttatctatcaataacaacattgactggaaataaactaaactctccaatcaaaagacattgagtagctgaatgggttaaaaaacaagacctaatgatctgttgcctacacaaaacatactttacctgtaaagatatacatagactgaaaataaagggatgaaaatagatattttgtgaaaatggaaactataaaagagcatgaatagttagatacaatagatttcaagacaaaaactattaaaaagacaaagtcattatattaatggacaagggttccaatttaggcaaatggntgtggaccagttttt

SEQ ID NO: 500902 - DNA, 254 bp, Homo sapiens
  misc_feature (147)..(147): n is a, c, g, or t
  misc_feature (216)..(216): n is a, c, g, or t
  misc_feature (235)..(235): n is a, c, g, or t
acccccattgacccacagggctgtgaggacacatgtgctcagagcctggctcactgcatgccaatagcatgagatcccgaaatgtttgttgctcagagttgaacaaatttctgagtgcctttattactaatcctgaagaataatgtnttttcagtatcacacattaagacatggaaagaaaaccccattttaaaaatacggaagaaatcattatanaatacacatcctaaaactngggtcctcggtggttcggt

SEQ ID NO: 500903 - DNA, 342 bp, Homo sapiens
ggcactttagtgcttatgcctaggccaaggaaacacgtagcttttcacaggtggtagataaggctctggccatgggagtgttgaggacagagttgtgataattcattttgttctttttttttttggaaaggaagtttcatccttttggcccaggcggaattccaggggcacaatctgggctcactggcaacctctcggccctccggggttaaagtgatctccggcctcgggttcatggagtagctggaattacaggcacattgcaaccacagcgggctaatttaatattttaagtaaagacggcgtccaccttgtgggtcaggcgggatctgaactcttgac

SEQ ID NO: 500904 - DNA, 351 bp, Homo sapiens
  misc_feature (300)..(300): n is a, c, g, or t
  misc_feature (315)..(315): n is a, c, g, or t
gagtttcaactcttgttcccccaggctggaatgcaatggcgtgacctcagctcaccgaaacctctacctcccgggttcaagcgattctcctgtgcctcagcttcctgagtagctgggattacaggcatgcaccaccacgcctggctaattttgtatttttagtagagacggggtttctccatgttggccaggctagtctcaaactcctgacctcaggtaatccacccgcctcggcctcccaaagtgctaggattacaggtgtgagccaccacacccggcccacaagtatgatttataacntattctcctttaaanaggaatacaggactctctgtattaagtatgaccaga

SEQ ID NO: 500905 - DNA, 287 bp, Homo sapiens
actttagagtatccccgcatgagggacggcggatacttccttccagacgcagataatggacgggcggattattcctttcaggtacgcagataatggaccgggcggatgacttccttccatgtacgcagaatatggacgggcggattacttccttccatacgcagataagtggacgggcggatgattccttcaggacgcagatgagtgaccggtggatgacttccttccagacgcagattaggaacgggcggatgatcccttcaggacgcagaggcggttcccgggtt

SEQ ID NO: 500906 - DNA, 958 bp, Homo sapiens
caggctgagtgcagtggcatgatctcggctcactgcaacctctgcctcccaggttcaagcgattctcatgcctcagcctcccgagtagctgggattacaggtgtgtaccaccatgcccagctaatttttgtatttataatagagacggggtctggccatgcggtgctatggctgtgtttcaaactccttgaccttcacggctgaatctgcctgtgtccgccatcccaatgtgctgggattacaggcatgatgccacctgtcgcggtcacatttgcatgtttattaaaagtgggtataaatgtgggtgccagacgtgctccggagctgaatcctgtctgcctacagggtaagaccatgcatctgctgggcggctagtcaacagggttcgtaaagaattagcgcggtatcagattataatgctggttgatcgtatattatcctttcaggcttgctcctttgagggttctttctctgctgccagcgccagggcagggtcgtcatgggctccggccgctacttgtggggcttgcgtgggtctgtatcacggttgttctgtgcttgaagtcaagcccaccttgtttgtgtgttgagacgctcttgtctctgtcctccgtgggtggtgatcctgtggtgttgatctcttgctcactgggatttcttccaccctcctaaggctcagcgatcctccagcggttaggcttctgaggaggctgggactgacaggcggtgcccccagggccccggctaatgttggatttgccgcgggccgggtttagcccggtgtcccgggggcgtgaacccggaaaaggcggcgccaaccatgagtcctcaaggggggaaataggggtaccccctgtgctgattggccgttgttagcaagggcccgtctcactaagagcgggggatataccgaaggggacaacactgcagttggcagcgaaacttcccatataagcta

SEQ ID NO: 500907 - DNA, 544 bp, Homo sapiens
ccgggttcacaccattctcctgcctcagcctcccaagtagctgggactatagcgcctgccaccatgccaggctaatttttttgtatttttagtagagaggggttttcaccatgttggccaggatggcctcaatctcctgacctcgtggtctgccagccttggacatcccaaagtgctgggattacaggcgtgagccactgtgcccggaccctttctttcttatcttttttttttttttggaaatggagtctcaatctgtctcctaggatggagggcacagggcgagacctgggctcactggcaccctccgcctcccagattcacgcaatatctacatgcctcagcctcctgagtagctgggagataacaggggcccgcaaccacggccgggacacaccaaacaacacacacaagacaaaacaaagagagagaaacaaaggaaaggacagaagaaaagaaagaacggagacgagcaaaagcgacaagacgagaacagagacaaaagaacgacgacacagaagaggagaaagagaagagacaagcc

SEQ ID NO: 500908 - DNA, 818 bp, Homo sapiens
  misc_feature (255)..(255): n is a, c, g, or t
  misc_feature (339)..(339): n is a, c, g, or t
  misc_feature (393)..(393): n is a, c, g, or t
  misc_feature (420)..(420): n is a, c, g, or t
  misc_feature (471)..(471): n is a, c, g, or t
atatgtctcatgtctcgttccttcttaatatgatttagctggaattcattttcttttcgtttcatgtttaatttcataaaacgtttaacaatggcatatatacttggcattcctgtccaccaaggatgtaatccaagcctgggaaaatcttaaatttctttttacttaaatctggaaattgtctccattctgccaccttttttttttttttttttatataggggaggggaggaaaggggggtgataccttgcagnaagtaagtcgaaatagcttgcctgaaatttgtgaaacagaccatttctaacacccagggtctgtgtttataaaatactggaganttacctttaagtgtgggaatcaacagatgcggaagaattataacatactctttnaaaagctttcataaataccagcagcanttggtaagcaattctacaagggttctggaacctttctatttatttacaaantctggaaaagtccttagagggttcacctaatcaggaataaagggcatttattccatgcagtatgattcacaggtatcctggagattcttgctccagtgtcctaatcagcaccggtgttcacaaaaaaatcttccaaattccctaatattttctacctatggttgtgggaacttgttccctgtatggggacaacatgtggtcacatggcaggtggtgtctactttacaggtataaacccctgtgtgttgggtgaaattcccgataacgtgtgtgcgggcgcctatttttccctggcgtgttactgttggaacggggttatttgacaagccggcttgccccgctgtgtc

SEQ ID NO: 500909 - DNA, 122 bp, Homo sapiens
ggggttttttcacacaaaaaacctttttcatttcggggggggaaaacccctgggggttttttccaaaaaaaaacctttttttttttcctgtggaaaccccctgggggctttctaactaagaa

SEQ ID NO: 500910 - DNA, 113 bp, Homo sapiens
aagatttcagtatagggtagtatagatcagtcagtatagataggtcagtatagatacttcagtatagatagcgtcagtatagataagtagtatagatacgtcagtactagata

SEQ ID NO: 500911 - DNA, 241 bp, Homo sapiens
  misc_feature (42)..(42): n is a, c, g, or t
  misc_feature (88)..(88): n is a, c, g, or t
  misc_feature (164)..(164): n is a, c, g, or t
  misc_feature (197)..(197): n is a, c, g, or t
  misc_feature (200)..(200): n is a, c, g, or t
caaaaaatgtacaggaattagccaggcatggtggtgcacgcntgtagtcccagctactctggaagctgaggtgagaggttctcctganctggggaggtggaggttgcagtgaaccaagtttgcactgctgcactccagcctggacgacagatcaagagcctgtntcaaaataataataataataataataataatantantaataataatgtagggctggccatggtggctcatgccatta

SEQ ID NO: 500912 - DNA, 144 bp, Homo sapiens
cagttgacttgaggctagctgagacaaaatgtgatgcctggttgaggcttggattgtatgactcctgtcgtagctctgccggcttctgtatcttaaatccctctagctggcctggcacagcggctcatgcctgtaatcccagca

SEQ ID NO: 500913 - DNA, 183 bp, Homo sapiens
tgaatgaacgtctcccaatgatgataacaactacggcatttagttaaggtgaagtccaaacaaaacacgtctgcagactggatctgggagaatcacctgagcccaggaggttcaggttgcagtgagccatgatcacatcactgccctccagcctgggcaacaaagaaagaccctgacacagtt

SEQ ID NO: 500914 - DNA, 149 bp, Homo sapiens
gttactgagtccaacgcatgaggttaaaatcatttagatgttttcaccccttaagctttcgttttcccaagatttctctaagcatttctggggccctctcactcagaaggcaaattctaatcattctaacggaaaacgggtcggacacg

SEQ ID NO: 500915 - DNA, 536 bp, Homo sapiens
aggctgggccagagagtgaggaaaacactggagcagagggacacagacccccgtcagggagagttgaggctgcgctttggtctctccctcctcgctgttacatcctccttgcaagtagcggctgtaaagcttctctgcctctcctaacatgccatcctccactcctgttgcctcaatctctcttcatgcccagctaatccacctttttgggtcttcagacatatcgctgcttcattgatcctctctcctgtatagcagctctctcccctctgcctatgcacagctcttcattccagaacagttgatgtaagcctgcttcccctgtttcttcactgcctttcctctttgtaaaacatactttcacccagagtctcttgaacctatgctcctaaaattcacaaggagagcagggcacagtggctcatttctgtaatcccagcactttgggaggccgagtcaggaagatggcttgagcccaggagatcaagaccagcctgggcaacatagtgagaccccatctttacagggaaaaaaaa

SEQ ID NO: 500916 - DNA, 379 bp, Homo sapiens
aacaagcaggaagccaatccaatacatcagagaataaaaggaagagctaccatctagagaatcaagagcggagagccgaactactttgcatcaggtgtgtaatataaaaggttatacataagcttatggtagaggcgtgtcatctagagatatagtagaactagtacctcgagatagcttggggccttcttgggtgtcctgcagggccctcaaggccagaatgtgggcccaggccacattgccaacatagactgggttaacagtggaggactttccaacacttgacaggatcccattgttgtacagggcctcgtttatactagcagaaaggaatcggcttccttccccatagatatacatgggtcgtaaggcacaagtg

SEQ ID NO: 500917 - DNA, 204 bp, Homo sapiens
aatacctaattacggaaacatctcattatggaacttacctgttctagtctgttggtttatctcccaatttacatttagaaagttcaaaaacaagcaaaactgaactattagatttaggcatgcataacaatcactgggatgatggaatgctaaagatatacaaggaagtaattagcaaaaggtcaggatagctgtggctctatg

SEQ ID NO: 500918 - DNA, 352 bp, Homo sapiens
tcagcttttcctggtactccagtttcctcagcctttgcaaggcactcagggtggggggcagcaggatcaagacaacccgttggagcccctgtgttccaaaggacctgatgccaaggggtaatgggcccaccagtgcctttggagcccaggccccaacacagccccatggcctttgccagatggcttttaaaaaggtgatccaagcaggcccccttatttgtacatagtgactgagtggggggggctggcaagtgtggcaactgcctttgggctgagcacagcttgacccctctagcccctgtaaatactgggtcaatgaatgaataaaactttcctaagaatttcctgggga

SEQ ID NO: 500919 - DNA, 354 bp, Homo sapiens
  misc_feature (1)..(1): n is a, c, g, or t
  misc_feature (27)..(27): n is a, c, g, or t
  misc_feature (29)..(29): n is a, c, g, or t
  misc_feature (34)..(34): n is a, c, g, or t
  misc_feature (271)..(271): n is a, c, g, or t
nctgtttggaacttcacgccgtgctgntnggggnaaacagattctggtgcagccccctggggttagctgttgaacatggaccatatgttcctgactttcttcagagattactgtgtgcgttatattgacaaaccaactgcccaaaacacttctggataactttatattacaccaacagcttgctaatgagccatggtagcagttgccatattataaaaatatttccctcccgttatgaggcatgaaactgtattggtttagctctgcgatncactagttcaaagctagaaggttttatttttgaaaataatcatttgtccttgccacccgaaaaaactggcctcgttggcctca

SEQ ID NO: 500920 - DNA, 689 bp, Homo sapiens
aagggctggtacggcccggaataacgggtctcgcagccgacgcggtagcggaggtcctggccgtctgtggcgacttcctgtgtaggcctgcagcggggtgcgtggcgcctgacggtgcgagagccatgtgatgcgatgcgagctgatgccagagccgagcctcccgccgtcgccatggtgccagaacgacctgatgggcacgtgcctgaggactattgccgaccagttacctccgtgtcacaaagcagtacctgccccacgtggctgcgcctactgtctgatacagcaccttcctggaggacggcatcctgtatgtggttccagtggagcgagcagcgcgactacatcgacaccacctggaactgcggctacctgctggcctcgtccttcgtcttcctcaacttgctgggacagctgactgggctgcgtcctggtgttgagcaggaacttcgtgccagtacgcctgcttcgggctctttggaatcatagctctgcagacgattgcctacagcatatcatgggacttgacagttaagatgaggaacctggccctgggaggaggcctgtagctgctcctagcagaataccgttctgaagggaagagcatgtttgcgggcgtacccaaccatgcgtgagagctcccccaaacagtacatgcagctcggaggcagtgtctatgctggttctga

SEQ ID NO: 500921 - DNA, 155 bp, Homo sapiens
aaatgatccgcccgcctacagcctccaatgtgggattacaggttcgagaccagctggacaacacagtgaaaccctgtcccttctaaaaatacaaaaaattagctgggcgtggtggctcacgcctatagtccaagctactcgggaggctgaagcag

SEQ ID NO: 500922 - DNA, 806 bp, Homo sapiens
  misc_feature (1)..(1): n is a, c, g, or t
  misc_feature (596)..(596): n is a, c, g, or t
  misc_feature (617)..(617): n is a, c, g, or t
  misc_feature (628)..(628): n is a, c, g, or t
  misc_feature (638)..(638): n is a, c, g, or t
  misc_feature (643)..(643): n is a, c, g, or t
  misc_feature (645)..(645): n is a, c, g, or t
  misc_feature (648)..(650): n is a, c, g, or t
  misc_feature (657)..(657): n is a, c, g, or t
  misc_feature (661)..(661): n is a, c, g, or t
  misc_feature (667)..(667): n is a, c, g, or t
  misc_feature (669)..(670): n is a, c, g, or t
  misc_feature (687)..(687): n is a, c, g, or t
  misc_feature (706)..(706): n is a, c, g, or t
  misc_feature (788)..(788): n is a, c, g, or t
nccgcagtgtgctgaaagggtggaacaaaagctggaaaatgagcaaaaatgagttggtggctgtggagatggacgctttgccccttggtcctactcacctgtgggctgcattccagggagagccttgcagcacagactttggcctgggacaagataatcctcagcccaactcatgaatgaatgcttgcagcttgtaggtcttctgtcatctcaaggcttcctgtgctgtctctgtgtcttcccatggaggacttgagggactctgggtcacctagtgccccacccctgcccagtccaaccagccagtctcaggaccatgatctccattgtcactatctctgacaatactgtgcttgagattgatgataacagcagtttgtaaccaaaggcctctagtctcccctccttccatgcctcactgtggcagtctcttcctggaaacacctactgtgtgccaggcgccatgctgtaatttatagccatctgccccatggctttcagtctaatcctggcaccatgctatggaggagatagcattttcttgcttgctgcactcccaggggctgtggcacagataagacaggctgcagcctctntataaatctccagggggttangttgtgagtgntttatctctnattcngnaannntttgttnactngcagtntnngagagtgatgtcattgnagacaaaacactgaatccncggaaattttttttttaaacatcctttcctgatttaactatttccagttacaactgttgtcaacacactgccatcttctganatgtgtgtgatgtgcctc

SEQ ID NO: 500923 - DNA, 463 bp, Homo sapiens
gagaacatgcaaaatcaggaaaggctgtaccaaggaaatataccttaatcaggctgatttggagtgagccagaaataccataaaaatagaaccgtctcaatgatcggggtggcctaatgataaatgtcagggcgtaatgtaacgcgacataaagaccaaaagagacaacacggaagacaatgctcgacagagcttccaaaggttttctcacaacgttgtacaaaagtgctctctgggctagaacatgtgctacagtgtgcggccacatttgggtctctgtggccgtgaacgttgctaaaaattatacatgtggtcacccgtggtaaacgaactgttcgcaatgcaagacatatatcaagtggcccaagaaagaatcctgggttacccgcatgtaaagcatgccgcggattcataaagttcccctgtgctgggacatgtgggctaggaaatccaacaaagtcaa

SEQ ID NO: 500924 - DNA, 881 bp, Homo sapiens
gttttgagggttttctcttatttccgttgcttcctcgagggagagtaatccagtctaatttgcatttctcttacttttaagctgagctgctgcgccctcacgggacacagtcatggggagccctctgccccatggtgggcattggtgaagccacagtggtcccgggggcagacctcaagggtgcacagcagcagccccttgggccctgcctgcccaagccccacctggccccacctgccctgtgttggggactttgtatttcagcctccatgcagggtgacgctgggactccccagcttccggttcacggcttcagggtccagcaggttctcctgaagccccatctaccgctggcttcctgctcactctcccctctcccgctctgtctctccagaggaggccgggcctgtggaattaggcggctgcttcacctgaactcactgcagtgccgggaaaggagcctctggaactagacccaggagcggatctgcaaaggctactcagggttctcccagcggtctgaaccccgaggcaactcgccctccaatcactggcccctgaagcaggcggaggtccctgtgctcagtgggcctgtggcccatttggttcaggagtgatggtgacacggagttggttcatcgagggctcctggcagctttacctctctaagatagtcttagaagcctcttggaagattcacgttccaccgttgcctccaaccaaggcctctcccccgggggcaggtcccctatactattttccttggacgttcccctggtccgcgggggcggtggccccagggcccccgggcggaaccccgctttgggaaggacccggttttttacgcctgggggcccccccccggttttaaagcgcctcgg

SEQ ID NO: 500925 - DNA, 181 bp, Homo sapiens
ggcgcgatggtggcgtgctcctttaggcagctgaacaggtggatttacgcccgtgaagatccgcagtccatccagcgtgcgtgggtagagggcaagtcgggacctgtgtatggggcctggagtcatgcggctggcgtgctgctacggacttgtcctgatccggccccgctattgagtgctg

SEQ ID NO: 500926 - DNA, 114 bp, Homo sapiens
attacaggtgtagccaccacgtccagcctacttccttcttttcacatgataggtatgaactggtaatggaataaaataggccgggcgcagtggctcacatctgtaatcccagca

SEQ ID NO: 500927 - DNA, 186 bp, Homo sapiens
agtatccctactggtcgcagcggggaatgctggcagattgtcatgggtatggagacatatcactactaagttactgctagggtgagtgcgtacgaacgtattttcataggaggtgtatgaattggtcgtagcggaatcgggggtatgctgttcgaattcataagaacagggaggttataaccaggg

SEQ ID NO: 500928 - DNA, 418 bp, Homo sapiens
  misc_feature (274)..(274): n is a, c, g, or t
cagggtgtgtgtgtgtgtgtgtgtgtgtgtgtttatgtgcacgcatgtatatgcatccccacgtagccaggaggggcctgttggggtttgagtcactgggatcttcctggtgagaggtaaaagaagtcactgggcttagctgggcctttgaggcctgtatggaacttttggttgctgaggcacccatggacctgttgctaggaaatagttggggaaggcccaaggccgcccagggcaaaaaaaggagacgaaaagtttgggccagtgggggagnaaatgggaagggatgggatttttgggtcccagagcgggtgggatactcacgcccagctttttcactggtggggggtggggcccccattatttttccctggtcatgatttacaaaaagaaaaataaaactgcttttggaccccca

SEQ ID NO: 500929 - DNA, 234 bp, Homo sapiens
  misc_feature (17)..(17): n is a, c, g, or t
  misc_feature (60)..(60): n is a, c, g, or t
  misc_feature (85)..(85): n is a, c, g, or t
gcggtggcgcaccgaanccgcccatgggcgaggtcgaggtggtcttcaccgcccctgtcngagctcggcatcctcgatcacgacngtcttcttccccgatggcacgatcgtgcagaactcgctgcgggtgctgcgcaacgccgacggcgccgagatcgtcttcaccctgttccagcacccgggcgtgagcgacgaggcgttcgaggccgacgcgacggcggtggccgccgacct

SEQ ID NO: 500930 - DNA, 442 bp, Homo sapiens
agggatgcctcacgctcacaggcatgcatcactaggtggtgcgagacacacagcctctgcacacctcccggggagccaacgctggttagagaataacatcagggcccccttatctggccagaaaccagagaagagttgaacacacccagcagctgacactaacatattggctatgagtgtactgtcacccaactgggacacagtaacgcagccagactacactgtgtgactttgggcaagccactccccttctctgagccccagtttccttatctatcccatggctgatattacatgactgtctctcctagggttgtacccacacctgaatgaccttctagatgtgagctgctgcccaggggacaatgctcagcacacacagcccaccttcaccgtctctgcgtcacgctactctggtccctgatgctctctggaccctgtt

SEQ ID NO: 500931 - DNA, 345 bp, Homo sapiens
  misc_feature (258)..(258): n is a, c, g, or t
acaattgagtggtgacttattgtagagcaggccatggggatgtcagcagcggtctgcactgcgtatggcaggatcttgcttcagattgcccaggtgaggcagaagctgattctcacactgctacagcaaaataccctgctctggtgtatccacaattatcgctcttattgtagtttctgcaagacaggcacagacacacttgcccgctatgtagacaacccccaccaagctcatggcatcagctctccatcatgactnggcgatgcagctcggtggctctgctgatacacactctatttcctacactgttacactccactcacacacttgagtagatcacttggc

SEQ ID NO: 500932 - DNA, 804 bp, Homo sapiens
  misc_feature (503)..(503): n is a, c, g, or t
acctttttggagcaaatgagataaattctctctttcaaaatggtgtatcttccttaatcctatttcataattttcctttggccagttttcacatatcttggatatgtgagcaacatttattatttacattagagtataccttttagtaataaaatgatggaaatcatattattttaaaagcccttggcttctttcataacttataatctcctctaaaaaacctctgcatgtttttaaataaaggcatttcttgtcaaataatggacttttttctaaacagaaataatttcctataattgggcaaagtgatgattcactttttttaacttttttcggattatcagagtacttagtaaatgtatatagttaagtctaagatagtcccaggattaaaaggttaagaggaaaacacaaatcaccaaatttctgataatgtttatctcctgaacaatattttctcactcatattcctctatcttatcattagtaaagacagctaaatntcccaattttctgtccaaaatatgtgtgatttaattgtatataagccttctcattttgccatgtggttgttgatcttacaagttagatgttactatacctaacaatttattcaggtggagttgtgaccacggttcgtggttcatagaattaagaatattggttgggcccagggtttcacggtttgggttaatgggcctttattaattaggctaataatatagggtttggaggaattttaaagtattttttaaaaatttttttcaaattacagttgcgaaattaagttgagttaaatggctg

SEQ ID NO: 500933 - DNA, 1025 bp, Homo sapiens
ttctaaagtcctcctgtatgcagagtgtagacaaatgtttcctcccaggggtgatcagtgcagagatatgtcacaaagcccctgtaagcagaagctttgacaaaggttacatcacctgtttgatcagtggaaatgtatatcacaaagccccctgtagcaaagcccagacaattgttacatcacctgggtgggcagtggagagatctgtcgcaataccctgtaggcagagcttagagaagggttacatcacctgggtgatcagtgcagagattatgtcaaaacgttcctgtaggctgaacctagacaggaattacatcacctgggtgatcagtgcagagatatgtgagaattcccgtgtaggcagagctagacaagtgttacatcacctaggttatcagtgcaggtataagtcataaagcctcctgtaggcagagcgtagacaaggcttccctccccagggtgatcagtgcagagacgtgtcacaaagcccctgtaggcagaggctacacaagagattcttcacatgggtgatcaggtcagagatgtgtcacaatgtccatgtaggcagatctaggacaagagtccatcacctgggttatcagtgcagagatatgtaccaatgacccctgtaggcagtgcccagaaaagagttgcatcacctcagagatcagtgcatagatatgtcacaaagccttctgtaggcaaagcccatacaaggcttacatcacctaggtgatcagtgcagtgatatgtcacaaaaatccctgtagacagagcctagaaaagagttacatcacctgggtgatcaggacagatatttgacacaatgcccccatagacagagcctagacaagacttccatcatctaggtgatcagtgcagagatatgtcaaaaatctccctctagggcagagtatcgagaagggtcccatcacctgggttatcagtggagagatatttcacaatgccccctgtaggcagagagaggacaagagttacataacctaggtgatctatgcgagtct

SEQ ID NO: 500934 - DNA, 394 bp, Homo sapiens
  misc_feature (112)..(112): n is a, c, g, or t
cgttaaattggtgtaaactctgaatttacattaaatctgtgaggtcaatttcctcatctgcgtgttacagatgaaattatccgtatactacctttcaggagtaagttgccanaatagtcttaaggttttattcattccaggtcttaacaggctgtgctaacgaatagctgctggtgcttgatacatgtttgaatgactgactagagtgcacaggatttaaacaacaagtgtttgacgagggtaaacgcgcagagtagttgggggtggccctattttaccctctccttgtcaggctgcggggtgtcaaggacggggttgaggggacggagaagccaattgcacccctggtccaaacaaaatagtccagcagcagggtaccgaggctcgagattcg

SEQ ID NO: 500935 - DNA, 182 bp, Homo sapiens
cgggggggggggggccccccctttggggagggggtttttttttttccgccccccgggtttttggggttgtgtttggaactggttccccaagggggttttccccccttccccggcccccccccggttttttttttaggggggggtttttttttttttttaaaaaagggggggggggttttgga

SEQ ID NO: 500936 - DNA, 565 bp, Homo sapiens
aggactatgaaggaactttgaccccattctgtcccctccagtaaccataaagcaaacagtaaacacagatactggtagtacaaggatcctgatttacaaagctactgtgaaacagctccaaaggcaaagaagaagcctttgtcagggaactactccaaaagggccttcaccttttttccctatactctcataccgcttgtagatcagctcccggcgtaagtagctgtcaatctcctaaagcagtgatacgctcctgaagtggtagcgtggcatttataaaattgggaacctgtaaaaaagttcaacccattccatggatggcacttgtcttccaccttatccactgccccagtctgtttcttcagcctctcaaactccttggcaaagaacaggtctaagaaaggcactccaagggacttaatgttcacttcaatcagggagctgaccatgagcatcaaccagaaaggcctcttgcgctccaggttccgacaatattctgaagagccaaagctttctattgaaacatgattgtgttacgactcaattttaatatggtttgtattac

SEQ ID NO: 500937 - DNA, 298 bp, Homo sapiens
cacaccacctgagtctgtgctggcctctctctgctgacgacactggtgacgcacataggaagtctgtggtgtgtgatgacttgcgtgcagtcctaagcgtcagttggaaaattctgaacacatgatgggtgatcttcagcccagaaggtgtgcgggcttgtgagcactaattatgccttgtccatgtctgacagctaccacaatgtctccccttgctagggcagctgcgaggagacgtgtccagtgatgactggcagaatctggacaaacggacatcactgcaagggtctgtccacct

SEQ ID NO: 500938 - DNA, 189 bp, Homo sapiens
gttctagaggagccctcacgccgtgtcagaacaagcaacacacacggcgtggacatacgcacctcccctgccatacgaacctccccgcgtgaggcttcgcggcgtgcctcactcccacccccggcgggccaaggcctcacgagcaggagcatggtggaccagtccaggccatgttaatgccccgcagca

SEQ ID NO: 500939 - DNA, 1291 bp, Homo sapiens
gatggagggtgtagaacgagaagaagagggaggttccggcggtgccacgagaaccctctagagaagaatagcgaaggaatcgcgcagagctgcaaggatcagcgcgcctgagagaagaagtttgctcgcgaaagagatgcgtatcgtaaaggcaaaggcaggaagcttatcgtatgaaagaagcatcagcgactatggaccaagggaatatgaggcggatgtacagaacttgaaattcgtaatggcagaggatggtcaagagaagcatggataacattctatgtagcgcgtcgcaagaatcccaaagttgggcgtttgtcactcaggaattcagatggtatcacatcggatgtgagccgccaacatggtgtccgaagaggtgtcgcacgcttgcttcgacctatcgtcaagatcttcaatgagaaccttggtgaagctcaataaggcttcgaatttagacaatgcatggagggatgtgtcagagcccatcatgatcagcaatggcgggtgaccccgaatctggaagtcgagtgaaaatggaaagctcaatcattaccacagccgtgggtcatagtggcccagaacatctacattcagagcatacgcagaacttgactctctgacgacggatacacgctgtagcattcggcgtcgactctcctgtgggtaagactcacggccatccaatttgccatggaggcattcgcatgtccatgacgaatcctagtactggtcgggagcaaaccgacttctaagagcaggcgaccaataatggttccatgttgagacccccttttccatagatcgtcgtttgcgtcgccatcggaagggtcgtggacacttggacacgacaataaacagtaccctagcggccaatattgggtcaacgaacatgggttgggacgaacttgcctgggcggcatagccaaggggaaggtgaagcccaaggaaattcaaccgcgaggggctttagttttacgcaacgaaagtagaaaacgtaagcgggtggtccttaaccccaggggaaggatcaactcttgcgcgctaaaaggaccagggatctgggtatacacctaaatacccaggctaacccggtgcctcctcccacacacgtcgcgaccacactacttcatccgcccgcggcaccccggcggcacagactgggacgcacacaggacgacgaaacgcgtgcccccccgggcccgctgggcgtctcccccctgagacttaacggggggcggccacaagcgtcgggcgcggtgactaccacaagcgcacacgcccccgacat

SEQ ID NO: 500940 - DNA, 352 bp, Homo sapiens
gcacgctgaaaaacaaaacaacagaaagaaaagaaacaaaaagccggccaggtgcagtggctcatgcctgtaatcccagcactttgggaggtgaaggtgggcggatcacaagatcaggagttcgagaccagcctggccaacatggcgcctgtctctactatacagagccaggagaatcccttgaacccaggaggtggagcttgtattgagccgggatcgcgccactggactccagtctggtttacagagcatgtgtctgtttctatgtattatagagctaatgcgcttacctagaactgaatacattgttcatgattatgcttatgattattatgggtgttattatggtgtc

SEQ ID NO: 500941 - DNA, 560 bp, Homo sapiens
acttcttttaaatttggattgagcgggagtgaaacggccatcttctggaaaagaatctcaggcaaaagtgagcgcagctcctctggactggtggagtgggaatccaagaacgatgccctggagactttgggcttcctgaaccattaccagatgaaaaacccaaatgggccaaacccttaccctttgaagttgtgtttttcccctggtcagcccccctcctaattaggggcctaggaaaagtcccatttgagcaggaaaacatttttttttcccttaagcccttttttgtttttggtatttgcaaaagattttggattccctttttttttttttttttttttttttttaaaagcaagggttgaagagggcttccctcccccttaatggaaaccctggaaatttgcagggggagggagaggggaactgttatttcccaagattacccttcccttttaaaaaattattggacatgggatttttttttttcctgttcaaacatttgtgctgcccatgtacttttggcccatttcaataaaattgtttggaaaataaacccagca

SEQ ID NO: 500942 - DNA, 1291 bp, Homo sapiens
  misc_feature (380)..(380): n is a, c, g, or t
  misc_feature (382)..(382): n is a, c, g, or t
ggcttgtaacgcgccatatcccatgtgtcccaagcagaactcggcagccggacgtgcttgtccgagcgggacgagcaatggttccggacctgacatgagtcgcttcttgcgtgactgtcaaccaaaagcttcttgcgtaggtgtcttaatcagcgaggaatgaatagacgcgtgtgtcccacgatcggaagtgcacgccattgaatacaacgcggttaggacgcaagaggcaagaagaaggtcggataggaatgattctagccccgcatgtggagcccaaggcatcgtgacactgtctacttagacgcttcctgaagcgtaggcgagtgggacgtaagaatccagcagacgacgcctaggctctggatatcctagccacntnttcctccgattaattcagacaagggattagccttgaggctgccgaagataggagggacaaggcctagctagtccaaacctgagaagatagggctgggtcgggttagcacccttgcgaagttgaagagcccggaagcaaggagcatggacaaggcaaagccatgttaaccacttagcaaatgtggaaggtcttgcccgtgggtcgggtagcctaatggctaggtaccttgaaaagcccctaactaagaagattcgttgcctaccgcggatggaaattattctcaaagggaccgaagagaaaaggaattccaactaaccataaggaacacgtactcccgaagggctttctttggcggacgtccacttgaaacctaggcatctttccctttgaatagtgggttaccacaggaagggagttgggggttgggcgttgctgtaaatgggctttacctccacaatcacgtttcggaattgttttcgcccagttccttttccaccttgaagaaggaatggtttccattttgggacacccgcaaaaatactaaagaaggccgccggtttgaaagcagccggggaacgccgttttccggagtccgacattgtggctgtgcacaatggaagttgaacacttctgtttggtgccctatttccgaaggaggaatgcccagcgaaaacgcggctgggattaaccttgggcaatcacaagggccaaccaacgggccgaagtgaggccgattttgaagtcacaatgcgagcctgcctgcctgaaagagcctgtttcctttgcgggaagccaacggtgaaagtcctttggtgacgggcctttggggaaacgggaagcccagaggcacgcggggaacgggccttttaggcagcaccttgctcagagctgtgagataggaattcccaa

SEQ ID NO: 500943 - DNA, 2473 bp, Homo sapiens
atggcagactccagaggatcctcctcctaccccacggcactataaaaatgatcctggagaataatttggctagactttgcaagaatgacaaaaatgattataagaatcagttgtctcactttggggaatacattctgggaaaataatgtaagagaaaaaatatttgcatacagacatttgaggctgctctgtatattacaggcaagaactggaaactgttcggctgcagggtgacagctaactagattgtggtttattaggggaatgagcctttctttgtgtatgacaactatgaaaactattgagaagaaatagttacgtgatacagtcataatcctcaaaaacggagaatcaggaattatgatcaaatagtgatagtaacaaggaaaacatctgtctaaataattactgagtagaaataggttcggaatttgtaaatagtcattaatttgggagattggggtttttttgttttgttttttgtttgtttttcattattttgtgctattattcatacgtgtacatttctacttcagtttttattatccattacataacatacatgcttgattatttgcttcaaggaaatacacctttataagtaatactcaataactactgggtttgagaatgaaggtgtcagaacgaatgagattgtcctatgaaagaagaggcaggagccagggaggaggatcccacccggccggggctcagccaggaggcagggccattggggcagggtggcagtccaaggaaccgctctgggaaggtttgcaaaggtcggggtcccccctgccaggtgatcgaattatcgtggagtgtctggaaggcgggggaagttttgttgagttcaccaaataactcagaccaactggaaaccaagtggagtttctacaggaccaactagaatagggatcagctacatgggggcggggggaggggggcagggaacggtgtctgtcttcattgcagctctgtctgcagagccagcactgtgatacctcatagtaggtgctcagtgaatgtctgtgaagtgaattactatctagacaaggatgagactggtatgactctccaaagctttcccacctccaaaacctcggcttgtggggaatctccagtagggggcactgtggacacggttcgcatctgcctcccaaggctgggctccgcgtcaaaaaaaaaaaaaaaaaatgagactgagccaggtgcagtggtcactcctgttatctcagcactttgcgtggccaaggcgggaggatgtcttgaggccaggagttcaagactaggctgggcaacatagcaagaccccatctctacaaaaaaatttttaaattagccagaggtggtggcatgcacccgtagtcccagctgctcgggaggctgaggcagaagattgctcgagcccaggagttcaaggctgcagtgagctctgattgtgccactgcactccagcctgagtgacagagcaaaacctggtttcctaagggggggataaaagagggagagatgagatcggggtgtcccgcttctgtgcatgtggagggggtaactgggaaccgtgtactgtaggggatcgcacaccttggggtggaaacagcagctctccggagttgcatgggagccatgggcagtggtcctggctggtgaaatgattctagccacgtggcccacccagggggcaaaacaatagaaaccttcagaaatgaaacgtcacctggctgcaagaagatagtcccacaggcgccctagagatggggatgccaagtggcttctcgggaagctgtaagaatccacagggcattgtaagatggagggaaatattaagttttcttcgtaaagaggtgaggggggcgagagcagcaaaggacactggaaaatgagaagcatggatgggaagtgttgcattgagcataatttggaggtaaaatctccaacaccgtaactgagtggcctggggacctgatagaaagccttgctcaggactaaggcagagttcccagttatatcgcagatacaaagagaccaggaacacgcttgtaatcacagcacttagggaggctgaggcgggtggatgacctgaggtcaggagttcgagaccagcctagccaacatggtgaaacccccatctctactaaaaatacaaaaattagccaggcgtggtggcacatgcctgtaatcccagctactcaggaggctgaggtgggagaatcgcttgagcccgggaggcaggggttgcagcgagctgagatcgtaccactgcactccagcctgggcaacagagtgagaccctgtctcaaaaagaaaaaaaaaaaagagagaaatcaggaacatcatgaaagatacagcaaaatgttttaccccagcccactgcaccacacctgggattgtgacaattaacttgataaattgatgtaaacttgattattttattgctaatttaaaaataaaaatgactttgtattgattgtga

SEQ ID NO: 500944 - DNA, 361 bp, Homo sapiens
  misc_feature (357)..(357): n is a, c, g, or t
aatgtcataaaatgagtcttaagtaaaaaattgttacaagagacaaacaaggacattacatgttgataaatgtgttaatttgtcaagaagattggcccaggtggtgctcatgcctgtcatcccagcactttgggaggccaagatgagtggatcacctgaggtcaggagtttgagaccagcctggccaacatggcgaaaccctgtctctactaaaaatacaagaaattagccaggtgtggttgcaggtacctgtaatcccagctactggggaggctgaggcagaagagttgtgtgagccttgtggtcagaggctgcagtgagatgagattgtgccattgtactccaccctgggcaacnagag

SEQ ID NO: 500945 - DNA, 713 bp, Homo sapiens
cagacagaaggtataatttttttgacacccttgcccaccctgcggcctatgctaggcttgtcctgagaacatccctcgtagcttgatattcacatgacctacacggatgtcccactctgcagggctgaatcaattggggaacacccgaggctacaccgtagctcttcctgctactcggttaatgagcttggccggttctttgtctccgctgaattcttatcatggaaccaccagccagccaccgctaggaaatcttcaagtgtagtgtctgtgctaaccccagtggtaaatccccttagatcccctgctggtctctggccagtctcccttgattttgggtacccatgtatattttccgctttgactttaacgctttctaggatagggtaagcacccctaattcaggcactgtcccattagcttcctttgccaaggctacttatggcccggtcaccaatccaagccactctagacagagcccaggccaatatcctcttgcccctggctatgatgtccagaccagtggatgggctcccagccaaccagagaccaaaataactaaaggcctttgctctcctctgacattgaggcctggggcttaccgtttggaataccacaagtgaaggtttttgttgttgtttgtattttttagatgtaaacttgattattttattgctaatttaaaaataaaaatgactttgtattgattgtga

SEQ ID NO: 500946 - DNA, 927 bp, Homo sapiens
gaggcattgaggcagccagacgtgagggggcttcgggtgagggggcaggcggaggtggaggaacaccgcagagtaagtgtgtgctctcttggagaggatacgacgataattagcaatttatttaagaaattatagtcaaataggtactaaggaatatggctatagcgtgaagtgttgtaagggtaattttacactacgctaaagactttgacaggaagaaaactttggtgacacgatcgttacaacgacgtacgcatgagaggagggacactgagactaaaggggttttctaaaacgagtgacgggggggttggagactgacacgtgtctctaacagtgggggtaaaaaacgtgttttgaacaacgaactcggttggaggagaaggggacagtagagagcctgtgaatttaagtaccagttagagagggcagatgctttgagatgaaaagtgagggtgacttaaaacaggttaaaagtaagagtgcacacagttgtagtgtgcttaaaactaatttggaagggcgagtctggttacaaaggagattaacgtgagggttggataaacgacgacctttgggaacatccaatgagcgccgggacggaaaatgcggtcaatacaaggcctaagttaccggcatttactaaaacccccagaggaacgtgcaccccatactgggcacgggcaaggaagaacactggcggaccacttacagtttggaggggcaccttgcagcacgaacgcggggagggcaacaaccacacacaaaggagaaaagtttggggcctgccgtgaagaatacaccagtgggcgccccaagagtaacagaaggtctagacggcgagggggttcaaccggaggggacataggtgttgcgcccaccggcgctgcgggtgaaacccataccctgtccctcaggcaggcagag

SEQ ID NO: 500947 - DNA, 2876 bp, Homo sapiens
atggcagactccagaggatcctcctcctaccccacggcactataaaaatgatcctggagaataatttggctagactttgcaagaatgacaaaaatgattataagaatcagttgtctcactttggggaatacattctgggaaaataatgtaagagaaaaaatatttgcatacagacatttgaggctgctctgtatattacaggcaagaactggaaactgttcggctgcagggtgacagctaactagattgtggtttattaggggaatgagcctttctttgtgtatgacaactatgaaaactattgagaagaaatagttacgtgatacagtcataatcctcaaaaacggagaatcaggaattatgatcaaatagtgatagtaacaaggaaaacatctgtctaaataattactgagtagaaataggttcggaatttgtaaatagtcattaatttgggagattggggtttttttgttttgttttttgtttgtttttcattattttgtgctattattcatacgtgtacatttctacttcagtttttattatccattacataacatacatgcttgattatttgcttcaaggaaatacacctttataagtaatactcaataactactgggtttgagaatgaaggtgtcagaacgaatgagattgtcctatgaaagaagaggcaggagccagggaggaggatcccacccggccggggctcagccaggaggcagggccattggggcagggtggcagtccaaggaaccgctctgggaaggtttgcaaaggtcggggtcccccctgccaggtgatcgaattatcgtggagtgtctggaaggcgggggaagttttgttgagttcaccaaataactcagaccaactggaaaccaagtggagtttctacaggaccaactagaatagggatcagctacatgggggcggggggaggggggcagggaacggtgtctgtcttcattgcagctctgtctgcagagccagcactgtgatacctcatagtaggtgctcagtgaatgtctgtgaagtgaattactatctagacaaggatgagactggtatgactctccaaagctttcccacctccaaaacctcggcttgtggggaatctccagtagggggcactgtggacacggttcgcatctgcctcccaaggctgggctccgcgtcaaaaaaaaaaaaaaaaaatgagactgagccaggtgcagtggtcactcctgttatctcagcactttgcgtggccaaggcgggaggatgtcttgaggccaggagttcaagactaggctgggcaacatagcaagaccccatctctacaaaaaaatttttaaattagccagaggtggtggcatgcacccgtagtcccagctgctcgggaggctgaggcagaagattgctcgagcccaggagttcaaggctgcagtgagctctgattgtgccactgcactccagcctgagtgacagagcaaaacctggtttcctaagggggggataaaagagggagagatgagatcggggtgtcccgcttctgtgcatgtggagggggtaactgggaaccgtgtactgtaggggatcgcacaccttggggtggaaacagcagctctccggagttgcatgggagccatgggcagtggtcctggctggtgaaatgattctagccacgtggcccacccagggggcaaaacaatagaaaccttcagaaatgaaacgtcacctggctgcaagaagatagtcccacaggcgccctagagatggggatgccaagtggcttctcgggaagctgtaagaatccacagggcattgtaagatggagggaaatattaagttttcttcgtaaagaggtgaggggggcgagagcagcaaaggacactggaaaatgagaagcatggatgggaagtgttgcattgagcataatttggaggtaaaatctccaacaccgtaactgagtggcctggggacctgatagaaagccttgctcaggactaaggcagagttcccagttatatcgcagatacaaagtgccgagattacagcctctgcccggccgccaccccctctgggaagtgcggagcgtctctgcctggccgcccattgtctgggatgtgaggagcccctctgcccggctgcccagtctgggaagtgaggagcgcctcttcctggccgccatcccatctaggaagtgaggagtgtctctgcccggctgcccatcatctgagatgtggggagcacctcagccccgccgccccgtctgggatgtgaggagcgcctctgcccggccgcgacccagtctgggaggtgaggagcgtctctgcccagacgcccgtctgagaagtgaggagcccctccgcctggcaagcgcccgtctgagaagtgaggagccctccgcccggccagccgccccgtccgggagggagcgcgaagacgacagcaccctacccggccagacgcgccgaccgggaacgcgcaggagaccgagtcagcaccaccgcccgccaaaccggccataaccaaaaaacgccccgcaccacacccccgcccaacaaagcaaacacgaccaggagacagaaaaagaaaaaaacaatacaaacggcaacaagaacaagaacagcaaccagaacagaaaaaaacaccaaaccaaaacaaaacagaaaacgaaaaaacaacgacacactaaagcaaaccaacacacaacgcaacgccacccaccgacaacaaaaagaacaccatcgaacacaagcaacaacaacaagagcgaacagcgaagagcagaccagcaaaccaaaaaagcgacaaagagaagaacgaacaacccaaaacaaccaccaacaaaacaaaacctacacaataaaacgcagaagaagcagaagcaacaa

SEQ ID NO: 500948 - DNA, 503 bp, Homo sapiens
gacactagtgcaatgtgcatgttgttctgtcatttctccccatgtagattcctgtgaccagcatcagggtcaaggtacagccctctcccatccatcactcaaggttctcccctttataatcctgcctacccctgcccaccagcaatccctagcccgtagcaactgctgatatgttctccatgtctataattttgtcatttaaagaatattaggggccaggtgcggtggcttacacctgtaatcccagcactttgggaggccgaggtgggtggatcacctgagatcaggagttcaagaccagcctgggcaacatggtgaaaccccgtctctactggaaatgcaaaaattagctgggcatggtggcgggcgcttgtaatctcgctactcgggaggctgaggcgggagaatcgcttgagcccagcaggtggaggttgcagtgagctgagattgtgccattgcactctagcctgggtgacaggctgagactccatctcaaaaaaaaa

SEQ ID NO: 500949 - DNA, 211 bp, Homo sapiens
  misc_feature (6)..(6): n is a, c, g, or t
  misc_feature (134)..(134): n is a, c, g, or t
agaganagagagagagagagagagagagagagagagagagagagagagagagagagagagatgctttaagcaaaagatattagcagctttgactgcagcattagcaattagggaaaacaataacgttccctgcngacatgtaactttgccatcagttttgatgtggaaacactgtgatatataaatgttgttgggaccacattagttttta

SEQ ID NO: 500950 - DNA, 400 bp, Homo sapiens
  misc_feature (23)..(23): n is a, c, g, or t
  misc_feature (213)..(213): n is a, c, g, or t
  misc_feature (319)..(319): n is a, c, g, or t
gacggactacaaaaggaattttntcccataggtctttcattcaaggggattattaacatatgtcaagagtctaccgtgtgctggacactggcagatatttatgtgtctttttaacttataccagccctgtaagtgggctcatacccatatcctcccttaccccttaatggacaaagaaaataaagattctgattaaggaacttgctcaacatngtgcagctagtaaaaatcagaactaagattttaacccaagtcttcagagctccaaagtcaatactctaatggagcaacaggacttaagcaaattacatattaacanaagcttaacaatgaattttgtaaaatgaaatatcagtgtgtttcctttatccttttgcactccaaacatgattccttaaga

SEQ ID NO: 500951 - DNA, 842 bp, Homo sapiens
  misc_feature (19)..(19): n is a, c, g, or t
  misc_feature (54)..(54): n is a, c, g, or t
  misc_feature (350)..(350): n is a, c, g, or t
  misc_feature (756)..(756): n is a, c, g, or t
  misc_feature (770)..(770): n is a, c, g, or t
  misc_feature (773)..(774): n is a, c, g, or t
  misc_feature (780)..(780): n is a, c, g, or t
  misc_feature (789)..(789): n is a, c, g, or t
gacttgttttgcacatgtntcctctagttctttgttcatagcccagtagacctngttacttctgaggtaagttaagtaagtgattcggtatccccccatcttgcttccctaatctatggtcgggagacagcatcagggttaagaagactttttttttttttttttaaaactaggaaaaccaaatctggaagccaaaatgtaggcttagttggtggtgtggtctcttgagtttggtcgctcatgtgtgcaacagggttatggactatctgtctgggtggccccgtttctgggtggctctgtgggcaggctggccagctccaggcgtgccggtggggccgccgccttctttncaagcagctcggtgccgtggtgttccagtgcgcctcaggggccagtgctgaggccttgggccgtgtgccacgttgggaaaacgcccggtgttgaacaagtgaagtgctgggactcagccttcagaacagagaggactgtagggagggcggcaggggcctggagatcctccgtggagaccagcgcccgtcctgtgcctgtgtggcgccgtctccaggggctgctttcctccgggaaattgtgacgagggggtgtctggggcaagagcttggctctgagcgcctccatccaaggccaggttcctccgtatagctcctgtgtggcccacaccctggggcccgtgggctggaatcaggaatatttcccaaagagtgatagtcttaggcttggggcaaaactctacttatncagtgggtttcccngtnnacgtanatttcccanatgtaataacttacctccagggaccaactccatccccaacaacacacaacctg

SEQ ID NO: 500952 - DNA, 113 bp, Homo sapiens
  misc_feature (100)..(100): n is a, c, g, or t
tcgagcccagcaggtcttgagcatggcatctggcgacatgcgcacctcgcagtgggggcgcttgaacttgcccgcagatcaaatagcttctggttcatgnctccagctccttg

SEQ ID NO: 500953 - DNA, 618 bp, Homo sapiens
ggtattatgtccaaagtggtactgcctatgatgtcataagggtgtctagagtcatgggtttcacatctaagtgtttaagcatctagagttgatttctgcatatggtgtagcaaggggtctagcttcaatcttccacattacttatttttgtcagctttgtccaagatcagatggtcttaggtgtgtggccttatttctcggttctctcttctgttccattgatctatgctcctgtttatgtgaattccagaggaaaaaacaacccattatgaagtgggcaaagtatatgagcagacccttttcaaaagaagacatacatgcagccatcaatcatatgaacaaaagttcaacaacataactgatgattagagaagtgctagccaaaaccacaatgaaataccatctcacaccagtcagaatggctattattaaaaaagtcaaataatagcagatgctggtgaggttgtggataaaaaggaatgcttaaacattgttggttggagtaaattagttcaaccactgtagaaattggtgtggtgattcctaaaagacctaaaagcagaaatacaatttgacccagtaatcccataactgagtatatcccccaaggaatataaa

SEQ ID NO: 500954 - DNA, 523 bp, Homo sapiens
ggctgcctggcaagagtgcagaagctctgtaccccagagaatatcaactgcagagacacccagggcagaaattcaacccctctgcacctggcagcaggctataataacctggaagtagctgaatatcttctagagcatggagctgatgttaatgcccaggacaagggtggtttaattcctcttcataatgcggcatcttatgggtagtaaaagttggattccaagacctcctttccagcttgttgtaatgattaaatgagaccatgcatgtggaaattgcattaactaatgtaaggcattataaaaatgcaagcatgttgacatagcggctttattgataaaatacaacacgtgtgtaaatgcaacagataagtgggcgtttactcccctccatgaagcagcccagaaaggaaggacgcagctgtgcgccctcctcctagcgcatggtgcagaccccaccatgaagaaccaggaaggccagacgcctctggatctggcaacagctgacgatatcagagctttg

SEQ ID NO: 500955 - DNA, 616 bp, Homo sapiens
gagtttggacgcgtgtactatgttacagtgcgccggccttgtgattggccccgagtcacctttgcaaacacagggtgaagtgcttgataactcacccagtgggtgtcccccgttatatcccacctttgtggagaagtggccctcggggataacccccatgagaaaagtagtagggttcccccgcacgtgtttaaaacaccgagtgacactaatattggttcatttaattctgtgttctttggtagttattatttgtgggttcatgctgtcgggcgtacgatgttaacatttttttttaacaacaaaccaccttgggccggaggaactccggcggcgggtttggggcaaaaatatattgagcactttgggaaaatccagcaaagattgtctggcagtgtctccgggcagtctttgttccggctaggggtggcacatttcgctcatcatgttcgcactggagggcgtctattctcgctcgagtgcgctgttagcactgacggtagtgacaccaaccactaccgcgtgtgagaagccatcgacccagtagactctctatacgactcacaataggcgcgctttctccaaccgaccgacgagcgcagcgaaaacaaagaag

SEQ ID NO: 500956 - DNA, 997 bp, Homo sapiens
gagggcgctgcccgggtggccgcggcgctggacgacggctcggccctgggcgttcgagcggatgctggcggcgcagggcggtgatcccggggtctggcccggagcccgtgtggcttcggggaatgtgtcccgcagaacgcggggaaggttgttggctttcgcggcccgggggaggccagggaaggagctggttgggcggcccggagatgggccaaccggggggagctggggtccgagggggcggctggccggtttggggtctggggtggtgtgcacggaggcttcggggggccggggggggccaaccccggcgctgggaggcgacggccgggcgcccggcgggggcggggtgtgggcgcagccaagaaggttgggctgggggttcaggactggtgggctctccacaagaggtgcttgagcggctggggggggacccccctcgtgggtcttcccgggcggttgggccacggggggagaggggcccccgggcgcatcaaggggggagccccggaggaaagaggacagggccccttggcaaaggagaggggggggaccgggaactctcctcagggggaagcggggggcgcgccatttgccggcgcgggccgccacttttcgtcctttgcggggaagaagggtctccgggtatcgttaggcgggcgggaagaaaataaagaagggttcctggggggcggaggaaaaacaaaaagacgtttgacgcacacgacatcagcacgacgcatcgagagacaaaccaaaagagatctgtgtgtgcgtgggggcgcgcaactggtgccccgacagagagaaaagaagtttttttttgaaaaaacacatcttcggcgggggggggcgcaggacggcgcaccccccatgagagtgttgatgacaagtcgacggtggtgccacacgaggcggggcgcccccgaagagaacaaacacccggtggacaacggacgacggggggtgggggtttttctctcccaacaatttacgc

SEQ ID NO: 500957 - DNA, 169 bp, Homo sapiens
caagtggtctttgtatggcaagctggcttcaaataaaggagatctgggacacttaactaggcttttaaagttcagacagtgcacagttctcatttggatggtaggctgcgatgatcgtgtggtgcggtaattccgacctgagtcgtacggtcggctaaccatacaacca

SEQ ID NO: 500958 - DNA, 766 bp, Homo sapiens
  misc_feature (17)..(17): n is a, c, g, or t
  misc_feature (78)..(78): n is a, c, g, or t
  misc_feature (94)..(94): n is a, c, g, or t
  misc_feature (97)..(97): n is a, c, g, or t
  misc_feature (102)..(102): n is a, c, g, or t
  misc_feature (169)..(169): n is a, c, g, or t
  misc_feature (205)..(205): n is a, c, g, or t
  misc_feature (209)..(209): n is a, c, g, or t
  misc_feature (211)..(211): n is a, c, g, or t
  misc_feature (221)..(221): n is a, c, g, or t
  misc_feature (226)..(226): n is a, c, g, or t
  misc_feature (228)..(228): n is a, c, g, or t
  misc_feature (254)..(254): n is a, c, g, or t
  misc_feature (270)..(270): n is a, c, g, or t
  misc_feature (284)..(284): n is a, c, g, or t
  misc_feature (299)..(299): n is a, c, g, or t
  misc_feature (333)..(333): n is a, c, g, or t
  misc_feature (339)..(339): n is a, c, g, or t
  misc_feature (349)..(349): n is a, c, g, or t
  misc_feature (366)..(366): n is a, c, g, or t
  misc_feature (488)..(488): n is a, c, g, or t
  misc_feature (491)..(491): n is a, c, g, or t
  misc_feature (511)..(512): n is a, c, g, or t
  misc_feature (515)..(515): n is a, c, g, or t
  misc_feature (518)..(519): n is a, c, g, or t
  misc_feature (528)..(528): n is a, c, g, or t
  misc_feature (539)..(539): n is a, c, g, or t
  misc_feature (542)..(542): n is a, c, g, or t
  misc_feature (547)..(547): n is a, c, g, or t
  misc_feature (642)..(642): n is a, c, g, or t
  misc_feature (653)..(653): n is a, c, g, or t
  misc_feature (718)..(718): n is a, c, g, or t
  misc_feature (742)..(742): n is a, c, g, or t
acaagattttgccaggntataaaaatgagcgcgctttctatgagaatccacttaatagtttccgagtcgaatggcagnccgcgcgtagacacanctnaaggnggatggctgtttctcccagtagctggacgcgggttgctgaaaaggctgcgagcacgccggacataancaagcctttattggtgcttgtgtcccaggtggcgcngacngngcactgtcgngtccngnatacagaagaatatctgttgtaatgnaggtagacaacctggntgtacttatgcgcngccagcccaccaggnactctggtaagcttgtagttgtccaagtcaagcnccctcngatggggcgngtgggccagagagccgntgtcgacagcggatatgctgttgagaactcaatgcccagcttagcgcgggttattcagtcctttcaggcgtagcgtgcggcgaactctgctgattttgttgccatcaagatgtaattccgtnagngaaggaggaagatcttgagnnatnctnnttatattgntatcagcaatncgnatgtnggagagcttcttcattccctggaaagccccattttcaattcctgagctcttcagcggattggtgcccagtgctatgacaatcatctggttcagtncattgaaagtnactcttcgcactttggtgatctcattctcatgggcacgcagctcctgaagagttttgggcatttnttctggcaatccccttcagctgantcttggacagataaagtcgttcca

SEQ ID NO: 500959 - DNA, 160 bp, Homo sapiens
gagtgagccagatacaaaatacattaacagtctcatagatttgtagtggcataattataattcagcgttatttaatgcacataaagaccaaaacaaaacgaaaaaaacacccaaacactccaatcacaagacaagcacggcttttaaccccggatcaaaa

SEQ ID NO: 500960 - DNA, 663 bp, Homo sapiens
atgaaatgctggcaaggaggcagcgacttcagatgacactcgtgagcgctccgggaactggacagcccggcggcttcccgaagccggggcgcagtgcccggggcgagggggagaaagggagagagggagggggagggcgggcgaagcgggagagccagagactcctcgtgctgctgagctgcggctggcggcccgggcagacccacgcccctgcactcgcagcatgcggccgacgcaatgaagcacatcccggtcctcgaggaacgggccgtggaagacctgtgtgcgtgaaggagctgaacggccttaagacagctcaatgcggaaaagtgcaaggatgccggctgcggctgctgcagaaacgggctagtaaacaattttcctgaacatggacgtatggaaagccgcccgaggcccggagaccgtaggcaaacaaagggacttgcagggacaaggaacacatcgggcctgacaggaacgggttcccgggtaacccggattgcagagaatgccaaggtaccccagatggacggaccgaaccggggtcccaccacaaaagaagggggggcaaggaaaaaaagtaacgggtggaagcgacgagggagacaactagaggagaacccgaaggataacagaaacgcgcgggaaaacgaccagatatac

SEQ ID NO: 500961 - DNA, 232 bp, Homo sapiens
gtagaggatcccctgttatgactcactctcaagtcatcacgactcctaggagcacggggcagttgccagcacagtcagcagtcgcaagtcagatatactaaaagtatccatctgggcggtgtagtgatcaagatttgctttaaagttaaattaccactcccctctctaaactagaacttctctcaggagagaagaggggggggtgggataccggagctcgaaattcgatagg

SEQ ID NO: 500962 - DNA, 431 bp, Homo sapiens
ggaaaaagccccgggggcccccccgttttaaaaaacggcccaaaaaaatttttaaaaaaaacgccccctctttgggggcgttttaaaaaaaaagaaggaagaagggttttttgtgggccccctccggggggtctggggtttttttaaacttttttccccgggggtttttaaaaagggtttaaaaattaccccccagactttcccagaaaaaaacaggggttttttttttttgaaaaaaaaaaaatttgggagggggggggctttctcttgtgcgccccatggggggggaaaggggggtctaatataaaacccccccaaggggggtttttccccccgtttttccccgggggggttttaaacaaaccttttacaggccccccccctttggggaaaaaagtgttttctaaaaaaactggggggtttttctttta

SEQ ID NO: 500963 - DNA, 163 bp, Homo sapiens
tctgcatcgctaatcctttgatgaagcttggactgaggagcaagcgagcaagcagcagttcgtggtgaagagtggacaagagtccaggagcccgtgcgatttggtgaaggaaagctccgaagaaggaaggagcgctaacgatttggtggtgaagctaggatcc

SEQ ID NO: 500964 - DNA, 294 bp, Homo sapiens
  misc_feature (40)..(40): n is a, c, g, or t
  misc_feature (87)..(87): n is a, c, g, or t
  misc_feature (96)..(96): n is a, c, g, or t
  misc_feature (138)..(138): n is a, c, g, or t
  misc_feature (257)..(257): n is a, c, g, or t
  misc_feature (271)..(271): n is a, c, g, or t
  misc_feature (286)..(286): n is a, c, g, or t
ttaggctggggacgatggttcacgcctgtattccccagcnctttgagaggcttcagtggatggatcccttgaggtcaggagttcaanaccaccttnaccaacatggtgaaaccctgtctctactgaaaatagaaaaantagccaggtgtggtgcaggcgcctgtaatcccagctactcgggagactgaggcaagagaatcgcttgaaaccaagaggcagaggttgcagtgagctgagaacgtgtcactgcatatcancctgggcaacagangttaagtccgtcccnaaaaaaaa

SEQ ID NO: 500965 - DNA, 356 bp, Homo sapiens
ccatgtctatagatagtttaaattctttgggaataatcccaaactgttttccatagtggctgaactattttacattcccaccagcagtgtataagtattcccttttctctgcaacctcaccagcaactgttattttttgactttttaatgatagccattctgcctggtatgagacagtatctcattgtggttttgatgtgcatctctcaaaagattactgatgttgagcattttttctcatatactcgatggccacatgtatgtattcttttgagaagtgtcttttcatgttctttgctcattgtttaatggggttggtcggttgttttttgcttgactgatctataggagtggtg

SEQ ID NO: 500966 - DNA, 343 bp, Homo sapiens
  misc_feature (17)..(17): n is a, c, g, or t
  misc_feature (52)..(52): n is a, c, g, or t
  misc_feature (70)..(70): n is a, c, g, or t
  misc_feature (230)..(230): n is a, c, g, or t
  misc_feature (249)..(249): n is a, c, g, or t
tttgccaagagcatcanccttttgggtggctttgtcctttatggtgaagtgnccaatggctttgtcatgntgaaaggctgtgtggtgggaaccaagaagcgggtgctccccctccgcaagtccttggtggtgctgacgaagcggcgggctctggagaagattggccttaagttcattgaccccacctccaagtttggccatgggcgcttccatctcatggagtatacctntgcatttctccgcccttgnccaccccaccccctcccccaccaagggcgcaagagtagcggtccaagcctgcaactcatctttcattaaaggcttttttttcaccagcaaaaaa

SEQ ID NO: 500967 - DNA, 887 bp, Homo sapiens
  misc_feature (19)..(19): n is a, c, g, or t
  misc_feature (22)..(22): n is a, c, g, or t
  misc_feature (43)..(43): n is a, c, g, or t
  misc_feature (47)..(47): n is a, c, g, or t
  misc_feature (57)..(57): n is a, c, g, or t
  misc_feature (59)..(59): n is a, c, g, or t
  misc_feature (76)..(76): n is a, c, g, or t
  misc_feature (94)..(94): n is a, c, g, or t
  misc_feature (97)..(97): n is a, c, g, or t
  misc_feature (100)..(100): n is a, c, g, or t
  misc_feature (109)..(109): n is a, c, g, or t
  misc_feature (167)..(168): n is a, c, g, or t
  misc_feature (171)..(171): n is a, c, g, or t
  misc_feature (179)..(179): n is a, c, g, or t
  misc_feature (186)..(186): n is a, c, g, or t
  misc_feature (198)..(198): n is a, c, g, or t
  misc_feature (202)..(202): n is a, c, g, or t
  misc_feature (212)..(212): n is a, c, g, or t
  misc_feature (223)..(223): n is a, c, g, or t
  misc_feature (228)..(228): n is a, c, g, or t
  misc_feature (234)..(234): n is a, c, g, or t
  misc_feature (236)..(236): n is a, c, g, or t
  misc_feature (240)..(240): n is a, c, g, or t
  misc_feature (242)..(242): n is a, c, g, or t
  misc_feature (244)..(244): n is a, c, g, or t
  misc_feature (248)..(248): n is a, c, g, or t
  misc_feature (250)..(250): n is a, c, g, or t
  misc_feature (253)..(253): n is a, c, g, or t
  misc_feature (263)..(263): n is a, c, g, or t
  misc_feature (269)..(269): n is a, c, g, or t
  misc_feature (290)..(290): n is a, c, g, or t
  misc_feature (293)..(294): n is a, c, g, or t
  misc_feature (317)..(317): n is a, c, g, or t
  misc_feature (327)..(327): n is a, c, g, or t
  misc_feature (335)..(335): n is a, c, g, or t
  misc_feature (340)..(340): n is a, c, g, or t
  misc_feature (350)..(350): n is a, c, g, or t
  misc_feature (352)..(352): n is a, c, g, or t
  misc_feature (380)..(380): n is a, c, g, or t
  misc_feature (401)..(401): n is a, c, g, or t
  misc_feature (446)..(446): n is a, c, g, or t
  misc_feature (448)..(448): n is a, c, g, or t
  misc_feature (481)..(481): n is a, c, g, or t
  misc_feature (486)..(486): n is a, c, g, or t
  misc_feature (505)..(507): n is a, c, g, or t
  misc_feature (526)..(526): n is a, c, g, or t
  misc_feature (570)..(570): n is a, c, g, or t
  misc_feature (679)..(679): n is a, c, g, or t
  misc_feature (775)..(775): n is a, c, g, or t
  misc_feature (813)..(813): n is a, c, g, or t
  misc_feature (865)..(865): n is a, c, g, or t
tgaagactccagctctgantgnatatggagaccaggaccccangggncagaccagcntngagcacctgaagcagcngcccaaccaccgggggcngancangaagggggnggggcaccccggggaccgggacaaaccagaggaggggcagacaggggggcgggacggnnggnaggggggncagggangcccagcacggnggcngggggggggnggccggccggngcggngcgcgngngggnangngcgngnggngcgcccaggngcgggngcaggcacaggcaacaggggnggnnggcgagaggggggggggcggggngggggggggngggggggnggggngaccgcgggngngggcagggagagacggaggggggaaaancaagagaaaaaacgcgcaggnagcaaggaacagaagccgggggaggggaagccaggacaggagcgncnccggggcggccacgggccggccgggcgggcacnccggncccggcgcggcccagccgnnnccgcccacccacgccgccngcggcaaaggcccggaaggccagcccttaccccaacacccactnccccacctccttaggccccagatacatacatgcccacatgcacgcttacatgtttagagccatccttgtttccaaatatgacccttcgcttgagggcaactgcataggnacatctaactctggactggcatgcacattgtcatgtgcagctttgcatatacacacatgcatacatgagcctccacacaagcacttgcacacatgnggactcctaaccatgctaacctcactggctgggaaggnggggacccatgggccagcccttgcaggaggcccttttgcaaggcttaggggngtggccagccctgaaagctact

SEQ ID NO: 500968 - DNA, 235 bp, Homo sapiens
gatgggtcgaggtctcagcttatcattccaaaagttcctagtcaagaaagcaaaaatgtattttagtacaaatcttatatctatagatattttgtatatttatggcttttattgttagttaccatcctggaaaatatgtctaattattaaatgtttgtttcccctacagcaatggtagatacaatcaaaggcataaatgattagagaaatcaaattaaatttatatcttgtgtgg

SEQ ID NO: 500969 - DNA, 851 bp, Homo sapiens
tagcataaataaaggttaatgggccagttggggtgagtgacaaactgacttggccccagttcattattccaattttccaagcccctgaggtggcaaaaaaagctaacttattaagggggggcaaggggtgaaaggtggaaaggacttgaaggcctcggagggttaacagggctaaccgggaccggaaccaatgtcccaggaataagtccaggagggaaaaggcaatcacccagggcgggaggtctgggacgattcgggatcacccctaggacggctatcggctccgtagtcgggtacaggagtctctgtccgggccctcatggtccaccacagcggggctcctccattatcccatcgggttaggagatctgggcccacagagatgctcttgaaataggattggggctggggctgtaaaaccgggcaaagaccctctggggaacaccgtggaactcaggatcatggcctctacggggctcaagaatgggggtccataggcaataatcatcaaacctatgaaagtggctctgggagcccagtctggtgctgatgggggggaacacaatcttgcatcactcctccaagacccccccaaaataagcgtgcgcggggtgacccactcgagatacttacagcgatggagtcccgaagggtttttggcccctgccagtgagtctccacaacgtggtcctgaaaacggaccggaaatcaggcagattggtcaaaggcaggcacggacccaaatcgcgtaaacagcttatgacactcgtcaaggataacaaacaccaagtatggggaagataccccacggtgtaatagaaacaacaaacccagggggtgcagagactgcc

SEQ ID NO: 500970 - DNA, 791 bp, Homo sapiens
  misc_feature (106)..(106): n is a, c, g, or t
  misc_feature (471)..(471): n is a, c, g, or t
  misc_feature (524)..(524): n is a, c, g, or t
  misc_feature (679)..(679): n is a, c, g, or t
  misc_feature (687)..(687): n is a, c, g, or t
  misc_feature (703)..(703): n is a, c, g, or t
  misc_feature (734)..(734): n is a, c, g, or t
  misc_feature (748)..(748): n is a, c, g, or t
ctgaaatctgtggatgcaaaccactagttgtcatgcccactcgtcctagcaagttacattccccgtaacaaatgctttgaaatagaggccgcgtattgtacccatnatagctacccccttcgtactctcccatcatatgagcacaagaataagaaaaagattagaaacaaagaatagaaaaactatgtcttggagtcggctcgatcggcctctcttcatagaagattgtattgaacacactattgggttggggggagcggagggatccgtaagatgtggactcaggaaagataggagtggcgagacaagagtgattcgataagagaaaagtcacgggtggcatgagtagaagggggtggcgaatgtattcctcgcgcaagattaaagagaaaaatagtgcgctggagtgcgaggcatgcggagtggtgttgttgtagagagaaaaaaaatattcacaacgtatgcgtgcgntgtctacgaggaagggtctattaaagttggggagggtatgtatattctcactnggaaggtgttgtactcaaggcgtgacatgagacgggacattgtaataattagtcttagatgagctcccggcggtagtggtgggtttaaaaccgacttgtttttatcaaagcgtggtaaattgatttgtttttaaaaaaagagcctatacaacgtnaaagcgcngtttggaattatcggntcaacagcaatttggttcatcgcgggagggnccaacattgtcttntcaaaagttaccaggactcaaaaggggcacaatcagaaaccct

SEQ ID NO: 500971 - DNA, 669 bp, Homo sapiens
  misc_feature (73)..(73): n is a, c, g, or t
  misc_feature (77)..(77): n is a, c, g, or t
  misc_feature (89)..(89): n is a, c, g, or t
  misc_feature (91)..(91): n is a, c, g, or t
  misc_feature (96)..(96): n is a, c, g, or t
  misc_feature (106)..(106): n is a, c, g, or t
  misc_feature (111)..(111): n is a, c, g, or t
  misc_feature (114)..(114): n is a, c, g, or t
  misc_feature (117)..(117): n is a, c, g, or t
  misc_feature (120)..(120): n is a, c, g, or t
  misc_feature (128)..(128): n is a, c, g, or t
  misc_feature (133)..(134): n is a, c, g, or t
  misc_feature (138)..(138): n is a, c, g, or t
  misc_feature (144)..(144): n is a, c, g, or t
  misc_feature (157)..(157): n is a, c, g, or t
  misc_feature (162)..(162): n is a, c, g, or t
  misc_feature (165)..(165): n is a, c, g, or t
  misc_feature (169)..(169): n is a, c, g, or t
  misc_feature (171)..(171): n is a, c, g, or t
  misc_feature (173)..(173): n is a, c, g, or t
  misc_feature (182)..(182): n is a, c, g, or t
  misc_feature (224)..(225): n is a, c, g, or t
  misc_feature (238)..(238): n is a, c, g, or t
  misc_feature (277)..(277): n is a, c, g, or t
  misc_feature (285)..(286): n is a, c, g, or t
  misc_feature (296)..(296): n is a, c, g, or t
  misc_feature (310)..(310): n is a, c, g, or t
  misc_feature (312)..(312): n is a, c, g, or t
  misc_feature (316)..(316): n is a, c, g, or t
  misc_feature (320)..(320): n is a, c, g, or t
  misc_feature (327)..(328): n is a, c, g, or t
  misc_feature (341)..(341): n is a, c, g, or t
  misc_feature (347)..(347): n is a, c, g, or t
  misc_feature (349)..(349): n is a, c, g, or t
  misc_feature (353)..(353): n is a, c, g, or t
  misc_feature (357)..(357): n is a, c, g, or t
  misc_feature (361)..(361): n is a, c, g, or t
  misc_feature (387)..(387): n is a, c, g, or t
  misc_feature (395)..(395): n is a, c, g, or t
  misc_feature (404)..(404): n is a, c, g, or t
  misc_feature (422)..(422): n is a, c, g, or t
  misc_feature (457)..(457): n is a, c, g, or t
  misc_feature (491)..(491): n is a, c, g, or t
  misc_feature (518)..(518): n is a, c, g, or t
gggctgggaggctagctgttgtcgtggttgctcggatgtgcacgtgtgcagtcccggaagcggcgatgggaanctgntccgcgcgcgcngngggangaggaaccgnccggnccnttnggngtccgggnccggnngggncatggnttcaatgcctgangcccngcngtcncngntgtcttctngcttcttcccttgctgctgctgctgctgctgctgctgccggnncccggagctgggnccgagccaggccggagctgaggagaacgactgggttcgnctgcccanncaaatgcgangtgtgtaaatatgntngctngtgngagctgnnagtcagcctttgnggaaancnggcnagancaanggaggtgattggcacgggctatggcntcctggancagaagtgnctctggagtcaaatacanccaagtcggacttgcggttaatcgaagtcactganaccatttgcaagaggctcctggattatagcctgnacaaggagaggaccggcagcaatcgantttgccaagggcatgtcagagacctttgagacattacacaacctggtacacaaaggggtcaggtggtgatggacatcccctatgagctgtggaacgagacttctgcagaggtggcttgactcaagaagcagtgatatgtgctggtggaaga

SEQ ID NO: 500972 - DNA, 842 bp, Homo sapiens
aaactccagtgcttaagacacgcctctggacctgaaggtcttagtaggctaggacagaaacctgtcatggagaatgatggctggccacgtgccatatgtgagaatgcttttatgtggtacatctgggaccctggaggaggtccacatgccacagaatgtggatcaaccaccctggcatcactgcccttgtgcccaggctttctgctgtacaaccccctgactgcgggtcatcaacctgaatgacaacaccttatcactgagaagtggcgccgttggccatgtgaccgagaccttgaagaccttgctggctatggtggagtgtgattaaattatggggacagcctggtgacgctaccaagtgtgtgcaagttgccatatgcaagcatgcccatccagcggccggcctgaccaaagcatcacaggcagacagaggcaagcaagaggaagcaagaagcacgcaggaggaggaagatgaggaagcaggaggcacgaagcaggaggcaggcaagaggaagcaagcagccgtcacaggagagatactaggacccagtaacactagggggatgccacgagtccccgtagcatgtacctcacacaaacataccatggtaggacgtctcaaaacactaccctgagcgataacccatccttccaagaaggaggctgcttggcgcttaaaaggcccaaaaagccacctagtgttagatcagtccagtacaaactgccacggtaagaccccgagtaaggtgggaactgacctcctacgagggtgtaaagtgatcaagagcgacacaatggggagatagcgacggggtgaggtagatcgaatcgaagatcaaccg

SEQ ID NO: 500973 - DNA, 222 bp, Homo sapiens
  misc_feature (117)..(117): n is a, c, g, or t
  misc_feature (153)..(153): n is a, c, g, or t
cgttatgctcctcactacactttggtgggtctgcttgaccccacactgtattatctaaaaagatgaaaattgcggtcatttacttcaatggataagtagctttggaactcttgaatngtgggtcaactttgcatcacgttggccccataatgnataatttagtaagttactcattgctgtaggtgtttgagaaaaatgatgaccagcaatttgaggaacact

SEQ ID NO: 500974 - DNA, 508 bp, Homo sapiens
  misc_feature (85)..(85): n is a, c, g, or t
  misc_feature (164)..(164): n is a, c, g, or t
  misc_feature (228)..(228): n is a, c, g, or t
tttggggagggggggggtcgcccccccttcccccccgggcgcggggggcccccccctttttgaaatataccaaagattttttttnagaggtttgtggtttcccccccggtgggtttacaaagggggtggggttcccgcgctttataaaaatccccccaaaaacnctttggggggtgtggggggggccccccttttggggttttgggggaccacgggggaaaaggggcncccctttttttcccttttcccttggggtttttttggccccaaaaaaatttttgccttttttttggggaaaaaagggggctttttttcccccccgcgcccccaccccccttgtccctgggggcccgggggggttttgttttttttggggggggggggggggccccccctccccccccccgttttttcccccccccccccggcccccgggttttttttttggggttttttcccccccgggggggggggggggggccctttttaaatttgggggcccccctta

SEQ ID NO: 500975 - DNA, 137 bp, Homo sapiens
  misc_feature (132)..(132): n is a, c, g, or t
agtgagaaatgggaccccactatgggtgggacacggatagagcctctgacatttggaaggggaccaagaaattaatgctgtcacccacaccggtaatattaatacttgtgaacaaacctcatagagaccccngtctc

SEQ ID NO: 500976 - DNA, 256 bp, Homo sapiens
atgtgcacaattgaccatttgccagaatccactgctttcttgattccatgattgaattaaaaaaaaaaaaaaaaaaatattaaaccacaatgcagcacccacccctttttcccccaccagggttgtatgtgtgatggggaaaaaaggatgggcagcttcaccaatggcgcaaatgcttctgctcgctctgtgccatggtgagctatggttgaatatgcatgggtgctcccctgacaagatttgctgggggtgtggt

SEQ ID NO: 500977 - DNA, 513 bp, Homo sapiens
tgggtgataggacttcaaccagatacacgagtgaagacgatgcggtcagtcagtctcaggccagcttctctgtgacccctttactcctactgggagggctctgtgggagagagatacagcggaaaggagctgttcttcaatggtccccgtcaaacatgagacggaacgagcgaaccccagagggtcatcacgcctgtatcagcttcctttcttagtcttctcagcatgatgaaaactttggcgtctggcccagtttcaggaccatcattcagcttgacagaaacacccatcttagtgctgtgcaagcgcatgggcttatcaggggacttgacggtcaccatgggacattcaggcgaggctcacgcttgctaccctgccccagacctgatttcttctacagggaggaggacaatggtgcgcgaccagggcacaggagagccagaccgggctggatgcacaggggcctcatacccacaaccatggacctccgatgcccatcaccccgagccctag

SEQ ID NO: 500978 - DNA, 166 bp, Homo sapiens
tgatggaaaagggtactaatggttgtcctccgatcaggtaagaatgaggaggtctgcggctaagaatcaataaagtgattggcttaatgggcgaaatattatacttttgttggtttggatatatggaaggatggggattattggctaggattgaggattggatagt

SEQ ID NO: 500979 - DNA, 418 bp, Homo sapiens
gctcgtctctgatggatccctttatgatgttgcccctgttgtcaccggtggggtctgcaagtgaccgagtcaatggcttcagctgccctgcccctcgggcttcagcggctccacgtgtccgctgtgacgttgacgaatgctgccagcacgccctggaggaatggcgccaaatgcgtggagcagcccgatggctacgagtgcctgctgtgccgagggcttatgagggcacgcttgtgtgatcgcaacgtggacgactgctcccctgtcccatgccaccatgtgtctctgcgtgtcatggcattgccagtttctcatgtgtcctgtgctcctggttacatgtgtacatgctgtgagagccaggtggacgaatgccgtatccagtgcctgccgtcatggcggcaaatgcctataattggac

SEQ ID NO: 500980 - DNA, 152 bp, Homo sapiens
acgaccacccttcctcgtttcatcaggctttgaagatgccatggatggcctgccttccctcaggcctgtaattgagctctgcatcccttcctcgtgggtgccaacccaggctccccctggctgccatgtagtctccctcttcactcagtaca

SEQ ID NO: 500981 - DNA, 738 bp, Homo sapiens
  misc_feature (16)..(16): n is a, c, g, or t
  misc_feature (211)..(211): n is a, c, g, or t
  misc_feature (213)..(213): n is a, c, g, or t
  misc_feature (219)..(219): n is a, c, g, or t
  misc_feature (318)..(318): n is a, c, g, or t
  misc_feature (478)..(478): n is a, c, g, or t
ctagtagccgtgttantcggcacgagggtacgtgacgcgttagctgggggctccggcgcgggggaaccctgtctggctgaaccacagaatggctggcgtgagcttggtggaggccaaaaacatggtgatgagttttcgagtctcgaccttcagatgctcctgggtttcgtgggccggagtaagagtggactgaagcacgaagcgtcgttcnanccaggnccctccagctggtgcagtttgactgtagccctgagctgttcaagaagatcaaggagctgtacgaaggaacgcccgggggcgtttaaaagcccggggggnccaagaagaactcggagcctgccccacagccgcaccggcccctggacccctgaccatgcactccacctacgaccgggccggcgctgtgcccaggactccgctggcaggccccaagttattgactaccccgtgctctacggaaagtacttaaacgtgaccnttttgggggggggggggacgggttgcccgccaagaccctcaagccagaagttcccgccttggtgaagctgccgttctttaatatgctggatgagctgctgaaagccccaaagccccggggaaatttagtcccacagaacaacgagaagcttcaggagagcccgtgcatcttcgcatttggacgccaagacaggtggagttgatccggaactccagggaactgcagtccggagttaaagccgtgcaggtcggtcctgagaa

SEQ ID NO: 500982 - DNA, 545 bp, Homo sapiens
  misc_feature (2)..(2): n is a, c, g, or t
  misc_feature (9)..(9): n is a, c, g, or t
  misc_feature (22)..(22): n is a, c, g, or t
  misc_feature (36)..(36): n is a, c, g, or t
  misc_feature (47)..(47): n is a, c, g, or t
  misc_feature (59)..(59): n is a, c, g, or t
  misc_feature (73)..(73): n is a, c, g, or t
  misc_feature (78)..(78): n is a, c, g, or t
  misc_feature (232)..(232): n is a, c, g, or t
  misc_feature (317)..(317): n is a, c, g, or t
  misc_feature (386)..(386): n is a, c, g, or t
  misc_feature (445)..(445): n is a, c, g, or t
tnctgttgnaatttaactaggnaacactcacagtgnactggtatagnacagttgaaagncattcttgaaaatncctgnctctgctgcctttaaaagttaacaatctcttttatcagatgtcaagggcaagggtaatgcagtttctgtaaatttatgaaatttctttttctatgtacatgaagtacatttagtaagtaacacccccccttcccatgcggcacatgtgcattancacacacacacacacacacacaaacacacacactgtcataaagctaatgatttgggactttaaaaaataggatgtcctccggggncaatcataaatttatgaaagaaagagtggtttacagactcccctgaaagaagcagtgtatatgtgaagncagtgcaaaaatctctttgccatgtatattatagcgtattcattggtgtgaatagtcanatgttccttctggtccaactctgtgtttgcaaatttccaagaggcattgttttcaaaagctcccttaaaatgtactggtttttgagtagaggttccgttt

SEQ ID NO: 500983 - DNA, 343 bp, Homo sapiens
ttgatctagaggatccctgaatatgctggtctcagcaatagaatagaacaagtagaggaaacaaattcagagctcgaagactaggtctttgaattaacccaatccgacaaagacaaagaaaaaaagaataagaaaacatgaacaaagcctccaagaagtctgggattatgttaaacaaccaaacctaggaataatgggggttcctaaggaggaagagaaatctaaaagtttagaaaacctgatgacaatgagcctaggcaatcatcttttggtgatgaatttcccaggtgttcttggtgcttctggtgtttggatgtctaggtctgtagcagggtcagggaag

SEQ ID NO: 500984 - DNA, 406 bp, Homo sapiens
  misc_feature (176)..(176): n is a, c, g, or t
  misc_feature (188)..(188): n is a, c, g, or t
  misc_feature (273)..(273): n is a, c, g, or t
cgcctctgcccggccgcccctactggggagaggagcccctctgcccggccagccgccccatccgggagggaggcggggagggaggcagggaggtcagccccccgcccggccagctgccccgtccgggagggggcggtggggtctgttctttgtttgttctgttgttttgtctggtntgtgtggtttgnttttgttttgtcgttttgttttgtgcttgttgtttgtttttctccgtgtccctcgctttttgctcttcctttcggttttccttcnctcgcttcttctcttttctccttgtccctcttcgctttctcttttgttgccctctccctcctttgtccggtcctctcttttccctttgttgcctctcttcttccttctcgtctttttgttccgcctggcttcg

SEQ ID NO: 500985 - DNA, 266 bp, Homo sapiens
  misc_feature (55)..(57): n is a, c, g, or t
  misc_feature (77)..(77): n is a, c, g, or t
agcacgattagcacatttaaggaattaaaaaaaaatttgtttggtcacctctgcnnnatgtacctgggtgcacgcanggctgagtccaaaaaaggaggcagcaaagggttgtgggattaccattggttcttataggttttgggataggaggcggagttaagagcaatgtttttggggcagagggtggatctcacaaagtacattcaagggtggggcgaattataaagaaacttcttaagggtgggggaaattatcaagaacattgt

SEQ ID NO: 500986 - DNA, 637 bp, Homo sapiens
  misc_feature (271)..(271): n is a, c, g, or t
tagcgaaaatgtcaagttataatctgccaaatatacaagtgggattggtggcagcatgtttggccggggtgccccacagtaaacagagggttcgtggcaaagtgactcaagtgggtatagggcgtgaaaagtgggcacgtggcccttagcccgagggtgagtttaggacaccgggcaggggaagggcgaaagaagggtgaggcccgtggaggtgtcagtctcagaacaggaacgtgcacacagagggacacaaaagccagagtgatacctnctctcgagagagacaccccgagggggtccacagaggctctcccgagaagtgaattagcccccctctctctctgtgagagagtggagcccacccgcgaggtccacacaacaagactcccggggggctgtgtgtgtgtgtgtatgccaaaacacgcgtgtgtcagggcagcgctgtggccctccgcggggggaacacagccaacccgccccctgtatcacccgatggcatatctctaatatgctctataaccccagagaacacacatgtggtataggggctctcgtttcttttttacacccccaaatctctccacagagagaaccccccccccgagaacagagggggctctctggggaaactttccaa

SEQ ID NO: 500987 - DNA, 355 bp, Homo sapiens
gatccccacgcctcggccgtaaggttcctgcgccatgagagcgaagtggcggaagaagagaatgcgcaggctgaagcgcaagagaagaaagatgaggcagaggtccaagtaaaccatcttgtgcacccacgaagcctgcgggagcagaagtaagggatgctgaagcccggaacaagtggttggactgtatgctgctgtcggtaataagtctcagtagacccggaatgtcacctcgccgagatcagctgggaaaatgactaccttcctcacaaccaaaacagtcccgctggccctctgccctggacctttggcattctggactagttctgttctcttgtggccaagtgtaactcgt

SEQ ID NO: 500988 - DNA, 131 bp, Homo sapiens
ccacaccaccagctcggtcagggaatgggaagtgccgcagaagaatgcccacctcaaggacagcgatatcaccaagcccgtagccgccattcaggccctcgcagcccttctggcggcctcagactacacaa

SEQ ID NO: 500989 - DNA, 318 bp, Homo sapiens
tacttcaacttaagctaagaacagggctataaaactgagggagaagaacagggtaagagaaatgtgaatcaggagtatttctgagatctctagactcccaaagcaagtaggtgtctagcatcttatttttccttcctcagtaaaatgaacaagaaaagatacttgtagtctcgacaagaagaggaaaagtttgagccatgagggaatcagtggttcggcgaagtggggataatttcagattcaggagggtacattcggaaatttctcaacagttttggttgtcacaactggaagtgtcactgatctataggagtggtg

SEQ ID NO: 500990 - DNA, 446 bp, Homo sapiens
tgataatgcagattgttgggaaatctataaggaagtaactgactctaggcaaattgttttcttcctcctacccgcccaaccccctacccgtccgtcaccttttaggaacacagtatgccagtgtaatgtgggaaccattgagactgtatttgccctgagtaccaaactaatttaagtgaatttttttttaaacatactggtaaatgatgtccacaaatttccttagatatattttaattaattgtcttaaaatacattgatatttattaatcattggatttggggacagatttttgactgtggcagatggtagggaacagaacagtaaacagttggatgagatcaatcagggcgaattacatttttctggttacactggtgatcatttgagaattgatttacctcagtgtttaacagtttttgttttggttttaaaatactaacta

SEQ ID NO: 500991 - DNA, 445 bp, Homo sapiens
  misc_feature (89)..(89): n is a, c, g, or t
  misc_feature (113)..(113): n is a, c, g, or t
gtaaataactggaaaacattttgggccccccccccacccttttttcggggagagaggaaaatccccaaaatatactctctttttagtgngcctcaattgggcctcacagctcncaggacaattacaaggtcacctcttttttttggctgtccccaaaattgttgtgaattcgagattaatctccccccacgctttgccaggaattttttcagacctccctagcacaagcccggttgttccttgtcaggagaatttgtagatcattttcccttcaaattcctgggggggaaacttttttcattttgccccccaacctctgtaaataaatttaccgcatttacggcggcattttgtaagtgggcatggtttcctaaaggaggagggttccttgtataataagttattcccctgagtatgcaaaaaaaatgtgggggcccctctttta

SEQ ID NO: 500992 - DNA, 192 bp, Homo sapiens
acttcacatcgttacatggttctgtgtatggccatgggtttatgtgtataaagcgaagctgtttctgtgaaactgtatattttgtaaataaatatattgctactttgaggttcatgagaaaaagcaaaaaaaaaggggccgctaagtatccctaggggccagtaggtaccattttgcagggtggccctatag

SEQ ID NO: 500993 - DNA, 722 bp, Homo sapiens
  misc_feature (304)..(304): n is a, c, g, or t
ccaaaagctcccatttggttattaaatttagaggggccaggcttttaagatgggtttcaagttctgggccattccagcaccagccctcagagaatcaagatgcctcttgaatattcatccaaaacattccaagaagccttctttgccccagcaatgttttgcaaaactcctttctttcacaaatcaacagctaaggagccaagccaccagccatttcttcattttccacttcggcaaagcagttggaatttttcaacagaggtttttcccaggcatcacgtcagtttccctgaagaccgaatcnttgatttcccaggatatactgggcaagtccgccctgttcatcagcacatccagcggttctccatgacagcatcccgtgtggctttggtaagatctgtcactacctggaaacgtctgcaaactcagctttgggaatctctgctcaagccgagctactgcccatgctgtgagagctctttctccaaattattgagactggcacacttgagtctctgttggcaggcgaagccttcccttcatcccaaagttcttcgagcttggcaacagcaggccagctttatcagcagcttgcaaccattctgtaaaagcagctttatccctttagcaaaaaaaaaggagttccggggcataaaagtaagcatgtcatctggcaaatttcatataagtattttttcaaaaaatgtctcatcaccgtcatg

SEQ ID NO: 500994 - DNA, 182 bp, Homo sapiens
  misc_feature (79)..(79): n is a, c, g, or t
  misc_feature (114)..(114): n is a, c, g, or t
  misc_feature (135)..(135): n is a, c, g, or t
tggccggtccgtgggaactatgagttctatggtgccctatgagccctgtgcagctctatgggatcttatggggtagtantgggctctgtgggatgcgctctatagggtcctatngggtgtctacggggttccaangtgaggttacggagctctgttgggcggctacggggcactctggggtg

SEQ ID NO: 500995 - DNA, 340 bp, Homo sapiens
ccccctttctttttccccccccccccggggggggttttgcccccccccggggtagaacccccctttttttttggggtggttccccctgcccccggggttttttgggttttttccttttccccccccccttccttgggggggtcccgtttcccttttccccatgctttttggggggcccccccccccgggggggggggggagggcccccggggggtttttttttggggttttccccttgggcccccctctgttggggggggtgggggggggcttgggggtcttttgtggccccccccctggtttttttggggttgttttaaataaaccttgcttctaccca

SEQ ID NO: 500996 - DNA, 695 bp, Homo sapiens
  misc_feature (689)..(689): n is a, c, g, or t
ccgatggcgcatgcctgaagtctgtaaaattgcacatattttaccaagtcgcgtgaatcaagatcgggtagtgagtccatgacgtgaagagcgcgatcatctaggagctttgtagcagatgagtcacttattactatttagcgcccatggctggcaggacagtcgtatctctatacagtgggaatctagagatgactcgagagcagacatatatccgtatcatttgattacatgatgatgataatagttattgttagaagcgtcaacgttatactacgtctatgagtaggacaagtaatgagaagagaattctgaatactttacctacagatgacaatggccaatgtgtatatagtattggacgtaaagataacaaccgatctctgagcagcgtatctgccatgaggccctatagggagtcaggccgtatctgttctgtagtgcagcgattacaactgattgatagtatagacattctttgcgcagaaagactacaaggctaccgtactgtcagctaaggacttcggctgacttagcatataagtagtgacaagattacactatgcaatgtatcttggaatcctgccattaactaatgtaccacaccctaggctagagtagcaacctctgcaacaacttggctactaaccgggccgcttccttttcaccccggtggcctaccccctttngccccc

SEQ ID NO: 500997 - DNA, 283 bp, Homo sapiens
cgcctcccgggttcaagtgattcttccgcctcaacctcccgagtagctgggattacaggagcctaccaccacgcccagttaatttttgtatttttagtagagacggggtttcaccatgttggccaggctggtctcgaactcctgacctcaggtgatctgcctgcctcggcctcccaaagtgctgggattacaggtgtgagccatggcgcatgcccaggatgcagtttctattgcaacagaagtagttgatatacagtactccagcgcgtgagagagggaagat

SEQ ID NO: 500998 - DNA, 300 bp, Homo sapiens
  misc_feature (19)..(19): n is a, c, g, or t
  misc_feature (71)..(71): n is a, c, g, or t
  misc_feature (270)..(271): n is a, c, g, or t
tagaaaaaatagttagtanactttaactgaagttatatagacatatactttcataataatatacttgaaangttgttttaaaagtatttgtaataatattctaaaattaaaggtagtatcagagatctttcaattaaatacaaagttaaatgttacaaaatcaagacttctcctaggttcattttttgattaagcaaagtaatcaatactccaccacaacaattaatgaaaggagattttgattttttttttttttttttcttttttttnntaataactgggggtacggagctcgaatcg

SEQ ID NO: 500999 - DNA, 469 bp, Homo sapiens
  misc_feature (73)..(73): n is a, c, g, or t
  misc_feature (78)..(78): n is a, c, g, or t
cccccatgaggtggttccccttaatcccttaaaatttttaattagatgtgagcaaaacagtttaaaattccangaaanccctaaatatcctttgaagggtcacctgtaccctagtctgtccctcatgcctgcctgataaaagccatatcctgagactgggcaatttacaaaaggaagaggtttaactggacctcagagttcccacgtggctggggaggccctcacaatcatggtggaaggcgaggaggagcaattcacatccttatgtggatggcaacaggcaaagagagagagcttgagcaggggacctcctctttttaaaaaattagatctcataagactcattcactactatgagaacaacgcaggaaagaccagaccccctaattcagtcatctcccaccaggctcctctcaggacatgtggaagttgtcggagttaaaattcaagatgagaaccccatctcaaa

SEQ ID NO: 501000 - DNA, 226 bp, Homo sapiens
  misc_feature (153)..(153): n is a, c, g, or t
  misc_feature (181)..(181): n is a, c, g, or t
  misc_feature (190)..(190): n is a, c, g, or t
  misc_feature (201)..(201): n is a, c, g, or t
  misc_feature (221)..(221): n is a, c, g, or t
tccggtataagctcagggtagtagctatgtgaaacggagaaatatatgaagacagtaccaaggtaggatgaataagattgactgaacaattcttcacatttccactttggattatggaaagattttggatcctattgaaggttctgggtatcntagctgtgatccaccctatgcagacagngaacaccanatggatctcantactattccagcctgttaantggct

SEQ ID NO: 501001 - DNA, 147 bp, Homo sapiens
cccccttctctcctgcctggccttctgtctgcagctcctggatcacccttgggacccaggagtccatagaatccctgctttccagggggtccctctttgccagctgcaccatccgtaccaggttcgcctggggctccggctgtctga

SEQ ID NO: 501002 - DNA, 188 bp, Homo sapiens
tttttttttctctcttgtgctgcatcagtagacagaacttcggtagttttataatgcaacatcctaacccttgtttctggaaaagaactgcatgacttaagttgagaatgtgatacgctcactactcacccccactcagactgtaatctgactcttagctgcagctcgcaggcagcaggctagcagca

SEQ ID NO: 501003 - DNA, 884 bp, Homo sapiens
ataaaatattagcaatctacccatgatcaggggcgtaaccaaaacagaatatataaggagctcatacaatcctatagaaaaaaaaaaatctaataatctgataaaacataacaaaagattggcatagacatttctcaaaagaagatatacaatgggccaacagacttctgaaagggtggctcaacatcattatcagagacttgcaattaaaatttacaatgagatatcatctcaccccagttaaaagggcttaccattttacttttacaaagacagacaattataaatggctggtgagaatgttgacaaacggggaaccctcaaatactctgggtgggactgttagtaccaacccatctatgcagaacagtttgacagtttcctcaaaaaaaactacaacacattaggctactgtaggatccagaaatcccactgtggtatataccccaaaaggaaagaaactcagcaatcaaagagggtatctgcactacatgtcgtggcagtactcttcacaagtagctaatatttgaagccaccctcagtgtcatcaaaagtgcgggattccaaaatcacttccaaacttcagcagcatttaattcccccaaacgtgagccattcgaaacgacataaaacggcatcccattggtatagcgcaacataaaattaattcctgtggagtcacagaagggacaaaacctctatatggaagacggattcagacaaggggccatatccctcgggttccgtcttcgcctaaaagaatgatccggttgtcacacgtgtggcacagcgtttgtggacaccaaggaagaacgggattccattggggtgcaacacgcggctcgacgacacgcacatggggggtgcaaaaacttatctgcgta

SEQ ID NO: 501004 - DNA, 388 bp, Homo sapiens
  misc_feature (126)..(126): n is a, c, g, or t
  misc_feature (252)..(252): n is a, c, g, or t
  misc_feature (283)..(283): n is a, c, g, or t
  misc_feature (315)..(315): n is a, c, g, or t
tgtgaatattgtgtggagttaatattatggaaggtaaggtggatattgcgagaaatgttcttttcttgtggtgtttttggagcttatggattagctttcttagggtttacgtgttgaaatcctaantttaaatatgatgataggaggagatggggcttttgggaggtgatgaggttatgagggtggaatcttcatgaatggttttaatgcctttagaaaagagaccccagagaccttgctcccgctttttantgtgggagaatgcagcaagaagtcagctgtntatgaacaaggaagcaggtcctctccaggcantgaatgtaccagtgccttgatcttggacttcccagcctccagaactatgacaataaattctgttgtttaagct

SEQ ID NO: 501005 - DNA, 268 bp, Homo sapiens
  misc_feature (21)..(21): n is a, c, g, or t
  misc_feature (77)..(77): n is a, c, g, or t
  misc_feature (79)..(79): n is a, c, g, or t
  misc_feature (116)..(116): n is a, c, g, or t
  misc_feature (151)..(151): n is a, c, g, or t
  misc_feature (174)..(174): n is a, c, g, or t
  misc_feature (176)..(176): n is a, c, g, or t
  misc_feature (187)..(187): n is a, c, g, or t
  misc_feature (208)..(208): n is a, c, g, or t
  misc_feature (236)..(236): n is a, c, g, or t
  misc_feature (253)..(253): n is a, c, g, or t
  misc_feature (258)..(258): n is a, c, g, or t
ttagtatgcatattcttaganaagtaggaggcagatgcacctataaactttattcatcttaagagccaacaaatttnanaaaaaaatatggaaaaatttaccacagctgctaaganctgttccattttaaatgcaggtaaagacaaaattnatctttcaatagcaacagccttntnaaataatttantctgcaaaaataaattttatnattgaagtaacttatcaccattgtaagnattaagaaaatgcattnaaganattctcaact

SEQ ID NO: 501006 - DNA, 269 bp, Homo sapiens
ccggggggggggggggggggggggccccgggggcccttttttttttttaccccccccttttaagggggggggtttccgggggcccccccccctccagggccccccccccccccctttttttaaaggggggcccccccttggggggtccgggggggggggccggggtttttttttccccttgccccgggggggggggggggttttggggggggtgggcccccccccctttcgggccccccccccatttacccgtttttttggggggggga

SEQ ID NO: 501007 - DNA, 273 bp, Homo sapiens
atcccctagtctaccaaagttcctagaagggtggataccttcacatagttgttggtgtttgttttgttttgtttttttctccccaaagaaggtagatgacttaaatacagtggggaaggtggaaggaactcatactgtgcattctagcttcagcagactgattgcaagactcaaatttgatgtatgtgctatgctatgatcaggtgaagaccctctcccctgactgggatgaaacctcatttagatgtcttgaattaatacattgtgtgtaaa

SEQ ID NO: 501008 - DNA, 532 bp, Homo sapiens
gagcactgaaggaggagtctcttgcgggtgctggctttcctggtcctcagcagagtctgccggcacaaagaaccgacactttccttggccccgtcctcaagcaaatgtacatcacgtatgtgaggaactgcaagttcacctcgcctggtgccctccccttcatcagtttcatgcagtggaccttgacggagctgctggccctggagccgggtgtggcctaccagcacgccttcctctacatccgccagctcgccatacacctgcgcaacgccatgaccacccgcaagaaggaaacataccagtctgtgtacaactggcagtatgtgcactgcctcttcctgtggtgccgggtcctgagcactgcgggccccagcgaagccctccagcccttggtctacccccttgcccaagtcatcattggctgtatcaagctcatccccactgcccgcttctacccgctgcgaatgcactgcatccgtgccctgacgctgctctcggggagctcgggggccttcatcccggtgctgccttc

SEQ ID NO: 501009 - DNA, 817 bp, Homo sapiens
agcggagtctccacccggactacgccatgtcggggagcgagggtcgggtggccgctgctccggcctccggggtccttgcggagactcatcccttcagcgtcgctgaccccagctcagctcttactgcgggccgctccgcacggctggtccatcctgtcaggtgactatgcggcgcaaacatctccttcagccaataagcatggcgccgactaccgggcgcatcgtgtgcgtgtccttggctgctagtggtggacgtccagtatgactgagggactaccacctaatttctaacatgccctggcagagtgcgaaggctagggagagactcacgatctggttttccggcaggtggcccacgtcattctgggctgagagtcgacaggtaagagactactttgctagtgcgcagtggatacagaatggcttggttacgcaggccagaaagtactgtgcattctggtgcatcgcaatctaaatattcctgaatggctcctgcagactttgggcagaatcatgaatgtcatgaagaacctatttgatgaactgaggtcccatcaaaaccaaacaatttgctcccattgcatagcgtgagtgctaccagagttcgatggacactgagtgtacgagcaggaaattctggtgactggtatcaagggtagtcgaatctgctagctccctatgccacagggtggcgaaaatagcgcttcaaggtggtgctgcaagttcgccaagactggtcttgctcctggagttactcaaaaattgtctccaaagccatggtggttctccgtgattgctgatgtaggcgacagaacct

SEQ ID NO: 501010 - DNA, 379 bp, Homo sapiens
ggggaaggggccctgtgaatttttctaaaggggctatttaacctgggaggagagcgtgttcggctccagcccagcccggtggtccctttccaccctttttccacctgccttggggttttcgggcctttgctttccgacctttttcctttgaaaccctcctccacagatgcagcccatcctcccgggtccctcctagtctgtcctgggtcctctgtccccgggtttcagaggcaacttcccaaagcccaaagcagtttttccccctaggggtgggaggaagcaaaagcctctgtcccttttttgtttgggtataataatttgagatgtttttaatttttttgattgctggaataaagcatgtggaaatgcccccacctta

SEQ ID NO: 501011 - DNA, 152 bp, Homo sapiens
  misc_feature (115)..(115): n is a, c, g, or t
gggcaggagttggaattagttggtccccactgtcccccatgaggttgtgaacccccccccccaacttttcatgttttttaaaggcattttggttttttaaaatctggacagcaanagcaactttttctgtcaaataaaaatgagaaatgcca

SEQ ID NO: 501012 - DNA, 530 bp, Homo sapiens
  misc_feature (36)..(36): n is a, c, g, or t
aatctatgaatctataggctcggtgtgtgtaacacnacaccccctatcgttgtccttcaaatactcagcattaccattggttgaggccaaattcagagctttctcaaatcagatttacaatctccattttcattaacggggaaacatcccgagccactgagtgctgtgctttgtcactgaaggttagatctgaacccagggtgtcaacagctgctctcaactccccacctctgggcactgaggagtatttcccctcattctacctctctaaggctatgcacccctccccacgtcttcagcttggggatggggggagtcataggaaagccccatctccatctggatagggacttcatcagccttaacctggaaatgctgctgcccaagtgactcttggttcgtctccacatacagagcagggtgaggggagggtggtctagttagagggttccagggaagtagctctcctcatgcttttgtagtgtgctaggtgcttactcacacttggccttgaggactggagggctgaa

SEQ ID NO: 501013 - DNA, 1220 bp, Homo sapiens
ggcagcaaggtggcagaggaagtataccagcaagagccagagttagtccctcttggcatatacatctactgaattgtactgatgtcttcctctaatcgcggagagtctcgggtgactaatggctagcgtcgtgagtagtttggagtgtgctgagtgcatccatccaaacctagttgaatcaggagattcgattgtaatcattggcccagcaggacacgacacgacactcgatgtgatatgtggagtcgaatgggtcccgcgtagtattccgcgagcacacgtgagcatgctatgatagatgctgaaaagaaggatttcgggattgctcagaggcgcaggtagatatatgctatcagtagacttgatgacaggggtgtggcatgaagagaggtcatcgtggtgaccgtcagcgcgcagcgtccagacgtcctactgccgttctatgaatacctcgctacgggaagggactctgttggtgcctcgcagagggaccctaggcctactgtgctaggtgacgtggcagcggtggtccaatccagtcgagtacgtaaagcttgggcgggtcccacaaccaagtgccatttgcctgacggtggtggtgatttgagttcgcttgtcgtgcgcataaaggatccactcattgcaagcgacgagatggagaaccttaaaagagttcctcatttggagggcgctctgggatatggatataggtgcgccttgacttgcgctgcccacaccccagtcgagtgagagataaccgccttgggttgaaatcgttaaccttaagctggttctagatcccacttagctgtgattcgcggcgcgatctcgttgtatttggcagtcccatggaacgagaggggcgtcttgctcgcctgggcggcaagtccaaaatggcgttgaatatggacttccaatgtcgatggcgccacgtcgcggggtacacacctcgagaaacagtagggcttgtgagacgcaattgtggagccactttatatggaataaagatcttcgccgttggctcatttgaaggcgcaaatcgaattggatagaccacgtgtgtgggtaagaggggataggtcctaaggaagggaaattgccaagaatttaacgtaggaccccgaaaacaaccaccaccgctattttacttccaattacactccaaggaaccgggggctggaggagaaatccgccgagtgtaagtcccaagtctttgccca

SEQ ID NO: 501014 - DNA, 284 bp, Homo sapiens
gtggaaatgcacagggatgcagcccacgaggggagtgggctgcttctagcaaacactacgggtatgggccctctgacccagcaggcccacttctaggaacctatcccagagagcctcgggcagacacacatgcaaggctctttgatgccgtacggctggatccatgaacgatcagaaatgacccgtatgtccaacaacagggcgccagtccaataagctaggtggcagccatgtgagggagcgccgcgccattaagagattcagaagtcgggcgcagcctcgtg

SEQ ID NO: 501015 - DNA, 345 bp, Homo sapiens
cgaggaacacagctctgggggaaaggtgttatccacctcgctttaaaaaaaagcacatgaaggctgggcaccgaggctcacgcctgtaatcccagcactttgggaggctgaggcgggtggaacacctgaggtcgggagaatgagaccagcctggccaacaaggtgaaaccccatcgctactaaaaatataaaaaattagctgggcatgggggcgcacgcccgtagttccagctactcaggaggctgaggcaggagaaacgcttgaacccgggaggtggaggtagcagtgagctgagaacgcaccattgcactccagcctgggcaacaagagcgaaactctggctc

SEQ ID NO: 501016 - DNA, 332 bp, Homo sapiens
tgtgccaggcacagtggttcacgcctgcaatttcagcattttgggaggctgaggcaggcagatcactcgagtccaggaattcaagaccagcctgggcaacacagtgaaagctcatctctacaaaaaattagctaggcgtggtggtgggagcctttagtcccagctactcgggaggctgatgtgggagggtcacctgagcccaggaggtggaggttgcagtgagtcatgggttcgccactgcgctccagcctcggtgacagagtgagaccctgtctcaaaaagtaaaaccaaaacaaacattttgtattttgcattttttgctcagattatat

SEQ ID NO: 501017 - DNA, 662 bp, Homo sapiens
ccgcggcctgagttgtgctagcatttcccccaggtgaccgttgcagtcgtccaggcccacttctccacgactcaccatgtgcagaccgagaggccgtgatcggacatgcagacctgtcggaagagatgcaaaaggactcggtggagatgctcctacttcaagagcgctgggaacatactaatcatagagaacgtcatgcggctcagtatcaaacgacacgcactttgactacatgaatgtaacaagtccccaccctggccattgcatcgtggcggcacggaacttcggtcaggttatgtgacacatgaaaccaatacacttcatctagttctacctgggccaagtggccattcttctgttcaaatctggttgaaaagcatggactgtgccacacacccagtgatccatccaaaaacaaggactgcatgcctagattccaaataccagagactgagaattttcatgccttgctaagggaccatctcgatgtttgaaccttatgtgtgttttgtacagggcattctcgtgtactagtttgtcgtggttataaacaattagcagaatagcctacattgtgtatgattttctattccatacttctgcccacggttgttttctctcaaaatccattccttttaaaaaataaatctgatgcagatgtg

SEQ ID NO: 501018 - DNA, 133 bp, Homo sapiens
aggatccctcttactccactcacatcttggtcagatgtgaactcttcaatctcttgcactctatgcttgttaagatagtttagcgtgcattagttaacttccaactttacctactctactctgtatgggggat

SEQ ID NO: 501019 - DNA, 286 bp, Homo sapiens
cgactgtctctcacaacaaaaatcaacagttaatctacacagttttagaaaacagtgtacataccttaatttaaaaatattttattgctagaaaacgctaacaatagcggctgggtccagtggctcacgcctgtaatcccagcagtttgggaggtcaaggtgggtggatcacctgaggtcagaagttcgagaccagcctagccaacgtggtgaaacgcgtgtctattaaacatacaaaaaataagccaagtgtggtggcagacgcctataatcccagctactcagg

SEQ ID NO: 501020 - DNA, 144 bp, Homo sapiens
ttgcaggcgacctagaggatcccactacgtcgcatatcacagctgtcagccaaaataaacctttcttctttataaattatccagtctcaagtattctgttatagcaacagaaaatggactaagacaaaattggtactcgagaga

SEQ ID NO: 501021 - DNA, 219 bp, Homo sapiens
agtgctcatcttacgatgatttcaatatcaggccgagcacggtggctcatgcctgtgattctaacatactgggaggccaaggtgggcgatcctttgaggccaggagttctagaccagcctagacaacatggtaaaacaccatctctactaaaaatactaaaattacctgggaatgggggtgcatgcctgtaattcccgctactctggaggctgaggcag

SEQ ID NO: 501022 - DNA, 331 bp, Homo sapiens
ttttttttggatatggagtgtcactctgttgcccaggctggagtgctgtggtacgatttcagctcaatgcaagctctgcctcctgggtttaagcaattctcctgcgtcagctccccagtaggtgggactacgggtgtgcaacacaacatccggctaatttttgtatttttcgtagagacagggtttcacatgttggccaggctggtcttaaactcctgacctcagttgatccacctgcctgggcctcccaaagtgctgggattacaggcataagccactgtgcccagctgccatgtggccgtttttaatggttagttaagagaggtcgacg

SEQ ID NO: 501023 - DNA, 173 bp, Homo sapiens
ctacgaggcagagcagcagcatgccctggcttgtgctccgggcatctaagaccatgcgcagagcaatgcgcttatgcacggttccacttctccacggcagccgctagcagatatcagcagctgcttccggactcggagcaggccctggagcaggcccatcgcgcctctgtact

SEQ ID NO: 501024 - DNA, 309 bp, Homo sapiens
cttttttaaaaaaaaaaaaaaagggccggggggggggggggttcccccttttttccccccccttttgggagcccagggggggggtttcccaggttcggggtttggggcccccctgccccaaatgtttgacccccctttttttttaaaataccaaaatttgcccggggggggggggggggctttttatttccccctttttggggggttgggccggggatttccttttcccccgggggggggggtttccgtgggcccagtttgccccccttttttcccgcctggggccccagggccaaaaatttttttcca

SEQ ID NO: 501025 - DNA, 250 bp, Homo sapiens
agtggacacgacgaacggatttgacgacataggcactcactggttcagacctttgatcaggactggaggaacaaaggtttgtgtattagtccattttcacactgctgagaaagacatacccaagactgggcaatttacaaaagaaaggtttaatgggctcacagttccacatgactgaggaggcctcacacttgtggtggaaggtgacacggactgtctcacatggcagcagaccaagacgacagacaaa

SEQ ID NO: 501026 - DNA, 544 bp, Homo sapiens
gcaatcactctgacacagttacacatgctttctgatctcagtatttaccataataaatctgctcatataattgaggcataccatcctcaaaaacctttttgtaaacaggattggacccagttagaaaaagatgaacgtacttgtttaggaagattgctttgcagaacagacagaggtgctgcacaatgattcctatggaatcattattaattggtaccctaaggggatgtttagcttgaattgcacctctcagtctgcgtgccatggccacactatgttcagatgatctgaacaaaacggtcagatggtagaaatgataagaagtatggcaaaagttcctattatctggaaccgtggcggtatagtggcacctcaacctcaaatgatatggcctgctctagaagcttaacataaggatttgtggaaactattagatgttcttaataagatcaaaatttgggaaagaataaaaaggcatctagaaggacactctacaaacttgtttttggatatggcaaaattaaaagaacaaatatttaaagca

SEQ ID NO: 501027 - DNA, 494 bp, Homo sapiens
cgatcatcgtcaccgcgagcggcgcgacctggatcaggctcgtcggcgtgaatgcgcccttcgaccagtcggcgagacgccgcacttccgggctcaggaaccacacccaccacatgaagccgacatagcgcgccgggctcttgaaatacagccagatgccgaccgcgatggccagcaccgggaacgcgagcgtcagcaccttgccctggtggacggcgatcagcgcggcggtcaacgtccacagcccggcctgtccggcccagtgcttcggctcggcgaaccagcggcggttgcgcgacggggcgcgttcggcggtaatcgtactcatcgatccgctctcaacgcgacgacggacgcgaatccgcgagcggcatcgccacgcctgccgcggccggcgtgcggcgccggcgcagcatgtcgcgcgtgatccgcacgtgctgctcggcgaacgcctgggtggtcaggtcgcggtcgcgcaggcacgcggcggccgc

SEQ ID NO: 501028 - DNA, 747 bp, Homo sapiens
  misc_feature (382)..(382): n is a, c, g, or t
  misc_feature (395)..(395): n is a, c, g, or t
  misc_feature (401)..(401): n is a, c, g, or t
  misc_feature (431)..(431): n is a, c, g, or t
  misc_feature (473)..(473): n is a, c, g, or t
  misc_feature (719)..(719): n is a, c, g, or t
gggtctgcggccgcggctgaggctccagtgccgagcgcaagaaccctgcgcagcccagagcagctgctggaggggaatcgaggcgcggctccggggattcggctcgggccgctggctctgctctgcggggagggagcgggcccgcccgtggggcccgagccctccggatccgccccctccccgggtcccgccccctcggagactcctctggctgctctggggggttcgccgtgggccgggggacccgcgggtccgggcgccatgcgggcactcgctgctgcttgtcggtgctgcggcccgagggccccgtggccagtgggcattctccctgggctttcacccctgagcctgcgtcagcgtcacctgggtggaggagccgtgncggccaggcccgnccccancctggagactctgagctgccgccgcgcggnaacaccaacgcggcgcgccggcccaactcggtgcagcccggnagcgggagcgctgagaagcccggggccggcgaaggcgccggggagaattgggagccgcgcgtcttgccctacgcaccctgcacagcctggcatggcgccaaaaacggcgtcaaggacccgtacatcatgcacggagctgggcatcaggcagaggctgtggtggcggtgctgactctcagacagctgccacgctggcgtgtccgtgaccgcacgctgggcaccggctgaagcgtgtggtgtcctgancgggcgcacgggggcgctggcgccactg

SEQ ID NO: 501029 - DNA, 299 bp, Homo sapiens
  misc_feature (14)..(14): n is a, c, g, or t
  misc_feature (184)..(184): n is a, c, g, or t
  misc_feature (190)..(190): n is a, c, g, or t
  misc_feature (199)..(199): n is a, c, g, or t
attttaaggtctcncgtgatttaaaaccaggccaaaacatcagcctaagggctcatgtcagtatgaggagaaacatttcaaccatgagataaacccccatctgaccagaaacatgccaagcctgaggataacctcccctccagccagagatattccaactctgcaataaaactctccttcacanagaaanattcgcagnctgcggtaggctcccccttcctaaacccttaaatgcccttagtctgtaagagaatgtccctgaccgaaattggccagaagcccctctcaggtttattccc

SEQ ID NO: 501030 - DNA, 135 bp, Homo sapiens
ctaggggatcttattaataaatcagtgccgagagtatgttcagttcgcagtagtagatttattggaataaatattctatggtacatttctcagaaataggcttccaactaaaatacgtttgacccatttttaata

SEQ ID NO: 501031 - DNA, 148 bp, Homo sapiens
cctcatctcccttacgtctcccaagtaactaagactacaggtgtgcgcacacacgctactactttttgttttgctttctttgtaaagacagagccttgatatgttgcccaagctggtcttgaactcctgagctcaggtgatcctcctg

SEQ ID NO: 501032 - DNA, 1546 bp, Homo sapiens
  misc_feature (534)..(534): n is a, c, g, or t
  misc_feature (920)..(920): n is a, c, g, or t
  misc_feature (1251)..(1251): n is a, c, g, or t
tgccgattgttcgagcggttgtgctcctccggtggttagtttgaaattgttgttggctgtatatggtccctccctcggtagagagcgtttcttggtgtggtgagaggatgtgtttttcagcgtcgcgggggaccacaacattgtgtggggggcgttatccacgaagtgtgtgccgacggaggatatgtgggtttgtttccttcttgtcgacacaggcgaaaatttgttgttgtcgctttgtcagtgtggatggcacacacgacccttctttgtgctcttggggtgttgatcacactgcccctctcattagtttgtgcgcccccccgcccccaatcttggggaaaaatcactactgctcttggggcgttttgttcaatgctagggtgcttctacagggggtgggatgtttatgtgcctgtgtggggaaccacaatgttccaccgggggcccccctatatgttatagggtccgcccccccgcggcttaatattgggccccccccctcggtgtatatatctggtggaagattgtggnccaccaacaccaacacggggggcgttacaacacaaatgtttgggccacatacgacccaagagttttttgtcccttgggagagagcttgtagaaaggtgagaaaaaaaggaggttttttgtatattctcgccccccgctttctctggggttatataaaaatataggctctgggagaagaacgatggggcccccccttctaaaaatttctcctttggagaaagtttctttggggtgtagaatattgtcctctgccacaccattgtggtgtttgaaatataatgggggtttcctccttggggcaaaaaggccgcacgacattaggtggtgtgtttgtgagaaagaccttttcctctcccagagaccgttaatcccccacacctttgggngggtctcgccttttgcgctgtgttcctggtgagataattgtgagacacccagacacacagaagtgtgtgcggggttggggggtgtgtctcactctcacagagccccagatggtggcatcccacagagagagagcgtgtctctggggagaccctgggcgcacagaggtctctcccgcacagatctctgccccccagggaaagaccgctctcgagagagagagcgcttaatataggagatatatatgtatctcccccttagatatagcctgccctactctccccacgatctttttaatcacccagatgggtgtggaagaaacgcgtgtctccncagagaactcgttttggtgttgcgcaatatggcggccatattttaagattcttagattagattaaaagagactggtgttaataggataacaccaatagccatccgttaaaacactctcacgagaggaaaaggaggaaatgttttgtggagccacctcttggttttcttttttgcgtgtggcacgttttaaagttatattatgtctttttaaatcacgtaactttttaatgggaagcacacttgagcccaaaatttgtcacaggattttgagacccctttaaaaagtttaatgaga

SEQ ID NO: 501033 - DNA, 838 bp, Homo sapiens
gaagcggcaaatgttaaggattttggaatggctgtgatcttctttagaattattttatttttgtgtcttggttaccatttttgagatatataaggggcaggggagagtgggaggtgtttttttggtgcatcttcaaggaggaagcatggtagagggggaggaggaggcgtttggaagacagagaagtggcggtgggagtaaccattcctttctagctgcatagtctgagccagttcccttcttcaagctttataataataactgtatgggtatgggactgattcatctaatggtgcagagtgaatggtagcttctatattattactagatgcccaaaggagatggcaaaatgatttcacatcaaatgccaattcagggatgagagtggcctaaagcaggctttggaggacaatggcaggctaaatgggaaaagaataccattattattagcaatatgtgtaatgggcataggagtcactgtcgtgtggtatacttatccccagggtagatgcagtggcttttgtacttcacagctcacaaaaacctgtgaaagtgtggtattttacctctgcatgggaatgagaaacgacttcaaggtctccctaaaaggtggttacagaagccattcctggaacaagttcactcggaatggatttgtaaggtcaagaggggcatcctgtggatttagagaccagccccaccttggtacacatggggtctaaggtcttacattatcttgtatgaagagggatactctttgaatttatttgtgggcaggccgggagggttctttggagaaaaaaaaggggggggataaatgggggaaaagtaacatgca

SEQ ID NO: 501034 - DNA, 667 bp, Homo sapiens
ggagctccttccatcacacgcccgtggtaggagctgtataagcgttttcatgcttgctggaggggcccccgtgattcgatgggccgaggccgagactggaatgtggacctgattcccaaattcctcatggctaacggggcagctggtaacagatgctactgtatacagaggtgactcgctaccctggtactatcgacagggtcggtgcgatggtgcagacgtcttgattctacaaaggcgggagcgacacggatcgtacaaaagatgccacgcctagtgatggactgatggtccttcgcttgccgagatctgatgggctagtgttatgagaaagcggcagtcttccgcatagtttcctggatgctgtgtaggcaaactttcgatgagaatgaccccaagacctttgagggcgttgacccccagactaccagtatgcgtgacgtctaccggaagttgtgatctggggccaggatgtcatcgacttgtcactggccatgccctggcgctctatccgcatctgatgactaccgtggaccaggccatgccttgagaccgtgcaaccgtttcaagttgtacagtgagtccctgggccggtatggcaagagcccatatttatacccgctctacggtttgggccgagctgcccagggtttgcagattgagtgcc

SEQ ID NO: 501035 - DNA, 139 bp, Homo sapiens
caccgtcagacgctgaactatgtgacttgtgctttattcagcaaagctcatgtctgaaaattggttcagtgccattttaaatgtgtggttcccattgttgtgggcgtttatttcctccagttgctggcaaacgtctgca

SEQ ID NO: 501036 - DNA, 1318 bp, Homo sapiens
  misc_feature (255)..(255): n is a, c, g, or t
  misc_feature (258)..(258): n is a, c, g, or t
  misc_feature (347)..(347): n is a, c, g, or t
  misc_feature (349)..(349): n is a, c, g, or t
  misc_feature (464)..(464): n is a, c, g, or t
  misc_feature (469)..(469): n is a, c, g, or t
gaacttgagccgaagtacttgggtgaaagcgacgtaattcaggacagaagtagaaggaacagacacacgatcagtagaaagcactccagcggagggtccgatcttgcttgaccatacatagtttacgcatacactagaaagggcgctaggagcccacgaatggcacttaatagtatgtgacaccttgggacgagtggctgtgcgcagacgtagagtatgcactatataggaggtactagcacgcgtgaagctagnctnccaatgctgaggtaacttcgatggcgccttcatccacgtcgtcgagagcgacatggggacaatgggccactatatcaaataggcagagnanacacgaacttgtctagtctgagtttgctttgtgtatgaatttgcactatagttgtacagttgatgctgcaattttcaaggcataaaccataggtagatcaactatccctagcgtntgtgncatcgttgcacaaaggtctaggaaacaagtaagcttgaatatatattttcattactatatgttggtattaactgacataaacattgggctaggtatactacattttgatattacgatcttagtaactccaatatattttaaaatcgatgaatgattcgcaggtggtgcatggcccatacgtaggacacaatttaagtaagcgtgtagagcatagttgtgtgccggtgaacacccgtgtgcatctatacaatatgtgcctacacagacattacgcataaaggacaggcgcaatcatgcgggggtcatagatatcgagggcatatggaagacacaggccttaaacgctctttcggcataattttgagcacgtatatatggtttgcccactgcgtgcgtgggggccactcataggcgtaaggtcacgagaggagcgcgctcggcggtaacaaccacaaatagcacccgaactatcattgaagggcctaccaattcgtttaggaagggcaattttaaacgcaggtttcttgtggaagaggacctttggcagacataaataaactatacaactaggggcaaggaagtccaagagatccacccacgtttattaaatcgggggtcaatttagccaaccttttgggaaccccatgcctaatctattgggggaatgacccccgatcggaacacattataagagttcacgaaagaatatagtccatagaaccaaagggggagatcaagcgtaggcgacacattggggacaacatattgggtgaacatcccctgagaggggaagactatcagccaacggctgggcgagctcaatttaaaaagcgctgaaaaggaacacaa

SEQ ID NO: 501037 - DNA, 229 bp, Homo sapiens
gggctcggtaccctccctgacacggccatcacttctcgacggtatcgctgacacgatactgcttcgcctgccgttgatgacgtaactggccgtcgtgcgcgaaacgcccgcgagacgcgcgatttcatccagtttcacattaaccccttaatgacgctgaaaatagaagtgaaggctgtgctcggattaaccatgacatcccgtgcggttattcaatccagcctctgcg

SEQ ID NO: 501038 - DNA, 105 bp, Homo sapiens
  misc_feature (79)..(79): n is a, c, g, or t
  misc_feature (82)..(82): n is a, c, g, or t
  misc_feature (105)..(105): n is a, c, g, or t
gacaaaacataaaacgttttcagccagagggtcaaatccctgtcgttaacaacagacccagggccataccttcgtattncgntagttggacccagtgtcctagcn

SEQ ID NO: 501039 - DNA, 101 bp, Homo sapiens
tcctattagacatcgagcatttcttcaaagacatctgcccaccttttactgttctccacctgtgcttctctttcttctcgtgtacatatcaagagaagaaa

SEQ ID NO: 501040 - DNA, 213 bp, Homo sapiens
gtatatcagctcggtaccgcgtgggttcttgcagataggaaggagcagacattaatatccatgcaatcatgtgtgtacgctgaaagatacagaggaggtagagctgaagtttcctgcaccaggcaagcctcatgaacttccaacttcaatggtttaatctgatccaaacccatataggagtctgatctcagaaacacagtatactgataattt

SEQ ID NO: 501041 - DNA, 864 bp, Homo sapiens
catcagggccacaacttgcattgatccaagaaaggcatcctccagtatgcccacgaagtctaccctgatctgcagatcaccaatgtggtagaagccaaccaaccagtgaccatccagaactggtgcaagcggggccgcaagcagtgcaagacccatccccactttgtgattccctaccgctgcttagttggtgagtttgtaagtgatgcccttctcgttcctgacaagtgcaaattcttacaccaggagaggatggatgtttgcgaaactcatcttcactggcacaccgtcgccaaagagacatgcagtgagaagagtaccaacttgcatgactacggcatgttgctgccctgcggaattgacaagttccgaggggtagagtttgtgtgttgcccactggctgaagaaagtgacaatgtggattctgctgatgcggaggaggatgactcggatgtctggtggggcggagcagacacagactatgcagatgggagtgaagacaaagtagtagaagtagcagaggaggaagaagtggctgaggtggaagaagaagaagcgatgatgagaggagatgaggatggtgatgaggtagaggaaaggtgggaacctacgaagaagccacagagagaaccacacagaatgggcagcagcagacagacaccacacaagaagatccgtggaacgaggtggttcgacaggtgtgctctgaacaaagacgacgacggggacgtgcgaggcaatgatctccacggtggatactgcagatgtgactgaagggaagtgtgccccatacttttacggcggcatggtggcggcagacggcaacaacttctgacacagaagcactagtgcatggacgggtgc

SEQ ID NO: 501042 - DNA, 1186 bp, Homo sapiens
  misc_feature (109)..(109): n is a, c, g, or t
  misc_feature (361)..(361): n is a, c, g, or t
  misc_feature (367)..(367): n is a, c, g, or t
  misc_feature (578)..(578): n is a, c, g, or t
tgggacaattatgtttaaaatttatttaaaaagttaaaactcaatttggtaaaagggctacccagatcacagctccaccctcagcctttcacaagctattatttatacnaatctttattatcaacaaattatcaccactgtgatatcactggcactgggcaatgtatcacccctttggttcaacacagaaaacatgtgtggttttctcccatataaagaagagggattgtgcctcagaaccaccaaccgtgggtgttctcaagttctcgtggtgtggtgaccatatttctcatataccacatatagccgtgtgtttatagagttataatgtgagaatataacatataaatctctatcaccnctatanagatgtggagccacattataacacaaccatctcgagtgtctctcagagtgtggctttctctgtgagtgtctctatatattataatatacaatatacttttatatttctccttttctcttgtgtggtatgagaaaaaaacacacaaaacagagagagcggcgcggcgcgcgccctctctatagagagataatatctcccctctcgagagagnggcgcccccagagtctatatagcgcgcgatatacccccgagtctattctctgtggtttacacaagggggttggtcctccctatatatgagtgtgaagtgcgcgcatattaatatataagcgcacatgagggcacacgtgtggcgcgcgagcgcgttatatacaacacgcgcgcttgccggtgcacgcgggtgggaaaacacacgcgtgcgcatacgctctgggggaaacctctgtggggaacaaaggggacacctttataatctctgtgtgggggggggtgtgtgcacaatatatctgtgtgagaaccaaacaattatactctataaagaagagaatattttaaaaaagggcctcttaataaggggggcaacacattcttattaaaaaacactttgttctagtaaaacaggggtgtataaaatacaggtgggtctgtttaaaaacaatataaggaggtgagacaatataatttccattgagcagtggctttgtatacaaacaaggttttaggagacaaaaaccggaggaaaaatattagaacattagttgtgaacacaatattatttattaccaggacactcatataattataactataaaataagga

SEQ ID NO: 501043 - DNA, 624 bp, Homo sapiens
gagcggagcgcgggccgcggaacatgcgccgggagcggggcccgggcgggactccggagctggtactgctccccccgcgctccggcgccgggcctcgccgtgcggcctccttcctcccttcctcccgcccggctcggccggaggcggcggcggaggggcgaggcgcggcccctccttcggcggcacctcctccccgggcaggcgcgggcggagccgggcccgcctcagccagccgcggcgggagcatgcgcagctgcggcgccgcgggcagcgagctccgcattcgaacctccctcgcaaaagacagtctccgccccacaatgcaccgcggacgggcagcctttgaaaaagcggcgcggctcgtccaagatggcggagctcgacccagttgcctgacgagagctcttcagccaaaaagcccttgtcagtttacacccgaagggaacgcttatctaacacgtggcacactgacgcagtacagttctttacagaaaacacctgttttggaacggcaggactacaagctctgctgtggaaatgccttttcagaaatttcaaaacgaaagtcgacttttatctgatgcaacatgataggcaactcaattaccaggtcacctaaacgac

SEQ ID NO: 501044 - DNA, 1335 bp, Homo sapiens
ggtgtaatgggatggagctaaaggacaaggaatgctgggggctgtgggaaccaggaatgcagataccctttgaaggagcattcctgtaaaagaagctgaaaatgtagacctatgtgaagtgcgtctgatattctaaatatagagtagagcggtgaggagaagagaaagagatttaggacgtagaggggctatatattattcccacgattgatatgagttgatcttagtcgctgtatgcaagtatgataaggagaagtaaacgatgtcagcttatctggtccgaaaccgaagagaaagataacttacataaagaatatctcaatctatttatgaattttaggggatgtaggctgaacgatggtaatatatcagctgacggatctaatagactactttgaggctggaacgctgggaggggcaccatgtgcaccctgcccaccctgtacggcccgagcagacgcaaccttaaaggcccccccgcaaacgtgcacaccccacgtccacaatcatacacaaccgtccatctatccttaccccttcaccaacccctcacacccccccctacgcacacgcggcgaccgacgtcaccgtcaaccctgtaccgccgaacgtccttcaccttctaccgtacccatctcactggcagacgcgacacgctagcggcaggagcaccacgaccacgactatggaatttggccaacaaacagcacgacagccgcgcagggaccagcgctctggctcccgcgtgcaccgcaacttgtagtgaaactcagactgacgtacccttctggaccacaccaacccgcacacacacctgctcgcatccaccgtcgccctacacttccatctcgctgccctccttccccacacgccccacccccacccatgcacgccctctgccctgccgcccacccctagtcatccccagacatcacgctccacagtctgtatccacccaacctgtctcgggctgtgtaatgctaacacaatccgcacgtccttcccggcttcagggagtccctcaaccacctcggccctcttcccccgcgtcctcccccccatctcctctccgtcgcctccaccgcctgccctccgccacctccctgtcgccccgccacgcctccctctccccgcttcccccgccctcccgctcccctccgctccgtgatcttctcccttccctcccccgcctctcttcgcagcctgctcctgcgtgtccccttctcctctctctgctctctgcctgtcctccgggggtcttctcccgtctggtcggcgtcgggcgtggctgcgctccgtcctcgtctcctgccctcgttcgctcgcgcgtctggg

SEQ ID NO: 501045 - DNA, 197 bp, Homo sapiens
ctgccgctgatgctgctggtcgttctacaggatccccctcctccacgatcaccgtctgtgtgccagtgtccctgggtctgcctggtctagggctacttccccgaaccggtcacggtttcgtggcactcaggcgcccgtgactcatgctggcgttctcatccttccctgtctgtccctatctggtccttcatgactct

SEQ ID NO: 501046 - DNA, 275 bp, Homo sapiens
  misc_feature (5)..(5): n is a, c, g, or t
  misc_feature (22)..(22): n is a, c, g, or t
  misc_feature (84)..(84): n is a, c, g, or t
  misc_feature (180)..(180): n is a, c, g, or t
  misc_feature (188)..(188): n is a, c, g, or t
atctntacaaaaaatacaaaanttagctgggtgtggtggtgggtacctataatccctgctacttgggaggctaaggttcaagantcgattgaaccggggaggcagaggttgcagtgagctgaggtcgtgccaccgcactccagcctgggtgacaggcagagtgagactctgactcaaaantaaataantaaataaataaataaataaataaataataaataaaaaataaaggctgatggcgctacatgtttacatgtcagtaaccatgtgggaaa

SEQ ID NO: 501047 - DNA, 177 bp, Homo sapiens
gagcgggcgtttactctgttttttttattttattttttggggatatatggacagatctagtttttaaatggctctggattgactgtggacatttggagtaaaaacactttacgttattcattttttcatatggagtttcacacgttgcccatgcggcagtgcaatggtgcaattttg

SEQ ID NO: 501048 - DNA, 713 bp, Homo sapiens
  misc_feature (245)..(245): n is a, c, g, or t
ccgtccatggacgtgtgctctccccactgatatcgtgagtattcctggaggagggggattctagtctaggcaataatagtcaatagcctgctatattcaatgctcctattctaacagatattggtgaagttagttcacccccaatttgccgccccaaataactgtcagcaccgtttgctggtcccgcgaattcatctagtttatcgagaggtgagattgctttgagtctatcgtggtacatggcnagcaagctcgtctcgtcgcaattccccatcagattcggcattgtaggtggtggagtcatactgctctggggccaagtgttgtcattgtgcgggaaatactatgttgtacttgggaagcgaccgaagatgttgttgctacacatactgagaataccgtggacgaccagtatggcgctacgatcaaacgtggaaaccatctactccatagcacatcgattagccgtgctatactttgtccctagatcctttttgggctgtgccatcagttgttataagtcaagacagttgtgattcctggattcgtaaaagtggttgcttccgttactttgacgtgagagctaaccctggaaaacgtgtgcctgttgcgctataatccgaaaggattaaggggatttgaaaaagtgctaacaaggaaaagagttaaaaggtggcctgattattggggtacccgtttagggcctttgaggc

SEQ ID NO: 501049 - DNA, 190 bp, Homo sapiens
agccagattcggccgaggcagagcgagccgagctgcaacccgcgtggaaaggccgcctcgggcgccccatcccgctcgacggaggtaggtgagcagcgtgcggaagaaggctcagcgcaggggcgcagaccgcctggccaatatgcccgcattatacctttagggggcgggggagggagcgtcaatttca

SEQ ID NO: 501050 - DNA, 131 bp, Homo sapiens
  misc_feature (79)..(79): n is a, c, g, or t
  misc_feature (93)..(93): n is a, c, g, or t
gtagttgggttgagagggcccaccaaccaaggcccagccaatttttggtatttaaatataagaagagggggttacaccnactcttgtggccanggctgtggtcttcagaactctcctgtgaccttcatgtg

SEQ ID NO: 501051 - DNA, 1225 bp, Homo sapiens
tgaaaaatatagggtgtgatttcgtgtgttgtttgttattgtgttccctgcgcgtggtggggtgtgtctctctcgttcctctactgttttggtaattatacgtttcgggccctgatttttagtgtatctttgcattgtggcgcctgtatggggcccgcgctgtagagtgtattatctgtggctggattgattcatgcgattcgcgttccgttgtcttcttttatttttcccgaccgtttcccttgttcagggcgtatgcgtccctgatgttactatccgggaggtggtgcgcctttagcgtaccgtgtgtgttcctgcgcatacgtccgttgtatacccctttacgtcatccgaggcgttttggtgaacctggccatgtgccctcccaagggcggtgcgcttccttggtccacccggtaccaggcaagacactctggtgcccggcattgcctaatcggactgatgcgtgcgttcattcgagtttattcggatctgagctttgtaccagaaatatcgtcggtgagggggctccaatggttcgtgaactctttgaaatggccacgaaccctcaacagcctgccggtatcttgctttgtactgaaaattgatgctattaggaggggctcgttttcgatgattggtgctgcgaagtgtgaccaatgatatgtgcacgatgaacaatcgttgcaaactgatcaaatcagcttgatgtgttttgatcctcgaggcaaataattaaagtagctgatggccactaaccagaccatgataactttggatccatgcactgatgaggcccagggagatttggatagaaaaacttgaactttacgcttgcccgatctatgacgggtcggacccatcatatttacagattcaccgctcgttcaatgacgtgttgaaagagatatcagatttgaactgatcagcacgactgtgtccaaactagcactgctgctgagattagaagcgtctgcacagagcctgcgctatgtttgccatcagagcacgcgcgataataacttgctaccgagaaggatttcttggaacgctgtaaataaggtcattaagtctgtactgcccaaattctacgtgctactgcctcgttacatgacatacgactgtaccctgaaggctttcaagtgaaaaccttaaatttggaatccttaccttatatagagcttgtaactaaccagtcatactagtgggttttctgctgctgtcc

SEQ ID NO: 501052 - DNA, 392 bp, Homo sapiens
  misc_feature (62)..(62): n is a, c, g, or t
  misc_feature (318)..(318): n is a, c, g, or t
tgccagtaaaattgattatcgcgtctgaaccactggtgacgaggccaccgcctgcgcggaangaaatatggctatctgcaccgatagtggttgtaccaccacgaacttcgacgccattggcgcggctccagttacatcaacagtgagtgcattcgcgctaacctggccaaagctccagaggccgtgagcattatcgccattggttttaatggtactgtttgttccgagatcgacaacagagtttttctgtacgtttatccccatggcgctgtagccctgaacatccgattgtcaggtctgtagccgtaaaacgcgcanacccattgggcgttattgccgttgagaccaccgatataaacacctgtacttccatcggtcgtgattttacttcg

SEQ ID NO: 501053 - DNA, 159 bp, Homo sapiens
ctcttttacggtgaaaataaattaaccgtttatgcaagaatttatctcccacgtaacgtttttgagatagacacctatgaacaattgcgagagctagatggtaaatctagccatcttgatacagatatcatttctttaattagtaaagaaatgggtgtt

SEQ ID NO: 501054 - DNA, 103 bp, Homo sapiens
ttttcctgtgccactgaaagggggaaaaaactgccaattaacctgtaaaatgccaacatacatgggatgcatccaaatataagatagtaatatgtaagacaga

SEQ ID NO: 501055 - DNA, 386 bp, Homo sapiens
  misc_feature (94)..(94): n is a, c, g, or t
accttcagcccctccttgccttgggtgtgcccttttttgccaaggaaaaacacaagccccaggaaaaaatcaaaaccgtcatgggtaggccacnccgtccttttccctccccaagtgtttttttcctgacccagggttcaggcaggccttgtggtttcaggactccaaagacttccatgtttaactcagaaggggcaggtgttaaaaatgggccccaggactggagccccctccggagaccaaactccccatccctcagtcctccccaacaggggattagggatgcagccccctgtaggtcctttttgcttacccctcctgtggaccccttgccctttggctggccctttccaaagcccaaaaagtaaaaatgttttggtttttta

SEQ ID NO: 501056 - DNA, 378 bp, Homo sapiens
  misc_feature (325)..(325): n is a, c, g, or t
gacgccctaactcctagtacctcagaatgtgactgtatttggagagagggtctttaaagggataagattaaatgaggacaggccagacatggtggcttacacctgtaatcccagcacgttgggaggccgaggctagcggatcacgagatcaggagtttgagactagtctggccaacatggtgaagccccgtctctgctaagaaatacaaaagtgagctgggcatggtggcacatgcctgtagtcccaggtactcaggaggctgaggcgggagagtcgcttgaacccaggaggcggaagttgaagtgagcactccagcctgggcgncagagcgagactctgtctcaaaagtcgacgcggccggaatttagtagtagtag

SEQ ID NO: 501057 - DNA, 259 bp, Homo sapiens
  misc_feature (7)..(7): n is a, c, g, or t
  misc_feature (183)..(183): n is a, c, g, or t
ggtagtngggattataggcacccgcaaccatgcctggctaatttttgtatttttagtagagacggggtttcaccatgttggccaggctggtcttgaactcctgtccttgtgatctacccgcctcagcctcccaaagtgctgggattacaggtgtgagccactgcacccagtcaaaaatttttnagtgttagatttgcaacaacattttttttttttaatgcatgtgcatcagtaacttttatgtagacagttttcaaat

SEQ ID NO: 501058 - DNA, 490 bp, Homo sapiens
  misc_feature (275)..(275): n is a, c, g, or t
  misc_feature (281)..(281): n is a, c, g, or t
tgcactccaacctgggctacagagcctatctcaaaaaaaaaaaaaaaaaaaaaagggccgggtgcaacggctgtaatctcagcactttgggaggccaaggtgggcaggtcacttgaggtcaggaattcaaaaccagcctggtcaacacaatgaaaccccgtctccactaaaaatacaaaaaattaccggggcgtggtgatgcatgcctgtaatcccagctacgcgggaggctgaggcaggataatcgcttgaaccaggggggtggaggttgcatngagccnaaatcgcaccactgcactccaggctgggtgacagagcaagactctgtcttaaacacacacacccaaaaaaaaaaaactcttggggattccagcatgcagtcccatttaaaaaccactctttggggggatttctcttatggttgactccatagatacatatataaggaatacctatgatttggcccattttaccacatagttgactgcga

SEQ ID NO: 501059 - DNA, 364 bp, Homo sapiens
aggacgggggccttcttttcccattttatgaaaaaaatgaaaatctttttggaaaaatggctgtggaatattcacctttatatataaagaaaaacccttaagtgctggatagggaaggataaaataatggtttttttatttgggaaagattttaaaggattatataattattttggggggtttattttaagcaaggccctttaacccttgagctttgttatttttcccccccggagggggagggaggttttttgaatggtttttatagccaatatttttttttaaatgaaaaacccggggggggggagccaagcctctttttttttttgatcctgtttgggaataaaatttgtccctttgggga

SEQ ID NO: 501060 - DNA, 343 bp, Homo sapiens
ggaaataggctataaagtgctaagtacacagctatattctcatatgtttaggagaaatggctcacagaatttggctcgcctcgatttaatttactttatatttcagtgatagatgagtcttccaccttcactttcctgaggtgagatattaacacttaccctagactctgcaggtttgaggaactcttatgaccaggtacatacactagatttccttggctaacccaaatctttggccaaaccacaactctcagatttcatagacagtggtgcacaaaccttcgttagatgaagtattcatgaagtctagtcacccagattggtctcttctgtgctctggccc

SEQ ID NO: 501061 - DNA, 785 bp, Homo sapiens
atgacccaccaatcacatgcctatcatatagtaaaacccagcccatgacccctaacaggggaccctctcagccctcctaatgacctccggcctagccatgtgatttcacttccactccataatcgctcctcattactaggcctactagaccaacacagctaatccatataccaatgatggtcgcgatgtaacacgagaaagctacataccaaggtccaccacacacctacctgtccaaacaatggccttcgatacgggagtacatcgctattgtgattacctcgagaaacttttagttctgtcgcaggagtttatctgagccctttgtaccactccagcctaggctcctacccgcacagttatggcaggcggctcgtgagccaccctaagcagggaactcatgctcctgcttatcatccaccttagaaagtccacactcgcgtaataggacgatcgcgtaatcatcgtcgctactcaggagttctcagttcaactctggagactgcctccagtatgtgcgtagagatgcaccatagcaggcccgcaaagcacgataattgaatgtccaatggcgacgggggttttaatgtaacaggttctctacctaggagttcctccatatattttggcccatcacgtaaccaaggcacatctagaatgcttacttttcagaaaggttctcccacctgtcaacgctactccctccacggaaacgggacctttgttattggtgctttccaagccaattaatttattgggacgtccagcaagggtcgttcccacaa

SEQ ID NO: 501062 - DNA, 453 bp, Homo sapiens
  misc_feature (7)..(7): n is a, c, g, or t
cgaggangtctcatggttggctaccagtgtggtttggtcttccgggcatgctgtgtcaagaggggggagatcggagatttggatgtcgcgcgcctccaagaaacggataagatcattgaggttgaggaggaacaagaggacccatatctgaatgaccgctgccgaggaggcgggccctgcaagcagcagtgccgagacacgggtgacgaggaggtctgctcctgcttcgtgggctaccagctgctgtctgatggcgtctcctgtgaagatgtcaatgaatgcatcacgggcagccacagctgccggcttggagaatcctgcatcaacacagtgggctctttccgctgccagcgggacagcagctgcgggactggctatgagctcacagaggacaatagctgcaaagatattgacgagtgtgagagtggattcataactgcctccccgatttat

SEQ ID NO: 501063 - DNA, 403 bp, Homo sapiens
agtgacgcgggccgtcagagcaaggaagacatagaaggtatggtccaggaagctgagaagtacaaagcagaagatgagaagcagagggacgaaggtgtcatcccagcaattcacttgcagtcctatgccattcaacatgcaacagcgaactgattgaagcatgcagcaacacttccacaggcacagcattaacgcatgcaggcactaacacagcaagcatgctggcacaagatgtaatgcaaattatcgagctggacttgataagcaatccgcattgctgcagaaggcaagaatttgcaccatcaaccagaaagcgctgaagaaagttagccacccccatcatcaccaagctgtaccagagtgcaggaggcatgccaggaggaatgcccgggggataggaggt

SEQ ID NO: 501064 - DNA, 205 bp, Homo sapiens
cacatattatggagtagatgtgattttttccaatacacatatgtgaagtgattaaatcagctaattaacatattaatcccctcaaatacataccacttctttgtggagagaatatttaaaatccttttttttttttttttggttaggaattctggtggttttgccagggcggaagtgcagggttgtattcaggttcctgtgcacc

SEQ ID NO: 501065 - DNA, 366 bp, Homo sapiens
ggtcggtacccgggcagtacggatgtggtggtatcaactgcagtcagttactcaggaggctgaggtaggaggattgctggggcttgggagccggaggccacagtgaaccaagattgtgccactgcacttcggcctgggtgacagagcgaggtcttgtctcaaaaagaaatagtaactatgggccgggcgcggtgggaggccgaggcgggcggatcaggaggtcaggagatcgagaccatcctggctaacacggtgaaaccctgtctgtactaaaaaaatacaaaatattagctgggcctggtggcgggcgcctgtagtcccagctacttgggaggctgaagcaggagaatggcgtgaacccgggag

SEQ ID NO: 501066 - DNA, 227 bp, Homo sapiens
  misc_feature (194)..(195): n is a, c, g, or t
  misc_feature (213)..(213): n is a, c, g, or t
agcagatgccaaaaaagaaggccatatagcagcacatcccgagcatgataaaagggcggcgaccaaagcgatcggataataatcctgcaaaaagcaagacacttaatcgaccaatgcccagcgatgagataactatcgagacacccgcggcattagtctgccaagtgtctccagcgaggccatattcaggctcnncaaaggacgccatacatncacagacctggaga

SEQ ID NO: 501067 - DNA, 371 bp, Homo sapiens
tcctgaatcccagatttgattcagaggcctcgtgaccacggcccgtcccgacgagcaggcatattgacctatttgtccagcttctaccatgctttttcaggagcgcagacggtgaacatgccgccacccggatctgtacggtgctggctgtcaaccaagcagaacgagcaccttggtggaggactacgagaagctggccagcgacctcctggagtggatccggcgcaccatccccttgctggaggcccgtgtgcccaaaagactatccaggagatgcagcagaagctggaggacttccgcgactaccggcgtgtgcaaaagcggccccaggtgcaggagaagtgccagctggagatcaacttcaacacgct

SEQ ID NO: 501068 - DNA, 279 bp, Homo sapiens
gtctacccacaggctaatatcttgtttatttttttttaaattacaactctataattaatttttattttttcagaaagaaccatttcttctcatcttggtcaaaaggtttttataatggcaactcgttaaggtttaacacattcctataggcatataatctcattttggtggtggttggtggagacggagtctcgctctggtcgtccagcctgggagtgcagtgggcgcatatctcagctcactggcaacctctggcctgctggagttcaaagaaattct

SEQ ID NO: 501069 - DNA, 404 bp, Homo sapiens
  misc_feature (1)..(1): n is a, c, g, or t
nttaccataccctcttcatggatgggggaactcagatccagggacatgaggccccagcctccctgaagcctttgcattttggatgagtttcctgaaacaactatggaatgataactagcgaaatccattcacagttcttatgggccagactatgccacaagtgacttcctgtaccagctccaacactgcaaaggatcgtgtcctcagccattgcgaggagatccaaagagaagcccccagcataagaaccgtggaaccttgggcgagttaaagaccttggcaagctcttggaccagcccccacccgtgggtgggccaacaaacgaacactaaactatgcattggtgccccaaggaccatgctcatggacatgatgccacacgaaggaggctcacaggtggttac

SEQ ID NO: 501070 - DNA, 341 bp, Homo sapiens
ttacaacagctagaaaaaggaacaaagtaccgataaatgctacagcacaaatgaaccttgaaaacatggtaagtgaacgagagccagaaacaaaaggccacatgtacaattgcatttatatgaaatgtccagattaggcaaattcatagagatataaggtaggtcagtggtttcccagggctggggagaagagggaatggcaagtgactgcaaatgggtacatgatttcctttgggggtgataaaaatgttctagaattagatagtggttatggctgcacaaattcgtgtatatgctaaaaactgctgaactgtataccaccaccaagtacagggcaaacc

SEQ ID NO: 501071 - DNA, 378 bp, Homo sapiens
taccgtgtgtacaatgttgtcatgtagttcctagtatgagactttctgcatgggggccagctgtaacagatgtactaagtggtggaaaaaatatttgtcatcattaccgcttgtccagtttgttatagtcgccatccacataagccagttcttttgcatggaggatagcgagtatcagtttccagtactttgcgtgcatcattatgagttacagttgcatgttactgctgctctttctccatttttggtaccgtgcttacaccaaaggtcagaggttggccaaaactgtgaaaaatggcactggcaaaaacaaagatcattgaagcccgacatacgtctatgatcgaaactgatacattgtcttccttgagaatcgag

SEQ ID NO: 501072 - DNA, 987 bp, Homo sapiens
agcggaatgagaaggctgggacagagtgaatgggaaatgactgtgaggagtgcggaggggggctgcgaggtttcaagatggcggtagctgagtgtggttgagcgagagacccagttgacggcctttacgaagtgaaacgagagccgggacatcgcccccctaaccgcttctcgtagtccatgggagcacagcgagaacgtgttaatctatatttttaatgacacaaagtaaaaccatacgaaattagtacaaacaattgggacaggagaaatcgtacggagtcattcgcaaccaaatgaagatggaaaaaatatgacatggacaacccaacaggaggccaaaggcccgcgaaaaggggacaaggcccggcaaagacgaagaaattacaacagaaggaacagtaaaagaacgagcgacactgattgggtctcaagaaggctgaaagcgagtaagcgtactgcaaggtgaataacgcgagaggcgaggaataaattcgggtaggacgcagttgggcagccaacagttgggcaaatgaacaaattgagcgcgatagaaacagccgcacgatgccaaacaacgacacaaccaaaatagcaaatggcgtaacagatggagacggaggaaagaggcaacacaagaaccgcgatagaaacaggaagtgggagatggagaaaacgaaggtggaacccggtcaattcaagggagcactcgatatatgaaaagaaagcgaaagaaagaaacgaagaaagtagatcgctaagaacaaaggaacgatacgaaggcaagacagggcgtaacacaagagcagggacagaaatgaaaacgcagagacagaaagaggagacacaaagtagaaagacaaacacaaataggatggagagagagtgagaaaaaagacaagaggaaagcaggagaatgagtgagaaagcggggacgaaaagaaaaggggagaaaaaaggagaagaaaggcggtggcagcacaagtga

SEQ ID NO: 501073 - DNA, 229 bp, Homo sapiens
  misc_feature (10)..(11): n is a, c, g, or t
  misc_feature (25)..(25): n is a, c, g, or t
  misc_feature (132)..(132): n is a, c, g, or t
atggacagtnncggtcggggttcangcggtcttggattcctgcactgcagttcgtcgatcatctgctggcgcatcatgaacttctgcaccttgccggtcacggtcatcggcatctcctggacgaagcggatntagcgcggcacgactgcaggctcggggctcgaggcagatgcgctcatgtcttgtctcccggatgtgcttgtggtgtggacagggcaatccgccggag

SEQ ID NO: 501074 - DNA, 486 bp, Homo sapiens
ctcccttcaccctggcaaccactagtatgcttcccatctctgtggatttgcctattctggacacttcatatagatgggaccatacaacatgggcctttatgtgccttctttcatttagcatgtttctaaggctcatctatgttgtaccatataacaatttcatccattctttatggctgaataataatccattgtattgatataccacattttatccattaattagttgatgaacacaagttttttccacttttcggctattatgaatatgctgttacgaacagcatatttgtgtggacatgcttgtaactgtcttgggtatatatctaggagtagaattgctgagtcatataataacactatgttctaactttttaaagaactttcgagctgatttccacagtctgcatcattttacattcctgccagcactgtgtgatggttccaatttctctataccctcattaactgttgtcatagctgttt

SEQ ID NO: 501075 - DNA, 282 bp, Homo sapiens
cttcagttgtcggaggaaagccaactgtctccgtgattgcccctgggaactgaatgtctcggtataaaacacgattgtacatttgttcagttctgagcatgcggacgaagaaactcgccactagtgagttgggaggcgagacatgtttacagcaatgctgccttgttatcctttactccactgagatgtctgggtggagagaaacataaatctggcttacatgcatcgttccagttcccgtagttacctttccctttgaacttcattatgacatagattcta

SEQ ID NO: 501076 - DNA, 646 bp, Homo sapiens
agaaactgtattgtgacgaggtgtgctctcatgaacacgagacttgcgctaaacacagtgcttgagaactcctccttgaaaccttgtcacgatacacacataccactggaattaaacttacgaggacttcttggaccctacaaacccgctgctctaaagggtgtgtcaacggaagggaccgcaagtggagcctgtattttcctaaggacttgtgatttgctctttaagaaatctgggcctgagaacaccagagacctgaaagtactctgtgaataggactctgagctgaagataggcttcatgcaatggactgcctaaataaccgctgagtctggacatgcattgagctctctcaatggccgtgtagagtgctatacccgtgaatattaaggaggtgaccaaatcaccgtgaggaggtagatatggatgctctgcatcttacgggactatatgcaccagcgccagatagcaccatgaacttcttctgagctctgatatgagagaccacatttctgagtaattgcctcctcacattattaatgagaataagaattatattgaacggtctaacaatgacacttatatcacatgcgttctctgtggtgttctataagtgatatgtgaaatcaatagagccctttacggt

SEQ ID NO: 501077 - DNA, 130 bp, Homo sapiens
ccgggtgcctgctgctcattagagggtcataagaataacactctgagtaattgattgttcactatcctgtacgatgtatcttgatgtgatctgtcatgctcgggtaaagataacttaacattgttctgtt

SEQ ID NO: 501078 - DNA, 411 bp, Homo sapiens
  misc_feature (411)..(411): n is a, c, g, or t
catgattaaactatataatagaatgtatagcatctggtatacgctagaacggcggactacggtcaatagtgattggacatttaagaataactaacagagtataatcggattgtttctaatacaaaggataaatgcttaagggaaggaatactccattttccatgatgtggttattacgcattgcataagtgtagcataatagttcatgtactgcatagatatatacacctggctgggcgaggtgactcacacctgtaatcccagcactttgtgaggccacggcaggtggatcacttgaggtcaggagtttgggaccagcctgaccaacatggaggcctgtgtctactaatgatacaagattagctgggcgtggtgtcgcatgcctatagagacagttactcacgagctggn

SEQ ID NO: 501079 - DNA, 297 bp, Homo sapiens
gtgatctagaggatcctttctctgatcgctcaaccgactgctgtcacttcacgttccagtttttaaatcctgagtcaagccaaaaaaaaaaaaaaaaaaaaaaaaaaaaaaaaaaaaattaaggcttgccattttaatttggttttttggcgaaattaaggttttggccaggaaggggtgaaaggaaataagttcatagtcggcttaaaagatttgggggggaacgagggaggggcgggactcgtaatactcttgttggttgatccacttctgcgggaagggtggccagcgagcccg

SEQ ID NO: 501080 - DNA, 131 bp, Homo sapiens
agataacctgagctcttgtgagcactccgcagccaggtctggcccagcgactgtgcccagccagatctgcctacaagctgcatgtgctgcagaagagtgccgacgcagtgagatccagagcctgagagctg

SEQ ID NO: 501081 - DNA, 1109 bp, Homo sapiens
cccaaacagagggggtttatatcccgacacagggggtcaaatacccccgttctgggtggaccaatatatgcaggtgacccccgggagttttgctggggtgcggctactcacatggggggagcataaaataatctttgttgcccccccgccatatttttgtcaggaaggtgcacagagattggggcctacaaagttgtttttctgccctcgttgacacctttataaacacgggtaaacgggccccctttggattcgctgacaagaattttgtgggtcgcaccagttgtgttatggcccacgctggcaacgtatggcacacgggggcaacgggtttggaaaggggtggggagcttttttaaatccccccgaatcgccccaacggtttaacccgtctcacacaagtttctttatgacacatatcctccccgttcgaatttatccccacacactattgggacttgacaactaaatttatcccacggtttctttaacccgtatcacaccccccttatacacgtataccccacttttctttaaactttaaccctatttttaatacttattgcctaaaactatgtttatcgcgccaatttcactatataatctcacaacttttaaaactctccagtcacccacgcgaccccctcatctattctatttctttgcacaccgtgaaaccacacgctatacacactgagcttaaacacccccttataattccaagtccacaccctctcttctctcctatgggagggcctgcgcacccggcgtataaccggcttttttgtccccacaacatgggccacttatatcgaaagagaattcaccacacaaagaccacaataagcctcattcatatccccacacacactcaatatagccacaccacatcacacccctccttaaaccctttaactttctacctaacgcctaaatttaccttcaccctcaatcaccacctaactccccaatattctaacacaacgtataaaaatataaatgacacacgtttgaaacataccacaaacccacccccacttcctccccacactcatcgcccttaccacgctactcctacctatctccccttttatactaataatcttata

SEQ ID NO: 501082 - DNA, 348 bp, Homo sapiens
tgtatgctacattggagagtgtacatgcattaccaaagctcacctctccagcttactctgcaagtcagtatggatgataatcagtcattctgtcttttgtaacttcccatattaaacgagtttatcaagtctggtcattctccttcataaagcactcacaaatccatcactcatctccagcctcttctgccctggccttaattctgcctctcaaaatttctcacttagactcctgcagtgccccccaacttgtatctgtgcctcccccacaacttcccttgatccatctttcatgccagtgtcttcaatctgctggtcacaatccattggcaagtcacaaaattaatg

SEQ ID NO: 501083 - DNA, 100 bp, Homo sapiens
gaagcttgacgagcttcacttccagttcttggtccgcagcagggcagcccgcactgcttccgccgccacatacgggtcacgtcaacaatacggaatccta

SEQ ID NO: 501084 - DNA, 157 bp, Homo sapiens
gctgatctgactaaggatgcaccactcagctccgagtctggatacaggcatagcaccggccagcgctcctcttgtacacagacactactacatgagtttgcgtccctttcctcttccttatgtgcgagcacacccgaggcatactcttatcccttcc

SEQ ID NO: 501085 - DNA, 135 bp, Homo sapiens
gaaaaattaaggatgtgtcaaacaagcaggatgcaggtgatgggtattaacatcagatatagagaccagaggataaatgtaaatactgcgtgccgcaaaacgatccatgtaagtcaataaacaatgctttttaga

SEQ ID NO: 501086 - DNA, 323 bp, Homo sapiens
taaatgggtcaccccatcaactatcccccatggccaaagcctgactctggcccccagaaaacacaggcattcagctggacagcctcgccttcacgctgctgctgtcctcatgggggacaggcctcaggtggcaatgcacaattcattagttacgggcagttgtgacagttcccaaggagtgtattcccccgccccccgcccagtgaaaacagccctacccaggggtgggaaccttggggctctgacccgaagtttagaaaacgctggaaggacagcatccctgtctgcaagggcaggagcaaagttgccaggctatgacgaaa

SEQ ID NO: 501087 - DNA, 203 bp, Homo sapiens
tacctggacccgaacaggacagcagaagatgctgcaataactatgcccgagggcactacaccattggctgaggcaggagaatcacttgaaccggggaggtggaggttgtattgagccgaaattgtgccattgcagttcatcctgggcaacaagagcaaaattccgtctcagaaaaaaaataatgcctttgtctcctatggttg

SEQ ID NO: 501088 - DNA, 163 bp, Homo sapiens
acccactccaccttactaccagacaaccttagccaaccatttacccaataaagtataggccgatagaattgaaacctggcgcattagatataggtaccgcaagggaaagatggaaaattattacccaggcattattatagcaaggcctacccctatacctctt

SEQ ID NO: 501089 - DNA, 448 bp, Homo sapiens
atctgcctgcttcggctcccgaagtgctgggattaaagacatgagccaccacgcccagcctgtgtgtggcttctttcacttagaataatgtttccaaggttcatctgtgttgtagcatgtatctgtatcttatttatttttattgctgaatagtattccattgtatggataaactgcattttgtttattcattgattagttgttgatggacatttgggttgtttccactttttagctatatttacattactgcttgtgttttcatttctcttggttatatactaggagcagaattgctgggtcatatggtacttctacttttaacctttgaggacctgccagactgttttctaaagtggttttaccattttacattctcatcagcatatgtgagggttctggatttctctacatcctcaccagtatttgtctttgatcatagtcatcc

SEQ ID NO: 501090 - DNA, 207 bp, Homo sapiens
cgttaagtggccgaggagtaagaatgttggttgtggcggggactttgccccggggaagggactaaggagccagaggccaggagggaaacacacagagccagggcgttgaatggccacggaggcgttgaatggccacggaggcgttgaatggcccggaggcgttgaatggcccgggccattcaacgcctccgccattcaacgcctccg

SEQ ID NO: 501091 - DNA, 513 bp, Homo sapiens
cgggggtggcaggactgcttgactcccggagtctgagagcagatctgggcaaccgtgagagcctgtctacgaaacatcccggcatcaggtgtggtggcatgcacctgtagtcctagctactcaacaggctgaggcagaaggatcccacaacatacaaagagtccatctttaacaccaacaacacacacacacttttcaaaaaaagatgacctccaccttttttttgagtaactagccgaataacaaattgccatttacctaagatgacggaagactggaagggaccggcactatagggaacgtaagactccggacgtcggttaacgctgtagttggagatgccttttaagacatcaagtgggaaagttaggtagctgttatataaaagttggctgttaaagggagagaagttggagttggtgttgttagaccaataggtataatttaagaaatgagactaatgagatcttgtgagtgtagatagagaaaaaggttgaagcatgctctcacgcg

SEQ ID NO: 501092 - DNA, 491 bp, Homo sapiens
ctatatgatctaaggatccccgggcagtacggatatgcggcagtgtgctgggcaatggtgggcagagggcaaggtggtgagtgggagaggtgagctcagagagtgagataggagccaatacgcagtggctcgcaggaccttcaagtgtcctctgagttggggtgggatccctgtggagtgctctgagcaggggtgggagagggtctgagttggttctggcagggtcctctggctgcgtgtgaggaacaggcagtgtggcccagtactgaagctggggccccaggcatggaggtgactgcaatggcgcatggcaggatgatggggctagaccaggcagcatccaggagggtggggggacaggaaggagcctgaagctctggggacaagttgagaaagacttcagatgggcctagggccctatttctaggactcccattctcaagagttctatgaacctcttttctgacacaatgagccacatccgtactggc

SEQ ID NO: 501093 - DNA, 433 bp, Homo sapiens
aagaaatacagatacacacaaatatacatgcatatacacacatacacacacaatgggggtgtgagatagagacagaaaaacagtaagtatagcaaaatgttaacattaggtgattctgagaaaagggtatacagaacttcattttattctaaacttcccataagtttgaaattatttcaaaagaaaaagtttcttaaaaattatatcagttaagtgtaaaggggttttatgtctacttaaaagtgtcgtgggatcccttgcatttctgatggtgaatgctatgctgatttaggataggagcagatcaaaacaactttttgctccagataatggttattttgttgaagatctgatgatttcttttctgtttactgctggccaacacaatttccttgatttccctttcactgtgtaaaataaaccatacaccaca

SEQ ID NO: 501094 - DNA, 529 bp, Homo sapiens
  misc_feature (371)..(371): n is a, c, g, or t
acatagcccatgaatgcagttgctatgactgcaaatagtaggatgatcccaatgtttcaggtttctaggaaagtgtaggatccatagtatagtcctcgtcccacatggaggaataggcagatgaaaaatattgaggcgccgttggcgtgtaggtatcggattagtcagccgtagtttacgtctcggcagatgtgggtgactgatgagaatgctgttatggtatcagacgtgtagtgtattgctaggaataagcctgtgaggatttgtacctcggccgcgaccacgctaccctatagtgagtagaagagctgatagggctcgagcggcagcccgggcaggtacaattgcaagggcggcgataatgaatgggnggatgaagtggaatgcgaagaagcgtgttagggttgctttgtctactgagaagcctcctcagattcattcgactagggtagtcccaatgtaagggatagctgataataggtttgtaattactgtagctcctcagaatgatatttgtcctcatgggagt

SEQ ID NO: 501095 - DNA, 851 bp, Homo sapiens
ctttctggtgttagatcgagcaaccctctaaaagcagtttagagtggtaaaaaaaaaaaaaaaaacacaccaaacgctcgcagccacaaaggggatgaaatttcttcgggacatcctccgggcttctcccggttacggatcgtctgctccctagaagtccttcgtgaagctttttattcctaagaggagaaaatcagtcaccgggcgaaatcgttgctgattacaggagctggggcatggaatggggagactggactggcctatgaattggctaaacttaaaagcaagctgggtctctggggatataaataagcatggactgggatggaaacagttgccaaatgcaaggggactggggtgccaagggttcataccttggtgggtagactggcagcaaccgagaagatatttacagctctgcaaagaaggtgaaggcagaacatgggagatgttagtatttgagtaaataatggctggtgtagtctatacatcagattggttggctacacaagatcctcagatggaaaagactttggaagttaaggtactggcacatttcgggcactacaaagggcatttcttcctgcaatgacgaagaatacccagtggccatatggtcacctggggcttcgcgcagctgggacatgtctcggtccccttcttactggcttacggttcaagcaggttggctgctgtgggatttcataaacctttggacagatgaactggctgccttacaaataactgggagtcacaaccaaccatgggtcgggtgtcctaatttccgtaaaccacggcgcttcatccagaattccaaggtacaagtttggggaccccattcgtggaacccg

SEQ ID NO: 501096 - DNA, 1120 bp, Homo sapiens
  misc_feature (346)..(347): n is a, c, g, or t
tgggaagagagaaaaacagagggttcgattcgtgccctatttagtgttttctactcgggaacaaacgtgggtgtggtggtggtggtggtgtgttttcgtgtggtgtgggttttttaaagaaagtgggaagaagaaaaaaaatttctcgcgcccctttcctcgatctcgcttcccccctttgcggttctcttttcgaacgggttccccccttccctttttgtgggtccgtggagtgggtttgtggttgtgggctacgaagttccaaatttccgtggttgggtaactcctgggatgcgaccgcggtttccgtggtttcacaggataagagtctcctcgttatacgccnncaaaaaaaaaaacaacacaaacaaaaaaactgcggggaggcaatcctattggcgcggggaggcgcggaaaacaagagggaacagaggaaagggggcccagtggggccccatagagcgtgtgtattctcgtgtataccccgcaatttattttgtgtgtgtcaccaaagggtggggacaacactcggcggggggatcccccatattagggggggggagggcgatatatatatttgccgaataacgccccggtttaaccggcgggtttatgtacctttcggcgagaacacagttggagagaccaacaactaacaagagcacgtgcgaagcgcaacagccggcgacagagagatacacacgggaggcaatacaaaaaacggagagcacagaaccaaatacaggaggccagagagacacaagccgaaaggacacgtacagcccgcaaaattaataatttacaatacattattacacatctaaaataatttattattatattatatttaatcttaaattcaaaaatttaatcgaataaatcattcatattaaaaaaataagaaatttgatactttctttctttttaactataaatgtaataaaattattagtaaaatatagaaatgaataaacatatataccatttcacaaaacaaaaaaaaaataataagtgtttaaaataacaacaagataaaataaacatacacacaatcaatttttctttgcttatagacaaaaagactttacaactaatatattaatctacattccattatatt

SEQ ID NO: 501097 - DNA, 84 bp, Homo sapiens
cccagccccaaccagacctctctgtacttctgtgccagcagttgggacgttagcgggagggccacagatacgcagtattttggc

SEQ ID NO: 501098 - DNA, 166 bp, Homo sapiens
ctcggatcgagcgagagggactagctggttagtgccaagatagaatcttagttcaactcttatactttgcccagcagaaccactctaaatccccttggtgaatttgacgtgttacgtccagaagaggaacagcgtcttaaggacacataggaataataaccttgta

SEQ ID NO: 501099 - DNA, 1039 bp, Homo sapiens
gggaacatggggcggtatgctgcagacgtgcagagcgtgtgggcggcgtggagagccgccagagctctatcagaggggttgggtacctccagcgactgtccagaaggtgaagcagtgtacgcgccggtgtgcgaaacgcagcgctactccgccgtgctggatgctgtgatcgccaggcgccggactcctccgatgcgagtagaacgaagctgcggtcgtaccgtggtcaaggtgctacgtgtatgagtagtagtccggagaagaggtgctgttccgagcgagtgtgctggggggtcgatggaacggtctctagtggagtgacggcaccaggcgaggctcaacgggatgagtctggctcggttcacggtacatactggggcctgtgagccggagttgaggacctgttgggcaggtgggactctcaggcctggccccagcactcgccgatggtaggcatctggactaagtggcggtgtggcacggcgtctctacacgaggcgaggacgtgatagactagtacgatggacttatttgcaagagatcatggttgctcctaatcagggtcggggggtcgaagccctcgaatgactttaactacgcctctacatacagggaaggcatgtcctctctggatccgcttagatgccggagatgctggtgtgtcgccgccccatgaaagatctgaggttgaaacacccaatgtacgggggccgggccactcatactggagggacagggccaggtgactgcaaacgatgagagtggaacctcccgaagagggtcccagtgtcatgcgactgcgtgtgccggcccaggcaacaccacactcaggtggtgggcttggtgaagaccccgctctcggcctgactgggagcaggggtggatgctggcccggatggccggaagggacctgaaggaggggagaggtcgggagccccagggcaagtcatagcccacaccggggcaccggggcggaccagaaagggagcggaacacagaggatgcggaaaacacgcaaccgaggcaccacaagaggggg

SEQ ID NO: 501100 - DNA, 244 bp, Homo sapiens
atctagaggatccctcggattcaacatcagcgcacgcccatctctgtggctttctgagaggcgcagaggggtgggagagtgggagcaactgtgctcagtgaggcaggtgcctcttctccacgagtccaggtaccctctgcccgagcgtgacagctcacctttggcccaggacatccatccgctgtacgctcctggtcatctgtagctcctcctcctcagtgaacctgggacagcagggctccag

SEQ ID NO: 501101 - DNA, 173 bp, Homo sapiens
  misc_feature (96)..(96): n is a, c, g, or t
cggcagatcgccttttattctcagtgctgaggtacttagtgaattcattaatgtgagttgaaaaaggggaatagtgggagggggagattggaatanatgtggtctgatcgggagggatggtgtaaaaactgcgctccttggcatcattctgtgaaatacttgagggtcctgtg

SEQ ID NO: 501102 - DNA, 227 bp, Homo sapiens
atggctgttccagaggatccccgaagagccagttcatacaagaaagctagagaagaatatagcgtgggcagtgggtggcagtgcctcgtaggtcccagactacttgggatgctgaggtgggagaatctcttgagcccaggaagcagaggttagggtgagttgagatcacatcactacactccagcctaggcaacagagcaagaccctgtctcaaaaaaaagaaaaaa

SEQ ID NO: 501103 - DNA, 405 bp, Homo sapiens
  misc_feature (405)..(405): n is a, c, g, or t
tctggacctgccctaggcagaagggagcccagttccccgaagggtgagtctcagtacaggcagcagtcaccacaatctgactgaagagccttgagctttaagggaacattggtggcagcctggcagcattccccatggtcctgaggtggcagtgaccatgaggtaaggctcctctgcgtttggtaatggaagcgaagactgagaaggactgtgtcttgtggttcaagttccagctcagccacaatacaatagaataccaggtagacttctaaggttctttactctagtccctgactcccaggcatccatgtgcagaagaatgaaactagacccctatctctcaccaaatacaaaaatcaaatcaaaatggattgacttgaatctgacctctgactatttactacn

SEQ ID NO: 501104 - DNA, 785 bp, Homo sapiens
  misc_feature (6)..(6): n is a, c, g, or t
  misc_feature (211)..(211): n is a, c, g, or t
  misc_feature (253)..(253): n is a, c, g, or t
  misc_feature (333)..(333): n is a, c, g, or t
  misc_feature (337)..(337): n is a, c, g, or t
  misc_feature (361)..(361): n is a, c, g, or t
  misc_feature (376)..(376): n is a, c, g, or t
  misc_feature (388)..(388): n is a, c, g, or t
  misc_feature (390)..(390): n is a, c, g, or t
  misc_feature (416)..(416): n is a, c, g, or t
  misc_feature (432)..(432): n is a, c, g, or t
  misc_feature (436)..(436): n is a, c, g, or t
  misc_feature (439)..(439): n is a, c, g, or t
  misc_feature (450)..(450): n is a, c, g, or t
  misc_feature (466)..(466): n is a, c, g, or t
  misc_feature (559)..(559): n is a, c, g, or t
  misc_feature (578)..(578): n is a, c, g, or t
  misc_feature (592)..(592): n is a, c, g, or t
  misc_feature (630)..(630): n is a, c, g, or t
  misc_feature (643)..(643): n is a, c, g, or t
  misc_feature (646)..(646): n is a, c, g, or t
  misc_feature (670)..(670): n is a, c, g, or t
  misc_feature (772)..(772): n is a, c, g, or t
cgctanggagctacattttaggttaatagagcctggggcctagggccgctggggtcagggccctcagtgacgttggcagtcgtctggaacgagcccttggaacccaattctgtggagggcagggcaggggtgccgctcgcacgggggcggccagcagagggacagggtgtaaacacgcagactacacatcaatggcacggagtcacttggnaggggggctgggggggggcttgctggtcaggatctgacagtnttaaatagtttttctctaaaaagttttctagatttgcagtttttttttttttctttactttcatttttttaaaaagctangatnatgagcaggtggactgtggtttcnaggaatggtggcgtntcagcgcttctngngctttatcctttggggcctccgagcngctggggttgggggantggncangaggctccctntaaacatttggacttnggctggggcaggggctggtgttgggcaaagctgggggtccaggctggagtaagcagtggctccctccagtcgcagtcttgtgtgagactcatnatgtgcccccctccccttntcacagaacaagantatggttaaaaaccagaacagatgcccagaagggggtncatggccattgcnagnatctcagacaagggcaggcttcanacagggaggcctgtggcaacccctcccctacgtctggagctgaggggacagggggagctgagaacaaagagaggaaagaggagaaaagcggcgggggaacangcggggagcgtga

SEQ ID NO: 501105 - DNA, 675 bp, Homo sapiens
  misc_feature (143)..(143): n is a, c, g, or t
  misc_feature (223)..(223): n is a, c, g, or t
  misc_feature (227)..(227): n is a, c, g, or t
  misc_feature (251)..(251): n is a, c, g, or t
  misc_feature (266)..(266): n is a, c, g, or t
  misc_feature (278)..(278): n is a, c, g, or t
  misc_feature (280)..(280): n is a, c, g, or t
  misc_feature (306)..(306): n is a, c, g, or t
  misc_feature (322)..(322): n is a, c, g, or t
  misc_feature (326)..(326): n is a, c, g, or t
  misc_feature (329)..(329): n is a, c, g, or t
  misc_feature (340)..(340): n is a, c, g, or t
  misc_feature (356)..(356): n is a, c, g, or t
  misc_feature (449)..(449): n is a, c, g, or t
  misc_feature (468)..(468): n is a, c, g, or t
  misc_feature (482)..(482): n is a, c, g, or t
  misc_feature (520)..(520): n is a, c, g, or t
  misc_feature (533)..(533): n is a, c, g, or t
  misc_feature (536)..(536): n is a, c, g, or t
  misc_feature (560)..(560): n is a, c, g, or t
  misc_feature (662)..(662): n is a, c, g, or t
tacttcttgcacacttcgcagaaagccacgtcctttggctgagtcacgtgaacggtcagtgcaggcagccgctgtgccagagcagaggtgcagcatgctgcacaccagctgggggggggcttgctggtcaggatctgacagtnttaaatagtttttctctaaaaagttttctagatttgcagtttttttttttttctttactttcatttttttaaaaagctangatnatgagcaggtggactgtggtttcnaggaatggtggcgtntcagcgcttctngngctttatcctttggggcctccgagcngctggggttgggggantggncangaggctccctntaaacatttggacttnggctggggcaggggctggtgttgggcaaagctgggggtccaggctggagtaagcagtggctccctccagtcgcagtcttgtgtgagactcatnatgtgcccccctccccttntcacagaacaagantatggttaaaaaccagaacagatgcccagaagggggtncatggccattgcnagnatctcagacaagggcaggcttcanacagggaggcctgtggcaacccctcccctacgtctggagctgaggggacagggggagctgagaacaaagagaggaaagaggagaaaagcggcgggggaacangcggggagcgtga

SEQ ID NO: 501106 - DNA, 243 bp, Homo sapiens
gcaagcttcacgcgtagaactccatggtgggggctatctagtagaagtggttctatgcccaggtcatagctgccttcatccttcttcttcatacggtacatgagcagtaggattaggaagacggcacagaggatgcccacgatgccacccacaatcagagctgccaggacctccgctctctcacagatgctgctgcactgacacagtgctggacactagacattctgctgatccgcttaagga

SEQ ID NO: 501107 - DNA, 194 bp, Homo sapiens
  misc_feature (190)..(190): n is a, c, g, or t
ctgttgaatctctgctatatgtgtgattctaaatctttaataggtctctgagaactgctttctgaatctgggtgtctttgtcagggcatatacatttagaatagtaatgtcttcctggtgaattgagcctttttcaattatgcaatgccttcgttcttcttgatccttgtgctggttaacaggaccagcntttg

SEQ ID NO: 501108 - DNA, 353 bp, Homo sapiens
gggaataggctccaaagcactaggtgcagtgctgtagtcttagctgtacatgaacgatggctcactggatcaggctcgccctgattcaatttactggatctgtcactaccccagacgctgtcaggtggacgaactgtcacgaccagctgcgtacactagactaccgtgactagcccacatctaacatagtcagggccgcgtccatcacagacgcctggacctgatgacatatactgaccagacgcacaatctcgagaagccacagtcggggttgacacacgctcgtatgatgatgcactcgtcggagttagacgccaccagtgctctgtagatctagtctaactggcgcttgg

SEQ ID NO: 501109 - DNA, 199 bp, Homo sapiens
  misc_feature (87)..(87): n is a, c, g, or t
  misc_feature (154)..(155): n is a, c, g, or t
ttaagctccaacaagacacagaataaacttgactttcagtcaagggcagagagaggctcttccatgtcctggagttgaatgagttcnaagattggcataaagggaaaaagaaagccttacgggtatgacggggaacaagctttggagtttatcnnaacagtcacacctagtttctcttagcaacacggacacccctttt

SEQ ID NO: 501110 - DNA, 132 bp, Homo sapiens
tgttgggtatggagacaaaaaatgggatcccttactggatcgtgacaaactcttgtgtggtccccagtggggactgcactgggtacttcctcatcgagcgcggaacgaacatgtgtggcctggctgcctgcg

SEQ ID NO: 501111 - DNA, 492 bp, Homo sapiens
  misc_feature (15)..(15): n is a, c, g, or t
  misc_feature (26)..(26): n is a, c, g, or t
  misc_feature (41)..(41): n is a, c, g, or t
  misc_feature (43)..(44): n is a, c, g, or t
  misc_feature (49)..(49): n is a, c, g, or t
  misc_feature (79)..(79): n is a, c, g, or t
  misc_feature (86)..(86): n is a, c, g, or t
  misc_feature (88)..(88): n is a, c, g, or t
  misc_feature (95)..(96): n is a, c, g, or t
  misc_feature (102)..(102): n is a, c, g, or t
  misc_feature (110)..(111): n is a, c, g, or t
  misc_feature (139)..(139): n is a, c, g, or t
  misc_feature (147)..(147): n is a, c, g, or t
  misc_feature (158)..(158): n is a, c, g, or t
  misc_feature (169)..(169): n is a, c, g, or t
  misc_feature (191)..(191): n is a, c, g, or t
  misc_feature (209)..(209): n is a, c, g, or t
  misc_feature (225)..(226): n is a, c, g, or t
  misc_feature (231)..(231): n is a, c, g, or t
  misc_feature (237)..(237): n is a, c, g, or t
  misc_feature (241)..(241): n is a, c, g, or t
  misc_feature (246)..(246): n is a, c, g, or t
  misc_feature (250)..(250): n is a, c, g, or t
  misc_feature (257)..(257): n is a, c, g, or t
  misc_feature (259)..(259): n is a, c, g, or t
  misc_feature (272)..(272): n is a, c, g, or t
  misc_feature (294)..(294): n is a, c, g, or t
  misc_feature (298)..(298): n is a, c, g, or t
  misc_feature (309)..(309): n is a, c, g, or t
  misc_feature (325)..(325): n is a, c, g, or t
  misc_feature (346)..(346): n is a, c, g, or t
  misc_feature (349)..(349): n is a, c, g, or t
  misc_feature (355)..(355): n is a, c, g, or t
  misc_feature (358)..(358): n is a, c, g, or t
  misc_feature (394)..(394): n is a, c, g, or t
  misc_feature (396)..(396): n is a, c, g, or t
  misc_feature (400)..(400): n is a, c, g, or t
  misc_feature (403)..(403): n is a, c, g, or t
  misc_feature (407)..(407): n is a, c, g, or t
  misc_feature (473)..(473): n is a, c, g, or t
tgtaaaaaaaaaaantaaatttgaantaaaaaaaaaaaaancnnaagtntccaaaaaaaattgaaagtaacccaggggnttaaagngngtccaannaaaaantttggttnngggaatgggtatcaaaaaaaaaaaaggnaggagttnggaggaaaaangggggcaaaanaggggtttttttaaaacctttntaaaaaaaaaaaaagtanaaaattttgagttgcnnaaaanctgttnaaanggggnttcnaaaaaantntactgtaaacccnaagggaaagggaggaaaaaaangtgnaaaaaaaaggnggaaatttcttgaggnaggggaagaggagggaggttnaanattttnaangccctaagccccaatccctaaaaaaaaaaggaaaanangtanaantttnaataaattccctgtaaaaaaaaaggggcaaaaacccgcggggaaaaaaatttaaaaaaataaagcnggtaaatccggagttctat

SEQ ID NO: 501112 - DNA, 529 bp, Homo sapiens
agtacaagggggaacgttatattagttaaaaaaattacaatggataggactgagtataattagaagcaagcccatttttctagagccatagaaataaaaatattaataatgtgagccagcttgttgagttccagtctcaactgattattgtagttctccttctcaagggagtgttaagtcttattggaagactagaggacattacatagataatattttctccaggtcacacgttaaggatccatgattataggattgaaatattgtgcactattcaatctctagtcacccagtatgatctctgtagtcgacatggcttttctattttcagagaataaacatttcatctccactgagtatccaaggaatacaaaggataataaggctatatagcaaattaaataagtaaagaaaatgtaaatttttatgttagcaaagattgcaaaaagtatgtttagaatagattcaaaataagaccattacatactgtgtagaaaataactttttcttctgggtcaaacaataaatg

SEQ ID NO: 501113 - DNA, 374 bp, Homo sapiens
ctccgatttgtaagcacaatatcactctctttcacaagctgtgttctgatcacgttccacactttttatagcactctgtgtcaaatttccagagaccctgcctataggccaaacacttttcccaccaaagccaaagtgtgtggccctgtgaaattccatgtctcttaaaaggtccttgtgccggtgtcccatatagatagagaagcccgaggttcacagccagagagaagccaggtttcccgcgccaattttggtatgagtgtccatcgccactctctctcttcatgtgtgctctgtgtgtcctccttatatctgagtgcctctgtgctctgctctgtgtgcctagagcttcccgcgtgccgtactcgtacagc

SEQ ID NO: 501114 - DNA, 542 bp, Homo sapiens
  misc_feature (108)..(108): n is a, c, g, or t
aaaaaataaagatgttttaaaatgtttacttggaaaaggaaccatacaacaattttggaaaataagagcaaggcctggcttgtccgcaccagctccaacaactaaaantatgtggccctgtggcagaaggtggcaaagacaccactgcctggacaagtaacccggaaaccaacctgtgcataaatgtggggatttaatttatgttgagcatggcatttcagagagtgagaaacagacctttcaataagtggtattggggtgattggctgtatagttagaagacggtagagtgcgggtccgtctctcaaaaaaatgcacacacaaaaaacattaaacccaaaccatgtgagcactgagagagtatatgagagaatatttgggatctggaagtgataagtgcctttcgtaggccaaacacaaaatccttgaaggaaaagcctgacaaatctaactacagagtttttaaacatttctgtgcaatcaaagacacaaaaatgttaaacgacagcctgggcaacagagccagaccttgactcaaaaaa

SEQ ID NO: 501115 - DNA, 512 bp, Homo sapiens
agatatataagggaaactgattatctattaaaaactgactacttttcagtttagactgcatagttcattaaaacacagaggatgcctctgagtaactggtattgactcttgaagtctactacgagaagaagtctggactcggctgataaactgagaaaccaggtctggagtttcccagcactatgctccaattttcgaggaccgcgcttctatttgccagaactgtgaactcctcttttccaggactgagtgctgccatttcccagtactgtgtgctcgcataggtcacgtctgtatgcccattttccagtactgggctcctatcactcacggcgggctatcatttcttagtgctgtactgccacttctgagtactgtgctagcactttcgaggactgggctgccatgaaccaatactgagctcccattatgcagagctgtgagccctcatttgccagtactgagctcccatatgctagtactgtgctcccaattgcatcgtgcagcatttc

SEQ ID NO: 501116 - DNA, 1095 bp, Homo sapiens
agcgggaaggagaatccgcgcgcaccaggaaaagcaggtgccggtgcctgtccccgggggccgccatggccggtatccggagtcggaactgccagcgccgttgcgacttcccaaggtaagaacgcgtgcacgcaaggagccgcctggaaccataggacacaagtggaacacgaagacacgtgattccagggaatgcctacagttattcctcccatggacttactcgatgaacaagaaagagcttatagtaggctgaagacatgtgggagcagccgaagttcagtccttgctctccagctaggcaaggttactctcgaactataaccaagggttccccttcccctgagcccccatcttacaatagctgaggtggaagcggcttatcacccgagagttccgcaccccgctaaataaagctggaaagaggagcggacagtaaccctcatcacagagatggttgcacatcaattcccgggatttcaaggctcagtctgcatgattacgaaaacctctcaggcaacacagtgtgatgtgataatacgtcatgagtttccagcagagatgagtaccctagaaatcaacgtttgtggggctgctcatcgggcccagatgggaaacatcccttgaaagaaacataggagaacggacgttgcaatggccaacggatttattgacccgggggaacgaggtgtctgtgaaaagaaagcgggaaggttgggccgcaaagatggccagatgttgtcctggagaacgatgaaccacttcatgccctggttactggccagatcccatggacgaaccgtcaaaacaggcagttggaacagatacgaaaacattcttgaagcagggtatcggaagaacttccaagatggacccagaaatggatctacgcgaaagattgccagcgttcgcgaagttgggctctccttaaaagttggaccctttcggggagcaaacgatatacaggatgcttatagaaccttgggcggaggctagagaaaccgcgagcatttccacacccacaattgtgtgcccacttgtgttattggtttggcccgatggttcagcccgtaagtcccacagctcggtgtgccc

SEQ ID NO: 501117 - DNA, 499 bp, Homo sapiens
taaagatggggtgtaggtgacttcatcaagaaatggatattacttgtcaccacctttctcctcatgtagcacaccactaggggtggctaacttactgaatgcagactcagtggacacaggtttcaatagggtccaaatgaataaaccacacacacacacacacacacacacacacacatttatataatatatatggaccccacgtgacctgcctaagagaggcattggctcaatatatatcatatttgtgccccgtgattgcgcgagtgggttagatatccttttcagtatgtgacagtggataaacagtgttccgtgcacacagatgtcttggctattcgtgggtctcttgacgtgctatatgtctgtctccgtgcaatagtagggacgctagcccagggagaaacatctcagcctattacatagtattcacaacacgcactatatatgctctcttacgtagtgttgtgtgagccgtgtgatattctagaacacaaaa

SEQ ID NO: 501118 - DNA, 242 bp, Homo sapiens
  misc_feature (220)..(220): n is a, c, g, or t
taaaacactgacacaactaggctcttaactgacatagaagaaccatggactatagacttaaggaaaacggaacgactgactttcactaaacatgactgacacttggtaacgacactcaaccatactcaacaaacctactacttactaacgcccctctactaacacactgacacacacttacctacaaccacgccaactactctggacaaacggccaacgnctactactcacgactcgtaacg

SEQ ID NO: 501119 - DNA, 261 bp, Homo sapiens
tcctctaaaaggaaacccccatcccattaagcagatactctccattccttccttcctccagcccccagcaaccaccaatttgctttctgtctctatggatttatctattcttgctattttatataaatcgaattgtatgagaccttttgtgtctggcttctttcacttagtacaagtttttgagatttatttacatagtagcatgtatcaacacttcatttttatggccaaataaaattgtattatgtgtttatagcccca

SEQ ID NO: 501120 - DNA, 393 bp, Homo sapiens
ctatattcatcgatgtgacaatcttcggtattcacatatttggtagatttccaaacgtgttttcagagtccatttaaggtagatattcattgagggctatgttagatctgaaaagattactgaaattgccaacttctaataaactaggccaaggttaggttagttcccatgaacacagtgaggttaggttagttaccatgaacacatctgtacatagagaaaggtggtttctagatatagaatctaggattgctttctaccacagttcctgttgctctaggaagagaagaacagagttgattaatgtggaataaacagccatccctatttgtgagccacgattaggccctcccatattacaaggctggcatacaaaaaactatccttaggggt

SEQ ID NO: 501121 - DNA, 853 bp, Homo sapiens
tgcgcgacaaatctggtgtgtgtgtgtgcccccacccattggagagttgccctcttccttcgtggcagagagtaggggtcttccatacccgggtgtttgttccccctacgaggagggggcggcatccacacaagagaggagggtcgtgtcagacatgtttctcctccgcgccccccctcccaaccgagctggtgggcgggaattttactacaccacgagaaaccacgtcggtgcgggtgtattattctgctcgatacgggtccgtttctggtaggacaacacttcttttcccgggctctccgtctgctggtccgctggggcctcgcctagttgtcgttgcggcgggcggcgctgcctcccggcctacatctcgcccccccgtgtcacttccagataagatgtacccgcctcccctcctacaagtcctgtggtgggcagcggtcatcccagtcccccgccacgccgtgggcttcttggtggtgaggggggcgctcctcactggctatgtcctcccctggcgctcgtctttttttatgtttttctttttctttgttgtcgcccttgcctgaccgataatgagggcgggagggtcggtcgctcggtctctcggtgggcggctgtcatttttgttgttcttatttgcgcgcggcttttcggggagaagggcggcagcgatattcagctcccccccccctcggttggtgccccctccgcgtcttgttgcacctctcccccgcggcttggtgctcacattccgccgcctgttcttttttcttttttagggccccctttttttttttttggcggccccccccccccccccccccctcctttttggacccccttttcaaga

SEQ ID NO: 501122 - DNA, 555 bp, Homo sapiens
tgccaccttaatacatttgatgtcttccctagaataccggttatattggtgccaactcgcctttgttgggggcagattgagtgcccgcagcccccgaccctacaggtggatttttttatggaatttttgcccaatttcccccccctaaaggaggctatggaaggaagctctactcccgtaaagaactaagacccgtggttaacatgaagaaaaccttttgtttttgccccctgttttttgaatgggcccccagggtttatgttcttttaaccaccccccgaataaaacatgttcccttttttttgtaaaattgggttgagagggaactaatggggtttccttggaaccgtcctttgtaatttaaataaaaggattattttcccaaaccccggggttttttttgataatttcccgatttagctttttttttgttatattaactgctagcccccaatttttgttttgttaaagggtccccttgcccagaaaaaacatactgtcttgttttttttttttagcatagacttaactgaattaaaatggtgattcccggga

SEQ ID NO: 501123 - DNA, 370 bp, Homo sapiens
acctatggtccatgggcaaatgctggacccaacacaaatggttcccagtatatccgatctgcactgccaagaactgagtggttgtatggcaagcatgtattgtttggcaacgtgaaagaaggcttgaatattgtggaggccatggagcgctttgggtccaggaatggcaagacctaggcaggaagatcaccattgctagactgtggacaactcgaataagttagacttgtgttatatcttaaacagcagatcattccttctgtagctcaggagagcacccctccaccccatatgctcgcagtatcctagaatctttgtgctctcgctgcagttccctttgggttccatgttttccttgttccctcccatg

SEQ ID NO: 501124 - DNA, 445 bp, Homo sapiens
  misc_feature (206)..(206): n is a, c, g, or t
tataaaagaggtaagcggaaggggcctttagcggtttgtttttttaaaatttcaggcacgaggcgggagctggagagctggaccccagagatgccctgagcagccccacctgtcgcctgccggcctagttaccatcacaccccgtggatgtgagcctgcagctgcctgcagcctggccccagtcaccaatcacctgcaaaccagtngatgcatgctgatgtgctcgaagtaacccctaagacaagggcccgtggccagaaccgtaacgcaacctgtccgggaagacggtaccgcaaccggaccaccacttcagatagcgcagccatgcgccgtgaaagtgcacacaaaagacaacgacaagagtagcgagactatactgatggggccgaactatagggactgcagaaatgatgataagtaaggtagattgagtatcaactagacg

SEQ ID NO: 501125 - DNA, 887 bp, Homo sapiens
  misc_feature (53)..(53): n is a, c, g, or t
  misc_feature (62)..(62): n is a, c, g, or t
  misc_feature (78)..(78): n is a, c, g, or t
  misc_feature (80)..(80): n is a, c, g, or t
  misc_feature (102)..(102): n is a, c, g, or t
  misc_feature (120)..(120): n is a, c, g, or t
  misc_feature (138)..(138): n is a, c, g, or t
  misc_feature (142)..(142): n is a, c, g, or t
  misc_feature (149)..(149): n is a, c, g, or t
  misc_feature (155)..(155): n is a, c, g, or t
  misc_feature (170)..(170): n is a, c, g, or t
  misc_feature (181)..(181): n is a, c, g, or t
  misc_feature (190)..(190): n is a, c, g, or t
  misc_feature (237)..(237): n is a, c, g, or t
  misc_feature (239)..(239): n is a, c, g, or t
  misc_feature (242)..(242): n is a, c, g, or t
  misc_feature (253)..(253): n is a, c, g, or t
  misc_feature (300)..(300): n is a, c, g, or t
  misc_feature (317)..(317): n is a, c, g, or t
  misc_feature (356)..(356): n is a, c, g, or t
  misc_feature (422)..(422): n is a, c, g, or t
  misc_feature (450)..(450): n is a, c, g, or t
  misc_feature (562)..(562): n is a, c, g, or t
  misc_feature (588)..(588): n is a, c, g, or t
  misc_feature (591)..(591): n is a, c, g, or t
  misc_feature (665)..(665): n is a, c, g, or t
  misc_feature (667)..(667): n is a, c, g, or t
  misc_feature (683)..(683): n is a, c, g, or t
  misc_feature (735)..(735): n is a, c, g, or t
  misc_feature (778)..(778): n is a, c, g, or t
  misc_feature (781)..(781): n is a, c, g, or t
  misc_feature (851)..(851): n is a, c, g, or t
aatctgggacccactgccccacccacgcaatgtgcgtcccagtcctgggggcnggcggaganagggggggggtgagangngaagagccccgtgcttcctcantgctggggggttggagangcgcagcccccgttctgnggcnctcctcngggcgnctaggaaggagagcngatgaaatctnagagcctgnggcttctccacaccactgccccccaggttggaggggagctaagagangnganaaggggggagnggcaagaaagagatgattgatcgaagaaagatgagaatcaggggtgngggctgaagagagaatnaaagataaaataccagtttaaaaaaaaaaaaaaaaaggnggggggggggtgggggagagtggaggaggggaacaaaacacaaaatccaccccaaatccgaaccancctgggaaaaaatgaaagttctcgagtntcacggggacattatttggcgcggcaagctctgcggcaggagcgctcaggcctcagtccagccctggaggcaggcctctctacagctcgtccttggcctggccggggacatnttcctcctcatcttcctccttgtccnccncatcctcctcatcctcatctttgtcctcatcatcctccttgtcctctgcctcctcctcctctttgcgtttcttntnttcttcctcctccttnagcctctgctcctcgtcctgtttgtccttcatttgtttctctgctgcctttnttacgccccacgtctcgttgccaaactcctcagcgtatgcttnatngttggtgatgaggaagttgtcaaagatggtgccagacttgacctgccagaggtccaggcccagcacgccnaagttatcataggcatagatactgggatcgggagaa

SEQ ID NO: 501126 - DNA, 944 bp, Homo sapiens
taaatattatactagcatataccatctcacttctaggaagtactaggatatcgctcacacctcatatcctaccctactatgccgtagggaggaataatactatcgctgttcattatagcgaactgctcatgaccctcaacacccactccctcttagccaatattagtgcctatgacatactagtcttagccgcctgcgagacgcagcggtgggcctagacccgtactagtctcaatctccaacacgtatggcctagacgtatgtacataaccctaatacctagatccaatgctataaagctaatcgtcccaccagagttatgagttcacataccagctgacagtgactgtccaacaaaagacataatttgagatcaataagccaagccagcgccacaggcataagttattagctatcatcccttcctacatattttgttaaccaaatcaaagaactaaggtctatttatgctgttcgccacaccttttcctccgaccccgctaaataaaaccctcactctcgtaataacctaactagcttgagatcctacaccccgtgcgactaatgcaataggcaaagctcattgcgccaagcttatcacaagtgaaccaagttatcacgaaaaaaatgctagctctctatattaatctcactactaatctccttaaggatcacgatggcacgagcatcatgaccctattcagtgtgcatgatctgctatcggaaacaaccactgtatccccatccttggcgtatcagtcaccccgattgatgcaagccagccagaaggcctgcttggctggggcgatactatcgctaatctaagcctagtgatgctccctttccgtaacgtgggctaatgtgttgcacaaaacctgggttttaacctttaaatcactcctggcagataggaccgggcaaacataatgtgttagcagtaagga

SEQ ID NO: 501127 - DNA, 148 bp, Homo sapiens
tccggttactctagacgactccctgagacgaccgtgttgcatgaaagacgaaccgactttaactttacttttcccctcaaccttgcctgctctctatgccacgcgcgggaatgcctcagcaacagaacaatgtctactggagtcacta

SEQ ID NO: 501128 - DNA, 836 bp, Homo sapiens
ctccacggggtcccgtagccccggcccgcagccggtctcccggcctccgaggctgccggctcctccccctgcgcatcccagtgtcctgactagctggccctgagctctggagcagcccgtgacccacactaagaggctttgaagcccgaataaaaatatagacacaaaacaccagaacaactaacaagtactgatgtacgcagtacccttactctagtccttcgtacctcgcctacgacatacatcgccgcccgcccgccctacagtctttagtgcgtccagccagctggctctcatactcctcatcctcatctcatcacacccactaaacactctctcacctctcgcacacacacagccagacacaaatccaccactacacctatacacacatataatccacgcccgcatcaacactccacactcacgcacacgcatctaaccatcaacacatcacccagcacccaccaacgaccagaaaaaccgaccaacaacacaacacgcgcccagccatccaccccatccgcccaaacgaaagcaacagcgcaggacacaacagcagagatccctaagacgacataatcagcatcatcacacacaaacaacaccacaacaacttgtccctatcaactcgacgcaccactcaccaccaagacaacagccacaagacgaaaccatcaaccgactccagcaaactaccaaccaccgaagaagcagaacagtcacaagcacaacaccgatccactccacaaatactacagtcagtaacagctactcattgctacactcgccaactcgcccaacgcacccaactcacgacacagcaagccagacgg

SEQ ID NO: 501129 - DNA, 584 bp, Homo sapiens
  misc_feature (52)..(52): n is a, c, g, or t
  misc_feature (54)..(54): n is a, c, g, or t
  misc_feature (71)..(71): n is a, c, g, or t
  misc_feature (104)..(104): n is a, c, g, or t
  misc_feature (107)..(107): n is a, c, g, or t
  misc_feature (112)..(112): n is a, c, g, or t
  misc_feature (122)..(122): n is a, c, g, or t
  misc_feature (484)..(484): n is a, c, g, or t
  misc_feature (506)..(506): n is a, c, g, or t
  misc_feature (531)..(531): n is a, c, g, or t
  misc_feature (560)..(560): n is a, c, g, or t
aagatggcggagaacagcggtcggacggcaagagcagcgggacgcagccgcngnagggggcggtgtcccangagcaggtgattgctggcttcaaccgccttcgnaangctcngtgagcgggntgcatccaaagcagctgagttggagatggagttgaatgagcacagcctagtgatcgatacactgaaggaggtagatgaaactcgtaagtgctaccgcatggttggaggagtgctggtggagcgaactgtcaaagaaggtgctgcccgctttggagaacaacaaggaagcaagatacagaagatcattgagacactgacacagcagcttcaggcaaagggaaaagaactaaatgaattcccgggaaaagcacaacattccgtctcatgggaagaagatgagaagccagcagccaaggaaaactcagaaggggctggggctaaggccagctcagctggagttgtttggtctcctagggaccaanggcctttgcattttttttctanccctgacttcccaattctaatttcncctttattgttaattattaattaatttcnccggcaatggtaaaattttttttt

SEQ ID NO: 501130 - DNA, 228 bp, Homo sapiens
  misc_feature (36)..(36): n is a, c, g, or t
  misc_feature (118)..(118): n is a, c, g, or t
gcattatactggcaggacagcctcttctcagcatcnggtctaagctaaagtgcagctcctgagggctccccttcccatcagcccctttccacacccttctctccatttgctccccctntggagacaggatgtcactctgtcactcaggctggagtgcaatggcatgatcatgactcactacagccttgaactcctgggctcaagagacccttctgcctcagcctcctg

SEQ ID NO: 501131 - DNA, 90 bp, Homo sapiens
attcccttaggacttcgtcagaaactccaccctgtgtggaatctccttcctctctctctcttggaggatgcacccgaattcgaattgtga

SEQ ID NO: 501132 - DNA, 203 bp, Homo sapiens
tgtggctatcctgtgctcagcacctggactagtgcatcttgcttgttaaagggaccatatgtgggtggtgcgtagtcttggcaggtgcagtcgccgtactagagtagctcgaggggccagggcccagagcagtggctatggagcttccagcctgagctgggctgtctgccaagtggcagccatgagtcctgcatgggtaccat

SEQ ID NO: 501133 - DNA, 325 bp, Homo sapiens
aaatgttcacaccaacatagctggaggccccaaagactgataaatatgtaatgtataagctcaattacatgatgttgttaacattaacagttccaagattaaattcaacaggtgggactaatccccagcacctgaatttcacaaattacagactgtctgcaagagatcgacttgactaatatggctgcacactgaattaccgttgcaaataaaccactgagcgctgttggacgagatatatgcctggcgcgtcaagtcataagatgatcgagaggtgtggaggatacaagagtcactatgcatgggcacattctctacttgctct

SEQ ID NO: 501134 - DNA, 800 bp, Homo sapiens
gcctgggcgacagagggagactccatctcaaaaaaaaataaaaaaaactccttactgaggtgttggcccagtggcccaatcccaggccctggcccagtcttgagggcaggcagtgttgtcactgctttgctctttgacctgtggttactgcttcccaagggccaggcttgttgcatactcactagctttcacgcagcccacccagcagcagcttactctggccctgcctagaaaggcagaatgcaggaaacctggctttccgggtttttttctttccctttttttttttttttgggtaaaaacggggtttggctgtgttgcccaggcgtggtctcacacttcgttgggcctccagaaattccccccacctcggcctcccaaagtttgggaatttacgggtgtgtggcttagcgcccagcccaggttttccttttcttctccccaccacaaagagccttctccgaacttgtgggcgtttgcctcccattttcctatacccctttcccatccagtggctggtatgtggttaggatctcagaaacaggcagaaaattaatctaccgtgatatacagaaatctcatatagagtggattctcggccgtgtcgtgaatcaaaacacaagccagtgtgcagtgcatgcctggtggtcccagcatactggggaaggtggcttgagaggatcacttgagcccgggagtcccagtccagcctgagcaacacagtgagaccctaatctctaaaaggcgatataaaacaaaaaaaacgccaaaaaaaccaggatgtctcccatttggattca

SEQ ID NO: 501135 - DNA, 357 bp, Homo sapiens
cccctgtgacgacactgactgtcactctgtggctgctccgcgtgtccagtgtctgacgggctgtgccgagccatggaaccatgggaagacctttacttgcagtgctgcctacccctgagtccacgacccctgataaccgccaccctctcaaaatccggaaacacgttccggcccgaggtccacctgctgccgccgccgtcggaggagctggccctgaacgagctggtgacgctgacgtgcctggcacgtggcttcagccccaaggatatgctggtacgctggctgcaggggtcacaggagctgccccgcgagaagtccctgactagggcatcccggatgcaggtgtgggaggtaccg

SEQ ID NO: 501136 - DNA, 138 bp, Homo sapiens
agttattcttatgtcagtttcttaagcagttatctcttaatcgttaaaagaaggctagcagttgtttcacaaaaaggttggtgattcccaccccaagataggtaataacgctaccttcttgtgagtaaccgttttatt

SEQ ID NO: 501137 - DNA, 251 bp, Homo sapiens
gcagacgtgttgcaggccgtaactgtagcgtgcgtcggctgcgacttccgctgcgcgggtctggatcttttcatcctcgagacaggacaagatgcagttcacggcttctatctggggtaaagagcttgaagagcccctcacaggccaagaaaattcagctgacgtttcctccagccttctgtatcctcatccgctcttcatactgagtaggattatgctctttgctgtatacaacggttcatcgggggtac

SEQ ID NO: 501138 - DNA, 272 bp, Homo sapiens
gctcggtaccggttcgcatgttccctggagactcatgtcgttaccactcaactggaagctgagcatggcttattcctctgatggttacccatgccaggcgcacctctccatgtccaatgttctttctttatttgtttgtttgttctgttagtttgtttgtttagagacggagtttggctctgttgcccaggctgtagtgcagtggcacgatctcagctcactacaaactccgcctcctgggtacaagcgattctcctgcctcagtctcctga

SEQ ID NO: 501139 - DNA, 403 bp, Homo sapiens
  misc_feature (66)..(66): n is a, c, g, or t
  misc_feature (161)..(161): n is a, c, g, or t
  misc_feature (212)..(212): n is a, c, g, or t
  misc_feature (276)..(276): n is a, c, g, or t
  misc_feature (288)..(288): n is a, c, g, or t
  misc_feature (331)..(331): n is a, c, g, or t
  misc_feature (336)..(336): n is a, c, g, or t
  misc_feature (343)..(343): n is a, c, g, or t
  misc_feature (345)..(345): n is a, c, g, or t
ccccaaaaacccccccccctttttttttaaggggtgtttgtttttaattctccttcagccctcaangggtttctcatttttgaatcaacatcttttccttctgtccctccctttctccatcttttggtcactaccctccaactctaggaacaggggtgtanaggagaagccctaggcttgagatttcatctgctctccttcctgcatctcanaggagggcaggagaagggggtggtgttttccctccccccgcactgaggaagaatggggctcttntcatcccctttntcccttgcccccaggactgggccacttgtggggcagccagttntagcncagctcncnctgagagtgtaagaactacaaacaaaatttctattaaattaagttttgtgtcttaaaa

SEQ ID NO: 501140 - DNA, 184 bp, Homo sapiens
cgtgcaagactccagaattgtaggcatgatgaagactctgctgctgtttgtggtgctgctgtgacctggagagtggcaggtctgggggaccagacggtctcagacaatgagctccaggaaatgtccaatcagggaagtaagtacgtcaataaggaaattcacaatgctgtcgggctaggcgggg

SEQ ID NO: 501141 - DNA, 178 bp, Homo sapiens
ggtcctacgagtggaactggaacctcggtgtgtcggacttgagcttaagcgaagtgcacgtgctgaggcctgccagaacgcccctgccatgcacaccagtaaaccctgtacctgccacgtgtcctgtgcctccctagtggtgtactcctcttagatgtcagcacctgcacggctatgc

SEQ ID NO: 501142 - DNA, 708 bp, Homo sapiens
taacaatgttactagttataatttattctatgcattttataaaataaataaagctttaaaaaaatgaaggtgtgatgggttacagcacaggagaggtgtcctggctgaggcatgcttttgtggagacccccagtggggagggagggatgggagctgagggccctgccttctcccctgcaggaccaagcatccccagtcttgcacttgtgccagatgaatggaatggggtagaactgggccctgcagctcctagctctgctagatggggcccctaaaacccatagcttggtggccacctggcctggacctaggtgaggggacatgtgccccctggtgctctgggtctcacaatgaggcaggctgtttggcccccacccacaatttttgtcccatcatgggtcctccccacagttggggggggggagggtccttcccgtcaggacaagtcgctggaggcgcaaagccaggatggcagaccagtggtcggaagtgtgggtgcctgcgcttggtgtgcggtgccccccggtgccctatagcccgtgagccatgtgttgtctcatgggcccgcctctgtcacccctccagacctggtggcccacccgatcacgcgctctctgcgtgccagccgcggcgtgggtcccttaggtcctggcccccttgttccgggctgcccccccgtgtccccgaaggatccgccgtgtgctgggc

SEQ ID NO: 501143 - DNA, 684 bp, Homo sapiens
ccctcagaggctgatgggagagaaggtgagaggacaaagcaaagacaaacaggcccccacctgcccaggtggagagggcagagaaggcaaagtgggccaagaactttgccccaccacaatggcatcttttctttttttattatttttttttatttttgaggcagaatctcactctgtcgcccaggctggagtgcagtggtgcagtttcagctcactgcagccttgatctcctgggctcaagcgatcatcccacctcagcttcccgagtacctgggactataggtgcgtaccaccatgcccggctaatttttgtatttttttggagagacagggtctctccatgttgcccaagctggtcttgaactcctgggcccaagctatccgccagcctacacctcccaaagtgctaggattacaggcgtgtgccatcccacccagccaatggtttctttcagaagcaactgaaaagccaggcacagtggctcacccctgtaatcccagcactctgggaggccaagacgggcggatcacttaaggtcaggagttcaagaccagcctaaccaacatggtgaaatcctatctctaccaaaaatacaacaattagccagttatggtggcgcacgcatgtaatcccagccactcgggaggctgaggcaggagaatcgcctgaacctgggaagcaga

SEQ ID NO: 501144 - DNA, 340 bp, Homo sapiens
gcaagcatgtagttattaagtccattacagtgcacattcattgactctgtgtatcttcacagtgtgatcttctccatccactgcaattcttcaagcataattctctgatagccagtgtatgactttggctttgacttgtttatacacagtgggtccagtcatttatttcgggaacttgaccagtctttttccaggtatataaccaaatctttccacactccatatcctactgcatccacgtatctgtttataagggaggggcaccacagtcattatcttagcatgaaattgctatcttcgtcagtgctctaaagtagttcttcacagtgtcccaactgtc

SEQ ID NO: 501145 - DNA, 185 bp, Homo sapiens
ccagcgcttgttggatggagagaagtatatggtaggaaaacctctgacttcatatggagaaggcacatcattgtgctgtgtgcctccatcttgagctatgacgatattatgggtctttgcatgagctactcgccaagatactttactacttgtgagctccagtgttcttacagatgaccacacca

SEQ ID NO: 501146 - DNA, 1854 bp, Homo sapiens
  misc_feature (278)..(278): n is a, c, g, or t
  misc_feature (920)..(920): n is a, c, g, or t
cgagacgcgtgagagtccagagtacactatccagacattgcgtaagcttgagttacgtcaagcaacacgtatggactggagatcgaaccatcataagttatgttagagcatgtccatatccagggtaataacgtagcccttgcattatacgagcagtaagcagatactccacgcggggtccccagaagcgtcggtggagcctgatagtcattcaagtgagtgaccctagacagagagtaagctcgtgtgtctgttgctagagtccttggctctccagngagtgtgcacggtggataacacgtggcaatgctttggcatggatgtgtagatagactttggacagagtggtcgctagaggtggagaggtgggagatgggacattggagagtggacaggtagattgtattaatccatattgtgctccctctttctcatgtgcacgtgaagagctctacttcaggggggaagaagatgcagtgggacacacatgatatcatcgcggagacgcaagggatgctgtgtctccgtagagggcgcgtgcgtagtgtgctctagagcagaagatgctcagtggaatgtggcatacacttctataacgcattataacttcacgaggaagtgtgcgtagaatgacgaatacctagggggtaagacaaaggttgcctggcttgtgggatcagcacctggtgttggaaagttgggacgaccacggggctttttgtggcaccggagcagaggtgtgggggcgcgggaacaaaatgtgggtaagagcacctcggacgatgtgggggaatattattcggctaaacgcggcttggacaggaagttttcaaccaagaagattgtagacagcaggggacagttggtaaatgttctcgatttcctctttatattacaacagtagcaggtggaaaacaatntataacagccacggactatactcaacgtgggcgtgtgccgtggttcgcgcacgataatggtccttattgatgagggcaataccctataagatcaatcaacaatacacgaagaaagatgaaggaagaagatcgtgctgccggaaaaagttgtgccctacacaaggtgggggtgtttatcaaccttgtgggcgttttattatatgtcagatggttgtaaaaacagatgggactgccgaagaggagaacacctcgtgcgataaagtaggcggagtatgaaggtgaactatggcattcatttaatgtatattaaaagcgaggctttttagacgatcgctaaatcgtgaggtagaggcgcggttaggtgtacaaaaatattaataatagagagaagacatatttcgggcccaaacagacatattgggggggggacttaataaaccagcggtgagccaccaaaaaatacaaaagtaggggagcgagacaaccaaattgtgtgccacgaaaacaaagagaagtgggttaccacacgccgtcgttgtgacaacatcaacatggcacaggagaacgctgatgggagtcagcaacacaaaaactacatgagagtgacggcacaagaccaatcaatcacaacatacaatgctacccaccaaacaagactgagtgacagataaaactatgagccaccaacagcatgcagaacaaaacacggtgaatgcgtgaacggaccgcacatataatcaacagcaatggccccagacaggcacgggctgcaaaaaaacagcgcacgagttgatagtagaagcatctccacagcccagcgccaagcaatataaatgatgagtatgccagcaatagtagacgaccaacaccacacagagacacgagcgtccaccaacgcggcaggagtgcagagaccagccaatagatgacccac

SEQ ID NO: 501147 - DNA, 468 bp, Homo sapiens
  misc_feature (26)..(26): n is a, c, g, or t
  misc_feature (234)..(234): n is a, c, g, or t
tgccccctcttttttccccccccagntcctcccctcccctctttctccccaaatcccagaagtagatctaggaatctgaaaaattcccaccttggcctacaaaacagcactgaagtctctttgaaacagccttgtcccataaatccttagattgtttttccatctttgaaaaaagttacttctggccccagcacggtggctcatgcctgtaatccccagcactttgggaggcanaggtgggcggatcacctgaggtcaggagttcgagaccagcttgaccaacatggagaaaccccgtctctactaaaaatacaaaattagccaggcgtggtagtgcatgcctgtaatcccagctactcgggaggctgaggcaggagaatcacttgaacccgagaggcggaggtttcggtgaactgagatggcgccattgccctttagcccgggcaacaagagcaaaaaaccgtctca

SEQ ID NO: 501148 - DNA, 363 bp, Homo sapiens
aagctttctaaaagggacgtcatagttagtaaacacctacatcaaaaaagactacaggaagacctgcttgaggctgttttacaggttaccattttgtttaacaaggagaaggagtacactctaaaaacaatgataaaagtataatatagtagatacataaaccagtaacatagtttttattatcattatcaagtattatttactgaatataattgtatgtgctatacttttatatgactggcaatacattaggttttttataccagcatcaccacaaacaccttagtaatgtattacaatgtctacaacatcattaggctataggaattcttcagctccattataatcttatgggaccactgt

SEQ ID NO: 501149 - DNA, 626 bp, Homo sapiens
gggcctctgctgtgggctggctgggaatcctgcgtgacatctgggtcgggtctagtgctcccgatgtccgctgctcctgggcgggatgcccttgtcttggtgtctcgctggtggtggctgccagattgctgtagtgccacactgactagttccttcttgtctgcttttcccatgcaaattggctggatgactgccgtgtgcatgctgtgtggtgtgtgccctgggggccctggtggccctgggatggggaacctgcggtggcttcctgctggatggtttcggcagttggcatcctggtggcctggtggtcgctggcctgtggactggggcctggggcctgagtgcctgctggagctctgctggagtgcaatggccgatggataacggatgtggatagccctgtcaccaatgttgggcctgcttggtcaaggacattgaagatcaatgtccctgggagggacgaatctacttcttctttcatccccttgccaccaatttaagacggggaacttcatcgaagaagtccatttgggaattttcgccttttcacctttgtgtgggtggccatatcttcttccaatgggattgagggtttttggacacggactttaatagcccaagttgca

SEQ ID NO: 501150 - DNA, 342 bp, Homo sapiens
ctgaggatcaccggcagaacacactcaaggaatactatataggacattcagattcagatttcagatccgaatgctcagctggtaatgggataccgatattaccaaatggcaataaatctgaaatctggaacacttatggtccccagccttttggggaagggatactccacctgtatattatggactccagtctttcatccgatatatgatttggcaatatgttctccccactgggtggtttggtctttttgttttttttaatgggtggtccatatggaagtaccacaagtttacttttaggtaaaggtcccagttccatccattttttctccttttatagga

SEQ ID NO: 501151 - DNA, 671 bp, Homo sapiens
aaaaataccaccgtgttcattatgccattggcccacccgaattggacattagaaacttggccacatattggtttaagcggggaaatccacgagttatctccaatcaggaccatgcctaaaggtcggccagtaaatcgatcataaacttagctatagggacattttgtttacagtccccacctgagcttagtgcacaagttagcatcgatagaaacggttatgagcacatatgtacggacataatgtacctttgttacacggccagatatcaccctctcgggctcaggagctcctgcgacgtcagcctcctggtagtgttaaatggtcagcgggtgtgcaggtgtgcgtggcatgaagatacagtactcatcctacatctgagacatgtgccgtgtagatgcaccatgcctgtcaagcagcttatgcccctgctcaaacggcgtgatcattagatcagatatcagccgttgtcattagaggatcttcccttccagttgtaccattcccatatttagaataagcaccatatgtagtaatgataccaacctagaggtccccaaattgtatgcaccatatgcatgtcaggaactattatccattcatgtgcagggcatcaatttcaagtattccccaatcttctgaagaatacagatagctagagaactcgagat

SEQ ID NO: 501152 - DNA, 762 bp, Homo sapiens
gctgaggtgggcgaatcatgagatcaggagttcgagaccagcctggccagcatggtgaaaccccatctctactaaaaatacaaaaaattagctgggcgtggtgacgggcgcctgtaatcccagatactcaggaggctgaggtaggagaatcacttgaacctgggaggtggaagttgcagtgaaccaagatcacgccactgcactccagcctggccgatggagcgagactccaactcaaaaaaaaaaaaaggaataaagaaagaaaagggcgattgcccagttcaattcacaaattaagaatcatccgggttaaaaaatctactctcacatggtggattcacagttataaattttctagtgtgcgggtgtttgggtccgttggtatttgggtaaagagtggggctctcgttttggtcgcccaggccgggttttggaactccgggctttcaaggcgaatcctccgtgtctcggcctcacaaagtgttgagactacgggctatgagccatggtgcccagcctgtcctaatgttttaaagctacacgaggaatttttttaaataaattctcacggttggctcagtctggtctccatctaaagttgtgtgttcgcagttctaacggttaagcgtgcacttttaagggccactttccacctgagaactagggtaatcatctttacttctggtccctgaaatcattttttcccatgggaacctccctccagtgggctgtggtttgtgagcattgcttccagaaacacta

SEQ ID NO: 501153 - DNA, 1066 bp, Homo sapiens
  misc_feature (56)..(56): n is a, c, g, or t
tcccgagcaaaaatctggttaacagtttaattttttttaatgttaaataccagggngacaggcattgttaaggcatgaaacaacactcagtcaacaacgtgcctcacagagggataagaaaaaattctgccatgaatattagcaagaggtaaaggaggaacaaatttacacttgtaagaaggcaccatttccccaaggaatacctctgggcatattctccgtgaaagtgaagtgtggcgatttcagccaactcttacactataaactctattattctcaaagacaggttcacaccagccacacgagaataacacatatttcacagagcggctatcttatctcacaacacacaaacaaacaacaacacaaacaaaaaaacaaaacaaactaaaaaaaaaaaaaaacaaaaaaaaaaaaaaaaagaaaaaacacaaaaaagaaagaaaaaaaaaaacaacaaaaacaaagaaaaagaaaacaaagaaggacaaagaacaagaaaaaaagaaacaacaaccggagagagagaggagggggcggaggcgcgcgagcacagacgcacacgaacaaccggaggggccggcgcgagaggagacaacgcgacagagaatcgcgcgcgagagcgaaaagacgaaggcgaaggagaagacaagagggcagggcgacggcaggcggaaggcagtcatgggaaggaggaggagacaagaaggcgagcgaggaggaagcaaggaggaagggaaggcagaggaggacgagagtgggaggcgcgaacaggagaagaaggacagagcgacacctaggcggaagggaggggaggtgaggcgcgaacgcgagggggacaccggagcggcagtgggtggcaggggaacaagcgagagagggagacggcacagcgggccgaggaagaagaaggaaaagagggaacgaggaggcagagggagaacaaaaccgaaagagcgagagcggagacgagaaggaaaaaaagaaaaagggggagagcaaggagagagaggagacgagcgagacagggaggaggagacagagaagggagagaaaagggaaggga

SEQ ID NO: 501154 - DNA, 246 bp, Homo sapiens
agaggatccccaggttggctgatagatggagcgacacttacccaagtttgataaagatcatgatgtaatgttatttttgaacgaatgtatgatcccgaaacgcggagcttgaattactgtgccggcatatctacacaccacatatcctgtaaaatacgtgacttgctcccagcttatgtgtgacagacgcaggatttattcaacgatactaggccttactcctctaagagcgaacgttcaacgcga

SEQ ID NO: 501155 - DNA, 450 bp, Homo sapiens
  misc_feature (47)..(47): n is a, c, g, or t
catatgtctctatcagaaaatcagatcaagggaagtagcctggaagncacttcacgtactaaatgaataagaagaacttgccatctaaggaaaggggggatacggaagagtatacaaggtcaggaataaatgagatggtcagtattatgcaataaaaaaaaatccggatgaggggtgcaactaaaacagttggcatgaaggtcctacgggaagtgaaggtgcgggcaggtcttcagcaccccaatatggtgggctatcacacggggtggatagaacagtgtcatgtgattcagccacgagcagacagagctgccatggagtggccatctcgggaagtgctctccgaccaggaagaggacagagagcaggggggtgtaaaaaatgatgaaagtagcagctcatccattatctgggctgagcccacccggtcggggggagcgggaaccggag

SEQ ID NO: 501156 - DNA, 803 bp, Homo sapiens
  misc_feature (5)..(5): n is a, c, g, or t
  misc_feature (147)..(147): n is a, c, g, or t
  misc_feature (151)..(151): n is a, c, g, or t
  misc_feature (248)..(248): n is a, c, g, or t
  misc_feature (261)..(261): n is a, c, g, or t
  misc_feature (263)..(263): n is a, c, g, or t
  misc_feature (272)..(272): n is a, c, g, or t
  misc_feature (288)..(288): n is a, c, g, or t
  misc_feature (298)..(298): n is a, c, g, or t
  misc_feature (333)..(333): n is a, c, g, or t
  misc_feature (367)..(367): n is a, c, g, or t
  misc_feature (377)..(377): n is a, c, g, or t
  misc_feature (381)..(381): n is a, c, g, or t
  misc_feature (394)..(394): n is a, c, g, or t
  misc_feature (489)..(490): n is a, c, g, or t
  misc_feature (508)..(510): n is a, c, g, or t
  misc_feature (600)..(600): n is a, c, g, or t
  misc_feature (783)..(783): n is a, c, g, or t
tacanacataatcaccaggtctgcgctggccgaagacgaagcgtcctccctggaggtgggaacaagtcacctctgaccacacctcctctgacgccatcacctcctcctggccccacccaagggctcgacacaagccccaaggtcggngggngaggggcggggcggaaccgagggcggaggccaaggtgggattccaggaaggccttccgaagatggaggtgggatcctgtccctccaggtagcttgtnggtgatggacagnangacttgctngctcagtgtggagacnaaggacactntgccactggattgaagtgagtggtgagggattggnggtggctccacagaggcatccatctgcatggacntggccctatngatncagcaggctgccntggctgtggagtaagcccacggaaccacatgagcttagtggggccgctctggggcaggggctctaacaggacagcatgaaaactagatccgcctnntgagggacaagccaggtnnngagctgtggtgcaatttgctcctgtccctggaggtctgtgggcggaactgtgggcacaggtggacatggctgtcagacgtggggtcatangctcccactccccagctcctgcctcctcacagacagaagccacggccaaggagaggagagacatggggaaggcagagatgagggaacaggaagggagaaggcaatgaggaaagagaaagggagggtaagatgcggagggcacaggtggatggggacgagggggccaagcatggacagcagggnggggagaaggcggaggggcc

SEQ ID NO: 501157 - DNA, 298 bp, Homo sapiens
tgaaatggagtcttgctctgtcgcccaggctggagtacaatggcgtgatctcagctcactgcaacctccacctccccggttcaagcgattctcctgcctcagcctcctgggtagctgggattacaggcgcgtgccaccacgcccggcatgagtggaattttagtgttaaatctcttcctgggccttttcttcatagtcaggttcctggaaagcaactggcttgtgtgggtgacacagatgatccaaatcccatgcacattgatcatgatcggaacatggactgggtttccacccagct

SEQ ID NO: 501158 - DNA, 340 bp, Homo sapiens
ttttttttttaaccccccggttgcccggggggccccccccccgttttttttccccccttaaaaaacccgggggcggttccccccccgggttttttctttggggggggggggggtttccttttttccccggggaccccttttgccctttgggcctttttgggggcccttttaaaacagttttttccaaaaaaagggggggggccggggcgggttttcccgggttttttttacccccggggggggccccggggggcgcccccggggtcgcccccgggggccctttggggggggggttttttttttttttttaaaaataaagggaaatttttttttgggggga

SEQ ID NO: 501159 - DNA, 181 bp, Homo sapiens
tgattagaggatctacaggagagagaactggattttgggagaggaggttgtggaagcccaatagtttatttcgttttgggagtgtatatttcctcttgctggagtacacaaatagcagggggatgcgatagagggaagggtcatgaccccaaaggctagccaagtcagaaaatgaggggag

SEQ ID NO: 501160 - DNA, 336 bp, Homo sapiens
  misc_feature (288)..(288): n is a, c, g, or t
  misc_feature (333)..(333): n is a, c, g, or t
taaacttgacattgggggtcccccactccaactttgctttttgaaggttttggtgtacattgagccccaaaaggaaaggagagtatttgtgagtgggggcctcccttgcccccagtacgaagtttatgccctgaatccccaaagtagcccttcttggtgcccaactggcctggggacaaacagggtcccctacatttaggactcccggttaagtggacccattttttgccctcctcccaggaattttggtaaaagctagctttggggaaggggttgggtgtaaatatnaaagggtggagggagcccagctggtaccaataaacatgggtagancta

SEQ ID NO: 501161 - DNA, 429 bp, Homo sapiens
  misc_feature (308)..(308): n is a, c, g, or t
tgagacagagttttagtcttgtttcccaggctggagtgcaatggcacaatcttggctcactgcaacctccgcctcctgggttcaggcaattttcctgcctcagcctcccaagtagctgggattacaggcacccaccaccatgcccagctaatttttgtatttttaatagagagctaataattgtatatttaataaagacgggtttcaccatgttggccaggctggtcttgaactcctgacctcaggtgatcctcccgcctcagccttccaaagtgctgggattacaagcatgagccaccgcacccggnctcacagtgacagattctgaggaaacagcatgcaaaacatttggaccattttcttcatctcccattgttggatagagagtgtgcaccgctgctatcttggcagatccacactggtcctccc

SEQ ID NO: 501162 - DNA, 917 bp, Homo sapiens
ggacccaggtcatctgaagcagatgatcctcctcctgacctactgtcaggagagcagtgaagtagcctaatgctatgccaccaggcctgagtcatacacctcacttcatctcatcatgtggacattttagtcatctcgaatcatcacaggaagagactttgtgggccaaggcttagtcatctattggtatggatttgtccaggagctggactgcaatccgggaacaaggggcgtcctgctcgaagcctgtgtccccacgaacattgtcatccttatgccaccagcatagcttgatgcctgaagatcctggtactgagaacgctgggaggaaatagagacccagcattgattaccatcgtggaataatctagcgcaaacctaggaaagctggaagccatcaaaagtaccaaagccagctttgtactcacctgccagagctccatgaagaacttgatggcgagctgctatgctgtgtgtttgctatattcaatctttacggatgcctgacgtctgtgacggtaaggccaagtgcaaaggaatacattgatgagaatttcctctggttaataatgttatttgaacaccacatattttagatttatcttattgaagtattagttccatgtgcctggaaacaaactcctttgatgggggcgagaggggacaacccagattggggagagttcatttttaaaacatgggtagtgtcacgatgtacgtgaacagatttgatgagtcgcagttttaaggccatctgcttatggtgatgggttttaccgggttttagacctcgtagtagtcacaagggtcatgtaaagagggggccaaaacggggctttagacacaggaggtttggccaaaaaactcgcgggtggaaagcaggagaaaaaaaccccgagttagcaaatagcgcgata

SEQ ID NO: 501163 - DNA, 213 bp, Homo sapiens
gctacgtggtggatccgtcaagcagacctacatggaagtctgacacaaactcatacaaccatgatgcagtgatcaagaactacgggctgctctactgcttcttgaaggagatggtccaggtcgagacattcctgcgcattttgcagtgccgctctgtagagggtagctgtgtcttctaggtgccctgctggtggatctggtgagcgatccctc

SEQ ID NO: 501164 - DNA, 507 bp, Homo sapiens
gaatcgagctcggtacctgtcgggacgtgttatcgcatcagaatcttatgagtagcattcaaagagagaatatgcacttgcgcctttcagtcgatatgaaacgtggagagccttatctggggaagaccatggttgaaaatggttcatgtgtgtagtcagaatgcagaagggagtttagttgttagaacaaactgtgacattaaatagcctttttacagaagttcttagctaaagcaaatctcaaaccttgttaaatacaagactggataactataactttagggggactgcagagacgagggctttaatgatatttcagagggcacttgtgaggggagtgtcacattgactcggggtctgggagtggactcagcctggattcagcctaggcatctcttcagcctcagctgtccagccctggtgcctgtctggggatgtgtggcctaggcagagggcagtttaaagcacaaaaccacatggggataacacgttcgcgagggggatccc

SEQ ID NO: 501165 - DNA, 384 bp, Homo sapiens
tttacaatgatacagctatgacaacctgagtagtaggatattacctacgaagcacatctgatgtgaaagtatataatgtcatatgcctgatttcctcaacaccttttgttttgccgtcatgatcttctgtctttatatttttatcacagaaccaatgatctaacagggttctttcgtatgaggattattatgataatgtaacactatgatcattaatgcacgggatcatgccagctcattcatgggttgttctatagttccatggaactctaagtaggccaacgttatacataggcactccaaggggcatgcttcagccagacaagtaaagggctgaaagaagtagaacaatacaaaagccctcgtgtggtgggaactgtggcc

SEQ ID NO: 501166 - DNA, 128 bp, Homo sapiens
tggaagtgggggtgcccttccttcctaaaggccctgggggccaagctgacttggcggggcagacttgacactatgccccactcactcagtatgtcctgccaattccacccacgtggggtcacccctgg

SEQ ID NO: 501167 - DNA, 582 bp, Homo sapiens
ccaaaaaccaccaataggtggtgcccccgaaataaattttttttcccggaccctttttttttggggggggttaaccctttgggcccccttctttggtttttgtacgccccccacaagggggggggcccccggggggtctttttggggggaaaaaaaaaacccccctgaattttccctccccccgggccaaaaaaacccccaaagtttgggtaaaaaaaaagggggcccccccccaggggtgtttttttttccccccttggggggaacactgagggggccccggcccccccccctctcaaggggggtttatttttttgggggggttcccccaccccccccaaaaaaaaaaagcctttttttagtttttttaaaaaaaaccccccggaaaaacccccctcccccaaaaaaattttttaaaaaccttttttttttaaaaaaccccctataaaaagggaattccggggttttctttttttccccttgggaaaacagggggttttcccacaggggttttcccggctcccccccggtttcgggagtgaattttgttttccaaaaaactggcaagtccgcctgtctcag

SEQ ID NO: 501168 - DNA, 272 bp, Homo sapiens
  misc_feature (64)..(65): n is a, c, g, or t
  misc_feature (69)..(69): n is a, c, g, or t
  misc_feature (103)..(103): n is a, c, g, or t
  misc_feature (106)..(106): n is a, c, g, or t
  misc_feature (111)..(111): n is a, c, g, or t
  misc_feature (140)..(140): n is a, c, g, or t
  misc_feature (183)..(183): n is a, c, g, or t
  misc_feature (248)..(248): n is a, c, g, or t
  misc_feature (254)..(254): n is a, c, g, or t
atgtctgcagtctagacctcctgaagaagctacagcgtcaggcacacaccaccacacctggctnntttntctatttttagtagagatggagtttcaccagtgnggncaggnggtctcaaactcctggcctcaggtgattngcccgcctcagcctcccaacatgctgggattactaacatgagncaccacacccggtcttgctcttgatttatttctgatgtttctgtgtcaggctcttctggagctcngacccngagcagcagggaaagaca

SEQ ID NO: 501169 - DNA, 243 bp, Homo sapiens
aggatctctcgactcgacggtttctctgctgctgatgaagacacacctcaggcttgccctgcagcctgctgccccgaatcaggaccaggaccaggcctcacctttgttacgccccacgtctcgttgcaaactcctcagtgtatgcctcatcgttggtgatgaggaagttgtcaacagatggtgccagacttgacctgtaggatgaatgggaaggatggtcagaggtgataccggatagccctt

SEQ ID NO: 501170 - DNA, 153 bp, Homo sapiens
cggatgtctgaggcagcgattgtctgtttattgctgagtaacgtcactgtgtaacattctgggggttttagtcatctcttgttgaagacccttgctgttccatctggaggctcttatgagtaaacctgttacgctggcctacaggacatgccg

SEQ ID NO: 501171 - DNA, 114 bp, Homo sapiens
atatcaatgccaaacagcaatacattgatttataaaaactaaaataaccacatcacagtaagttagtgaaaaacacgatatacattaaggaatttcacttattatgagtcccat

SEQ ID NO: 501172 - DNA, 1158 bp, Homo sapiens
  misc_feature (242)..(242): n is a, c, g, or t
  misc_feature (630)..(630): n is a, c, g, or t
agctatctgtgtttacttttctaaaataatacctgagctggttcaatgatttctctccatcttagctaattctgtttaaaactctgtcagaggcctgcaggcctgtgacgttactactttactacaactatactcttcagacaacttacactctttacacaacgacggccattacgtttccacgacataccttattttaacaacaccgtttacacacttaacactactttatactgcgccantctgtacacggacacactttatcatatctatcctctatacctttgtgcggacacatctggactgggtcttacctttaacctaggttccataatgggggaatctaatacctattctcctcggagtactcccccaaatgggtttctaaccaaactttcccatctttcccaaccattatatctggcactatctaggcacacgcttagcggccgcaaacacacgacggtccccttttggaaccacggccgcatttctcttcaacttccacattaggttcgggctactacggcttatggggtctcggcttagatatggttacaccaattatccatctatcaagatttggaccacccgtttgggtatactccaacgcgtatccctgcgatttancggtgtttacgacccccgtatatttacacttgtgcacacgcgtgcccttcttcacgcggcacgaacttttgtacccaaacaagcgaccaaaccaggcgtctggtaatcccacaggcggagaattccacaaggataaacacacatcgtagcatacacactgtgctgagtttaagaccacgcgccttggggttaacacccatattatattggagcccgttggtcttcctcttgggacacagtggcacaccgtaggaggccacacacccgatacttccagtcagggttgtccgaccacattttcggcaccattgggcgctgctagctcgcaactttgtgccaccctctttggggtcccacccactatatgatcatcaacccccaacagacggcccattaaaagtttgcacttaaccttccactctatcacacacaggcacagtcttatgggcctataacagcgtggtatcacaccaccaaaccaactttttgatcgttacgcacacacgacggtttagtaggtgggttcga

SEQ ID NO: 501173 - DNA, 100 bp, Homo sapiens
ggagtatgagaccagcctgggcaacatagcaaaaccctcatttttacaaaaataaaataaaaattagcagggtatggtgatgtgcacctgtagccccagc

SEQ ID NO: 501174 - DNA, 134 bp, Homo sapiens
cccgtcagtcaatcttatctggtaatgggatcattactgttatccagtgtcaatggtctcagtagtatttccattttttttaatggagtttttagattaaggatttctctttttgttttattaaacattgaaag

SEQ ID NO: 501175 - DNA, 270 bp, Homo sapiens
gcacggtaggccgtgtctcctagctacgcagttccatgctttcctcaccagcctgattgcttgcaaaccacgcagtgtcagacatgtggctcacttacagacgcacagaggagtttgaggatgaccggctcctttgacgagccatgagactcttgcttaggagacacctccagtctccctactcagtgcctgatcaacctggaacacaatgatctggttgcctctggctgaccccagattggggaccactgcttcccacttgctgaagtt

SEQ ID NO: 501176 - DNA, 150 bp, Homo sapiens
  misc_feature (19)..(19): n is a, c, g, or t
aaaattcaacttacctgtngtcttgagtgcctacggaaatcttgctgaagaccacgtatacatgatgtgaacattcatcattatgaggatgaatgtaaaatacttcattttataatgaacaaagagacctgaaattccctggcctgaagc

SEQ ID NO: 501177 - DNA, 390 bp, Homo sapiens
  misc_feature (131)..(131): n is a, c, g, or t
  misc_feature (187)..(187): n is a, c, g, or t
  misc_feature (228)..(228): n is a, c, g, or t
  misc_feature (240)..(240): n is a, c, g, or t
  misc_feature (242)..(242): n is a, c, g, or t
  misc_feature (246)..(246): n is a, c, g, or t
  misc_feature (249)..(249): n is a, c, g, or t
  misc_feature (254)..(255): n is a, c, g, or t
  misc_feature (259)..(259): n is a, c, g, or t
  misc_feature (268)..(268): n is a, c, g, or t
  misc_feature (274)..(274): n is a, c, g, or t
  misc_feature (284)..(284): n is a, c, g, or t
  misc_feature (292)..(292): n is a, c, g, or t
  misc_feature (326)..(326): n is a, c, g, or t
  misc_feature (335)..(335): n is a, c, g, or t
  misc_feature (341)..(341): n is a, c, g, or t
  misc_feature (354)..(354): n is a, c, g, or t
  misc_feature (366)..(366): n is a, c, g, or t
  misc_feature (371)..(371): n is a, c, g, or t
gggtggggacgtgggtgggtcccaggtgtgtgtggggtcggggtgggctctaggagttagcccttatcccccctgaccaggcgggagccgccaggccttcaactgggccagtgcccaggagccatcctggngtggggccaggagcttgtccaaggccacaggcccccagcaccccctgccggcgggntccgtggggccctggagctgatgacgggggagggccgtccncctggccccccnanccgnccnccttnnctgnccccaaaantgtgtntttagacctnctgggggngcttaaaggggtgagttgggtttggatttttagntattttttnttcagntttattagacttnttttttataaanccatnaatcccttttcctccggga

SEQ ID NO: 501178 - DNA, 1302 bp, Homo sapiens
gaatgccccaactaaatactaccgtatggacacaccataattacccccatactccattacactcattccatcatcacccaactaaaaatattaaacacaaactaccagcatacctccctctatcaaagcccaaaaaaaaaaacaaaaaaaaaaaacaaacaccatgaagaacacgcaaagacacaaagaaacacgaaacaaacacacaaaagaaaggcagcaacggggaccagtaggaaacaggacaacagaggacaacgacgaaacacaccagcaaccaccgcggccccaacggcaaacagcggccatggaacaacaaccacacgaacacaacaacacacgcacgcgagaggcaacacacggacacgacaccagcgcacacaagaaccgaaaaaaggcacataaacaggagaagaccaaacaaaagaggaaaaagaccaccacaccgggaggaaacccaaagggagaacgaccacgacaaaaacacaagaaaaacagccccacagcaggggaacaccgaaacaaagcgcaaaaaagagaacaaaacagagaaaacaaaaaaacacagaaacagacaacaaaacaacaaaacagacgacagagcagacgaagacgaacagaaaaaaaaagaagggacaacaaggcagaagcgacaacaacgaaagggacgcagcagacacaagcgcaagaagaaaaagcaagaaaagaagcggagagaacgaacaaacgacccaagagaagagaaaaccggaggacgaaaacacaagaaggcaagacagacacgccggggcgacagcggaaacgaagcagcgggagaaggcgcagggacacggagcggagcagcggaagagggcgacagcacgaggaaagaggaggtacgagggagagaggagaagaagaggcgacggcgcgacaggagagagaagaggagagagggcacaagagaaggagaaaggaggcagcaccagaagggagacggaggagcggcggaggacaacccgagcaagaggagagagaggacaagagacgaaagcgcaaaaaagagaccgaagaccacgcaagcagaacacagacaacgagacgagcagacaagcaaaacaagcaaagagagaagagacggggagacgcgcggagcgagacgcggcagcaggccggcaagagggagaacggcgagagcagacacacgcgagcagcaaagaacgaaaagagagagaagacaggagaaagaaagaaggagcgcagacagagcgacaggcagcgaccgagagacgaagagcaccacgacggcagcagagcgaggaa

SEQ ID NO: 501179 - DNA, 125 bp, Homo sapiens
  misc_feature (22)..(22): n is a, c, g, or t
  misc_feature (121)..(121): n is a, c, g, or t
tgtgtgtgtcccattggactcntgcacctgggggggcaacttatggtcctcatttgttttatttgtaccccctctttcaccctttttattggttcaaggtaaacatattattaataaaaantgcc

SEQ ID NO: 501180 - DNA, 573 bp, Homo sapiens
  misc_feature (318)..(318): n is a, c, g, or t
  misc_feature (326)..(327): n is a, c, g, or t
  misc_feature (385)..(386): n is a, c, g, or t
  misc_feature (564)..(565): n is a, c, g, or t
gctacaccattagtgcggcgcacgtggctgtgcaggtgcttgaagatggtcgtacgtgtgtcctatgtgatcttggtcactgaataccgctagaattgctcagccaattgtaaatgtcccggagtgcagacaacgaaggcgcttctggatacgaatatgcacactatggcgaacgttcactggtgagtgcatacaacgtgcggcattgtcactctatacaagggtaggctctcgaacaaggcgtacgacttcagattatcaatacacttcaacaggctcctctccgcgccatggaagtggccccacacaagaaagttnatgtccgnnacaagccttgcaagaaaggccagcacatttcaatacaaaaatggggcccagccacacnngatgggccaagcaagattgacagccagacgaaaggcaaagccaagcatgacagcattttgcatcgcttttaaacgttatgacaggcaacagaaacatgacggaacagacatacatcaagacatgaagcttacagaagctttcaaacaaggcagctccctcctgaaaggcttctcccannaaaaagca

SEQ ID NO: 501181 - DNA, 797 bp, Homo sapiens
ctctctgtcctacccttttcttcaccacgcagatcttaaggccaaatataaagagcttctgaaacatccctttattttgatttatgaagaacgtaccgttgaggtcgcatgctatgtttgtaaaatcctggaccaaatgccagctactcccagctctcccatgtatgtcgattgatatcgctgctacatcagactctacaaaaaagggctgagaggaagcaagacgtaaagaattttcatcccgtatcacagtgtttttattgttcgcccagacaccatgtgcaataagattggagcccgttcccatcatgtctgcttactcctgtcacctccaacgcgcatctttgcaatacccgaccgatcacaccgtgttcgtgctggacttagagaccttatacctgcactttcacgatgttcatacttctgccatcgttccttccccccccccccccatttacttccgtttctccctatacctcattaatcatcctcactctacctcctaccctcttttttcattctaccgctctcgctttcccgccccatccccacccgccccgtcaccgccaccaatattttacccctcgcccccgctccctcccctttctttttctattttgcttatacctctcttttccccatccccccatccccttctcctccgcccccgcaaaccacgccctcccctatcctcccctttttatctcctccttcttcccttttaccgagactcacaaccttcccattccccaccaccacttgctcacctaccttccccccccatccatccatcccca

SEQ ID NO: 501182 - DNA, 288 bp, Homo sapiens
gctcggtacccctctgatatgggcgatcagtaaccgcaaaagagcccaatgtcatacatggaacacaaatgactgctatagtgtatcatacaacttgtgcatgaagaagagtactcgcctatgaggacgtagtctttccaatttacatcacatatgtttacacctggaggtggctgatatgatgcttcattcaacctgaatggataaccacatgtacctgtaacagttttacttctcacgtaactgcaggatgacaattcacttgaatttctgtttggcccttatcga

SEQ ID NO: 501183 - DNA, 304 bp, Homo sapiens
acggggaacccagaatgggggcttcggacacagccctcctggaggacctgggaacagcagtggccttctcctggagaggatggtggccattccagccaacaacaaaatgcctgatccttccggaaaaactagccccctccttcaccccccgcacacctgcatcccctccggaggcctcctgtgaggcacgaacccctgcctcccctaggccggaccttgtggacgacagccccacccagtctgtgctcctcagccgctgcgcaaggcccagcctgctcagaataaagcatgtcctgttgccgga

SEQ ID NO: 501184 - DNA, 973 bp, Homo sapiens
  misc_feature (950)..(950): n is a, c, g, or t
acaacttaatatgactagcttacacaactagcttataaatgtgaagtataccatcttttacgtgacttcctacttatgactcggcataaagaccatgtcgatagaccctcgcatcgcatgtgagtcaatggagtacttgtctggattactcattataactaggcgtgatatgtgtataattacagcctcatcactcatactctaacacccgtgacagaatacatagcctaccccttccttgtactatccctatgaggcataattataacaagctccatctgcctacgacaaacggaacctaaaatcgctcattgcatactcttcaaatcagccacatagccctcgtagtaacagccattctcatccaagaccccctgaagcttcaccggcgcagtcattctcagtaatcgcccacggacttacatcctcattactattctggctagcaaactcaaactacgaacgcactcacagtcgcatcataatcctctctcaaggacttcaaactctactcccactaatagctttttgataacttctagcaagcctcgtaacctcgcttacccccatattaacctactgggagaactctctgtgctagtaaccacgttctcctgatcaaatattcacttcttcctacttacaggactcaacatactagtcacagccttatttccctctacatattacacaacacatggggtcagtcaccacaattaaacataaaccttattacacgagaaaaacctcatgtataactatccccaatttctctatcttaaccgaatatacgggttctcttaaaaaaaaaaaaaaaaaaaggggggctaaatccccgggcgccgagccccctttgaaggccaggagtaaaagaacgggggaaaggggaaacaaggtgtggcctgtgggtgcgcccacgcgggtaatttgacttgcgagatattacacgnacgtccacagaagggccgcagcc

SEQ ID NO: 501185 - DNA, 110 bp, Homo sapiens
cgtgtagtctctgtagctggggcaccggcatatgttttctgaaagggatgtgacagtggacttgagcatcctggcaggttaggggtagtggagctgcgtctgctgaggag

SEQ ID NO: 501186 - DNA, 103 bp, Homo sapiens
gccgctcaggatgtgccatcttgagtgatgtgttcctctctccccacaccctggttctacagaacttacagattccagtgtaggtcatgctatttccagaaac

SEQ ID NO: 501187 - DNA, 286 bp, Homo sapiens
aactgagaaactgtttcatgctttatgcctacctcttgtagttgttgcagagcaaatataacttgtaataagatagctaggccttgcagagacagacagaaaacttaaaaaaaatgatatagagctggagtctagtatttatatgagtctgtgagagatactgtgtttggtctcactgcaatgaaccaaaagcggctgagtttggttttaattttagccatgtattgagggatcgttttgaccaactcttgttggctctgtcttgaccattgttaatcactgtcct

SEQ ID NO: 501188 - DNA, 695 bp, Homo sapiens
  misc_feature (177)..(177): n is a, c, g, or t
ttccgcggcgcccgggaaatggcatccgggccgccgcgcgccgctgtaaagaaataggaaatgctagtcaagttgtggtgagagggaggatggcgttcgaatgtttataggcgctcctgttctatccgctggccaccccccgaaggaagagggatctactctagaaagtacgtgacnattttctcgttctttatatattgatcggtgtgtctctttcctttattcctcagtccaatgcagtagagtgatacaatggtaataatcatatatacatgagaatattaggaataccaacctcactctcttcactcacaccctcacagcctcccctcctcaccgtccccccccccctcccctccctccactccgcttctctttctctctgtatctatctttttgtggcgtgtgagtattgagtgagtccctaccccccctcacacgattctcatccccacaccctactctaacccaacctcaaccatgcaatagccctcctctccgacgtccttcgtacacctcatattatggtaagtagttactatttccctaaacacacaacgtccaggcagaaagacgatgtaaatagcgaattatagtctgttatcatggtgtgttcgtgaatcgtaacccgtttacaagtcgctcgtccaatgacggataacgttcacagctcgtatcctctcacacttacatct

SEQ ID NO: 501189 - DNA, 517 bp, Homo sapiens
tgagacagagtcttgctctgtcgcccaggctggagtgtaatggtgtgatttcagctcactgcaccctccacctcccaggttcaagtgattctcccgcctcaccctcctgagtagctgggactataggcacccaccatcatgcccggccaatttttgtatttttctacagatggggtttcaccatgttggccaggctggtcttgaactcctgacctcaagtgatccacccgccttggcctcccaaagtgctgggattacaggggtgagccaccacacccagcctacttactctttcttttttacgagacagggtctcattctgtttcccaggctgggagtgcaatggcacaattaatggctcactgctgttcttgagctttctgggctcagtcgattctcctgcctcagcctgctgagtagctgggactacaggtgcgtgccaacatgcctgggtaaattgtttttgtagagatgggaactcaaccatgttgcacaagctgggtcttttttttttttt

SEQ ID NO: 501190 - DNA, 825 bp, Homo sapiens
  misc_feature (22)..(22): n is a, c, g, or t
  misc_feature (169)..(169): n is a, c, g, or t
  misc_feature (176)..(178): n is a, c, g, or t
  misc_feature (180)..(180): n is a, c, g, or t
  misc_feature (187)..(187): n is a, c, g, or t
  misc_feature (502)..(502): n is a, c, g, or t
  misc_feature (511)..(511): n is a, c, g, or t
  misc_feature (515)..(515): n is a, c, g, or t
  misc_feature (518)..(518): n is a, c, g, or t
  misc_feature (545)..(545): n is a, c, g, or t
  misc_feature (553)..(553): n is a, c, g, or t
  misc_feature (657)..(657): n is a, c, g, or t
cccaagagagtttcctaaagcnaggaaaccaagccgggcgcctcttgcaatggagacggtcatttcttcagatagctccccagctgtggaaaatgagcatcctcaagagaccccagaatccaacaatagcgtgtatacttccttcatgaagtctcatcgctgctatganctgattnnnanaagctcnaaattggttgtatttgatacgtccctgcaggtgaagaaagctttttttggcctgtgggtggacctaacgggggttaccgagccggcccctttaattagggattaagtaaggaacgggcaaaaggtttggtggggcacggcctgaccattcacaggatttcctttcaattattccggcaccgctaacttaattaaaatcagcctggcgtccagaatctaataaagactaaaaaaccccaagataaaaacctgtggagaagaaggtggtattctccaggactccctttaaaccgttgggtcttgcattttctcctantgccagctngttngangctgtctcttcattaattcggaacaanatccacangctgccagttattaacccagaatcaggcaatactttgtacatcctcacccacaagcgcattctgaagttcctcaaattgtttatcactgagttccccaagccanagttcatgtccaagtctctggaagagctacagattggcacctatgccaatattgctatggttcgcactaccacccccgtctatgtggctctggggatttttgtacagcatcgagtctcagccctgcagtggtggatgagaagggggcgtgtgggtggacaatctactc

SEQ ID NO: 501191 - DNA, 2317 bp, Homo sapiens
tggcacgaggcacttgagtgtgaaattcagttgctgaaaaacttgctacatgagcgaattgttcagtattatggctgtttgagggatccccaggaaaaaacactttccatatttatggaatatatgccagggggttcaattaaggaccaattaaaagcatatggcgctcttactgagaatgtgactaggaaatacacccgtcagattctggagggtgtccattatttgcacagtaatatgattgtccatagagatatcaaaggcgcaaatatcctgcgagattcaacaggcaacgtcaaactaggagattttggggccagcaaacggcttcagaccatctgtctctcagggacaggaatgaagtctgtcacgggcacaccatactggatgagccctgaagtcatcagtggagaaggctatggaagaaaagcagacatctggagtgttgcatgtactgtggtagaaatgctaactgaaaagccgccttgggctgaatttgaagcaatggctgccatctttaaaatcgccactcagccaacaaacccaaagctgccacctcatgtctcagactatactcgagatttcctcaaacggatttttgtagaggccaaactgagaccttcagctgatgaactcttaaggcacatgtttgtgcattatcactagcagccagtaacctctcctgtgcctctacctagctcccatctattcattcaccttctctctgactgcacttttcttttttataaaaaaagagagatgggggagaaaaaagacaagagggaaagtatttctcttgattcttggttaaatttgtttaataataataatatcctaaattttttatatttaatctttttttcccttacaagaacttgaagtttttttttttaatttttataatgtactgatgtggttcagagagataaagcactttagtacatagtcactctttttagtacaaacaaatcatttggaatacctaaagattgtagagtcattccctctatcactgacacatcagtgacgatgggaagacatggaaaacaaggagaagaaaatgatgtataatttgtagtttttagtgatagtatttaaaatatatcctcatttgtggggttgagccctaaactttagtttagggtaggtactcaacttaaagaatataggtttcttcttatatctgtattctttagatcctaacctctgtctaccaacctttttgctcagtaggagtcttgatagaagatatgaatctctgagaggtatgtttatttgttaatcctaaccagtataataagcaaatacactataatagatccacgttactggaatctgtaaaccttgagggatagctttctgcttaaaaacacacacacacacacacacacacggaaaacctttattttaaagtcaagttgtgagcaaatagaaataaaagacaaaaggacatcactcttatcaaatgtgtgagcagtagaagagaccacatttacagtcaatagaaataatgaaaaaaaattaggtgtttagtgtattttaaacagttttgttttgttttacttgagggggacgtcccaaaattaaaggaatggagaaataatcaaaatcatgtataccatcttctatttccagctcctgattccccataggtaacatcccttaggagcgaagagttcaattagtaatgtttatgtgttatgtcaggagatgaaacccttgttcttaggatcacagaatactaaagcacctcaaaaaaacaggtatcatgtgaaacagtggttgccaaaagtggagcgaggatgatttcactaggcatttggcaattcttagagacatttccggttgtcacaattggagggatactagtagcatgaattgggtagaggccagggatgttgctaaatagattataatacacaaggaaagcagcctcaaagaattacccctcccaaaatgtcagaagtgctgaggctgagaaaccctgatgtaaagatcagtcccagttataaactgaaaacagctatttacaaagcagtaaatgcaagaaagaaaaggaagtcgcaaagagaaagtgatgtaatgcaaattgaggattttacaagatcagatactgctgctttaagtcaagggtgaataatctcaacaaacagcaaatagcaatcactttaccagctgcatattgcacccacataggtaactcttcattttaggaacaaactgaatttgaacactgagccttttgaactcagccatctctatatattctttccttaaaattcatgattttgggcaaaaaaaaaaaaaaagtcgacgc

SEQ ID NO: 501192 - DNA, 776 bp, Homo sapiens
  misc_feature (22)..(22): n is a, c, g, or t
  misc_feature (169)..(169): n is a, c, g, or t
  misc_feature (176)..(178): n is a, c, g, or t
  misc_feature (180)..(180): n is a, c, g, or t
  misc_feature (187)..(187): n is a, c, g, or t
  misc_feature (250)..(250): n is a, c, g, or t
  misc_feature (257)..(257): n is a, c, g, or t
  misc_feature (267)..(267): n is a, c, g, or t
  misc_feature (301)..(301): n is a, c, g, or t
  misc_feature (305)..(305): n is a, c, g, or t
  misc_feature (309)..(310): n is a, c, g, or t
  misc_feature (315)..(315): n is a, c, g, or t
  misc_feature (322)..(322): n is a, c, g, or t
  misc_feature (337)..(338): n is a, c, g, or t
  misc_feature (343)..(343): n is a, c, g, or t
  misc_feature (351)..(351): n is a, c, g, or t
  misc_feature (354)..(354): n is a, c, g, or t
  misc_feature (367)..(367): n is a, c, g, or t
  misc_feature (378)..(378): n is a, c, g, or t
  misc_feature (381)..(381): n is a, c, g, or t
  misc_feature (383)..(383): n is a, c, g, or t
  misc_feature (385)..(385): n is a, c, g, or t
  misc_feature (393)..(393): n is a, c, g, or t
  misc_feature (401)..(401): n is a, c, g, or t
  misc_feature (403)..(403): n is a, c, g, or t
  misc_feature (405)..(405): n is a, c, g, or t
  misc_feature (411)..(411): n is a, c, g, or t
  misc_feature (419)..(419): n is a, c, g, or t
  misc_feature (432)..(432): n is a, c, g, or t
  misc_feature (434)..(434): n is a, c, g, or t
  misc_feature (439)..(439): n is a, c, g, or t
  misc_feature (442)..(442): n is a, c, g, or t
  misc_feature (453)..(453): n is a, c, g, or t
  misc_feature (462)..(462): n is a, c, g, or t
  misc_feature (466)..(466): n is a, c, g, or t
  misc_feature (469)..(469): n is a, c, g, or t
  misc_feature (496)..(496): n is a, c, g, or t
  misc_feature (504)..(504): n is a, c, g, or t
  misc_feature (608)..(608): n is a, c, g, or t
cccaagagagtttcctaaagcnaggaaaccaagccgggcgcctcttgcaatggagacggtcatttcttcagatagctccccagctgtggaaaatgagcatcctcaagagaccccagaatccaacaatagcgtgtatacttccttcatgaagtctcatcgctgctatganctgattnnnanaagctcnaaattggttgtatttgatacgtccctgcaggtgaagaaagctttttttgctttggtgactaanggtgtangagctgcccntttatgggatagtaagaagcaaagttttgtgggnatgntgannatcantgatttnatcaatatcctgcanngctantataaatnagnattggtaaagatntatgggctagnagnananaagatagnaaattggngngnggtgtntataaagncataatttaaaangnttgtntgnatttctcctantgccagctngttngangctgtctcttcattaattcggaacaanatccacangctgccagttattaacccagaatcaggcaatactttgtacatcctcacccacaagcgcattctgaagttcctcaaattgtttatcactgagttccccaagccanagttcatgtccaagtctctggaagagctacagattggcacctatgccaatattgctatggttcgcactaccacccccgtctatgtggctctggggatttttgtacagcatcgagtctcagccctgcagtggtggatgagaagggggcgtgtgggtggacaatctactc

SEQ ID NO: 501193 - DNA, 2263 bp, Homo sapiens
tggcacgaggcacttgagtgtgaaattcagttgctgaaaaacttgctacatgagcgaattgttcagtattatggctgtttgagggatccccaggaaaaaacactttccatatttatggaatatatgccagggggttcaattaaggaccaattaaaagcatatggcgctcttactgagaatgtgactaggaaatacacccgtcagattctggagggtgtccattatttgcacagtaatatgattgtccatagagatatcaaaggcgcaaatatcctgcgagattcaacaggcaacgtcaaactaggagattttggggccagcaaacggcttcagaccatctgtctctcagggacaggaatgaagtctgtcacgggcacaccatactggatgagccctgaagtcatcagtggagaaggctatggaagaaaagcagacatctggagtgttgcatgtactgtggtagaaatgctaactgaaaagccgccttgggctgaatttgaagcaatggctgccatctttaaaatcgccactcagccaacaaacccaaagctgccacctcatgtctcagactatactcgagatttcctcaaacggatttttgtagaggccaaactgagaccttcagctgatgaactcttaaggcacatgtttgtgcattatcactagcagccagtaacctctcctgtgcctctacctagctcccatctattcattcaccttctctctgactgcacttttcttttttataaaaaaagagagatgggggagaaaaaagacaagagggaaagtatttctcttgattcttggttaaatttgtttaataataataatatcctaaattttttatatttaatctttttttcccttacaagaacttgaagtttttttttttaatttttataatgtactgatgtggttcagagagataaagcactttagtacatagtcactctttttagtacaaacaaatcatttggaatacctaaagattgtagagtcattccctctatcactgacacatcagtgacgatgggaagacatggaaaacaaggagaagaaaatgatgtataatttgtagtttttagtgatagtatttctcaacttaaagaatataggtttcttcttatatctgtattctttagatcctaacctctgtctaccaacctttttgctcagtaggagtcttgatagaagatatgaatctctgagaggtatgtttatttgttaatcctaaccagtataataagcaaatacactataatagatccacgttactggaatctgtaaaccttgagggatagctttctgcttaaaaacacacacacacacacacacacacggaaaacctttattttaaagtcaagttgtgagcaaatagaaataaaagacaaaaggacatcactcttatcaaatgtgtgagcagtagaagagaccacatttacagtcaatagaaataatgaaaaaaaattaggtgtttagtgtattttaaacagttttgttttgttttacttgagggggacgtcccaaaattaaaggaatggagaaataatcaaaatcatgtataccatcttctatttccagctcctgattccccataggtaacatcccttaggagcgaagagttcaattagtaatgtttatgtgttatgtcaggagatgaaacccttgttcttaggatcacagaatactaaagcacctcaaaaaaacaggtatcatgtgaaacagtggttgccaaaagtggagcgaggatgatttcactaggcatttggcaattcttagagacatttccggttgtcacaattggagggatactagtagcatgaattgggtagaggccagggatgttgctaaatagattataatacacaaggaaagcagcctcaaagaattacccctcccaaaatgtcagaagtgctgaggctgagaaaccctgatgtaaagatcagtcccagttataaactgaaaacagctatttacaaagcagtaaatgcaagaaagaaaaggaagtcgcaaagagaaagtgatgtaatgcaaattgaggattttacaagatcagatactgctgctttaagtcaagggtgaataatctcaacaaacagcaaatagcaatcactttaccagctgcatattgcacccacataggtaactcttcattttaggaacaaactgaatttgaacactgagccttttgaactcagccatctctatatattctttccttaaaattcatgattttgggcaaaaaaaaaaaaaaagtcgacgc

SEQ ID NO: 501194 - DNA, 647 bp, Homo sapiens
  misc_feature (22)..(22): n is a, c, g, or t
  misc_feature (121)..(121): n is a, c, g, or t
  misc_feature (128)..(128): n is a, c, g, or t
  misc_feature (138)..(138): n is a, c, g, or t
  misc_feature (172)..(172): n is a, c, g, or t
  misc_feature (176)..(176): n is a, c, g, or t
  misc_feature (180)..(181): n is a, c, g, or t
  misc_feature (186)..(186): n is a, c, g, or t
  misc_feature (193)..(193): n is a, c, g, or t
  misc_feature (208)..(209): n is a, c, g, or t
  misc_feature (214)..(214): n is a, c, g, or t
  misc_feature (222)..(222): n is a, c, g, or t
  misc_feature (225)..(225): n is a, c, g, or t
  misc_feature (238)..(238): n is a, c, g, or t
  misc_feature (249)..(249): n is a, c, g, or t
  misc_feature (252)..(252): n is a, c, g, or t
  misc_feature (254)..(254): n is a, c, g, or t
  misc_feature (256)..(256): n is a, c, g, or t
  misc_feature (264)..(264): n is a, c, g, or t
  misc_feature (272)..(272): n is a, c, g, or t
  misc_feature (274)..(274): n is a, c, g, or t
  misc_feature (276)..(276): n is a, c, g, or t
  misc_feature (282)..(282): n is a, c, g, or t
  misc_feature (290)..(290): n is a, c, g, or t
  misc_feature (303)..(303): n is a, c, g, or t
  misc_feature (305)..(305): n is a, c, g, or t
  misc_feature (310)..(310): n is a, c, g, or t
  misc_feature (313)..(313): n is a, c, g, or t
  misc_feature (324)..(324): n is a, c, g, or t
  misc_feature (333)..(333): n is a, c, g, or t
  misc_feature (337)..(337): n is a, c, g, or t
  misc_feature (340)..(340): n is a, c, g, or t
  misc_feature (367)..(367): n is a, c, g, or t
  misc_feature (375)..(375): n is a, c, g, or t
  misc_feature (479)..(479): n is a, c, g, or t
cccaagagagtttcctaaagcnaggaaaccaagccgggcgcctcttgcaatggagacggtcatttcttcagatagctccccagctgtggaaaatgagcatcctcaagctttggtgactaanggtgtangagctgcccntttatgggatagtaagaagcaaagttttgtgggnatgntgannatcantgatttnatcaatatcctgcanngctantataaatnagnattggtaaagatntatgggctagnagnananaagatagnaaattggngngnggtgtntataaagncataatttaaaangnttgtntgnatttctcctantgccagctngttngangctgtctcttcattaattcggaacaanatccacangctgccagttattaacccagaatcaggcaatactttgtacatcctcacccacaagcgcattctgaagttcctcaaattgtttatcactgagttccccaagccanagttcatgtccaagtctctggaagagctacagattggcacctatgccaatattgctatggttcgcactaccacccccgtctatgtggctctggggatttttgtacagcatcgagtctcagccctgcagtggtggatgagaagggggcgtgtgggtggacaatctactc

SEQ ID NO: 501195 - DNA, 917 bp, Homo sapiens
atttactggcatgtttacatttataggaaggaacaatagtttcgtttatttcaacacaactgaatacttataaactgtatgttcctggaagttatttattccatacaccaaattggtcctttggtcatgacatttataattcctaaatgaagaccagaaagtacaaattgctggcgaggaagaataggctttattaatcaactgcatgtacttcgataattctaaatgggaagatggcttaatttttaacactaattatgggagcagattcttagcaaacttctttgggaaaagttaatgttatgatgtgcataaggctgccccatcgtgtatataactgaagcagattcgattcatcgtattcttacgcttctctgcttggtagttcgtggctgtacttaaagaacatacagaatttcatatctccaccaaatgtctaaaatgtgacccacagaacatcgtacacatgcttacacaactaacatgacaatattacaacctaacacgaatcttaacttcaacaaggtgcttcaacttcgaccgccctgtgcccacggacttcacttgccaccaccttcttaccaccgcgatacattcatccgagtcggcacggacctcgacagagctggcactacaacttctgacttaccgttaaacgaacacgacaaccacaacacaaccaacaccccgtctccggcgcgtctgccccaccagaagactccagacccatccccgcaaggaccggcgccacacctagacaaaccgcgcacgcgccacaagcgacacccaaagaaaacacgccgcacgacaaagagaagcgacccaccacacaaaaagccccgcgcaaaccaccgcggttgccaacacgccgtgacgcaccgaggcacagggcatcatacaagtggaacggacaaaga

SEQ ID NO: 501196 - DNA, 162 bp, Homo sapiens
catgtttcaccacgacgtaaatcagttaaatattgggacactaaccatccagtgtcaagaaaagtcacatgccatagccatggtattgcacatcattcatcttgcattcctttgagaatacagaagatcatgtaaatagttacagaatgtgggaatgctttg

SEQ ID NO: 501197 - DNA, 387 bp, Homo sapiens
acagactgtgttgcaatgtgtggcaaaggggggtacatatgcatgggaggcagtgacagtttggtaaagggaagcacaaaagttgaagatgaggcactgcaaggtgaaagctgtgaggcttcaggccaagtaacaggggctaaggaagccacaagggaggacattttctgcagagttgctgaaccagtaacaacctggtcctgacaaagctcttgtggaagaataagagccaagtgggaaagcttttcatcttgcaaagctgggggcagaaggttcttccttgaagtgtggtcatctgcacttcagctcaagagtcctgttggctgaagtccagagtgtcctttctgattcctgaagtagatgaacagccctgtcccaaggaagagc

SEQ ID NO: 501198 - DNA, 140 bp, Homo sapiens
  misc_feature (13)..(13): n is a, c, g, or t
  misc_feature (88)..(88): n is a, c, g, or t
tggcacagcagantgtaccctggcacagcagacgtaccctggcacagcagacgtaccctggcacagcagacgtaccctggcacagcanacgtaccctggcacagcagacgtacccagttatcagatcaaaaccaacccgg

SEQ ID NO: 501199 - DNA, 143 bp, Homo sapiens
atgctcggatggacgctgtggcttgctgctgtgccaaatacgaacacacactggtactggggagagactgtgacttcaacatctgccaagagcctcgtgtatgggatacgtgggggctgtgatggggtgctgctgctcgcatt

SEQ ID NO: 501200 - DNA, 1141 bp, Homo sapiens
  misc_feature (519)..(519): n is a, c, g, or t
gggggtcccacaagggctggggcctgagtcttagtttggggtgctcgtttgccaatgggggatccctccatatgaattgggccgcatattgctagcgccgtgtgggtttatttttatggagtgaggtctccagtgtcctcaagttgtgccacgcgtgactcactggtgggccgcccgctgggggggcttttgttcattggagagctgcattgctatttgcgagttggtggccgagcacgtgctgcccgaacgggcgcgcgatgcatatcacgacaagggtgacttgctttctcgtgctcaactctctggtagtgcgaaaccccgcccatggagcagctaccttagagcttctttggggttgccccaccgccagcgccgactgtttatagttgggtagaagagctcgaactgatctgccgctgcgcgtcattatgcccaccaagggagttataccccctccctcggctctcataccctacatcaatttagtcgtatagttactacgcctctctgtgcgcncaatctgcacctcgtcgctcagaaaagatggcggttaaataatagccgtttgtcgcaagactcataagtgccttggtgtgccacgtctgtgcatctagaacacacgccggtctggttatgtgggcacgcagggttgctatgtgggggcacactggtggacacccaccgggggtgcgtggtgacccacgctggtatctcacgggtcgtgtgttgggcgccatatcggcgtcccatgccgtctgtggtttgtcgctcgccggctccacgtgcttggtctccccgtggggttgagagccacggcgtctcacacgccgtgccccatgcctctcctcgtgtcagaggaaccatgggtacccccgtctcccccatgcctgctaccagagagaccctgtacacctctggccacaaccagggtggcacccaggtcccattttgggccacttaggagccaggttccagtgctccagaacatcgggggcccaacacgagaggccctggtgccaggtgaggggggcgtgtccctagagggggaaaagggcaccccgggcaccccatgtcccaccgtgtgggcccttctgtgtcccttaagtcagttgtaaaattaatacagatttttatatct

SEQ ID NO: 501201 - DNA, 917 bp, Homo sapiens
gggcacattggcggcagggccagtccgccggcggtcgcgcacggtccgggtcccttttgcctgtccagccggcgctgtccctgctccctccctccgtgaggtgtccgggttcccttcgccagctctcccaccctacccgaccccggcgcccgggctcccagagggaactgcacttcggcagagttgaatgaatgaagagagacgcggagaactcctaaggaggagattggacaggctggactcacccatagattttctaaaaaatcttggaaacgtattgtccttcatagaattacgacacatgtccacactttaatttactcgaaaacgcctgtaaatcggctgaagccatgccttgtgttcaggcgcaggtatgggtcctcgaccctcaaggagccagaacccgctttctcagagcatacagatgtaccactcttcgggagaatacagcctccgatttactttaagtaccagagtatgtcaagtgtagcatggacctcaccaagactgaaatcactgcaccacttcctctccccagattaagatacctttatggacaaataaagaacaggctccgaagtcaaaggccaccaagccagtaccaaaagtgcccatggtccggacagcagacctcccataaaggtacgaagacattcagatgcacaacataccagagaaaaagacaccagaccacccaaaactgggagatggtgacgcacccgggacaggaaataacaaggcatcatagaacacgaagaaccaacacccaaggctacaagatgacacagcaacaccagtggaggacacaggaaatccacaaaaccaccacaacaagagcagaagaaataacgcgaagaaacgacacacagacacgaaacgaaagagaccggagccggaagagaccacaaagacacaca

SEQ ID NO: 501202 - DNA, 968 bp, Homo sapiens
ttggaacacttatacctattattcggcgcattgagctggtagtgctatggcacagctctacgcctccttattcgagccagagtctgggccagccaggcaacgcttcgtaggtaacgaccacgatctacaacgttatctgtctgcagcccatgcatttggtaataatcttcttcatagtaatacccatcataactcggaggctttggcaactgacttaggttcccctaattaatcggatgcccccgatatggcggtttccccgacataatgcaatcataaggctgtcgtgactcttacccgccgctctctgcctactcctgcatcgtgatctgcttaatagatggcaggccggtgagcaagtgaaactcaggttgaagcgagctctaccgcttctcctttagtcagggcacacatacgtccactacgccttgtgcagccgtccagatagaccgtgaacctatcattcatcctgtgacagagctaggcgaggtgatcgtcgttcatatgcttaggtgggccgactccaagtatgtcagtctaacaaaacaaattcagtcagagttataaataagcccacctgaacacagtagaacccagatatatcctatatacggccccgcgttcgttgcgatcttggagtcgcgatgcacatacattcgacatgacaggtccttgacttactgcccttattcatcttccccagtcgctagactgcatgggcagtcacttatcacttagtaaacagaaacggagaacctcaaggaacaaacagtttcattccgaaaaccccgtgcgagcaaggggagagaataaacccacagtttcgtaagtacccaaaactagcttaatttcctggagtgttgtccaggtcacaccctgtagggcttatacatatacttactagcgtgcaagagttcggccaataatcggccaatattggtcaccgtataaatccggcaagacagcaa

SEQ ID NO: 501203 - DNA, 862 bp, Homo sapiens
  misc_feature (16)..(16): n is a, c, g, or t
  misc_feature (113)..(113): n is a, c, g, or t
  misc_feature (119)..(119): n is a, c, g, or t
  misc_feature (153)..(153): n is a, c, g, or t
  misc_feature (194)..(194): n is a, c, g, or t
  misc_feature (196)..(196): n is a, c, g, or t
  misc_feature (200)..(200): n is a, c, g, or t
  misc_feature (202)..(202): n is a, c, g, or t
  misc_feature (207)..(207): n is a, c, g, or t
  misc_feature (209)..(210): n is a, c, g, or t
  misc_feature (212)..(212): n is a, c, g, or t
  misc_feature (229)..(229): n is a, c, g, or t
  misc_feature (235)..(235): n is a, c, g, or t
  misc_feature (239)..(239): n is a, c, g, or t
  misc_feature (256)..(257): n is a, c, g, or t
  misc_feature (278)..(279): n is a, c, g, or t
  misc_feature (284)..(284): n is a, c, g, or t
  misc_feature (302)..(302): n is a, c, g, or t
  misc_feature (328)..(328): n is a, c, g, or t
  misc_feature (332)..(332): n is a, c, g, or t
  misc_feature (366)..(366): n is a, c, g, or t
  misc_feature (391)..(391): n is a, c, g, or t
  misc_feature (396)..(396): n is a, c, g, or t
  misc_feature (400)..(400): n is a, c, g, or t
  misc_feature (447)..(447): n is a, c, g, or t
  misc_feature (449)..(449): n is a, c, g, or t
  misc_feature (455)..(455): n is a, c, g, or t
  misc_feature (480)..(480): n is a, c, g, or t
  misc_feature (495)..(495): n is a, c, g, or t
  misc_feature (535)..(535): n is a, c, g, or t
  misc_feature (541)..(541): n is a, c, g, or t
  misc_feature (544)..(544): n is a, c, g, or t
  misc_feature (552)..(552): n is a, c, g, or t
  misc_feature (680)..(680): n is a, c, g, or t
  misc_feature (786)..(786): n is a, c, g, or t
  misc_feature (839)..(839): n is a, c, g, or t
cccagctcccgaccanaacccccttcctcccccggggaaagcaagaaggagcaggtgtggcatctgcagctgggaagagagaggccggggaggtgccgagctcggtgctggtntctttncaaatataaatacgtgtgttagaactggaaaatnctccagcacccaccacccaagcactttccgttttttgccgntntttntngaggngnngngggcaggggcgccaggnaccggntggntgcggtttattgcatcnnctgggtgttcaccccgcgagnnttctnctgctcattgtagaaganatgacacttggggtccccccggatgnttgnggttccttggtttattttcccggtgttggggttnacacaccagcacttcccacgctgcncgttnaganatatcttgcactgtttgatgttgtacaggccatgtttgttacagttngngatgtncagggagtagaggtgctctatatgnccccgctcatttggnaggtgcatggtggagatccgctccaggacctggtccagtncctgtnggnagggagtnctggcagggggtggtcgcagcttcttgggctcctccaggccaaggtgatgcttgccacccttgcccatctgccggtgctgctcagtgaccttctcccggaacacggccagctccttcatacccgactngaggggcttccggccagcactgcctcccccgcccaacatgttcatggtgctgtccacgtggttctccaccaggcctccttctgagtggtcatcgccattgtctgcnacctgctccgggctggcgccatactcggcgtcccggcgcttctcacaagtgcnctcgcccatgaccagcgcctgca

SEQ ID NO: 501204 - DNA, 1415 bp, Homo sapiens
ctatcatagaagagcttatcagcgctttcatgatcacgccctcataatcattatacacattatctgcttcctagtcctgtatgcccattttcctaacacatcacaagcacaaactaactaagtacgtaacatcgtcagacgctcaggacaatagaaaccgctgtgaactatccgtggcccgcacatcatcctagatccgtcagtcggccctcccagtccgctacagcagtccatttacactaagcagcacgagggtcaagcgactaccctccgcttacacatcgaagagtcaacttggacacaccaaactggctagcatgcaaacgcctagcgcagctaccaaccagcaacgaaacgagacgagcacacaaacatacgttcaaaccatacacgtagcagtaccgtaaccacacacgagtaggaatgccccatcagccacaccccaagcggacggaccacatgaccgaacctccacctctcgcacccgctgtcgcacccacacgtcggcacgcgtacagctcacccatacccaccggcagctcccgcacccgcccgcccacccacatagcccgctcactcaccagtcacaccactcacgcacctcacgaacgcagacgaggaagcccggccgtcgctcccgcccccaacccaatacacaaatggaaagacaccaccgcctcccccagccccaagaagcctgcacgcgcggacctactcacagcacacacaacccaacgcacacatgcaaccaacaacgccgccccacgacccggcgacaccccggcctcaacaacacacaccaccccaccaaaacccaccacagccataactgatacccaccccgcagggccgcctccccccaacagccaacacaccgcggacgagcacgcactaccatatcccaccaaacgcgagagccgacgagaaacagtggccacccatggcaacaaacgaccacaacgcaaccgcgcaaagcacgcaaacagacgcccacagcaaagcgacaaagacgccacaacatgaccaccacccaacgacaccggacacacacgcatacacggcgcaagccgaactacgcagaagacgctcacgcgccccgggccatctacaagaccaccgaaataccccctgacacggcgacagaacaaccacacgagcgggcaaccaccgcaacagacttacgacaccccccgccgacgcaacataagagcaagcacacgcggacgccacacatacccgatacagacacacacgcgccactaccgcatcaacaccaagacgacccaccaaggcaccacgcacacggagaccgcaaccaacaccacacaccgcgcggacaacggtcgaccacgcaacaccacaccacacgacacaacagacgccgcacgcagccaccgcatgacccgagacaggga

SEQ ID NO: 501205 - DNA, 441 bp, Homo sapiens
  misc_feature (62)..(62): n is a, c, g, or t
ccgaagttgggaagtgagaaaccatgtttttaacttgtggctgcttttgctgctgctgctcntccgtatctggctgtatgggtggagaacccaccccctgcccaccacaggggtctccttccaggccactcaggacattttagcttctctcctccccatgctcccttttttctctaaagtcccctgacatcagccctccggactcctaagagggactacccatgagagtggggttctgaggcctccctatggggacagttccgctcctgaagtgtcagtgttcggcatctctgtgcctatgagccccatctcaggtttgggaccccccagcccctctgatcagtctcggagtccccccttgggagaccctacttctttcgagccccagcccctcttcttaaccacctccgcatcgctgtctatccctgtatttctcgaaca

SEQ ID NO: 501206 - DNA, 322 bp, Homo sapiens
gactgcatctgaacagatacacaggaaatgtgaccatatagcaactccaccatcccatgtcgacaccaccaccaaatgttacagtgacccacaaagcaaggtgttcacaataattacatggggggaatataataaaccaacaacaataacgaaaaataaaatccactcactctgcagctgtatcaaaattttactgttaagtattagcacgcccttcccccccccaaccctgtaaagtaaggcaactaacacattacatctggtgaaccagcaaagatatcactcaaacacaaaatgcagcaccactatgcaagcagaggaa

SEQ ID NO: 501207 - DNA, 332 bp, Homo sapiens
tcagaaggtgagaagagcaacaatactgctgctacttacacaacactgacgacgagagaacagtagatgaaaggacgcgataggcaacatcatcatcattgtgccgagcaggagagtcatctagcagaaagcaaagaaaagcacttgatggagaaaaaaaataaacaatcagataatagtgaatacagtaaatcagaaaaaggcaaaaataaagaaaaagacagggagctagataaaaaggaaaaatctagagataaagaaagtataaatataactaactccaaacacatacaggaagaaaaataatcaagtatagtaggcggtaaaagctt

SEQ ID NO: 501208 - DNA, 168 bp, Homo sapiens
gatcaatgtaggtgttttaaaatagaatttttaggtgtttttcttgacttcaattagaaaatttgttaagtgtgaacccttttatatctttaggagctgttttgggcccacaaaggatattttcgtgaagctcgtaatgtattttcccaaggagagaagcgacaccag

SEQ ID NO: 501209 - DNA, 870 bp, Homo sapiens
gccgcgcgggacggagcttgtgctgttggtcggtgggttcccgtgcggcggcgtgccaatggaggatggagacacagttgtgatgcatgctcctgtgggctgactggtgtgctgaggcctcagcatgcgctgagcttgagtgctggcctgagcctgctggttgccttcccctgcgtggtggggacgagctgggccccgctggctgtcatctggctggcgatggatgcctgccagaggcctctggcctagcatagtcggacagctgggcgaggtgagcagcccattggcagaacgacgtggctgccacctggagaacggacatgagggcctgttcccccgacatggccgaagtctggccaggcactggagtgcttggcacaggggacggccagcatgtgccgtgggtgcttgggacgtgcgcagacctgctgtgctgccccccggaagcgaggaaattcaggcaccggctgccagaaggggcgtaacccgagtagttccaacacgtccatagaccacgaacaccgtaagcggactcggcaacggcgggcggagacacaccttgcttccggtctgcgctgggcccttgaggccttggggaattactttaggcgcaacactacatgcactttttcaacacgcacctacttcttaccctaacaatttttgggcaagacagcgatccgcttgtgaacccttgttaccacactacaagatattgcgaattcccccacacgcactttgcgaaccgggttcagacgacggaggcatagcgggggcttataagtcccttgttctccaacactgcattgcagcacccaggctgcatggccagaaagtggttccataggacccaagaaaaggcgcagccac

SEQ ID NO: 501210 - DNA, 353 bp, Homo sapiens
tttttggggaaaaaaaaaaaaaagggccccccccgggcggcccccggcaccctttttttccaagggaaaggttggccccaaatttcccggccccccggggggggctttttccccttccccggggggttttccccaaaggggaaattttggggcccccctttattttttaaaaaaggggtccctgggaaaaatgggaaaaaaaaaccgggtaggttccccccgtttccccccgggggggggggttgggttaagccctttttacccggggccccccccctggggtaaaaaggggtttaaaaaaaaggggaaattcccgttaaaaaagttaaaatttttaaagtttttttttttta

SEQ ID NO: 501211 - DNA, 550 bp, Homo sapiens
  misc_feature (534)..(534): n is a, c, g, or t
tcagccggaccctcgcgaacgtgttatccgtgtcagatctgaagatgacaggagcactgaaggaggtgaaataactgattgctgtcctgaagtgatttttgtagaaatctagtctaactgctctagaagggactgtagatcccaaatagagagactattttgtttgcagatttggggagcaccttgctgcactttgtcatacaattgtgggttgtggctggaatcctgagaagaaaggtttttctctcaagtgaagcctggtgggcactttgtatataacgtccagtacttctaaacagtgcatggaaaatatgactaaaagaaaaattttcagccaggcacggtggctcacgcctataatcccagcactttgggaggccaaggccggtggatcatgaggtcagaagatggagaccatcctggccaacatggcgaaaccccgtctctactaaaaatacaaaaaaattagctgagtgtggtggcgcgcctgtaatcccaactactcaggaggctgagcagttgggataacacgtncgcgagggtaccgagc

SEQ ID NO: 501212 - DNA, 547 bp, Homo sapiens
  misc_feature (531)..(531): n is a, c, g, or t
atagatcgagtcggtccctgggaagtgtatcgggtagatgtgaggtgactgtaaagtggaggagggacatagctgatggtgtcgtgcggcgatttacgtagaaatctagtctaactgctctagaagggactgtagatcccaaatagagagactattttgtttgcagatttggggagcaccttgctgcactttgtcatacaattgtgggttgtggctggaatcctgagaagaaaggtttttctctcaagtgaagcctggtgggcactttgtatataacgtccagtacttctaaacagtgcatggaaaatatgactaaaagaaaaattttcagccaggcacggtggctcacgcctataatcccagcactttgggaggccaaggccggtggatcatgaggtcagaagatggagaccatcctggccaacatggcgaaaccccgtctctactaaaaatacaaaaaaattagctgagtgtggtggcgcgcctgtaatcccaactactcaggaggctgagcagttgggataacacgtncgcgagggtaccgagc

SEQ ID NO: 501213 - DNA, 857 bp, Homo sapiens
tgagcggggtggccaggctgctgaggagctggggccggggcgggacgggaggcggtgcgtctgctgagcgcaggccgggtggccgcggagtatcctggagctgcagacagtgctgggcctgcagcaccagtcccgggctgtcctctgccagcgaactcctcctcgagcccttgtggctgcgctgcacgcttggggcccctgcggtgggtttggccgtgcctcagctggatgcctgcctggtcagaacctccagtctaagctgcatgcgacgtggtgcgcatgcacttggacccagggcgacacatcgggaatgtgacgactatcgtcgtgacagtacgcgtttgggaccgtacgagacacgaaagcttccaggtggttgcattctgtgcgagaaccacctggaagcagggtgaattacaattgcagtaggtctaagttgtaggcaaggagtgactggcctaattgcccatggggctttttcttgggtgccttataagactgcactggacggcttcgccaagtgaaaggacctggaggggtagaaaccccatggtgaagtgcaccccgtggcattaccaatgctgtcgtgctgtccacacgatgactatctttgcataatacctggtgccggacccacagggggagaggcccacgcgttcccggcgtcgttgggggccaagcgatgggaacagagggtccacgactaggcacacgcaccgcgaaaccgtagcgtgccgattcaagcggcgccattgacacacagagggcaatttgcccgaggaaattcgtacatacccagtccttttagataccggacgaaccctttcctattgcagcccttggtattaaagacgaca

SEQ ID NO: 501214 - DNA, 221 bp, Homo sapiens
cactcttactctcatgcacaaaataacataagggtcaacggggataagagagcagtatataaaagagaaaacaaccaaatgtaatcctcctgctagcccagcacaatttcctgaacactcacttatatctacagcactataggtcacaaaatagctctcgtgaactttaaaaacagttccttttagtttaagaaaataagattttataaactttttattat

SEQ ID NO: 501215 - DNA, 211 bp, Homo sapiens
tgcctttcctcacgaggagtctctcaaggtgtgctagcagtgggccatgcccaacttcaggcagaacagtggaggccagagattacagatccccatcctgtaaggtggccaggcattctctcccctgcctctctgggacctctggggtcatacatcacttctttctgccatgccccaatccccctccacccctacacctgtcagttcttgc

SEQ ID NO: 501216 - DNA, 856 bp, Homo sapiens
  misc_feature (782)..(782): n is a, c, g, or t
aatcccagcactttgggaggccgaggcgggttgatcatgaggtcaagagatcgagaccatcctggccagcatggtgaaaccccgtctttactaaaaatacaaaaattagctgggagtggtggcgtgcgcctgtagtcccaactacttgggaggctgaggcaggagaatcgcttgaacccaggaggcggaggttgcagtgaggcgagatcacgccactacactccagcctgcgacagagcaagactctctcaaaaaaaaaaaaaaaattttttttttaaaaaggggcggggcttgggggtttgggcactgtagttctcagcaactgtggggaggctaaagtagtaggatcgctgtgaccctgggaggttgaggctgcagtgagcggtgatggtgccacgtgggctcacagtttgagtgacagagtggagacccttctttgattcaaaacaaaaaacttggtttctcctctctctcgtggtttaatctctatccattggatgtagtgattctaaatgcttggggaagttaattcttaaccaaaagagacttgtagtgggcccacccattaagtgaggtgcgcaattaaaacccggggtagtatggggtgcggaacattgggttttcaaaagataattctagattaggaacttcatattaaaaggttttttggggacattacggttaatcaccaggtttaaggaggtcgttgagcctttaggaggagggttggcgactacggggcgcaggggtataatgaagaggtgcggttaaaattgtcaganagagaggcgaaggcgtttgtgttatagcaaggtataaatggaagggggggaaccaaaaacggacaaaaagaggg

SEQ ID NO: 501217 - DNA, 265 bp, Homo sapiens
atactacgcttctgtcctaaactttatacatatttcaatgaaggtacgatatactctctgaacctcaataccttcgatatcatatattacacttgatccatattggtctctttgtttcgggattttcctatttattagctcatgagcggtctcaccttctcactctggctgtgctccttttcccggtctcgcgttgtccttactcctcagcttcctgggtctgtggccttataggcatcaccctggtctgtcgcgtatcctctcc

SEQ ID NO: 501218 - DNA, 640 bp, Homo sapiens
ggagagagagatagagcgagcgagagagagacagagagtgcgcttgcgagagagggtctgagatggagagactagatagcaacggagggacttccaggattagcacacttaggactttacattaggcatggcctggtatcaaaccgcggcataacaataactattggaggctaccatagaactatgaagatcaagtcttctctatactgaaactctagcaagtcagatgccacatttcttattgggaagtcaaacagggaatgtcaaacatatagacgtgaaatgctgaccagaaagacgagacagaattataggtaactcaccagatgctagataaatattttgctgtgtagcgccatatctgtgagaccatagatcagtatgatagtctcggtatcacctgtaagaacatacagaagtattaatcattatacacatcctgtaggttcgcgactgtgtgaaatgcactatgcacagggcagagaagtatgttcagaggttgtgtgagggaaggagcacatgacggggtgaggatctatctgtgcaggacagagatgagcactacggatcagtgtgtgtaatgtgacaaggagttccaagttcggtaccacatgttaccccacctggtatatggcacacc

SEQ ID NO: 501219 - DNA, 122 bp, Homo sapiens
ggtgctactgtcgtagagcttgttcacaggggatctagaactacatcggcacgtctgatcgccgatcacctctgagacccaccttgctcataacaaaatgcccatgttggtcccctgccaca

SEQ ID NO: 501220 - DNA, 411 bp, Homo sapiens
caacctcgcacctgttatgtcgctaaagatactgtcttacctttagtctctgtgccagcatcttgtacatcacttattctcacacaacgaagtgagaacaagcacatcacggggccaggactggaacagaatgaatgacttggtggtcatgggcatctgttcctcacaaccagcctctttctttaaacgccatggatagccatcaacatgcaggctgaccggaaaaagaggcactgtctgtcaccatggagaccaagagcagatagccacgctgctcgtctccaacctcttctcagtggcggtgggaactggatttagaggatggggttacgcaactaacaggataaaccaatgacttccagacgtgctgtcattaggaaacatctcagaatctgtagtgctgcacttcaa

SEQ ID NO: 501221 - DNA, 277 bp, Homo sapiens
  misc_feature (84)..(84): n is a, c, g, or t
  misc_feature (197)..(197): n is a, c, g, or t
  misc_feature (215)..(215): n is a, c, g, or t
  misc_feature (229)..(229): n is a, c, g, or t
  misc_feature (239)..(239): n is a, c, g, or t
gttttatatgctaaaaagtggatacactccagattggatatttctgcctgagaaatgtaatgcggattcagtccagatcagggncagcagttgcccacatgttagttcaaggtggagggcctctgctgacatcacacaggttgtaggtgtctttatgggtacaatctaattcagaggtctccattctgcttgatgcnctgaggataatcgcccanctggaggcctttcnagccggggtnccttggagtgccctatccatcccctcaagttccaggtc

SEQ ID NO: 501222 - DNA, 86 bp, Homo sapiens
ggagagagggatggtttctgaggggttctgaaagtatgattcactgtgcaacatacaggtaggtctcagcataggctgacatatat

SEQ ID NO: 501223 - DNA, 341 bp, Homo sapiens
tatccccatcaaccctaaatctattatgtatgatataaaacttaactcacgaaagatgaggccaggtgcagcggctcatgcctgtaatcctagcacttggggaggtcaaggcgcgtggatcacctgaggtcaggagttcaagaccagcctagccaacatggtgaaaccctgtctctactaaaaatacaaaaattagccaggcatggtggtgcacgtctgtaatcccagctacttgggaagctgagggagaaaaagcacttgaacccaggagatggaggtttcagggagccgagattgtgccactgcactccagcccaggtaacagagcaagactctgtctt

SEQ ID NO: 501224 - DNA, 489 bp, Homo sapiens
tcatagtctggacatgcagtatgcgtagagcttttgtctaggcagataatatactttttccatcttcagtctttagaactagaggattccttgcgctggtttacttcctctaatgaaatttattggctcggctcctgcacggttgtatctgtactttcctgctgattgattttcttcttctcttctttctcaactaattatttcatagggtcttgtatagctgctttaaagtattaaattcatatggttgattacctttgagaactctcatggactggctgccatagtgtgagaagtttactcccaaaaatgaagcagagtggtctggtatgttgctagcatgtgagacaagagattgcatctgctcgctccaagaagatccactttttgacaaacatccatcttcaatttgtcagagttttttttagcaaggggcacttgtgtttgtaccttcctgaacttctccatttgcttgtagaggtctggatc

SEQ ID NO: 501225 - DNA, 181 bp, Homo sapiens
agagatcctgcccaatgtgtatacacagcatgtgcaacactcagaggtccagattcccactatggcacaaaaggattgaagagagtagtgcatgagacacctgctgcgagaagactgttttgctctttttcagttccctggcaataataatggcacttcaatagaagatggacaattccag

SEQ ID NO: 501226 - DNA, 208 bp, Homo sapiens
tttatgtttacgaggaacagcagaagagcactagtggtgaatgaagaataatgttaccgtaggaaaagcagtgtattgaagcatgaagattacagtgactttgatttactttggagagcaaagctatagatggcccacaaaacttcatatttgtggctctgtttgcaatgatcattgtatataaatgaatcgtaagacataaccgcgg

SEQ ID NO: 501227 - DNA, 728 bp, Homo sapiens
  misc_feature (50)..(50): n is a, c, g, or t
  misc_feature (82)..(82): n is a, c, g, or t
  misc_feature (86)..(86): n is a, c, g, or t
  misc_feature (89)..(90): n is a, c, g, or t
  misc_feature (95)..(96): n is a, c, g, or t
  misc_feature (114)..(114): n is a, c, g, or t
  misc_feature (130)..(130): n is a, c, g, or t
  misc_feature (133)..(134): n is a, c, g, or t
  misc_feature (144)..(144): n is a, c, g, or t
  misc_feature (149)..(149): n is a, c, g, or t
  misc_feature (152)..(152): n is a, c, g, or t
  misc_feature (154)..(154): n is a, c, g, or t
  misc_feature (169)..(169): n is a, c, g, or t
  misc_feature (188)..(188): n is a, c, g, or t
  misc_feature (200)..(200): n is a, c, g, or t
  misc_feature (210)..(210): n is a, c, g, or t
  misc_feature (214)..(214): n is a, c, g, or t
  misc_feature (218)..(218): n is a, c, g, or t
  misc_feature (224)..(224): n is a, c, g, or t
  misc_feature (235)..(235): n is a, c, g, or t
  misc_feature (250)..(250): n is a, c, g, or t
  misc_feature (264)..(264): n is a, c, g, or t
  misc_feature (275)..(275): n is a, c, g, or t
  misc_feature (343)..(343): n is a, c, g, or t
  misc_feature (354)..(354): n is a, c, g, or t
  misc_feature (398)..(398): n is a, c, g, or t
  misc_feature (416)..(416): n is a, c, g, or t
  misc_feature (425)..(425): n is a, c, g, or t
  misc_feature (429)..(429): n is a, c, g, or t
  misc_feature (435)..(435): n is a, c, g, or t
  misc_feature (458)..(458): n is a, c, g, or t
  misc_feature (465)..(465): n is a, c, g, or t
  misc_feature (467)..(467): n is a, c, g, or t
  misc_feature (482)..(482): n is a, c, g, or t
  misc_feature (504)..(504): n is a, c, g, or t
  misc_feature (536)..(536): n is a, c, g, or t
  misc_feature (568)..(568): n is a, c, g, or t
  misc_feature (725)..(725): n is a, c, g, or t
acagatgaagcaccgagggttactacgttgtcttccctagatcaattttnttctggatggctcgtgctgagtggtagatgancgantcnntgacnncagccactgttttcatgnccccaatgatggcgcnctnncctgttaggnagttngtnanggacctgttcttctncgtcagcttcaccatcatnttcgagatttcntagaggacgnagantctnggaagntcttggtcgcncaatatcccattggnaaccttctcatgtntggtcacatanaactgatttgttctcagtacctctccgtccaccttcatgtacacagtgggcaccaccttcacaaagtnttggtacattntggaggcttggggcgcagtgacattggtgtggtccagggggttnacaatgcctggataggtnctccccaantganaggtgntggatgtgtgtgggtcatgttgntgttgtnanggccaaagctctgcnagttatggacgtgcacatgggncttctggaagctcttcccaggggcaaagtggnagttttcggccaccttattgtcttttaagagncatacacctggcagccttcattcttctgctcctgcatcttctggctgaagccctctcgccggcactgctcaatagtatctgggttcttgaaggcacagcctctacggcgatatgcctcccgcacatcttcacaggtgtcacagcacttgatatcttntgc

SEQ ID NO: 501228 - DNA, 621 bp, Homo sapiens
  misc_feature (164)..(164): n is a, c, g, or t
  misc_feature (366)..(366): n is a, c, g, or t
  misc_feature (396)..(396): n is a, c, g, or t
gtgtttcgttacttctttgcttatcccgttcagttcacattgtattactgcttgatttctagtttggtttttccaaatgattgctctttttctgtgaattttcaagggttgttatgtggttgtcatttgctaatgtgatgaacaagtaattcaagcaattatcntttaagatagttatatatttggtcagtttttactattttacgtaattatttaaggggtgagtatttttcatatcatttattcctaaatgtcactgatagcatggttattggaaataagcaaaattaatctcattggtacagattttagggcctatatatgttgcttaaattactttagaaatttttttcttgaaacgaaatnctctgtatataggacataaaccatgaattngttaattggtttttaaaaaaattaaatttcacttgacaaaaatggcagtcatggaaaataagtagccagctttataagcttctttgccaaagtgctgggattacaggcgtgagccgccgtgcctggcccatcagccttctgttaatatatgtcggtaacttctctgtctcattcttttcatctctcattcatctccaatttccatctcctcgagatggagtctgg

SEQ ID NO: 501229 - DNA, 1002 bp, Homo sapiens
  misc_feature (441)..(441): n is a, c, g, or t
  misc_feature (450)..(450): n is a, c, g, or t
ccgtcatctactctaccatctttgcaggcacactcatcaggagcgctaaggctcgcgctgattttttacctgagtaggcctagaacataaacatgctaggcttatgattcgcagttctgaaccaataaaagagtaataccgctcgattgccacacgaagactgccagtcaagtattatcctcacagcaatgcaaagcctgcatccgataatccgttctaatagctatcctcttcaagcaatatactctccgggacaatgaaccataaccaatactaccaattcaatactcatcattaataatcataatggctatagcaataataactaggaattagcccccgtttcatcttctgagatcgcatgaggttagcccaatggcagccccgtctgacagtccggcctgcattctgcatcagcatgacaagaatagatagcccccnatcgtcaantcagtatttaccaaaaggtcatcatcacactttactcagaacggtaggagccttgctgccgtcgagctctgctcaactgcgttatccattcgatagacacggcagttgaggatggattagagacgcaataccgcagcatacgcgaaaatcttagacatatctccatgaattacccaacataggtagtgaagtaataagcagttcgtaccgtacaatcctattgataaccattcttaatttaactatttatattatcctaactattaccgcgttcctactactcaagttaaactccaggcaccacgaccctactactatctcgcagcctgaagacaagctaacatgactaacaacctttaattccatgcagcctcctcttcctaggagggctggccccgactaaccggtttttggccaaatggggcattatcgaaagaattcggcaaaaggcaataggctcatcattcccagcatcaataggcagcaataacctcacttaagctctattgtacctaaggctaagtgtatccacttcaattcaaatagtcccac

SEQ ID NO: 501230 - DNA, 139 bp, Homo sapiens
cgttagaccacaccttctgtcatggcactttgtagtcgtttcatcgagtctgaggctgctcccacgggattggttggtagaccatgaagttgattcccgcctctacagcatctctgtgccagcactcgtcctatactct

SEQ ID NO: 501231 - DNA, 161 bp, Homo sapiens
catttcgctgcagcaggttagcggtgagctcggggccgtaggtctccaggttagacgctgaccagcttgtcggtgaggtccaagggcgtcatggacagccggcgcgccccgcgggatgcgcccgtagccctcgcgctgcgtcaccgacagctgcttccgct

SEQ ID NO: 501232 - DNA, 249 bp, Homo sapiens
acagaatgccatcgtgtggaatatcacgcgcattgcatgccttaaggaattcgcagatcatgcgcagagattgagcttctgtctaccaacgacaagaatgaaatgggctcgagccccatttccattaactttgaggtgcctttcggaccctctggtctcaaggtgcgctacttgaaggtgtttgaaccgaagctgcactacagcgaccattatgtcctcaaatgggtgcgctacattggcccttatgag

SEQ ID NO: 501233 - DNA, 470 bp, Homo sapiens
ctaagccaaacaactgataattttcaaaatctattttttctcctgatttaatggtcatacttgaaacacaattatatccaactgatccatgttgtatatgccttattttcaaaagtctcatttaagctcattcatgccctttctcttatgtagtcttcttcgatacgaaaggagcttggaataaatatccattagagcttttaaaaacacaaaacaatgctttaatgtttcttttttcctggactgagtttggctgaccaacaaaatctctcaagccattttgttttgatcctaaaatatcaatggtggctctcgaaatttggtagatctgatatcaagaaagaatttcaaagatttttatatcttttcaaaatgtattttatagttgctttgcatacactaaataactttgtttatgtaaactgtcaatattatcatgtaataaaataaatttatttttaaaacaaaaa

SEQ ID NO: 501234 - DNA, 138 bp, Homo sapiens
cgcctgtacactgggcatgctgttaatcagaggacaggatcctcagtgaaagtgacccattcgggatggcatgtcactccaggaataaacacaacttagtaaacaaactgatttccgtcactgatagctacagtgact

SEQ ID NO: 501235 - DNA, 468 bp, Homo sapiens
ggcccaatggctggtggcttgatgcatgcgtgcttcatagtgctgtgtcctgggagctgcgcatccagtgccgaggagatcgtcttccatgacctcaacctcactggctgcacggcatctcccactgccaccacctgtcgggaccggcccatgccagaatggcggtcagtgccatgactctgagaggcagagctacgatgtgcgatcttgcccagcatggcattcacacagggagccgcatgatgagcactcgcaggcaccatgcgacatgccatacacgaggcctgtgggcaccgaaagccaaccatgtgtgagaacgggactgatagcgaacgaaggctacaaacatgacagcagtgcacgaactatggcgaaggcatcacaagtatgaggcaaagatgaaagaaggggagttgagaaagagaaacaaaacgaaaagaatagaagagataaatgaacaacacaaaa

SEQ ID NO: 501236 - DNA, 218 bp, Homo sapiens
  misc_feature (191)..(191): n is a, c, g, or t
gatcagaggattagatgtatgccaacacttttggggtctgaggcgggcagattgtttgagccaaggagtttcagactagcctgggcaacatggtgagacccagtctctaaagaaaatgcaaaaattagccaggtttggtgtgcacacactccgtgtagtcccatgctacttgggacggctgacggtggganggatcgcgctgagctcgcaggtgaggt

SEQ ID NO: 501237 - DNA, 271 bp, Homo sapiens
gaatgataggacaaatcccaatgatttcgcatccgagaaagttaatgcgaggacatacgagcaccagcggcactcttagggggctagtaagaaaaatccgtaataagcaaatccgtaatcgatcctgaatggggccgggggctttttttgcgattggaacggcgattcaacataatcaccggtatgatgcggacgcttaggagaaatttcttcagtgccaaatatagtttacgaactagggagcttatatacttctagaggacgggcgagc

SEQ ID NO: 501238 - DNA, 1259 bp, Homo sapiens
cattcgtatgtcatggtgaatgccaaatttgaacgaagaatcacaagaacctgttgctgatgaagcaagaggaacgacagtgactgactgactgcttgaagccatattactgacattctacgactctgctgcctacgtgataacatcagccgctcgccgacggcaaactgttcacttgcacactgctgcgcaactgccacggccctatgccattcccagactccttgcagcgcatgcagcgcactctcacgcactgcacctacgcactgcgacgcaacgcaactactgcactgctgcgcacagccacactgcaaccacaggcaccacgggcggaacactccgcctacattttttaccatcgcttactgcaccgcacagcgactttattcccagtgctaagcagccacgaacacggcccacacgtctcaccacctggcaccacgcactctaccacacgcgcacagctgcccttctccgtccaggcgtcgtgctgcacgccatgcctccacgcctactacactacctgcgccctgcgagcgatccacggccaccccgcacacgcactccccacggtacacgaagcacactccactcgcaccgcactgcgcgcacctgagcactgcgctgcgcacttacccccaccaaaccgaaaccataggctccgctcttgctgtctctgccccccgccccgcattgtctccccactgcctccgccctcaccctcgcacccccctgcatcctcccctcgcccccggcccccccccacctcccgtcgccctcccttccccccgcctccccgcccccccgccctccgccctgcccctcctcgtaccaacaccattcacctgcagccacgccttggtaaacgcgtcttttatcaccttggaatctaaaggactccattcataaatcgaccgcctttaattagccctaacaatcacacctctacaacacgctggtgaacacgctaacagatcatcccacaggtcaccccggacacccacccccacggagcccttatagtttgcccgcgaagccactccacaccacactggtcttggtgctcaaccacacccgcctccatcccaagcccagctcaccagccgtacatctacctaggacaccccagtacaacacccacacacgcccctggcaactagcaacgagtctcaccctccgtccacgccaaggacacgggcagcctaacccgccacgacccacacacaaaatacataacaccactcaaacacagacgccgt

SEQ ID NO: 501239 - DNA, 178 bp, Homo sapiens
tatgcttaatcctgggtggtaagagagtcctcctagagatattagctgatgccacatccacgagtgccactactgtcgctcaatgcccacgccctctcacagtgatgatgcagcacccactccccaggccccgcccacgccctctcacctgagaacatgcaccatgctccccacagcg

SEQ ID NO: 501240 - DNA, 1022 bp, Homo sapiens
atgactatactcgtacctgtgatgatagcagactcgagaaacaagcgtcataccactattattcgacgccatgaacctgcgaggtcctaaggagccgttctacatctccattatgcaaatcccgtaggctggcgccagacaagggcgaagcctgtcttgagggttatcctgtaggggcacaatgtagggaagcgctcatcgctaaacagtctggccatgcgaatctagataatcatttctttcattcaatagctcaatcaccgcatctgtaactccgcggagcgcggttcggctcacactcgcagtcatgtgtcccccttaagtgagctcagggttgcctcgccggagtaattggagcggtttgtcccctcgggcaataaaactagacatatggcgttcctgaggtcttacacctgctcatcttcctcgccgtactctcgtggtccgcatcatgcctatgagttgggaggggcccggtacgcctaagagaagcaagtgttggcgagcgaggtcctaatttcccttcactcctttaagcctagggtgactatcttaaacttctccccagcacgcttgggccaccgtcccctactccgttaatggagcccttaaaaacacaattactgtacttctcgtattaactaaccctttgatcccaaggattgtccttgctcggtctaattacctttagggggcggcgcaaattccatatgtttctacatttcaatctaacccaaatttataactttccacatgagctgaacaatgccgtggcgcatgacccgactaacttcgcgaatggtacccccaagattgtctatcccccttctgtgcgaatccttgatgttcccggttcgccttaaacatacaacatgcgtaatgcatacgcataagctgtcattccctatttcattcctgcgcgcagttccgtacgcgcttgtcggagactggttccctttatttaccatatctaaatcagaacctggtaaataacatcaaaccaacccatactttcttggcgg

SEQ ID NO: 501241 - DNA, 115 bp, Homo sapiens
atggagcagacactctcatagaggtcatcccagattacgatgaggacctggtgcaggaagcttcatctgaagatgtcctgggcgttcatatggtggacaaagacacagagagaga

SEQ ID NO: 501242 - DNA, 1243 bp, Homo sapiens
  misc_feature (262)..(262): n is a, c, g, or t
  misc_feature (291)..(291): n is a, c, g, or t
  misc_feature (370)..(370): n is a, c, g, or t
  misc_feature (727)..(727): n is a, c, g, or t
  misc_feature (866)..(866): n is a, c, g, or t
ctctaccgaagatcatgcggagcgcttccgagccatccttgcatcgggctagtccacattagaggatatcaattcgcttgcatcggacgtgagcgcagcgatccgcctgtagtgcgtggctcttgtgcttccttaaggtttgacattatagcgacctgatcttcaaggctgcacagggggaggaggacgtaacgcccacgctatggatcaccacattattcatggctaccccatcttcatcaccagaaggccagtaactacnatagttatactcagaagagacacgctgcnctcgcgtacaggccactcatatcctgagtacatggcttcaactagggggcgctatacacacttatctatagttgtgccntatacatttttgtgcataatcgccctatcggtgagcccatggtgcaagacacgagtataagacccatttcgctacgtagctcggtagtcgttccttgctccacttcctccatcattacctgattgatccataggcccctaggctgctagtctgatagtcgcaagtggtgatggtttgactaggtatgtctcagataaagcctggtgccccaggacccaagactagtattgagactaacatagaagtactttacgacgcgaacgtcaaggtagcaggcaagtccaagcacctgatgtggagacacatgggattttggaaatcagcttctggaggaatgcatgtcacaggcgggacttncttcagagagtggtcagcgccagacatttagcacataaaggaccaaacagcccaggactgcgagactctggacgaccgcaaggagcctgattaggtactatggaacttttcttagggggacacgtcctcctttcacagnttctaaggtgtccagtgccttgggatggtttacaggcaaggcattcgggcaaacggattaagcctcttaggagaagatttccatatggggaaataggctccagagctgcctagtagggggggcggcaagggcactgttttcttcacacaaaaccaaaagggttataatatgatgacactggtgattaacggaggaacgacaacaggggaactaaagaatagggggaagagtaatagagcaagaaaaacgatgtggttgcagaataagttgtaagaacaagtataaaaaaaagaggggtatacgggagagacaaacacgagaagaagaagaaaaataacagaaagaaggagagatagaaaaagcaatgaattaatact

SEQ ID NO: 501243 - DNA, 284 bp, Homo sapiens
ccacacttcatcggagaggagcagactctgtctagaaaaaaaaaaatagaaatagaagagaaacagtggaactgccacagccaccccaaccttcagcagccaccaccctgatcagtcagcagccatcaacatcgagacgagacccttctccggtggcgtggtaccacgccaccggaaaagggtctcggataacgggatggggcctcggagggtccctgtaggggctcgtggggtcccatggatcaacgcacgggcttgacactggaatgacagctggggtaggg

SEQ ID NO: 501244 - DNA, 122 bp, Homo sapiens
cacctccagcggttgctttaaaggggttaatttctgagaaaaatgttaacataaaagttttggccaggcacggtggctcacgcctgtaatcccagcactttgggaggccgaggcaggcggat

SEQ ID NO: 501245 - DNA, 1809 bp, Homo sapiens
  misc_feature (351)..(351): n is a, c, g, or t
  misc_feature (1196)..(1196): n is a, c, g, or t
gatgtgcggcgtgttctgagggtgtgcgagagtcctctgggttggcgcgctaattttccgtcgcacgcgaggggccccacgcggtggttgtctgttgttcgtcctgtgggggtggtcaccagccagcgtgtgttgtttgtgtgaccgcgcgggcgaccatacgatagttccttcagggggggagtcgtcttagtttctggttgttcgtcaggctcgactctctctggtcgtccgtcgctcctcttgtcctcgtgagttgtcgtccggttcgtttgcgcggcgctgtgttgtccaaacgtcgtcttcgtgcctcgggcgtgaccaccatgtcgttgtgttgttggccgcgcngccgacatgtttgttgtccctggtcgctgtatttgccttgggggaggatgcacaccgttgtcccacctgggtcgcccgccctcctgttttgttgtgttggttgggcgttttgatggctcgttacccgccgtgtgctgggttggtgggccccccagagtccccccgagcccccacgtgtggaggggccgttctccccccagcgggattgttgttcgttcctcacggaagattgttatgttgtcccgcccctcgctgcacatcgctgttgggggagagggctccacagtcccccctgttgtctagctagaccacgaaccgccatttgggggaccacaaacaggttggtggtgaagaccccctctgtcgactggggcctctgtgtgctggcgtaagccacaccccgttgtagcaccttcgtcggtgtcttgtcctttggggggccgtgttgtcgtgaaatatttgtccggcggccgccccggccctgcatagggtattaattggtggggcgccttcttcctcttggggagaaaagcggcctcgttgggagcgccgccccctcgtggtgtgttgccgccccgccggcagattcttggtggcgccccccgaagtgggtagagagattgccgccgcgcgcaagggggggctgatcaccgagagcgctgttcttgtctctgcggagaaaggaagaggtcgcgccgacaaaagaccccccagaccgtgtggggcgcgcgtccccccgcccgtctagtcttgttgtggtgtcctcaactgcgggagactacttcttcttcagcaggagtatacgcctccacagctcctgctggagaatagaggtgtggagagtngtggggggtggtgttaaaaacactccccgccaacagaagacgctctcactagtgtgatatagccggtgcccaccactgtggcccccctctgtgagagagatatatatagctgtgatgacaccccagggcgcgccctgtttgtgggagatactcttctacagtgctcccccctgtggggtatcttggcgctccggcacactcgagagactcccacacagtctgtctctcgtgagagactttccctctggagagaactctcacactcttctctcaagataagagagagagaagttgagaagctcttatctcacacgagaagaattggggtggagccaccctctgagccacacacctctccaccacgggctctgggtgggcccgcgagagctgggctgtgggcgagttattcttctttcgcaaagagctcacacttctccacagacaccgccctaagaaaccctctttgagaccccgccgcaactttctgtaagggccccctctgccacaagataatagggctttctgcctaaacctttccctcccagcccataggcagcttttttaactatccttaccacccttggaccccaatggaaattaaactttttgaacc

SEQ ID NO: 501246 - DNA, 656 bp, Homo sapiens
aggtggcagcccgagttgcaaccttgaagatcggcggactgcctagtaggacgggattgctaccgaagcggtacgagttggccccggaaccataggtgcacgtagcagccatataccttattggggggacaattttacttggcccattgtggagcagccccccttacaggggccttagcctcggccacttaggtttggagcatcggcacaccaggaacgcctttggaacacaccatttttacacattaagggccggttcccctaggggataaaccccaaggttccccacactggccacaacacactctaatttcccccatgcacaccgcccaaggggataaatccaccttatcaaattatggccgcccaagatgggaccaaatcaccttggggacgtgttggcttacacaagctcccactaagggcccaatatcgtggcaccaccccctcccagttacagattattagatcgaacaataggaggagagcttcacgaaacgggccccccagggcatcgcgggggtctcccaaaccaaattaggatgacacgtgaacgggcattattccgaacacagccgggacaaccccacgtttaataccgtaccccccaattattgtggcaccttagggacacccacttgcctgaatacacaagg

SEQ ID NO: 501247 - DNA, 351 bp, Homo sapiens
gattatactctgtcttgagctgaagtgcagataacaatgtaaggaaaaatctatcttccccagcttcgctagcgatgaaaagcttacccgcctggactgttattcttccacgagagatgggatttctcaggacctagttgctactggttcagcaactgcagaaaatgtcctcccttgtggcttcctcagttcctgcccttgggctgaagtcccagcattgatggcagcgcctcatcttcaacttttgtgctcccctttgcctaaaccctatggcctcctgtgcatctgtactcaccctgtaccacaaacacattacattattaaatgtttctctaagaacagcgtataatg

SEQ ID NO: 501248 - DNA, 1579 bp, Homo sapiens
  misc_feature (960)..(960): n is a, c, g, or t
  misc_feature (1579)..(1579): n is a, c, g, or t
gccgattagcccacatcaggttgacagaagaggcacagcagatcagacccacgaggctcagcagaaagtagatgcctatcatctgcagctccagaacctgatgtatgcagtgtgcatgccacctacagcaaggagcatcaccaacatgttctgcgcagtttcaagtcccacagccatgcaagcaacattgcatcctggtcgagatttagcaggcagtttatcataaggaatggctcccaccagcatatacagcaaggccgacaagtcacctatgggcagaccctccaccagcacaacaactggcaacggtcatggaacgtggagacgcctggagaagcaagccgggacaacccagggctgggcacgacgcaaaggtacccggaagaaggtagggcgtcaattctaaacccaacggcacgaaaggacattcatctcgcacagggggaccaaatcgcgccacgagacgaacaccacaaagcgaacgatacccatcatgcaagaacagaggacaccaatcaccagagggaagcacaccacagaacgagcatcccacacacacaggcacactccacagttggacagagaggagacaacaccacatgaacacgacagaatgcaacacggcgacagggatcaacaccggtaggcaaaacgcaagttggacaacaacaataacaaggaacgcacaagcgggagctgacgaacaacaacgacaacaggaaaaataggaacagcaacaaagacaccacagaaacaagaccccaagacacagcccgaaacataaccacccagccgataacgcaaagaaggatcaacgccacctgatggagggcgacgacacggaggagccaacgctaggacaggctgaaaatcggcggaagacgcaacgagcgagacccaagggcgcgaccaataacaacgcgaacacggacatacagaacaacgtaggagtacggaggnacaacacaatgacaggacacacgagagcaccacagagaagaacagagagacatctaagacacagagagcacacaacaacgggagcacgccaccggacgagtaccaaacgagaacctcgccccgcacaccacagcagacaaagtatcacccacagccacgcgcaactgccaacacagccacagagcacagattcgcatacactaccaacgagcagctgacacccggagacagagagcaatgaggagaacgacccaacaaaacaacgaacacccgagaaaccagcagagaccacgcggaagaaagtaaaacacaccacaacagaaaacatcagcgaagacgaaggtacgacacacgacacaaagagaacacgacacaaaacaaacaaccggcaaacaaagaggacagagacaccagggcataggacacaacgccaagggcgccaaaccaccacagacgactgcaatacacaagagataacacaaaggagacacagcgagaacgcacgggaacacacgatagcacaaacaagagaaatgcagcaacacagcagcgccgcatgcaccacacacaactagaaccaataatagcacgatacagcaacacacctcacacatcgcan

SEQ ID NO: 501249 - DNA, 192 bp, Homo sapiens
tcattgaccaggttctttccccatagtgtaatggggaacacgaggtgttggttacatgagtaggttctttagtggctacttgtaagatttgggtgcacccatcacccaagcagtatacacggcatcctattggtagtcttttatccctcactccctccccaccatttcttccccggggcgtcagtatagata

SEQ ID NO: 501250 - DNA, 868 bp, Homo sapiens
gcatctcatatctgggcgagatgtggcatgtccatgtgctttaaggcgacggtgggttgctgaaaggacgaacatttgcctcgtggaacgggcatctaaaccacagaatgggttagagaaaccagagggtggagcccacaagaagccagagagactgggccagactcctaagggatctgtgaagcccgaactggggccggtcctctcgcacgtgtgagagcggaagaagagtgtacgttgagagctctggcccaggagccaataacctgcgaggttaatgcgcctaatgtggtctgggtggctctggtcctttcccgggcccttggtcactaattccggcaatcccagttcttcactattcttggccccaagggtttcttcaggtggcctgaaagtggtacactggctcttgtctagtaaggggcggggaaccccaggcaggctgtgccccattattaaacatgatctttaccaagtgttcttgctttgcctgtactgaccttggggcctgggcgagctccatctgggggactcaactcagcccggggcacagagaacagagcaggtaggcataggttggttgaccaaaggaccaccatgacaaagggttgtctaagaaggaccagcttgaagtaacctgtgagtgaggcccgttgggtgcaatggttccacccatttaaagcaggcaaggcacgatatagcaggttacagcagtgattccaaacatgaaactgggggcgcctcgaaacaaggtcgttggaacttggtgaaagggaattacccctctcaagttagagttgccatgaatctagcagcctcaggttacatggtcaactgtgtccagaatgaaggcaccactgggcgagac

SEQ ID NO: 501251 - DNA, 336 bp, Homo sapiens
tttggaaaacttaagtctttccaaggcttgcgctggaacaacacaaacttctcccgtcagaggcaactagtctagcatccaaacatcatgcacaacacctaagtggcagcagcgcactgcgcccactcccaccggggccttgctaatttgtgcatgaaattggaagcatctgggggagtggaaatagtattggaaagaggagggagaaggaaacagcgtgagtgcttagctgagaggaggccagccaaagttgtgcagggcgagcctgaacatgtcattggggcaaacccaagcatcgttgatgttctttaataggaccatctggggggaccccat

SEQ ID NO: 501252 - DNA, 311 bp, Homo sapiens
gggcgtcgtgtaattcggaatgaggcattactgaggtatacagtgcatcagtgccctgaatgacttctaaggtactgcctatcagctccgttatctcacattcacttgcttctcgctctagactccatagctcattcatttcaatacactactagtaacatcccatttctcttgaccactcccatatgcctggaactggatcaattcaaatgtctgctttctccaggcctacaacagactactccattgccaaaggggagtacacacacacacacacacacacacacgcacacacatcattactttgagaa

SEQ ID NO: 501253 - DNA, 152 bp, Homo sapiens
ggcacaggcagaggtgactgtgccgcccgcgggctgtcttccaccggtggcgtactgtgtcattcgtggaaagaactatgatgcctctgagactcgtgagagaccgaagtcactgcagagactaactctataacagttagaaccatactcca

SEQ ID NO: 501254 - DNA, 106 bp, Homo sapiens
gagccccaaagtcccgcctgaagcctgtaaccatgggttgggccctgcaaggcccacactcaccccctgtgggtaatggtcccggtgggtgggtgggggttaaccc

SEQ ID NO: 501255 - DNA, 121 bp, Homo sapiens
tgggttttttttgggggggggggggggccccctttcccgggggggggggggaaaacccaaagcctggggggtttggcccaaaccttccccctggtttttataaaaaaagccgggggcccca

SEQ ID NO: 501256 - DNA, 589 bp, Homo sapiens
  misc_feature (67)..(67): n is a, c, g, or t
  misc_feature (101)..(101): n is a, c, g, or t
  misc_feature (300)..(300): n is a, c, g, or t
gtttggggacatccctttcctgttggacagcaacattgtagattgatatgctgaggtcatttctggntgaaggccttggaaggatggcccccttcccaccncccatgcggcatctgtcttcacttacaccacaatgccaggacagaaagctcacgtggaccaccacagaagttcccacagtgctgctctattttgggccacctggacatcagattgcatctgcaacaccacctgaagcaagagtgggacacaggacacaggtctgcagcacatagcctgtcccacagtccaccctgtagnactccatggcagatgttgctaatctccgttctcagtgatggcacctgagtttttaagtatgtggcatgtggcataagccgggttggcattcctggtctaaggagaccaaatgctagacgtggcccaggcagagtgccagcagacatggtgtagtggtgcagatgctgcagagctgtggcatctgagggactaaggggaccacttgaagagtttctgcacacgctgttgagagatgcagctccttttgccatagatactgaaagaatgacaaatccgtggagctgacatg

SEQ ID NO: 501257 - DNA, 279 bp, Homo sapiens
gaaaatttttttttggaaaatttttccccttttggtaaaattttttccctcccctttattgggttgccccctgaggaacccccccttacccccccttttcccccaggggtttcagaaaatttaatttagggggcccaaaaattgcaaggagggaccccttttgatttggttttttttataattttccccaacccctggggttgtggactgttttactcctgggtttttttaaaaattgggggggttttaataaattttaatttttttttttgcccccca

SEQ ID NO: 501258 - DNA, 1669 bp, Homo sapiens
tggcttcaaaaagctttattcccatttgggcccaaggctgtgtaggatagttaaaaaagctgcctattgggctgtggagggaggaggctttaggcaaaaccccttatttactttgtgcaaggggccctttcagaaagtctcgcgtgggcctcagaaaggcctcttagctcggtgcttgaaagttgagcctttctcgaagaagatacctcgccacagccacagccctcgcgggccacccaagctcgtgtgtggaggttgtggctcagggtggttccacccattcttctctttgaataagcttttacattctccctcattcttagagaaggtgagttcttccaggaaaaggttcaccaagaagatgtgggggtctcccggtgcggggcaagaaccacagggggcatgtgaaagatctccacaaaggtggccgtggttttcaggcttttttctctctcccaggggccccattgtggacgaggcttttctcatgtggccgtctctgtggggggttttataaccccccaaactctcactatcctctcaaaagtgtgaggcttctctgtgtgagagtagctcgctgtgggacacagacagaagcggcgagccccgccccacaaggcgctgtggagatatgtgggcacaactctttctcagcagaggagacacgctgcgctcggattaaagccccctctacggcgcgcgtaatctttcccctcttcggggcccaagatgtctcgcgcgggaggaaaaacaccacgtgttggggggcctaccaccagcgcccttttttccacaagaagaagaggcgcccaatattttcaactatcgaggggggggtccacggaacaatattaaaagataatggcccccaatagaagagagagcaacggtgttacaacgaggtgttgcattaacacgcacgcacggggcccctttcggcacgatggtggttccacccacaacttttttttcggccccccccatggcgtcttgtgttattagacaaccggcggtagtggagccccctcacccccaactgggtcccgcgggggtgagggggagaacataccaaaaatttcttccttggaggaaaggggaaaactcctcgtgggggaggacacggcacccaatggggggatctacggcgcttcggggggacaccacggaagaagggggcgggcgctttcaaacccgcacatcgaaaaaacaccgggggtggtccgctggggaagtagaggggttcccacccagacgaaaagctgccctgggggaagcaaataatggtagcccgcgcaaacaaaaagtatagggggtgtcccccccgcagaagatgactttttgtcccaaaccacccgccgaatgaagagggaaaaacactcacgcggaggagggggcgcgaagctctagcaaggcgagtgtatctgggtgataaaaaaataaagattcccccgcggagagaaacatttgttggtaccttccgctcacaaaaaccaccttggtgttgtaatctcagcaggagagtactgagctaccccccggggaaacccctacgtaagggagcgtgtgctaagtcaccgcgccaaactaaaaccctcggtcggcgatctctgtcttgttactacagacgacgattactcacaccaacgcagcgagcgctacaagagctatg

SEQ ID NO: 501259 - DNA, 234 bp, Homo sapiens
gccctttccgggggggcccccccctgggcccccccccccccccaatttttatttttgttatggtgggggcatcgttgaccctttcaaggggggggggccctgggccccaaattggggcccttccaccacccattaagggcggggggtaggggggggcgggccccccgccccccaaagattgttgcaaaaaaaaagtttggttgggttttgggatttgttgggcccgctttgtta

SEQ ID NO: 501260 - DNA, 136 bp, Homo sapiens
tctagaggatcctgctgctactactactagaggatataggaaacctcatggggggcgctggagcagaagagggtgcaggagggagagagtggggtgaatgtagaagatattggaggcagaaaggtttggagagtgt

SEQ ID NO: 501261 - DNA, 104 bp, Homo sapiens
gcgcgcgctgatcttcaacaggcacaccccacacgtctgccttgtctattttgtcccaccacggcgccttagtcagtttgtggcccacactcttttgtcaaggc

SEQ ID NO: 501262 - DNA, 251 bp, Homo sapiens
ggctcggtacctgttttcatggaacacacctgtctgtccctgagagacagacagcccccgggctgggggaacccacaaacccacacctcctccttaaagcacccagcccaggtcccacactctttctctagaacgggatctcctggtgggtgatgccgtctcccttgtgcccccagctgcctgtggtggattcctcaccaaactcaatggctccatcaccagcccgggctggcccaaggagtacccccagg

SEQ ID NO: 501263 - DNA, 294 bp, Homo sapiens
  misc_feature (138)..(138): n is a, c, g, or t
ctagtttagaagttcaatagcaatccctcttctgggtatatccccaaagggaatgagattatctctgcactcccaagtttattgcagcacaattcacaatagtcaagatacagacacaacctaggtgttcatcaatgnggcaaactggataacagaagctgtagagatagaagagatcaatagactagataattagcaatattatttagcctttaaaaagaaggcagtcctgtcatttgccaaaacatggatagacctagaagacattatgctattgaaacttctaaaactagg

SEQ ID NO: 501264 - DNA, 244 bp, Homo sapiens
ctcggcaccctatcctctttgtgctttatctctggtaatccttataagagcaccatgagttagatactgtgtttatgccctttttatggaaatagaatcttagagtgtacattgaagtagctttcccaggtataaccagctggaaaagtgacagaacctaggtctttcagattccaaagattgcgccacccgaatactatatcacactgcttactggtgggagttcagcaaaaaattccttggt

SEQ ID NO: 501265 - DNA, 322 bp, Homo sapiens
caccactcctatagatcagttattgctgtggtttatgtcaaagagtgtttggcctatgttttcccctaagagttttatagtatctggccttatatctaggtctttaatccattttgagtttatttttgtgtatggtgtcaggaagtgttctaatttcattctttaagatgtggctgtccagttttcccagcaccacttattgaaggggttgtcttttctcctttgtatattcttgcctcctttattatagattagttgactataggtgtgtgggtttaattctgggctttctatcctgttccactgatctataggagtggtg

SEQ ID NO: 501266 - DNA, 322 bp, Homo sapiens
aagagataatggttctcttagatggtatatgaactaaacaaccttagttaattaatccattactaattcatcctgcagattattccattaagtagagagcacagaatacaggtcagcactttttctttgcacacctgcttgaaataaaaagtggttctaataggtttatatctaaacccagcagtatatctccttctcgcggatatatacctaaatcacaccatgatttttaacatctggttttccttttgcctctctcaataattttttgttgtagttcattccatcaaaatgttgagttgaggattgtgggaggcataag

SEQ ID NO: 501267 - DNA, 146 bp, Homo sapiens
agcccggattggaaaggatttgtttacaaacctgtcccctgtcctccaacccaaaacgcctttttttttgttttaaaatccagaaaatttaaaggcatcctaaaatcaatgtgaacctttaacaaaatagttttacttattttcca

SEQ ID NO: 501268 - DNA, 513 bp, Homo sapiens
gatatccatgaagctatggatgtacttctcccgagtagaatcagtataacggcaagtagctattccaaggcagatttaatatttcaaattcacttccttccacataagcagaatgtgacgaggcgaaaatattcacatgctcacagtatagcaggtttgagaaatggttctggggtgattattttaaattattggctatatttgttctgcttaaaatgtttcaatcaaagtgacttgaaaggcagagacaactgcattaagatacaattaaaaacttatttgtgactcagcctatgttaaatactacaacttggaaaataaagcagttttcttacagaaatatcattcttaaactgggattgatagttaactttaacccacgcatttgaagcttatttttttacatactaaagggtatgttgaaaagagccagtaattttaggtaattgatttcttcctaaaatgacgaattagaatatcatctaatttgtacaatctggcctccagaattga

SEQ ID NO: 501269 - DNA, 287 bp, Homo sapiens
caaatagaagataggactatctaagccctaggtttcttttttaatcaagaaataataacaattaaagggcagggggaacactgtatcagcatagcctttctgcctttaagaaacttaagcagccggtcatggtggctcacgcctgtaatcccagcactttgggaggccgaggcggatcataaggtcaggagattaagaccatcctggctaacacggtgaaaccccgtctctactaaatgtacaaaaaattagctgcgtgtggcggtgggcgcctgtagtcccagcta

SEQ ID NO: 501270 - DNA, 719 bp, Homo sapiens
  misc_feature (257)..(257): n is a, c, g, or t
tggaaatggagtcaaagtctcaccctgttgcccaagggggagttgtaggggtttgatctcagctcacgtgcaacctcctcccccctcccaagtttcaagcgattctcgtgcctcagccctcccgaattagcgtgggattatacgggcactccgcgtgctcagtgccgtggctaatttgtggatatttgtaagataaagagcgggggttctcaccatctggtaccaaacgtggctttgtaaacctctttgaccgtcgntgtgatctccagctgtggccttgcgggccttcttcagaagtgtggtgggggatatacgggcgttgagcacaccagtgccgtggccttctggggaaattatttaaataagcataaaacaatttctctattaccacagggttagatttaactaagggatagcacgaggagtgtgggccccctggtgaagcgtttttgttcgtgggcaaaaaaccatagaaacgtgctctcctatagccccattaaggtgggtacctttcgtgccctctcccgtggtggtgtctcctttcgggcccagttcacaagtttacaacggggttttggggtgtgaggaccgtctgggacagaatatccccagggcgtctgggttggtacagtcccccaggccgggccttggctgccgagccttttgggggtccccccggtttggacattgttgtgttttaaccggttggtttttggacc

SEQ ID NO: 501271 - DNA, 370 bp, Homo sapiens
  misc_feature (332)..(332): n is a, c, g, or t
tggctcatacctgtagggtcagcactctgggaggccggggcaggcggatcacctgagggcaggagttcgagaccagcctggccaacatagtgaaaccttgtccctactaaaaatacaaagattagccgggcgtggtggcatgcgcctgtcgtcccacctacttgggaggctgaggcaggacagtcgcctcaacctgggaggcagaggttgcagtgagccaagattgagccactgtactccagcctgggtgacagagcgagactctgtctcatgaaattgtgggatctagagaataaggatttttaaatcttacttttggtctttattagctnttattttgatggaatgcttttctcttacatattttttg

SEQ ID NO: 501272 - DNA, 212 bp, Homo sapiens
gctggtgtcgcatggccgcgcccgccgttgttaccggtattgtagacaagccgtaccaaagtctcgcttctgccgaggtgtccttcatgccaggattcgcatttttgacctggggcggaaaagcaaaagtggatgagttccgctttgtggccacatggtgtcagatgtatatgcgcagctgctctctaagccctggagctcccgatttgtcc

SEQ ID NO: 501273 - DNA, 382 bp, Homo sapiens
attcttgtgtcttagcccaagtagctgggattacaggcgcccgccaccacactcagctaatttttgtatttttagtagagacagggttttgccatgttggccaggctggtttcaaactcctgacctcaagtgatctgcctgtaatcccagcacgttaggaggccagggcaggttgggaagtcaaggcgggaggatcacttgagcccaggatattaaggctacaatgaactataattgtgccactgcactccagcctgggtgacagattgagaccttatctcaaaagaaaaaaaagaagtataccacagttgatttgcccattttttctttcatggcatctggatcatttatacctttatgatagtaacttggccaggggtag

SEQ ID NO: 501274 - DNA, 187 bp, Homo sapiens
ggcgtaacccagtctctacaaaaactttaaaaattagctgggcatgagctactcgggagggcttgaggcaggagaattcctttgaacctggggagggcgggagggatgcagtgaggcccgagatctgtgccactgcactctcagcctggggcgaaagaagcggagactcccatctcaaacaaaccaa

SEQ ID NO: 501275 - DNA, 466 bp, Homo sapiens
catcggcatgtatagcgccagagttcgatctgaacactagcagacgctcagggggcgtatcatgtcgtcagtatagtgtggtctccttgatcagcaccagggggcacacagtttaagtcggaatccgtgtcccgcagctgattgagtttaatattcactgcgaagaggtactcccgaacatcatctatgcccaccttcaggcccttgcacaccacatacctctctgagtgggcaggacggttggtaatcggctcgaagagacacactcgttcaacgcagcagtacagcaggtagaccagccccacactaaagggtgtgcacaggtcacaggttcaacagatgacgtggcctcctgtccggacaatggacagcgccatgaggaactgatctacctcagggcctacccctcaccttacagctcatgcacaatttccacagatagcacagtgtccgggggccagctctg

SEQ ID NO: 501276 - DNA, 407 bp, Homo sapiens
tctagaggatcccttattcgtgtgcactatcaaacacatactcttgttttcacagaatttctccaaaacttgaagttcatcaggtttccactgtcctgcatattcaggtgtcacttttagctgaagcgttggttggtttgggactaagagctactctgcatttcagtgcatcagtcttaaacatgatcactccgggttcattagaatttatcagctgcagctacaaaacaaggacacatcaaattaacatgtaagtcaaagagaaaatgaagatgttactgagaattgttccaaaaggaaaaccactaagttgatacctattccaaaacaaaggcacctacagcattgagcatcagctgctggcaacactgcaaaaagagatgcgatcagacgtgcaacacgaataa

SEQ ID NO: 501277 - DNA, 216 bp, Homo sapiens
cgtagagatcactgttatcccagcccttcaggaggcgaggcaggtggatcacttggaggtcaggagttcgagaccggactggtcaaaatggcgaaaacctgtctctactgaaaagacgaaaaattagccgggcatggtggcggaccagggggcccaatggggccagggagacccgttgagtccatctttgccaggagcaccagcagagccagcatc

SEQ ID NO: 501278 - DNA, 1000 bp, Homo sapiens
  misc_feature (752)..(752): n is a, c, g, or t
  misc_feature (917)..(917): n is a, c, g, or t
gaactcggtggtggccactgcgcagaccaaacttcgctcgtactcgtgcgcctcgctttgctatttcctccgtcagaccatgtcgtgacatatcgccgagtatggctgaggagtcgatgaaagttgctgattgaagtcgatagactgaacgaaggactggatgactgcggagacgaaataatccagctgccttccaatgaaacgattgaacaggagaagcaagcaggcgactcgtactgaggcgtgctgccgccgatatgcactgtatcattcctacaagcattgccttcttattttacttcttttacgctgtttaacctttgtaagatgcaaagaggtcggatcccgtttcattgactgtgctgcccctttcacatcaaagaactactgacaacgagggccgcgcctgcctttcccatcatgtctatcgtatcatggcgtggcagggaatggaaatgaacttgcatgttggtgaaggaagaagtggggtggcagaagtggggtgggacgacagtgaaatctagagtacaacctaagctggtccaggtgtcctgcaggctgtaatgcagtttaatcagagtgccattgttttggtggtccagatgatttgacatctcatgggaatgcgcaattttctcttgaatctgtcgcatattacctacaaacggagaagacgcgcagaaaacacagacgtctcttgagcacgacttattggccccggagaaaaagcttggtccaagccacttggcagnctggacaccgagcgcgccctgatgagagaagcgagcaacacgggggttccaacaagcatattgccaacgaaccaagaaactcgcgcgcacttagaacgaaaggcgctgaggatctcctcacccagatgaaaacacgcccgggggcgacacggatgatttgcaacnctagccccgacagggcgtacgagagaggcatcaggggggtcttcacaacggagaaggccccagggggtcccgctttaaaatag

SEQ ID NO: 501279 - DNA, 461 bp, Homo sapiens
  misc_feature (270)..(271): n is a, c, g, or t
  misc_feature (278)..(278): n is a, c, g, or t
  misc_feature (314)..(314): n is a, c, g, or t
gaccaatgatgagacagtgtttatgaacaaaagatcatgattaatccagttctgcacaaaacactgaggtccattagaaaaaaaaaaaaaaaaaaaaaaaaaaaaaaaaaaaaaaaaaaaaaaaaaaaaaaaaaaaaaaaaaaaaaaaaaaaaaaaaaaaaaaaaaaaaaaaaaaaaaaaaaaaaaaaaaaaaaaaaaaaaaaaaaaaaaaaaaaaaaaaaaaaaaaaaaaaaaaaaaaaaaaaaaaaataaaaaaaaaaaaaaaaaaannaaattanaaaaaaaaaaaaataaaaaaaaaaaattatatattnttataaaaaaatatataaaaaatttataaaatttccaaaatggtatatattaaaaaaattaaatgatagaattaaaaaaattattttataaaaaaaaactataaataaaaaaattataaaaatttataaaaataaatattttttaaa

SEQ ID NO: 501280 - DNA, 363 bp, Homo sapiens
tgtacaggtcttatagttttgctgtcctgtggatggcacgggcactcctctgatgtgcgcagaagatccagtcatcagatcctagatcgtgaaggggttggctgtcctctgtgaaccatagcaggctttctttaggcaggtgacaatacacttcagacaataataatctacctgtaatacacatcacccctctggcatggaagagcttttatcacaatcagacaaacatgcactgaaactgcacaattgaatgaaatccctttataaaatgtataacatggcccatcaggtaaccaaatgcacctgaagtttggattgtattcctaggaatatcggttcgacaaaccaaacattgataataaa

SEQ ID NO: 501281 - DNA, 156 bp, Homo sapiens
aattacagatctagaccactgtcgtgaggttcatgctgagggaggacaggatagcctctgtgggaccgttcccatgtaagaaaactggttccaccaggacgccaccagcctcggaagccacggtgggctggatgtctgctgtcctctctgtacgca

SEQ ID NO: 501282 - DNA, 808 bp, Homo sapiens
  misc_feature (639)..(639): n is a, c, g, or t
  misc_feature (646)..(647): n is a, c, g, or t
  misc_feature (653)..(653): n is a, c, g, or t
  misc_feature (664)..(664): n is a, c, g, or t
gcagtagttcacttttcctcttctaattcatttctttttcatcagaaagttctcattttaaataataccagccatgcaccgagcccttgctaactgtcaaatgactactgaagctctgcattatgtcaggttattacagtaagcttttggtttgtgactgccaggccaggagttgaggcttaccctctcttttgttggctacaagcaaagtatgtcaactgcagcctccccatgcctttcctcactagctgcctcagatctgcttccttgttctttgttgtgctgtcttctgatggatgctttggtcgttctgttcatctactgtttgctgaaacccaaagcttttttgtacttctattaacagttaaccagttcaccctaaggagattgtacgcagaccagcctcccacatttgtgttaggggtatgttactactcatatgagatttgaagccttctttttccccaaaaaaatggtcgatctcagatcttaataaggtgccccttttctcaagccccatagaggtaccttttatattcactgtgaaactgtcattcaaatgaatctactcctggtctttaactttttttgcacttctaccccaataagaggctgtcttgcagtggggaggaatgcatnttgtgtnncttgtncttcccatttnatcctcttttgcttattggaatctgactatccatgaataagatggactttgagatctacttgtaagtacacaggctgaagttgaatatctgtatcccagtacttaccaccatgctttgtgcatgttaaggtcactttcgtcaca

SEQ ID NO: 501283 - DNA, 1319 bp, Homo sapiens
  misc_feature (243)..(243): n is a, c, g, or t
cgagggcagagccgggctggcgagcgaggtcgagagagagcgggagatgagcagatgacgagagtgcgagatagatgcgagaggagggtcgtcgcgatgtgagtgagcgcctgagaaggcgtgagcagagagtggaggagggaagtgacgagtacgagagggaggaggagatgtgaggagcggagcggtagtagcagagaggaggagcgagacggtcgtggaggatagtgggatgagagagtngggatgtagggaaggtgaagaagtggtgagacaggattgagcaggggaggagataggcggaggtagtgagtaacgagagagggggagtgtaggagcgattggtgagggcttagttaggcgacgtgagaagagagagtggcggcggagtaatgtggtcgccaaggtgttgacatagagggggtgaagcgccgcagatgagtgtaaggcacgcggttaggggggccgatatgcgaagttgggcgggagagagagtgtgcgggatcaaagagcgtcgggcagaggggaccacaagtagcttagagttgtaaggggtctgtgtcggaaaaaaaggccatggggttatcgaagtgatcgtgagaagcgcacccctcttaagagattcgatgaggggggacctggggtcaaactgaaggattttattccagtcgggctgaataaaggcactttattatgccagaagccatctgaaatttccacctatttagcagaagccccgtgggtgattttgatatgcactaaagtttgaaattaaggatcatggttttaaacaagagtcaggataagattttaagcaaaaaaaggtgtgtgtgtttgaggggggctctgagtaaccaaaataatgtaaaggtagtaaagggtatacggtatatttaactctttatttagaagagccatgatttatgtttatgtcagacatgatcttgattccaagaataagatccagatataatttttagagcactttcacatatagtgtctcactgaggcacagttttcagtagattagaagtgttgggtgatgggctgggcgcagtggctcatgcctgtaatcccagcactttgggaggccgagccaggcagatcacttgaagtcaggcgttcgagaccagcctggccaacatagtgaaaccccgtctctactaaaaactacaaaaattagccaggcttagtggcaggcgcttgtaatccagctgcttgggaggttgaggcaggagaatcgcttgaacccaggaggcagagtttgcagtgagccgagattgcactctcgcctaggcaacagagtgggactacatctt

SEQ ID NO: 501284 - DNA, 107 bp, Homo sapiens
ctagagcatcccatcatcgctgataggcatgctgttaagcaaaaataaaatggattatggaccaaacgataaactgacctataacagagatgcaaagaattttaaag

SEQ ID NO: 501285 - DNA, 558 bp, Homo sapiens
ggaccagctgggtccccagcctcacctgacaaccgggctagaccccctcaccgtgcgcccccctgtgcctgccgtgtgggtgctgctcacgccgggagccccctggagcccccactgagtgtggttaacccaaccccccggagcacccccctggcctgggttccctgccccgctcccgctgtggccctcgttcccgcgagaagggctcgagacaaccccgagtcgtgagagacctcgctgaggcccgcctgttctccgggcctgaatgttctggggtgcttgtgcctcttttctgagaagcggttgtgagctgctccacaactccccctaccaggtttgagtcccccacaagtggagcctccctatcactgcttccccttccctctagcactgtgggaagggactgctgtgaagaatgacccgatgtggggcctctgcccagattttgccttgctaaataagggcttcctctgccttctacctaccgtgcctttgaactgccttttgaaagaggtcccgggagggatttaggaaataaagtttctacctatttgatga

SEQ ID NO: 501286 - DNA, 194 bp, Homo sapiens
cgtcggtagcgttccagctagcaagacaggttatgctatagtacaagccactagcccgctcttagaacctctcatttcctttccatcgtggaaatctatcctcaaggaaataacttctcagtgttccatctgctattctactactcctcagggataattcaggccccctcccttccctacacatcaagctcgag

SEQ ID NO: 501287 - DNA, 199 bp, Homo sapiens
ctaacattgtacacaatgtctccaacttccgtaaggaaatgaacttcagaatactcaagcaagatctgatctcacctctcggggaaagccatgaatcttcgctcccctccccacataacaagagagttttgctggattttacctgggactgcaaattctacctcccagggaaatcctaaacctggcttaggatctggct

SEQ ID NO: 501288 - DNA, 210 bp, Homo sapiens
caaatctactggtatagtcacagtgtagacatttctgcaattctagcaataaataaaaagtctcttctatcttctcttcaaagctatgaattacagaagatggtgtaaaagaagtcatatttttttctattcattcttgtagtattaggagccaagtatttttaccatcacatgtctacaattttcactttatccactttaataagttct

SEQ ID NO: 501289 - DNA, 842 bp, Homo sapiens
gtgctgcacagcagcaaagaacaagcttaaccaggtggtcatgatcgaggacttgagtaagaaaatgagagggcgtggaaaatggaattagattgaggacaacactccgtagccagttgctgaatcttctgagaacagcttgaaggatcccatgccacagataccaagtgcaatagcgcagatggtccatgtgatgacaacaaggacgagtatcaatcccagatgagtctggaatgggctcatatctagcccaaggtccctgttgctatagactatgtagatgacctaaaacagggttccaactgtccagctgtgtgcactcttgttataccaacctttgagagaaatgtttgcagaacgaaatactcgatttgctaggtagacctatccgtcaagtcatccagaacgttgaatagacatttcttgaagtcaattcgggtagaacgagggcaagatagtagaaccggaaacttaataggtgcacgcgccgattacccgtgtgtctactagaaaattaatgggttcatgggttgcaaatggtaaccttctttaatatctaatctggatagtttagaagaatgttatgtgtactctttggtttacagtgggggaaataactaagatgtccggtccagtgtgttaacgtgtcttaggcaccaatggtcacttgctggttgaagtgactgaagaacgcgttgtgaatcacaatggcacagaccgaccgacttggacacgagcgattcctaagtacttagaaacctggcccctggcaaacgtgttcacctttggcaaatgagattctcggccacggttggagtgccttttccttttaaaaaccccgg

SEQ ID NO: 501290 - DNA, 100 bp, Homo sapiens
cgcggtgagcatcgtaaagtcaaaaaatcctacagtaatatcacaaatcagcacacagtactgtatgcatacaattttggggccccacccctcagaagat

SEQ ID NO: 501291 - DNA, 406 bp, Homo sapiens
  misc_feature (103)..(104): n is a, c, g, or t
ccccagcagtggaatagggcctgttgtaccttgcaggtggatcctgattttggacaatgcagcaatttgtaagtgtccccgtcccttattgaaacaaagcaanncccaacgtgagccttgggcaccaaaaagatgcagccgtcaggttctcctttaaactttgtcaacggaaccaaaagtcacgttgggatggcttccagcaattcccctttgggattctccaccaccgtaaggggctgaggtttgtccagacaaattggctatgattgatatgaccaccaccattgaaacttcaggtgcaggctgaagaggctatcggggctgtaacattctcccttggccaacgcctccgggtaacttctcctcggtgacgtccaggttgtccacgtaggccggcgtggtgata

SEQ ID NO: 501292 - DNA, 239 bp, Homo sapiens
atgccgtggaaggctcatatcaggacatgcattgaaaagtgttgcatacctgtgggctgctggcggtgctgcaggcaggacttcctttcctcccttccctggcctttccagacaccacagagagaccaggcagctttctctggcaccagcccaggcctctggcccaactggcctcacctcctacctcctcctggggaatcagggcctcagtggaagataacggggcccgggagaggtct

SEQ ID NO: 501293 - DNA, 448 bp, Homo sapiens
  misc_feature (4)..(4): n is a, c, g, or t
  misc_feature (13)..(13): n is a, c, g, or t
  misc_feature (54)..(54): n is a, c, g, or t
  misc_feature (87)..(87): n is a, c, g, or t
ccangattgtaancccctgactacttccaacccaatttgttctgtccctaaaanggaaatgatgttccaaggaaataagaggagacngaaaagaactgagagagacaggagtgtgttgaaagggcaaatccctaatgagaagtggtataaatgtggatcaggttaggcccaggcgcggtggctcacacctgtaatcccagcactttaggaggctgaggcgggcagatcacttgaggtcaggagttcaagaccagcctggccaacatgatggaacctcatctctactaaaaatacaaaaattagctgggtgtagtggtgcacatctgtaatcccagctacttgggaggctgaggcaggagaatcgtttgaacccaggaggcagaggctgcagtgagccaagatcgtgccactgttactccagcctgggcgacagacgagactccatctc

SEQ ID NO: 501294 - DNA, 250 bp, Homo sapiens
gatctagaggatcccaattctgcagctcatcaaggacagctgtttgcccagtgcacgcagtgggtgccccgaagaactactacgatgcctggtgtcgacagctgcttcatgcggggtcgacgctggagtgcgccagtctgcaggcctacgcaggccctcgtgtgcccagcaagaacatcgtgcctcgaggtgggggaaccacagcgcatggggccctgcttggtggatgtgcccatctcacgagggagta

SEQ ID NO: 501295 - DNA, 105 bp, Homo sapiens
catcatcatcatggatttgctggtgcagtacaactaggcttaatagggacatgggagtctaactgaagtctctccttcctaataaatgttaccactctgaaaaaa

SEQ ID NO: 501296 - DNA, 134 bp, Homo sapiens
acctcgtagatcccacttctgcagaggaggcacaggtttgccttctcgaggcatgtgtaggcgttaggttctgctagcatgatgttcaagctgcagagggaggggctggagaaagacttccttaagcggatcag

SEQ ID NO: 501297 - DNA, 227 bp, Homo sapiens
tccccgggggggtgtccgttttccttttcttgttgcccaccccccggccagtgttatttatgctccctttgggggtgatgggccacgccctccccatgtccttggaaaagggtttccctccgggatcccctgcttggtgcccacattgctttgcaagggtttgcccccctcaggtggttcccctgttgttgacccttgtgttgtcaataaacggtttgaggtttgca

SEQ ID NO: 501298 - DNA, 208 bp, Homo sapiens
catcatcatcatggatttgctggtgcagtacaactaggcttaatagggacatggtcagccacacagtaatagtgggagacttcaacactccaccaacagtatgtgacaaatcatcaaggcagaaaagtaataaagatatttaggacctgaactcaacattggtccaaatggatctgatagacctcatcagaactctccacccaaaaaa

SEQ ID NO: 501299 - DNA, 105 bp, Homo sapiens
  misc_feature (72)..(72): n is a, c, g, or t
  misc_feature (85)..(85): n is a, c, g, or t
catcatcatcatggatttgctggtgcagtacaactaggcttaatagggacatggcaccactgcactccagcntgggtaacagagnaagaccctgtctcaaaaaca

SEQ ID NO: 501300 - DNA, 227 bp, Homo sapiens
gccccgtgctgctgagcgaggcccccctgaatcccaagctctggcagtgttcggtcccgccattccgtcgatcccgttcactccgcactggtcccgtgtcctccgcgacccatggggatcgcgtcgcgagtcgtccatttcgccccgcgacccgtccgcttcagctccgtgacatctcatggtacgaagtatccgtgtggcacgtcagcgctgtgcggactctgtcg

SEQ ID NO: 501301 - DNA, 117 bp, Homo sapiens
  misc_feature (60)..(61): n is a, c, g, or t
catcatcatcatggatttgctggtgcagtacaactaggcttaatagggacatggtggaannggaagcaaacatatcctctttcacaggatgataggaaggagaaatgccaagcaaaa

SEQ ID NO: 501302 - DNA, 1025 bp, Homo sapiens
gggttcctccttttcagcgccctccatgctttcctggagtgaacgtggcttgcacgtctagggtacactgaggcctagtacctccgaccccgtttggtgcaaacactgatttcattttcccccaggcggtgctaggctccttggttgggcactttttgtgtgcctgtccctatactaatgtactctgctttagctccccgttcccttgcgcgcttggtgcaaggacgcgcgggggaagggcatcgctgtcgcacccctcacagttagccctgaggctctccacgggtcccgttcttcccgcgtggcaatgctctcaaatgttgtggaggtttgcttgaggcttccgcaatccttgcactcgtcacccttacttcttgacacatggatgtgaccgatgctctaggatgattgggtttggggccaagaatgggagcatcgacatcttccccagcagccacctccatgctgagatccgctcgaccttgcttgccgaaaccagatccctaactcgatgacctcagcctcgaggatacagtgctctcctcaacgtgactctcctgtgcttctgttttgtccaccctgctggggaggaacaggagaagtggatgtgggtgagagccactggggcctccagagcctggctctgctttgtagcattgtggctttagccggacgagggactgtggccaagggtgaggtggccaaaaccagaaccagcagtctcaatgccttgttccctcctggcccatcaggcccatcattccagggatgtctctcacagctcctgactgatatgtgcctgaagctgacccgaggtcttcctatctggaatgactagagggagccaagaggatggggtgggggccagggccccccagggcctatcgtgtggagagcactggagcaggatcccatcagaaaggtgctgactaaaactggttgcccgacactcaacagcctccacctccctttcataccctcacagctcctggggccttcctttatctggcgggagaaagtattca

SEQ ID NO: 501303 - DNA, 172 bp, Homo sapiens
  misc_feature (139)..(139): n is a, c, g, or t
  misc_feature (152)..(152): n is a, c, g, or t
catcatcatcatggatttgctggtgcagtacaactaggcttaatagggacatggtggtgtgcgcctgaggcaggagaatcgctggaacccgggaggcagaggctgcagtgagctgagatcgcaccactgcactccagcntgggtaacagagnaagaccctgtctcaaaaaca

SEQ ID NO: 501304 - DNA, 142 bp, Homo sapiens
catcatcatcatggatttgctggtgcagtacaactaggcttaatagggacatggatgagctgaatgaatgcactaatttaacatgaagcccagaccagagccttgcacagatcttttgggtgatatgctcaaaaaaaaaaaa

SEQ ID NO: 501305 - DNA, 1306 bp, Homo sapiens
agcgggcagtgtctgccccggaacctggtcggcgcgcggcgcggcgcgcctgggcgctaaaatggctgcggcgttgagttgcatgttgatgtgagagatcccggggcacgccggggtcagctctgggcctccggcatgtgtgcgtcaaccaatctgcagactcgaaaacgctgacgagtctggctacgacctatcgaagaataccgacttatgtggagctcgtgcacagagcacgggtggcagtgtgactagagaggaagaacgactacacaggctcgaagaaagagtgttctgctcggagtgccttccgccgttgtgctggaacacgaaattcgtacagtctagagcgcgggcaagtaatcattgaggcttgatccgaatggtcctcttatcacgtggaactactacggcagatcagatttgaggaaggaatcttatgtggagtccgtccattgggtcgacgcgaagtagcgcgaataggtcgacggactaaggggataacgcgtcaggactaccactcgctcatggagggcactttcacactcgaaaaaggccttggctccctcaagggaaagtcgtctacttaatcaatttcctcttttcgtggaactagttttcactttacaattcggccagttggtaagtcctcaagtggttggaacatggcggttggttcgaacccaggcaaaggaagcgtgtggcgacagcaacgttcccaatcgtagggtatggtgaaaagttgcccttttgggttggttcaaaggcagggggtacacggccgctggggggaactttcgggtcgcttgggacaacttgcttggcttgttccttgcccaatgccaatcggggaagggtccaaggaccgctgtgcgaaccccttgggaaagggaaggttgaaagattccgttggggcccaattaaccccccccaaatttccgaaattggaagaaggggcttcgcgataaaggcggaatgaaaggacaccaaccaggtgtgtggaagcgttggttggttcccacaacatttcccttccatttatgtaagagcctttaagttgacggggagggcacaaccccagtttttggagccccgagttaaagaggaaattctcagaggcacagccccttggggggggaacccttccccaaagcttcccctaaattaataggaggactctctgggtggagaaaaagaactcccaatgagcaggcaagaaaagcagcctggtttggtccaaagaggaagaggcgctctctttgggagaacggttccaacaggaacaccggctggacccgtttgtaaaccg

SEQ ID NO: 501306 - DNA, 138 bp, Homo sapiens
catcatcatcatggatttgctggtgcagtacaactaggcttaatagggacatgggagacaagcagtcagagtttagctttgcgaagagctagtaggatattgaagtacgcactcaggagagtgctaaggcacatagga

SEQ ID NO: 501307 - DNA, 212 bp, Homo sapiens
gactgaatgccgctcttgctagcacagacagattacataactaaaactaacataaaggacagcggcctacttggccagaccgattgaactatgctgctggtgatcatgctactgctgacaccacagctgctcctgctgctgctgcagccccagctaaggttgaagccaaggaagagtcgcagtgactcgcagtccgcgcataccgacgctag

SEQ ID NO: 501308 - DNA, 134 bp, Homo sapiens
catcatcatcatggatttgctggtgcagtacaactaggcttaatagggacatggaaaaatgaggaaggatcacttgagcccaggagtttgagaccagcctggggaacatagcaagacctcatctctacaaaaaa

SEQ ID NO: 501309 - DNA, 204 bp, Homo sapiens
gcgccactcctcaggcattgggagctccaagtgcctattccaccaccagatgccatggagaccctagtttgtgccctaggcctagacattggcctggtggggttcctcgtgggtatcgtcctcatcatcatgggcacatatgtgtccagtgtccctaggtaatgatccttctgagagaaatgacttgtgggagacaccctgcag

SEQ ID NO: 501310 - DNA, 227 bp, Homo sapiens
acccatggatggatggccaggattcccgtggtccctagctagatccccttcctatcaatcacctgatagcaacagggccacttgccaatcccctgctctttactcaatggtccccagggagggagcatgggaaaagggttagctgagggctggaggagggccccaccccctgggtgacctgttcccggttttatactattgtttgtgattaaaagtgcttcccccca

SEQ ID NO: 501311 - DNA, 908 bp, Homo sapiens
  misc_feature (106)..(106): n is a, c, g, or t
  misc_feature (857)..(857): n is a, c, g, or t
  misc_feature (864)..(864): n is a, c, g, or t
gtccttgtatgtatataactaatataccagtcttgttaacctgtggatgaatgcctttttccgaggacaatatcaggataacaagtctttagactccaccattagnacccaaagctaagattctaatttaaactattctctgttctttcatggggaagcagatttgggtaccacccaagtattgactcacccatcaacaaccgctatgtatttcgtacattactgccagccaccatgaatattgtacggtaccataaatacttgaccacctgtagtacataaaaacccaatccacatcaaaacccccctccccatgcttacaaggcaagtacaggcaatcaaccctcaacttatcacacatcaactggcaactccaaaggccacccctcacccactaggataccaacaaacctacccaccctttaacagtacataggtacattaaagccatttaccgtacatagcacattacagtcaaatcccttctcgtccccatggatgacccccctcagaataggggtcccttgaccaccatcctccgtgaaatcaatatcccgcacaagagtgctactctcctcgctccgggcccataacacttgggggtagctaaagtgaactgtatccgacatctggttcctacttcagggccataaagcctaaatagcccacacgttccccttaaataagacatcacgatggatcacaggtctatcaccctattaaccactcacgggagctctccatgcatttggtattttcgtctggggggtatgcacgcgatagcattgcgagacgctggagccggagcaccctatgtcgcagtatctgtcttggattcctgcctcatcctattattnatcgcanctacgttcaatattacaggtgaacctaccctgaaacgtgacttc

SEQ ID NO: 501312 - DNA, 801 bp, Homo sapiens
ccccaatgaggtgtggggccccctcgattgtggggttttaaaaggggcgacccctttaatttacagggaacccccatttagggttcccgccattttttaaacccaggcggttaggcctcccaaaattaaaatttctatttggttttaaaaagaggatttcgtccgcagtgggcccccccctgttgggctttgtttcctaaggctatgggggcaactgcccatcctttagattggaccaacttcaaagttgcccccacggacaattttaatcgatccttcgggctcgtgggtccctgtccatttgaaactcctagaatgggatcctgaatcctgttctccgcgttcctatttgatcctcaccgtctagcctttacaaagaaaccctgtctgatccgtcccatacttttagccctctagatcacggtacgtttttctcgcagttcgtgtagtcgtcaccacggagctctcatactaagtgggtttgaacgtgatgctcagatcccgtccaggggtgtgcaaatccgcacaaatagctggtaggtccaagtcccagggccctagctagggtgtggatctccccctcatccaggaccagactcttccacatgtagaggggcgttcgtatacttagtcctgcataaaggactttgagtggtatgtcaccacgtcagacagcaatctctaacggtatttaaagataggccaggcatggtgtttgtgagtgtcctcgcgtcacttgtgcagcatgcggtcatatgttcacttcagaccttattctttggtccagccaagttaacatct

SEQ ID NO: 501313 - DNA, 412 bp, Homo sapiens
ttttttttgagacggagcttcacacttgttgcccaggctggagtgcagtggtgcgatctcggctcactgcaaactctgcctcctgggttcaagcgattctcccacctcagcctcccaagtggctgggattacaggcgtgcaccaccacgcctggctaattttgtatttttagtagagacaggatttcaccatattggtcaggctggtctcgaactcctgacctcaaatgattcacacaccttggcctcccaaagtgctgggattataggcgtacgaccacacccaggcagcgcacgtttttttctttttttttgacacggagtctccctctgtcacccaggctggagtgcagagcgaggttctgtctctaaaaaataaacatttaaaataaaaaatgagtaaaaataaaaag

SEQ ID NO: 501314 - DNA, 814 bp, Homo sapiens
  misc_feature (763)..(763): n is a, c, g, or t
  misc_feature (770)..(770): n is a, c, g, or t
catcatcatcatggatttgctggtgcagtacaactaggcttaatagggacatggcatggggaagcagatttgggtaccacccaagtattgactcacccatcaacaaccgctatgtatttcgtacattactgccagccaccatgaatattgtacggtaccataaatacttgaccacctgtagtacataaaaacccaatccacatcaaaacccccctccccatgcttacaaggcaagtacaggcaatcaaccctcaacttatcacacatcaactggcaactccaaaggccacccctcacccactaggataccaacaaacctacccaccctttaacagtacataggtacattaaagccatttaccgtacatagcacattacagtcaaatcccttctcgtccccatggatgacccccctcagaataggggtcccttgaccaccatcctccgtgaaatcaatatcccgcacaagagtgctactctcctcgctccgggcccataacacttgggggtagctaaagtgaactgtatccgacatctggttcctacttcagggccataaagcctaaatagcccacacgttccccttaaataagacatcacgatggatcacaggtctatcaccctattaaccactcacgggagctctccatgcatttggtattttcgtctggggggtatgcacgcgatagcattgcgagacgctggagccggagcaccctatgtcgcagtatctgtcttggattcctgcctcatcctattattnatcgcanctacgttcaatattacaggtgaacctaccctgaaacgtgacttc

SEQ ID NO: 501315 - DNA, 810 bp, Homo sapiens
  misc_feature (84)..(84): n is a, c, g, or t
  misc_feature (166)..(166): n is a, c, g, or t
  misc_feature (173)..(173): n is a, c, g, or t
  misc_feature (190)..(190): n is a, c, g, or t
  misc_feature (192)..(192): n is a, c, g, or t
  misc_feature (201)..(201): n is a, c, g, or t
  misc_feature (262)..(262): n is a, c, g, or t
  misc_feature (265)..(265): n is a, c, g, or t
  misc_feature (283)..(283): n is a, c, g, or t
  misc_feature (288)..(288): n is a, c, g, or t
  misc_feature (290)..(290): n is a, c, g, or t
  misc_feature (338)..(338): n is a, c, g, or t
  misc_feature (360)..(360): n is a, c, g, or t
  misc_feature (363)..(363): n is a, c, g, or t
  misc_feature (368)..(368): n is a, c, g, or t
  misc_feature (400)..(400): n is a, c, g, or t
  misc_feature (405)..(405): n is a, c, g, or t
  misc_feature (408)..(408): n is a, c, g, or t
  misc_feature (415)..(415): n is a, c, g, or t
  misc_feature (517)..(517): n is a, c, g, or t
  misc_feature (528)..(528): n is a, c, g, or t
  misc_feature (564)..(564): n is a, c, g, or t
  misc_feature (567)..(567): n is a, c, g, or t
  misc_feature (569)..(570): n is a, c, g, or t
  misc_feature (576)..(576): n is a, c, g, or t
  misc_feature (578)..(578): n is a, c, g, or t
  misc_feature (581)..(581): n is a, c, g, or t
  misc_feature (600)..(600): n is a, c, g, or t
  misc_feature (609)..(609): n is a, c, g, or t
  misc_feature (629)..(630): n is a, c, g, or t
  misc_feature (635)..(635): n is a, c, g, or t
  misc_feature (639)..(640): n is a, c, g, or t
  misc_feature (642)..(645): n is a, c, g, or t
  misc_feature (651)..(652): n is a, c, g, or t
  misc_feature (654)..(654): n is a, c, g, or t
  misc_feature (657)..(657): n is a, c, g, or t
  misc_feature (659)..(659): n is a, c, g, or t
  misc_feature (662)..(664): n is a, c, g, or t
  misc_feature (673)..(673): n is a, c, g, or t
  misc_feature (720)..(720): n is a, c, g, or t
  misc_feature (729)..(729): n is a, c, g, or t
  misc_feature (758)..(758): n is a, c, g, or t
atgattactgtttaaaatttaacaatgtaggtatatccagggtgagctaagcacactttgacagcacactattgaatgttatantttctgtattgaaatatgtaaagacatctgcaaattagtacctagcaatgaagacatacatttataaatatacacattctangtttganaaggtaaatgtaaacanangccatgacnccttttcaaacagaaaacccacaagactaatagagaaccaataggctccctatagtacgantgngcaaaattaaagcatggnaaacngntatttacataaatatcaaaccaacaattagtttatacattgtcaatgnccttctaagatatgtcatgggnggntccangaatatctttcccccaatggggagggtattcnggggntanattccgncactttaaaatggcacacatcataggctttacctgtttgaccactgcctcaaatgtgtgagatgtgattttatgataagcagtctattatttttaaacaagnggttctaaacncatctttagattctaagcagaaagaaattacaagtnctntnngatttncnttnaacaagttacctctatcanatttctcgnttctcttatgctgtagctanntttgntttnncnnnnaaaagnncnaangnccnnnccccccctntgttaattttggtaaactaggcacattttacaaggaaatctgtgtcnaaacagatnacagtgcataaatcaatccaaatttagancctggcaaccagttccccattgctcatctacgggactctgtcaaacggtaaa

SEQ ID NO: 501316 - DNA, 360 bp, Homo sapiens
tggcacgacttctgggactctgcgtgtagtgttggtggtgggtttcatgatagccatcctgttctgtattacctaccttatatcttactgctctatctctattctactgctagctctttttctcagacttcttcatttgcttttcactcttaagtaacttgtctgcgttctcattcttcatcttttaattcttctccttctctggtttctcaagctcttcatgctttttagactccttagctttttttaaggggaacattccccacctgcagctcgtcctccagctgagaggcagtaggccggctgaggtcatacttctcctcatactcattactaagaatttagtcctgggccttcttt

SEQ ID NO: 501317 - DNA, 498 bp, Homo sapiens
actcctataaacagacatagtcaagtcatagaaatcatgtcaagcatgaaatctacagctgtcagagtcagataatcaaagagggagatcttcccacatcaaccaaggttattttgtcagaaccttagaggagttgagacagtttttcatgttgcaagtgattggtttacttatttcagtcaagctggatatggcacaccagactgatttcatttcagtgagctatagtataattgattcttatgtgtgtgctaacccaaagctgttgtcatttgggctaacatacactgacagagacaattccacacgacaaaagtttcccagaaaacttctgtggcattttttctttttggacgtaaatgcccagatctaaaggtatttctacccaacaacgtctgtataagtgtttcatgttatttcctttttggtcctatacagaatgctatgacttctaatataggtctgaatgctgatccacgaatgatcgaggatcctcta

SEQ ID NO: 501318 - DNA, 506 bp, Homo sapiens
aagaatggagtaatagaggcatgcggtggatgcgctgtacagcccgacactcaagggcagcaaaaatcctacctgttgacttactgtcttaaaaaatcccagagaccagcaggcaggtccaaggcttatctacctcctcagggctgtggtattaccactcgaagggctcagagatgggtgccagcaagtcctcgtggcacgagagggcaaagtccaccttcactctggggtaggggctcgccctgctggcctgccaggtttcgagatgaaatctccgacctgtagctccggacgtcctccagatccagcgtggcacgtcagtgaattccacgtcatccagagaaaactgggatccttgcgcaaagacgcttccgttcatggcgatcatggcacagccgtcgtcgtacaggcggtccacgtcgcaaccctactggttggccagcaagtaaatcccaccgttcttgctggtgacatagtcacgagatcaccctggtgtaggatatgag

SEQ ID NO: 501319 - DNA, 1370 bp, Homo sapiens
cttggaggcgcggtgggtgtctgcgggggtctcgcggggcggctgcgtcgggctgcaggagaagatggcggtctccaacacggagctctacaccgcttccctcgctaactcccttccgcctcgctcgcgaacgaaccttgaacgacagcgaccacaaacacggagctagcgcgaaccgagcaccacgcctcacgcctgcgggcccctcgcaaaccactgcactgcacacgcactactgcacaccctctaaccaccaggcttggccccacggccatgcactcaacttgccgcccccacccacaaggccccacaactctactgcacacacacccaggacactcactcactagcccctctgaacacacgccaccggcacacctgcctgcgcaccctcttacacacacttacccccaacgaacacgcccatcccgaatcccggtccacaagcctttaagcaacatctgctgcctcaacctcacacaccacacgttctaaactctacttgaacacgcgtggggcacactttaccaaacgtaaagtttgtgcgccactgtcttgggtgtgcaccttggcgccttggggctagcttggcgtcccggggtacggcgccattttacccccatcgccttggtctttcaacggtcctactcgcacctcgctggcggctcctaaccacgcattttctccctcctttacttacggcgcccacgcttcttcggacccgccgcctcctcggcctggcccctcttcccaccagcgccacgtcccctcacaacgcaacccgccctcctctacacctctgtacactgccttcccccacacctccagcacaccaccaccctaacctcgcactaccgcccactcatccccaacctaaccgcccccaccccccatgacaccgcgccgccccccaactccccaatcttaactcataccccacaacctttacacaccttcactccagacggcctggccgaaccatccttccaacacccaccctctctgccccccatctaaatactcttcccacacctcaacaaccacattttccttaaacccatacaaatcatgactacacaacacctgacacatcacaattaggcacactctcatctaaaccacttaatataccactcaccaccttgtccccaccaccacctcaccacacccccattttcaacaccccctccaccacctcgcacaacactatctccccacgcccatgtgcgcctacatacccccctcttttgaaatcccccatgaggacccaccccacttccacggcctcaacacctcacacctcatcatttcacctctctgccaccccttaccttcacttgagctaacacaccacactccctaacactgtt

SEQ ID NO: 501320 - DNA, 108 bp, Homo sapiens
gaatgcaatggaattgaatcaaccggagtacaatggaatggaatggaatggaatggaatggaatggaatggaatcgaatggaatggaatggaatgatacggaatagaa

SEQ ID NO: 501321 - DNA, 165 bp, Homo sapiens
gcatggcttatgcttgacaaaccagtaacaactctggcatggcgatcgtgggatgtgtcgcaagcaatccactagacaatcttcccacgaatgtccgtagccagcgcctctcccgagcgatggctttagtccgactgaatctccaccatgtcggaatcgttacgg

SEQ ID NO: 501322 - DNA, 161 bp, Homo sapiens
tgaaaagaagcgaggggaacagaggggaagagaaagagacacactaaagtgctgcctcctgacagaattctacttcctccaagattattattttttaaagaaataaccatccatatacaatttcattcaaaattagaaccacaaaaattggggcacctggg

SEQ ID NO: 501323 - DNA, 182 bp, Homo sapiens
ccaccacccgattcgtgaccaagaaggctctgtgcattcgggttttccaggagactcaaaagccgaagaagcgaagaagagccttaaaggctgcagcagccagaaaaacaagcaaaggaggaacccagacagccctgcaaagcatacaagacactcaagacagcaattaatctgtcatcatt

SEQ ID NO: 501324 - DNA, 205 bp, Homo sapiens
ccaggccatatactagtggcaacacacaatataaaactaaaatgccattggctcctttacattggttaaaagcaaaaatgtaacaggcagaaagtctgtttcacacacaacttacaaagctatgtgttcagatcacactccttcccaaatcagataatatacacacccacaaaaatagtgtgtgcagccaagctgtcatacacca

SEQ ID NO: 501325 - DNA, 712 bp, Homo sapiens
  misc_feature (21)..(21): n is a, c, g, or t
  misc_feature (83)..(83): n is a, c, g, or t
  misc_feature (140)..(140): n is a, c, g, or t
  misc_feature (142)..(142): n is a, c, g, or t
  misc_feature (159)..(159): n is a, c, g, or t
  misc_feature (172)..(172): n is a, c, g, or t
  misc_feature (240)..(241): n is a, c, g, or t
  misc_feature (335)..(335): n is a, c, g, or t
  misc_feature (665)..(665): n is a, c, g, or t
ccctcaggtcgtatcattatncacaaacccactttaaggttgttttgtatgtgctgttgtccctatgttgttgtatcttgttnttagtatgatctgaggcagaaccatctgattccatatcgggtcacagggatataatntntctgtagatcacactcnttatcactgcagnaagtgactcttgacatttagaataagaaagtgaggggacttaccaaatctatccattgctattgacannaacagttgaatcagcatgttctgctttcaccaggaaagtggtttataactactccaagtgactgttttagtcaattcagactgcttcaacaganaaccacagactagatggctaaccaacaaacatgtatttctcacaatcctggaggctggaaagttcaagatcatggtgtaagtagattcagttctgttgagggcttgcttcttggtctgcagatggccatcttcccattgtatcatccagtggtagtgagcagagattggagaacaagctctcttgtctctctgttaaaggcactaattacatccaaggagctccaccctcatgacctatcatctcctaataccatcacattgagggttagaatttcaatataaaaattttggaggggagggcacaaacatccagtccacagcagtgagtntcttgtaatctcagaagtcttcttacataactaaattgttgctcgtg

SEQ ID NO: 501326 - DNA, 250 bp, Homo sapiens
aactaaccacccccgcagcaataccgtagcgccagtgataccggcaactgggttaacgccgatggtgcgattttctacccctatattggtcgcctgaaagtggccgggaaaacacttacccaggtacgcaacgagattacagcgcgtctcgattcagtcattgaaagcccgcaagtcgatgtcagcgtcgcggcgttccggctcgcaaaaagcgtacgtcaaccgccgaagtcagcaaatccggtcagcc

SEQ ID NO: 501327 - DNA, 995 bp, Homo sapiens
gatcgcatagccagcgtcggagggacacgcacgctgctgactggtacttctcggtgcgactgttaaaggagtctccagagttttctctctgcctgtgcaaatatgtacaccctcttgtaggagaaagatagtcatggcaaccagggtagtgcgaaatacacaagagatgtagtttccaatgtaagattagcggattgagggtgcaccgtgagtgtcggaccacgagttggttatgtgcgttgttgtctatatagccatttcgttgcgagaagacgccttgggtagcactgagccattcgtctcattagtggcactgtttggacataattagtacttgcgccgatgatatgattgaaatcgaagaggcattggctggccgcaatgaacgtttcagtatcaccctagaacaatctgatgtgtggaaattgcacgaatgattgctaggtgaacagctggcacatagctagagtatgtggaggggataatatggcatgcgcagcccgttgctacacagacatggggtacaatcggaattctaggtgcatggatgccagagtaaaatggttaaaggtccttcaaatgccgttatatggctcagtgtgggtcgaaggttacagtgctggtttgcatcgttacttggttggtttggcagtccatgtcgggaccatgtctttgcgttctgcgtacctggcaagcgtaacgtgggatatgcgcaactaccgcgtggagttgcacgcttgattgtaacctggggttgctgtgagactctggctgaacctcatgggttgtcacaaactgtggcattcatcacaacgagtttgcatggtgggcttgtggcggcgacaatgggacacccccagtgtggggggtgtgcatcgttgtacttggggagtgttttctcccggattggtctccaaaattggccgacactctggccaatgagggacccataataggaggcgaagcaagtggaaacagaaacagggtgcgaaggg

SEQ ID NO: 501328 - DNA, 436 bp, Homo sapiens
aaaatatatccacagcatctagaacatgggccagcatgtgatatgggctgtataaacatgtgctgtctttgaggaaggagaggtgtctctgcagccagtgatcttactatcgcacgtgttgcctattgggcccagggtcccattaccaccgtgggagggcacaagatgctggtctatagtacagagcagtggttctcaaacttcagtgcagagtgggaggaccccacctctggagattcaggttcagtaggtccaagatggggcctgaggctgtccatttctaccaagctcccaggcgatgctgatgctgctggttcagggactactctgtgagtagtactgctgcagtaactaactccatccttgcccccagtgcacaactctggtttctctgggaatcccaatcattagtgaaacagaaaaactctcctctcaa

SEQ ID NO: 501329 - DNA, 213 bp, Homo sapiens
caaaaaaaaaaaaaaaaataataaaaaccactttttgaatgtggcccgccccctaaattaggaaaaaaaaaggccttttttgcatttttgcccagttttccttaaaaacccccctaaattaaaaactctgtttttttggggtttgcccaaagaaaagcttttaaaactttttaaatgggcttttttaaggaataaaagtttttccttttgcca

SEQ ID NO: 501330 - DNA, 261 bp, Homo sapiens
cgtgaggtgattagaggatcctctacctggggtgctgccaagagacgcaagacgatgcaggttgagggcccccagctgcttctctcagaggctgtgagccggggcagctaaggcagccggagctcggcccctgacgagccccgatgagcctgagcgcgggaccgtggaggcaccagaaggttcagagagagctacatggcacccggcgagggtagagtggtaccggagcgtcggaattcggtaatcgatggtcgatagcgt

SEQ ID NO: 501331 - DNA, 223 bp, Homo sapiens
gtgacgagagagtgaatagcccaagagatgcagtgtggactgcagacgtgatagtgtgagataagagtataaacagcagaatggcatgctgatctccgaacaaatgtgaaattaggtcgaacgtgaaggggacctggtgacaaataatcacagttcacaaagagaaaagagaggtaggcagagaaaggagaggtagacagaatattttcttcttatttgatct

SEQ ID NO: 501332 - DNA, 230 bp, Homo sapiens
acaccaattttggctaggaaagcacctccagtcaccatacacagtttaccagtgtcgtacttgatgaaaacagcaatcttgccagtctctaaatcaatctgaatgggatcattcaccttgatgaggggatcggggtagcggatgttgcgggcatcatgagtcaccagatgaggtatttcttttgggcccacaaagatctttctcactttgcacaacttgtacttggcctc

SEQ ID NO: 501333 - DNA, 369 bp, Homo sapiens
catatgtgtgggagttgccatacttgtgggtatgctcaatggcttcctgaacgtggtccactacttcaatgcataactcgaggtccccatactcagggcggaatgacttcacctccggaggggctgaaggctcagactacgaggcaaatatgagggcctgcatgacctctcacctgatccactctcagcatactcactgatctggtcaacatatggtgtcctgagcacgatcccggtggacccaccaagtctccaaagcatcacaggcagctgcatactcacattcagagcctctgactagcctggctgaccttatcacccctggcctcataccccccatacatgtcccccacccctccgctgcgccca

SEQ ID NO: 501334 - DNA, 114 bp, Homo sapiens
  misc_feature (67)..(67): n is a, c, g, or t
  misc_feature (71)..(71): n is a, c, g, or t
  misc_feature (96)..(96): n is a, c, g, or t
agaaggtcttgacgttcagagtaattcacgatttgatgttgtaaacagtgaaaaggggaactctcangtanggtgtattttgacgaggtaatgttntagcagtagctctgtgta

SEQ ID NO: 501335 - DNA, 128 bp, Homo sapiens
ttagtctctgcaaagaacatcagcctgttacgtgcccagcgcgactataagaccggatggcagacgcgacggaaaccaccttgctggataatcctgagcttcaggtcgatgccgtgcgcagcaaggat

SEQ ID NO: 501336 - DNA, 414 bp, Homo sapiens
accctgctcaataaagtggacatgctatctatacgtggcgagattgtcgggtttactttgctctttatacgttatgtatgttctgcacattctgtattgaatgggtccttttttcagatgagtattcatagaaattaatcaattctccgtaaaaccgacatctaacatatgctaagaaaacttgaatatcttgtttaatatatcaccaggcattatgctgacctcatagagtgttgtaactaaattcaaaatccaagtaaccctaaagtgaagatgtaataacaaaaaggcagattgatttacgtcagaaggctattatatctgacatgatgttaaatcatgaattctgctataaattcttacatgaggatatttaaatgttatgttcactataacagacgtgaaacacgtttg

SEQ ID NO: 501337 - DNA, 460 bp, Homo sapiens
acagaaaatcgtgcaggcaaaatagatttccccagacatttggatttccatgtaaaagacctcattaagaaactgctcgtggttgacagaacaaggcgattaggaaacatgaagaacggggcgaatgatgtgacagcatcatcggtggttccgctccgtggactgggaagctgttccgcagagaaaactgaagcctcccatcgtgcccaagatagctggtgacggcgacacttccaacttcgaaacttaccctgagaatgactgggacacagccgcgcccgtgccgcagaaggactttacaaatcttcaagaatttctgaggacaggagctcacatctggaaggagagaagagttaaggaagaactgtaggttatcttcaaataagaccagggtcttgctctgtcacccaggctggagtgcagaggctcgatctcagctcactgcaccctctgtcttccg

SEQ ID NO: 501338 - DNA, 329 bp, Homo sapiens
tagaggatccctcgctattagacatcattctagaaaaggtaactaatctatggtgacagaaagtagatcactggtttaaaaaaaaaaaaaaaaagcagatcatgggttctctaggaccgagggatcagaggtccgacggtgcggattcacaaaagagccggaccaaacttccagagatgatgacttggtccacaatcttatttataactaccaaaactagggggtgacagttggacagttatacacatatgtcaaaatgggccataattatatccttcaaatgtgtgcaggttaatgggtatggtaaatactcccaacgttatatcaca

SEQ ID NO: 501339 - DNA, 197 bp, Homo sapiens
aagcttagtaggcagaataagcaaggaagtgggcagagccaagcacgagctagcgagatcctattggcacgttgtaacatttatttgcatatttccgttagggaacgcctcctctgtgaagtgcgcgtgtgcagaatctcatttagaccttgtacttcttctgaacagcgcccttttttaataaaaaaaaaaagctt

SEQ ID NO: 501340 - DNA, 229 bp, Homo sapiens
ctgtttttttttgccgatggtactcacagtggtactgggtcggccagaggggcgggcagtcaggtttagacgtcagcctccttgcttgtgccttgctccctgcctgctaccagcttggtgacaccagaggtttcctccctccctccctctcttctccctctccctcctccctctccctctctctcacacacacacacacacacacatacaaaccccgtcggataatttt

SEQ ID NO: 501341 - DNA, 891 bp, Homo sapiens
tatacgtgcgcatcaattatcacgacagctgatcgaactaggaattgttatatagagcccccttcagctgtgctttacttgaattcaacggcattggattgttcaaatgctgtatctatgttggaaggaatgataatccacgatccgttgtgcatgatacatccccgggtgttggcagctccctggagtctggtggtcacgactgcacgaataggacctgtatactgacttaccatagtagagttcctctgtacccacattaattgaattagcatctagaatgatatagtacaaacgcacaatcgttacgcgcttctttgtaaaaagatgacttactggctacaactgttcagcctggtccttgtaaacttatactttgataccatgaccacgctgagcgtaaatagtgagcaagtttccatcgacagaggacgtctttgattggtaagaagagtgaccatctttccatacgggctctctagtatagtggattttccccctttggggacacgcaatgtgtgagagcaactcactatccgagtgtccttcaaataagtctgttcgacccggcaggggctcttttcaaccatagggggggtttatggccattgaataagatcttccttgatcacttgcttcaaaatgcacccctggatggaacaggtgttggacgttacactacttacgaagatattcctcttactattgctggcatccgggcaggctgtatggatgaattatagctagaaagaacctagatttttcaatcgaacttcgtatatatctaccgggcagactaaaattgcctatgttacttgggggttgtggcttattcatcccttcagtaagctttccggtgcattggtgggaaatgggccaggacttatttgc

SEQ ID NO: 501342 - DNA, 595 bp, Homo sapiens
tcctataaccctttatttttaacgtttctttcacacaaaaaactctttgggggggaaaaaaaaaaaaaaaaaaaaaaaaaaaaaaagaaaaaaaaaaaatataatacaaacaaaataagagggggggggcgcgcacggaaagcctgccgcaccgcgcggcggccacgaggaccaccgtcgaccgaatactctagtagcgagcacgccgcctccacaaaagaggggccgataataaaaaagccaagaaggcgggccgggcgcggtaaacaacaaccgacggggggcggagaaaaacactctgcgagcagccatatgagaggagaaaaacacacaccccatggggtggggcggcacaaaaaaacttagaggaggagaccaaacacgacgcacccggcgagtgaagaagccagcgccgcagcgagagcaaaaacacaaacaacccgcggggagcacgacgctgcgtggcagggacaaaaacaccagagcacgaccgaacctgctgccggccgagagatgaaaactagtagccccgcacaagaacatggaaccacacaaaacatatccccaaacagcagaggagagaacactaacaatc

SEQ ID NO: 501343 - DNA, 134 bp, Homo sapiens
tacctggggcctgtggcttggtcgtgccgcacaggcttcctgaggcaaagcggcattggtttggattcccgcggctccatgcctgtcatgcacatgtatgcacgtacctgtggtcgtatgcgtgtcggccgttc

SEQ ID NO: 501344 - DNA, 417 bp, Homo sapiens
  misc_feature (32)..(32): n is a, c, g, or t
tccatgcaccggggggggagttccaaagccgntgtcctttggttttggtttagccacaaaagggtcaatggttgccttgcaggtgcccccagggaggacccccagtttcccaaggggcagtggccaccccgtgaaatttgttttgcctgccacaatgaacggctggatgggcccgtgtgggaggtggaagccaccctcaatttcctcaagggccatttttccccaaggaaaattattttggatttccctgcaggtgggtcagctgcccggagggatgtgcagaatgtggcagccgccccaaaggtggggatgggagccctggaggtggaaagccggaatttaattttggaccctgggaagcctgagatgatgaagtcccccccaaacaccaaccccatggcctccatgattttttta

SEQ ID NO: 501345 - DNA, 370 bp, Homo sapiens
aaggctctgaaaggggtcctactgggtcaatagacaccaagtccgaaggtaagatgcgctgcctactctgccaaagagagagggcacgatctgtagaacgggcctcaactccatatggcatagattcagattctttgggaatggagtgtattatttcgtgcaaagtgcctctccgatctctggcaatcaacactgtgtactatcgacagtaatcattgtataacactgatcagcgaattggctagtgattgtcccacgcagtagcctttacaacagtctctcagaccagagtttggcatctgttaatttgaacagtgtgggaagtgtgcatggttctactccggtgacaagccatccagaatcagtctct

SEQ ID NO: 501346 - DNA, 445 bp, Homo sapiens
  misc_feature (19)..(19): n is a, c, g, or t
  misc_feature (79)..(79): n is a, c, g, or t
  misc_feature (81)..(81): n is a, c, g, or t
  misc_feature (83)..(84): n is a, c, g, or t
  misc_feature (96)..(96): n is a, c, g, or t
  misc_feature (114)..(114): n is a, c, g, or t
  misc_feature (125)..(126): n is a, c, g, or t
  misc_feature (128)..(128): n is a, c, g, or t
  misc_feature (162)..(162): n is a, c, g, or t
  misc_feature (167)..(167): n is a, c, g, or t
  misc_feature (239)..(239): n is a, c, g, or t
  misc_feature (274)..(274): n is a, c, g, or t
  misc_feature (401)..(401): n is a, c, g, or t
  misc_feature (411)..(411): n is a, c, g, or t
  misc_feature (423)..(423): n is a, c, g, or t
aaattcaggtctgaatttntttaagtaggagtcagtctgttgaaaatccttaacatgtcaattgtcctttatgcttttnangnncagctgcaattnactcctttatggtctgtngtggacatttnncnccatctttgccaagtacatacctttgagaacatngcctncaaagatggggttctggcagccatgtctgctttacaaaacaaaaaggcctgactacataactgccctgtctngtcaaaggtgattgtgccaagagtacacaagcggncataattcgaaccaatcagtttctttctcctggggtttgggattcatagatactaattagtctctgtttgttcttgaagtgaggctgggtaaacctggattacgttcccaaaaaagcagtgaaaacngctctgccgngattataaagcngctttgtggagagaagcagaga

SEQ ID NO: 501347 - DNA, 131 bp, Homo sapiens
ctggaacgtctgaggttatcaataagctcctcctccacgtcagctcccagtcatggtcacacagcggcagtgataaagagcacagggatgtggagagatctcaagaacaagaatctgaagcacaaagatac

SEQ ID NO: 501348 - DNA, 164 bp, Homo sapiens
  misc_feature (1)..(1): n is a, c, g, or t
nctctctctctcgtctctctctgaagtctttgactttgaatgtatctgggacgccatacacagttaccttgtattgcagattaggaaaaggggtaagaaatggatgagtggccaggcacggaggctcatgcctgtaatcttggcactttgggaagctgaggaag

SEQ ID NO: 501349 - DNA, 343 bp, Homo sapiens
  misc_feature (275)..(275): n is a, c, g, or t
ggcccaggctcactagaaggccttctctgaggagcctacctacggagctgagatcaagccgagcagccgagcagggcgcatcagcctgaccttttcatcagatcccggctccagcccctcggagacggtaacatcaggccacagagccattgaaggatgagttgaacttgttgcaagtgcagtccacagagtgcggggagatggctttctgtataatggattcgaagccatttcatagcgggccctggatcgctcgctctgaaacttttgcactncctccggtcgtggatggtgacaagcagcttccagatagccaggagtgcaagcccaacaaggaggatgc

SEQ ID NO: 501350 - DNA, 186 bp, Homo sapiens
ctcatggtcccacacctcgcataaaagttaattccagtattaaatgtaaaaaaagagagcagcagcagcagcaacaaaacattcagcatgtcatgtgtgttttcacgtcctagcagcatgcaagtcttctcaaaatcttcaatttcaacaccagcaaaccttcatacaaaaggcaataaacctcaa

SEQ ID NO: 501351 - DNA, 163 bp, Homo sapiens
atgtgggcatcactgtggcactgctgatggtggccggcctgacaacacagggcgtggatatgtgtggagacggattctccgccgagctgtcggatacgcccatgaaaagctcaatgccagcaggggcttcttggctacgttagtggatgttgtcgtccagtcc

SEQ ID NO: 501352 - DNA, 103 bp, Homo sapiens
tatacaatcgagctcgtaccaggtcttttcccctcaaagttagccagtctttatagtttttcaaggtttcttcctgattggttcagctgcgtttcacttccga

SEQ ID NO: 501353 - DNA, 1306 bp, Homo sapiens
  misc_feature (38)..(38): n is a, c, g, or t
  misc_feature (143)..(143): n is a, c, g, or t
  misc_feature (234)..(234): n is a, c, g, or t
  misc_feature (385)..(385): n is a, c, g, or t
  misc_feature (402)..(402): n is a, c, g, or t
  misc_feature (408)..(408): n is a, c, g, or t
  misc_feature (411)..(412): n is a, c, g, or t
  misc_feature (418)..(418): n is a, c, g, or t
  misc_feature (430)..(430): n is a, c, g, or t
  misc_feature (442)..(442): n is a, c, g, or t
  misc_feature (454)..(454): n is a, c, g, or t
  misc_feature (456)..(456): n is a, c, g, or t
  misc_feature (483)..(484): n is a, c, g, or t
  misc_feature (495)..(495): n is a, c, g, or t
  misc_feature (502)..(502): n is a, c, g, or t
ctttatttttattttttggacaatctacaaacactttnattagcaaaaggagtaagtgcagcatgggagaaagaggggctccttcctttccccttcaaaggcattcactgtgcccctttcccaaggggcaggccagcagggancaagaggaccccagggtttgcaagcaggcgtggaactcagacaaaaggtgactccgtgtccgggaagcattgtgaccgtgccagaacattntgagctcctcattatttcactccagaagccgccgtggaacgtgggcgggttgttgaagccacgagaattacacagcgcgtgcttcgtgcctcagagaaccggacactttcggccccccgtggagaaccagttgtcagcggacgggggcaanattattcacattcgtgngtggtnctnntgaagntccatagcgtgntcgtgccccttngttctccataananaaagagttcctttgtgacattcttccnntatagccttgnagtggcntttcattctcacattcttctctttgtctcacaccaagattcttaccatttctcagaagcgttgccagaagcaggtgggaaagggcgccaggatatagcccagcgagggtctccgggcagaaagttatcaggtgggctatccttactagcccaagcctctcgcctcattctccacgttatgctgctgtgatgtagtcagccagagactctggccaccatggggctgctttctcgccggccaattggctatgtaaccggcctcatgaagctttcaatgccccagaagggcttcacaacgtggggaagggggagctgacacgcagtgtgcctggggccccattagagcaacagtgccgggaccaaccccggaagagtcaatgggatccgaggcccggtccataaaattacccaaaagagggcgacacacgggagacaacctgccaagagcacgataattaacggccccagcgagtgcgcaaaaaggttttaccgccccatactagccgcgatgtagggcacaccagtgatatcaacgcacgcggactacgtaggtggtcgtgaaaatacactggcggtaacaagaatacagatgatgtgtacctaaccaccagtagtaatgtttgtgcgatcacaacgaccgtgtgaactgaaaatcggacaacacaaggcagctagcgtgccacctcgtatggaattacccgcaatacagacgagagacaacaccagtcgttgggaggagtccgatggcgctagtacaccatctgtgacgctcctacggtctcccttttcctactagtgcagtaga

SEQ ID NO: 501354 - DNA, 403 bp, Homo sapiens
ttcagagccctgttacaaactgcgcagaccacccatagccctactgctgacacctgccctgctgccaggctttaatcttcccagagaactatgctgccacttcatatccactcaccacatcccacctacagactaacaactttcgagatcaggaccaacctggacactgccagagttggctctgcctaaacagacattgatgcggacagctcaccaacccctgaaggggccgaccagcctggttagtatgctacctactccgagtgtcctcccctgccccagcagattgctgcaaggacagcggcgtgcctgggaggcaaattgtggacccttctttatgcctatgcaactggttcttacacagctgtcatagagctttcaaaattgcagcagtcccacagat

SEQ ID NO: 501355 - DNA, 202 bp, Homo sapiens
  misc_feature (3)..(3): n is a, c, g, or t
acnacggctggctaattttgtatttttagtagagacggggttttctctatgttggtcaggctggtttcaaactcgcgacctcaggtgatccagctgcctcggcctcccaaagtgctgggattacaggcgtaagccactgcatccggccctaaagtatgtttcaatccctctatctccactgccaccaccccatttcatgtca

SEQ ID NO: 501356 - DNA, 183 bp, Homo sapiens
  misc_feature (50)..(50): n is a, c, g, or t
gacagactgagtgtggcctcagctcccccaagcctctgcccaggcactgntaggctctgtttggaaaatggggaccaacagcccccccccagggccagcctttaaaacagactacaactggggtgcagggatgtgggttccccaaacggaagggtaaacaatatagtctttttcagttcctga

SEQ ID NO: 501357 - DNA, 242 bp, Homo sapiens
tcatcggcccttgcgcggcgagacaaagtcttcgtccagttcgatgttgtcgaacagcaccgtgccgctgaccgaattctgctggccgaaggcatgccagtcgtccaccagggtcaggcccggggcgttgcggttgagcagcaccccggcgccgcttattcgctggcggcggtcagggaaatccattcggccaggtaggaaccggtggagtagaacttgctgccgttaaggatcagcttgcc

SEQ ID NO: 501358 - DNA, 623 bp, Homo sapiens
gcttattttaaaaaaacaaaaatttttcacatttttctttcttacttttttactatttataatcattatacatcttaccttaattaaccattactttaaataaaaccaaaaattgtcctcaataaactatcacatactttccactcctcaaaacataaactacctctctaacacctatattccacaccgttcactctcttattccacacttacctcttctctaccccaaccaacaactttcactcctccccctattccctcccttccacaccacctctccctataactacaacctccatactaaacctcacacccaacctcaccacaacattacctatatcttcccttcaattccctcctcttcacctaacacctatacccaccccatactcttctctccccacccttacaaccttacctaacccatcaacaacctaatctcctatccccctcctactcttccttctcttccccactcacccttaatcccatattcactacttacccctcatccccttaaccttaccacaattaactcatactcattctcactcctctacctcccctactcactcaaccatattccctctcttacacattcacacctctctacacaatatccg

SEQ ID NO: 501359 - DNA, 439 bp, Homo sapiens
  misc_feature (27)..(27): n is a, c, g, or t
  misc_feature (105)..(105): n is a, c, g, or t
cttactgcctgggccagatgcaggatncccgcgccatccccatgctggtggacgtgctgcaagacacccgtcaggagcccatggtgcgccatgaggcaggggaancctgggggccatcggggacccggaagttctggagatcctgaagcagtattcctcggaccccgtcatcgaggtggccgagacctccagctggccgtgcgcaggctggagtggctgcagcagcacggcggggaccggcggcgggaccctacctctccgtggaccctgccccgccggctgaggagcgtgacgtgtgggcctgcgggaggcgctgcgggacccattgacagcacgatggtggtccctgagtgggtcaggtagggcacaggggccagggagggacaagcagacctcagacgctgcccagatggaatattaaattatttttgccaaaaaa

SEQ ID NO: 501360 - DNA, 322 bp, Homo sapiens
gggtcatctagaggatcccagcagctgtcgtgaatggtcatgcgggttaacaaaacggcacatggtggcaaaagggtcatgaggggaaggggtgtctgttaaaaatgcagttctcagacccccatgctcagtaatgtaactcaggaattggagtggggcctggaaatctgcatctttacactggatgcatagaacccctgtcttagcctgttctttgctgctacaatagaatacctgagactgagtaatttgtaaagaacagaaatttattttcacagttctagaggctgggaagtccaaaatcaagatgctgacccttggt

SEQ ID NO: 501361 - DNA, 647 bp, Homo sapiens
  misc_feature (38)..(38): n is a, c, g, or t
  misc_feature (106)..(106): n is a, c, g, or t
  misc_feature (137)..(138): n is a, c, g, or t
  misc_feature (205)..(205): n is a, c, g, or t
  misc_feature (211)..(211): n is a, c, g, or t
  misc_feature (267)..(267): n is a, c, g, or t
  misc_feature (280)..(280): n is a, c, g, or t
  misc_feature (282)..(282): n is a, c, g, or t
  misc_feature (314)..(314): n is a, c, g, or t
  misc_feature (318)..(318): n is a, c, g, or t
  misc_feature (323)..(323): n is a, c, g, or t
  misc_feature (329)..(329): n is a, c, g, or t
  misc_feature (383)..(383): n is a, c, g, or t
  misc_feature (392)..(392): n is a, c, g, or t
  misc_feature (399)..(399): n is a, c, g, or t
  misc_feature (430)..(430): n is a, c, g, or t
  misc_feature (457)..(457): n is a, c, g, or t
  misc_feature (510)..(510): n is a, c, g, or t
  misc_feature (631)..(631): n is a, c, g, or t
caactgcgggggcaggcagagagacagcaaaagcaaanagggcaagggggggggacaaaaggagacgggaccaagggcggaagaaaaaaagggcagaaagcggganaagaaaacaggcaaagaagcagcacaggggnnaagaaaaaaggaggaaaacaggagccgggggaggagggaggccaagaacagggaggggggggcggcnggggcnggaagggcaggaagggagcagccggggcgggggcgcaggggcgcagggggggcagncaggacggagacncngggagggcgccagggcagggaccagagacggngacnggganggaggnggagagggccgggccaggggcggagggaggaacagagcaagcagagagcccgcnaggagggcnaggaagnggggggagaaagagcggggggccggagggcngaaacggcccaggaaggggccaaaaanacgcggccggggggggagaggccgggaagcaggacaaggcgaggggggcgccngaacgggaagaggggaaggaaggggaaaggcgggggagggcgggaccagagaggacagggaggaggacggggggacggcggaggccaccagagcgggcccgcgagggcacagggagagggncctgggtcagggcgcg

SEQ ID NO: 501362 - DNA, 768 bp, Homo sapiens
acgaggacctcttctcacaagtacgtgcctcgagccattctggtggacctggaacccggaaccatggacagtgtccgactcaggggccttgtggacatctcttcaggcctgacaatttcatctatgggtccacgagttggggccggctaacgaactggtgaccaaagggtcactacatcggagggggcggagtctggtggcattctggttccatggatgtggtgcggaaggagtgtgaaaacgtgcgattgcctgcagtgtgttccagctgacccactcgctgggggggcggcacggggctccggcatgggcacgttgctcatcagcaaggtgcgtgaggagtatcccgaccgcatcatgaacaccttcaggcgtcgtgccctcacccaaggttgtcagacacggttggtggagccctaaaactccaggctgtccatccaccagctggtggagaacacggatgagagctacgtgcatcgacaacgaggcgctctacgaatctgcttccgcacctcaagcgtggcacgcgcactacggggacctcgaaccacctggtatctgggcaccatgagcggaggtcaccactccttgcggcttcgcgggccagctcaaggctgacctgcgcaagcttgggcggtcaacattggtgcccttcccgcgcttgatttctttcatggccgggtttcgcccccctacaaggccgggaaggcctggagtaccgggccttggcgtgccggagtcacccagagattttcggtgccagaactg

SEQ ID NO: 501363 - DNA, 1693 bp, Homo sapiens
  misc_feature (118)..(118): n is a, c, g, or t
  misc_feature (140)..(140): n is a, c, g, or t
  misc_feature (160)..(160): n is a, c, g, or t
  misc_feature (199)..(199): n is a, c, g, or t
  misc_feature (233)..(233): n is a, c, g, or t
  misc_feature (336)..(336): n is a, c, g, or t
  misc_feature (970)..(970): n is a, c, g, or t
atgaatgatgactatgagtacttgagatctacaacatcgggtacctgcggcatacacttaaaacccagcctagaaacgaataggactctacttctcttcgggactctattctcagttntctcttctgcgagagaacgctncaaagcgcctatcctcgcanagaatcgatctatgagatcgcactctcgacgccttattngcgctgcgagcacatgctagcctctattctacanaagacgggtggtactccactcgtgtgatcatatgtatacaccatgtgttatgtggtgcggcatgaacaacaccagggaaagcaacacgtatctgtgacgagantgatatctctatgtctcctctgtctttagcgtataaaaatatagtatattgcatcagacagccaagggggctcatttacccgactaagtgtctcgagagagacgaacagcacggcagccaatagcgacggatatctctatatatgcgatgtaggggcacaagacaggtgtgtcccgtgagttaaactttccctcacacgcactgtgagagagctctctgtgggactctatcttctaaccaatgacatatacaagacggtgtgccacgaggtgtccaccccaaagatgttcgcacacaccaaagataagaaatctgctcccagtgtgtacacacggcctatgcgttggggcataaccttttgagagactgatgtagagcgggagacgtaggactgggcgtttatgggcccttgatccatatattagcacgggaggagaaataatatcagatttggctacccgcggggagcaaattataatgagtagatacggccctaggggttgcggaatatactaatggacgcgcccctaaggtgagaagaccacggcaggataaaggcggtttggggcgataagatggggggagcgcggagttgagaacacttggacaggagaagacaggcccgaacacaagngggcggtttgcccaaccacagacaaaatgacatgacataactagtaaaggcgccattttctcccggtaattgacaataggcaaattgaccgcaaaatatcggcacaagaacgggagagcgagagtaaccaatttggcggccttccgcgaaagagctttttggtagtacaatcaaaaaaaaagcccctatgggccgccaattggataacgcaaaaaaatccttccccgagaaaacgtttgttgtgctggaacggaaacaccccctaggacaaacattcttaaggcgaccgggggggggcaccaccgctggggcaaccaaaaggaccgagtatccccgtggggagggcaggagcaataggggagcgggcaagagatacacccaccaaaacgctaactgggtctgcgcacaccttgttatgtgaaaccgccagagagcaatgaagacgttgtggcgccctatattgtaagagacacgggagtaatgctattccacaacatattagcccggacaaattaggagtttcctaagaaatatctggcgaaaagacgaggcggaccgctccaccctaaggaagaggaatatatccacccttagcagaggagggggcccccacaagagcgtattacaggggcggttaatcccgccggaagattctcgtacttgggtacaacgaacagggtggtccccccataattatgaaggacagcgcgcagcatacaataa

SEQ ID NO: 501364 - DNA, 664 bp, Homo sapiens
tttttttctccccccccccccccgggggggggggggagaacataatctccccccccccttgggggcccacaaaaaatatattttttcccccgggggggggggggggggccctcccccacacacaaaaaggggtgttttttaaaaaaacaaccccattttttttttttccgccccaccggaggggttttttttttgggggccccccccaataagaaaaaagccccccccccccaaaaaaattttttttttttttttgaaaaaaaaaattttttttctcccccccccattttgtgggggggggaaaaaaaaaacccccccccctttgttggggggcccccctctccccaaaaaaaaaaaccccgcccgccttttttttaaaaaaaaaattctcccaaaaaatcccccccccaaaaaaagcccccccccccaccccatattgggtgggggaaaccccccccccccacaaaaaacccccgagaaaattttttggaaaagggggcgcccctaaaaaaaaaaccttttttccccaggggccaaggggccaaaaatttttccgtgttttgggccctttgttccaacaacccaaaagaaacccggcccaaaggctttccgttacggccatttcaaaaacccgggtgggttgacatggctatagcaccaggtt

SEQ ID NO: 501365 - DNA, 536 bp, Homo sapiens
  misc_feature (9)..(9): n is a, c, g, or t
  misc_feature (121)..(121): n is a, c, g, or t
  misc_feature (243)..(243): n is a, c, g, or t
  misc_feature (326)..(326): n is a, c, g, or t
  misc_feature (329)..(329): n is a, c, g, or t
  misc_feature (346)..(346): n is a, c, g, or t
  misc_feature (369)..(369): n is a, c, g, or t
  misc_feature (531)..(531): n is a, c, g, or t
tcggtgccnctcgccccgtttgtacaacccagccggctggtccggtccggaattccgggatgccgaggtttccccaacctgacgactgtcatccaggcgacatatgggacagatgccaccnatgtgggggctgacggcgggtttgctcccaacatcctggagaataaagaaggcctggcgctgctgacgactgctattgggaaagctggctacactgataaggtggtcatcggcatggacgtngcggcctccgagttcttcaggtctgggaagtatgacctggccttcaagtctcccgatgacccccgccggtccctctcgcctgnccngctggctgacctgtccnagtccttcatcaaggactacccngtggtgtctctcgacgctccctttgaccaggatgcctggggagcttggccgccgttcaccgccagtgccggcctcccggtcgtgggggctgctctcacagtgcccccccccaagcggatcgcccaggccgtgcacgcgaagtcctgccactgcctcctgctnaaagt

SEQ ID NO: 501366 - DNA, 648 bp, Homo sapiens
ggcgagctcatgagcatctcagtgcatgctcaacagctcaaggtgagccagtcactatttggctctccaacagtccagaaatgacagattgtgactcgggatatattacaggctgctcaggactattgaagtacgtcctacagatagcagcaagctggatcaggtccaggcaaaacgtccagagtgctacaaggaggttgcgtgcatcaggtccagaaagacctggtcaagaaatctgacagatcatgctgtggccccactgtgacgtgttcgtgtccggtagacagtgcagaaccactattgaaaacagcgttgatggacccggagttcagagagacgacatcattcaacttggggaaagacattgtaacctatattgtgccattggaatggtattctcatagaagaaacttgtacgacgagcaaagtgtggccacgaatgtggttactataacggagattgcatatattgtgggggagtttcatagtgaattaacaaaggagaattgcctaagtgcaaagcggggggtgggaaatgcctttgtatagaagttggaccttgaatctggttgatggactttttagaggtgaggtaacgattgggaaatgcgatttcagaagcactactgttacgcagaaggaggtcat

SEQ ID NO: 501367 - DNA, 161 bp, Homo sapiens
taggtccttcccttgatttctgaatttaattataatacgtttcatttcaacaaatgtttaaaattattctaacagtgtgggaaacgtattctttactctcatacaaggaaaatgatttactaggatctttactgggtacaaatgctaatagcatggtagta

SEQ ID NO: 501368 - DNA, 220 bp, Homo sapiens
  misc_feature (66)..(66): n is a, c, g, or t
tctgtaaagccccggcttcagtcctctacagggaagggttgggggaaaagctaaaatgtcttaagntaagtgtccaaggattgtcccgtcacctcctgggactgggattgcccgacaacactgtgatgtatttctcaatgaggtgcctttcataactgaccaaatgctgccatgtttggcccctgagtcaataaaatatgttgaaaatttgtaaaaaaaa

SEQ ID NO: 501369 - DNA, 271 bp, Homo sapiens
atctaacttgataaaagacagcaatccaaaggttccaaaatttttcatacattccaagccgaatcaatgtcacgaactcatgcagacatatcaaaatgaaactactgaaaatccaaggtataaagcagatctttcaaagtgcagcctgatgggcacagtggtatcaaacctgtaatcccagcacttatgggaggctgaggcaggcagatcacctgaggtcaggagttcgagaccagcctggccaacatggtgaaaacccacttctactaaa

SEQ ID NO: 501370 - DNA, 1530 bp, Homo sapiens
tttcagtggggtaaaaccatttttattaactgaccaaagcacattcattttgtgtttcctgatttgtgaggataaaactcattaaaacacagttctcacaagaaaaaatcacaagtgacatattttaaccacaattatacaagtttgtgaaactcctccactagggtgttctcattatatatcttaattatcaccaaattctcatatcagccaactgtgtgtattatgtctctatatcttatagacgcttatagtgtgttatacaccaagaagagagagcccaatatatctctacaagacactctatatgacacacacttgtacactatcactatcacttttgtgtgcccgaggtgcgagtatatgtatgtgtctctctatctacacacacacacgagaacatatacactgtgtgtacaccccttcttatgtgcacattatatactcttatcacctttatatacacacacgcccactgtgtgcactctgacgcccgaactgtgtgtcacagtgtgttccctctctggtggactctcaacggggggtgtgtgtgcaatgtgaaaaaggtctctcatatagagaacgaagtccaaacaccacctgtgtgtctccctatatatctcgtgtgtatgtgtgtcacccactctcctctctaaattctccacacatgtgtacagaacgtatcacgccacaatgttgtgcgagttagtaaaacagataataaaaccccgaaaaattattaaaacccgccatgttgtggcctcccctccaaccccactgtgggaccaccattgttggcgggcgcctgttgttgggggaaaacagacaacagacgctcctctgataaaccacactatccctctacaagctccaacatatatttttctatagagcggcagtcatttttacatagaggcgaccgcaaagaccacgaagacacaatctgttattgttatgatctcctccccctaaagagtgaaacattcatccacatctcttttgcggacaccatgttgtctatcctcacaaaacaatatccccgttataggtatatttaacaaggagtgcccctcatacacacgcctctatatatgtttaggagacccctttcaaccaggtggtgtacatgtatttactgacgctgccgaacacgagggcgagacatggacgatccaacagcgagaccgacgtgacacccactaacagctggcgcaagaagaaagcagcggcgccacaaaaggggaacaacaaacacaactagcggagtgggcgaacgggtaccgaccgacagacaaaaaaacgaaccacacgaagaagacagacaaacgatcgtgtgacccagtatcaatcatgccaggacacacacgcgtcagtaagaagcacccctcctcgcggagtatgttcttaggccgcacgaacacgaacgtacccgacgaaccggcagtcagaggcgacgcacacaccgcgtcgtggcgaacatacaacgggcgaccggtataacgcaagacagccgccacagtcgcaccccca

SEQ ID NO: 501371 - DNA, 134 bp, Homo sapiens
taccctgataagggccaacctgacagtaatggacagagtgcaaagagatgcttcttggtgatggatgcatatgaagaagtgcccaggctcaagctggatgaccacagtgctgtgtgaattgccgcctagtgtat

SEQ ID NO: 501372 - DNA, 215 bp, Homo sapiens
atagccgacggatatcacagtggtatgtcggtccagaggggcgggcagtcaggtttagacgtcagcctccttgctgtgcctgctccctgacgctaccagcttgggacaccagaggtttcctccctccctccctctcttctccctctccctcctccctctccctctctctcacacacacacacacacacacatacaaaccccgtcggtctaatttt

SEQ ID NO: 501373 - DNA, 256 bp, Homo sapiens
tcgaggatccgagcactgaaacgtaagacagactgcaagaccaacgctgtctctacctccgcatctatctccgtcctctgcctactcgactgtgaagacaatgagaaagaagacgtggatgttgacccaggttccatttaatgaatagtaaatatattttctctttcttatgattagctaaataacattttctctagcttactttattgtaggactatagtgtataatacatataacatgcaaaatatgtgttaat

SEQ ID NO: 501374 - DNA, 234 bp, Homo sapiens
gctcgcgcgagagaatgcagttgtcttgacttcaggtctgtctgttctgttggcaagtaaatccggtcctgttctgttcccgctgcttttggattgctttgtggacgactggggtttgttttaagttgtgttcccccctgattggggtggtgttttttttgggggaaaatccgctgggtgtttggggttggtttttggggtttttttcggttttggggcgtgttttttgtttag

SEQ ID NO: 501375 - DNA, 178 bp, Homo sapiens
tgtgtatacctctcgaataccagaaatggtgagctcgaacgagggtaaggttcctgtatgtcactcctcaccagaaaaagccactaaagcagttacagaaatgaagcggtagaatatgtggccacaaatgccattgtaatgtggctttagcctcagcgcaagagaagagcgccaggat

SEQ ID NO: 501376 - DNA, 458 bp, Homo sapiens
  misc_feature (396)..(396): n is a, c, g, or t
  misc_feature (449)..(449): n is a, c, g, or t
tggcaggctctctacctatgccacatcccttcactggggcctaacttagtggaatcaaattaagtatatttccctccaagtggccccaggattctggggctccttggcacactacaggttttctccaaaggcccggggtttatctatccttgggtgaattttcaactcttctaatcacagttctcccggccggccaagcgcatccgggactccgggtctccgttggcctggtggagtccacagggatggccttcctggctctcggtttcagccagtcctatctttcctcaaggccacggctagtttcatctcggcgaggccttctcagctcccacccggtctcaggccctcagggcccgtggggatgggcagcaccttcagcgtaaagcagacggntcggagtggctggaccggctttaagtcggcctccgtcatcagaagaggatatnccgggctaa

SEQ ID NO: 501377 - DNA, 303 bp, Homo sapiens
tggcccgtgtgcctcggtgtgtctctgttcctctccaggaggcaccaccacagtgccccacttctggaaggttccatccgctgcgggcctgcactacacaggctccatactgtgtcactggtcttacccatcccgccagcatcccagccatatcaatgcagaggcgcagcacacggcccagcacctcagggtggcctcatggtcagagatggggtggtgggcaacgtgtgcctttggaggatctgcgcgcctgctacgtctccttcccattctccaagtatctgcggagcaactccagacaca

SEQ ID NO: 501378 - DNA, 823 bp, Homo sapiens
ggcgtccagctgctccggaccgaggctcggggtgtatggggccgtaggaaccggctccgtgggccccgactaacgggcctgccccacagcagcctcgggctggcgtgagggtctcccttgtatctgagaatggctacctctcgatatgagccagtggctgaacattgtgtagtcggtagcctatgggacagtgtacaaggcccgtgatccccacagtaggccacatttgtggccctcaagagtgtgagagtccccgactggaggaggaggtggaggaggccttcccatcagcacagattcgtgatggtgggcgtttactgcaggccgactgggaaggcggtattagacgcagtcccagagtgttgtctcggcttgatggacgtctgtgtgctagaagtacccgatacatgacctgggagaatgcaagggataaccgccatggtgtcgagagcagtgtagaccaaggacctgaaggacagtagtctgggacagagggcactcgcccacgcaggcttgccagcacgagaccgatccaaggatctgatgcgccaagtttcttaaagaggcctaggatatgcttcagtgcccaaatgaattcggttcaccggagagtctgatagcccaggaagacaacatttgctcggttgcacccagtgggtggcgaaaccaagtccaacgcgcttgggcttgaactttttggagcctggccccatgacatccttacatggttacgcagaatgggtcactttaccgagcccggtggttgtggagcactctgggtacccggagatcccggagagtcttgctgcagtgcgacgtatgc

SEQ ID NO: 501379 - DNA, 1017 bp, Homo sapiens
  misc_feature (18)..(18): n is a, c, g, or t
  misc_feature (32)..(32): n is a, c, g, or t
  misc_feature (630)..(630): n is a, c, g, or t
  misc_feature (637)..(637): n is a, c, g, or t
ttatcccattatttcttnaccaggcggctgtntaagatcaattttcacccagatcttctcccctagtatcttcagcacatgctcactgttctccccatccttgtctttcccatgttcattaattcatattgccccgcgcctagtcccattttcacttcctttgacgctcctagtagttttgttaagtcttaccctgtaatttttgcttttaattttgatacctctttatgacttaacaataaaaaggatgtatggtttttatcaactgtctccaaaataatctcttgttaagcacggagagcagttcttttccattacacataaagtcaggaggtggttccccaaccgcaaaggccatctcaattaggtgagtagcctttaaaacacacctttaagtaaaaagtatgtgtgttacccccctcacattagtgtgctgtgtggggcagttcaacacaaatgtaacaatgtatttttgtgaatgagagttggcatgtcaaatgcatcctctagaaaaataattagtgttatagtcttaagatttgttttctaaagttgacactgtgggttatttttgtgaacagcctgatgtttgggaccttttttcctcaaaataaacaagtccttattaanccaggantttggagaaaaaaaaaaccctggttttttatttttgcattttattattggttacttcaaactttgttttacagcgtcctccacaaaacctctagaatgcactagatatatttttcttggagtcataatcatgatgcataccaacacaacactactcaaattatatttcattgagatgcatgttgcattgaggagtcaacttgacatagagtggagactttttcaaaaggctttttacatccttatgaaagttggggaggaattatccttttgccttttcataagggctttggggccaactgggccccctttcttgaggttggggttgggcctaaaaggttggcccttaaaaggggaggggttaaaaactttaaatttttt

SEQ ID NO: 501380 - DNA, 157 bp, Homo sapiens
gcttagttagatatctaatatctctgtcatcttgatgtgccatcaattaaggtctcttctcatgaagcggaggttttctgggcctagttttagaagtttcaatcctagttttagaagtttcaatagcatagtactctatttcagacaaggcaaagcg

SEQ ID NO: 501381 - DNA, 192 bp, Homo sapiens
  misc_feature (22)..(23): n is a, c, g, or t
atcagagagagttttcctggannaaggtatttgagctgagatctaaaaccttgctactcaaggccgggcacagtggctcatgcctgtaatcccagcactttgcgaggctgaggcaggtgaatcacctgaggtcaggagttcaagaccagcctggccaaatggcaaaaccccatcttggtcaggctgaaaatt

SEQ ID NO: 501382 - DNA, 393 bp, Homo sapiens
  misc_feature (205)..(205): n is a, c, g, or t
  misc_feature (231)..(231): n is a, c, g, or t
  misc_feature (238)..(238): n is a, c, g, or t
  misc_feature (288)..(288): n is a, c, g, or t
  misc_feature (293)..(293): n is a, c, g, or t
  misc_feature (318)..(318): n is a, c, g, or t
  misc_feature (338)..(338): n is a, c, g, or t
  misc_feature (342)..(342): n is a, c, g, or t
  misc_feature (347)..(348): n is a, c, g, or t
  misc_feature (387)..(387): n is a, c, g, or t
cgttatgggctgatgaagaggccttcttaatgttccagaggtgctataatctagatgtaatgtggtcactaattaattgccattactcccagttgagttacccattgtcagtttgggcatttatattgcaggacacgcagagtttgttaaagcccttgtggggctaaagtccaggagtgttccagagcttgatggcctgtcccancaagagagaaacgacgttactggccntagaggncaccaaagtccctggtgggattacactgaaacgaagtggcgtgggtgtcncttcntactgtctctgggacttacactttntctgcgttggagttgtcccntagnacagnnacgaacccgtcatagctgtatttggtaaaggcagcttanctgtgt

SEQ ID NO: 501383 - DNA, 344 bp, Homo sapiens
atagacagtgtacatgcatgcatattgtatgcgcttaaatgtatgcaggctgtgccacacagtcacagagtccaccttcctaacacaggcccttcggctatttagagagagtggacagttgtgcctgtgacttatgtgtagacagacctgcagcctcagaaaacaatgtcctcagagaggcaattcattttgcaacagtcataaaacataacacatataaatgaaaaataaatagcaatggatatttacaagcaaataggcagggcaagtataggcagggcaagtataggcagggcaagtatgtcgacgcggccgcgaatttagtagtagtagtaggcggccgc

SEQ ID NO: 501384 - DNA, 401 bp, Homo sapiens
  misc_feature (37)..(37): n is a, c, g, or t
aaaaaaaaattttttaagatcccagctctttgggggncggcaaaagcagtggggacccagcccagtttccatcaatttcatcaaaaaacttgaggttgttgggcccagtatttcaaatgcccaaagttaaaaagctgggtatacccaattaccaaccaaagtgatatgcatttaaccctttccctttatggccaatttttttataaaaaggggtcatttgctcataactgttagacccccccaaatgtttttagtaacctgagggtttatgcttgcaaaaatgtatgttattattgtttgttttattaaattaaggggggtataaagtattttgttgggtttttatgtttttcaaataagttcccctttaaaaaataaaaatttttaagttttttaaacta

SEQ ID NO: 501385 - DNA, 726 bp, Homo sapiens
gcggcgggagcttgagtgctgtgggcctgagctgtcatgaactcgtgtctgtccggcgccctgcatcccgggcccgggcggcccgctggaggtcggcgatgagcacagggctgactggtcggctgcccgggccatgagtgcctggtgtagcagtcgctggagccagtccctggcagtcatgctgtccatgagctgactctcccctcagaggagactcttcctcagcggatggctgcagagacagatgatgcgggtggctcctggccgcgtgggacccgtgagacgggttcgtgggcggccattaagggggacgctgtgaacacgcgggctgcgcaccctccggactggttccattgggccccgggacgctcgacggcgggccctgcgagtaggcggcatgctcccgcggaggctgctgggcgcctggttggcggggacgcggggcggggtgcctgctggtgcttctggacgatccgtgcgcttcgttcatgggcctgcgcgtgtggcgcggcgccagcaccatcgcagcacgctctacggccggcctctactccgagagctccacagccgcgtactccctcgagccggctctggcagcccggtttgcacaggccgtcctgtgcagtgccatctggcttgatcggcgggcgttaggcccggggtcttccgctatgggacgcaggacgaggactcccaggaacaggcaggagtttggggagaaaaaga

SEQ ID NO: 501386 - DNA, 180 bp, Homo sapiens
tgcacgccaaccttggcaataaaagcgaaattctgtctaaaaaaaaaaaaaaaattcttgattaggctgagcgctgtcgcaaatgcccttggggaggctgaggtgggcaaatcgtttaaagccaggattttgagaccaacctgggcaaagcgaaacgtctctagggtaaagggcccccgg

SEQ ID NO: 501387 - DNA, 306 bp, Homo sapiens
  misc_feature (277)..(277): n is a, c, g, or t
gttgtgctgtggcatctggtgaaaccctaccccacctgaaggcaatgtttttaaatctgtaaaataagctgtataggattacaaaggaaacattatatttatagacagttatcaaaatatttcttttttatttttgagatggagttttgctcttgtcatccaggctggagtgcaatggcgcgatctcggctcactgcaacctccgcttcccaagttcaagcaattctcctgcctcagcctcccgagtaactgggattacgggcacgtgccaccacanccagcttaattttttgtatttttaagtag

SEQ ID NO: 501388 - DNA, 657 bp, Homo sapiens
attcggccattatggccggggaacttgctgattctgtagtaaaacctgggtggaggttggggtggggggtaagctcatattatataaggtgccgcaccccccaacaaactttttattattcaactacattgtctctcatacccatcatccacaaacctaaaactgacaaacactaccaagctacaaattaatttaccccttaaacaccccaaataaatacacatacttaacataatattataatacacaacacaccacaaccacaacccaaccatcaacataaacaatactactcaacacccacaaaacaacaaaataaacttaaaaacacctttccccattaaacacttacttctacatataaaaaatcactcacacattatctaaacaacacaaacaacataaaaaaaaccaattctacaaactaaataaactctaaaaatatcgtacaacacatatactacactaaaaaaaaaataaaacatcccccctatacacacacaaaatcaaaatacatatattcaaaattcgacctcacaaaatccaaaacccccacaaaacccacacaaattaactgaaacatccttcaaactactaaacacaatcctaaactactcctacacactatcacattgctcaacaaacaacaaaccttct

SEQ ID NO: 501389 - DNA, 510 bp, Homo sapiens
ccccgtccctctgccccccggcgcggcccgacagctcccagccccatcctggcaggtggcttgggtggcggtagatgccgggcgggaggaagatgtggggctgctctggcaggttgggggtgcgaggaggaaaaaaaaacagagaaagacacacacagagagacagggagagagcgcgcgcgagagagctcttgtctatagatttatccacataatatatatttatgtagctttttttctctcgacactgatgaatgcgcgctcggatccccgggcggactccctccaagccggctcgcttttctagtctaaataaataaataaagccagatggaagaaaaaagcgcccattccacctccgccgccgccccgcccgccatccctgcctttgcttcgcccgcctggcgccctaatagagcatagcttggtggataaagcccccctacatacccacacgaaaataaaaatcactatcattaaaatacaaaaagttgcacctgctgctattac

SEQ ID NO: 501390 - DNA, 213 bp, Homo sapiens
gacatgcgagacgtggaggaccaggcctccaccctgtctggcctgcgtcccttcatcgcccttaagcactaagccctagcctcccctgctctccttcccacgcatttgagcccttggttgcctgggcccaaggctgagcgggttttcagtatttgtaagcatttcagcagaacaataaagaccgtttggcactacggaaaaaaagaaaaaaaa

SEQ ID NO: 501391 - DNA, 728 bp, Homo sapiens
tctggatgtcttgctctgtcgccaggtctgtagtgcagtggccactctcagctcactgcaacctccgcctcccgggttcctgcccttctcctgcctcaccctcccgagctcgctgggactacaggtgcccaccagccacgcctggctaatttttctgtgttttcagtagagatggggtttctccgtggtctcgatctcctgacctcgtgatctgcccgaccttggctctcccaagagtgctgggactacaggtgtgcacgccatctgcgcccgtgcccatcactggaatctttccaaaatgcagccgcttcagcaatagatgatgtcaaagagaccgatcacattctgacactttagtctcacaactcttctcgcgtcagccgcaaactttccacgagtggtcgcatgtggctcctgctcatgtttgtgacgcagaccttctgatgcagtgctgtgtagagctgggctggtggtaaggactaagagaaagggcttcttaggtgctaccgccgtggctttcctgagttcctccttctcttgaatgatcaaagctgacattctctccttcttagatgctgtcatggctagtcagctctttaacatttctcattagccatttccccttcttaagtccacctttttctgctccttgttgctaccagttctgggttaataaagtgggaagctcatacacctgctaatcttacattaatttgttcctaacaggg

SEQ ID NO: 501392 - DNA, 134 bp, Homo sapiens
caccgaggcccacttggacgtcggggtccatgtgttcgccgtctggactcagctgcgctgctttgatgaacagatcagtcaccttgtcgtgcagaagctgccggtctgtgaagcccaagtcggaggcgggtgag

SEQ ID NO: 501393 - DNA, 380 bp, Homo sapiens
caaggtggaagcaaccacatattcaacaaatgaatgtgtgaacaaaatgtggtatatacatacaatagaatattattcagtcttaaaaaggaaggaccaggcactgtggctcacacctataatccctttgagagaccgaggtgggcagatcacgaggttaggagattgagaccatcctggctaacacggtgaaaccccgtctctactaaaaatacaaaaaaattaaccgggtgttgcatcgggtgcctgtagtcccagttatttgggaggctgaggccggagaatcgcttgaacccgggaggcagagattgcagtgagccgagatcgagccactgcactccagcctggtgacagagtgagactgcatctaaaaaagttta

SEQ ID NO: 501394 - DNA, 114 bp, Homo sapiens
tctgcggttgttgcagaactgatacttatttcagagggctagatctctgaaaatacttcgtgggaatcactgtatataaaagtacaaggtgtataagctacatcattaatgagc

SEQ ID NO: 501395 - DNA, 100 bp, Homo sapiens
  misc_feature (1)..(1): n is a, c, g, or t
  misc_feature (7)..(7): n is a, c, g, or t
  misc_feature (9)..(9): n is a, c, g, or t
  misc_feature (11)..(11): n is a, c, g, or t
  misc_feature (15)..(15): n is a, c, g, or t
  misc_feature (32)..(32): n is a, c, g, or t
  misc_feature (55)..(55): n is a, c, g, or t
  misc_feature (61)..(61): n is a, c, g, or t
ntctttngncnttgnatggaatgactttttgntgtgatggttttgaatgttgggnttctgntgtctgcttagtacccatgcctgattttttgagattgta

SEQ ID NO: 501396 - DNA, 269 bp, Homo sapiens
ctcgtcgctctagaggatccttgtctgcttaggactacctggctgtttgcttatctggtcctggttctgcctgacctggcttgtcttggatcctctctggttctgctttctccctggcctgccttgctctggcctgtcctggccagccttgaccctgaccctgtgcctgacaatccccaggtctgacactggccatgcttggccctggcccttccttttggccctgcccctggccctgccttagccctgtgctaatcttagtccaaagg

SEQ ID NO: 501397 - DNA, 247 bp, Homo sapiens
gggggaaattttaaaactcagactccttgccttaagcagtcctcccacctcagcctactaaagtgctgggattacaagcgtgatgcattacatccaagagaaatttcttgagacggctacatgatgcctaaatctgctggtgacgaagttaataaagtgtagaactgaataaatattaaatattagatcaagtttctcatgtttatcttaacgtataacgatttatgtgaaagcactgattttcact

SEQ ID NO: 501398 - DNA, 391 bp, Homo sapiens
tggcagaaaaccttgagggttgtcagtaccagttcacataggctttccttacgttacaacgaggactttctatctcactacagacatcccttccccttcctctccacttttcttctacgtgcccaccctatctaaaaaaaatcaggtgtttcaccaaccgggattagtttacaatgtacgacctgaccccggccaatagggaaagggtacaggggcaggacttgcatcaggcagtaaaggctctcatgcccctttgttcaggtatgctctcatggcaactggtcaaggaggcacccctctgcacagaagtaaaattgctttgctaagaatcctttgttcgagtgttcaatttccttaggattttgagcgttattcctaacactcattctct

SEQ ID NO: 501399 - DNA, 702 bp, Homo sapiens
aaggctcgtagcctaaaacaaatgtcaggcattggtcgcatagaaactgtcgacctagtgggcagctgcctgttgtaatcaacttgatacggaaatgcatgctcttctacgggtgcctagcgcacctgtggcatagttacggatcctctgtagccctcgtggtggctagtgagtcacattttctacaagtacagcgtaggttcagagctgaacagccatggatgagcagcagtgtggcctgcctatcagccgctggctccccctccagcataagcctagtcatgtccagatcagcgctgtcatatcaagtccagctccatgtgacaggggctccattccccccctgtcctgcagggaggggtgccatgagtcgtgctgtcggctcatacagcacagaggaaaggctggcaggctctgccagcatccgtactgataagaggagggagtcactccaggaataacccctaaggagaggaggggtccatcacctgtggcgtctaccatcgtgccttgcgtgtctctggtttacatcatgatgcatggagcgccaacagccatcataggtccagaaggtgcacagcatcacgtaaatcatctatatgttaagaaggacggtgagagcccaatctctggtgttaatgagatcatgcatgaactccggacgcgcctgcctcagagtgctgcgaaagatataaaaattct

SEQ ID NO: 501400 - DNA, 297 bp, Homo sapiens
ggcacgaggggcctcggtgattttggagaaaaaagaaatgcaaagccagcaattgtttgttaaagaaggattagaaatggctaggagagagtgagtgcgattgatagtgtgatagagatagctggggagaggtagtgggtggcataagaacgggaacaagaataagaatgagtataaaagtaaagaataagacttcatcagggtgaaagtattggagtgtgttctgtcagcaaagatcatctatccactccaagagggaggcaagagtggtggattggggatagattttcacgatgg

SEQ ID NO: 501401 - DNA, 147 bp, Homo sapiens
tttttttttttatttaaaaaaaagggcccccaaaaaagccccttttttttggggttccaatggggggccctttaagtaaaacgccatttttttttttgggtgaaaatttaaaagggccggccccaaaaaaaaccggtatttttttga

SEQ ID NO: 501402 - DNA, 116 bp, Homo sapiens
  misc_feature (30)..(30): n is a, c, g, or t
gtatcttctttttttattccagaataactnacttcactcacaagtgagatgaatggtctttttacagaatttagggattccaagtggcctggttttaatataatacatattcacaa

SEQ ID NO: 501403 - DNA, 176 bp, Homo sapiens
acttggtgagttacgacggggggcgcacatttggcagccctcatgagtgcaggcccgccacttgtccagagggccacgttggggatgtcttgaccccacagccatctgggcaagtggcgggccctgcattcttgggttccggggttcgattcggtattcttgtccttagttgttcc

SEQ ID NO: 501404 - DNA, 602 bp, Homo sapiens
  misc_feature (419)..(419): n is a, c, g, or t
gtagcgctcccactaccaaaagctcccgtatccttgaacaattcctaataccattagaggaatgaaagtacataacaatgtgatgaatcaccttttacttcctagactagcaacgaatgaaagctaagtgtaacaagggtgtagggatacaggcacatgtgtgaactaggtgtgagtgtaagctgagttcaatggtcttttggaagaaaattcgtaaacatctaaagaaacttctgaaatgatttatcccacggaagtagaagtaaaattctacttctaaggagttgcccaataagctggtgcgcatggacatgtggacacacgatacatacaagggtatttagtacaatgctgttggaattagcaaaggcaaatttgctttgggttatatcccatcgggatgggatataaccagctgnctctagatggcaacagtgaattaacctgtggcttacccatgtagtagaatacaatacccttgtttaaaagaaaatcaatctgaatgtactggcataaaacatctaatgtgatttgtgctagctcccaaaattttaaaaagcactggtgcattgaatgctttaataaggcagatgatgggggat

SEQ ID NO: 501405 - DNA, 894 bp, Homo sapiens
tagaagcaggatgccacagtgtggaggctgccctaaagacctttacgatcactgtgcaaagcggggaagcagtgtgaactctttatgcaatcccagactgtcctgtggtcagtcgcactgtgtgcacgtgctgtgtcccctgttccacttccatgctgtaccgacagcagcatgaaagcatttgcatagtgatacctcatcactagacatcgtactaaaacagaaacgttctacgttgtagctcacttccaatatgtcctatcaataggagcgtgtgactggggcactcataggaggcttcatcaggtgattcccctatctcaggctacagcctagaccaaacgctagggcaatactccatttcacatatcatctggatcggcgtaaagtctatcttaacattaccacaagggtgttctcggggcgtatccggaggtgccccgacgtgagggcggactagcccgatgcatacaccaaatgaccggttcccgggagtatctgtaggctcattcatttctctaacagcagtaatattactaattttcatgatttgagaagcttcgttcgaagcgaaaagtcctaatagtaaagaaccttcataaacctggaggtgactatatggatggcccccaacctagcaacattcgaaggaaccggtatctttaaatctagacacaagggaggaatcgaacccccaaaggggttaagccacccatggctccaggctttccaacacaacaacaaaaaacatgtggggggggccgagacttacacagttgggcggcgcggaagaggcacagccagaacgggagggggtaaaaagcggggcgtcgacacagtggtggagagggcaaccgcggaaagaacgcgcgggaggggcatacggacagaagg

SEQ ID NO: 501406 - DNA, 444 bp, Homo sapiens
tctctaacggatccccgagaatggctgatagttagtgagttagaattaaagtgcagaaattatttaacatttatttgatgcctttacaaaatatagacagactacaagaaacagtaaacaagaataatttctgcacatagcagtatttccctgcaatataataatcctccctcagtacatttcctaattctcgagatgtcctatgttactggcgcggtacggcatgaagcaggataggtttaaacagggttacaccctttttttgtcccattgtctaggatttttgttgacggtcgtgaagttgtaacatagtattgaaacttatccataaatctagtggatgttgcaaaaaaaggacaagaagtttgtgtaataatagaacctatcccttgtgagtcacccttagtgtttggaagacattttgaagctccggatattcttgtt

SEQ ID NO: 501407 - DNA, 673 bp, Homo sapiens
attgtaatttccaatgttgggggagggacctagtgggaggtgattggattgtgggggtggaatttcccatgctgttctcgtgatagtgagtgagttctcacaagatctgatggtttgaaagtgtatgacacttcctccctcacactttctctcctgccaccacatgaagaaggtgcttgtttccccttcaccttccgccatgactgtaagtttcctgaggcctctcagccatgcttcatgttaagcccgtggaactgtgagtcaattaaacctcttatctttataaattacccagtctcaggtcgtactttacagcagtgtgagaacagattaatacaggttcatttctacggctcatggcagctctcatggctctactttgttcttactgcatgttccttagttcacctgtgcatccatcatccatcagccatctaccttatgtttgcctactgtgttcttaatattcttatgcttcgtgtttcctctgaatcatcatggagtccagaatagaatccagtgttgcgtgatgtcctttataggctacactatatgaggacactgggatcccttactgagatttcatctctattttaacacagtgttttcaactttgatttcgaatcaatgggtcatgtccaggtttggtacctgcgtttttggatgtgctggt

SEQ ID NO: 501408 - DNA, 486 bp, Homo sapiens
tggaaacagtctttgctgttttgcccaggctggattgtggtggcccaatcacggctcatggcttcctcaaatcacccgggcctaagcaattcctcccaccgtgtaggctgggacttacagcttcacagcacaccggtggcctaaatttttttttggtggagagggattctctatgtggcccaggcgggctcatcaggctccggggctcagagtggctcctccgtgcctcagtttccaaaggcacaggccatgttgtagctttgtccctggccattcattgcccaacaagaggttctatacctttataactgattgcgaacttatcataaatgggttatgtgggggggcaagttcttaaagcgggaaatggtaaatttcctcctgaaaggtttttccatgcagttaccatgaactaattactacaataaagggagggtctggggtgtcaaaaaaacaacaaaacacacaatacaaaacacaaggagg

SEQ ID NO: 501409 - DNA, 97 bp, Homo sapiens
aagtgatatttataaagttattgggtatggtgtcaagtttggtttggcctcatagtatgtcagcaaaaaattaaataccagtcctcctatttaacct

SEQ ID NO: 501410 - DNA, 786 bp, Homo sapiens
gcttgacttgacttgtatttgctgggcaacttacttggggactttcataggacaacagaaggtctgacacaggaacttgagaagacgtgacagcaatcccttcacctttgaatgtcatggagcctatcaaaagacaagaaaagtccattcgttctctcaaatgacagttacctgtaaaactagctcatgtgatgagaccacagtatcattgcaatgatagctgtatctgtcttttttttttttttttttttggaaactgactttactttacttcactttaagtaagtcttggcctcttgtccgcccagggttggattgcaagggtgtaactcccggctcaatgaaccctccgtttcccggggttcaaacaattctccggcgctcagcctccggagtacgctgggtggcccataaccaacacccagttaacttgggtatttaaggtaagaagacgggggtttcaccattgtgggccaggctgggtctgagaactccgagacctcgtagatccggccgcttgggccccgcaaagggcggggattacaagcttgagcccagcgccgggatggtatcttcaccatttaacccaagtcattttacccaagtaagtaatcgggggaaagccgtgagtctggtaccaccgggtcattgggggaccgggtgggaaacgggagccaagggacctaagtgcccttggcacgagcgagttccaataccatttcacgaagggtaatacctttctaaatctgaagtaaccaagagtgataatctcagggacagaagata

SEQ ID NO: 501411 - DNA, 123 bp, Homo sapiens
tacatttcaaccttgggatttttcccaattacttaaaatgtttaatgtcagttaaagatttttttaccctctttttgggaacatcaattttggactgttatgcagtaacccttttttataata

SEQ ID NO: 501412 - DNA, 157 bp, Homo sapiens
tgggggggggcccccccccccttaaagggtccctttccccgtcctgccaaaaaaccccggggggggggagggggcagcatgcaggggcccccctccccctttgggggggatgaaaaggggaaggggcccaatgaaaaaaaactgccttttccgtgga

SEQ ID NO: 501413 - DNA, 146 bp, Homo sapiens
cccccccccccccccaaaaaggggttttttttttttcccctttgggccccccggggcccccccccatcttttgggggccccccccccggaaaggccggggggggttggggggggccaaaaccccccccggggccccggggttggga

SEQ ID NO: 501414 - DNA, 199 bp, Homo sapiens
gccttcacctctggcccagggtatggcagaggtctcccaggtaggggtgtggctctctgggcaccgtctatattgctgtgtacgcagcggcaggttctttggcaggatggggcacagggtccggcacccattacaggtggggaaacaatgtcatcactctggtgccaacctagggattagaatcaaggtctccctggga

SEQ ID NO: 501415 - DNA, 863 bp, Homo sapiens
gaagcggccgtggggtggagttaacagcggtggtcccaagattggtgcgcggcgtttggaggacgtcgggccgcgcagaacatggtggaagtgggaccgccgagaacaaggagctgcggggacacaggagccataagtgggcccggcgtgacaaagggggcatcttggcgaccgaattggggagccgcgtcgccccggcagggaatatcgggatgaatggccccacaaagggccggttcccgctctctatgacccctcaggggcacttgttgcggaagaccatgccagaggttgtccaaagacccggcgtcaaagccgagtccaagggccccggcgctttgtgaaaatcacaagccttgggaggttcccagtctcccagcccgcctgttagcattgtcatcggcccacccgttgtcagggttatgtagggttgagcccctctgtgtcgctaaagtgagagtgtttcttcgtagggggagtgatctaattccgcaggaggagaggctagtacgtgcgggagagttgtaccaccacaggctcgggcgccattgggcatcatagccgcgtaagtctcccgcgaatatttggggggacgtatgccggcggatcaccttgaggtcaccagtggtccagacccgcctggcccaactctgttcgcaccccctttgtcttctttttgaagtagaatgtgaccaccgccatgtgtggtgtggcgcccgttttgccccccttttcatgggcgggtcgatggcccggagacgtcctgttgatacccccgtactgccgactgtctcctctgtagccccctgtcactcctacgtcactgcccccctgggtgaaaaaagaaacttttattcaccaca

SEQ ID NO: 501416 - DNA, 407 bp, Homo sapiens
  misc_feature (75)..(75): n is a, c, g, or t
  misc_feature (346)..(347): n is a, c, g, or t
  misc_feature (370)..(370): n is a, c, g, or t
gctcggtacccccagtagtttgtgatgggtgcatatgtgtctgtgtgtctgtgcacatgtgtggtgtgtacctgngtgtgctcgtgcatgtgtatcaggtgcgggtggtgtgtttgtgcttgggggtatgtactgagcgtgagtctgtatgcacgtgtgcctctgcacccacctgtgtctgtgtgttgagccctatcatgggctgtgcagctggcagtgagatgtaagtctggagcctgggggtgctgggctaacatcagccaggagggtgtcactggtgagggatgcgttgacagccaggggtccccatgagcccctggagcaggcccctcccagcctgggcctnncagagggcagctgcataccagangttgggaggcagccggtggtggggcaggaggagctgg

SEQ ID NO: 501417 - DNA, 361 bp, Homo sapiens
ggtagacatatacatttgtaaaaatctatcttaacttttaatcttttaaattacttttttttttttgatggagtcttgctctgtcgcaaggcgggagagcagtggcacgatctcggcttactgcaacttctgcctcctgggttcaagcgattctcctgcctcagcctcccgagtagctgggactacaggtgcccaccactgcgcccggctaatttttctatttttagtagagactgggttcaccatcttggtcaggctggtctcgaactcctgacattgtgatccacctgccttggcctcccaaagtgctgggattataggcgtcagacaccgcacctggccgtttttgttttaagaactg

SEQ ID NO: 501418 - DNA, 377 bp, Homo sapiens
ctctaaaggattcccttaggcatatcaagtgaaaaatctgtgtagaaaaaaatttcgtaagttatagggccaggtaattgtgagatattaaaacactcagattcatgtaaaattctgagatgcagccttgcatttcctcctccttggcgcgtcatgataaagcttaacatattaaaggctcattctcagagtccacagagaacgagcagaaaatgagcttgaatggattgggtagcaaaactataaaatttttgattctcagtgtagacaaaaacaactcttttatatctttcaaaacccattttatttcttctagtataaaacgtttttaattgagaaagaaattaggtttgtctccacccacctctaccatctgg

SEQ ID NO: 501419 - DNA, 456 bp, Homo sapiens
  misc_feature (49)..(49): n is a, c, g, or t
  misc_feature (74)..(74): n is a, c, g, or t
  misc_feature (76)..(77): n is a, c, g, or t
  misc_feature (80)..(80): n is a, c, g, or t
  misc_feature (82)..(82): n is a, c, g, or t
  misc_feature (86)..(86): n is a, c, g, or t
  misc_feature (98)..(98): n is a, c, g, or t
  misc_feature (108)..(108): n is a, c, g, or t
  misc_feature (128)..(128): n is a, c, g, or t
  misc_feature (134)..(134): n is a, c, g, or t
  misc_feature (142)..(142): n is a, c, g, or t
  misc_feature (194)..(194): n is a, c, g, or t
  misc_feature (227)..(228): n is a, c, g, or t
  misc_feature (249)..(249): n is a, c, g, or t
  misc_feature (266)..(268): n is a, c, g, or t
  misc_feature (279)..(279): n is a, c, g, or t
  misc_feature (287)..(287): n is a, c, g, or t
  misc_feature (383)..(385): n is a, c, g, or t
  misc_feature (437)..(437): n is a, c, g, or t
aaaacacctattttgattgatcagttcttttgtatgaatatccacctcntttaaatactctatttttatatatntnnggntntgangataaacatgantttatatttnactgtcttaaattatatttncataantgcaaatntcacttgatataaacaatacaaatctgcatcttacagatgataatttttttngaagaatgatacagaattaactttaaaaataanncttttctaatatacacttaantgcaaacatcatttttnnnttttcagtgantttttttntgacataaaacgttaccaatgtgtgcagcctctccatcatgttttaacatactgtatactctatagcagtattacagtcagtatttcatataattnnntttgacctaactgttaccatctgactgaggttactctggtatttatctcttngctgctgaaataataatag

SEQ ID NO: 501420 - DNA, 287 bp, Homo sapiens
gggtagaggatcgtctgagcccacgagtttgaggctgcagtgagccaagatcatgccactgtactccagcctgggcaacagagtgagaccccatctcaaataaataaatacataaatacataaataaaataacaacaacaaaaagtccataagccccacacccttctcccaggaatgagagaggactccttatagatacaatctcgggcatcgctaagccatgtgtcactgaaacccagaaggaacaaggggctcttgtgcaggcagcaaaaccctcagcaggctgc

SEQ ID NO: 501421 - DNA, 500 bp, Homo sapiens
gagatactcctgaaagttgtgtatgacagaatttagtgtgagggaggctactggactcctgacaaggaaaatacaaaatgagtactgtaactctcttaacacattcattggtgagtgctggcattacgatggggtcccatggaaaaggagagggtctgaggttattttgagaattaaaaagctgaaggggatataggagtccatcttctgtctcttgggttgagtggccgacctcatggtctgccccctggaaatggcctgggatttctgccttttatgggatgtaggagtccaggaaaaggtccaagttgactggacagttgggtgaaggtttccttaggaaagtggcattcgatgggacactagatgagatggtgccgtccccatctctccttcagtagcttccaaactagccttcttgacttcagtctctccccgtcttcacccacctccaaagggatccttttcacacttattttgtctttttttttcttcctttt

SEQ ID NO: 501422 - DNA, 238 bp, Homo sapiens
ccacatcggaaagatatctccttcatatgattcatcttcatctgcatggtatctttctgcactaactgtggacgctttctgaatctataactcgtggcactagaaatggccagatcccgtgctgattgctatcaccatagcaagtcttacacacttattgataccactactgtggctgacgttaactcgactcctgtagaaggaacagtagacttgttccagcaaactcagcctggtc

SEQ ID NO: 501423 - DNA, 684 bp, Homo sapiens
  misc_feature (59)..(59): n is a, c, g, or t
  misc_feature (207)..(207): n is a, c, g, or t
tctagcatgtgcccagctgacgcacatggctctgatagcgagacaggtccgccgtcccntgcggtccggcgcgggtgcctcgtgcatctccacactaacgaggatgcacgtgatatcgtcgagcaccgtccctgaggcgccggtcagtcataataggcggccatgcgtgggctattctcctcgtacacagagtgttacgctggagcnccaggccgggagcacagcaatgagactgcgcgaagtcagagttcctagggctcccaaagcgatagcgggaacctggctgtagagagaggtgtcgtcactcgctggaccatcaaccaaggtcgtttgaagattgatagctaggggagttaatccgagttcaaacgaatcccagttcttccagagacatagggggaagggagaagaagcattcgcagtgtatgggatcgcggctcacacaaggttaaccaccattcgatgtgcgattggccgttgtgccgactgtgcgcactggagcgtcacaacggacgaggttggctaggttaagccccccgacaggggcgaggatccataactttggcaccatttttccgtgtcttacgttgggacaattgaacccccttatttggagaccaagtctctttaatccaagttggaaatgacaaacctacggaaagatcaatttcctggccattactg

SEQ ID NO: 501424 - DNA, 1263 bp, Homo sapiens
  misc_feature (514)..(514): n is a, c, g, or t
  misc_feature (527)..(527): n is a, c, g, or t
cacggtggctcacacctgtaatcccagcactttgggaggccaaggcgggtggatcacctgaggttaggagctcaagaccatcctggccaacatggggaaatcccaactctactaaaaatacaaaaactagctgggcatggtggtgtgtgcctgtaatcccagctactcgcggggctgaggcaggagaatcgcttgaacccgggaggtggaggttgcagtgagtcgagatcaccactgacagttgcagaacattcaggatgttgccagtttgggcccaccaataaagttgctacaaacattcatgtacaggtttttgttggaacataagttttcatcactctcagataaatacacaagagtgcaattgctgggtcgtatggtaattgcatgtttaggttcataggaaactgccacactgttttttttccagagtggctgtacaattttgtgtatcctatcagcaatattatgagtgatccagtttcctcacatcctcaccagcacttgatgttgntactttcttattntagtcattctgataggtgtgagtaataaactaatgggattttaattacatctctctaatgctaatgatgttgacgtctttcatggacttattgccatccgatatctctttggtaaaggttcttctggctttggcattccctaatgaatgttaattttgcaggagggtttaaagtaattataattctgacacggggggtttggtggttggtctttggccggggaattgttgggaaatttttctcaggcggaagttggcttccatcctttttaaagacttttcccgttcaaatgggccaatttacaatttcttttaggcaaacctttccgccacgcttaaacccgatgttatcccggaccatacatcatcccttctttttctgacatctcctcaaggtgtataaatcctcacccctttagatacactctcgcaccgcgattactacgtctacttctccatgtatatctaatcccccgtcctcgtgcaactccctactctcttactctcgctcctctcgaccatacgctcctaatcatgttctcatgtatcacctacgtcgcctgtcgcaacgttcactcacttagagctcatatctccttacgtatcttacgtcaatactcacacccccactatgtcctggtacactagaatctattctatcttctcgcgccacccattcatctacccaatctgacgctccaccactcgtagctccagcactttatccctcccccgcc

SEQ ID NO: 501425 - DNA, 638 bp, Homo sapiens
  misc_feature (9)..(9): n is a, c, g, or t
  misc_feature (44)..(44): n is a, c, g, or t
  misc_feature (49)..(49): n is a, c, g, or t
  misc_feature (59)..(60): n is a, c, g, or t
  misc_feature (64)..(64): n is a, c, g, or t
  misc_feature (94)..(94): n is a, c, g, or t
  misc_feature (111)..(111): n is a, c, g, or t
  misc_feature (123)..(123): n is a, c, g, or t
  misc_feature (137)..(137): n is a, c, g, or t
  misc_feature (143)..(143): n is a, c, g, or t
  misc_feature (246)..(246): n is a, c, g, or t
  misc_feature (375)..(375): n is a, c, g, or t
  misc_feature (409)..(409): n is a, c, g, or t
  misc_feature (446)..(446): n is a, c, g, or t
  misc_feature (451)..(452): n is a, c, g, or t
  misc_feature (456)..(456): n is a, c, g, or t
  misc_feature (459)..(459): n is a, c, g, or t
  misc_feature (465)..(465): n is a, c, g, or t
  misc_feature (513)..(513): n is a, c, g, or t
  misc_feature (558)..(558): n is a, c, g, or t
  misc_feature (568)..(568): n is a, c, g, or t
  misc_feature (621)..(621): n is a, c, g, or t
cctcacccncttaagatggggagcatcttccaatcaccgtcccnatcgngggcattgtnntggnctggctgtctagcagttgtggtcatcgganctgtggtcgctgctgtnatgtgtagaagnaagagctcaggtgnaaaagnagggagctactctcaggctgcgtgcagcgacagtgcccagggctttgatgtgtctctcacagcttgaaaagcctgagacagctgtcttgtgagggactgagangcaggattttttcacgcctcccctttgtgacttcaagagcctttggcatttctttttgcaaaggcacctgaatgtgtttgggtccctgttagcctaatgtgaggaggtggagagacagcccaaccttgngtccactgtgacccctgttcccatggtgacctgngtttcctccccagtcattttttttgttccaaaaaggnggggnnggangtntccatntctgtttcaactttatgggcactgagcggcaactttttacttccctgntgaaaataagaatttgaaaatcaatttgttttttcaaatatttgntatgagaggntgatggattaattaaataagtcaattcctggaatttgagagagcaaataaagncctgagacccttccaga

SEQ ID NO: 501426 - DNA, 354 bp, Homo sapiens
  misc_feature (43)..(43): n is a, c, g, or t
  misc_feature (167)..(167): n is a, c, g, or t
  misc_feature (345)..(345): n is a, c, g, or t
tcaaggtactcatacctctccatggaactatataatatcacgngcatgtgctatatacaataatcacttacgagcatagaggtactagctgaatcaccaaagtatacatattacaaccacaggaagtttaaaaaagtataaacagccaagagatttatgctgctatncttcagacatatttcaaccatgaggagacaggcagaatatcaaatacactaacagccatcactggactttaagtgctcaagataatcattgcaatggtatgggtctcaccagggcaaactcattcccatttctctttaaaattgtgacagagtaaaactagaccagatgcgacttggntgatcacca

SEQ ID NO: 501427 - DNA, 813 bp, Homo sapiens
cagggcaggtgcctcagccacctgggaaagaacgccaagcagaggtccccacagccaccctgcagctcggctgcacccaatggagttcagtgcccctggtgccaggtgtgatgatgctgtgtgtagagactgcagtgaagagggaggctgctcctggccctcagtgctggtgtgtgaatgtggtgctctgtggtgtgaatggtggtgtagagtgcaccctcatgggctgggtgtgtgctgtgggcctgttgtgacccagtggtcctgaagtggagtgggtttcgtgtcatgggacaccatgcttggtgcaaaatgttgtggagatgattcattggtgtgtccagtgtggtgttgtcctgccgcctgcatggggtgctagaatgtggctgggcaaaggccaactgtatacctgtggggccttgagggagggggaaccctggctgggggccccacctccgccctcatttcatggccccctcctggcttcccagatggtggccgataagcggagctgcttaggatccgatggaaggggccagtgcatgaaccctgggggaatgagcccagggtgcctcaactgcatgggcccgttctgtcctagtggggtggggcccctgcattccaacgtggggagcctcttcttgtcctgtggggttggtggccctgcttaccaaacggagtggctcttctggtctaggggtgaccggcgtacgtggtatgtcgtgtggcccttcccgggatcggctctggcttcacgctctgcctcctattctacgcggaccctcgcccgggtatgtcagatctatcttgtaa

SEQ ID NO: 501428 - DNA, 1409 bp, Homo sapiens
  misc_feature (315)..(315): n is a, c, g, or t
ctgctgtttgttcctgctctcgttatgttatactcggcgagtgatgtggtctcctagtgctgtcgctggtaggtgttggttctcccacgaaacaccacgtggtgttgtttctctgctcactcccttctgtgtctctctagagtcctggacgcagttactctcttctttctgcggaagtgtttcaatttcttcgatgggcctgcatggtattgtttctcccccctctccaggatgaacttctccggagtaacccccgtgtggggctgtgcgctgaatgaatagttttagtccttccttgcctcttgtgaccccccncattaggtggtctgtccctaacactgttgataaggatgccccgccaaaggttccctttctcggtctgggtggtcacttggttctttttcacaagagggtgttggctctcacagggactcctgtgtcgtagtgccgcgattgtgcgccgcgaaaattatatgtgccccccgggttggcctttatacacggcctcccctaagccttggcttccacctttaaggagcccccccccccattttttaagttgaaccttttaatgtgaggtactctcagctttgccgtttccaaacaaggggtgttcccacacagcaagttcacataggtgccaaaacaaccacagccggttttgttttgtctgtaacacacgatgtcttagacacaccgcaggacacaatggggggtccgccaacagttctccttgccagagacattgctaagacccgtcttggcgcagtgtttacgttctcctgtcttggtctcggcacacccgtgttctcccaccccagttataagaattattgcttgccagggagttctcgccaaatcctttcttagcgaacaaattgtgtaatagccacacagcgccaccaagttgaccaatagccaacacagcgctgcctgtttcaatgggaccaagagtccagagaacacctttgactgcgttcccaatgttttggcaatcttgcccccctctcaaagaggccaaagcacaaatgtttgggtgaacggctggtttctcctctttaattcaaagccacatgcacccataacttcttgctggtaaaatcacctggcaatgtttgttggagacttgataaattcacgaaactttttcaaaatgctcgagtctccacgagtcacactccgtttctaaaggttgagatgaaagctgtagctgtactacaagcccacccaaggctaaagagggctgcccacgagaagcaggtaacacgtgccacccggggttccacacctgatttaaaattgaatacgggacccatgaaaagaaaacttgggcttcaccgaagaaaaatattttaacatcgataaacttaaatattatggaaaaaaaacattgccaaaatataaaatta

SEQ ID NO: 501429 - DNA, 304 bp, Homo sapiens
tctgcgagattttattggcccatgacatccagtgacagtgtgggagcaggctactctccagtgacatgtttttggaggcatatggagaagggggcccaggcgaggtggctcacacctgtaatcccagcactttgggaacctgaggcgggtggatcatgaggtcaggagatagagaccatcctggctaacatggtgaaaccccgtctctactaaaaatacaaaaaattagctgggcgtggtggaaggtgcctgtattcccagctactcgggaggctgaggcaggagaatcgcttgaacccgggag

SEQ ID NO: 501430 - DNA, 382 bp, Homo sapiens
gcacggttctgtcgttggggtgacgagggtactccagcgaactgtgtcaagatgtgcgtcactaagtggacatatgtgggtggaagcagaggtccctgtgaggcagagaccttggcagaggtacggctgcagggagaagcacagagggcttaactgccaatccccccaactgcagttcaatgtgtcatagctgttgcttatctcagagaaaggagcagggaagacaggagttggggtcccagggctgtggagctggagcagccaactctccctttgtaaacacacaccaggcacactcagacacagagatgcccctagagctccagtcacacagatttgcacacacacccagccagggtcagagacacacagaggcacaccc

SEQ ID NO: 501431 - DNA, 113 bp, Homo sapiens
  misc_feature (7)..(7): n is a, c, g, or t
  misc_feature (47)..(47): n is a, c, g, or t
atcgtgncatctccctgctgattttagctactaaggcataggcaagntacttaacctctggctaccctgagctaaaactaaacccttagaagagctggctgcactctagctta

SEQ ID NO: 501432 - DNA, 194 bp, Homo sapiens
attacatgaaaaggttctaaaatgatatatttagatgcaataattaaccatatgctagaatgcccacctctaagccaattgggattctagagctgctctctttctctcctacatctaccatcttctcttttgcgctctgtcttcacctagagaactgcatgtctgagggccaagattccacaagaaacacatct

SEQ ID NO: 501433 - DNA, 341 bp, Homo sapiens
tcgtcagctcggcccgaattcctaattacgtgtaattccatctacaagatgacactcttagggagtgaacaaagaaagcaattgatgctttattcttattcttgcagtgaattttgcttattaccttcttcaaagtacaattgagtgaatagtgattattctcacataggcataaatgcatacatgtggaagaagctaaaaatgaatggcatgaaaatagctttcgacttccaaaatcattttctcaatctgctaaatgaggccagatttgtgcagtgtatgtcaggcataaaacagaatagactcttccagctttgttactaactctggatccagtaatg

SEQ ID NO: 501434 - DNA, 177 bp, Homo sapiens
gcctaagtgggctaggttcttgctctctgactgcgtgctgctagagaatcgagctcctgagctgctccaatgaacctgggctctgtcactggagcctccagaattgcctgtgagcagagcagaaggcaccaccagaccatcaacaatgctccccaatgtttcccccgtaactgcctg

SEQ ID NO: 501435 - DNA, 261 bp, Homo sapiens
gaggtgatctagaggatcccaggtggaaagcgagtcaggcttagcggctttatagctaagggcagtcctgctgatacacccgggcagcgtgtgcacaaacagcagagtcagcctctcccgacgggtgctcgctcctcttccttcctaattcatgtccttggtggcattttttccctaatagggcacttgcgcctgcataaaaataccggttcaggcagatgtcctttctcctccatgattttcttttttttgtcttttttc

SEQ ID NO: 501436 - DNA, 817 bp, Homo sapiens
  misc_feature (1)..(4): n is a, c, g, or t
  misc_feature (20)..(20): n is a, c, g, or t
  misc_feature (22)..(22): n is a, c, g, or t
  misc_feature (51)..(53): n is a, c, g, or t
nnnnaaggggaaaaaaaagngngaaagaaaagaaaggaaagaaaaaaaaannntttagcgcaacatggagccctgtactatcaaaaacggctttaggccgttgatctgctcaaacaactatatgaaaaggagccactgggcaatgtcctcttctctccaatctgtctctccacctctctgtcacttgctcaagtgggtgctaaaggtgacactgcaaatgaaattggacaggttcttcattttgaaaatgtcaaagatgtaccctttggatttcaaacagtttcattggatgtaaacaaacttagttccttttactcactgaaactaatctagcggctctacgtagacaaatctctgaatctctctacagagttcatcacctctaccaagagaccgtatgcaaaggaattggaaactgtttgactccaaacataaatcgcaacaaacgaatggacagatcaacaactcaattaaggatctcaccaatggccactttgacaacattttacctgacatctctgtgaaccaccagaccaaaatccttgtggataatgctgcctactttgttagcaaccgcacgaccatattttctgaatcaaaaaaaagaaccgatctcatctcccctaacgggtggagccctgtcgacgctttccatttaaagaaggttaattcatgatcctttatcaatgacttcctgaactctgtattttagctgcttcaaattgtttagttttactccaaagtcgttataccaggttccacatagtgaagggatccgaatgtaaaaacatttcaatagttgcctacatccctcccc

SEQ ID NO: 501437 - DNA, 403 bp, Homo sapiens
aaaaaagtaaaagggcatgttaatctacagtgaagagagaatggggctgcctaggtgccctttaatcatttacaacattttataaaactatgtgggtaagagagaaggcaaatctaatcagagaaacagtggttacagttccctgttacgtgactgaggtcctataatcacattcctttaaggctcaaaatgttttgaagttccaacagcttagattttgaattacttattttcacacaatcagttctccagcagacagtagctgagtatcctctaattcagttcaattctgacactgcctggagacagtgtgagatctcacaggttgagggatcccacttctgatgccatttgcaaaccccaggttagtttgcctgtgcttctgactgacccggctataaac

SEQ ID NO: 501438 - DNA, 171 bp, Homo sapiens
tctataggattccctcagctcatttagggcatgcagtagctgccgcagaataacgccaaactcccgcggcttataggaaagatgtccattctcccccgaaagctggttgattttgcgatccatctggctcttctctgtcttcagttcctgacactgcttcagcctttcatg

SEQ ID NO: 501439 - DNA, 343 bp, Homo sapiens
tcttcaaggtatgagggtttcccactacaccagatacataggcagcagctgggtgtcctcaattcaattctgtcactgatcttcctggatatagggtcagatcctataggttgggtgctcagttcccaagaccgccaccctccctttagaccagtcacaactctggctctctagaacttctgaccaaccagcttcaagttggggtttccacaatcccccctttgggtttgatcaatttgctagaatggctcacaaaactcaaggaaacatgtacttccatttactggtttgttataaaggatattacagacgctatagatgaagacatatactggggaaggag

SEQ ID NO: 501440 - DNA, 556 bp, Homo sapiens
tagatttagtggcaaagactatatgcatcagagggtaggaactaaatatagactacaattcaagggccttctacctctagtgcaattggtagggacccagtgacatggggcatgtcaggatatatcttctacggtgaaggatacgtcacttgcatctatgctgctcttaaataccaagaaagaggcacaatacttagtgggcctctttgggtattggaggcaacattttccaatttcattatgttacaccatgcctgtttaccaattgactcaaaaagctgctagttttgagtagggcccagaacaagaaaagagtctgcaacaggtcccaggctgcttgtgcaagctgctctgccacttgggtcatatgatccagtggtgtttcagtggcagtggcagatagggatgctgtttgaagcttctggcaggtcccctataggtgaatcttggtttaggattatagaggcaagccgtgccattaccaacaaataactagtctctttattgagaaccagctcttgggctgctactgggccttagtagagactgatcttaa

SEQ ID NO: 501441 - DNA, 153 bp, Homo sapiens
gtgaagtctagagtaagaacagactgggccaaggtatcctgagaggatgtgaatgcagtttaatcatagtgccatttggtttttggtccaaaatatttgagttgttggaatgaacaatttttttaatttgaaaataaaaagtttaaaacctta

SEQ ID NO: 501442 - DNA, 447 bp, Homo sapiens
tgtcaccagggctgaaggtgcagtggacgatcttgtgctcactggaacttccgcctcccaggttcagtgattctcctgtcacagcctccagagtagctgggactacaggtgcaccaccaccacatcctgctaattattgtatttttagtagagatggggttcaccatgttggccaggatggtctcgaactcccgacctcgtgatcctcccacctcggcctcccaaagttctgggattacaggcatgagccactgcatgtggcctagcatatctttagtttgcaattctctggctaccagtaaatttgaatgatttgctcttctatttatgttcttcgtacatttatctatgaagtcttttaaagataacagtttctaaacactctccatatattatgtttactgatccttttcatatgcattataaatatattttttaatgatttta

SEQ ID NO: 501443 - DNA, 624 bp, Homo sapiens
gtcactctttctaatgcattcaatcaaatgagtgtataggtccatggggagactgaaggagtgatacagaaaatgagagaaagagagtaaaaaatgacagcaatgtaacacttgatgaatgtaggcaagaagatttgttgcattattcttttaatatttctatatattagagaatccacagaatgaaaatgagaagttatcaaaaactattaaaattatcagtaattgccgggcacggtggctcacgcctataatcctagcactttgggaggccagcgcaggaggattgcctgatttcaggagttagagaacagcctgggcaacacagtgaaacccgtctctactaaaatacaaaaaattagctgggcatggcagcatgcgccagcagtcccagctactctggaggctgaggcaggagaactgcttgaacccgggaggtggaggttgcagtgagccgagttcgtgccactgcactccaccctgggtgacagaacgagactctgtctcaaaaaaaaaatgatcagtaatggagaaatttatgcaattaatgatatatttattaagagatgatttattaataagtagtgggatattcatattatgatcatggacctggaaatctca

SEQ ID NO: 501444 - DNA, 108 bp, Homo sapiens
acacactcatgcagacccttcatcacctgctggtcatcaaaccctctccagttaaagcccattaatcatgacaggatcctcatctgcttcacaatagggtttcgactg

SEQ ID NO: 501445 - DNA, 940 bp, Homo sapiens
  misc_feature (918)..(918): n is a, c, g, or t
tgcgtcttgtgcttgcctggtgtcggtggttagttactgcgacttgtgtagggactgctgcataggaatgatgctcgtatcacggaagagtgtctactatactctgggcaccctgtcccccatagcttcatgacgccacaggctgttatgccagatgggtccagttctagagatatcagacctgtctgactacataggaacatatgtagtgtgctttctttttacccttcttgacttcactctttgtgtgccccacggggactcattgctttcagtgactagggcagaaagacatttaggaatacatcaacatgccaagtgatgggctgcttcgtgtggacttcgtcacattctgtcatctagtcatggcgtcaattacacctgaagaaacaaggaggactgcggacccagtgaacattccttcggtatcagagccctgaagcgcacctattgctcagtgattcatggggtcttaaaggctgatgaaggcatctcgtacaggggccttttaatcattgatagataagggtattctatcgagagatcactgttagaatgaccatccactgttggccggttctgtggatgagacttttgagactagatacaggccttccagttcactgacagaacatggggacgtgtagacccagatggctggtaagcctggcagtgataccatcatgcctgatgtccataacgagcaaaagaatatttctccaagctagaagatggagcgctggagctgtttaaagttgccaggcatgcggttgggcattccattgagaaccaagcacctacgtctggaatataagtcaccacattagggtaaatacgcatagacttcaggattcaagccgaagtagtggtgtccttacaaggcagggccttcctaacaggaggtggtagaaggcccancatatcttccgttggaaggcat

SEQ ID NO: 501446 - DNA, 427 bp, Homo sapiens
actctgaagctctacacaactttacacctgattgaacgccaaacctctatggatatataaagggaagcgtgtggattaattttacagttacagtgcacaaccagatgcaaaaaaattaaccagctcttcattcaaccaaatcctttactcaccatgcttcctcctgccattcatttttatctccttccccttgcatgcatcctaatgaaaagctgtttggcttttatgatgccccagaaatcctttattcacatgtggttaaacctgttccagcacaccccatcatcaacagtactttgaatcaacccacaaatggaggcacgcatttcactaacactggactggattggaacactcgggttcaagtgggttgccggcctccgttccacctacatctctgatggccagtccaccacctttgccctct

SEQ ID NO: 501447 - DNA, 324 bp, Homo sapiens
ttttttattttggttggtcatgcttcttctgaacaggtctgtggggggaaaagggaaacagagatgccccttggggccatgattaaacacagtttgcagtgcacaggcaaaggctcgggttcagtgcagaaagcaaagtcaccgccagtgctttggaatgggaatcacaaaaggtgacctgtggctgcttgagccattgtagaacttctgaccccagtgtggaacagagattaccacaggcagtctagaaatttcgtgggcaggggcaggttgggcatttacagacaaagttgattgaccaattcccagaacaaaatgttcctc

SEQ ID NO: 501448 - DNA, 615 bp, Homo sapiens
  misc_feature (45)..(45): n is a, c, g, or t
  misc_feature (74)..(74): n is a, c, g, or t
  misc_feature (92)..(92): n is a, c, g, or t
  misc_feature (107)..(107): n is a, c, g, or t
  misc_feature (201)..(201): n is a, c, g, or t
  misc_feature (225)..(225): n is a, c, g, or t
  misc_feature (290)..(290): n is a, c, g, or t
  misc_feature (293)..(293): n is a, c, g, or t
  misc_feature (315)..(315): n is a, c, g, or t
  misc_feature (470)..(470): n is a, c, g, or t
  misc_feature (481)..(481): n is a, c, g, or t
  misc_feature (487)..(487): n is a, c, g, or t
  misc_feature (500)..(500): n is a, c, g, or t
  misc_feature (517)..(517): n is a, c, g, or t
  misc_feature (531)..(531): n is a, c, g, or t
  misc_feature (545)..(545): n is a, c, g, or t
  misc_feature (613)..(613): n is a, c, g, or t
cgcggctctcccacctgtcaccctggcccttctcttgcttggatngtgtcttcctctcctcagccgagaatganttcgtccaccggatccangaggaactggaccgntttctgctgcagaagcagctgtcaaaggttcttcttttccccccactctccagtcgcctccggtacctgatccatagaacagcagagaattttnatctcttgagcagcttctccgttngggagggctggaagaggaggacggtcatctgtcaccaggacatcagggtacccagttcggatggnctntctggcccctgccgcgctcctncctcctgccccatcaggtaccacggtcctcggcccatctccaaccaaggagcagctgcggttccccgagtgtgcccgggtctggccgtgtggtatcgtggacgcatagcctgaccagcctttgtatgtgccctctgggtgtctgtcgcaagcagnaagaatggggngctgantctctaccctcgngtgctcaaagagagatngccccagcgtgtgnaggggaccacaganagaggcctgagagtatgttttggtgtctgtgagactcccaatctctgtactcaagggtactcccctgntg

SEQ ID NO: 501449 - DNA, 457 bp, Homo sapiens
acagtagtcctaggcctttgcattcacttaccactcactcactcacccaaacaacttccaatcctttaaggtcccattcatggtaggtgtcctacacaggtataccattttttatcttttatattatatttttactgtaccttttctatgtttaaatacacaaatacttaccgttgtgttataactgcctacagtatttagtacagtaacatgctgtacaggtttgtagcctagaagcaacagactatcccataaagcctaggtatgtagtaggctgtaccacgtaggtttgtgtaagtacactttatgatgttggcacgatgatgaaatcgcctaaagatgtattctcagaatgtatacccattgttaagcaatgcatgactatagttaaaagcaatttctaactgttctgaccgaattatgaaaagagtggaatgaatactatcagctctcctgc

SEQ ID NO: 501450 - DNA, 174 bp, Homo sapiens
agatctagaggatctttacactgggttctgagttcagaagatattaatgctctgtaaatgggagctgataggtaaagcatgcgaaattgtgacaccaaatataaggacaagatcaggatgacagagttaggaagagtttgaggaatgggacatctaaaatctaaatagctgatt

SEQ ID NO: 501451 - DNA, 1188 bp, Homo sapiens
  misc_feature (1)..(1): n is a, c, g, or t
  misc_feature (15)..(15): n is a, c, g, or t
natatggtttgaatnagtgtaacagacatccaggagcaagacagtgggtcagattcagactaaaggagaaccactgttaagtctctactaggggtgacaccgaatgctagttgatacaaggcatatacatggtagaacgtctctctacactcatgatgcgtgacctcgatcatacagatgtggctactactacttcacacactaggactacttcttggacctcgaagcattgtgagtactgaaagttgaccgatgtatcatcatgaagagtcactcgtctgatgcgataattcaattgacatcgctgcagtaacgaaaactatgcgacgatgtaaaagtcaagaatgagtgtacataggcacaggagcattccttgctagggatgagtggtgcacctaggcatgatccatcgcgtctttacgtcatgaaatgaaaaggcgaatcattctggccgaagggcccaggttaatcacctgtctggatccatgatgcagggtcttcgggtgctactggaagctcgtcgattccagggcatgtgctgttgcttgggctgggtgggaagttctatggggatgatgccaggaccatctaactgttcaatctcccatgattgtcaaggtggtgaatcggaggaactactacgcagagatgatccttgtatacaacaaatctactggaatgtcatggacagtagcgagtatcaccaatgaatcaaggagcatgggtagtacatcgtatgtgacaactgagtatcacacaacgctgaggtggcacaattaacagtgatgtatcggggagacatcagagatgcgatggcgacccagtaatctcgctgtggactcggtgggtccgattcggaattcatgtgcccctctcagagtatcgtcgcattgcaggtcacgtgtacgattggagtggcgacgcgtccagtgcacgcgcgatgcttctaaagggctcggacgtatgcgttacattgggcggccagcgtcttgggggaattcaccctgccctggaaagttggccacgtcggcccccaagtgggaaaacggcaaaaaaagtcttagcgtgtattgtgttcaggctgtgcaccccgggtaacacatgaacggcgcgggggagaaacacaacgggcgccaacggggcaggaccacaggaaaacgcacggtgagaaaaggtagttgtcaataa

SEQ ID NO: 501452 - DNA, 170 bp, Homo sapiens
ggcgcagtctgtcttcccatgagcgcagagtcgagtgttagagtgcatgtgctccagagcggggagatggctgggctggagttgggggcctggcggcttggtccttggttacttggttgcctgtgcagcgctctcctctggggggctgcagctcatcttgttgggagctt

SEQ ID NO: 501453 - DNA, 158 bp, Homo sapiens
actagtccacggttggctgccagtgttaagacgcccttcatcctcacggtgaccttgtgtggtagtactttattatcctctttggtggaagtgacaagctgaggcctagaaaagtcagggcacttgtccacggtgacactagccaaccgtggactagt

SEQ ID NO: 501454 - DNA, 219 bp, Homo sapiens
gtaaatactttaggtaaatatgttttgtttgtgttgtttttgagacagagtcctgctctgtcgcccagcctggagtgcagtggcacgatctcagctcactggaacctccgcctcccaggttcaagcgattctcccccctcaacctcccaagtagctgggtgcgtgccaccatgcccagctaacttttgcactttcagtatagagaagtgcgcctgggtg

SEQ ID NO: 501455 - DNA, 263 bp, Homo sapiens
  misc_feature (19)..(19): n is a, c, g, or t
  misc_feature (224)..(224): n is a, c, g, or t
  misc_feature (230)..(230): n is a, c, g, or t
gtgactctgaggatcccgnatatgctgtctcataagacttttttcttaaaaggaaattccaatttggtttaaaaaagggaaccaggtaggtccacttagagagatcagatataatatacagcctatgcagccacatgagaaatagtttttgctgctttgttattacacaggtagttgcttccttcagctaaagcctggagtattgtatttcttttatgcatatngggttnggttctattacttggcaggagattgtactcccc

SEQ ID NO: 501456 - DNA, 1392 bp, Homo sapiens
  misc_feature (516)..(516): n is a, c, g, or t
  misc_feature (1392)..(1392): n is a, c, g, or t
gagagagtggggacggtccggggttcggagtcggggagtgtgcgtggtgctcaggcgagtaaggaagagaattaaaatatgggtgatgttgatgaaatggcgaagaagatttttattatgaagtgttcctctggtgcctgacctgttgaaacagggaggctagcacaaggactgggcctagatctgccatggttctctttgggcggaagacaggtcaggtcccctggatactcttgacacagtacgcaataatgaagcaaaggcagtgatctggggagaggatacactggatggaggtatttggaggaatccgcaagaagtacgatccctggaatcgaagaatgatcttggtcggcatgaagaagaaggaagaagagggcagacgttaagtagcgttatctgaaaaaagctgctaatgagtattaattgggcggtgccttatttattagaagacagaaatgtctcatgacttttttgatgtgtgcatcctttaatagatctcatatcaccagagancgagatcatgaatgacttgaccgagatatttggtcgggcagatctgattttaaacttagaactggcttgtgggtaaatgaatatgtccagggggaatttatagtaagtccttccggacaaggttcctggtggcccttttaggttgtttgacccgggggaaggcaccgcccacaaggggggggggtacaacggggtgaggctcaagaacacggattggagcaacagaggtgacgacatccactttgtgttctatgtttttgtctttttttgttttttttttttttctctgtgtttataccgagcaccacaaataaacaccaacataacaaaaacaaaaggagcaggagagcagagagagggcgaggaaagaggatgcaaacagagaagagagaggagaagacgagaggggagaacaggacgggtagaccgagcaagcactagagaaaagagtagaaccaggcgagacgagccaggagaagagaagagcgagagaagagagacggagagaagcaagaaagcaagaggggaagaaaagaacgagagaagaagaagagaagaacaagcagaagaagcagaggagaagggagcaaggagatagagcggagacgcaaagagaaggaaggaagagagacaaggagaaaggaaagaaagaaaaaagagaagtaaaacagcgcggggagaagacacagagagcagagacaacaccaggacgaaggcagcgcggccaggaagaagacgagagaaagtcgcacaagagaagagacgaagacggagagagcaagagataacaaagcagcaagcagaacacgagagcagagggagcaacgagaggaagcgaacgagtccagggcgagagaggaagacgcgaaggacagn

SEQ ID NO: 501457 - DNA, 950 bp, Homo sapiens
gtccccctgtgggactgtccgcggacacgtgtgtggctgccgtacgcgatttcggcggcgttcgtggccggtttttgccgttgtcgcctccgtttctccggttgtggcaccattcccttgggccgacggccccccgccgttcctgccttgtctgtttcgccggtagcacacgtttggcacagggacgcacgtgctatcgccttttgggggggcccccctggcgcccaccatttttggggagcttttctgccctcgctccaccgttgccaaccactgcccccgggtgtgcggcttaaggggaagcccaaagtcccggctggttttcactgacacacaggggtgtctaatttcatggacctccccctgctgcacccgtccgtccccccgctggcccgctccaaagggtggttgttcaccacgattctccgagtgccatatctccggagatttaaaaaatgggggcacacacaccacggcggattttggtaagctgtgcctcctcgcaatgttgttataacctcaggccgttgtgttcctaaaaaatcggcgccccgtctccgccgcgtgtagtcccaagggagggacccctcgtcgccgccttctggctgcatcttatattgggatgcagccctgccggccacctttgtgtcctccttcagaagatcttcttgatccttcttaagcgacgtgttttccctgttccaaaacaaatatacaaaggggtgtctcttttgtcgctttctctgaaagatgacgctgcctcgtttcttgtttgcagccctaaggggtcactttacatctaaggggggaggctaatcagccgtcggaacaccaagctggggggtgttcgcaaacagcggggccccactctccctggtgggcaaaaccacatgatctgcggcccgccaaggggccaaaaaacccaaattcttttaaaaggaaacataaca

SEQ ID NO: 501458 - DNA, 105 bp, Homo sapiens
ggtaagtcttacaaaccaaggtgcaaagaaaaacggcctgccattcaagaaacgaataccaagagaaaggtgctctgcagaataaaaaaaaactaaaccccaaaa

SEQ ID NO: 501459 - DNA, 223 bp, Homo sapiens
gcttatgatgctacgtagtctccactttctcaatgcttaggagacagatcactcctggaggctggggatggtaggattgctggggatttgttttttttataaacagggttcttactcggtggcccaggctaaagtgcacgggggcaatcacagctcacggcagcctcaacctccggggttcaagcaatcctcctacctcagcctccggggtagctagcatcag

SEQ ID NO: 501460 - DNA, 284 bp, Homo sapiens
ttaatattaaaacagtggcgcgtcgtcgtaaccggccacagtggattcgtttgccaaaggaagtttactacgaagctaacgccatcacttatttgcaagatttgccatcagttaagcgtgccttcatcgtggccgatccaggtatggtacaattcggcttcgttggtaaggttttgagtcaattagaattgcgtcaagaacaagttgaaacatcaatctatggctcagtacaaccagacccaacattgtcacaagcggttgaattgcacgtcaatggctgcttc

SEQ ID NO: 501461 - DNA, 359 bp, Homo sapiens
  misc_feature (40)..(40): n is a, c, g, or t
  misc_feature (72)..(72): n is a, c, g, or t
  misc_feature (236)..(236): n is a, c, g, or t
  misc_feature (297)..(297): n is a, c, g, or t
  misc_feature (323)..(323): n is a, c, g, or t
  misc_feature (358)..(358): n is a, c, g, or t
cttgatggctgtttctccacttgagccttggccttctccntgcccaatcctccgtgctgatccagcccacgnttcaaattccccttccacgcagcagcctcccaaatctgtcagcaggctgacccgtcgcctgagtcacagtccaattatttcaagcatctcatatgaggtggccccgaacacctgaaacccgagccgacccctctggtgtctcctcctcctcccatcaacttttnttcctgtcttcctgggtctttgcattcccagcagcctgtggatctcataccgaataaccgnccccaggttttctgcagccaatcagntatcggaatttggtccaggaaatccctggttctgna

SEQ ID NO: 501462 - DNA, 264 bp, Homo sapiens
gcttgaagctgggatggtaattggctcttggtaataggatccttaagaacaggtaaattcttgcataaaagaatttgatgcaactgctgttgcccacggaggtggctccccctgccattattcccgcagagctttcttccattgtcattacagagagtcaggcgtgtgtccaggaaggagacgggatcctgccgtaatgactttgtcttcaccatcttttctcagctgcttaaattgctgtcagggcagcgtaggaatcttaaa

SEQ ID NO: 501463 - DNA, 145 bp, Homo sapiens
ggccagttggcagaggttcattcacgtaaagtcccgagcatgggtgctgataggacagccatccttcttgaagtagcccgttaagtcattttccaaaatacagcgctgggcataaccaggggaaacccatctgtagttgtctgta

SEQ ID NO: 501464 - DNA, 97 bp, Homo sapiens
tattgaaaaggaaaaaattccttaattttttattcctgggccccctaccacaatttacagggcaattttcctggtgttttgaaaagaaaaagaaaaa

SEQ ID NO: 501465 - DNA, 569 bp, Homo sapiens
  misc_feature (19)..(19): n is a, c, g, or t
  misc_feature (22)..(22): n is a, c, g, or t
  misc_feature (29)..(29): n is a, c, g, or t
  misc_feature (62)..(62): n is a, c, g, or t
  misc_feature (299)..(299): n is a, c, g, or t
gcctactactactactaanttngcggccngtcgacaaatgagccttacttcaaatacagccnaatgcagttcagtaattagtatatgagttctgcttcagcttgggctgggctccagttcttcattccagccttagctctggaatttccttctctagaaaaccttggcggcccactcccaaggccgggttagcggctgcttgagctgtcctgtagcacttatctggccttcgggttctcaaaccgaggcacctaacactgaatgtggagtacaaaaggttatagagcaggccgggcganggtgtcacgctgtaatcccagcactttgggaggccaaggcgggcggatcacgaggtcaggagattgagaccatcctggctagcacggtgaaaccctttctctactaaaaatacaaaaaaattagccaggcgtggtggcgggtgcctgtggtcccagctacttgggaggctgaggcaggagaatcgcttgaacccgggaggtggaggttgcagtgagctgagagcacgccactgcactccagcctgggtgacagatccagacaccgtctca

SEQ ID NO: 501466 - DNA, 525 bp, Homo sapiens
gtgtctttttgattggagtagctgtcacatggtgcatagatatgtgcttataggccgatcgtggtggttcatgcctgtaatcccagcacttggagaggtcgaggcgggtggagcacctgaggtcgggagtttgagaccagcctggccaacatggcgaaaccccatctcttctaaaaatacaaaaaattagccgggtatggtggtgcgtgcctgtaatcccagctactcaggaggctgaggcaggagaatcgcttgatgcagttaagcgagatcgtgccattgcactccagctggggtgacagagtgaggctccatctcaaaaaaaaaaaaaaaaaaaaaaaaaaaaaaaattgttttccccaaaacttaataaaaaaaaataaatagggtgctcatgaacagggttgctaggccaggcgttgatgggtctattgcgtggtatattccaaacattggggaacaccagggcaggagaatttttggaccccgggagtccaaaaccaggtgggccaacatggggagacc

SEQ ID NO: 501467 - DNA, 275 bp, Homo sapiens
cagttgagcatatctatataagtatatcggtcatccagattcggcattctgttcagttctgcatccatctcctttttctatttttttccttataagcagtcatatgttagtgaccttcaaactcttcctgccccttacttgagggcatgtgctaaggaatactttgaccgaaatcattagcttgcagaaagtagcttttatccttagacatatctctaccctacttaccccaacccgtctggtgtaggggaggttaccttgtacctacactgata

SEQ ID NO: 501468 - DNA, 362 bp, Homo sapiens
gcgccttgaaccaggagtggagcggcgagtggtaggttgcagtgagctgagagcacgccacttcactccagcctgggagagagagtgagactctgtaaaacaaacaaacaaaaacaaaacaaaacaaaaacctatctctcaccatatattaaaatcaaatcaaaatagattaaagatgaaagacataaatgtaaaacctgaaagtatgaaactactagaagaaaacattggggatatgcttcaggacactggtctgggcaaagattttttgggtaagatctcaaaagccaaaggcaacaaaagctaaaatagataagtgggattatatcactctaaaaacctgcacagccattgcactccgg

SEQ ID NO: 501469 - DNA, 200 bp, Homo sapiens
ggtgtgtcacgctataatcccaggagttggggagatgacgcgggaggatcacaatggtcatggagttcgagaccagtctgaccaatgtgatgaagcccctgtctctactaaaaatacaaaaataagccgggcgtgggggcgcacgcctgtaatcccagctactcaggaggctgaggcaggagaattgcttgaccccgtga

SEQ ID NO: 501470 - DNA, 412 bp, Homo sapiens
atgggctgtctgatcgctgtgcctactacaagaaggacggttctgacttcgccaagtggcgtcgtgtgctgtatgattggggaacactgctcctcagcgcctcgccatcatgtaaaatgccaatgttctggcccgttatgccagtgatctgccaggcaaaatggcattgatgcccatcgatggagcctgcaaatcctccctgattgggaccgatgcacttgaagcgctgccactatgttaacgaaaaaggtgctggctgctgtctacaaggctctgaagtgaccaccacatctacctggaaggcaccttgctgaagcccaacatggtcaccccaggccatgcttgcactcagaagttttctcatgaggagattgccatggcgaccgtcacagcgctgcgccgcacagtgccc

SEQ ID NO: 501471 - DNA, 183 bp, Homo sapiens
ctttcatttttctaagttggactctggcagtgatagtggttttccggaataatagcacacatctgctatgactgattaagaaatctgaggggggtgggggtgagaaagattcggcacaaagagccactcaggaatgagtgggaacagccatgttggagccattaacaagagtattatgaaaaa

SEQ ID NO: 501472 - DNA, 287 bp, Homo sapiens
  misc_feature (12)..(12): n is a, c, g, or t
  misc_feature (23)..(23): n is a, c, g, or t
  misc_feature (39)..(39): n is a, c, g, or t
  misc_feature (60)..(60): n is a, c, g, or t
  misc_feature (93)..(93): n is a, c, g, or t
  misc_feature (111)..(111): n is a, c, g, or t
  misc_feature (156)..(156): n is a, c, g, or t
  misc_feature (181)..(181): n is a, c, g, or t
  misc_feature (209)..(209): n is a, c, g, or t
  misc_feature (225)..(225): n is a, c, g, or t
ccaaacgcgctntccgccctgancgacctgcacgcgcanaagcttcgggtggacccggtnaacttcaagctcctaagccactgcctgctggtnaccctggccgcccacctncccgccgagtttcacccctgcggtgcacgcctccctggacaagtncctggcttctgtgagccccgtgctnacctccaaataccgttaagctggagccncggtggccatgcttcnttgcccttgggcctccccccagcccctcctccccttcctgcacccgttcccccgtggtcttt

SEQ ID NO: 501473 - DNA, 848 bp, Homo sapiens
  misc_feature (651)..(651): n is a, c, g, or t
gggggggggtacaccacaccattttttatctattggtataaacgcacctcctctcatcttccactcatggagataggtgctcacgtcgcctcgtccaccaaaccaaggggtgttgtgctgaactctcgctgggctatacacccccgcgagcgggataatatatctcctcccacataatataatagaatcacatttggtggtttgcgcgtgtaaagataactatattagcttagcgggtatgttgaagaacaccactcgtggtggtgttttttctatcgcggcgtgggttttttctcgcacgccaagttcatcgacaagagacgatgtttttttcttggacgcccccctccccccccctctcttttgtaacaactttttttgtgcgttctcactcgctcgagatatatatatgttgtttgcgatagatatatatatctaaaactagtgtatgttgaacacacccgcgccccctcttggagttagatggcccctttcgttattgtgctaatatatattgtagacatatatcacaagcaatgtaatcctcaaaaatatcctcgtccccaccccatacttgtttattagaaaactacgccaacacatattggttgattcaaccagccagtgtgaaaggagtgttcctcacccctntttcttcgggatattatcattccctgaataatactaagcagatacttcaagaaaatattttgtgggagagaacaacacccccttttgtaaccaccttttttgtggggaccaaggggaaggggaaaaaatttcttttttttttttagacggtgttttttttttaaaaatttttttaaatttttttttctccccctata

SEQ ID NO: 501474 - DNA, 381 bp, Homo sapiens
tggacaataatgtttaaatttatttaaaagtaaaaatcaattggtaaaagggcttccagatacagttcaccctcagccttaacaagcatataatacaatttatataacaatatacccgtgaatactgactgcaaggataccctctgttcaaacaagaacatttgttttccccataaaaaggggattgctcagacaccaaccgtggtgttcaagttctgtggtgacctatttcatacacatagctgtttaaagttaagtgagataaataaatctaccctaaagtgagccattaaaaacatcagttcacaaggtgctttcgggtctcttataactaaatacttatatctctttctcttggttagaaaaaaaacaacaaagggg

SEQ ID NO: 501475 - DNA, 141 bp, Homo sapiens
gggcgtcactgtgagaggtgcgcccctggctaactatggcaaccccagccagggccagccatgccagagagacagccaggtgccatggcccataggctgcaactgtgacccccaaggcagcgtcagagcccaggtgtgatg

SEQ ID NO: 501476 - DNA, 104 bp, Homo sapiens
agatcctacctggtatcccaccctcagactccaacataagtcgtttgcacagaacttttttttttttaaggaaataaagaaaacagtgactaatcccgctaccc

SEQ ID NO: 501477 - DNA, 159 bp, Homo sapiens
tgctgccggtcgactctacgacggactccccgtatacaccacggggacgactacggtacgactagcgtggtacgggcgactgacgtgtggggacggacctggggtgggtttgtactgttcacaccgtcacttttactttttaccgtttgttacgactac

SEQ ID NO: 501478 - DNA, 249 bp, Homo sapiens
gggtcttagccatgaatacggtgcgtcacatcactggttttccagaaaagagctgtatagagagagaatttacacagctgacaatgtgtccgtttaaactcttccaacccgtggctttctgtatgcagagacttgtgccaccatcaccacagtctattttattgctttacttatatttgttttttttttttttgggagacagggtctcgctctggtagcctgggactctcaggctaaggggaccctggg

SEQ ID NO: 501479 - DNA, 479 bp, Homo sapiens
agaggatcccttcacacatttagtcctccagtaatatagtggaacggctataagtgtgtcatgatttctacaaatagacttcgacttgggaaatggactttgaatggacaatctgaaagagtctcaatgatatgcttgcaaaaatatattttaatgagctggtactgacagttacatcataaataactaaaacgcttggctttcaatgtcaaagttgtgccttcacattaaataaaatatatggtctgtgtagttaccgagatgtactatatacagtatattttcctaagaaaaaaatgccttgacccaccgtgcctggcaaaataagataatttctcaaaataattgggttccatataacgggagtagtaattaatattttaacttcatcaactagatgtatctcctcagtagcatagtaatgggtacttccagaaatctgaaatccgagttacttgatacaaattctactaaatgtg

SEQ ID NO: 501480 - DNA, 179 bp, Homo sapiens
ttgcatctgatctggtagtggcccttccaaatttcagattctgaagcactttcttcctcatcagagtttctaagtagagcactcttcagatttctattgaagacttaatgtcctttatctatttatcttgcgaggcctcttcctaacgccacggtagcgggatcctactagcagtcgac

SEQ ID NO: 501481 - DNA, 412 bp, Homo sapiens
  misc_feature (16)..(16): n is a, c, g, or t
tagaggatctactaanctaatgcagaagaaacagcaaatgcaaggctgacagtatatatggtatggttgaggactagcatagctagcgtggctagagcagagagcaggggttgtaggtgattaggtcatagtaaggctactgtcttttagttagagtgagatggagaccctttgaagggattgagcagactaacatgatctggctatctaaaaggctcagtctcactgctgtattggcagtagactgaagggaacctggatggaagcagagtccagttaagggtcttttgcaataaccttggctagagatgagagtagcttggccctattcatcaccagtgaacgtgcatgacactgcactggagtccaggatatactttcacgcatctcagctttatggcaatcccacctg

SEQ ID NO: 501482 - DNA, 306 bp, Homo sapiens
ttatatttaaatttatttttaaaaatttatgtgggtacatggtatgtgtatacattcatggcatagatgggttactttgatacagacatgcaacatgtaatcacatcagagtaaatgagttattcatcacctcaagcatttatcctttgtattacaaacgaatccaattatacacttcatttttaaatgtacaattaaattattttttattacaggtaattttatgattgtatttagaattatatcagaatataattataatttagacatttctgtgtcctgaataaatatgtttttaaatgttcc

SEQ ID NO: 501483 - DNA, 269 bp, Homo sapiens
  misc_feature (22)..(22): n is a, c, g, or t
  misc_feature (50)..(50): n is a, c, g, or t
  misc_feature (61)..(61): n is a, c, g, or t
  misc_feature (198)..(198): n is a, c, g, or t
gtagagacggggtttcaccatngttgggacaggatggtcttgatctcctngacctcgttantccgccttcctcggcctcccaaagtgcggggattacaggcatgagccaccatgaccgaccaagatttattaaaaaataataaatactatactactgttttccataatggttgtcctagtttacatttccaccggcangtgtagaagtgttccctattcactgcatccacaccaacatctattatgttttgattttttgttatggccat

SEQ ID NO: 501484 - DNA, 1165 bp, Homo sapiens
gcttattccgtgctaactgccagaggggtccatacgggcgattgttctgggatatcctcggtcgttacacttaaatgggaaactattcacagatgtctcggatgccgctatgagtgatccatgtcgaagatgaatggagagaggagtgtccttaaagattcctttgacaggcagtgaaacccaacattaaacgttgggcaactaaaatacttaagatattgcctacgcattggaacaccaggtcaccaatgctgtatcaccacatatgggcacacaagtgcatcggctattctcatatatgctatcatacatactgcatagcagtgcaccctaggggcaagagaacttatcctgggcttgggacagagtcctgtggccaaatgtgaggtatagcgctaattttggcaccaatccccttgggttcgaaacgtcggagtgtataattattgcaatcccgagggtaaattagttggggcccaagtaaaggggctagttgcattggacaggtattcgcttggcgtgccccaatgtggcaagacccaacttccccaatatttagctacgggaacaggatatattggaattgcctgttgagtaaaaacacttttgagcgtaaagactaggaaattatcaagcagaaagtgaacatatactcgggagaatgtaaccaaaggaggtgaaaaatgaaggaatgaggataaagattggaatcggtccaagttgggaggttgtttacccaatactaagtatgcaatcatacaacgtgtaaggtggacaagttactgtggaatgggtataaaaaacgtttaagcaagtaacacaggtaggacgtaaggggggataaaataacagaggagtgttcattggaatcattgtggcattaaatggtgaggacaaattttgcacaagttggacaactgtacaaataaaaaagcagtgggaagacatgcaaaccaacaaggatggagacaatacaagacaataaatggcacgagacattgccaggggaaaccacggacaacggagcaccatagatggcgcaatgacacgatggaggaacccaaagagaacgccaatgacaaaagacgacacgaaatagggaaaaaggcacaaaggcacacggagaccaaacgggaaaaccgcaacgtagaagaggcagcaaatc

SEQ ID NO: 501485 - DNA, 175 bp, Homo sapiens
ccaggaagtccccttcctgccccccagaattctgcttcagagagcttcttatacttggagcgtttgttctgaaaccagatctttaccttcgtggaagaaacaggggaaatgaagtgaaacgatcaggaggaacgatactgtgtgaaacagtttcgaaggaatgggaaatgggatc

SEQ ID NO: 501486 - DNA, 213 bp, Homo sapiens
tgaaccaaaagcaaacttttttattggacacaggacaaaatataacccaacttggcaggatgcataccggcctgcgcaagggaaaggatttcaaatcaactggcagggtcaagcctttctgcactggaaactttccacactttggaaaagaagcaaacaaaccaaccccaaagaacccccgaaaaaaacaaaaaccattcgggaggggcatga

SEQ ID NO: 501487 - DNA, 112 bp, Homo sapiens
aaggaccctgaggagagagaatggatatgatcaaagcggggagcgagtctaatcagagatatgaagatggcattcttcacgaaaatgaaacagtcatgagatgaaaaaacaa

SEQ ID NO: 501488 - DNA, 979 bp, Homo sapiens
ggtgtcttcccctgcatagccggtgtatccgcctgggtcactgctgatggcagacggagctggtagtcagatcccgaaatgcgccctcgtcgtggactcggtcctcagggatgcgtataactggtggtgccgaggctgtcgttgccatcaatggcactatgcgtggcgcctttccatacctcggaggtgacatggtgctggtactactgccagccctctgtgctcatggcatcgtgctgcgccatctgtcttcgaaggcgcctggcgtctgctgatacgctgcgcctgcgagtaagcaatgtttcaggaagatgactgacctcctcactaagacggggagtggaggccggttctccatcattgcgcggatgcaaatgcttgtgtgctctacctcttttaacagattattctcccaggagtgagatgagcctcctggtgtctatgtatttcttcgtgtgtgtgaaatcctggatcgctgtgcccatggccagtcaaaccccttcatggaattgagttttagtccagccaatctttccaatcggactagtgacagcatgatctgcaatacagggcttctggggaagaacaaggatgagatcatcggttatgaagtttggcactcaatggacctggtgtgcctgggtcctgggcagcatcgttagtgtgtggtacctgtttgaggaaagctgtggttgcgaccacctttttggcctgacatctcccttgattggagaggaggtcctgaagcgtaaggaagttgggcactggtggttcagggaggggactgttatgtccgacgtgtccgcggtcgggccaggggggtgcgactggcgcgctaacggcccaaatatgtgtttcccggtttgggcagggcggccccaagttctgtggctggcagcggtccgagaaggggcacgcgagagggagaaaccccaaaagtatcgggaacaaggaaagcaatctcttagaagaaacacac

SEQ ID NO: 501489 - DNA, 223 bp, Homo sapiens
ctatcacattatcgaaacacagaagagaagaagtacgagatgctggtggcagggcatgtaggacagcaatggttgtatcaagctatgaagcagcgtcgtccgcgtggtgctgaactggctgagcgaccattcccacgtctccaccagcagtcctgtgtcctttaccctgctgttgacatttccgtcatcgtccgccgtacaacgatttcctctacgtgacttt

SEQ ID NO: 501490 - DNA, 1221 bp, Homo sapiens
cggcgaacgcggagtagcacgccatgaaggcctcttgcggcacgctacgagagtacaaggtagtagggctcgctagtcactgcgccaccccacagagatgcgcacacgccgccccgtctatccgcatgcgaaatcattctgcagaccttataactcattgttcagtcgcctaggatcccgcttctggtactttgtactctcacgttacaagaaggatgaatgatagtcttgcagagggaagattgtcatacttgtgtggtcaggttgtgtgaggaagtccacgctcgcttgcgggtgaatgaactttcgtggatctggcttgctgcctatgagtcccggagctgggacgcgcaggagacatgtaccgggaatacctgggatctgatcaccgtagtgcgcatgtcagcgcatgtgctagccgagacagtggagtgccgcggtagcgggcccgagtgccattccattcagcatcatgaaggtgcaggagcatcgctggccgagatagagtgccgatcggccggcttgtcagagcagattgccatgactccaagatcaaggttcccgcgtgtgcaccgaccggggtacctggcgccgatcagcaacgaggtgacgcttcgacaacaaggagaggccaagaagcccttctgtctagcgtagcaggggcctcgtcctgtgggtgattgctccgaatataaaaactcaaggtaacgctccccggttaaattaaaaaaataaattcacacttgggccctcacacttgaagacagcagtcacagcaaagatgtgagtcccaagtccattctaccaataactgtggcggaaaccaggtggcaaataattcccaatatagggccactataagtatggcctaagccgggaagtttacaataggaacacataaaatgggaggcatagaaaagacccaaagagacccagcgcacagcgaaaatcaaccaaagaaagtctaggagaaggcgaagaaaaagaacagcatagtgacacgaagtaacgaacgaagcggcacacccaaacacaagacggtggatcaaacagactaatgtgaaaacacaagcactccacatcgaagagaagacaacagacatgagcacgaaagaagtaaaacaaacacatcgccgtcgaaatcacacagaacacagacgacagcacatagagggcaggcaacaaaaggacgaagacgaagaacaatcactccaaactaag

SEQ ID NO: 501491 - DNA, 357 bp, Homo sapiens
cttgacagttgtagggtatgcgggggaatcgatgatccgggagtcccctgcgtggatgtcgtcccggcaccaggacgggaccgattgctgggtccagtgtccccagaattgcggactgcgcacacctggaaggacccgaagtcccgtgttatagttgagaaactcaagactcagacaagtgaaacgactttggcttcatgacagctggaactggaacccagttcccttttagactatggcgagcagtacctggagttcagtccagcagaatgaagaacgggatggtgtgcgtttgagttggaacgtgtggacttccagcacggctggaggctacaagaatggttgtacccctggcac

SEQ ID NO: 501492 - DNA, 593 bp, Homo sapiens
taccacctctgacgagtcttcagatgtcagatgtgtctttgttccttctggtgggttcgtggtctctgacttcaggagggaagctgcagacctccgcggtgagtgttaccgctcttaaagacgtggcagacccaaagcgtgagccgcagcaaaatttattccacgctgtggaaacgaacccaagcagatcgcggcggcaaactgggcagcctgtttattcccttatctgaccccacccacatcctgctgattggtacattttacagagagctgattggtccattttacagacagctgattggcccgttttgacagggtgctgattggtgcatttataatccctgagctagacacagagtgctgattggtgcatttacaaccctctagctagacataaaagttctcaaagtccccacgagacttgctagacacagagcactgattggtgcgtttacaaatctttagctagacagagtgctgattggtgcatttacaatcctctcgctagacataaaagttctccaagtccctaccagattagctggatacagagtgctgactgttacatccacaaaacctgagctagacacaga

SEQ ID NO: 501493 - DNA, 121 bp, Homo sapiens
gatggggactacgtgtggtttcgcacgaccgactactaccactactgacttacgttcttgtgggctgtgacctgttactcacttaccggacgactttgtacgtggacgacttacgtactac

SEQ ID NO: 501494 - DNA, 305 bp, Homo sapiens
acaggaaaaactgagacgaccaaagatctggcaaaagctcttgccatccagtgtgtggtctttaactgttcagatggtttggactgcaagatgatggggcgcttcttcagtggcttggcacagtcaggggcctggtgctgctttgatgaatttaatcgaattgacatagaagttctgtccgtcatcgcgcagcaactcattaccattaggaacgccaaagcggcaaagctctctagattcatgtttgaggggcgggaaataaagttggtgatgacttgtgcagcctttatcaccatgaatccagg

SEQ ID NO: 501495 - DNA, 860 bp, Homo sapiens
agcggggcagagcagccgcgcagcgcctgaaccgctgcgggccgccgcggacgacccttcccaccctcgccatcatgacatgtctccagaactcgcttctccgactttcctgctcctctgctgccttcgtatcatggtcctcggccgtcctcgccggccgaccagaggagtccccgagcccgacaagaagccgatttccgcatggcaccgaagccgccgcgaacttcgagcacagatttcatcccatctggctagtctcccaaaacggacgactccatcgacccgcgggaagaccaggcatgagaacgcgaacgccacgaatcactctccaggacgccgcagagagacgcccggcggacacgccccgacgaacacacacaccggcaggctctcggaccagagacgcctgccttcgaccgaccgccgtcgctcctcgaccgctgcacgaagacgcgacgcaccctgcctgcaggcggcggaaccgaccggacccagacccagacgcaagatggcgacggccgcgtgactgcctcagcgtccccgagctcggctccgagtgcaactacggactgactgtgggggcagagaagggcgagatcaggactctgtcttagagaatcgtagactgcatgaagggtcgactcaccatcgggccataattggagggagatgtctggtcatgtaactaaaggcaggagcacaggtgagccacaagtcctggaaagagacgaactacggcgtcatggatagtcgagacacacggacgcagacactggaggaaacaccggatgacaggagagatgcaatgtgaacaacacacgaaagccccagcaacatctggaagcatccccaggaccacg

SEQ ID NO: 501496 - DNA, 528 bp, Homo sapiens
ggcccccccgtgttcctccctttcccggggagcaagccaaagccccggtatggaaaggggagttcccaccaggatgaaggttcccccatcagttcccccaggccctccaagcaaggaggtttccttttgtcacagaaatcagaggaaaaatggggttgggggccctttggaaaaagccagtttccccggcccccggcatttattgggtttgcaaggtccccccccctttgtttttggggccggcaagattttttaaaaaaagttttattttttcgggccccttgctaatcatgggggggggcccggggaacagcgggggccctggggtagtttttcaaattgcccccctattacgggggccaaaaggaaacccagggggcgggggttgttttttccccccctgtttttttcccccccaaggggaaaggtttgggggaaccccgctttttctgtttttgaaaaaatacaggttccccccggcaagttaacaaggaaggccggggcccaaaaaaggtttttcccccttga

SEQ ID NO: 501497 - DNA, 457 bp, Homo sapiens
tcgtctctgatatcaaacagagagagcacatcaacagatgagcatcagatgcaccaatccacaagaccaggtagtcagtactacaaatggagagtacaacacagatgaccccaccgcaggaacgtgcaagtgcacccatcacagcccctactgaagtagaagtaatggatgaaaccaagtgctgctgttcatcccaaacgaaggaaaaggacaaccatacagcgccacaaatgactctggacacagacagatcctggggagttacttacgtgtacatctgctgtcttgtgatggacatcagtctctgtagtgaccacgtgatatgttcaaggactcactcgtagaaacaaaaatgtcatactttcatacttcatgttgtggtagtcttgcattcttttactatcatgctgttccacaaagcaagccgtataggaaagactaaaggcgtggacaaaga

SEQ ID NO: 501498 - DNA, 673 bp, Homo sapiens
gagcgtgatggtggatttcccctcctcacgccagctctaggagaagaagttcgtagtcccagaggtgtctgccgagttggtacacagtggatcacatagaagaggagttgtacgcgtgtcagagaggttgcgggctgtttgcatacttggtcagtggtgtggatgactggaatggacttaaatcgacagctaaatcggcaatgtgaatctgctatgtgcagaagcatattcccaagtctgatgagcacatatgcttgcccatcttggattgccagaatctagcgtgccattcgctgaagtgagacaagaacaacttatgtccctgatgccaaaaatgcacctactctttcctctaactctggtgaggtcatgtctggagtgacatgatggactccgcacagagcttcatgacctcttcatggacttgttatcttcaagccgatgacggagaagatagttatattccagtctaagccagaaatccagtacgcaccacatttggagcaggagcctacaaatttgagagaatcatctctaagcaacaatgtcctatctgcaaagtgagacattcacaagcgcacaggaatttatcttgcaagatggagaaaagtgagtggctttaaagatgcctctctcttaactctgggtggatagaactacaactcttgtcctc

SEQ ID NO: 501499 - DNA, 452 bp, Homo sapiens
catatgtatcaggtacagcggaaaccataaattatattttagagttattccaaaaaataaatccaaatatttagtaatgaggagattgctgtgctctgtggcaattctttgaaactggtgactgcatttggcattgttcctcagggtgtcatatggaaccatgtggcatcaacacaattaaaagatgatcctggataatatctcagttaaaatcagaaacactgacaagccaagtgattaataaaaggtcccatcaggaactttggacttgaaataaaaatgaattgctcaaattctcgccctactgttttactaattatgtcattaagtagggagcttagtgagccacttacatatctttcacatctctttttttacatctgtagaatgaggacaataaaacctgtcctccctcaaaggattgtagtgagggtcaatgagagaatgagtgt

SEQ ID NO: 501500 - DNA, 221 bp, Homo sapiens
cctagcgccaggactcttaaagtgaaattactggggcatagggtatgagggttttcatgatcctttgtatcttgacaccacgctccccgggtgtgccccgcagctgactttgccatcgaggccttgcgcaaggggacctatgagcggatgttccgctggctggtgctgcgcttcaacaaggctctggccaagaccaagaggcagggcgcctcccttcatcg

SEQ ID NO: 501501 - DNA, 982 bp, Homo sapiens
cgctgctattgtatagaaatccccatgagattggttaacattccatgtctcagcctgcccaggagccgggcttcaaccggtagcttcctgggagattctggattttcaggcttgcccggctaaattgcagtcaaccaaggttttccatgccaagatttgatccggtgcgcctgctgtagttgggactcgaagtacacggccacgattcctaacccattggctctctaatagtcagccctatgctgtcctgcagcgccctttgtggcccagcatggtagcatgcaaaggccagctggactgggtaagagagtcccctgcttctaacagcctgttcccagttctctgatggctctaatctactttatacggctgctacacggagccgctgtctggtgaacctgccgacaccggacttcagcatgccctacaacgtgatcatcgccttacgtgcactcgtggtaggccgtgctcgctatggctccttctacaatctcctcacccgaacctgtccacatcgaggagccctgcacaggatggcctaggccaagcggctggccaaccttatccggcgcgcctgaaggtgtccaccccactctgattcattgccctttaccagcagctgcagctgccgtttctctctggggaggggagcccaagggctgtttctgccacttgctctcctcagagttaggcttttgaaccaaagtgaccatggaccaggtcagggcctacagactgtgttgtccagtatcaggagccacgagcgctaaatgtggcagtattgaatttgaagttaactgtagaaattcagtttcctcaccatgctatgtggccacctgatatattgaggtgctcaataagcaaaagtggtcggtggctgctgtattggacagcacaggaaaagatttccatcaccacagaaaggtcggatggcagcactggccaaggtgatggggtttactacagagtgtatgtcactgtt

SEQ ID NO: 501502 - DNA, 1174 bp, Homo sapiens
gttggtttctttgtttgtagtaaaaacaacaacaaggcagaaggcggcgggtggtcgtaggtggagacggccccacgagagcggaggaagctcgtatatatcaagttacattccgtccttggtgggtgggtggtcgcctataagggttggtcttttcctcacagccctaatttttctgaaatggcctagaaatgtgattgcgtgtccacagggcgccaccactgtctccgccgcttgggagcgcgatgtgctctcccctcttcgtgtggagaagacacgtgggtgtaaccgcccgggggcgttttctgccgtcgttggtgggagtacctaccgcacgagagctctattattttggggcagcaagatatttctgccgggcaagttgtttcttgtgtgtccccggagaccacagttatggccggcgccggcgtgttcgacccaccggcgctgtaccagggccgtctctcctctttgctggtgagaagattgctcagggtctcacttacgcgccgcccgggggtgaaagtcgccccgcattgttagaggcggcgccccccccggccggtggtggggcgcgccccccctctgtctggtggacgcttcctccttgtggcgggatatatatgtccgggcgccaaagtgtagctcgccccgcacccttcctgtgtccgcgggaccaagaatgtagttccgagggacgcttgtctccacgggattacagcaggtgtttcccccccggcttcgttattctcccccctcgggtcatagtgttcgtcgcgtggacaccactgttctcacatcgtctccagattgcgtataaaccccgcgccccacattgttgggaacgtgatattatctctgggttttgaataaaacaaatgtggcaccctgtttccacgcagtattcatacacagagtacagaaggggtccgtcttgttgcagggatcagtttgcagagacactagttgtatggcgccgcgccgtgcgaatcgttctgtagaaacccccattatgcagttttgttccccatcacctctgtttgagtgcgcaccgaggggtgcccacaccacctgcgctttctatggagcggtagtgaagcggcaacatattctgttcacagagcgataatttgggagagacaaaactagaaaacaactcaacaaatgtcgagaa

SEQ ID NO: 501503 - DNA, 711 bp, Homo sapiens
catcagggcctggtttcattgtaacttacctgccctcggtctccttacatttccacacagttcgcgcaagtggagctatggaaggcccatgctgtgctgttctaatcatgtgagggattcttaggggtagagggggaaggactgaaaacggctgcagaccgtttaggatgcctggagtggagacaggagttaagccccttactcagagtcagctcttaagaactgcccagggccgggccacagtaggctcatgcctgttatcctagcactttgggaggctacaagtgggcagatcatctgaggccaggagtacgagacctgcctggcaacatggcaaacaccccgtctctaataaaaatataaaaattagcctggcatggtagcatgcgcctatagtcccagctgctacaggaggctgaggcatgagaatcgcttgaaacctaaggaggtggaggtagcattcaacttgagatcataccacttcatatccagcctgggtgacagagcaagacctctggcctcaaaaacacaacaccacacaaacacacctggcgagaccacaccaaaccgggacggcgcgcccaacaacggggacccctccacggcacacgggcccacacggctgtccgaccccagtatcctgacccaccagggaacacggaggacaccaaaagagcgccgccaatatcgaaaccccggtaaccagcctag

SEQ ID NO: 501504 - DNA, 888 bp, Homo sapiens
  misc_feature (249)..(249): n is a, c, g, or t
  misc_feature (848)..(848): n is a, c, g, or t
  misc_feature (862)..(862): n is a, c, g, or t
  misc_feature (883)..(883): n is a, c, g, or t
gccgccatcctcggcgcgagctcgcgtcttgcgggttctacctgggagaatccagcggcatccgacagcatggtgaacttcacgggagaccagatccgacgcgatcatggacaaggaggacctctacctgaagccaatccagagaacaatcttgatgatgggccgctacgtggagcccatcgaggatgtgccttgtgggaacattgtgggcctcgtgggcgtggaccagttcctggtgaagacgggcancatcaccaccttcgagcacgcgcacaacatgcgggtgatgaagttcagcgtcagccctgtgtgtcagagtggccgtggaggccaagaacccggtctgacctgcccaagctggtggaggggctgaagcggctggccaagtccgaccccatggtgcagtgcatcatcgaggagtcgggagagcacatcatcgcgggcgccggcgagctgcacctggagatctgcctgaaggacctggaggaggaccacgcctgcatccccatcaagaaatctgacccggtcgtctcgtaccgcgagacggtcagtgaagagtcgaacgtgctctgcctctccaagtcccccaacaagcacaaccggctgtacatgaaggcgcggccttccccgacggcctggccgaggacatcgataaaggcgaggtgtccgcccgtcaggagctcaagcagcgggcgcgctacctggccgagaagtacgaagtgggacgtggctgaggcccgcaagatctggtgctttgggcccgacggcaccggcccaacatcctcaccgacatcaccaagggttgtgcagtactccaagagatcaaggcacagtggtggtggcggctnccagtgggcaccanggagggcgactgtgtgaaganaacat

SEQ ID NO: 501505 - DNA, 540 bp, Homo sapiens
caatgcccagatagcccttagaaatccagatcattctgtagcgggagtggtcccattacaactctgggtttatgaaatgtgcatctggtgaaatacatgagcctttgtcttcagattatgagtggaatgtgataatataaagaaaaagaatgaaaaggaataaagatagcctacaatatatagaaaattgcctcaaaagaccaaatcttagaattactggtgttcaagagggagctaagcagaacaaggaaggggaagaaagcttattcatttcctttgagacaggatctcactctatcacccaggcagaggttgcagtgagctgagatggcgccactgcactctagcctgggtgacagaatgagattccatctcaaaaaataaaaattaatataataataatagtaatagaaaactttccaggtacaagaaagcctgagatcactaaacagattcaacccaaataagatatcccaagggatatagtaaactctcaaagatcaaagataaggagaggatttgaaaagcagcaaaaaacaa

SEQ ID NO: 501506 - DNA, 726 bp, Homo sapiens
  misc_feature (45)..(46): n is a, c, g, or t
  misc_feature (49)..(49): n is a, c, g, or t
  misc_feature (51)..(51): n is a, c, g, or t
  misc_feature (53)..(54): n is a, c, g, or t
  misc_feature (56)..(56): n is a, c, g, or t
  misc_feature (686)..(686): n is a, c, g, or t
  misc_feature (700)..(700): n is a, c, g, or t
  misc_feature (721)..(721): n is a, c, g, or t
tcccgacgtttgcccgatgtatgtggccaagttcgccgccaaggnngangncnngnggtggcctgccgagcgggccaagaaagtagaggacatgatgaagaagctgtggggtgacaggtactttgacccagccaacggcaagttcagcaagtcagccaccagccccgaagggaagaagctgctgacctgcccaagctggtggaggggctgaagcggctggccaagtccgaccccatggtgcagtgcatcatcgaggagtcgggagagcacatcatcgcgggcgccggcgagctgcacctggagatctgcctgaaggacctggaggaggaccacgcctgcatccccatcaagaaatctgacccggtcgtctcgtaccgcgagacggtcagtgaagagtcgaacgtgctctgcctctccaagtcccccaacaagcacaaccggctgtacatgaaggcgcggccttccccgacggcctggccgaggacatcgataaaggcgaggtgtccgcccgtcaggagctcaagcagcgggcgcgctacctggccgagaagtacgaagtgggacgtggctgaggcccgcaagatctggtgctttgggcccgacggcaccggcccaacatcctcaccgacatcaccaagggttgtgcagtactccaagagatcaaggcacagtggtggtggcggctnccagtgggcaccanggagggcgactgtgtgaaganaacat

SEQ ID NO: 501507 - DNA, 408 bp, Homo sapiens
accttctgctctgagattgagaaggctgtctatcttgccagcttcggtgaggaggaggtggcatagggctctgccttgtgagagttggagcagcagttcgtcagatggcacgcaagaacagtgcagatacagttcactatcaggctgtgccaggaagcagtcagaacaagacagaaccgcagggggcgcgggaaagggcctccctgtcacccctggaagggtcaggcgtccacggagggtccggcaggaacgagaaaaattaagtcagatacgggtgtaaagacgcaaaaatctcctttaaggtaaacaggaaggagaactgtccgttgagaagaataagtacaggaatccaattgtaagagcagaagtccccatacgggttgcagggcaaaagattgttacagtgta

SEQ ID NO: 501508 - DNA, 1135 bp, Homo sapiens
  misc_feature (230)..(230): n is a, c, g, or t
  misc_feature (270)..(270): n is a, c, g, or t
  misc_feature (273)..(273): n is a, c, g, or t
  misc_feature (320)..(320): n is a, c, g, or t
  misc_feature (338)..(338): n is a, c, g, or t
  misc_feature (364)..(364): n is a, c, g, or t
  misc_feature (374)..(374): n is a, c, g, or t
tcctgcggcgtctggtggcgagctgaggtggaggcatggctgcggcagacggcgacagtggcggctggcgccatggcagggcttgcaggatccctgctgccttggtgatcccgggctgacagccagagagcacagcggctcagctcctggagagtgagggttgaagaaagcggagggcagccgactgcgcctgctggctcccattaggtcggttcctgcagcggtgcccnggcagccttggtgaaggccctgcccggcagagatcatgtnttngcctccagtggctgctgcccgtcctcctcatccccaagcccctcaancccgacctgtggttcagncactccatgttcatgggcttctaccntgctcagctncctcctggaacggaagccttgcacaaatattgtgccttggtatttccatggcaggcctgttccttatactgctatagctgctggggaaactgtatcctgtaaccagtggtccgattcccgcgttccagaatcgggagcatgaatcccggcgttgtagggcaccttaacggtgcctgaccctgtataggcttaccaaaggaaggccgaaagacggggagaggcgaggcacttgacagtagcgtcagtaaaagcattgggaggtttcagaaatacccgcaggcctcagacgaggtgtcaacattatccgtgaacgagaacgcctatttgggggccctaggtggaatcggtgtgaactccctttaacaacttggttgacattaaatttcgggcaagcttgacacgcggttggcttattacatttggaaagcggtaaccttatacggacggatggagctagagactatggattggagaaaggaaagatcgagatgcaagccatggagacgcccgcgagctacaaaaggggataccactgggaatggcggcgcggcaagtgagagccaacgcgccgatacgtaggcaaccgttacaatcatacagatggccgaaagagcaagagacaaaggggggcagcaagagaccggcgggaagacaaagaagtgacgccccaacatgggggaacgcacatggtgcaggcagagaacacaacacagggcaggaacgacagcatggagacgcaacagaatgtagagaagaacacc

SEQ ID NO: 501509 - DNA, 1424 bp, Homo sapiens
  misc_feature (45)..(46): n is a, c, g, or t
  misc_feature (49)..(49): n is a, c, g, or t
  misc_feature (51)..(51): n is a, c, g, or t
  misc_feature (53)..(54): n is a, c, g, or t
  misc_feature (56)..(56): n is a, c, g, or t
  misc_feature (542)..(542): n is a, c, g, or t
  misc_feature (550)..(550): n is a, c, g, or t
  misc_feature (568)..(568): n is a, c, g, or t
  misc_feature (601)..(601): n is a, c, g, or t
  misc_feature (606)..(606): n is a, c, g, or t
  misc_feature (633)..(633): n is a, c, g, or t
  misc_feature (785)..(785): n is a, c, g, or t
  misc_feature (1384)..(1384): n is a, c, g, or t
  misc_feature (1398)..(1398): n is a, c, g, or t
  misc_feature (1419)..(1419): n is a, c, g, or t
tcccgacgtttgcccgatgtatgtggccaagttcgccgccaaggnngangncnngnggtggcctgccgagcgggccaagaaagtagaggacatgatgaagaagctgtggggtgacaggtactttgacccagccaacggcaagttcagcaagtcagccaccagccccgaagggaagaagctgccacgcaccttctgccagctgatcctggaccccatcttcaaggtgtttgatgcgatcatgaatttcaagaaagaggagacagcaaaactgatagagaaactggacatcaaactggacagcgaggacaaggacaaagaaggcaaacccctgctgaaggctgtgatgcgccgcttggctgcctgccggagacgccttgttgcagatgatcaccatccacctgccctcccctgtgacgggcccagaagtaccgctgcgagctcctgtacgaggggcccccggacgacgaggctgccagtgggcaattaaaagctgtgaccccgaaaggccctcttatgatgtatatttccaaaatggtgccaanctccgacnaaggtcggttctacgccnttaggaacgagtcttctcggggctggtctccanatggnctgaaggtcaggatcatggggcccaantatacccctgggaagaaggaggacctctacctgaagccaatccagagaacaatcttgatgatgggccgctacgtggagcccatcgaggatgtgccttgtgggaacattgtgggcctcgtgggcgtggaccagttcctggtgaagacgggcancatcaccaccttcgagcacgcgcacaacatgcgggtgatgaagttcagcgtcagccctgtgtgtcagagtggccgtggaggccaagaacccggtctgacctgcccaagctggtggaggggctgaagcggctggccaagtccgaccccatggtgcagtgcatcatcgaggagtcgggagagcacatcatcgcgggcgccggcgagctgcacctggagatctgcctgaaggacctggaggaggaccacgcctgcatccccatcaagaaatctgacccggtcgtctcgtaccgcgagacggtcagtgaagagtcgaacgtgctctgcctctccaagtcccccaacaagcacaaccggctgtacatgaaggcgcggccttccccgacggcctggccgaggacatcgataaaggcgaggtgtccgcccgtcaggagctcaagcagcgggcgcgctacctggccgagaagtacgaagtgggacgtggctgaggcccgcaagatctggtgctttgggcccgacggcaccggcccaacatcctcaccgacatcaccaagggttgtgcagtactccaagagatcaaggcacagtggtggtggcggctnccagtgggcaccanggagggcgactgtgtgaaganaacat

SEQ ID NO: 501510 - DNA, 351 bp, Homo sapiens
aaaggataaagaaaattgggggtgaagttccctgctcacctcctaacagagattgagcaggtatctgtgcagacatcctttaagaaagcagttagttttccatgtcatgagggctggtcctgaagcagttaaaatgtgatggtgttggctcaggagtgatcgtcgcccacaggaagttaactggaggaagattctaggaggttcagtgctatgcaggagcctgttaccccagcctccaataagctaacagcggaagctgccgcctaaagctatttttttttacatccaaggttttgggaatagttcatcctttcactatgctattaataaaaattcataagtcaatttcca

SEQ ID NO: 501511 - DNA, 1471 bp, Homo sapiens
  misc_feature (45)..(46): n is a, c, g, or t
  misc_feature (49)..(49): n is a, c, g, or t
  misc_feature (51)..(51): n is a, c, g, or t
  misc_feature (53)..(54): n is a, c, g, or t
  misc_feature (56)..(56): n is a, c, g, or t
  misc_feature (589)..(589): n is a, c, g, or t
  misc_feature (597)..(597): n is a, c, g, or t
  misc_feature (615)..(615): n is a, c, g, or t
  misc_feature (648)..(648): n is a, c, g, or t
  misc_feature (653)..(653): n is a, c, g, or t
  misc_feature (680)..(680): n is a, c, g, or t
  misc_feature (832)..(832): n is a, c, g, or t
  misc_feature (1431)..(1431): n is a, c, g, or t
  misc_feature (1445)..(1445): n is a, c, g, or t
  misc_feature (1466)..(1466): n is a, c, g, or t
tcccgacgtttgcccgatgtatgtggccaagttcgccgccaaggnngangncnngnggtggcctgccgagcgggccaagaaagtagaggacatgatgaagaagctgtggggtgacaggtactttgacccagccaacggcaagttcagcaagtcagccaccagccccgaagggaagaagctgccacgcaccttctgccagctgatcctggaccccatcttcaaggtgtttgatgcgatcatgaatttcaagaaagaggagacagcaaaactgatagagaaactggacatcaaactggacagcgaggacaaggacaaagaaggcaaacccctgctgaaggctgtgattttttttttttttttttttttttttttttttatatttatttttttttgcgccgcttggctgcctgccggagacgccttgttgcagatgatcaccatccacctgccctcccctgtgacgggcccagaagtaccgctgcgagctcctgtacgaggggcccccggacgacgaggctgccagtgggcaattaaaagctgtgaccccgaaaggccctcttatgatgtatatttccaaaatggtgccaanctccgacnaaggtcggttctacgccnttaggaacgagtcttctcggggctggtctccanatggnctgaaggtcaggatcatggggcccaantatacccctgggaagaaggaggacctctacctgaagccaatccagagaacaatcttgatgatgggccgctacgtggagcccatcgaggatgtgccttgtgggaacattgtgggcctcgtgggcgtggaccagttcctggtgaagacgggcancatcaccaccttcgagcacgcgcacaacatgcgggtgatgaagttcagcgtcagccctgtgtgtcagagtggccgtggaggccaagaacccggtctgacctgcccaagctggtggaggggctgaagcggctggccaagtccgaccccatggtgcagtgcatcatcgaggagtcgggagagcacatcatcgcgggcgccggcgagctgcacctggagatctgcctgaaggacctggaggaggaccacgcctgcatccccatcaagaaatctgacccggtcgtctcgtaccgcgagacggtcagtgaagagtcgaacgtgctctgcctctccaagtcccccaacaagcacaaccggctgtacatgaaggcgcggccttccccgacggcctggccgaggacatcgataaaggcgaggtgtccgcccgtcaggagctcaagcagcgggcgcgctacctggccgagaagtacgaagtgggacgtggctgaggcccgcaagatctggtgctttgggcccgacggcaccggcccaacatcctcaccgacatcaccaagggttgtgcagtactccaagagatcaaggcacagtggtggtggcggctnccagtgggcaccanggagggcgactgtgtgaaganaacat

SEQ ID NO: 501512 - DNA, 284 bp, Homo sapiens
tacacatttactgccagaacatcaaggagttcactgcccaaaacttaggcaagctcttcatggaccaggctcttcaagaatacaacaagctaatgaaagtggaagtttccagtaaaagaagtttacatagaactcttgtaattcacaccaggagcaactctatggaagaaatatatttgcatatatgaaatagcacagagcgatttctattaggtgtcagttgccagattcttggctattacaagtgtctttctagcctataataaaataaaacaaaatcttgt

SEQ ID NO: 501513 - DNA, 195 bp, Homo sapiens
ctgagaaactttaggtctagcgacagatctacccatgcctaggtactctcatacaacgcttaccagcaataagacacagagtcattcatctggtgagtacttacagttaccaacagatgggtgcaaggaaaagaaacatctgtataccttatgataaatcaaataacctcttcctcaattcctcatccttgggcg

SEQ ID NO: 501514 - DNA, 190 bp, Homo sapiens
gactagagcatccgggtcggcaaaggatgaggatgtctttgatctccttctggagcctcatccacatatttctggtaataggccaccaggctttggagatggactgacggatagcataaatctgggccacgtgaccaccaccctttacacggacacagatgtctacaccagcaaatcgctccttgccgaa

SEQ ID NO: 501515 - DNA, 157 bp, Homo sapiens
cagcaacagcacacagagacgcataaagacacagcacacacaggcacacacagcacacacacgcgaacacagcacacacgaacacagcacacacagcacacacacaaacacagcacacaaacacgcagcacacacgttgcacacgaaagcacccacc

SEQ ID NO: 501516 - DNA, 473 bp, Homo sapiens
cacttatcctacccgcactctggggcgctccaatatctgccgttcctgcggtatcccctctcgcgagggtggccccttccccgggtcccgtcagcacacacggccccggttttccccgccctgtcgcggctgagaagaactttgcgtctgcaacaaggcccaatcccagacggccctcctccggtgtgccccccgcgcactttttctatcctcctcgttgcaccggtggctccctctccttgttgaggaggcacacttcgtagactctcgtcgcgactatttaacccctggggtcgtgtgcaccagagcacccttgcgcacagtcgcttgggcgttgctcggtgtcatctaccctgttgacaccaccaccccctggcggccgcaagcacgctgcgtggcaagcacttttgggcccggggtttgggcccccccccgccaaaaaaaaaaaaccctttttccacccccaaaaaaaa

SEQ ID NO: 501517 - DNA, 366 bp, Homo sapiens
gtctacagcaaatacagactgaccagaaggtctacataacagcccagactcttccaactctcatgcatctgtagatagaacgagagctgggtcttgctcacacacaggcgagcccttcttagaagaactgcctgtcccttgtaaggttcagagtcttgggtccagcagcagagaggagcccaactctgacgtggatcgacgctccttgagtgcgagccccttggatctcagtctgcctctgggctgcgcagcaggtttaaggtccatagttcacatgttcccaccagagcaagtcaaactcaaggtcctgaaatcttgaagggaaacaggggaatgctggaaaagggagcctgtgaagaaattgaa

SEQ ID NO: 501518 - DNA, 108 bp, Homo sapiens
ttgagctcaggagtatgtgcaggaaatgatgccgtgaggagagaggtttgctgaaacctcagcaggccccatgtgtggttagtgtagaacaaccgatggaggggatcc

SEQ ID NO: 501519 - DNA, 712 bp, Homo sapiens
gcctttagctgccatcttgcgtccccgcgtgtgtgcgcctaatctcaggtggtccacccgagaccccttgagcaccaaccctagtcccccgcgcggcccttattcgctccgacaagatgaacatgaaacaatcaatgaaccaggaataaactcggccgaaacctgcaaggcacaagtgcgcattgtgtgggaaaggaactgcgtcgcagaaagaagcaaggtggttcatagatgcagccacagacaggatgacaaataaacttgcagtgctccttaaagaaagttaggggtaaacaatatctctggtatcgaagaggtgaatatgtttacaagaccaaggaacagtgatccagctttaacaacccgtaacagttcaggcatctctggcagcgaacactttgcaccattcacaggccatgctgtagacaaagcagctgacagaaagtgctacccagcatcttaaagcagcttggtgcggatagtctgactagtttaaggagactggccgaggctctgcccaaacaatgctgtggagtggaaaagcacgcatttgctactggagaggatggatgatgatgatgttccatgatcttgtggagaaatttttgatgaggcttccaagaatgaggcaaatgaattgagtcaattctgaagataaaactgaagaagttactggggagctggtattttatattatgatgttttttaagaa

SEQ ID NO: 501520 - DNA, 271 bp, Homo sapiens
gagaagactccagaagatggccatggcaacagcataggatttgctataatgggattcatgggcttcttggtgaaatgatccatattcctattaataacatcatggtgggtggctgaatacatttgggaagagagtttttcatcttacgagatgggtgaacaagtgtgagggtgtgagaaactcacagaatacaaattggccggtatgtgtggtgggttttttttttcctttcaagaggttttctatttctaaattaaagtcatttcaaagt

SEQ ID NO: 501521 - DNA, 305 bp, Homo sapiens
cttcagtactccaccggattgctttattggttaggtaatgaagcacgctagggaatttctatcaaacaggagtcaacatactgcccaataacatctgaaatgactgaactataagtttagggagcatgggatgaggtgtactgttaaatcgctcctatgctggaaagtgttccctaagttcttcccatcactacctggagaagttgatgcgggattactgggagaaggcttgtgacttttaggtcctctcagagctcttcactttgctccatgttgtgtgttgttttcttgttcgtgattttttt

SEQ ID NO: 501522 - DNA, 102 bp, Homo sapiens
actgagtggcctcttcatttccatgcatctaggcgtagtcagtgcaggaagctgcattcatggtaagaatgagtgtgtgggatggatcctctaccatgtcga

SEQ ID NO: 501523 - DNA, 376 bp, Homo sapiens
  misc_feature (195)..(195): n is a, c, g, or t
  misc_feature (224)..(225): n is a, c, g, or t
ggggtgggtcccaaaaaccccaaaaatttttttgggggccctgtggcagtttcttttccccgggtgggaaaaaccccaaaatccagtggggggttggggaaggagccttggataaaaggtttcagggggggggtgtcccaggaaaggtaagggccccttttggggccccgcccttttttttaacccatggggtanttaaagtaaggagaccagggaatgtcaanntgggttttttaaacccaaaaccccccaattttttccctgaaaagggggggctcctgttttaaaattttaaaaggggggggttccaaaaaaaatttggggttttaaaggaagggttttttggcattaaaaaaaaaaaaggttttggaaccca

SEQ ID NO: 501524 - DNA, 325 bp, Homo sapiens
  misc_feature (188)..(188): n is a, c, g, or t
attcgcgggcgcgtcgacatggtggttcacgcctatagtcttagcactttgggaggccgagatggtcagattgcttgagctcaggaattcaataccagcctgggcaatatggtgagacccccatctctactaaaaatacagaaaaatagctgggtgcggtggtgcatgcctatggtcccagctactanggaggctgaggtgggaggatcgcttgagactggggtggtggaggttgtaatgagccgtgattattaccactggactccagcctgggtgacagaacgagaacctgtcttaaaaaaatgaaatcattaaataggtctac

SEQ ID NO: 501525 - DNA, 658 bp, Homo sapiens
aggccggtgaaggatcacggagggcagagaactatggaggcagagcagaagtggtgatgcaagatgtttgcccgcaacctccgagatgatccggtaagatatcctctgcgcgtgtcttgacaacgagccctgtttcccagcaacgtgtatctgtacctgtacacactgtggggagacttatacagctgggccaagggagtcagacgtctaagaacaatagatgtcgcttttcccgtgctcatgtaacattgtgttgcacgtattcatgggcgtagagctgttaagagtgggcttctccaggcaggctcgagcagccagtgacatttcccaagaagatgaagaatggtgactgtgtatttgattgaaggaattcaactgaagaataatgtttaaaatgtgtatatagagatagtatagactcctccgcggaagcatggagggaacaggaggttgtaaaatagactccatggagactcttaggaagcagtagattcccgggggctgtgcctttagcgttagaggaaaccacatagacgctggacactgtcacatggacaaaggcagtccacagcgttgagtttacggagacccaagacaattaacatacaattgcacttactggttacctcgtaacatggtatcttctctctggaaatta

SEQ ID NO: 501526 - DNA, 543 bp, Homo sapiens
agcggggtctcattgaactcgcctgcaggtcttgggtattagtggcttccttcgttatgggagccggtctacatcccagacaaccatgtccaagggacctgcagttggtattgatcttggcaccacctactcttgtgtgggtgttttccatgcaacggagaatagtcgagataattgccgaatgatcagggtaaaccgaacgcactcctaagcgtatgtctgctctttacgggacactgtaagcggttgactcggtgatgccgctagaagaatcagagttggcaatggaaccccaatcatacgacagtgttgtcgatgccaaaacgtctgattggacagcagagtttgatcgatgcatgtcgtccacgtctggatgatgaaagcattaggcccctttactggatggctgaactgactgcatgccgagtgtccaatgggtcgcagacgtagaactacagatgggacgacgagccaatacacgcttgatagtccgagataggcaggtgtgcttctgatggattctggacgagaagatggaatgtg

SEQ ID NO: 501527 - DNA, 503 bp, Homo sapiens
gcaacatggagaaaccttgtctctattaaacgtacaaaaaattacaggccgggcgtggtggctcatgcctgtaatcccagcactctgggaggccgaggggggtgaatcacctgctgccaggagtccgagaccagcctggccaacatggcgaaaccccacatctactaaaaatataaaaaatcagctgggtgtggtggcacatacatgtagtcccagctactcgggaggctgaggcgggagaatcacttggacctgggaggcggaggctgcagtgagctgagatggcgccattacactccagcgtggacaacaagagcgaaacgccatctcaagaaataaaaaaaaaatgctgaaaaattatctcatttaatccttttgaaagctcagggagtataaatacaacaattactcccattttatagatgaggaattgaaacttagggtaagggatcttcccaagatttctcagcaagtggatagcagagctgggatttcaaccaggt

SEQ ID NO: 501528 - DNA, 202 bp, Homo sapiens
tacgtctagtgttggctagggaactgtggtgggcctgaaaagctgagagataccaggaacagcagaaccctattgtcctcagtgtggcgaggtgggggaggcactgtttcggggggcactgtttttgggccaaattgtgttatagctctttcaggtctcacttacccatgctctgtgcttgcagactcctgtggctagatcc

SEQ ID NO: 501529 - DNA, 525 bp, Homo sapiens
gtacgatatccgctctccagaccgtgcagtctgctggcgtctgccactacctggattccgatgcaaggttgtgaagacgtggctgaacctagtgaggcagcacggatctcggatggacgcaacgcgcaatgcaagaagtcgctaatcaatgtggcatggacccacaaatgaaaagccactgttagttccactcgcgcaatgggctccaatctagcattcgactcgtccggagaacgctcgacgtactaaggcttcaaggattgtaatggattgattttaaaggaggtataaccatttatggcttgcgaaatgcagagggactcaacgagcttgcaacgagcattggtttgcgtatgttggaggaatgaacgcactttccctgcaaagagcggcacttgaagcgtcctcagaagaggaactggcagacaggatcgttgatgagtctgggatctgtgttcgcgtgggggatgccaggcagctacttggataccgtagcctagatgccggtagacgagctgcagtgca

SEQ ID NO: 501530 - DNA, 418 bp, Homo sapiens
cgtcgacaagacaagaggctataaaagggcatccgattccctagacctggagttacagatggctgtgagccatcatgtgggtgctgaatctggtcctgcctaggcagtggatacatcaacgtatacgcctagttcctcttctgttgggttctcccattaggatctttcctgccaaaatctagtctcaatgctatgagagtcccaaactacctggaaaggccatatataggtgtgtgctcattgacagactcgatggtctcccaacccgcagcagcagcagcagcagcagcagcagcagcagcagcagcagcagcagcagcagcagcagcagcacaagcagtcagcctggcaagtaacttagaagggaccctgttgtagctgtctcatatgaggctatgccagtgcctggcgtcgacgc

SEQ ID NO: 501531 - DNA, 395 bp, Homo sapiens
ggccaagtccacgtgttgcaaagtagaaaaatctttgtgggcccaaaggaatccctctatttggtgactcattatgcccgcccactccgctcccccgttcccctcatcaaggggaatgataccattcagatttatttggaggctggccagatttctgatttcatcaagttcgaccctggtaacctgtgtatggtgactggaggtgctaacctaggaaaaattggtgtgatcccccacaaaaaaaggccccctgggtttttttacgtggttcccgtgaaaaaagccaatggcaacagctttgcccctcgactttcccacctttttgtttttggcaagggccaccaaccctggattttttttcccccaggaaaggggatccccctccccctttttta

SEQ ID NO: 501532 - DNA, 103 bp, Homo sapiens
cctgatgtacgttattatgttacaggcaaactgggtacaggggctccgttgttgaagttgcagccaagcaaagatggggctgcagtcatcttagggcttgatt

SEQ ID NO: 501533 - DNA, 182 bp, Homo sapiens
ttacgcagttacgtgaaagaaatagagtattaattagcacagcagagcaaaatggcttggttggcttttcttgtcatctaaatctatggcttctggttctggtttatgcaggcatccaaataaaacttctctatggcatgaaaaaaaaaaaagggagtgaggaatcaggatccgaaatcggg

SEQ ID NO: 501534 - DNA, 579 bp, Homo sapiens
aaccacaaagttggtgaaggaaagttgttgattagagaattccaatctggttaaaagggtcaaaggaggccaggcgcggtggctcaagcctgtacagtcccagcactttggagaggccgaggcatggtggatcgtgaaggtcaggagatccagaccatcctggctaatacggtgaaaccccatctctactaacaaattacaaaacatattcgtgcgtggcgctggtggcatggcgccctgtattcccagctacttcaggatggctgagtgcaggagaatggcttgaacccgaggtgggcggagcttgctatgtagagccgtacgatcgcggccactgctagctccagtcctgtggtgacagacctgagactcgtgtctcgaaacaaaaaaccaaaaataacaatacactaaaagagtcaccagtgaaattgcatacgacattttggaaaaaactacacgcctcctttcaactctttcaccaaaagagtccacctgggactccacccgctgggctgcactaggcgaaattgggagtggttccaggaccacttcagggtgtacccaaaatgggaatagcga

SEQ ID NO: 501535 - DNA, 126 bp, Homo sapiens
attatggtgaatcatccgctatccttcgcgcccatggcgcccaatattctttagtctgcctcttcctacagctcgggtcgatggcctatattacgaatcatttctcttactcagcaaacctggaaa

SEQ ID NO: 501536 - DNA, 117 bp, Homo sapiens
actccgttgagcattataactgaacatggtcacaccacgaagtaaagtcagacctagagacacgagaacgctccgaaggctggattggcgtcatcgcgagatcattcagaaatggct

SEQ ID NO: 501537 - DNA, 873 bp, Homo sapiens
tcagggagccatcagcactctggtccagccctaagactgcttgtaaaatgaatatcaactgtaattgtatctgtctctagttataaactgataaaagaaagagtaccagacttatataattctagccatgcggttgacagttattactttttttttttttggggtacagataatcatgatttaggattaaaaattaagcgcaaccaattggggcacacttttatttggatgggtattcaaattggtggactagctggcaaataatggattggtaacaagaatttcacggtaaaattatcaaagtccttacgggcctgaaaacctcttagaaatcacaactatggtctcttatttagagaattccaggaaaatcaatggataaggcttaaaggttctcacaaataggtagtggaagggaaattacgtggtcagactatctctccattccagggggattctctaagaccacaggttcaagaaaccagagatttaggcatgaagtgacctcgtgctcataaccgggggagcagtgactcaagttacaacaccgtgacattacaacgggtggtgcttacatttcccaccagattagaactaacttattactcaatttaacgggtgtaagaggaaaaggaagagcacggtattgagagaacaagagtctgagccctggtcgccgaagagctgtgaaatgtgcaaggtgggcaagtagactcacgcgggacaccacagtggaacacctccgggacccccccggggtccaaagcggaattctaccggggccttcaagacctccccaaagataccgtcggcaactaccagcgcacccaacacaccagtgtccaagcaaataagaggcgattcaaggcacac

SEQ ID NO: 501538 - DNA, 363 bp, Homo sapiens
gtgttcttcaagagtgcataactttcctttttttctttttttggagacggagtctcactctattgccaaggctgggaatgcaatggtgcaatcttggctcactgcaacctccacctccccagttcaagcgattctcctgcctcagccgcctgagcagctgggactacaggcgtgcaccaccacccccagccaattttgtatttttagtagagacggggtcttgccatattggccaggctggtctcaaattcctggcctcaagtgatctccccaccctggcctcccaaagtgctgagattacaggcatgagccgcggcaccccactctccttatcatcttaattccaagttcttgaagaacact

SEQ ID NO: 501539 - DNA, 530 bp, Homo sapiens
  misc_feature (55)..(55): n is a, c, g, or t
tgtgctcccaggttccaaggggccaggttggaagccccagccaccccaatatgcngcaggccgccttcccactttcaggcagcttatgggaagcagggccccatttgtccctcggtcgccgtgtggccagagtgggtccgtcgtccccaacatttgtgctcgctcagacactttggcaggatgtttggggcctcaccagcaggagggggtgcaagccgggcagggggtccacttagacccacagcccctcgggggccccccccctttgggtgtgaggtagctttttctccctcagcctgcaagggtccgatttgccattgaaaaagaccacctctactccttttttttgtattttgcaaacccctgaagcgggagctgttaaatttatcttggggaaccctcagaacgggtctattgggggtcggggaccctcttacggctttcaaaacacgattagtaaccaactgtttggtatacttgttttcagttttcatttcgacaaccaagcccggtaattaaagcgattagaa

SEQ ID NO: 501540 - DNA, 117 bp, Homo sapiens
gacgtccgctggtatgttgcaaatagtgggaagataagtttagcatggagtaggtttaggttatgtacgtagtctaggccatatgtgtggagatgagactagtaggggtaggctacg

SEQ ID NO: 501541 - DNA, 236 bp, Homo sapiens
  misc_feature (36)..(36): n is a, c, g, or t
  misc_feature (61)..(61): n is a, c, g, or t
  misc_feature (108)..(108): n is a, c, g, or t
  misc_feature (131)..(131): n is a, c, g, or t
  misc_feature (181)..(181): n is a, c, g, or t
  misc_feature (200)..(200): n is a, c, g, or t
  misc_feature (222)..(222): n is a, c, g, or t
agagccccaggacccggcagcggggcaggtgggagnccagctcttggggagctgccggganccgcggcttctggcagggccgcttgtgctgtctgcgccctccgcttngtcccctcctgcgcctgcctccncacccccacgccgcgtcgccagaatttcctcagccgccaggattttcctntccgccagccgcctcttcnccacgcacagggagctctgggngcacacggtctggc

SEQ ID NO: 501542 - DNA, 112 bp, Homo sapiens
ataatgtgtgccctatccccagatgtaatttaaaaactgaatagaaactaagagaggaaaaatttcaaagtacggcgcagcttgagtgatctctagcgaaatgcatgctctt

SEQ ID NO: 501543 - DNA, 224 bp, Homo sapiens
cttttgctttggcccattggaaaatggaaatttaaggagagaagaaaaaaaaccccgatgccctttaaacatggaaagaattttttttatgattaaaatatatttagcttttccaagccccagactgaataaaagggctctttttatgctttttggagatggttctgtttaatgtctttttacctcagggttaataaatttgtaatgacctttgatgggtttga

SEQ ID NO: 501544 - DNA, 285 bp, Homo sapiens
gaagttggagcagaggcttaaaacacaggctgctgaagttttttggaatgctggtcgtaacacgttcgtagagttaacgttttttttttttccccagaagtaggtcccccgttaaggagcgtcagtgcagaggacccaaaaaaaggtttctgcagtataaagcagcacagcctctctaacagccagcaatgagggtgcccacagctttgtcacacggtcggcgcaggcgcctaaaagagtgccgatccacggcctaaagggccccagagggacggggtaagggaa

SEQ ID NO: 501545 - DNA, 159 bp, Homo sapiens
tgcgcacggacgtggctcgagtttccttgcttccgcttcgcccgctagctctcctcccttccgctcctgcttcttccgggttcccgctccagctccagccccacccggccgtcccgcacggctccgggagccatggaggacccacgctcatattgtcga

SEQ ID NO: 501546 - DNA, 409 bp, Homo sapiens
  misc_feature (336)..(336): n is a, c, g, or t
gcaaattgcttttactttctcaaggtcttaatttaattgtgctttcaacttggcagtgttgtatattttataagctccactaaagaacacatctacacattatgacatagcacgttcttggaaacttgacagaactgttgacaagtacagattggtttttggttactgtgagtattttttgtgctaattgaactgttgttagttcttggtagctttatgtgcttgtcagtctgttttcttcataagtgatgattaatttaaatctgtgtgatgtgttccagttcacttacttgatgggaaattgggaggaagtgcatagctttctggatattcttnaattactgggttcccattaagtgacgggagaggcaaatatttatgtctcagggtattgttggtattggatttc

SEQ ID NO: 501547 - DNA, 312 bp, Homo sapiens
  misc_feature (156)..(156): n is a, c, g, or t
ccaagatcgtgcccactgcactccagcctgggtgacagagcgagaccccgtctcaaaaaataagaaaacatgactgagaaatggaagatacagaaaagaagcaagttggacaaaatgtcactggaactaatctcccaagtagaagaattccacatngtttactgagatagttccccttcgaggaggtgatgcttaactcctcactccagaagcctgggctttacctagtgaccctcttccaaagagcagagcacagagcaggaggagcagctttccagtggagacctccagcaacacagcctcaccagggac

SEQ ID NO: 501548 - DNA, 309 bp, Homo sapiens
ccgctgatagcctccaggtgctcagtatccttaactgttacatggggataataataggacctacctcacagcgctttcattagaattaatttatgatacgtaaaacactaagaatggtgtaagcagtgctgggcacctataatcctagtgctttgggagaccaaagcgggaggatggcttgaggtcaggagtctgagaccaggctaggcaacaacactacaagaccctgtctctaaaaataaaaaataaaaaattagccaggcgtggtggcatgcatctgtagtcccagctgctcaggaggcagaggtg

SEQ ID NO: 501549 - DNA, 279 bp, Homo sapiens
atttgactttcagcatggcccacgctttttaaaggccctatggagaaaatttataaggggcggggaacacaggtatggtaaacccttcccacctcccacttccatcaaatctcaagaaatcctcctgcttcaaaacataaacaatctcacaggatttttattggaccataagggggaaaggaaaactgtcttcctatcctttttgatactaacagttttacggaattcgtttccactttctgtcaaaaaaccacgtatgttgctgatatggattctcaa

SEQ ID NO: 501550 - DNA, 639 bp, Homo sapiens
  misc_feature (11)..(11): n is a, c, g, or t
  misc_feature (88)..(88): n is a, c, g, or t
cacctgccccnggttttggcccccctgttccgccctccgaaaggggagagggttcctgccaacccacgccggccttcccattaatttnagtgggtccttgggggtcagtcccaggtcaggggggttgtgtatttctggcagttgagggccatccctgcccgggaagcaaaaagacagagcatcctgttctccccccaagtttaaaggtcccggtccatttcttggagggggacaaatggcctggaaacctttggttaattgggccatccgtaaagggggaaccttccttaggggtccttgggccccccccaagggttgggcctttttccaaaaaaaagggccccaaaaccaaaggaaaggggggttggaaaaatcccccccaggtttgggggccccaggggggccccaaaatggggtttttttttgggcccccaaggggggccccaaaccagttttttttggagtccaggcctggccccgggaacacaggggaaaggggggggtttttataaacttaacttaggggttaaaaaatttttttggggtcccttgtcaaaaggggccccttttggggggaaggggaggggggggggttccccccctgggggtttttgaaaaaaaggggggggtttttcctga

SEQ ID NO: 501551 - DNA, 1800 bp, Homo sapiens
  misc_feature (1661)..(1661): n is a, c, g, or t
agcgccacgcgctgatcagcgcaggaaacatgatatgcagcgtagaagtggtcgaaggaatgtcagcacttacgataaaggcaacaaaggtgcataacaagcacgcacgcacacgcagtcagcactgccgtgccaaaggtctcgtgcgtatgcgcacaatgagcttggaacaagactcgcgtagaggaggccgaacgttgcctgagagcgagtcgtctctgtgcgatcctagaggcgggaatcgccatcaccgcgaacgccggttcagagggaacttgtgcaaaactggccgcaagggtgggcataccccaatctggctggccgtttggcaggcgacttacgtagggagcgtgtctactcccgtaacccatcgccataccgtccggatcaccacaccttagacgagacgtcgccttgttgcccggtccgtgccctcttccggtccgcctacgtgcagtgagctttcgtaagccatagagactctagtgggtggccggtcacttcgtggttagccctgggtgtcctccgtaggttgtcggggcacggcaccgggttgggcaggttaacttttgtacggtggatatcccttgccataaggagcgccactagcgggtcaatgttgggttcgggttccctacctcggtttgtgggttcctcactcgcagtggcgtgtcgacaacccggaattctcagcaaagacacagccggaccaagggttaaaatacaatttcctgaggatcccttgttaatattaagtcggcctagcgcctaagtttgccacgaaaggacccgtgcgttcggcgcatcgcgtgggcaccaacggccattccgtccaccggcgtgggccccggtggcaaccacaatagctccgctttgcaggggcctttggttgcctaagaaggttggaatcccaacactgggataacttacgcttaggttaacgctggggtaacataacaccgtgtgacttcggattgtaccctggttacccggatagggtgggcgtaacacttccggcgccggacggggagcttatgaggattatggaaacccgaggggaccacacaacataagacgttaggaaatccaccacataatccaacaaccatttggtgaccacaaacaaccaagaggacacagtggggcacgcttagtccccacatttttgaggctggttcccaaggcacgtggtgtcaacctcctaaaacttccggcgttcggaaacaacgcgaagctgtcaccaaaggcggcccacccagaaggacagataatatagaaccccggtcgccgggtggccccaataaccttgagcgccccccgggtggcgaactacatgttccaggggcgccaggtgttggggtctctacagccatccaggggagctcttccccacaccaagtgtgtgggccattctcgtgctcaaacagcacccttgtgtgcgcccgttggcaactgctcctctggaaacagcgggaaaacacacaccgcaacctcggggaagccgcgaccacccgggggtatcccaggaggcgttaacaaaatgaaaaacaagcggccatcagcggtaacccggtgtagatggtgggcaggcgcccgctaacaaacacgaccatccccttgtgcacaacaggttgcgcctgccgcaatagtaacactggcgngttgagcgccacacccctggttagcgcgaaacaagctgagcccgggcccccactgtgcagcaaagcagcccctcacgtgccatgaggtcgctacggccgcacgggccactcctaccacgagacggctagataccactca

SEQ ID NO: 501552 - DNA, 289 bp, Homo sapiens
  misc_feature (99)..(99): n is a, c, g, or t
  misc_feature (210)..(210): n is a, c, g, or t
acagaattctaggcagtactgctgtctgttctataaattggatgtaaggagaaggctgatttataattcaacaaactcccaaattaggcatcccttttncccccttgctgggatttaaggaggatttttttctaataactagccaccttattcttgatcattcaaaatctgggtgagaattttcttaaaagtcttagacagatatatttnaaacgtaattctatattgggaacataagtgattatgccacacataggcataaacaatgctttcatgagttcaattatac

SEQ ID NO: 501553 - DNA, 308 bp, Homo sapiens
cccatattagtgtcagtcatctccctgaatgcacttcttcctgtgcacatccacatagtcaacgactaccacatctctcagaatcttctcgtcaccatcagtaacaacgctgccattcagtttggaaactgatggcaatctggctattaccaattaccttcgctcctcggtggtatatggctgcagaagaggacttcctaacaatctcacttcttccagtattgagacactgaatttacgttatcactgtcttcccaggactgcgaaaactgactatgtggcggctgatgcatcggaagatacggaca

SEQ ID NO: 501554 - DNA, 158 bp, Homo sapiens
agttgctgggactaatccagctctcagtctcgcaagttactgaatctctctctcccccatttactcatgcgtacaatggggaaactaacggcacgctcctccagtgccatcagtagggccaagtgagttaacgctgcagagtagcaggactaggggcc

SEQ ID NO: 501555 - DNA, 344 bp, Homo sapiens
gcttatttaaagcgtcagggagaggatgtgcacacagatgtcactgaggtttcgtgaacgcctgtgggagagcagatgcagcgggggggattcaggcagtggccactgattcgtgggctcgccttaccaacaattaccgggagaagaagatagtacacagagccaagagggctgtgtaaatcacaggaatttagcgggattagcacaagtattcctagggtaaacaccaaggcggcccaggggtccctaggcagcccacttttcacttcccaaaagctcatcttgaggccagggcccccgttcaagcccctggcaggccaaaggcggataagtcttcaattctg

SEQ ID NO: 501556 - DNA, 128 bp, Homo sapiens
tcccttctctttatgttagtgtcataatttctcatcaatctccacagtgattgtttagaggttagtgggattagtcatggtggggtggtgattagtcggtgggtgatgagatattgggaggtggggat

SEQ ID NO: 501557 - DNA, 2055 bp, Homo sapiens
  misc_feature (260)..(260): n is a, c, g, or t
  misc_feature (1760)..(1760): n is a, c, g, or t
ggtgcctgcctttcctgtgcctgctgcccctgtattcccatgtgactgaatgtggcactcctgcacctggacccctgtgtccctgtgctgctgctggctgtgtggcactgctgcccatccctgctgctgctgctgtgtgtgcttgctgttgtgatgtgtgtgtgtgtgtgctgtgctcctgcctgtgcttgtgtgtgaccatgtgctgtgtgtgtgacgctgtgcgtagtcctgatgtgcgcaagcctgatgtgtgctcncttgctgtgcttgctttgcgctgtactctgttgcgcgtgctcattgtgtgcctgtggtgactttccagttgagccattaagcgagtggggctgtttcagaggatcgcataccagtcgcccaagccattgagtttgtggataagagcatattcatggcagcgccacaagtttatggtgcacttaccgttccagggacccagagtgacgacccgatttagccaatcacagagagttggtcctttgggaaaccccatatggcttgatgatattcccgactccgtctagttagcatttggatcgcccagtgtgtgagtttataagccgccaggttgtgggcgcaagaggaagaagcgagccaatgtttcaagtttcgagcggctgaggggggtcgtaacaggacagctgtacaagcggctatgtggtaccttccgaagcgtggaaccatggtgattcatgttaagagacgcccgccgagggcccattaccgaacgtggttttatacgcggcttaacgttatcaatggcttttggtgggtggttttggaacagcacaaagagagtgtccgccgagaagctctggccctttatttggtatggttatggcaaacattatcccttttggcagattattaccgaagccgcagcaggtgtgggacgttcacgtgtgggaaacaattgcactgcgcgcctggaagccgagatttccatggcgaacagcgtggcaattccacgagaagaagacaagatgcgacatggaaagacgtgcggttccgcggcctatgtaagttttggaacaagccgttggccttttgttagtagcaccccatggctgccagaccaacagatgggccccgcgagtggatatttaaattacaccccctggtttgatgattgggtggattaacagagacgttattattatatccgtatattggggagccgaacgagcaggttccgccagtttgcgcctgtctttcaggcgagagaatgcgccatccgacaataatcactgtggtgggttccagactggcaagacgtggtggaaattcccttggattggagattgtggcccggcaccgcagaggagagttattttacaacgcatgggtgggttacacttcgctgataacattctcacgaggggataacacccgttttggatacgagctcaagcttcagtagaagcagacaaagttccacaaacgagagcacgataatcagccaccattatgaactatggtcgaacacccccgatttttacaatgttgtggtagatcacccgagaccaggtggggtgaagaagatgagagataatcaacggattggagatacgcacgtaatcccctgccttattgacgatgaccattctcagacacggcatttctagatggaagaagagagagccttttgaaatgaattaacagcgccgggtagttattgtgtaccacaaggatgactttgattacagcacgggagaccacccaaagagactcaaagacantaagctttacacgccacataagtccagttgtgtgtcatgtcagagagcgtttcattgtccccgagactcagtatgtcgtagttggcaccagatctgagttacccagtaagtgtaccccagaagtgccccaatagaacacggtgtcagcaggactactgtcgttggtagcccacgatggagcgaccttacagcaaaggttgagtcctctctagtaaggtggtccaacagatactgagcagatgggagagttcctagactgccgtttgaagtggtcgtggagggcggcagcaggcat

SEQ ID NO: 501558 - DNA, 252 bp, Homo sapiens
cgtcccgctgtatcttgatgatcgtcgacctgtgctgtccgtggactgagtctagtggccctgttagataactcatggctgcggtcgatatgtcatggcactgtccgccttgtatgatccggccaacttttcttcagcatctgcattactgcttctgagcttcttgtgcgatttggtaaccacggagatgggggtcatgtggggtcgagccacggatacaacggtcttgtgtctagcattccacgtagtaca

SEQ ID NO: 501559 - DNA, 304 bp, Homo sapiens
tcttctcccctgacacatttgggagcactgtaatcccagctacttaggaggctgaggcaggtagaatcgcttgaacccgtggagcagagggaggtagaggttacagtgagccgaggtagcaccactgcacttcacttcagcctgggtggctgaacaagactctgtctcagaaaaaaagagtctgggtcggtggtggtaggacagagtaaggagacagagtctctcacagggttccaaatcaggtgacctggaagatgacgagttgtcgactgggaaagagattccacactgtcaggggagaaga

SEQ ID NO: 501560 - DNA, 468 bp, Homo sapiens
  misc_feature (103)..(103): n is a, c, g, or t
  misc_feature (145)..(145): n is a, c, g, or t
  misc_feature (149)..(149): n is a, c, g, or t
  misc_feature (158)..(158): n is a, c, g, or t
  misc_feature (160)..(160): n is a, c, g, or t
  misc_feature (229)..(230): n is a, c, g, or t
  misc_feature (256)..(256): n is a, c, g, or t
  misc_feature (299)..(299): n is a, c, g, or t
  misc_feature (411)..(411): n is a, c, g, or t
  misc_feature (467)..(467): n is a, c, g, or t
gattcggcactaggaggctagccctgagtcaccaccacctgcgtccccggacggtcgtcactgagatccgaggcctgctggccaaaggtctgcggcctgaganccccccaccagccggccccctgctcaacggggcccccgctgngacnagtccccanantaaggccgcccccgaggcctcctcgccgcctgcctcacccctccagcatctcctagtctggaaaggtgnngtaccttgggccccccaagcccagcnaccaggagactggagagcaggtgtccagccccaagcaagacancccgccctccacaccaccaccgaggacaagtgcaggggtgcagactgagttctaaggccaagtgggtccctgactggctgcaacatggcacaattccgttcccttccggganccaggcaaggctcagctctgggggagggcaacctggtcttgtgccttgttgggttng

SEQ ID NO: 501561 - DNA, 497 bp, Homo sapiens
gcgttcagaggattcccgtccagtaaggtgtgccaggtattggctatgcctagtttatggagggtgtctatcatgaagggatgtcgggttttatcaaaagctttcttgcgtctatgaggtgaacatatgggtgtggtttttaattctgtttatttgatgaatcacatttattgatttgtgtacatggaaccaaccttgcatcccagaataaagcctacttgatcatggtgaattaactttggatgtgcacatggatttggttagtgttttgttgtgtgttttggcatcaatattctttaggaatatggtcctatagttttcttttttcatggtgtcttggccagctttgggtatcagggtgacactggcttcatagaatgagttagggggaagtcccttttggatttttgggaataatttcagtagaatgggtaccagcttttctgtgtgtgtctggtagaattcagctgtgaatcaatctggtcgcgggctttttg

SEQ ID NO: 501562 - DNA, 209 bp, Homo sapiens
ccccggagcagttcgtatgttgctcaggtgagtgagtggtattcaaggcgcgatccactatgatcagcacggatttgactgctcgtttcgacctgggcggttcaccctccttaagcaacctggtgtccccgctctcgggaggtcaccatattgatgccgaacttagtgcggacacccgatcggcatagcgcactacagcccagaactcc

SEQ ID NO: 501563 - DNA, 823 bp, Homo sapiens
ggctagtacgaggccgggtggttaatgggcgaggggatgttttgctttagctagggcagtgacataagaattccatgttagataagcatatgttacttaccttgtaattaaatatttcttgataagcaattttaatggtttaatttctatgtggacgtatgttaaattttccaacctaccctatgttaagcattcggttttaaaatttttatgctgaatataaatgctcaagtaagtttacacaagtattgaacagcatccctgctcggtatcaatttctgtagtaaatgcattggatcagttggactttgaacgcctttggacaatggctttgctaaaatgctcccgccacgaacagttgtaggaccatgggacacgcaggagtcacactagcaggcaagggagttgcagagagctgcaactgtaaagggcgaagaacaggcagaggtaacaaagatgatggaaggtgtggtgactaagggccacggttattgggtgaaatttgagattgtaggccaagctgtattttcaacgcttctgaacttaggcaaaatattcatcgcaaagtctctagcgtcatatttttctcacccaaattacgtttccacgagattatttatatatgagttggtctatctctgcagtccttgaaggtgaagttgtcgtgtaactaggctgtgtttagggatgtcacgcagatggcctgaagtgagttgtgcaataaatgttaagttgaaacctcaggaaaaatgactaaaaaactcccagggaattatggccgagtcgggagaaccccggtattgcacaggggcctgggccctag

SEQ ID NO: 501564 - DNA, 152 bp, Homo sapiens
tccgaacttggaataacctacaatataacttcagagatgaccgaaaatcacaatacgtgattggtatagaatggggtctcctcctccggcggggtcgaataaggtggtgttgaggttgcggtctgttagtaatatagtgatgccagcagcta

SEQ ID NO: 501565 - DNA, 123 bp, Homo sapiens
ggctgattgctgcggctctgcttttttcccaccagcagccacactaagcgagcccccagttgaggggaggttcgactactgttcgtgtcggctcgcttcagtgtgatctcttctgatggaggt

SEQ ID NO: 501566 - DNA, 142 bp, Homo sapiens
catctcaggctgtctctaaattttacaagtactatatctactggtaatactgcaggtgtgatccaatctgtgcttttgtaaaagagagggttgcttcattatacagaagaaactttagaactcaggaaattccagtgactgc

SEQ ID NO: 501567 - DNA, 119 bp, Homo sapiens
aggaagggccctgctgacagaggacggagacaagagctgcatggagggcttaaggaactctacaaaaggccaggatggctgctacagaactccctccagtcagttctccatgtattagc

SEQ ID NO: 501568 - DNA, 182 bp, Homo sapiens
atttggggccccccttttgcttttctcccccttttattattaaatgcttcccccaaatgaaaaatatgtctggacccatatgttattatacagggtcataaaaataatcaaatacccgcccccccagttttttttctgtattatcaaagtctggtttaaataaactatatagttcccattga

SEQ ID NO: 501569 - DNA, 1463 bp, Homo sapiens
  misc_feature (9)..(9): n is a, c, g, or t
  misc_feature (783)..(783): n is a, c, g, or t
  misc_feature (801)..(801): n is a, c, g, or t
  misc_feature (829)..(829): n is a, c, g, or t
acgccaccntgtcgaacgcgacacgacagcacttgccgcgacggcacggcgacacgcagcccgagaaatttgtttgatcatcgccgggtaattattagtctgtcttgtttcagtgactccctgctcgttgaggttgcttctccgtagtggggtggcgatatagtgatccacgtgtgtttggtttcccctatacgacacatccgttcttgtgctgattttgtatcgcctttggtaacaagtctcgctgtttttatctccggcggtaacctatcatggggcgaccattctacgaaatggtttctcccccccgtctgcggggggcacgccagtggttttccccacttggggaaacaaggtttgttcgccacagcacaccggtttatatccggggttccacattttggggggaaaccccttttgccccgcggaggtttttctgggccaatttttggcggccatctacttcccctcgcgtggtgtgggggaaaagtctattgtcgcgatgatatactcctgtgccctgtacccctgtgccgggggcccccttcgtagtttacgtctcattgaaagggggagctgggacccagattggttccatttaacccctcccatccagagtcacatgggtttttcacacagggagtgaaggatttggattctcggggttaaacactccacgggaaagggaatttttagggaaacgaaatgtttgggccccacccgctcctgctgtttgatatcccaactcggagttttataggtgaggataaacaatatctcggnggaactaatatagaaagnctccttttctcgccttgcctctctcgtngggaggaagatgtagctataacgctggtgtccccgcggggaaagaacgcctctccctcgctcgtggtggacctcgcaccgcacccccacctgcctgttcctctcaggcaccctcttatggccgcacattgtgatgccccgtggcgttaacacacacacttgcctctaatgtcacataactatgcacattggttcactgagcccacacacacacataacacacgttcactatagagaagaaaaaatatatttggtggcgtttctcttgtctcgagtgtcttctatagtgggagattcttctttgagctcgctcgttagtgtacttaaagtggtgacttaatagggttactcaagttttaatagcctcggccctatttccctcttataataataatattttttaagaggccttagagtggctcttttagcccttgttttaaaactcccatttatgattgaccatattgtgtaccctgatacttttaatctcagaagcgtttagccttgaaattgtgaactttttgggaatagtttatttagtcgaagttccgccaacttgaacttaaacctgtgaaatttatgatggattgtattccaaagattaatggaaaatacaaccattttgtccccctgga

SEQ ID NO: 501570 - DNA, 164 bp, Homo sapiens
gtaggttattgccatggaagatagcccatgtggcagctgtaacatcaccacagatgattagggtttgccgagaaggcaggcagtcggtgggttctgctgtttgtgacgtcccatacaagtaaagccttttcgatgaacgtttattaaaatgcccggtcccaata

SEQ ID NO: 501571 - DNA, 201 bp, Homo sapiens
agaaaaaaaaaaaaaaaaaaaaaaattttccacccccccacccctaagaaaaaacggggtttttaaaaattcccccctccctttttcccctccccccaggactggcccatttttgggggggccagtgggtcccaaattggttccccctaaaaaggtaaaaactccaaacaaaatttttattaaattaaatttgggttctca

SEQ ID NO: 501572 - DNA, 443 bp, Homo sapiens
  misc_feature (443)..(443): n is a, c, g, or t
taagctaactgtataatcatcgtatgatactttgatatcgctaatgtagagaaccacactttatataaagtagttttggcatttgtttattgaatgatgcatcttcttcggtgaaagtattgcatatgcataaatggccaaaggaacagcaaataatatatatttaacatgtcattgagcaatcattttctcaactagtcgtaccctcgtctctactggaacgaacatattgccaggtactatacagaccacgatttgtctaaagtggcatattcagaacttccggtactttctgtacaataggttaaaaataacactttctccctgggagcgttaacacctttaacgcgaaacaatttaaacgttattatcatgcaatgggcaacaagactcggtgtgaacagtggattggtcatggaatcacccagaagatcatagtatan

SEQ ID NO: 501573 - DNA, 331 bp, Homo sapiens
tgaaaaaataatccagagctgagaaaacgtctgcatttgcagagaatgaaagtatttaaataagacccagatgggccgggcgcagtggctcatgcctgtaatacccaacactttgggaggttgaggtgggcagattgcttgagcccagtagtttgagagcagactgggcaacatagctaaaccccatctctacaaaaagtacaaaaattagctgggcgtggtggtgtgtacctgtggtcccagctactctggaggctgaggtgggaggattgcctgcgctcaggaggccgaggttgcagtgagctgagatcacaccactgcactccagcac

SEQ ID NO: 501574 - DNA, 448 bp, Homo sapiens
actgggaagtatacattttatttaacattccattaatacgccatatttacatatataaatgaatgaagccttaatataaaatagaaaaattgcctggactgaaacaatcactccatatggagttactttacttattgaagaccttctgtttacataaaaatttacaataatttacataaattattttcttccaaactagatatctaataatccacactattctgatgactttacaaataggtgtgcattaaaatcttcccaagaaattacagcatttgtctgcgtaaaatttgctttggattggaagacagattctttctgtcacatttcacacacctgttcctgtcacttctgtagcagttctaggttagatattgactccgtcagctgggctatcctagggggaaaacatccgaatttctatgggaggaggtgaccaagcactctc

SEQ ID NO: 501575 - DNA, 282 bp, Homo sapiens
acgaggtccccagagtctgaaatatagaaagagagaaaatggacagtgagatcacaaggaataggaccaaggctcttgtaagaggatagtagcgtaaacagagagacgtaatcgtgaagcactacccccaaagcttgcctacaggaaagtgaacggagtatctaggtagtagatccccacccaatttcaatgcttacatataagctgtactatcgtgatggatattttggaattctgaatgaccagtgtacagacttcacatcctatattcaacgcccccga

SEQ ID NO: 501576 - DNA, 436 bp, Homo sapiens
aaattcaggaacgatgggaaaaaaaaaaaaagattgctaaacgtgaactaccatatcacccagcaattgcactcttgggcatttatccagagaaatggaaacttatgttcacactaaaacctggacttggaaatttatatcagttttattcataatagccaaaaactagaaacagcctagatttccttcagcagacgagtggctgagtaaactgggtgcatccacgtcacgggatgtggctccacaaagaaatggaagaaactagaactctgatgactctctagggaattttgctgagttaaaacaaccccaaaaggtctcatactatgtgattctctgtatataacattctggaaatgacgaaattgtggaaacggagaacaggtgagtggttgctggcgtttcccgacacagagaggggtgtggttattaaaag

SEQ ID NO: 501577 - DNA, 332 bp, Homo sapiens
gagaccacactgaggatagaacgcgccacactacaaaacaaacgttgatctcatcctgacacactgacttcttacagaaccttctgagactccaggaactctcggaacttagcatatacccaccagctattacaactatactcaagctcaatgtccgggccactagatacatagataccagagcgcacaaagctgaagtgcacggcagttccggaccatcctatatcacagtgcacccagcatataatcaggtcctattacttagactcgactgtacaacaaactcaaggggtgggagtgtagggcagctggcaaaaagtagcaggtaaaac

SEQ ID NO: 501578 - DNA, 96 bp, Homo sapiens
tgatagaattgagctggtaccaatgaggcggagttgctcattgcctgggtttgtcggcatgtgtaatcgtgcaaataaacgctcactccgagaaag

SEQ ID NO: 501579 - DNA, 470 bp, Homo sapiens
  misc_feature (40)..(40): n is a, c, g, or t
  misc_feature (73)..(73): n is a, c, g, or t
  misc_feature (95)..(95): n is a, c, g, or t
  misc_feature (119)..(119): n is a, c, g, or t
  misc_feature (130)..(130): n is a, c, g, or t
  misc_feature (172)..(172): n is a, c, g, or t
  misc_feature (193)..(193): n is a, c, g, or t
  misc_feature (221)..(221): n is a, c, g, or t
  misc_feature (232)..(232): n is a, c, g, or t
  misc_feature (275)..(275): n is a, c, g, or t
  misc_feature (320)..(320): n is a, c, g, or t
  misc_feature (330)..(330): n is a, c, g, or t
  misc_feature (373)..(373): n is a, c, g, or t
  misc_feature (390)..(390): n is a, c, g, or t
  misc_feature (406)..(406): n is a, c, g, or t
ccatccacaaacttcatttttttatccctcttttctcttnttttcccatataccacaacctctcatccttttnccccactctccattattaaccncatctcatcatatcatttcctccncacatcaatcnctcctattattttttaactcatatactcttccttttcaattncacatatacctctattttccnccttttcatcataaatctctacacttcnctctttaaatncatatctcttcttatctacttcatttttttccctaatcctccntcccttctcaccaataacattcttttttcttttttctaatataantatttctttncttttttttttaactctcacctcaactccatattatccatctncatccatccccctattnataaactcattcattncatcttttaatattccatcatctacaaacttcctcttctttttatattttcacttccatctttc

SEQ ID NO: 501580 - DNA, 166 bp, Homo sapiens
agggagggagatgagtcaggtttgagctggtgagtaggatgggaaagtagagcaggagtggcagagagaagggtggttacggagaagtgaagagcgcctgaatataaggaatctcagaccattgtctcattgcgagtggcaagaagtagtctaagctctctaaggt

SEQ ID NO: 501581 - DNA, 926 bp, Homo sapiens
  misc_feature (44)..(44): n is a, c, g, or t
  misc_feature (137)..(137): n is a, c, g, or t
  misc_feature (147)..(147): n is a, c, g, or t
  misc_feature (175)..(175): n is a, c, g, or t
  misc_feature (178)..(178): n is a, c, g, or t
  misc_feature (192)..(192): n is a, c, g, or t
  misc_feature (292)..(292): n is a, c, g, or t
  misc_feature (304)..(304): n is a, c, g, or t
  misc_feature (313)..(313): n is a, c, g, or t
  misc_feature (359)..(359): n is a, c, g, or t
  misc_feature (361)..(361): n is a, c, g, or t
  misc_feature (370)..(370): n is a, c, g, or t
  misc_feature (384)..(384): n is a, c, g, or t
  misc_feature (390)..(390): n is a, c, g, or t
  misc_feature (392)..(392): n is a, c, g, or t
  misc_feature (394)..(394): n is a, c, g, or t
  misc_feature (397)..(397): n is a, c, g, or t
  misc_feature (402)..(402): n is a, c, g, or t
  misc_feature (411)..(411): n is a, c, g, or t
  misc_feature (417)..(417): n is a, c, g, or t
  misc_feature (427)..(427): n is a, c, g, or t
  misc_feature (430)..(430): n is a, c, g, or t
  misc_feature (434)..(434): n is a, c, g, or t
  misc_feature (440)..(440): n is a, c, g, or t
  misc_feature (445)..(445): n is a, c, g, or t
  misc_feature (484)..(484): n is a, c, g, or t
  misc_feature (492)..(492): n is a, c, g, or t
  misc_feature (503)..(503): n is a, c, g, or t
  misc_feature (519)..(519): n is a, c, g, or t
  misc_feature (539)..(539): n is a, c, g, or t
  misc_feature (544)..(544): n is a, c, g, or t
  misc_feature (568)..(568): n is a, c, g, or t
  misc_feature (663)..(663): n is a, c, g, or t
  misc_feature (683)..(683): n is a, c, g, or t
  misc_feature (693)..(693): n is a, c, g, or t
  misc_feature (697)..(697): n is a, c, g, or t
  misc_feature (728)..(728): n is a, c, g, or t
  misc_feature (734)..(734): n is a, c, g, or t
  misc_feature (753)..(753): n is a, c, g, or t
  misc_feature (755)..(755): n is a, c, g, or t
  misc_feature (762)..(762): n is a, c, g, or t
  misc_feature (769)..(769): n is a, c, g, or t
  misc_feature (773)..(773): n is a, c, g, or t
  misc_feature (775)..(775): n is a, c, g, or t
  misc_feature (782)..(782): n is a, c, g, or t
  misc_feature (785)..(785): n is a, c, g, or t
  misc_feature (794)..(794): n is a, c, g, or t
  misc_feature (797)..(797): n is a, c, g, or t
  misc_feature (803)..(803): n is a, c, g, or t
  misc_feature (807)..(808): n is a, c, g, or t
  misc_feature (816)..(816): n is a, c, g, or t
  misc_feature (818)..(818): n is a, c, g, or t
  misc_feature (828)..(828): n is a, c, g, or t
  misc_feature (833)..(833): n is a, c, g, or t
  misc_feature (847)..(847): n is a, c, g, or t
  misc_feature (849)..(849): n is a, c, g, or t
  misc_feature (860)..(861): n is a, c, g, or t
  misc_feature (888)..(888): n is a, c, g, or t
cccatgagcagcagagtcgagtgtaagagtgcaggatccagagnggggagaggctgggcggagttgggggcctggaggctggggcctggttacttggtgacgtgcagagctctctctggggggctgcagctcatctnggggggagcnggactcagatgcccccgtaggtgcaaangcnacatccacatctcnctcctcccggtgctttttgcggtattcctgcagcgctttctccgccacggtctccataaatttagggttcttcctggagacttctacagggaccgtcacngatgatgggatnagagtcaangagcttcacgaccacctcagtgacaccggaaggaacgtccgagtcngncgtgtgggncgcccccgtggtgncccgangntngtnctggncttagcctngcgtangagtttgccngcngggncacccngttanactgctcgttcagctgctccagccaggaggaggtgttgnacatcttncactggtaggnatatagcaactcgttntatttactgataaacctatnaacgncctggagggattcgtcgagctccncgccgaagcttagcctgggagagggtataattggaggaacagtacacagacaagaactcccggcactagtcaccctggtccttcatccgcaggcngaccgtggcgttgtggcggntctcccggcncccngtccggtcctcgtcgccttctcgtctgcctnctgttngcgggtgctggcaggccgngntgtggcngtggctntccntngcctgcngcncctcgtgtntcntctccnggcnnggctggcncntggcgtggcngtccnggggctcgtccggngngaagggcatcnngctgcggaccgatgcgggcattgggcnagcagaagtgcaggctccagtggggccggctgccgggc

SEQ ID NO: 501582 - DNA, 266 bp, Homo sapiens
tggcttccgttacatcttattctaactcaggtttacggacccaatgctggaaaaccaattcctgctttacccacgccttaacttgttaagaaaaaaccggatctaaccccgaggaatgtcccattttcgccattcccacttcctttctgccctaggcattcgatacgtgccaccaggggccatcaggactagggctttgcacccatggcagcagacaggtgtgaagctcggagtccctcctaacagccttccttttggcgtcttct

SEQ ID NO: 501583 - DNA, 792 bp, Homo sapiens
agcggttgggttgatgggttttttttctttactgtgtgtgtatgtacgggggagtatagctttatctgtgctcaattcgaaagagagtattataagttttcccagcacaatccccctttcgaagcgcccaacgagccagccccgccgtaccgcgcacccatagacgacggaccgcctgcacctaccgacgcaccacgcgccagcaaaccaagagacgaacaacaaccaacaggaacacgccgcaaccaaccccaagaacgacaatacgaccacagcagaagacacacgcagccacaaccacaccaggagaagcacccacacgaacaacaccccggccagacccagccccactggcagagcagagccgcagaccgcgccacgctgcgccaccacacgacgcacgagacacgaaacgacaggagcagcagacgcagcgaggacgcacaccagggaagcccgagagacgaggcaacaagcaccagaccgacgcaagccggcgctccggaccagcacggccgccgcgcgagcgtacgcccacagcgccgccagccacacacacacaaacaaacaccaacagatagcacacgcaacaccgcacacccccacagaccacggaccacgcacaccgacagacagcacgaccaacaaaagctcgcggccacaacccggccggcacacgaaagccgacaaagcccagcaacaccgacaacacatacagcccgcgtaccgcaaccaaaccagggctaaagaccaagaaacaacactcgcacgcgcgcgcggacagcccacaca

SEQ ID NO: 501584 - DNA, 101 bp, Homo sapiens
cactgctgagcgcaggatgacgtcggcaggagcgtgcatgagctggaacgagcctgccgggtagcagaacaggcagccaatgatctgcgagcacaggtgac

SEQ ID NO: 501585 - DNA, 545 bp, Homo sapiens
  misc_feature (424)..(424): n is a, c, g, or t
  misc_feature (431)..(431): n is a, c, g, or t
  misc_feature (496)..(496): n is a, c, g, or t
  misc_feature (499)..(499): n is a, c, g, or t
ggttaagactgaacggggcatggagcataccaacagcaacgagagtgacagcagtccaggcagatctcctatgcaagccgtgcatcctgtacacgtcaaataaagagcccctcagatccagaaggaagctagaagggccccatgtcctttagtagacaacgagccacaccacatgtccatgattttggacccatgacatgagattacggaagaatgaaccatgtaaacggaggacattggagtgactatctggggcgggccaaccccgatgaatgaagatgggaaaatggagaaaaaaaaaaaaacaggccaaaggttcgcggtgaaatggtcctccattggtggtccggtcggggggatttccactacgtttggacacctctgaatggtgtgacctctaagggccatcaaaaaccccattggngagtatntggagattttccaacttttggtggaaaaagggatttggtcctctggtgcatcggagggcctggtnggntactggggatttccctctctaagcggtcaacatcggtgtggtaatt

SEQ ID NO: 501586 - DNA, 730 bp, Homo sapiens
  misc_feature (452)..(452): n is a, c, g, or t
  misc_feature (465)..(465): n is a, c, g, or t
  misc_feature (657)..(657): n is a, c, g, or t
gggggcagctcctaactcaaaggagcggggggggcttaatatacctctaaaggagcctgtccagacacaaataaaccccaatcaacctcaccacctctaactcaccctatataccgacatgtttaacaaaccctgaagaaggatacatagtaaacccatgaccccaccttatgacacaattgtaaggggtgccccacgaggaggcgtgaaatggggtgcatttactaccccaaaaaactacgataaccttaatgaaactgaagggtcgacggtggatataaaactaaactgagagtaaagtgtttaattgaacaggggcctgaagcgcgaacacactgtccgtaaaacctcctcatgaatacttcactggacatgtatctaataccccaacggatttatatggaggagacttttagaaacttgggaagcgtactccaaagaacactttctcnaacaccaaaaggngaaaaaaaaagaaaaaactcttcgtaattccgcttgtcccaacccttctctagacctcaaggaagtatttcctgttaagccctcataaagagctcccttgaccaattagccctaaagtgagtcgcataaaaataacctgcccgtgttcttcaacctggtgcttggaaaaccctagtgatccccattttattnccattggaaacatcctcttataaacagtttttaaaaaaaaagggccccaccattccccttccacacaggggcc

SEQ ID NO: 501587 - DNA, 453 bp, Homo sapiens
tccggacgctcagtatcagtctaaataatggtaagtaggatatggccaggtctttgagtcagcttatttatagctaagaaaacataattggatgaggtcactcctcttttctaaagataccaaaattaggtgggttgtgtggtgtgtgcctgcgatcccagctatacaggaggctgatgcagaactgcttgaacccggacagcagaggctgcagcgagccgagatcgtgccactgctctccagcctatgtgacagagggagactccatctcaaaaaaaaaaaagagtcatccctaaaaaaataggttgaggtgcaattaaaatatgagaggctgctggtatttttatgggacatagattacaaataggaggtgttgaggagttaaagaggtatttatatattggcaattaggttagccagataggaaagaaagtacctcatgtagtcgttgaa

SEQ ID NO: 501588 - DNA, 612 bp, Homo sapiens
gcaccgttatcgagagtgtcggcgctgtgcgtccacgttgttatacgcgtcgtgctttatgatccggcttatagacgatgccgttatatggtattctctgctcaggtattgcaatagtttgaaattcccaatcctctcgagccacacaagcccagggccagcaacaacacttcgtgagagcgggaggatgaagtttcgctgaagtttgtgtctgaaaagcaggccttccattggcaaaggattgttaggagctgctagggttgcttggagactgacccccacaagtgatcagcacagtgcctaagattaccaggtgcaggacgccccaattccacagtgaggtgaagcctcgccaggggggcctgagcagcaggcttgctcttgtccctacattaggacacccgaaccggtgtgacaggagagctaaagagccacccacaaggggaaaagctgatgtcaacttaagagccacaacacctctggaaaagcaacaagcctctccttcagtttagtccagaagggaatcccctcatttgtgacacatcatcatctcacccaagctgctggctctgggactggcctgggcaggttgtctgtcctccaggatggccc

SEQ ID NO: 501589 - DNA, 438 bp, Homo sapiens
  misc_feature (34)..(34): n is a, c, g, or t
  misc_feature (37)..(38): n is a, c, g, or t
  misc_feature (57)..(57): n is a, c, g, or t
  misc_feature (185)..(185): n is a, c, g, or t
  misc_feature (203)..(203): n is a, c, g, or t
  misc_feature (292)..(292): n is a, c, g, or t
  misc_feature (304)..(304): n is a, c, g, or t
  misc_feature (334)..(334): n is a, c, g, or t
  misc_feature (425)..(425): n is a, c, g, or t
  misc_feature (432)..(432): n is a, c, g, or t
tgttttcctgcgcaggagccgcaggcctgtacanacnnatggcgcccagcggaatgnatggtcttgaagccccacttccacaaggactggcagcggcgcgtcggccacgtggttcaaccagccggcccggaagatccgcagacgtaaggcccggcaagccaaggcgccgccgcatccgctcccgnccccgcgtttggtttccnatccggcccatcgtgcgctgccccacggttcggtaccacacgaaggtgcgcgccggccgggcttcagccttggaaggagctcaagggtnggccggcaattnacaaaaaaggttggcccgggaccaatcggnaatttcttgttggatcccgaggaaggcggaacaaagtccacggaattcccttgcaaggccaaacgttgcaacggcttaaaggagtaaccgntccaaanttcaat

SEQ ID NO: 501590 - DNA, 134 bp, Homo sapiens
gttggtctcctagggaccaaggcctttgcatttttttctaccctgactcccacttctaatctctccttacccttcttattattattttctctgccattgtaatatttttttgttaattaaatgttttggtcaga

SEQ ID NO: 501591 - DNA, 348 bp, Homo sapiens
  misc_feature (1)..(1): n is a, c, g, or t
  misc_feature (10)..(10): n is a, c, g, or t
  misc_feature (31)..(31): n is a, c, g, or t
  misc_feature (36)..(36): n is a, c, g, or t
  misc_feature (41)..(41): n is a, c, g, or t
  misc_feature (44)..(45): n is a, c, g, or t
  misc_feature (54)..(54): n is a, c, g, or t
  misc_feature (58)..(58): n is a, c, g, or t
  misc_feature (63)..(63): n is a, c, g, or t
  misc_feature (70)..(70): n is a, c, g, or t
  misc_feature (123)..(123): n is a, c, g, or t
  misc_feature (140)..(140): n is a, c, g, or t
  misc_feature (142)..(142): n is a, c, g, or t
  misc_feature (155)..(155): n is a, c, g, or t
  misc_feature (162)..(163): n is a, c, g, or t
  misc_feature (177)..(177): n is a, c, g, or t
  misc_feature (182)..(182): n is a, c, g, or t
  misc_feature (185)..(186): n is a, c, g, or t
  misc_feature (191)..(191): n is a, c, g, or t
  misc_feature (219)..(219): n is a, c, g, or t
  misc_feature (228)..(228): n is a, c, g, or t
  misc_feature (231)..(231): n is a, c, g, or t
  misc_feature (263)..(263): n is a, c, g, or t
  misc_feature (297)..(297): n is a, c, g, or t
  misc_feature (300)..(300): n is a, c, g, or t
  misc_feature (302)..(302): n is a, c, g, or t
  misc_feature (306)..(306): n is a, c, g, or t
  misc_feature (312)..(312): n is a, c, g, or t
  misc_feature (322)..(322): n is a, c, g, or t
nttcaggaancaaagacagatactgcgacanagggngctcnggnnccagcgtcncgcnatgcnatcgcgngcataccccccagacgaaaataccaaatgcatggagagctcccgtgagtggtnaatagggcgatagaccngngatccatcgtgangccttanntaaggggaacgtgngggcnatnnaggcnctatgaccctgaagtaggaaccagatgncggatacangtncactttagctacccccaagtgctatgggcccngagcgaggagagtagcactcttgtgcgggatatnganancacngagganggtggacaanggacccctatctgaggggggcatcca

SEQ ID NO: 501592 - DNA, 150 bp, Homo sapiens
cgagtgagtcaatgaatacgctgacaacacacagtacaacattcacagagtaatcctgcattcccacattcatagggaaggattctctaaaaacaatatgagtgggcgtttgtctggtgtgggttgcccagccagagctctggcaggcac

SEQ ID NO: 501593 - DNA, 461 bp, Homo sapiens
  misc_feature (27)..(27): n is a, c, g, or t
  misc_feature (65)..(65): n is a, c, g, or t
  misc_feature (439)..(440): n is a, c, g, or t
  misc_feature (442)..(442): n is a, c, g, or t
  misc_feature (445)..(445): n is a, c, g, or t
  misc_feature (447)..(447): n is a, c, g, or t
ctccagctcctccccagaagcaagtancttcagcctctctccaatctacttgctcctttcccaanaccccaagcaatatagacaagttctatttcttttgtttaaaaaagaaaaaaaaaaagacttcttcaatcccaccccgtctctgttgctgcggcctcctgccccaccccagcccaccaaggtggctgcgaccctggagtctccagctcctcccttcctatggcctttagcctgctgcaaccacatccctccttgatgtgtcactcgaccgccagtgtggcaaaactctctaacctctgcccatgtcgtggtgaagaaaaaggctctgccagtcaagctgcctggatctccttcagctccactgctcaatcactgtattactttggcccgtaacctaacttatctgtgtcttggctaacttgtctgtaaagcattnnanttnancttttatgcacact

SEQ ID NO: 501594 - DNA, 813 bp, Homo sapiens
ttcacatggatcgagcctgcttattcaggtggtccacaattagtgaaaatctgttggcaaccactggttatcctggcaaaatggcaagccagtttcaaattcatcatttaggacaccctcagcccatcctcatgggttctgtagccgtggatctggactgtcctggcatcgaactctccctctgtgtgtaattggggggagaccaaaaggttggtggttggggagagtagaagtatagggtgtctgtggtcaccataaggatccacaaacttggtatagaagtacatatgggaagaattctatagtacatatttggaagaatttttatatcaaatatacggtatactttagaaaatgtctcagtgtgctttattaaataaaatgtggatggttggaaaaattatttttctactctgtcctctgtgtgtgtatatatatatattttaaatcttacaaaatcatatggatcagcagtcactccagagaagagatgatacggaaaaataatgctttgagtttatcaaaaaaggagttattcgaagtgtatcgtgtttctatacttgggtatatgctgctttgctaaattctcagggacacatttatcaaaagagaaaaaaggcaggtacaaatgctcaacactgtaatcccaaaaatgtggaggtgaagggagtggatcacttgaggtgaggagttaagacaactggcaaattggggaacgtattttataaaagataaagataaaatttggcaggtggtggaaatgggggaaaaactgactcggagagagttcgtgaggcaagcgatctattgatg

SEQ ID NO: 501595 - DNA, 181 bp, Homo sapiens
cgcttccctcaggtttagataatcgtgtcgcacggccacagaacaatctgctggcatagcctttgacctgtttggctagctgaactagcacgctcagagcccagctctctagagttcaagtatccgacagttccccactgctcccaggagctgttacctctggcactctgtacccatcatt

SEQ ID NO: 501596 - DNA, 1115 bp, Homo sapiens
ggtagtaggtgatcgtggccttccttgggatccctgtttcccccatttgattcccttttcacccagtaaaacccatgcattttctcacgtctttaaagcatctgatgagcgtaaagtataagtggccatgggatggacaagaagcacatgtgtactcgtgaagtcctgtgacattgtgggttagtgcagcatgggagctccagaagtgacattctttcaggaatgccagtaggatgcttattagcaaaagatgcgtgcccatcttcgatagatactgttgatacacagttctgaatcagaaggcatgacatgatggagacccaagaaagccagagatctcatagtgtagcgtcagtgctaggagataccagtggagatgatctctggctcgagtgcaaacccatacccgggctcctgagagattcaaagcagtttctacctagcattgcagcatctaggcgtgccgcgagtaggcagggcatgaacgcgggcaacccccggtacacaccaatggccacgtgggctacagtggtaaggcgctacacgggacttggagcctacgaagaccatccatggaggctaacaaaagacagaatccgaagacaatgacgtataggacgcatccaccaagaggtggccaccggagaaatcgagcacgagcgattgcagacgtggggcaaacaacccccagggcgttaccacaaagagaacaccactgagaacacgtgaaaccaagtcacgagaaagtaacaaggggatgagaccacatggacaccgggaaggaaaacccgggagaaactggacagagacccagagcacaaaagaccgaaaggcatgccgccgcaacagccgaaaaacaggacggacaactagcacaatccaaacagacacggaagaagaccaacaaagagacagagagaaaccacaccggtaccagagagggaggaggggacaaaaccgagaagaagaaagagaaggcgaagaagagcatgagagaaaggaggaagcggggcgagcccaggacgaggaggcgaggaaagaaaaacaggaggggacagaaagggcggctgaggaccaggagaagacccggagcgagcgagcgagagcgacgggga

SEQ ID NO: 501597 - DNA, 227 bp, Homo sapiens
tttctgtgcccccgaaggttctatctccccgtcagcaccgaggcctggttcagtgagggagcggagcatgcattctccaggcgctgtggttgcccctggacttgtgcgtctgctgctccggggtggagctggggtgtgtgatgcacgtcctcgtgggggccgggccgtcctccagccccgtgtgctccctggccagcccccattgtcgctgacgggctagtcggggt

SEQ ID NO: 501598 - DNA, 932 bp, Homo sapiens
tgtagtctcgtgccgccggtgggcgtccttgtggacccttgttcaaaatggggcgcgtgtttcccttttccactgggtgtctagagccgcagtgtggcgaggttgcgaatattcccgggccccagattgcgtgtggcgggagcccattttcccggcccgtgtgggcgctccccctgcggattggaggcgttcctcggtgagccttcttcgccgaggcttttcaacgcccgtctcaagccacaggcgggtccacaggcttcagcccgcgccaggctcctctggacggtctctcgcaacaatatcccccgcaaatatcggagggggcgaaggcagaaacacccaaggggaggctacaaagctcgtcgagccaggaacactagcatggcgacagggtctgaaagccaccaccgtgccgtccacggccaccgattgggggacgcctcttgaagagggcaagattacccctccccgtctcccccacagcaatccggttggacagagggcccccacgcgcccatggaggcaagacctgcccaaagccaaccgccagtacgtgcgcgggcaagcaatcataatcacgatttctcgaggggccccccctgtcataaatggggaactccccttccttcactcaagatttggcaggcttccccaaaatgtattatcgctgcatctctcaccagtagaatctttgaccacacaggcagttgactaccaaaaaacgctcgttttccatccaccagcacacagcagcagctaccatctctgacaaatcctcccaataacagttcatacccaactccccccaccccccttattgtaaagactcactcaggaccgccccattcttttttcataagaggaagtttcccacacttttccgccagagaataacacagcaaaacaaaacataccttccgcccaacataaca

SEQ ID NO: 501599 - DNA, 421 bp, Homo sapiens
actcctcaaatcaccgggcgctgacatttgggatttttgccttcctggcgcaccccacccccacatgcacactcacgtgcatggcgtcggcagaatgtgggtgctgcgaaggtgcccccacttctgtgtctcccacgcagccccgggaacctgggcatcggcaggatgtgggtgctgcggaggtgcccccacttctgtgtctcccacgcagccccgggaacttgggccccacaggagccaggagttgcagcacaggaccaagaagcttgaccttttctccccaactgataaatcgccagtcctttggagcaacagtgtcctctacataaaggagcagttagactaatttaaaacagtattgacctttccttcctgcccttttcattttgactaaattacagggtgcggctctgcaaaaaaa

SEQ ID NO: 501600 - DNA, 490 bp, Homo sapiens
  misc_feature (34)..(34): n is a, c, g, or t
tttgtcgcacaagtcacccatttcaagcgctggnaggctgcgttctcatgtggcctggacacccccaggttgaaaaacccccctcctttccctggccgggagggcaatttaaagggtttcggaggggtatcccccccttttacctgacccactcctcaggtttggatttaacggggtggccccagggttgttaaaaccggaaaacccccgggggccccccttgcagggtcccccccttgggttccttcctttttgcaaagacctttaacaaccggccccccaattttgcccctctccccttgggggtccgctttcaaaaatttttgggagggttcccctaggggccccccggggttttcccccccccccccccgttttcagggggtaagcccccggacccccccaaggtttttttggggtcccccccccccccctggtccgtttgcccctttccctggttttgggtcctttaaatttcctttgggtttca

SEQ ID NO: 501601 - DNA, 193 bp, Homo sapiens
ggggtgacccagggggctgttaatttttcccctttggtttttttccccttttggggggggggtttaagggtttaaccggggttttcccccccccccccctttttttttttccccccccccccccccccccgggggggttggggttttttttttttttttttcctttcccccccgggggggggggccattccca

SEQ ID NO: 501602 - DNA, 817 bp, Homo sapiens
  misc_feature (1)..(1): n is a, c, g, or t
  misc_feature (77)..(77): n is a, c, g, or t
  misc_feature (81)..(81): n is a, c, g, or t
  misc_feature (176)..(176): n is a, c, g, or t
  misc_feature (180)..(180): n is a, c, g, or t
  misc_feature (209)..(209): n is a, c, g, or t
  misc_feature (238)..(238): n is a, c, g, or t
  misc_feature (262)..(262): n is a, c, g, or t
  misc_feature (265)..(268): n is a, c, g, or t
  misc_feature (279)..(281): n is a, c, g, or t
  misc_feature (306)..(306): n is a, c, g, or t
  misc_feature (313)..(313): n is a, c, g, or t
  misc_feature (318)..(318): n is a, c, g, or t
  misc_feature (323)..(323): n is a, c, g, or t
  misc_feature (341)..(341): n is a, c, g, or t
  misc_feature (351)..(351): n is a, c, g, or t
  misc_feature (353)..(353): n is a, c, g, or t
  misc_feature (356)..(356): n is a, c, g, or t
  misc_feature (363)..(363): n is a, c, g, or t
  misc_feature (379)..(379): n is a, c, g, or t
  misc_feature (382)..(382): n is a, c, g, or t
  misc_feature (388)..(388): n is a, c, g, or t
  misc_feature (392)..(392): n is a, c, g, or t
  misc_feature (403)..(403): n is a, c, g, or t
  misc_feature (414)..(415): n is a, c, g, or t
  misc_feature (425)..(425): n is a, c, g, or t
  misc_feature (430)..(430): n is a, c, g, or t
  misc_feature (447)..(448): n is a, c, g, or t
  misc_feature (454)..(454): n is a, c, g, or t
  misc_feature (462)..(462): n is a, c, g, or t
  misc_feature (476)..(476): n is a, c, g, or t
  misc_feature (502)..(502): n is a, c, g, or t
  misc_feature (505)..(505): n is a, c, g, or t
  misc_feature (507)..(507): n is a, c, g, or t
  misc_feature (517)..(517): n is a, c, g, or t
  misc_feature (519)..(519): n is a, c, g, or t
  misc_feature (522)..(522): n is a, c, g, or t
  misc_feature (524)..(525): n is a, c, g, or t
  misc_feature (531)..(531): n is a, c, g, or t
  misc_feature (542)..(543): n is a, c, g, or t
  misc_feature (557)..(557): n is a, c, g, or t
  misc_feature (561)..(561): n is a, c, g, or t
  misc_feature (574)..(574): n is a, c, g, or t
  misc_feature (584)..(584): n is a, c, g, or t
  misc_feature (600)..(600): n is a, c, g, or t
  misc_feature (668)..(668): n is a, c, g, or t
  misc_feature (670)..(670): n is a, c, g, or t
  misc_feature (676)..(676): n is a, c, g, or t
  misc_feature (702)..(702): n is a, c, g, or t
  misc_feature (718)..(718): n is a, c, g, or t
  misc_feature (720)..(720): n is a, c, g, or t
  misc_feature (802)..(802): n is a, c, g, or t
ngtcagtctataattccttaatcaaagtcagcaatttatggacagcttcagcatctacagttgacctttcactagcnaggnaaacttcccgaaataatcgtagtgactgattcatcttctcaaattctcttgcttttctatgtcccttttgaataacttcctctgggagattagcnagcnttgctgcattaaagccatagcttttaggncaagctcccttaatgaatttatagaggcnacgtaatagtctccgggcgtggcncgnnnngggtgcgtttnnnggcatgcgtgcgataggtgctaggngggcggngacantttgngaatgatcttctactaangagtggtagngngtngaaaatnatgtgggggattttanggngtgggngggngctttgggggnggggttggggnnggggggggcngcggnggggggggtggctcggnngagggnagccacgngcggcagagagtgngcggtggcgtgcgtgagtgtgcgggnggngncacttaattnancanannaatgtnctttcacctgnnattattctgtctgngcgnaccaagtctagtnaacactctancaattgcgcgcgagcntgcgcacttcagcggcgcgcgcgctgacaaccccatctgggccatttacagctaaataagccagcctntnctcatnagcgttgaacttgccccccatatttngtccagtaacaagcananaataggctttgccattttcctgctcctcttcctcacagcctattagaatgtcattaggaataaaatcatctccaaaaaaagncttcgtaatgcaagg

SEQ ID NO: 501603 - DNA, 378 bp, Homo sapiens
gttctcacgggaccagctaggggtccaggcttcagtcagttaaataagagtggtccatcgtcctaaagacacctctcctttacaaagacttgtgatgctcttggggctctctgtgccaagccccaccttttcttggtcatggtacccttacagcgttgatggctacagctcgaaggggggctttcgtttccccctgtgcgttcagttttttcagtatctacctttttcccgtgcccatttggctatttacttagtgttattttttgtgtgcctattgtatggtgggtgggtgctgggctttccctgccacttccaccccttttttgacttgtccttccgtacttattaaagtgcgcttgggagtgttttaaaaaaaaa

SEQ ID NO: 501604 - DNA, 377 bp, Homo sapiens
  misc_feature (6)..(6): n is a, c, g, or t
gcaacnaggccgagatttgggtgggcctcaacgacatggcggccgagggcccctgggtggacatgaccggggcccgcattgccttcaaaaaatgggaggcttagatccccgcgcaacccgatggcggcaaaacccaaaactgggcggtcctgtcaggggcggccaacggcaagtggtttgacaagcgctgccccgatcaactgccctacatttgccagtttggggttgtgtaaccggcggggcgggggccgtggggggcctggaggagggcaggaaccccgggaggccgggaggagggggggggcctttcagcccccctcctttccgggggcttggagcctctttttgcaaataaagttggggcagctttgcggaga

SEQ ID NO: 501605 - DNA, 812 bp, Homo sapiens
atggtagttattctgccttccagtttgcttgatatatttgttgagtatgaagattcttgagcttatatttgaatgggttctagctgaaaaaggaatgatatatcttgaagacatcgatatacatttatttaactctctatgattctacatatgtataaaatgaggaaatgccacaaatatgtatggtggatcaaagtcacttgagcacagaggtgatatggttgcatccagcgcctattgtcgtatggatgctttcatgatctccctctaagcacattctcaatagctttagcaacagttatcaccagctttgtaactttgcatagacgaaaagtttcacgctgtattgaatcaggtaatgccttcaattgaatgtagatactatcacataagatatatgaggaaagtgtgtccggctgcactaacgtagagtccggagggacagatcagtcataggggcttgcctgtatccagtagtctcaggccctgtgttccccggtgggtactctggtgacttgtcacgtctattcgctatgtactccatgtgattttgatttctcctgcaggactgagttagcaaggtatctggaattcttatagccaacacataggcaaacatccataaatatagagtctcatggacctgccctaaatcatccaattttctttgccaattttgcattgttttctccaggaccaaaatcgtgcgtcaaatacataatttttgatggtgaaaagcacattgttacgagtgcagcccctaagggtggtttcgcacgctggaagctaataaagtgctttccgaagaatga

SEQ ID NO: 501606 - DNA, 129 bp, Homo sapiens
  misc_feature (18)..(18): n is a, c, g, or t
  misc_feature (70)..(70): n is a, c, g, or t
  misc_feature (86)..(86): n is a, c, g, or t
acctacaacgggaccctngaagaagtcagagctatacaggaaatcaagccgggagaggaggtttttaccnactatattgatctccngtacccaacggaagatagaaatgaccggttaagagattcttat

SEQ ID NO: 501607 - DNA, 229 bp, Homo sapiens
cagacgctgactcttcccccctcgtggcttccctgggctactccctttctggtgaccttagaattccaggtttctcgagaagctcccctgtacagacccacccagcttggatacgactaagtgcagacctccctggtaggagccttgggcaaactgtctggaagccctaggcagccctctaggtttcctagtggccagcccctagtgagtagtggccaggccctagccc

SEQ ID NO: 501608 - DNA, 1306 bp, Homo sapiens
  misc_feature (461)..(461): n is a, c, g, or t
tcacgttaaaaaaagttttatttagggagctccagggaaatgtgcggggggaaaggagagggtgcaggtgctcattgtgccgcccttcttccttcccaccatagtgtgcatttaaataggtggagtgggagcattctgacagaaggtgagactcaggcaggtgggtgtgttcgtgcaccccaacagcgcatgtgttgtggctgtggaacagccaaagtctcatatcgtgcgtgaggtttataggcaagttctcaggttgtgcccatgtgaattttgtgcacaaacctctcctctcacgagcgtggacggggtgacgccgagggttctcaagagtctcctctctctcctctctcctcacacgcgggtgagacccaccgtggtgacacccacatgtggaaaaagctcgcgtgagagcacacgggcataagatctcaagacacagagctctctctctgtggaangtgtgtgtgacaagactctcctcttctcatgtgggaccccggatgtggggtaaccaagggtctctttgggcaacacgccttggcctgggaatgttctgggtcccggcccaaataccacacgggtatccaaccagggggacattctcgccatgtggacaggcgccatggcgtggggggtccatatccaggggacagaaggtgtgagaccacaggctctgggggtgtggtggcgcctaggggtctggcgcccctgggttctcacaaaggcagaaaggcgcccagaagcgggaatggagagtctcaaattctctacaattggtggtaacgtacagctctggtggcccccatctataaggggcggggagacgaatcgacacgactgtgggcacgcctagggggacggagcgccaaacggggatccaagcccccagaacgccttgtaatggtgcgcccagcgttggcaggcggggcatattccaaaggcaataggagaaagccggaagccccaaaggccccttgaaccaagcgtggggaaatccccagagggcgcaggtacccacggaaggggggcgagacaaaaccggtctcccgggaaactctctggtcacccaggcaggggataacgcgaaaagggggcacgcccacacaagggctcaacaacttgccgcagaagaaagggggccacaaacccggggggctgcgttacagtgccgccgggagaactcgtaaaagccccgcacgggccccggggggcagcaaacacaaggcagggcggcaaaaccccaggcgcagaacacgccacatctgctaagcgccacagcagagcaacaaggacggagaaacag

SEQ ID NO: 501609 - DNA, 1279 bp, Homo sapiens
aagaaagtcctgggcccctccagtgaacgtgtcccctttgctgtcacttccggaagggtggtcgtccccagtgtcccgcgatggtcccccagagctgctgcttgagtcccagtgtgaccactattcaggtgatggcttcgagctctgaggaagatgcctccatccccagatgataaagagaaccaggccccaaaacggagctggcccagatctgcgcttcgagatcagcagtgaggatgggcttcagcgtcgaggcagagagcttggagcggggcgtggccgaactctgatcgcgaaagtgcacgaggcccgagggcatgcccgactcagacatctctccttaagtggaatgcgtggggcgagacatcctgggcagtccaccatgatgctgatcagtcttcctggccgagcagctccccggaggcccagcgttgccagaacatataagattccgatcaccagcagacacgggacgagggccacggacgcgagccgcacccatgagatcccacataggggactgcatcgggcagagcgtactactctccgagacagtgcacctttgacatggtacacacattccctggcactccacagccaccaggggtggcacccctgagcgcgagccaacctgtgaatgcaggaacgacgcatgacccgtagcaccaccagtgaaccaccaagaccgtgacaccaggcgcatgtgacgctgcccgactggacacaatgccgggaacgggccacccactaccgagcgacaggtcacaaacggagcccggcggcgatggcaaacgggaccaaggccaacccacgcgcacgacggcaccgtcacctgcgcccgcgccaacaccccagcaccacaggccgcgcacacactggaggccgctagaaggcgacaccacgcacgtacatggtaccatcgcgacgcccccggcgagcctcagcgccgagcgccccccacccgggaggcgagccaacccggagcaaatacaaaacgccagcagaggagcaccaacccaggacccccggccagaccgacgcacccacgccaaagacagcacagacacccaccaaacagcccgcgggccacgcccactcaccagccacagccgcagaaacgcccacgctaagaagcacccacagcaacacagcgcaaacgagcgcgacgaccacgacaccacgcggaccacacacgaggcgagtacacacaccagacgggacgacaccccaacacacagaggaccacaccacagacgccccactcgagaacgacgccacc

SEQ ID NO: 501610 - DNA, 160 bp, Homo sapiens
gtgcagggttcagaaagttaaatatagaattaccatataatagactgggagaggtggctcacacctagtaatgccagcatttttgggagaggcaggcagatcacatgaggtcaggagtttgagacaagcctggccaacatggtaaaaccccatctctact

SEQ ID NO: 501611 - DNA, 330 bp, Homo sapiens
ctctctgggtacgaatctctttctgtctcccaggtggagtgcagctggcctgatctcagctcactgcaacctctgcctcccgggttcaagcgattctcatgcctcagcctcctgagtagttgggattacaggtgcgcaccaccattcccagctaatttttgtatttttagtagagaccgggtttcactgtattgaccaggatggtcttgatctcctgaccgtgtgagccaccacacctggtcacgttttctttaaacagtattaagaagtacagattatatagaggcagagaagagagcttcaaatattgtcgtgtttacctaactttag

SEQ ID NO: 501612 - DNA, 612 bp, Homo sapiens
  misc_feature (2)..(2): n is a, c, g, or t
cnttttcggtcagtgaggcgcgggcgccggttgtttttcctcttgtttacgcctcacccccgctctgtgtgttttaatccacccccccctttggggggggaaagggggttcctccccgccccccctgggtgttgggggggctgggtttttcttttgcaaagggcccttatttttttttgtcccctgtggcccccattggggggggagaaaccgtcccccctttttttttccccaccccccctcccccccaaggccggggtttcctccctttttttttttttttttaaaaaaaaacccggggggggggggggggggtttttccttttttccccccccttttgggggcccggggggggggtttcccgggggtgggggtttgcccccttttgggtttcccgggggaccccccttttttttttaaaaaacccaaaattttttgggggggggggggcgggcctttttttcccccttttttgggggggggggggggggaagggggtcccccccgggggggggggtttccttttcccccgtttttggggtccccccccccccggggggggggggggggcccccctttttcaaaatttatttttttaattttaaaaagga

SEQ ID NO: 501613 - DNA, 546 bp, Homo sapiens
  misc_feature (51)..(51): n is a, c, g, or t
  misc_feature (73)..(73): n is a, c, g, or t
ccaggtacaaaatcccctgggacaaaacagaactttcataactggctgtanagttattgtttttgccttttgnaagcttccaccttgtgacgggaagagcactgtcagcccaacacagaaactctgccgcctggagtcacgtggatccagatgcgaagggactccaacgtcatgctaaggagtttgggctaagaatttgtacagccatattacagatttggaaaatgatgtgaagagaagctaagggatttgccactgccactcagctgccaaggatcagagacattacttctacttctcaacgtccatcctccaaccattgtccagtgattcaggcagaattccctcctgctcaggaggtagccatcctgtgaccctggaagaaaccagcccaaggaaggtgctaacctacagaagaaggacatggccagggtaatcacatagacccggagttgaagccctgactgcaccacacccgaagcctccccacctttcaacctctcggtgatggtgaaccaataaactctttttattgttcaagccaaa

SEQ ID NO: 501614 - DNA, 492 bp, Homo sapiens
  misc_feature (51)..(51): n is a, c, g, or t
  misc_feature (73)..(73): n is a, c, g, or t
ccaggtacaaaatcccctgggacaaaacagaactttcataactggctgtanagttattgtttttgccttttgnaagcttccaccttgtgacgggaagagcactgtcagcccaacacagaaactctgccgcctggagtcacgtggatccagatgcgaagggactccaacgtcatgctaaggagtttgggctaagaatttgtacagccatattacagatttggatcagagacattacttctacttctcaacgtccatcctccaaccattgtccagtgattcaggcagaattccctcctgctcaggaggtagccatcctgtgaccctggaagaaaccagcccaaggaaggtgctaacctacagaagaaggacatggccagggtaatcacatagacccggagttgaagccctgactgcaccacacccgaagcctccccacctttcaacctctcggtgatggtgaaccaataaactctttttattgttcaagccaaa

SEQ ID NO: 501615 - DNA, 274 bp, Homo sapiens
tctaaaagtaccgctgacagcagtccaagtagcttgatacaaatttcctctcctggcttaatatcctccagagcagtgacatgcaaagaggacagttgtgttctggaaaggaggtctctgcattgggcacaccactgtggttgccgcagttctgaagcacaaagaggccagatccttcacagttcagaaactctccagttgctgcctacggatgtccttgtctagctggtcaatggaggcgtcaagctgctcacggaccgtgagtgcttcaact

SEQ ID NO: 501616 - DNA, 758 bp, Homo sapiens
agcggagtaacgtcgcggcgggttgcgggtaggactggacgccagagcagccgcgcagcgcctgaaccgctgcgggccgcgcggccgacccgttcccaccctcgcctctgctgtctccagcctcgcttctccgactttcctgctcctctgcatgccttcgtttctggtcctcggacgtcctcgccgggccgaaccagacggagtcccacgaggcccgccaagaaagccgcatttccgcgtggcccgcagacgccgcgacttcggccacagatttctcccatctgagctagtcatcccaagacggacgcatcctcgacccgcgggaagaccacggcatgcgaccgcgaacgccacgatcctcatccaggagccgacagcgagcgcccggcggcacacgaccccgagacacacaccccggcggctctcggacccagcgacgcctgccattacagccagaccgccgatcgctcctcgacccggctgcacacgacgaacgccaacgccacacatcctgcaaagcgagaggaacccggaacgagacccaaagaagccagcacgcacagcatgggccgacaggcacagcagatgaactggccctaccagcgatacacagggaagcatcgagactccagagatgacaaccataaaggaacgtggaaatggatggtggggcgacagacggaaaggggggagaaaaataccaagggaaagtaattgatcatatagggtaaaatcggttgaaaaatggcaaatgaaag

SEQ ID NO: 501617 - DNA, 246 bp, Homo sapiens
aaatctaactggaatacagctatatgcatggtaaatattgagaagctcagttagaagtactattgaatggactgtttaaggtattccacttaccacttaccatggccgtgctgatgttgagtttgctccctgtcattgtagccacaagtgatagaggcagggaataggacaatgacagggacatgaagcaccacccagagtcctcaagtgacattaatagtggttgggaatagctggtggaagaga

SEQ ID NO: 501618 - DNA, 229 bp, Homo sapiens
acacgctcaaggagcggtaccagcaagatcggggacaccaatacgcgcccgcccatcgagggtgctctgcgagaacttccccgaggagcttgccacgtccctaacgctatgtgcggcgcctggacttcttcgagaggcccgactattactacctgcggaagctcttcaccgacctcttcgaccgcggtggctccgtgtacgactataagtacgactgggccgggaagcc

SEQ ID NO: 501619 - DNA, 165 bp, Homo sapiens
agcccggtacactgcactgacgtcacagaggagctctatagagtgttaccacccaagagctggtgcaggcctttaaccatgctcctgcaacattagaagcagacagaggtgggaaagttccacataggtaagataggcaacgtctctggggaatatactgatact

SEQ ID NO: 501620 - DNA, 623 bp, Homo sapiens
  misc_feature (1)..(1): n is a, c, g, or t
  misc_feature (238)..(238): n is a, c, g, or t
  misc_feature (245)..(245): n is a, c, g, or t
  misc_feature (254)..(254): n is a, c, g, or t
  misc_feature (272)..(273): n is a, c, g, or t
  misc_feature (279)..(279): n is a, c, g, or t
  misc_feature (288)..(288): n is a, c, g, or t
  misc_feature (290)..(290): n is a, c, g, or t
  misc_feature (293)..(293): n is a, c, g, or t
  misc_feature (316)..(316): n is a, c, g, or t
  misc_feature (324)..(325): n is a, c, g, or t
  misc_feature (328)..(328): n is a, c, g, or t
  misc_feature (359)..(359): n is a, c, g, or t
  misc_feature (373)..(373): n is a, c, g, or t
  misc_feature (382)..(382): n is a, c, g, or t
  misc_feature (384)..(384): n is a, c, g, or t
  misc_feature (390)..(390): n is a, c, g, or t
  misc_feature (393)..(393): n is a, c, g, or t
  misc_feature (398)..(398): n is a, c, g, or t
  misc_feature (424)..(424): n is a, c, g, or t
  misc_feature (431)..(431): n is a, c, g, or t
  misc_feature (439)..(439): n is a, c, g, or t
  misc_feature (447)..(447): n is a, c, g, or t
  misc_feature (459)..(459): n is a, c, g, or t
  misc_feature (466)..(466): n is a, c, g, or t
  misc_feature (471)..(471): n is a, c, g, or t
  misc_feature (478)..(478): n is a, c, g, or t
  misc_feature (480)..(481): n is a, c, g, or t
  misc_feature (486)..(486): n is a, c, g, or t
  misc_feature (513)..(513): n is a, c, g, or t
  misc_feature (515)..(516): n is a, c, g, or t
  misc_feature (518)..(518): n is a, c, g, or t
  misc_feature (528)..(528): n is a, c, g, or t
  misc_feature (541)..(541): n is a, c, g, or t
  misc_feature (598)..(598): n is a, c, g, or t
ngctgacaggagtggggcagggttcatggacctttacctcagagcagcttaccctgagctatacccacatctcaaggatttgggggcgtctagatctcatctaagggagacacaacttttctggtcctcagatggaaagctgggggaaggtaccagtatttacccttccataaaaactttggaggtctttaggaggatacccctcaggagggctaggagaggaatgacaaatacagangatagangtcccgtgncctggttgtaccctcccnnagggtntgggttatncnggnctgccactcccgctgccacaccnccatctgnntgntcgatggctttggttcgaagtagatgccccncagtgcatttttcntcacgagtntnttttcntgnctganatagaccccaaagatgcccagctctnaaatgcnctggaccnctcgggcngggctgccaggncgtagcnggccnttctcananngctcnggttcgatcttctccatgaggatgtcngnngncctctcgctnactttcgcttcangctttttgcagggcgcttagcgcatttgcgctgcgcgcgcaataatagggtttgttnaggctggcagggctgctgctgcttt

SEQ ID NO: 501621 - DNA, 417 bp, Homo sapiens
  misc_feature (15)..(15): n is a, c, g, or t
  misc_feature (23)..(23): n is a, c, g, or t
  misc_feature (153)..(153): n is a, c, g, or t
  misc_feature (186)..(186): n is a, c, g, or t
gataataaatgcccnatgttacnggccatatgtatttattatgcccgtatttttaaacccattattttagagtatacctgccttcctgccttataaagaaaaagttaaactgtaaaacagccctcagatgggtccctttagccaggtattccnagaagaagagattatcatagaagatgactgccnctgtgtgtgttattgccccctgaataccctcccagtgggatgagataaggaggtgaaagacagtgactttgatgatcctgacactgtgtaggtctaggctgatgtatgtgattgtgtcttagattttaacaaaaaagtttaaaaactaaaataaataattttgaaaatggaaaaaacttatagattataaggatacaaggatataaataaaataatttgtagagctgtgta

SEQ ID NO: 501622 - DNA, 103 bp, Homo sapiens
gcttacaacttgccccggcgttgttgctgttgctgcaacggcaaaaactcaatcgctgggcggtgggtgtactggtcaacagcttgtggttgctggccttgct

SEQ ID NO: 501623 - DNA, 498 bp, Homo sapiens
tactggcatatgctaggaaaagcaatgttgtaacacccaaatcacaataatgcttttattttccacatcaagattaatttatatgttagttttagtacaaggtactaaaatgtatacttcttggcctaatagctaaggtatacataagcttcaccatacatcttggaggcacctgtctggtcctatgtcattgttataaatgtagagattttaggaaactattttattcaacctgggacatctatactgtgggagttagcactgacctgatgtcttatttaaaagtaatgtatattacctttacatatattccttatatatttaaacgtatttccatgttatccagcttaaaatcacatggtggttaagagcatgagttctgagtcagatctggactgaaatcctgatgctaccacatgggttaggttgtgattgtggtcaagtcacttaacttcttcatgggccaggtggctcatttttaaaagagaaaaccttcat

SEQ ID NO: 501624 - DNA, 896 bp, Homo sapiens
aagaagaaaaacactacttagtgtccttatacctgttgtataactgtgactaatgtttgatgacttttctttacactgtctggttaatttcgtttttaaactacggcgtgtccttccactgtggccgtcgctccaattggttatcctgttccgcatcgaggtaccccttaacctcgtgatggtcgcgacctacaattattggtgttgccctctgcacatttctttttccccccccgatattcttgccgtttcgatactcaaccctcccgtgcgtttccagcctgattgaacaccctaagttttgtgtgctgtgtttccgtaaaaatactgggcctaaatcatgttgccttcgtagcattaccccccccgtcttctttgtgaaacagtaaccgcccccccccccctcttgggtgcccatgagcacaccaatgccgttttgcctgaaagaccatccccctccccacaatatagtagctagtacccccgttaaacatctctccccacttcgattatagtttgcgtaaaaagcttcccccaccaaacaggtgtgctcgtgaataaccagaacaaacatctttatcgtgttctaccataagttcgtagacgggcgtcttacccacctccttcagtgcctcgatactccgaggggtattttccccgcacccctcccgcccaacaactgaattatcgatctttaacatggtaatttctataggaggacttcttgacccccacacgacgtgggtgtgacccacaacaaaggaccctcactttgggtcttgaactggaaacggagcgacgagggtacggtgatctggcagaattctcaaggctaattcaaagccccctcaccaggtcaaaaaaaacattcttttctttttagatcaaacaaaaca

SEQ ID NO: 501625 - DNA, 313 bp, Homo sapiens
  misc_feature (33)..(33): n is a, c, g, or t
gcaggaaagtggaaacccccacggggggccccngggtttggttttttttttaaaaattgggggccccccgggggggggtagggttggggggttctaaaaggggttccccccccccccccccaaaaaaacccggggggttaaaaaaagccctttttttccttttgggggaaaacccttgggggggggggaaaatttttaaaaaccatggggcaggggggggggcctcatttttttccccttgggggatggggggggggggccctttcccttttttttaaaaaggtgttgttaaaaaaaaaaagggtccctggga

SEQ ID NO: 501626 - DNA, 1748 bp, Homo sapiens
ggagagaactagtctcgagttttttttttttaggatttaacaaaactgaggtttttactccagtttctacagatgacaaatccaaagtcaggggcatagggcagggcaccaatgccgagtgtgcacagaaatcataggacagaaagacaccccacagggtggcacagaaagtggaggtgctcgagctagagatcccatagagggaaagtgcccacttcttcacagccaaccctcccgtggacaagatcgcgcacaatgacggcacacacaaactggctgggcaccagcaacaacgcgaacgagggacacatcagactggagggtctcacaggggcccaacgggcgccgtggagacaggacggcgtgccctatcaaacggaaaagaaccaaccataattctagaacgcgtatcatcacctgtggcacaacgacaagagttaagacaggccgagagtgacccaacaccatatcagataacatgtgccggacccataaagtgacacacgagcacacaccagcgcgatagcagacgagacagacccgcaattatgccaacgtgtgagagcgacaaatactacacaacacacatgagacgacagcgcagcgcaccggcacaaattcaccggggggcggcacaacacgcccctgcgaccgacgaaacacacactagaggcatacaaaaatcacacatggccacaactcttcccgcacgaggcggagcccacaaacaccaccaaacgtgtgcccaaagggggagggcgacaccaccaataacaccgggacccaatgccagcgccacgccccgtgaacaccacgaacaggcgccagcgggccacacgtccccaacccacagaccagatgaatccagccagcagagcaccaagaaaccagtacgccagacaccagccgaggacgcgcggctacaagaggagagaggcgaaacaaaaacccacacccagacactgagccacttaagaaccacatccgaggaggcactctacgaacaaacaccatccccacaccacacacggcgagagagaacgacaacacacagtcggccaccaacacgccacaacgccagcaacagagagagagcaacaagcagcgactactaacgcaccacaacccacagcaaagaggaacaccactcagaagcaaacacagaaagccaactcgagccacacgatcaaccagagggcgaccgcacgcgacatcacacaccacgagcacaacaccgaacacatagtacctatatacaacagaccgacactcacagagcaccacaccgccgcagagacgataccaactagactcaggaccagggagcagagcgcacgaggggaacacaacccagcacgcacatacggccgagcccgcgccaggataccaaacgtagcacaacaaagtcagcacagcgaactaggcgaaacagcgaagagaataatgatgagacggaacacaacagaacagcccagcagcagaggcgaacgacaaaacaagaagagaacgagagagacccacaaaacaccaaccagggatcaagtgaggtaaccatgtacacagacgagacctccaacggggagacagagcaagaactacgagaagaggagggtcaacaggacaccgatcagcacatatagacgcgagacagagtacaacgaagggcacgaagcacgcaagcaagacacaaaacgtcaacaaagacgaggcacagcgaaccaagagcagacaggcctgcccacgaacac

SEQ ID NO: 501627 - DNA, 729 bp, Homo sapiens
  misc_feature (44)..(45): n is a, c, g, or t
  misc_feature (60)..(60): n is a, c, g, or t
  misc_feature (78)..(78): n is a, c, g, or t
  misc_feature (111)..(111): n is a, c, g, or t
  misc_feature (558)..(558): n is a, c, g, or t
  misc_feature (608)..(608): n is a, c, g, or t
  misc_feature (617)..(617): n is a, c, g, or t
  misc_feature (717)..(717): n is a, c, g, or t
ctagaggatcccggaggcagactggtaacaggcagaagggaacnnaggtggaggagtggngggcagaggcactacaancacaacttcagtacacttctttccagcgttgtntcagaagtgccatagctcagctggactccattttcaatctgattatgatcatagtgagttccccatatgttacattgtcctaccaggacagcctcctcactgcctgctaagattaaaagtaaataaatagactaactgaagcatgaaggatttcggctagacataaagaactatttcctgttgttaagcaggagggacaagttgccaagaaagtttgtgaaatcctcttctcaaaggacttgaaaaggagaaaagttttcccagtggtctgaggttttagatgccatgttcactagaaggagtgggttttctcctctccaaaccaattaattcctgagatatcctggtctgcctgcagcaaacagagggttaacagcatcactacatcatttgctattggcaaaattttcgaagatggtgtgcctctattgcccgcctcagtttatnttaggtctataatttcttttcatttggagtaagtagtcggcaattgaaanaggtgattncttctcataatgtgtgcattgagttgtgtgggccggtggctgttgagtatgctttctccatgttgttgctggtgttgtttttcaataaaatttatattcntttttatccaaa

SEQ ID NO: 501628 - DNA, 348 bp, Homo sapiens
  misc_feature (90)..(90): n is a, c, g, or t
tatcctctgtccatcctgtgtgatcttctgtgcacagaggcagctctgctccctctggaacattagcccagtggcagaaagctgttctcntgatcccactggggacactgcttgtgcttgtaccgtggagagcctgagtgaggacttgcctggtccagtcctcaccaggctttgccactttatgagccctggtagcataacacaatggacaggcatatgtggaggctccatagccccgcccattgcctgagaccccagagtgcctgccctgggtaacataaggcaagcacaaattccactactaccaccgcacccggtactcttttgcaagcaccacctcctggctgg

SEQ ID NO: 501629 - DNA, 198 bp, Homo sapiens
ggatttcattggattatctcgtatagatttcttcactggcgcttatttcttcagcttcctcatcatcaaaatcatcatcatcatcatcttcatcatcatcctcttcatcatcatcgtcatcatcttcatcagcagcaagttttacttatttctgtggtaccattgctaccatcctccagttgaactccaacgttcgcg

SEQ ID NO: 501630 - DNA, 133 bp, Homo sapiens
gcatcttttgcattcttcctcatccgcctccttccttgccgcagactagctcacgccggagtgccatccttccccttttttcgccggaacttcccgccagcctttattcggccagaggtccctgaaacttttg

SEQ ID NO: 501631 - DNA, 109 bp, Homo sapiens
gaggctaactctagtagtgatccccacctgcactgtaatacccctcacttcaccctcctatgtccccataacctctccattctaattctccaaccagtcgcaactatat

SEQ ID NO: 501632 - DNA, 326 bp, Homo sapiens
  misc_feature (34)..(34): n is a, c, g, or t
  misc_feature (140)..(140): n is a, c, g, or t
  misc_feature (194)..(194): n is a, c, g, or t
  misc_feature (318)..(319): n is a, c, g, or t
  misc_feature (321)..(321): n is a, c, g, or t
  misc_feature (323)..(323): n is a, c, g, or t
acgtacaatggacccaggccccttccccaagctntgtgtccccccaggctcactataacatgtaccccacagaaccctgactaagtccttgacaccgatggggacttcgatctggaggacacaatggacgtagcgcggcntgtggaggagctccctgggccggccaatggacagtcagtggatcccgcacgcanaatcgtgaccccgcgacctctccatcttcagcttcttcatcttcaccagaggaatcactcttgtggatgttttaattccatgaatcgcttctcttttgaaacaatactcataatgttaagtgtnnananact

SEQ ID NO: 501633 - DNA, 194 bp, Homo sapiens
atgctggcatctttactaatgattggcatctttactacatgcggcatctttactaatgagcggcatctttactaacccggcatctttactaatgagcggcatctttacaaaatgcggcatctttactacatgcccgtgcctctttactacatgagcggcatctttagtaatagagcggcatctttactaatgcc

SEQ ID NO: 501634 - DNA, 375 bp, Homo sapiens
tcacggtggctcacgcctgtggtcccagcactttgggaggctgaggcgggtggatcacctgaggtcaggagttcgagaccagcctggccaagatggtgaaaccccgtctctgctggaagtgcagaaattagccgggcgcggtggtgggcgcctgtggtcccatttgcttgggaggctgaggcaggagaatcgcttgggcccaggaggcggaggttgcggtgagctgacatcgtgccactgggctcaagtgaggctgatggatcaggattccataatgatgggactacaggcaagctcatgattaaatgtcctagtccatcggctcctataagaataatgtaagtgggcgggcacgggcctcagcctgtggcccgc

SEQ ID NO: 501635 - DNA, 1156 bp, Homo sapiens
gtttaagaaaacaggctggcaagttttatcaaacagcttgattgtggcccactcgttcttatcttattcccatcgctaggcatggccccggtagggtattttatccgttcagctgagcagacgtgactcatacagcaggccaggcatgccttcgactctataccatctagcttactcatctcctaagcacccgtaccacagatttagattctcttcctttctggcaactaacgctcaccggcgggctcggccacgcgccctccccactcccacacggcatggccgctgctgcaccaacactacgacttagccctgaacaccatgcgctccaccaggcgaaacaagttggcaccctctgccgctacaataacacggccagcacccgctcgctcctcaccttgcaactcccttctgccccttcacctatcagccgccccttccgtctcgcctcctcccatcttcccgcgccctacctgctcctactacctctcgacccgcggcggacacccccgctcctcttgtctccttctcctccagcgctcctcgcgcagcgccccacgccccccccactgcccctcgcaccgcaccctccccaacacggccctcactctcacccacgccccgcaatactgccacgaacgcgccgcgcatcgcgaccctccccacccccccccactccccaccacccacgccccccccgacccctactctcgcctccccgaccccccaaagcatgcctatccagccacccacccgctgacccaccaccatccccacaggctcgccaacctgccccgctcccgtccgcacgccccccacccccgcacaccccccgccccccacgcccgcgcccgcaccccacgccccacccgcggagcccacaacccccagccgtgcgccgcgtggatacgcacccctcgctcgaccgaccgcccccccactcgccgccgaacactcgccgccacgcaccaaacaacgcaccaccgcaccccacaccacgaccacccgcccacccccagacccaaggggaggaagcacggaacatgagcgcagagccacacacaccgccgccgcacacgcggccccaacacggccccacgcccccgacacccgacgcgcagcagcaccccccgaccatgaccacccaccccacccc

SEQ ID NO: 501636 - DNA, 1831 bp, Homo sapiens
atgtgttttttgtaattcccctgtgtgcccataaattttaatgggcaggtcaggaaaaaagcggggggataagggtcccttccttcccatccctctacccagaaaaacacccttccaagaggacagcagaaagccccagaagccggggtgcctcagaaggaccttgggaaggcagacaaagtgggtggataggtgattcttccgtggtccctcgaggcaggcgtggcggataggtgtggcacatcttcctgtggcgctccacagcgcggcggacatattgggagagctccaatggacgccggctggggtcacctccgggagattcttggcgcggtctcaaacatatatcagagctctcgcgcaacatatcgagcgccagagcgtgggcgcttcttcaacatacacgcgggatggaaatcaggcgccgcgggaatatatgtggcgcaccacgtgcgtgtggtctctcacaaagagggcggcgcccactcgcggattctgcgtggcacacgagtgtgtggtctcttctcacacggaggtgacagcctatctacacatgtgggccctacagcgcgtgtgtgagagctgtgtaaagggctatacaaaagcttccatcaccagaagaccacgccgccgtgacaagaggggggtgtgcgcgctacgacggcgagaagggtgctaccagagaaaagcaccgcagcttgcggggaacccgcggtgtggcaacaccaagatccggtggggagacgcgcggtgtcctctcgccgcgttggtgtgtgcccccgacgagaagacaacacgactcggcggcgaggtgtacacacaaaagacatcgttgatacgaaggactcctgcgggagactgttggggtgctggacacacacgccgaagggggtctttcatcagcagcagaagcaactccaacagatactaccgcagaggagttcaaccggatggcgctaccggggaccgcacatgtggaaacagcccttttcacaatatcaatttagggggggctttctgcgcgaccactggtggtctacccaccctaccgagggggaaaactccatcttggtgtgagagtggaaagacactctcgggggatggaccccgcgggggaacgagtgggcgaaagaatcatcgacaacgacgtaccgacaaacgatgagattgacagcgctgtgtaggcgaccactacccacaaactattgggggacccgcgccattacgcaggccaggaaacgcaggagaaatacgcccactcccccagccaaagggggggattacccatatatcccataaacgaagaggacaaagcgcgccacaaagagcatatcaaatcgccacatatacgacgagggcgctgagtcgagagacgacgtgggcgacatctaccccaagagggatccaggaccccccgtgggcccacaggagggtgctaccaggaaacaagactccgaaaggaaccgccggttggtggccaaggttccgcgagagtgaaagtcacaggcgccccacacaagacggcgtcaactagtcgaccacaacagccactgggtacccggactatacacaaacgcggggtgcgtccagaagaacgacacatcacgtcggaagccaaaaaaacagggcgtagttggtccaaagacccctagcagcggaccaaaacacgcgtcgagacgtcctccccaaggggggtggggacacccaaagaaacatagttgtgcgccgacagaaagacccgtagagaaaatcctcagtcacaggccacaataagtgagccaacagccgcagagaatacgacaccagccaccctagagttagtcgacacacg

SEQ ID NO: 501637 - DNA, 482 bp, Homo sapiens
gttctgtgctccgcagggcgcgcctctctccgccaatgccatggcgcgcgggggagccattaggaggcgatggagagaggagggcgcatgctccctgtcccagcccagccctgcccatgcccttgccctggatggcatgactgctgcctggaacctgtggactgctgaataaatatagcagatgctggatgtgcttctgctgcatgcaagatgccctgtgctgccgccctgcatccagggtttgcgttgaattccagtgcagtggtgtgacactgatgcctatgtgctgcctgcctgcctggatgcccattgctgggatgccctgtgtggcccatgatcgcctgtgaagacagctggtcccggctggttccaaccgctatgcccaggcctgagccgtgggccatggcaaccccatgtgggcccccttgcgatttgccaatgggtccgtttgcgagtgttggcactgcggatgaacattgcac

SEQ ID NO: 501638 - DNA, 396 bp, Homo sapiens
  misc_feature (393)..(393): n is a, c, g, or t
gggactgcgtcagacacacagtgacagtggcagcagaccctctgggacattgagcacgatgatgccgatgaggaagatgacagcctcaagccagggtgtatccgagaaatgaggggagaggattaaagaaggagacacccagtgaagacagccacgccgggtgatgagcttggatgaagtgctcaatctcgaatggcgatggggcgtctttgcccacctcccaagcccctgatgccagggttggcgattacgtgcccatgaccagtgctggtccgcccgttgcccaaccaccaacgcccccgaggcggtgtaccggaggctcgaaatttcggtaattcatggctcataaggcttgtttccttgtggtgaacatttgttatcccgggttaagtncca

SEQ ID NO: 501639 - DNA, 340 bp, Homo sapiens
gatcgagctcggtaccgtgtcgatctgacgacaggcactgcatatcggccttacggtctacgttgccgcagcctgctctaggcagcgcctcggtgaccaccaggaaccccatcgagccctcagccctggatgccggcgtactaccaaggttgtgtattcctagacccgtcctgaaacacttaccatagctcccgtggactggaggggttagtcatggcatagccatgcgtggtagcaagcagagaaaaaatcaacgagcaaacaaaaccactcaaaccaaaccgtcaacagcataataaaatcccaacaactatttttatttcatttttcatgcacaacc

SEQ ID NO: 501640 - DNA, 736 bp, Homo sapiens
  misc_feature (21)..(21): n is a, c, g, or t
  misc_feature (61)..(61): n is a, c, g, or t
  misc_feature (63)..(63): n is a, c, g, or t
  misc_feature (104)..(104): n is a, c, g, or t
  misc_feature (225)..(225): n is a, c, g, or t
  misc_feature (245)..(245): n is a, c, g, or t
  misc_feature (250)..(250): n is a, c, g, or t
  misc_feature (404)..(404): n is a, c, g, or t
  misc_feature (429)..(429): n is a, c, g, or t
  misc_feature (462)..(462): n is a, c, g, or t
  misc_feature (482)..(482): n is a, c, g, or t
  misc_feature (491)..(491): n is a, c, g, or t
  misc_feature (505)..(505): n is a, c, g, or t
  misc_feature (518)..(518): n is a, c, g, or t
  misc_feature (541)..(541): n is a, c, g, or t
  misc_feature (553)..(553): n is a, c, g, or t
  misc_feature (566)..(566): n is a, c, g, or t
  misc_feature (574)..(574): n is a, c, g, or t
  misc_feature (595)..(595): n is a, c, g, or t
  misc_feature (601)..(601): n is a, c, g, or t
  misc_feature (606)..(606): n is a, c, g, or t
  misc_feature (633)..(633): n is a, c, g, or t
  misc_feature (641)..(641): n is a, c, g, or t
  misc_feature (650)..(650): n is a, c, g, or t
  misc_feature (670)..(670): n is a, c, g, or t
  misc_feature (732)..(732): n is a, c, g, or t
cgggatggtggacgggcccanaggaattcagaattaaaccttgaatgcctgcgtccgtgananttcagcatggaatgtctctactatttcctgggaattctgcncctggctgcaagattgccacttgatgccgccaaacgatttcatgatgtgctgggcaatgaaagaccttctgcttacatgagggagcacaatcaattaaatggctggtcttctgatgaaaangactggaatgaaaaaactcnacccnagtgtggaagcggggagacatgaggtggaaaaactcctggaagggaggccgtgtgcaggcggtcctgaaccagtgactcaccagccctcgtgggctcaaaatataacatttgcggtgaacctgatattccctagatgccaaaaggaagatgccnatgagcaacataatctaatgaaaanaactgacaaaaaatgaaggctggttttatctgnctgaatccggtatgtattanaaatggaanaacatgtgtcaaangacagatgacggnggaaaaatggcaccggccaaaanccaatcaataangtcttcccttgangggaaaanctttttcctcaccaccccggnatgganaaganggaatttcatctacgtcttccacacanttggtcantatttccanaaaattgggacgatgttcantgagagtttctgtgaacacagccaatgtgacacttgggcctcaactcatggaagtgactgtntaca

SEQ ID NO: 501641 - DNA, 161 bp, Homo sapiens
gaggatccctgtagcagcccgacagcaggaggaggtacatacctgtcgtgcccgcctctgtcagaactccgacacctgaaccagctgaggtggagactcgcaagggtggtgcttgatgcagtgcacacattgagtcgggtggacggagggagtcaaacacc

SEQ ID NO: 501642 - DNA, 890 bp, Homo sapiens
  misc_feature (72)..(72): n is a, c, g, or t
  misc_feature (285)..(285): n is a, c, g, or t
  misc_feature (299)..(301): n is a, c, g, or t
  misc_feature (303)..(303): n is a, c, g, or t
  misc_feature (308)..(308): n is a, c, g, or t
  misc_feature (312)..(312): n is a, c, g, or t
  misc_feature (324)..(324): n is a, c, g, or t
  misc_feature (329)..(329): n is a, c, g, or t
  misc_feature (336)..(336): n is a, c, g, or t
  misc_feature (338)..(338): n is a, c, g, or t
  misc_feature (341)..(343): n is a, c, g, or t
  misc_feature (367)..(367): n is a, c, g, or t
  misc_feature (384)..(384): n is a, c, g, or t
  misc_feature (387)..(387): n is a, c, g, or t
  misc_feature (396)..(396): n is a, c, g, or t
  misc_feature (403)..(403): n is a, c, g, or t
  misc_feature (410)..(410): n is a, c, g, or t
  misc_feature (412)..(413): n is a, c, g, or t
  misc_feature (417)..(417): n is a, c, g, or t
  misc_feature (419)..(419): n is a, c, g, or t
  misc_feature (423)..(424): n is a, c, g, or t
  misc_feature (429)..(429): n is a, c, g, or t
  misc_feature (431)..(431): n is a, c, g, or t
  misc_feature (433)..(433): n is a, c, g, or t
  misc_feature (435)..(435): n is a, c, g, or t
  misc_feature (439)..(439): n is a, c, g, or t
  misc_feature (446)..(446): n is a, c, g, or t
  misc_feature (448)..(448): n is a, c, g, or t
  misc_feature (454)..(455): n is a, c, g, or t
  misc_feature (467)..(467): n is a, c, g, or t
  misc_feature (889)..(889): n is a, c, g, or t
cgagcttctagactagaggtcttaacaataagagagcaaacaaaagaaagaagctcgaggtagaaccatgtnacttcactttgaggataaaaccagaaaagtgaaagatgcaagcatgcaagactcatatacatttgaaatctatgatcctcggaatccagtgaataaaagaaggagggaagaaagcaaaaagctgatgagagagaaaaaagaaagaagataaaatgagaataatgataaccagaacttgctggaaatgtgcctacaatggccttgtaacagccnttgttcccaacggnnncncttangggngtgaaaagaagnatttntgaaccngntgnnnggttttgaaaaacaattatcttgntttgcaaattgtggaangangtaagcaantgctttngggtacngnnacangngttnnttccnancngncctnttatatngntaaatnngaaataaaatanctttccttcccattagcaaaaaagaaaagaggaattaaatatgctgtgagtgagctaggagggatagcgataatcggagtgcgcctcgtggacctcaataggtgggaacccttgctggcctgtttccttttatggggggggtagttcagagaaccttcgcttcactgaacccgctggcgcttggagacatccatgctcgaggcgatcacgagaaggggttagcaaaaaggggggaagtacagggttatcgaccggaatctggggaaggcggccaggacaacaccctgtgtgcactaaggccacccagagcgtcgggaatcccgcataaagggcgcccgtggtttgcggcctcttccattgggcggcacagcttcgcgagacagttccgcaaaatcgcgccggtgtacctcgacaagcacgcnc

SEQ ID NO: 501643 - DNA, 875 bp, Homo sapiens
  misc_feature (57)..(57): n is a, c, g, or t
  misc_feature (270)..(270): n is a, c, g, or t
  misc_feature (284)..(286): n is a, c, g, or t
  misc_feature (288)..(288): n is a, c, g, or t
  misc_feature (293)..(293): n is a, c, g, or t
  misc_feature (297)..(297): n is a, c, g, or t
  misc_feature (309)..(309): n is a, c, g, or t
  misc_feature (314)..(314): n is a, c, g, or t
  misc_feature (321)..(321): n is a, c, g, or t
  misc_feature (323)..(323): n is a, c, g, or t
  misc_feature (326)..(328): n is a, c, g, or t
  misc_feature (352)..(352): n is a, c, g, or t
  misc_feature (369)..(369): n is a, c, g, or t
  misc_feature (372)..(372): n is a, c, g, or t
  misc_feature (381)..(381): n is a, c, g, or t
  misc_feature (388)..(388): n is a, c, g, or t
  misc_feature (395)..(395): n is a, c, g, or t
  misc_feature (397)..(398): n is a, c, g, or t
  misc_feature (402)..(402): n is a, c, g, or t
  misc_feature (404)..(404): n is a, c, g, or t
  misc_feature (408)..(409): n is a, c, g, or t
  misc_feature (414)..(414): n is a, c, g, or t
  misc_feature (416)..(416): n is a, c, g, or t
  misc_feature (418)..(418): n is a, c, g, or t
  misc_feature (420)..(420): n is a, c, g, or t
  misc_feature (424)..(424): n is a, c, g, or t
  misc_feature (431)..(431): n is a, c, g, or t
  misc_feature (433)..(433): n is a, c, g, or t
  misc_feature (439)..(440): n is a, c, g, or t
  misc_feature (452)..(452): n is a, c, g, or t
  misc_feature (874)..(874): n is a, c, g, or t
tatttcttcttagatgtatttagctccacccgtacgcagagtttaggggaaacaagnacttcactttgaggataaaaccagaaaagtgaaagatgcaagcatgcaagactcatatacatttgaaatctatgatcctcggaatccagtgaataaaagaaggagggaagaaagcaaaaagctgatgagagagaaaaaagaaagaagataaaatgagaataatgataaccagaacttgctggaaatgtgcctacaatggccttgtaacagccnttgttcccaacggnnncncttangggngtgaaaagaagnatttntgaaccngntgnnnggttttgaaaaacaattatcttgntttgcaaattgtggaangangtaagcaantgctttngggtacngnnacangngttnnttccnancngncctnttatatngntaaatnngaaataaaatanctttccttcccattagcaaaaaagaaaagaggaattaaatatgctgtgagtgagctaggagggatagcgataatcggagtgcgcctcgtggacctcaataggtgggaacccttgctggcctgtttccttttatggggggggtagttcagagaaccttcgcttcactgaacccgctggcgcttggagacatccatgctcgaggcgatcacgagaaggggttagcaaaaaggggggaagtacagggttatcgaccggaatctggggaaggcggccaggacaacaccctgtgtgcactaaggccacccagagcgtcgggaatcccgcataaagggcgcccgtggtttgcggcctcttccattgggcggcacagcttcgcgagacagttccgcaaaatcgcgccggtgtacctcgacaagcacgcnc

SEQ ID NO: 501644 - DNA, 639 bp, Homo sapiens
  misc_feature (1)..(2): n is a, c, g, or t
  misc_feature (11)..(11): n is a, c, g, or t
  misc_feature (14)..(14): n is a, c, g, or t
  misc_feature (23)..(23): n is a, c, g, or t
  misc_feature (55)..(55): n is a, c, g, or t
nnaaaaaaaanaanaaaaaaaanaaaaaaaagaagaaggaaaaaaaaaaaaaaanaaaaaaagcccaggtagtaccatgtacttcactttgaggataaaaccagaaaagtgaaagatgcaagcatgcaagactcatatacatttgaaatctatgatcctcggaatccagtgaataaaagaaggagggaagaaagcaaaaagctgatgagagagaaaaaagaatgaggagaaggagataataatgagagagagagcttgtagaaaaagtgaatacagaggatataataataacgtattgttgaaaaaaaaaacacctaccgggcagctacagcgggtgctcccgtccccctgccacccacccccgcactccacgacactccacccctcctaactatgccttcatttgctcctttcgcttccactcatcaattaatcacaccctcctccactccacacctcacccacaccacccaccccccacagagacccgacaggacgttaaccgctatccacccccggacgtggcgcgaccgaccgtaacgcgcgacacgatgcgtcttcgccagccccgcggagtcccccaccacaaaaccccccgcccccctggcacgaaaggtcaatccctacgcaccccccccc

SEQ ID NO: 501645 - DNA, 96 bp, Homo sapiens
  misc_feature (31)..(31): n is a, c, g, or t
ggcctctcttccaaagtaagaaatcacatangcttacgttttactattcaaatcaatcctccctcccattgcacttatctaccttccccaagttgt

SEQ ID NO: 501646 - DNA, 366 bp, Homo sapiens
cacgtccgtcctaacgccactatgctctgaagcagtaacacgagatctatcgaatgttctcagtagtgtgctaagctcccatagatctcacttattaccttttttacttcttatatctttgccacacaagaagccttagcccttaacaatcactctctttcaccttggatcattactatattctttgtaattgatcctaatgtcagatgttagtggataccaccttctttgaactccaaacctaaattatatcttattggtgtgtgtgtgtgtgtattaaagtatactcattgtcatggatttccccatataagtatgtgtacaattattttattattatttgtaatgtctaagatgtctaatagg

SEQ ID NO: 501647 - DNA, 427 bp, Homo sapiens
  misc_feature (240)..(240): n is a, c, g, or t
  misc_feature (243)..(243): n is a, c, g, or t
  misc_feature (318)..(318): n is a, c, g, or t
  misc_feature (330)..(330): n is a, c, g, or t
  misc_feature (357)..(357): n is a, c, g, or t
  misc_feature (367)..(367): n is a, c, g, or t
  misc_feature (390)..(390): n is a, c, g, or t
  misc_feature (405)..(405): n is a, c, g, or t
  misc_feature (422)..(422): n is a, c, g, or t
aaactagaaaagccatagataccatacagtaaacatcactcttttaaaaaatattttttatttcggcataatttcagagttttacaaaagttgcaggaatagtacaaagaattctcttcacttggatacctaaatgttaatattttactacatttgctttatccttttctttctctgtaatttgtatttgaaccatttgaaaggtaagtagcagggccgggtgccaccgcaccccggtantantggtagggggttttctaaaaatcatggtccaataacccaccaaggggggcccatccaaaatcagggggtggttangtggggggtacngggccatttatttataccccgggcttnccctgggggnttttaccttaaaattttaccccnatcgggttaccaccnctttctttgttgggggnggtcc

SEQ ID NO: 501648 - DNA, 148 bp, Homo sapiens
ccagcaaggttcttcggatgatatgcgtccgcccccggaggaaatgttcgttcgtggccccccccggcccctggggggggcccggcccgggtttttaaaccctacccccgagggtttgccccaaaaaaggggggcggccccaaaaaaa

SEQ ID NO: 501649 - DNA, 108 bp, Homo sapiens
tagtgagaacacctgcaaagagcagggcgtaaggagagagagtcctgcagcagatggcctgaggtcacccgcgaagggttccgtctgaagaagatccttattgagtga

SEQ ID NO: 501650 - DNA, 355 bp, Homo sapiens
tagacccttcctgcatgtgttttaacatgaaaatcagtaggaagatgtggtatactcataatggaaagtgtaatgtaacaaaactctctttcgttaccacaaattgttgtgagtttagtactctactagattgccccataagatcagtagcttttgacaactcataacttctctgaaataacactgaaagacatttaattcaaggatcagaaattgtggccatctttgcaaatgactacctatagcctgtgaaaatacatttcataaaatgttatgtgcaatgaacactaaatttaatagcagttacagtgtgactcactcatgtttaaaaaacatcgaagagctaaaaaatacg

SEQ ID NO: 501651 - DNA, 192 bp, Homo sapiens
tcggcacgagctcagagctcccagcccttctcctcctgctaacccttctcactccctcaagaggagttagaaaagaggtccttcatctcactctatggaaaatggaacaagaaataatcatatcttcttcccacccttctcctgtatttaggatttctgacaagtggcttagattggtctctagagcgactg

SEQ ID NO: 501652 - DNA, 809 bp, Homo sapiens
  misc_feature (70)..(70): n is a, c, g, or t
gtcaagtcgtaaaacccggtgtccattccgcaccattcccgtatctcttccaatgttgctttctctcttntatcatcagtactcaagtactatataggtgtaagaaagtaggagaagagcaagacatgatcagacagaaaacaaactattaaaacccacacaaagatatacgcaggtatgttgtgtcagaagcactttacatccagtactgactttaagaggagaggtgcaacaacgaagcttacgtgaaagcagaatgcgtgtgcccaacaagtattctcttgtgtactgaggccacagtgacaaagaagagagggatctttctggacgccaacaggaaccaggcgttcgccccacctccgtttaccgactcctgtttcccaggttgatgctgctattggagttactaatgccggcatcttcagacaccctgttaatctctcagtttccctgtgaccacaactatactgtggaggatacaatgcaccagcggcaaacggattcatcagctagaacagcaagttgaacaaactcagaaagaagctcaagaccgcacagcagcgatgcagaaggcaagaacggcagcttgaaacattcacaggaggtcgtgcacttaccagaaagagaaagacgacgtatcagaaagaggtcatgtgattctaccaacatgacctactttgaaatagttgaagtaccagcattaaaacaatgaaatgtgtattgatttctaatggggcaataccacattatcctcctctagcctgtacaggagttcattctaaacaacatcacatttgataacttatatc

SEQ ID NO: 501653 - DNA, 284 bp, Homo sapiens
ctatcctcctgcgcagggccagagaagccagacccagtagcaacacatcagcttatttcactttaacatacacccaacaccattcccatattacaacatgtggggcatagggcaacccacgtcagtatctttccagcatggtcattcttccagcactcatagcacaggcagcttcccagattgcacattccacccaggtggcaccaaacatgcaggcacaacaccaggtgcaaccacagcttatttctcgtcattctcaccatcaccacacagtccagcatcca

SEQ ID NO: 501654 - DNA, 672 bp, Homo sapiens
  misc_feature (583)..(583): n is a, c, g, or t
  misc_feature (587)..(587): n is a, c, g, or t
  misc_feature (607)..(607): n is a, c, g, or t
  misc_feature (615)..(615): n is a, c, g, or t
  misc_feature (649)..(649): n is a, c, g, or t
agcgtggtcgcggccgaggtacggtgtggacctcatcagatacacccatgcagccaacacagtcgtttacagctctaacaaaatagacgatactattcgttacttgtccttgcatgacaataaatacatcagatactttcctggacacagcaagagggtggtggccttgtccatgtcacctgtggatgacactttcatttctgggtctcttgataagaccattcgactctgggatctccggtctcctaactgccagggcctcatgcatctacagggcaaacctgtctgttcctttgatccagaagggttaatttttgctgcgggcgtcaactcagaaatggtcaaactttatgaccttcgttcttttgataagggaccatttgcaacatttaagatgcagtatgataggacctgtgagtggacaggacttaagttcagcaatgatggcaaattgatactcatctccaccaacggcagctttatccgactgattgacgcattcaagggtgtggtgatgcacacatttgggggttatgctaacagcaaaagctgtgacactcgaagcttcatttactccagactncagntttattatgaaccgggtcanaagacggnaaaaatccacgtctgggaatggagagaagtggtntaaaaagtggctgtatttggatg

SEQ ID NO: 501655 - DNA, 403 bp, Homo sapiens
gctattgacacagcgatcagtaccctagatcaaagccagagtcatctacagggtcaaggatgggcaccgcgcaggtgtacttaaccagttcttaaagggaggcctacgaacgcaaccagggcactaagaaacaaatgtgaaagccgtaaaatcagatacccaggccagactaacatggcttgtcacccgcctaaagagccagccttacctagaaaatgacacgacttcgccatctggaccgtccttggtcttggcaaagctctagagacatattggctctattaaaaactcagctaataaagcactaagcttgattttcgtctatgctacagtctctttcttctaagggaaagaagatctccccaagaataggatgctacctgaggaatcatgccacctctca

SEQ ID NO: 501656 - DNA, 995 bp, Homo sapiens
ctcaatgccgcgcagtgcgcacatgtgacaggcaggtagctggcacagaagagccaaaagctcccgtggttggctggtaagcacaccacctccagctttagccctctggggccagccagtgtagccgggaagcagtggtggccctgccctccacgtgtgagcagttgtgtgcccctgccctggtgccagcctcatgtgagaacgtgagtggctgaaggtggagtgggatgtggaaatggggaggatgtgcctctgcccctttctgctggcttgcctggctgtgccatttgtgccgaaagttccctgtactgtcactggctgatggtgcagttcccctaaagtcctgtgcacataagcgtggcagaactgcactgcgaagcggcttcttcagagcacgggctggaactggcaggcaccgggatgcccctagcaccctgacaagctgatgttgtgcaggacgagtccccaggcagacccacaccacatgccgctgaattgagtgcttccaagtgctgtccgctcgcgggcccgcagaagccccgccgtggtgtcctgctgctgaggcgcccccagccagtgcgccttacctgccagactggcgcgccatggggcaaccggggaaagcgggaggcgccttctttgatggcaccccaaatggaaagccattgcgcctggaccacgacgtcactgcagccaaatgggacgaggttgtggagtggatgggccattgggcatcgtcaatgtctctcaatctgtcctggcccagtcgatgtatggcattgtgctggtcatcacgaggcccattgccaagttcgaagcgtcttgcagacgtgtcacccaactaacttcagtccattcacttggcctgtgcgtgatctgagtcagtgtgcctaagcagtggttgccctttgagggccgcccatattcttatgacaatgtggacgtggggcacttcctgtggagatatgggcattccgctggtgtggagggggacg

SEQ ID NO: 501657 - DNA, 850 bp, Homo sapiens
tccatttgggtttttttaatttaaaaaaaaacagtttcctccaagggcgacaaattaacctgaaggtcaaaaggaacctggttgcgggttctcctgaaagctctgtgccccaaaacctggaattgaggaaagggccccccggagcctcgtgcgggaaggtgggtgcccccagggggtcccgtgggtgtgggggaaaagagccgccagcccacacacggttcacgtggatgggtgtgagtgtggttcccacagcgacgtgccatgtcctatctccacgtgacttgtttgactttaacactctgggggggcctacaatatagggaactgacacgggagccaagagaggtggctacatccggctgggactcctgattcccactcgggaaatagtcttcatcttggtgcacccataagttcacattttccctgggagcggtttcgacggagcggtgagaccgtccggggggtcgatgtcccgccgggtgccccgtgccttcaggatgacgctcgtagcatgaggctggcaacggggggggggggcgggttgcccaaggtcgcctgctggaaatgcacttctgcggggtccaccaccgaagtgaattcccccctgcacatcccctttgtggcctagtggaagacagatcacaaagggttactactacacactcttggccatattccagcaagaaacggattgccccgcagttagcgaaaaccttagggagtcgtgtgccttatctagccctgcagatagtctgttgccccgaaaccttcacctccgagaaaccctaaggcccgagggaagcctcccgtaaacgccagcccaatcccaagcctaacacccccggag

SEQ ID NO: 501658 - DNA, 1384 bp, Homo sapiens
  misc_feature (532)..(532): n is a, c, g, or t
ggccctggtgtgattcttgtcctgcgcggttgttctctgagagcagcgttctttatatctcctgtcctgcccttctctcctacctaatgtgcgtgcctgccaccctgatggcaagattcgatggacatgtgacattgaagcccccttgaggccccaagaactatctatttcgcgttgtgaacctaacagtgccgacaaaagatttatcactttcacgggtgggataatgatggacaccttgaggcaccaagttaatcttttaacagaagcggtcagttcaagggggttgggtgcaaaagtgattgagtttgcacatttgtttgaatgcagcagggcaattgaattacggaaagggcagttccaaatttaacagtaaacacttgggcaactttttgcaacaatgtccttgttcacatggccaaaatcggttttccctttggggggcttttgcaacataacaaccaaccaagtgcgtcctcaaaagtgtctcgacagctcgtagtgttccacggggccaaggttgccattattncagtgggacatgccacttaagataggcttgtgggacggcaaagattgcaagaagtcaagcacgcattgacacaagtgcaggacgggatggttgcaaattcttcaaggtattactcttgggaaaagacggggcttgtccccctgtgaggggtgtgtggtacccccaaaggtgtttccccccaggcgaaaacacaaggggttttaacacactcttggctcgtggtcgcgactgtcagcaacacttgtctgtgaccgcagtcgtatggacattcaaacccagagacgttcacgtcactctaccgaccatcactcgccgtcatcgtgcacagacaccttcgagcgacaccaaagggacaacgacctcgtcgtaacaaacaaaaagcccccgggtgacagagacacacttctccttatacgaggaaaaaatcctccgcgcgcaccactgtgctgtcccgcacacctatcgaccatcaccgctactggctctccgacatctcctcacaacccacactatttaacccccccccgacacaacacggcaaacacgcacaccacccccttcttactagacagacgcacagaccccttatatcaccaacaacgggcagaccttgtgaggcatgcagaacaccaactacaggcctaccatacaacagcaggttctcacacaatgcaagccagacaccacatccacccagctgagagcagccctaactcaaacgtggatggctgcataaccatgcgaaacacacgtacttctcacagcagcctggttgtgcgcttcctgtttgtgtctgctcttttgcttctcactactacttctctgctatggtcagtatagacaaaagtactg

SEQ ID NO: 501659 - DNA, 544 bp, Homo sapiens
gtatattttatctggtcgatttaagatttgatgtgtaggagtcttttcatttgtgactaaaatgatgtgaagcaatggtcttttttttcatttctggtaaattaggattatgaactagagatgggttgaattgtatcatttttatgcgataggcactaaaaatttaatccttagcttccttttgtatctgtatagcctttattcaatcttgagttaaaggatcacctgattatacaaattcatatcatctttcatgttttgccgttgaagttgtttagtctcacaggcctaaaactagtaactgaagagacatagctacatcttgctatagaataggtcctcagcccaggactcgtaacagtgtcaccccactttttctctgaccaccctttacctgacagcctttaagtttcagttaagggaaaaggttagatgcattggcgtagcaagttttctccaagtaccagatcacaagatgctctaataaactttttcagatgtcccaactggttaacatcatggtctctggagtcacaccctatga

SEQ ID NO: 501660 - DNA, 516 bp, Homo sapiens
  misc_feature (218)..(218): n is a, c, g, or t
  misc_feature (220)..(220): n is a, c, g, or t
  misc_feature (223)..(223): n is a, c, g, or t
  misc_feature (233)..(236): n is a, c, g, or t
  misc_feature (244)..(244): n is a, c, g, or t
  misc_feature (277)..(277): n is a, c, g, or t
  misc_feature (279)..(279): n is a, c, g, or t
  misc_feature (284)..(284): n is a, c, g, or t
  misc_feature (295)..(295): n is a, c, g, or t
  misc_feature (309)..(310): n is a, c, g, or t
  misc_feature (312)..(314): n is a, c, g, or t
  misc_feature (320)..(320): n is a, c, g, or t
  misc_feature (329)..(329): n is a, c, g, or t
  misc_feature (342)..(342): n is a, c, g, or t
  misc_feature (366)..(366): n is a, c, g, or t
  misc_feature (375)..(375): n is a, c, g, or t
  misc_feature (413)..(413): n is a, c, g, or t
  misc_feature (415)..(415): n is a, c, g, or t
  misc_feature (420)..(420): n is a, c, g, or t
  misc_feature (428)..(428): n is a, c, g, or t
  misc_feature (434)..(434): n is a, c, g, or t
  misc_feature (439)..(439): n is a, c, g, or t
  misc_feature (444)..(449): n is a, c, g, or t
cctcagctgcaatccaatgaaactaaagccgttccagaattatcaaaaactgacagcaaacctgggggacatgaatcatcaggaattcccccaactggaaggtccttctctggcctcaattgcgtctcaaggccacgccttccacgtacagtggagtcttccgcacccagcgggttgaccttgaccagcaggcctacccaccaaatgccctgggctgnanacntaagccttgnnnncggacagngccgccacctcgagaagggccctcccgacgggnanaggancctgggtcccnaggggacaaggagnngnnnagcccncaccccgcngagggagttcctnttgccccctacccccggggcttgnatatagatnataaatataaagggggaaaggggtgggcggggaggggntntgggnctggggcntcactnccccncctcnnnnnncccctggtcccctgtccctggggctgtttgttaaaaaagagtaataaaaggatttaaaaaaaaaaaa

SEQ ID NO: 501661 - DNA, 382 bp, Homo sapiens
ggcccagttatactatggaaacatcccctggcagtgatcaaatatctgcgaatggaatagagataatataattatctcccaatgtatctttaataggatacatggcatatgaaaatctttagcacagtccgcctataaatgtagaaaaatgagaactatttaaaagaagggggcgcagaaataatccttttctagtattactctgggttgtcagatatctttgcaatataattactgtgttggtttttaaaggttaaaagagctctgacgtttataattctcttttgtgtgtgtgttctacacatataaggggaaaatctaacacatggaaggaaaatactttagttaacataaaggtcctgagcattttatggtttgtcaa

SEQ ID NO: 501662 - DNA, 246 bp, Homo sapiens
agatctatttctcttccacaggcagaaatggagaagcttacaaaggtgagaatccacataccagctcaggagggagctccagatcttcttccacatcccagccacctccttcctcttgtcccttgccaagagcatcatcccccaagccttctgtagcctccacaaacccatctgtaaagaaaatccaggctcaaaatagatttgtggaatgacatgattttgataagaaagcaaaaatgttgagat

SEQ ID NO: 501663 - DNA, 94 bp, Homo sapiens
ttaacaattgttggggcctaaacccaaaatgaatttcaaaaggtactttgttttccaaaaatgtcattcttttgggaataaaaacttttggtga

SEQ ID NO: 501664 - DNA, 521 bp, Homo sapiens
ataaactggaaagtcgagttgtcccacgtttgcttgcggtcgccggccttttccagactgaaccaatgtacatcttacatgtgttgatatgatgtctcatgtctccctaaaacgtatgaccaccttggcacatgtcgtcaggacatcctgaggctgtgtcacgggtgtgcatcttcaaccttggaacaataaactttctaaattaactgagacctgtctcagatatggggggttcaccattttggtaaccatggagggattctgagttgaggtgcccctgacctttgacagatctataggtgcttggtagcagcatgagctaaccttatggctcaaaccaacaggacaatttgctgaggtctgggagcaccccctccagagagtccctgatctctcaaaacttggtcgtgatctaaagtttatttgatgtacaactccccctccccttcttttggagttttatttgcttccaagaaggcaggcaagatttcctgggtccgtgatgatggaaggctgacaac

SEQ ID NO: 501665 - DNA, 131 bp, Homo sapiens
  misc_feature (28)..(28): n is a, c, g, or t
  misc_feature (64)..(64): n is a, c, g, or t
  misc_feature (92)..(92): n is a, c, g, or t
ggggaaggaggatggcggatatcatcgnaagactccgggaggacgggatccacgtgtgatacangaaggccgaggagagctcccggactttnaagatgggaccggccacgttccactaccggacgctgcac

SEQ ID NO: 501666 - DNA, 257 bp, Homo sapiens
  misc_feature (243)..(243): n is a, c, g, or t
aacatgtggacatggaaattattagcagtttctagagcagaaatttatagattagaaagctagtttgggagtaaattccgttttgatagaagagaatttccagactgtgttcattggcttccatgccgtgacctataccagttaagccttaaatcacagatacgtgccttctccgatgcagtaattccttgcccaaccatttgtaccataccatgagggaaccccctatgggataaccatttngattccacctggaa

SEQ ID NO: 501667 - DNA, 145 bp, Homo sapiens
ccgatgcgctggcacctgcctgcagatcgacgccgtgttgctacaacgccttcatccaggaacagagcctgggctatcactacaacgccgtcaacgacctgctggactacgtcagcaaccgcgaggtgttcgcctacgagaacgg

SEQ ID NO: 501668 - DNA, 152 bp, Homo sapiens
cgtacgtctaggtactcagtccagttcgcactgtcatatactagtaggcaatctatgtacggatagccacaaactggacagagccaaagttacgggccccctgggtgatagatagcctagtcacctaccttacgaggagcccaggtaccacc

SEQ ID NO: 501669 - DNA, 595 bp, Homo sapiens
tacatttatgctagggaaaaaccagctgggaaatgtccaggggaaagctatgcacaggcccgcgccctagggaggggggatgtgttgggggagggtgcttgtttcccgggtctccatctcccacagcgttgtgtctccagttgggatctccttatgtggcgggcgtggcgtggtggcttttcttcttctctccgtggctttcttcttctccctcctctccagaaataggggctcgtgcggagactctctcgtgcttatagcacagagtgtgggtggccagaggaacgtgggtggaagtgggtgtgggcgtggaaaacccgaggcgccacatgtgtgctctccaccgaggggaaaccgtggtcgtgctcctccagcgggaccttcacagtgttatttgtgttctcaggaagtggccaaaaaccctcagtgtggttcaagaactcgtgaatacctcccggaactcgcggcgcggccatttttcttccgagggggccacatttttataagtgatttccactcctttcccgatccgtgccttctgcacttttatagcgagggggttaacagaaagttcgaaccgggtcaaagcgacggt

SEQ ID NO: 501670 - DNA, 184 bp, Homo sapiens
tttttttttttaggggggggaaatttttccgaaaaaaggtctttggggaaaaggaaaggcccttaaaatcccttaaaaatttattttggccccttttttcctaaaagggagggcccaaagaggttaatttttttttttttcccttccctgggaggcccccgccaataaaagggtttcccattga

SEQ ID NO: 501671 - DNA, 271 bp, Homo sapiens
ggtttaaaaaattttttttttaaaatttttaaaaaggaaaaggttcccaaggttttttgggaaaattccttgttccccccaggaaaaaaaaaaaaagggttcccggtttttaaaaaaaaaaaaaatttttttttttttaagggaaggggccagggtttaattttggggccctccccaaagggggaaaatgggaaaatttttttttaaaaggaaaaggtaagggggtggttttaaaaaactaaaaaaaaaaatttttttccgggggaaagga

SEQ ID NO: 501672 - DNA, 543 bp, Homo sapiens
  misc_feature (22)..(22): n is a, c, g, or t
  misc_feature (81)..(81): n is a, c, g, or t
  misc_feature (311)..(311): n is a, c, g, or t
  misc_feature (348)..(348): n is a, c, g, or t
  misc_feature (371)..(371): n is a, c, g, or t
  misc_feature (491)..(491): n is a, c, g, or t
  misc_feature (493)..(493): n is a, c, g, or t
  misc_feature (495)..(495): n is a, c, g, or t
  misc_feature (506)..(506): n is a, c, g, or t
ccatcacagggaaaaaaaaagncctaagaatggaacaactgggcacctaggaaacaaaatgaaaagaacagtgttgttgancacctctggcctaaatcttaaaaacacatcctacctcctatgcccacagtatttgtcaataatctggggacagagaaaaagacattctgaaataaggggtcagagctgtagcagaaaatgtacatccttatttttcaggaatttatagagaaaggctactgttatgtgtgatgatacaaaccccagtaagagaggccagctcttgcctataatcccagcactttgggaanctgaggcgggagaattatttgagcccaggagctcaanaccagcccgggcaacatgggganaccctgtctctacaaaaagttagccaggtgtggtaagccatgctgcggtcccagccactcggaggctgaggcgggaggattgcttgaagcacctcaaggtgggtgcagtgagccatgaantncnatgcactcccncctgagcaatgaaggaagccctgtctcaaaaaaaaaa

SEQ ID NO: 501673 - DNA, 331 bp, Homo sapiens
cgggcatctcaccacgagttctgctggggtccgcacacggtcactgacaacgacagtcagttgtaggaactagagtgcggtgtcatcagacttaccctgtcctgccgcaccttccgtgctaacatcgaggtgtgtgcagttaccttctgagcggggaacaagcggactggaattttcctctgctacctctgtgtgtataaaatgttgttggtaaaatttcgaagggaagtgggtacactaggggggaaccttaattgtaaatttggttcatgtgtggcaaagttcttagcggcgaagagtataaaataaatttgtcgaaaagagaaagaaa

SEQ ID NO: 501674 - DNA, 257 bp, Homo sapiens
gttggtggggacagtgggacctggggctgaaaggagacggcctctgggttaagcagaagccctaatttagcccgtggcacctgaaccatataagagaaggaaacgcttcacatttctgcatctgagattggactctggcgggcctggagccttggggagcagcaagcccagtccccaagcctactcgaggcctgagcctgattacctgccggaagtcgtctcccaccttgacgctgggctgcctgccaggagatctt

SEQ ID NO: 501675 - DNA, 177 bp, Homo sapiens
  misc_feature (47)..(47): n is a, c, g, or t
  misc_feature (86)..(86): n is a, c, g, or t
  misc_feature (101)..(101): n is a, c, g, or t
  misc_feature (122)..(122): n is a, c, g, or t
ggtgctccaccccagcttccctgcctcccaaccatcgtccctgcagnctgcacaggcccggcagcagccaccgcagtactacctgnaggtacaggcaccancctctttgaacagtgagcagnaggactcgctacttctctccacctactcacaacaggcaggggccctgggctaccc

SEQ ID NO: 501676 - DNA, 291 bp, Homo sapiens
ctgggcgtgctggctcacgcctgtggtcccagcactttgggaggccgaggtcggaagtttgtagaccagcccggccggtatggtgagaccctgtcccttctaaaaatgcaaaaatttagctgagtgtggtggtgcatgcttgtggtcccggctgctcgagaggctgagacacgagagtcgcttgaacccgggaggcggaggttgcggtgagccgagatcgtgccgctgcactccagcctgggcaacagagtgtgactgtcttattaataaataaataaatacgaaaagtga

SEQ ID NO: 501677 - DNA, 278 bp, Homo sapiens
ctctacgataacaataacaaaacatttgctgagaggctacctagcaggttctcagtcctggctgcaccctacaatctcttaggttgcttttaggtagatttcctctcattcaggtgaaattcacttaacataaaactcaccattttaaaatgtacaattcagtggccttaagtatattcacagtgttgtgtagtcctcaccactatgtaattccagaacatttccatcatccccaaaagaaaccctgtattgattagtagttactctccactcctaat

SEQ ID NO: 501678 - DNA, 428 bp, Homo sapiens
  misc_feature (113)..(113): n is a, c, g, or t
  misc_feature (117)..(117): n is a, c, g, or t
  misc_feature (167)..(167): n is a, c, g, or t
  misc_feature (195)..(195): n is a, c, g, or t
  misc_feature (200)..(200): n is a, c, g, or t
  misc_feature (224)..(224): n is a, c, g, or t
  misc_feature (257)..(257): n is a, c, g, or t
  misc_feature (273)..(273): n is a, c, g, or t
  misc_feature (289)..(289): n is a, c, g, or t
  misc_feature (353)..(353): n is a, c, g, or t
  misc_feature (378)..(378): n is a, c, g, or t
  misc_feature (409)..(409): n is a, c, g, or t
gcgccccgaaccgtcctcctgctgctctcggcggccctggccttgaccgagacctgggccggctccactccatgaggtatttcacacctccgtgtccggcctggcgcggggancccnttcatcaccgtgggctacgtggacgacacccagttcgtgaggttcgacancgacgccgcgagtccgagagaggagccngcggngcccgtggatagagcaggaggggncccggagtattgggaccggaacacacagatctncaaggcaaggacagantgaccgagtgggcttncggaacctgcgcgctactacaaccagagcgaggacgggtctcacacttggcagacgatgtatgnttcgacatggggcggacgggggctnctccgcgggtataacagttcgcctacgacgnaaggattacatcgcctgaa

SEQ ID NO: 501679 - DNA, 782 bp, Homo sapiens
  misc_feature (65)..(65): n is a, c, g, or t
  misc_feature (206)..(206): n is a, c, g, or t
  misc_feature (242)..(242): n is a, c, g, or t
ggccggttgttgcgtgggatggatcaggcggaattccagaagagaaaataatccctgtctagatncagaggactggttcctattccagtgctcctccggtagcagggaggcgacagaaggtgtccaactatccattaccaagaagaaatctattcgtttgagcctgagacactctttgaggtaaaaaattagaatgaaagaacctntggatggtgaatgtggcaaagcagtggtaccacagnaggagcttctggacaaaattaaagaagaaccagacaatgctcaagtaagcatttcatcttcatttaaaaatttaaaaaaattccttcttttccatctggtcaactgaaaaattttagttaaacggcttctggtttgtaagtttaaaataacccaaactgagacaggctctcgctgtcgctgagggtgtggtgcagtggtgcgatctccttagctcactgcagcctccaactcccaggctcaagtgatcttcccacctcagacctcctgtgtagctgggaccacagggcacacaccaacatgctcaactattttaaagtatatacaggtagagacggggtttggccatgtttcccaggctggtctcaaactcttgacctcaggtgatccactcacctcagcctcccaaagcgctgggcattacaggcgtgagccagcacgctggccgataattctggatcggtatatctgccctcctctaccatagggtgaaagtccaatgagagtcactatatgactgtgacatatgaagcctgcgtcca

SEQ ID NO: 501680 - DNA, 234 bp, Homo sapiens
aggatccccttgaaatgggcacagaaattaccacaaactgtctctcagaccacagtgcacacaattagaactgaggattaagaaactcactcaaaacctgtcgagtacattgaaagtgatctacctgatcactattcgttactgaccacattatctaagatttggtcatcttcagatagcttttgtaacccttaagatctccgacactatctgtgcccatttctgggcctcctt

SEQ ID NO: 501681 - DNA, 681 bp, Homo sapiens
  misc_feature (65)..(65): n is a, c, g, or t
  misc_feature (206)..(206): n is a, c, g, or t
  misc_feature (242)..(242): n is a, c, g, or t
ggccggttgttgcgtgggatggatcaggcggaattccagaagagaaaataatccctgtctagatncagaggactggttcctattccagtgctcctccggtagcagggaggcgacagaaggtgtccaactatccattaccaagaagaaatctattcgtttgagcctgagacactctttgaggtaaaaaattagaatgaaagaacctntggatggtgaatgtggcaaagcagtggtaccacagnaggagcttctggacaaaattaaagaagaaccagacaatgctcaagagtatggatgtgtccaacagccaaaaactcaagaaagtaaatcgaaaatggtggtgtgtcttcagctaatgagagacctatgcccagcagttgaacccaggctttcagctttctttcgcatcatctggcccaagtgtgtcgcttccttcagttccagctgtgctatcaaggtccccgtcacgctcgtaaccaaaagcccctcaacgggccaaacgcatatcataagaccaggatctacccacgctctcctgcaccacacgatgcatcaaccagacatcctccacactgcagcctgcaactcctccaagaaccctgcacaacgcccgaagcatcaaccccaccaccccttaacccacctcccacaccgccccccggccccccacacccgccccca

SEQ ID NO: 501682 - DNA, 1225 bp, Homo sapiens
  misc_feature (122)..(122): n is a, c, g, or t
  misc_feature (146)..(146): n is a, c, g, or t
  misc_feature (185)..(185): n is a, c, g, or t
  misc_feature (204)..(204): n is a, c, g, or t
  misc_feature (649)..(649): n is a, c, g, or t
  misc_feature (685)..(685): n is a, c, g, or t
ttgaaagaggcaggtgactcactttcagtaagggcgttcctgttgttcgcctgcgatggatggcatcttgagctcacatctagcgttaggccgagaaatggggcccttagggaggcttccantgaaggttgagttataggtcaggnccgggaggttgttgtgcccctctttgagaaataaaagcngacgtgggcctctaagtantgattcttatggggtcagaaactatttcttgagtccgttcttctcagagtttattacttcctcccacgtcttggtctgctggtctaattcccttcaataaccttcaacataggaaaaaaccagagtgtgttgtgtgtctttaaagatattagagaagtgggagctgttgccccaaaactgttttcttatgtagctactgaaggaacagaaagcaggaagaaagaaaaaagttagttgtggccccagaagagttgtttttcaaatgccgagccgtgaagcctcatgcactcaacacaaagtttttctttcatatagataagcctgaagaaaaaagaataagcctgagtatgtattttaggtgtccaactatccattaccaagaagaaatctattcgtttgagcctgagacactctttgaggtaaaaaattagaatgaaagaacctntggatggtgaatgtggcaaagcagtggtaccacagnaggagcttctggacaaaattaaagaagaaccagacaatgctcaagtaagcatttcatcttcatttaaaaatttaaaaaaattccttcttttccatctggtcaactgaaaaattttagttaaacggcttctggtttgtaagtttaaaataacccaaactgagacaggctctcgctgtcgctgagggtgtggtgcagtggtgcgatctccttagctcactgcagcctccaactcccaggctcaagtgatcttcccacctcagacctcctgtgtagctgggaccacagggcacacaccaacatgctcaactattttaaagtatatacaggtagagacggggtttggccatgtttcccaggctggtctcaaactcttgacctcaggtgatccactcacctcagcctcccaaagcgctgggcattacaggcgtgagccagcacgctggccgataattctggatcggtatatctgccctcctctaccatagggtgaaagtccaatgagagtcactatatgactgtgacatatgaagcctgcgtcca

SEQ ID NO: 501683 - DNA, 826 bp, Homo sapiens
caatgtacgtcacctaaagatgcatctgagaaagctagcaaagcaagagctaaatctaaccctaagaattagtatagaagaaataatgtaacgaaggaacgagaactagaaagtaacgtgaattcgcaaatgaacaaagcaatacaagaagtcgagaggcaggaagaaaagacatgtgatctcttttgagagagatcatgcaatgttcaatcaaggtccttaggcatgagttaatagcattcgaaagacagacggaaaagagacaaataagtaaaatcagatggagcaggaaacagtattacaactgggcatgctagaatatcaccaggatcatcatggtagctactgatgacctagactacgtgcgcagataacacttggtagaaatctaggggagatggataagttcctagttgagatatcatagctaccagcagttacactcacatggaacgcaagatatcaagaatgattgcactcagagcaataatgactaaacaaagattgaagctgtaatatgaagtctcccagtaagagaaaagtccacaggagcctgcatggcttcgagctgcttgaagtcgtgccacagcagtttaaagaacataagagcagtgtctacgtcaaaccaatttccgaacaagatacaggaacgagggaagtcttctcccaaaactcattgttacacatgacccggtattacccgtgatactccataaccgaaaggacaggatgcttaaggacagtaaaaccacaggccagtatctctgaatgttgatttcaaaaaattcggtggaagaataagcagtcagcggaattccaaaattag

SEQ ID NO: 501684 - DNA, 201 bp, Homo sapiens
aaacataacgattatagctaaaggctaatcactgctgtataccgtgaagagaatgtggctaggctaagcgtatagagctgcattgctgcatgcttaatgcttgtccctttagatcgtggtgatttagagagtgaactcactggaacggggatgcttgcctgtgtcatcttactaagcgctcctagaacggctaggacccca

SEQ ID NO: 501685 - DNA, 617 bp, Homo sapiens
gtctgcgagacattgaactgtgtacactatatgcccatgatttctctctgcacttcgtcttattctactggtatggcaagtcgagatgcacataacccagcggacgctgatagattaaatgattagtccgacctatatcacacaggctcggggatctctgtctaggcacagtaagttaagcagtacacatgtccagatcctgtacgagaagagatagctgtaagatgttgatgagaaacttagggacttgtacgagaaaggtacgcgactgtacatgagacctatgcagaccacgcattctgctgcgcataacgagatcccgactgacctgactgcttattgtcacactgagatgacagttcacagatctacctgagccgagtccaactgtagcgtgaagtgtactgattatcatgacaatgcagcgtcgatgtcgaaaggacacttatacggaattgtagatgacatacttacttctatgccacggacatcttgtctttgataaccggactcagctgctttacagaatgttgcaagctgctgataaagtgcctgctggtgcaaagctcgagaacttctggatgaggggttaggctgtggccgagctcgtgtgccct

SEQ ID NO: 501686 - DNA, 102 bp, Homo sapiens
gaaggcctgggtcaggaccctgctttcccagcgcagttcccaactgtttccctgctcctttactggtgatgggctaataaaactgactttttggtttatgca

SEQ ID NO: 501687 - DNA, 362 bp, Homo sapiens
  misc_feature (202)..(202): n is a, c, g, or t
  misc_feature (207)..(207): n is a, c, g, or t
  misc_feature (220)..(220): n is a, c, g, or t
  misc_feature (228)..(229): n is a, c, g, or t
  misc_feature (236)..(236): n is a, c, g, or t
  misc_feature (238)..(238): n is a, c, g, or t
  misc_feature (273)..(273): n is a, c, g, or t
tccgttttcattgttcacttctaaaccaaaaattatgtgttgccaaaaccaaacccaggttcatgaatatggtgtctattatagtgaaacatgtactttgagcttattgtttttattctgtattaaatattttcagggttttaaacactaatcacaaactgaatgacttgacttcaaaagcaacaaccttaagggccggccnttccntagtaatcccccntcctgganncctgggntngaaaaacagctctgttgaatcacagtatcaggtanttttcacacgtaagcacatttcggggccattttccgtgggtttctcatgaagctggtgttcacagacctcaagcaaggggcatcggcat

SEQ ID NO: 501688 - DNA, 302 bp, Homo sapiens
agccaattctgttctcatgaggcccaatccagttgtgcctcacaatatggaaggagaggagtgagccctgctgtaaaggcactaggtagagggttccagcctcatgacctaattacctctcaaagcccagctcgaaataccatcaccattgcgtgtgaggtacaacatgagctttgggaggcataaacattgagccgtagcagaggattatttgggccatgctataatctagcaaaagctatgaataaaacagcgagagacaggaccaaaataagatttggcattaaaggcccagcaatact

SEQ ID NO: 501689 - DNA, 171 bp, Homo sapiens
gaaaaatttgggatttttcctttgttttaaaaaaaaggctttctgtaatgtcccaggaaaccttttaaaagggggtttgtaaaagcatattgtaaatgccctttgcaccagttggaaaaaaaagtgttgggtgatttgatttaaataaaactaaatgggttgtcctcctta

SEQ ID NO: 501690 - DNA, 399 bp, Homo sapiens
agaaagaaaggaaaagccagactcctttagggctttgaactgtgcctacagaaaatcagagtgcaggggacataatgttcaggcctacagtcaggaagcagttgctccttcccattccacaagatactgcaccttttcatcaagtgtcacccgacgtgccaaaactcggcatttttgggcacatgctattttacctggagcaccaaaataactggtaatggagttctttagatgattgaggtgtaactcctgatctgctaagttattcacaatctctgtgttggggtcatgaaactgatgatgttctttggcttcatcatcttttacaaaatctgagttctgagtctggagagctcttcttggaagacgacctcttcttctccgcaaatgtggtattgc

SEQ ID NO: 501691 - DNA, 458 bp, Homo sapiens
ccgggggtatataggcggaaaattgggaccacgaccgtcttttttcctcacccccgctgcggggcgtctcccccttcgctccagggcgccactgttctccacagtttctcccaccaacagcacgcatccacatatatgtgtgcacaatctctttcacagcggggttggggtctcttggagagccccgccacaccctgagcacttctccccacacggcgtctcttctccccaccccgtgaaactttctgttatcaaccacgccacacgaagggtgggcaccggcaaccctcccccggcacagggttgtggccacccacctttggccacccacgaggggaaaaaaaattttttggaaccccttaggggatgggggaaaaaaaatgggaatttttgtgcttttaattttttttaaacttccattattattttttaaccaaaaaaaattttccccccgttga

SEQ ID NO: 501692 - DNA, 749 bp, Homo sapiens
ggcgcagttcagtcctattatgccgaaggccgacccggaggagccccctgccggtgccacctcaaggaagagctcccctccagagaaaaaccgagagtcatcatttgcctgctcaactatgaataaagttccacgtaccttctctctgctcacttctttcagaggcacttccggctcacgaaactcttcagctaagttcctggggaatttgctgagtgtcaaaacatgaattaaaccagaagagatatgatagtgggttttgtctgagagggatgcccagccttgtgaataagtcatcttccagtgtggaggattgcttgctccctgacctgtatccactggggacccacatataccaggcattctgctcaccagagacacacacaagactcatgggtcaatcaccaaaacctggggccacagctcagacctgatctgtcatgtcagacaaggctgaaatattgttcttctgtgttgtgagttttctcaaatacaatacaaaactttctccttgcagctcaatcaaggcaatctgcatagtaagaagagtgtgggatttggaggcaagagacttgggtgtgagtttcaggcccctgattttgtgtaaatcacaattcttcctacctcttgattttcctaaactgtaaactgagctgcatgccacccgccctatttcttcaaaaggttcttataaagactgaatgaaatactgtatgcaaaaataacacattaaaaccactttatgaatg

SEQ ID NO: 501693 - DNA, 815 bp, Homo sapiens
ggcgcagttcagtcctattatgccgaaggccgacccggaggagccccctgccggtgccacctcaaggaagagctcccctccagagaaaaaccgagagtcatcatttgcctgctcaactatgaataaagttccacgtaccttctctctgctcacttctttcagaggcacttccggctcacgaaactcttcagctaagttcctggggaatttgctgagtgtcaaaacatgaattaaaccagaagagatatgatagtgggttttgtctgagagggatgcccagccttgtgaataagtcatcttccagtgtggaggattgcttgctccctgacctgtatccactggggacccacatataccaggcattctgctcaccagagacacacacaagactcatgggtcaatcaccaaaacctggggccacagctcagacctgatctgtcatgtcagacaaggctgaaatattgttcttctgtgttgtgagttttctcaaatacaatacaaaactttctccttgcagctcaatcaaggcaatctgcatagtaagaagagtgtgggatttggaggcaagagacttgggtgtgagtttcaggcccctgattttgtgtaaatcacaattcttcctacctcttgattttcctaaactgtaaactgagctgcatgccacccgccctatttcttcaaaaggttcttataaagactgaatgaaatactgtatgcaaaaataacacattaaaaccactttatgaatgggtaaaaaagaatactaattggttttgttgttctgaggtgaggaatatttgttggcgctttcgtgt

SEQ ID NO: 501694 - DNA, 758 bp, Homo sapiens
  misc_feature (75)..(75): n is a, c, g, or t
gtaccacccgtccccccctcacccgcaataaactccgcgccgagagggaaagcgcttacagggtgactacctcanggattgctcccctccagagaaaaaccgagagtcatcatttgcctgctcaactatgaataaagttccacgtaccttctctctgctcacttctttcagaggcacttccggctcacgaaactcttcagctaagttcctggggaatttgctgagtgtcaaaacatgaattaaaccagaagagatatgatagtgggttttgtctgagagggatgcccagccttgtgaataagtcatcttccagtgtggaggattgcttgctccctgacctgtatccactggggacccacatataccaggcattctgctcaccagagacacacacaagactcatgggtcaatcaccaaaacctggggccacagctcagacctgatctgtcatgtcagacaaggctgaaatattgttcttctgtgttgtgagttttctcaaatacaatacaaaactttctccttgcagctcaatcaaggcaatctgcatagtaagaagagtgtgggatttggaggcaagagacttgggtgtgagtttcaggcccctgattttgtgtaaatcacaattcttcctacctcttgattttcctaaactgtaaactgagctgcatgccacccgccctatttcttcaaaaggttcttataaagactgaatgaaatactgtatgcaaaaataacacattaaaaccactttatgaatg

SEQ ID NO: 501695 - DNA, 232 bp, Homo sapiens
cgtggcactccccatgattacccgatactagtatacgagatcaggttcgtccttcagtgttgcgtctggtccttatacgtttcgcggttacgcctgattagcacattgtagggtggtgattagtcggttgttgatgagatatttggaggtggggcatcactagagggggaaatagaatgatcagtactgcggcgggtaggcctaggattgtgggggcaatgaatgaagcgaa

SEQ ID NO: 501696 - DNA, 759 bp, Homo sapiens
agaaggggggaagagaaaagaggaaaaaaaaagaaaaaaagtgataaaagtagaaattcctagcgtgtaccctcaggcagagctcccctccagagaaaaaccgagagtcatcatttgcctgctcaactatgaataaagttccacgtaccttctctctgctcacttctttcagaggcacttccggctcacgaaactcttcagctaagttcctggggaatttgctgagtgtcaaaacatgaattaaaccagaagagatatgatagtgggttttgtctgagagggatgcccagccttgtgaataagtcatcttccagtgtggaggattgcttgctccctgacctgtatccactggggacccacatataccaggcattctgctcaccagagacacacacaagactcatgggtcaatcaccaaaacctggggccacagctcagacctgatctgtcatgtcagacaaggctgaaatattgttcttctgtgttgtgagttttctcaaatacaatacaaaactttctccttgcagctcaatcaaggcaatctgcatagtaagaagagtgtgggatttggaggcaagagacttgggtgtgagtttcaggcccctgattttgtgtaaatcacaattcttcctacctcttgattttcctaaactgtaaactgagctgcatgccacccgccctatttcttcaaaaggttcttataaagactgaatgaaatactgtatgcaaaaataacacattaaaaccactttatgaatg

SEQ ID NO: 501697 - DNA, 995 bp, Homo sapiens
  misc_feature (728)..(728): n is a, c, g, or t
ggtttctaaaagtgctagtcaccagactgcagccttgctagtgcttcgcagctctcgaagtaaattgtcgcgggaatggaggcctctctaccctagagtagtaaccaggtacggcaggctggcgcgtaagtaactgatcgggaattgacattttcactcatgggccaatacatgaagtcaccagttcgaacatttctatttcacatgtattaaaagccttgaaagaagctatttgtgacgctaccgatcacatacgtcctttggacgtgaattctcagggataaaaccaagagtaatctgtaggtagttgtccagggctaagaataggagagccacctagataaattatagctcgcatggacacagtggatgcaaactgtgactgacagtctagagtattagtaacgccgtcctattgtgatatcgacatcaaaggattgacgcataggcaatcgagacggaacactgctatgtcgctaacttgtgtagaaggtagagcattgtccgaggaagatggacccggctttgcgtagatgaggaaatacctagaggcttccaggaatagatcgcatttgcgaagggtatcaaaagaatatttgtgtcagtccagtactttatgaggtgagagataggaggacaactatgcgtcactcgactgtttcttccctaataaagggacgaatatttaagtgcaatcgagttgccgtgtgagaggtaggattctcagncgtgtacatgcttgatgttgggtaagccattggttatagtgaacgttaaatagtgttgctcgaagctgtggagattagtgcgagctcctgaaaggttgtgtctagtgtttcacgaagtggtgtgttcctttgttctgctttataaatgtaagccttgttagctggagttgaattaccaaggagatatgcgaattccttagatattgtccagcgttgggtaaacatattggatttgagtggttctgggagatacaggtgcaaggggaa

SEQ ID NO: 501698 - DNA, 278 bp, Homo sapiens
ggggaagggagacctttacgcaagggaaaagcggggggagggtcagagcccagtcgagacctcacacagggctgtccctcagggagacctcaggccagggtcttggctaggcctctggctgaaagccagggcagctcttcgggagtttctctaaagtcactagtgaacaatgcgggggtaaaagtaccacacaaggtatgggatccagggggcagtctggcaacagtgccaggtaagggttatgtctataggattccccgtcaaggcaagccaaaggg

SEQ ID NO: 501699 - DNA, 274 bp, Homo sapiens
gctcggtccactcatgtcatacactcataaaatgaagtagtcttaagtttctttctccttttttttttggaaacaggctctggcacggtcacccaggcggtaaggcagtggcacgatctaggcttatagcaactttcgcctcccaggctcaagggacactcaacctcagcgctggaggagctgggaccacagacatgtaccaccacgtccagctaattttggtgttcttttttttctagagatgggatctcgctatgttgcccaggctagtctt

SEQ ID NO: 501700 - DNA, 670 bp, Homo sapiens
  misc_feature (460)..(460): n is a, c, g, or t
cacgaggggagctccaagtctactctttactgctctaagtattctgctcctataggcccagcctctgaggctccattatctacaggtattgggagatgcacagctaacatgccaagaccacctgtaaacctataaatgggaccactgacatttaaggatgtggccatacaattctctctggaggagtggcaatgcctggacactgcacaacggaatttatatacgaaagtgatatttgaaaactacacaaacctaatcttcctgggtattgctatctctaaacctcacctaataacctgtttggagcaaggaaaataaccctggaataagaagagacaggacatggtaaccaaacccccatacttggaacatccctactatccactcttataattaaaaccacttttaccccttcatgaagtgttttctaaaacatactaacatttccagggcactacancctaaccaataggaggatgatgattaaaatattctgtgccaacttatcatcctttcacaataatcccattaaaaatcataattccaattacagtaacttgattgaaacgattttagaacaagagttctacgtccttaccccatacattcctttctagataatttcacaccctacgttttcctccccctgcactttttagcttttgccccg

SEQ ID NO: 501701 - DNA, 210 bp, Homo sapiens
  misc_feature (85)..(85): n is a, c, g, or t
  misc_feature (95)..(95): n is a, c, g, or t
tcccatgggaaggaggggaagacgcagcccctgtggccccctccgtgcctgcctatggggaccctgagctgcccacaccgggganagaggtccantctgaaagtgcccaggagccaggagccagggatgtggaggcgcagctgcggcggctgcgggaggagaggacgtgcaaggtgtgccaggaccgcgccgtgtccatcgtctttgtgc

SEQ ID NO: 501702 - DNA, 609 bp, Homo sapiens
gagtctcccagcaggtggcacaatggatgcgatctccagtgagagggccccagtcccagccccgatggtaccataccctctgctccctccgaccccactgaccagccccccgctgctcactgcaatatgccagacctcaggttcttggtggtgccagacctgctggccctgtgctgctggcgggtgatgtgccctgtgcggtgctgacttcattctgtggaggctggttctgtgtgcgtgataccctgtgtacttttgtgccgtgggcactgtggtgactccagcgtagggtttcggtgcctctatcggcctccgcccgtctaccttgtggctggctgcctggtgtcctgctgactgaggaaacgaaccggagcccttccgagcaggcagaagggcgagctacttggactgaccgacggagcaagcatcaacttgctgaaaaacctcgtcctaattagttgagggtccattcagaaggagagctaacccattggccatgggagatcaacggcgtttccccaaggaacagttgggaaaaattgggccttgcacatgggcgtccaaatgtaaggaattcggtgggcaccaagggtcctggccacccttcgt

SEQ ID NO: 501703 - DNA, 245 bp, Homo sapiens
ttaaatgtcaaaatctgaatatatctgggatatggtactaatcaaataataatcaatcaatcagcatatacatttcagccaagccatagagaaaagcatagttgcttgattatgtcatctccaccactctgctcagcctgtacaggtaggggaggtatacaggaggcttgcttgtcctgctatcatctctgtacctttgggtactctgcagtttcagtgtcgacctgcagtgactgatttctgtg

SEQ ID NO: 501704 - DNA, 105 bp, Homo sapiens
gcgtagggactctacatcagatacagcacattcgcagtagttctgagtaatacagagcttgcttgttcatgggattagggaaaactcttgtgttgcagtgtgctt

SEQ ID NO: 501705 - DNA, 175 bp, Homo sapiens
tcccgatttgacggaagcactctgacatactccaagatggacaaccttgaggacattatgctaagggaaataaggcagttacctaaggacaaatattgtatgattctacttatatgtggtaattacggtagtcaaattcaaagacagaaagtagaatagtggtttcgctaggggc

SEQ ID NO: 501706 - DNA, 121 bp, Homo sapiens
ggaaaatgggaggggaaagggttatatgaaaattttttaaactttttgctcaactttctgtaaccctaaagctactttaaaaaatgaagggtttcaagtaaataaataaccccccccccca

SEQ ID NO: 501707 - DNA, 259 bp, Homo sapiens
tcctccatgccgatgcaccagcgggtgaaatctccaggcagcatctgtgggtctctgtgttctgcccggcgctggtttgctctctcttgtgtgtctcagacggccagcttcctcacccacccggcactctgctttgctctgtctcctgaggtgggcctgaccaacctccccttctctgcctcagtccctgggctccagggctcagctccacagccctctgcctagcaggctggttctccctgccaagccccagctgcgg

SEQ ID NO: 501708 - DNA, 757 bp, Homo sapiens
tagcggattgtgatcggaagcgcgcgtaagcatgtacagaagcttcactgacgttcagaccacggtagaaaacaaaatcgagcgggcgaccaaacgcccgacgggctgatcatcggtaaaacgcacctggcgcagcgacatttcccgcgcaaagcgatataacgcgttcatccttctacggatccaggcattgaaatctcccgccataatgaccgggccgctgtgtgtgagctatctgatcgccaatcaggaagtaactgcttactatagacatccacgcccagcactgaagttgacggcgtgtatattaaccaccatcaacaggcgggtgtcaggtaaatggatagaccgtgcaccagtgcacgaacttctgacaggacacggcaaaaatgggttctcgttacacgtaacggggcagcaatacacatggattgtgccgccgaacaggggtcaattaacgccaggaacggatgtacggtgaacagcacataaaaaagccgggagactaccccattgacaatccggtgcagggacaacaaggaataatacactataaggcagcggtcgggccgataaaaccgttgggtaaccttaaaacgtccttgaggacagagtctagagccattgtcggcactttcccctttggccaacatacaaacaaacccacaagacactggatttggcactacacctttatatggcgcccggaacagggttccctctgtgacaattagcccggaacacaaagacagagtta

SEQ ID NO: 501709 - DNA, 295 bp, Homo sapiens
gccttttcccccccaggggggtttttccccaagttttacaaaaaaaatggtggcccggccccgggcccgggccccttccttttatttttttaaggtgggggggtttcgggccacaaagtcccccggggggggttttaaaaattttcccgatttcaaaattaattttccgttgccccccggggttttgggcggttggcccaaacccggttttccccccaaagggcccccccctttttttttgggggggggccttttttggggggggccccaaataaatttgggaaggcccgggtta

SEQ ID NO: 501710 - DNA, 904 bp, Homo sapiens
ggtgtacggtccgcagcggcaggtgaagcctagcagaggacgcggccaggcgatgcggtgaagcgattcctgcaggcgtatggttcccctcttatgacctggattgaattcgttgaaatgagcagtcgtaaatcaaagagtaacagcttaattcacacagagggcctttcacaggtacaaaagaattttacgtgaaagatcttgtcgtcaggagtccacatagtaaccctatttggagtgcaagtacaattaccaaacacttaagtgagctgctgaaaggaatgttctccatggagagagtaactctgtccttaattatcggaccccgaggatcaggaaaaactatgtatctctcagaagatacgagggtgtgcctcgaagttcctacagaagccttcaatatcagcaaaaacctgcggtcataacacatgctatggatgctgggttaaaaatcgagtaacaggcatcgacccattatgacttgccgtagatctaatggaagcaagcaactgtgtaggcatggactcgaaagcgaatattggtaccattggtctatcatgctgtggaaactctgtcttataatagcaatggacatttaatgacatctatgaggacgagccatttaattttcaaagtggctattaatgagtttccggaagtttgctcacggaccagcacattccgttatgattcgaaacaccgtgtcttgaaggtttgaccacctgcgcactgagttatacagcccggagaattcgggattcacgcagaagaccactggtacactggttggtgtatccaccttgggtggcgcgcatacccacggctacaatgggggggggcgcccccaaacggagatacagcgaacgcggttcatctggagagaagggatctttactcaattgtg

SEQ ID NO: 501711 - DNA, 123 bp, Homo sapiens
aaattcgcggccgcgtcgactcatcttaagttataactgccacaaataatacccaaggggcttcccagatgatgcagtggtaaagactctgtctgtcaatgcagagatgcaagcaacatggat

SEQ ID NO: 501712 - DNA, 602 bp, Homo sapiens
tgggcaaaggacatgaacagacacttctcaaaagaagacatttatgcagccaaaaaacacatgaaaaaatgctcaccatcactggccatcagagaaatgcaaatcaaaaccacaatgagataccatctcacaccagttagaatggcaatcattaaaaagtcaggaaataacagatactggagaggatgtggagaaataggaatgcttttacactgttggtgggagggtaaattagttcaaccattgtggaagacagtggtatgtacccaaaggattataaatcattctactataaagatacatacacacgtatgtttattacagcactgttcacaatagcaaagacttggaaccaacccaaatgctcatcaatgatagactgttagcaagactaataaagaagaaaagagagaagaatcaaatcgatggtataaaaagtgataaaggggaatgtaccaccaatcctacagaaatacaaactaccatcggagaatactataaacaccttttcacaaataaacttgaaaatttggaagaaatggttaatttctggacacatacaggctcccagattaatccgtgagaattgtatctttgtttag

SEQ ID NO: 501713 - DNA, 411 bp, Homo sapiens
  misc_feature (253)..(253): n is a, c, g, or t
  misc_feature (269)..(269): n is a, c, g, or t
  misc_feature (275)..(275): n is a, c, g, or t
  misc_feature (278)..(278): n is a, c, g, or t
  misc_feature (294)..(294): n is a, c, g, or t
  misc_feature (307)..(307): n is a, c, g, or t
  misc_feature (334)..(334): n is a, c, g, or t
taagggaatttacaaactaaagattttagtcatctggtggaaaaggagactttaagattgtttagggctgggattacaggtgtgagccactgcacctggcctatataggcttttttcttaaacctatttagtaatgttttcccaagtttattttttatttttaattttttccccaagtttatttttctatttttttttcatggaaaaatggggtaacttagcagtttcaatattgaagactgaagtttaaaanaaatttaaattcaagntacttntanaattcagttagaaaantaggctttaaaanttattagagacaagagtaccaaagcgntgtgtgtacgtgtgtgtgcgaatgcatgcttgtgggtatggacaacatttgcgagactgattacttttaaataaata

SEQ ID NO: 501714 - DNA, 748 bp, Homo sapiens
  misc_feature (255)..(255): n is a, c, g, or t
  misc_feature (361)..(361): n is a, c, g, or t
  misc_feature (399)..(399): n is a, c, g, or t
  misc_feature (409)..(410): n is a, c, g, or t
  misc_feature (485)..(485): n is a, c, g, or t
  misc_feature (493)..(494): n is a, c, g, or t
agttaaaacctacagccttatcgagggctacgctaaggactttgaccctgccgtcactgagtgcatccagaggaagaagttccccccagataattcagctccttatggggcccggtatgtgggctccatgggggctgatgttcatcgcactctgaactactgtttgtggggagttgctcgaccccgctaccaagaagagccccagtggaaagcagagactgctgtacgaaggcaaccccatggcctacgtcatgnatacggctgcgcgaatgaccaccactggtaaggtggccgtgtcagacgccattcccacacacattcaccagaggccgccgctgacctcagggacccccgacgacgngctttagttcccgcaggcaaatgaaaacccctctcccnaggaagaaanngccactaaatgaataagaaaaattgccccctacctccacctttacgttcacccccgcaaacccagatctcttatncaccctannactctcgaaagcccaaaatctcgcacagctctttactcaccgagcgccgcccaccgatcgccccccctaaccagatcatgttaacatacacctacttatcctaaactataccgggggccgtagggcgtcaccccactcccaccccctcccacccacatacctaaaaaaccccacgccccaccaccccttcccaccccactccccccccttcctctccgccccaccccccgcactacttcgttcacaaaaaacaa

SEQ ID NO: 501715 - DNA, 1205 bp, Homo sapiens
  misc_feature (424)..(424): n is a, c, g, or t
  misc_feature (440)..(440): n is a, c, g, or t
  misc_feature (446)..(446): n is a, c, g, or t
  misc_feature (449)..(449): n is a, c, g, or t
  misc_feature (465)..(465): n is a, c, g, or t
  misc_feature (478)..(478): n is a, c, g, or t
  misc_feature (505)..(505): n is a, c, g, or t
tcttgctctgttgcccaggctggagtgcagtggcgcgaccggagctcactgcaacctccacttcccgggttcaggggattgtcccacctcagcctcctgaatagctgggatacaggtgcatgctaccatgcctggctactttttgtatttttagcacagacagggtttcaccatgttggccagggtggactcgaactcctgacctcaagtgatccgtctggctcagcctcccaaagtgctgggattacaggtgtgagccactgcacctggcctatataggcttttttcttaaacctatttagtaatgttttcccaagtttattttttatttttaattttttccccaagtttatttttctatttttttttcatggaaaaatggggtaacttagcagtttcaatattgaagactgaagtttaaaanaaatttaaattcaagntacttntanaattcagttagaaaantaggctttaaaanttattagagacaagagtaccaaagcgntgtgtgttttttgtgtgtgtggtttggctgtcgtttgtggtgataggggaaactttggggagagtgattacttcttcatattttatgtgtcgacggtgaagacagcttgtagtgtgtcatgtaagatgactgctgcctctctaaggaaggtcgtgactgtttaaatagacgggcaaggttggaaccttttgaaagatgagcttttgaatataagtgtctgctagatcatggttgtatgaactaacaaggtttgcagatctgctgacttatataaagcttttgattcctactaagctttaagatttaaaaaatgttcaatgttgaaatttctgtggggctctattttgtttggctttctggtgagagagtgaggaagcattctttccttcactaaagtggtcttcttgtcttctggatagaatcgatttaaagagactagggattacaaactaaagatttagtcatctggtggaaagggactttaagattgttaggctggggggtgactcaatttgtatccagtatttgggaggcaaggggacattgagtggttcgaccagtggcacggggaactgttttaaataaaatgtggtgtttataaaaagaggacatgttttaaaaaatgccaacgggtgtggaagtgcgattttcaacacgtatagtgaaaaaatttattttttattaaaattgcgttgtacta

SEQ ID NO: 501716 - DNA, 768 bp, Homo sapiens
tctataattgtgggttgaaaaactttttttaaaaaagggttaaaccctgaaaaaaaaacaaccaaaaggccagcccttgtgggcatataacaactccgaacaacaacaagggaagaagaaaaaaagaaagaaagattatgcgtgcctcctcacatttttctccacaaaaatctggcggggggggggaaaaatcacccgggtgcccgtgaggggccgtgaagcccgtagcacgggggtacaaacccgtggggcgcggagttcgctcgcggtgtcacgcggggctccagacgggggctctatatagaaaacaagtatagagttctccccacacagagagacgagagaggcgccagagagagtgtccagaaattcacctctacgccatacaacacaagaaaatatataccgcgagagagcggcgatataatacacacccgcggaggaaagttgtgaacccgcggggaaacaaaggagaatgtggtgggagacaccacacaacaatattgtctcggaacacacgccggcggaagaacccctggaaaagaaggcggggggggccatgtgcccaaggagacgcctctcacaagagggcctctctggggggtggccccaacaaatctcgtcggggggaaacaatacgtgtggcaacacactgtgggggtggaggcacccggtggaagagagggggggggagagtgcaaaacaaagtttcacctcttggggagaaaagagtctgtccgggcccccccaccagtggggcccccccca

SEQ ID NO: 501717 - DNA, 111 bp, Homo sapiens
tctcagttactgcttggctgaagtctcagattgatggcagtgctcatcttcaacttatgtgctcccctttgcctaaagcctatggcctcctgtgcagatgtacctcatgcg

SEQ ID NO: 501718 - DNA, 334 bp, Homo sapiens
ctcttacaccacgagatgagtttacctatataccaaaccagcacatataaaacaaagtagaagactggggcgggggctcatgcctgtaatcccagcactttgggaggccgaggcaagcggatcacctgaggtcagaagtttgaggccagcctggccaacatggtgaaacccgtctccactgaaaagatacaaaaattagccaggcgtggtggtgggcacctgtaatcccagccactcaagaggctgacgcaggaaaatcgcttgaacctagaaggtggaggctgcagtaggctgagaccatgccactgccctccagcctgggcgacagggcgag

SEQ ID NO: 501719 - DNA, 147 bp, Homo sapiens
gattggcaacaccacaattttccatcattcatcactggccacatgcacaaccccatcaaaccagtcaagcacgcgtttcaacaggcagttccctgcatgcaggcatgcacttttcatatcatgtccagcaacaacatgggagcatcc

SEQ ID NO: 501720 - DNA, 282 bp, Homo sapiens
  misc_feature (204)..(204): n is a, c, g, or t
cactaatgtgcatggcatacccttcttggagatggtgctaccttattagcatgagagaatcaaaagacagtaaagatcattccaaagcattcttccaggtgagtaaccatagaataacaccactcatctgagaattaaaacagagttgacaaggtcttacagggatatttcaaccaggattttaatcactgatacgtgccagcnagattagccttaggaatagtggggagtagatatcctcggtgtgagatccaaaatatcattcattagcttgttccgctg

SEQ ID NO: 501721 - DNA, 180 bp, Homo sapiens
taatctcagcattatgggcggccaagatgcggacatcacttgacacacagagagattccaaaccagccctggcaacaattgtgagacccagtctctagtaaaacaaaaaacagtccactaaatcagaccacattaattggagaatcatatgtcacagccataagggagacaatatatatt

SEQ ID NO: 501722 - DNA, 422 bp, Homo sapiens
tgccaggggcatatgagcccttgcttcaggatcatcggaatttctgacagccctgtgaataatataaatccctaccaataccacttcaccttggccatttcctacagaataagaacctcccttagggaaagatatggtgaaaaaaaaagaattgctactcggtaggaagaaaattcggccaagttatctcaaaccacgccttgtcttctaaatgaaacctgaaggaacctatatttctcatcacctgtttcagcaaaggcataataaatccgcgtgtcagcggctcatgtaatgtaaaagcgccgggagagccaacgcggtggtcttgatatggcaagggccactccaaaaaggtgctctgagactcactcctcctcctcatgtgacagtgctgttcgcgctcgtgccgtattcggcgcgag

SEQ ID NO: 501723 - DNA, 329 bp, Homo sapiens
ccccttttggatttttggtttttaaaaaagggggcggggggaagtaaaaattttaaaataaggcccggggggggggccccccccctttttcccccctttttggggggggtggggggggcccccccccccccccccaaaggttggggtttccggctttacccccccagtttggcccagggggctttttagggggggggaaagggttccccttttttttttgggggggggggccccaaattgcccgcctttttcccccccttaaaaccccccccttaaaaagggggtttgggcgggttggcctttttccccaaattatttttgctttccca

SEQ ID NO: 501724 - DNA, 179 bp, Homo sapiens
tctttttttcttttccattccttccttccttccttccttccatccttcctttcttttcttattcttttttttgagacagggtttctctgtcttggaactcactctgtagaccagggtgacctcaaactcagaaatctgcctgcctctgcctcccaagtgctgggattaaaagtgtgtgc

SEQ ID NO: 501725 - DNA, 261 bp, Homo sapiens
tatgcatgggatactgcccagcatcctggtcatgcatacaggaggcagtagctgaagcaggtgcctggactgccccagtgaggcagtgcatgtcttgcttgtctctatggtcaattggcactcttgtgtggcctccctactgctcagacctccgagtgcagtgatgcgtggagttaatgcagcagtggtggtccttgattctggtatgagctttggccagtggtcacgcttacctgtctggtcccagacttacacatgaat

SEQ ID NO: 501726 - DNA, 804 bp, Homo sapiens
atccatccggaagcagacactcatcttgcttaccaatctcttgcaggaggaattgtgaaatggaaggctcctgttcttccgatttgtcagcactctgatcgattcacacccagacattgccagcttcggggagttttgcctggctcacctgttactgaagaggaaccctgtcatgttcttccaacacttcattgaatgtatttctcactttaataactatgagaagcatgacgaagtacaacaagttcccccagtcagagagagagaagcggctgttttcattgaacgggaaagtcaaacacaagagagacgacatgacccatctacaaatctcttctagaagccactccaccggattgaaccagcggaattccaccattcaacttccaaaatctggccttcagtactctgggccgtgcttggctgactggcatcctaccccgtggacctggacgccagtgagttactctcagacacgtcttgaggtcctcagctcaaaggagatcacgctttcggcaatgagatctaaaccagacaaagacctccttatggcacacgaacgatgacatggccttggcaaactgtagtcatgcacggaagctcacgaagaagctccatctcacaagtccagaagaggaatctccatagacacatatttacttccaaattattcatctcccctgcaataactgtgctgggagaacaattacgatccccaggcttagcgggaactcattgcctattctcagggaggtgactgccggattaccgcagatgcgctccaggactcatttgcagtggccg

SEQ ID NO: 501727 - DNA, 667 bp, Homo sapiens
  misc_feature (27)..(27): n is a, c, g, or t
  misc_feature (99)..(99): n is a, c, g, or t
  misc_feature (105)..(105): n is a, c, g, or t
  misc_feature (129)..(129): n is a, c, g, or t
  misc_feature (159)..(159): n is a, c, g, or t
  misc_feature (165)..(165): n is a, c, g, or t
  misc_feature (168)..(168): n is a, c, g, or t
  misc_feature (174)..(174): n is a, c, g, or t
  misc_feature (220)..(220): n is a, c, g, or t
  misc_feature (226)..(227): n is a, c, g, or t
  misc_feature (231)..(231): n is a, c, g, or t
  misc_feature (235)..(235): n is a, c, g, or t
  misc_feature (237)..(237): n is a, c, g, or t
  misc_feature (243)..(243): n is a, c, g, or t
  misc_feature (257)..(257): n is a, c, g, or t
  misc_feature (261)..(261): n is a, c, g, or t
  misc_feature (269)..(269): n is a, c, g, or t
  misc_feature (304)..(304): n is a, c, g, or t
  misc_feature (310)..(310): n is a, c, g, or t
  misc_feature (335)..(335): n is a, c, g, or t
  misc_feature (382)..(382): n is a, c, g, or t
  misc_feature (420)..(420): n is a, c, g, or t
  misc_feature (425)..(425): n is a, c, g, or t
  misc_feature (484)..(484): n is a, c, g, or t
  misc_feature (489)..(490): n is a, c, g, or t
  misc_feature (492)..(492): n is a, c, g, or t
  misc_feature (507)..(507): n is a, c, g, or t
  misc_feature (526)..(526): n is a, c, g, or t
  misc_feature (538)..(538): n is a, c, g, or t
  misc_feature (581)..(581): n is a, c, g, or t
  misc_feature (632)..(632): n is a, c, g, or t
acttttcctccctgtcccacccgcccnaagtgttacggtgaccacaaagcaaggtgtgcacaataattacagggggggcattttgtgtaaaccaccggnaataangataaataaaatccgctcgctctngctgctgtttcaaaattgcaatgttgagtntgtgcncgnccttcncccccccaaccctgtgtgtgagggactaagagatgacatctggtgnacggcnnggangtcncnacaccncggatgcagaaggncgangaggcagngggatgttggcttgttaaacagcagcagataaaanaaggangcatgcaggactccttcagttcttnactagtcttagaaaaactttccagaatactgcttcacactataaaanagaaaaaatatcttgcattagaatccttcaacatctgnatacngcttcacactgttctgcagcaaatactgtgcattctgtatctggtcctgtgttcctgtnatggnnangatccgatcttcggntccttctaaaggctcatcnattttgatcgangctcccgactcatgacggatttgtttaatccgctgaccacctntgccaataatagatccagccaaatctttgggaatagttacttgtgtagtantaataggtccaccaagatcaccatatgagccacga

SEQ ID NO: 501728 - DNA, 188 bp, Homo sapiens
gggtatcactaagatagtaaatattattatttttttatatttgcgaaggagatcatatcttttccttcctatagtatgaacagtattgctgtgtttccttttcttttcttcctcatttcctctgcccctttacagatttctgaaggagaaacttgtcaactcatatccacgttatctagcatagcaat

SEQ ID NO: 501729 - DNA, 957 bp, Homo sapiens
tgcggtggtcgtgctgtaatcccagctctttgggaggccaaggcaggtagatcacaaggtcaggaaattgagaccatcctggctaatacagtgaaaccccatgtctgctaaaattacaaaaaattagctgggcgtggtggtgcacgcctgtagtctcagctactcaggaggctgaggcaggagaatcgcttgaacccgggaggcagaggtagtagtgagctgacgtcccgccactgcactccagcctgggcaacagagcgagactcagtctcaaaaaagaaaaaagaacatttattgctgcatcaccacaggacagacagtttttataccgaccatactcatcaaagatttacgttggtatcattagtaactagtgcattactagagccaggtgcaggtggaggtctttaacagtttcaatgcaaagttcttctggatctaccgaaacaaacatttgctgactagccaatctaaaaaacatggacattctagggtactcaggtaccatcacgggatgcacatgggaatacattagcacacaaactcattctttgcacctcaaaattcagaagggactctaccatatcttagctcaagagcacagaggagtgccttatccccacacttgactgggctgtgacggtgggcatgtgggcccctgggcccagggctggggcccagcagccatgtggggagacaggagagggaggtggtaaccagttacacacacaacgccagacgcgcagcaccggcgaggaggcacaggaagcaagccaagatctgcaaatgcacaagcaatatccggcggtcgcacacggcggaataaatgggacgccaggactgacaaaacgatggaacgacgcacacgacatcggagagaccataccccacacaaaggacgagataggacgaccacacacacgctccacgggacaccgaggctggaggaacatccac

SEQ ID NO: 501730 - DNA, 363 bp, Homo sapiens
cttcctgagaacagggccaaatgtgtcagtatatcggattccctgggattcctcaaatcgtagaataccaggaaaccagcttaagggcaggcagagaaacttcagtggaaggaaaagttcactgaaaattctgaaaccaaatgttttttttttcagaagaaatggaagtcagttttacttttttttccttattttaattccaagccagatctttttctgatcatcttctatatacaaaacataaggtcctatcttcatctcccattctgcaacccagcaatgtggagaaatatttttttcttctctaaacaaacttctttgttagttgaacttactttaatccctaaattccttttcattttt

SEQ ID NO: 501731 - DNA, 443 bp, Homo sapiens
gttgccctccgctgaaagatctcaccttatctggtgagttgtgatcggggatgcctttgtcccagatgcgtgtaggtctggggtgctcaggctctccctaatgggagagatatacaagggtggtagggtgctggcaccactccgtgcagtggctagaaggctcacgcctgtcatcccaacattttgggaggccaaggcgggcagatcactggagatcaggaatttaagaccagcctggacaacatggcgaaaccctgtctctactaaaaatacaaaaattagccaggagtggtggtacacacctgtatgtcctagctatctgccgagttagaagtgcaaaaatcgcttgagcctagaggttcaaggttacagtgagctatgattatgccactgcaccccagcctcggtgacagagtaagacctggtgtctttaaaaaaaaaaa

SEQ ID NO: 501732 - DNA, 313 bp, Homo sapiens
tgcacaacctagggtcagttttgcaggtggtaagccatttaccaagatagttgtaggtaaagaagggcagatttattagagaaattgtgaaaatatgttgcagtgggcagctcagcagagaaggggctacctgcaaagaggcaagggctggaggaaagttttatagggtcctgctgtagggtgctacgtgtggaatgaggtcattgtgcccgcaggttgtttgtgattagctgtctctaacaattgttcatacaataattgttcattattgttctcaacttggggctctccccaacctggggacccttcctta

SEQ ID NO: 501733 - DNA, 860 bp, Homo sapiens
tcaggcccaatcatctaccgtaccggtcataaacctgttctcaatcgcgtctcccacaaagctccggccctttaaaattacggccccccggttagcccccccttttggaattgtccaccctgtcttcgaattaaacttaagccccccttgttcacgcaaactagtctttgtaccgcgcccccaataacgaaggtcaaatactctgcgggaaccccttcctttttaacccgctgctcccacaaatttttgacctttctggaatgcaaaatatttattgggccccaccaacttcgacaaattataaacaatcggagacaccctaaattctcatcctcccccgttacccacagcccctccatcttgccacgtctaaacccaggcgcccttgcttgtaatattccaaaagaacgttcttcgcgccaccggataattatggagcccctcatcaagaagctttttcgcccaccagcgattttgctaacaccctgagtgcgccacaaatgttatccacaggacaacgagaatacttcttagagacgcacctatggttggtgcgacagatatcaatctttacttcacgtcgtagatttcctctcttctagccgtatctatgcacagcaccgcctcatatggatgcattcaagcggcaaccctctcgatgcgagacatgttgatggggatatacccggaacaggtcgctagagaacaagctggacacgtccctcctcattatggggaatcaaaggatggaggaggtactacttcagcacccgcttaacgatcctgatggattccctagcgccctcgggggacgccgcggggccgcccccccccgggggccaaagaccccgcccacatac

SEQ ID NO: 501734 - DNA, 297 bp, Homo sapiens
gtttcaaaaaaaaagaaaaagaaaaaggaaaaaaaaccaagcccttgggtgaaagcgactcccaattgggttggggaaagtggagaaaacggacatgttttaagcatttgaagggcaggtagaatcaggtaagttttttggcacaaataatttttaaatgtagggcggctgcgagggttaattttgtttgtcaacttgggggcatcatggggggctcaaaaacagggttaagcattattttggggggggtttgtaagggggtttttggatgagattagcaattgaccctttaaccca

SEQ ID NO: 501735 - DNA, 1424 bp, Homo sapiens
gcacaggtgtcgtgaagaactacccctagaagccaaaatgggaaagcgaaaagactcactatcaacattgtcgtcattggacacgtacgatttcgggcaagtccaccactactgtgccactctgatctataaatgcgggtggcatcgacataaagaaccattgaacaatatgtgatgaacggacggtctgctgacgcatggtgaaagaggctcgcttcaaggtatgcctgaggtcttgcgataaaagctgaacagtctgagacagtgaagccgtagggtgattcgaaccaatgtcgattcattctgcctgtgttgcgcaacattctggaggaccagggcgaaagttacgtatgctggaacttagtcatcttgagttagcccctatggcattaccgatggaggaccttttaattcgacatagagaccgatcgaattaacaaggtgaacaattcatctaaggaccttgcatctgtggtgactgtggtcaccgtgaactatggtagtgacgatgcagtggcctggtccgcggtggacacctgtctgggaaaaggctgtgtgttaattcaatccctacacttgacaatggtgagacctagtgtacctcccaggaaggaaatgaccagtaggccccccaatatcagttgagacgattataaacaaacagaaccgtggggcgagatgtatcgtacagaacaaaatgccgttagacagtttgggtgcgggcgagttgactgtaaaaacccatagaaaaacctcggtgtaaattatcgcggagcagtggtaaggaaacgccgatacgccccatgttaaccgagaggacgaccaacagggaaacacggaacaggcaagttcacatttggcgaaacgggcgcaaaaacacatttcaccgcttaccccaaaaccagtgggggaacaactgagattaccatacaggaatacacacgttctgtaacgcaaaggttttgcgcgataggtaaaaacggaacaaagttacttggcgggcacatttatgcagcaggaaagtcgcgccacccggaggaaatccacgcgaaacgggtctaaaatgggcacaaacttctgagtgtggattaggcgcgcccgagacattgtatctattactacttgatcgaggaggatatctatagaggggggcaaaacaattctatcggcggtttgtgaaaaacgctaagatacaacccaaattatagaggcctttacgtgcggtcaattggacgcccaaaacagggtgttgggcccttgaagcagaacacgaacttgcagggcccccgttatcaggcaagtagatagaccaagagacagagagcagaaactgcggggcaggaacgaacacagtgatttgacataacaacgcgcaccctagggtgcaagaacgccggtgcgggactttctggcgcacgacaaac

SEQ ID NO: 501736 - DNA, 488 bp, Homo sapiens
gaggcggtagaggctacctcccaatgagcggtctcggcaggctcttcgggaaggggaagaaggaaaaagggccaacccctgaagaagcaatacagaaactgaaggacacagataacatactgatcaagaaacaggaatttttggtgcaaatgattcaacccgagctacaaacaggcaagaagtttgggaccaagaataagaaagctgccttacaggctttgcggaggaaaaaaagattctaacaacatctggcacaaactgacgggacattatccaccttggagttttagcgcgaggccattgtgccactaccaatgcagaagtccttcgtaccatggaccttgctgcccaaagcatgaagaaagtttaccaggacattgacattgacaaggtagatgaactgatgactgacattaccggaccaacaggaggtgggcccaaccaagatcctgtttggggggcctacaagagcctggcaccaggatgtt

SEQ ID NO: 501737 - DNA, 265 bp, Homo sapiens
gccacattcttccagagccttgcagctcttcgaaggccgggacccgtttcccggccccacagtggggtgtgtcaaacccgagagaactgtggttgcaaatttcgtgaagcatcagcatcatgttttggcagctgagtatttgagccaggagcctgccatgaggttttgagaacagagtcctgttttagagctggcagcagcatcttagcccaagagaaggttatatttccagagatgtcagtccaaggaccatagctgccatcag

SEQ ID NO: 501738 - DNA, 197 bp, Homo sapiens
actgaccacatgctcatcaccatccaggaacccagtgcccctcctgtgacactactctacggaggtatggcactcgtgtagttccatgaactgccttgaatcaccttttgcaccgtgcctgttcccgatctctttccctcagatggtgctctcttttagaaacgttatctaggaaaactgacgtgttaatggttgtt

SEQ ID NO: 501739 - DNA, 120 bp, Homo sapiens
ggccaggaccccccttcaggcttcacatagtcagggcaaaccttatgtccaaacccactttaaccaaagaataaaaggtataggtgcgttatgaacacttgaagagcccttgacggagat

SEQ ID NO: 501740 - DNA, 107 bp, Homo sapiens
gtgctctagagatccttcgcgtatctaatattataatcccgacgattcgctacgcgataaatacagcaatcctaaccagcacaggtttagtgaccaacgagccgttc

SEQ ID NO: 501741 - DNA, 574 bp, Homo sapiens
  misc_feature (4)..(4): n is a, c, g, or t
  misc_feature (6)..(6): n is a, c, g, or t
  misc_feature (9)..(9): n is a, c, g, or t
  misc_feature (14)..(14): n is a, c, g, or t
  misc_feature (28)..(28): n is a, c, g, or t
  misc_feature (61)..(61): n is a, c, g, or t
  misc_feature (70)..(70): n is a, c, g, or t
  misc_feature (72)..(72): n is a, c, g, or t
  misc_feature (74)..(74): n is a, c, g, or t
  misc_feature (83)..(83): n is a, c, g, or t
  misc_feature (105)..(105): n is a, c, g, or t
  misc_feature (111)..(111): n is a, c, g, or t
  misc_feature (115)..(115): n is a, c, g, or t
  misc_feature (135)..(136): n is a, c, g, or t
  misc_feature (180)..(180): n is a, c, g, or t
  misc_feature (203)..(203): n is a, c, g, or t
  misc_feature (232)..(232): n is a, c, g, or t
  misc_feature (236)..(236): n is a, c, g, or t
  misc_feature (242)..(242): n is a, c, g, or t
  misc_feature (259)..(259): n is a, c, g, or t
  misc_feature (335)..(335): n is a, c, g, or t
  misc_feature (347)..(347): n is a, c, g, or t
  misc_feature (361)..(361): n is a, c, g, or t
  misc_feature (392)..(392): n is a, c, g, or t
  misc_feature (397)..(397): n is a, c, g, or t
  misc_feature (420)..(420): n is a, c, g, or t
  misc_feature (446)..(446): n is a, c, g, or t
  misc_feature (495)..(495): n is a, c, g, or t
  misc_feature (573)..(573): n is a, c, g, or t
tcancncanaaaanagttttattgaatnagttgcatgcaggagcaattctgttcttcccangagcagcanantngagtgtaanagtgcaggatccagagcggggngaggcngggnggagttgggggcctggaggnnggggcctggttacttggggacgtgcagagctctctctggggggntgcagcccatcttggggggagcnggactcaaaagcccccgtaggtgcaaaancaanaaccanatctcactcctcccggngctttttgcggtattcctgcagcgctttctccgccacggtctccaaaaatttagggttcttcctggagacttctanagggaccgtcanagtaatgggatcanagtaaaaaagcttcacgaccacctcagtaanaccgnaaggaacgtccgagtaaaaagtntgggaagccaccgtggtgacccgcanaaagtactggtcttcgccttgcgtgaggtttgccagccgggacacccantaaaactgctcgttcagctgccccagcaaggaggaggtgttgagcatcttccactggtaggactttagcagcccgttnt

SEQ ID NO: 501742 - DNA, 843 bp, Homo sapiens
cagtgatgaacatggcatcgaccccaccggcacctaccacggggacagcgacctgcagctggaccagcatctctgttgtactacaatgaagccactaggtggcaacactatgtagcctcgtgccatcctggtggagtctagaacctgggaccatggactactgttcgcatcaggtcctttggccagatctttaggacgcatgacaactttgtatttggtcagtctggggcatggtaacaatcgtgggccaaaggccacttacatcagagggcgccgagctggttgattctgtcctggatgtggtacggaaggaggcagagagctgtgactgcctgctgggcttccagtctgactgcactcactgggtcgggggcacaggctctggaatgggcattctgccttagtcagcacagatccggagaagagataccctgagtcgcactcctgaattaccttcagatgtggtgccgtcagtccaaagtgtctagacaccgtggtcgaagccctacaatagccacaccttctccggtcgcatcagataggtagagaatactgatgagagctattgcatggacaaacgagggcctctatgatgtcgtgctatccgcactctgaggctgactagaccgaacgtacggggatctgaatctactgggcttaggaccatgagtgggtgttacagcaactggcctcggtttcccatggcagctcaatgttgacatccgcaaggtggcagtccacaatggtccccttcccaaggttccattgctttatgcctgggttggcccgtttaacaaccgttgaagccagcaatattgagcttttaacattgcgggaattacc

SEQ ID NO: 501743 - DNA, 628 bp, Homo sapiens
  misc_feature (154)..(154): n is a, c, g, or t
  misc_feature (160)..(160): n is a, c, g, or t
  misc_feature (178)..(178): n is a, c, g, or t
  misc_feature (192)..(192): n is a, c, g, or t
  misc_feature (210)..(210): n is a, c, g, or t
  misc_feature (229)..(229): n is a, c, g, or t
  misc_feature (244)..(244): n is a, c, g, or t
  misc_feature (279)..(279): n is a, c, g, or t
  misc_feature (366)..(366): n is a, c, g, or t
  misc_feature (369)..(370): n is a, c, g, or t
  misc_feature (380)..(380): n is a, c, g, or t
gagcctgaggaagagggcggcgacggtggtggtgactgagcggagccggtgacaggatggctgggcacagaaaggaatccccctctaaaatgaagatggtctatatccagtgtggtgtggtattaggagatctgcacatcccacaccggtgcancagttntgccagctaaattcaaanaactcctggtgccnggaaaaattcagcacatnctctgcacaggaaaccttngcaccaaagagagtnatgactatctcaagactctggctggtgatgtcatntgtgagaggagacttcgatgagaatctgaattatccagaacagaaagttgtgactgtggcacagttcaaaattggtctgatccatgnacnntcaagttatnccatggggagatatggcagcttagccctgttgcagagcgcaatttgatgtggacattcttatctcgggacacacacacaattttgtagcatttgagcatgaaaatacattctacattaatccaggttctgccactggggcatataatgccttgggaacccaaacattattccatcattgtgtcgatggatatccaggcttctaccaggtggtcacctatgtgtctcagctaatggagatgatgtgaca

SEQ ID NO: 501744 - DNA, 842 bp, Homo sapiens
  misc_feature (264)..(264): n is a, c, g, or t
gaatcatactgtcaaagacagtggtgttccacctgaattcactcaggtgtctctttgagggtcagagacattgctgataatcatactccaaaaggaactgggaaagtggagcgaaagtaagatgtgattgatagtttaatcgaggcaagacaacgggggggtcacttcataccagttttagcagtattcttctagtattttgttttcttttcccttcaaatcgcttgttttgatcttgtgtaagacaaaatagcttctgtgtgntaaatgtgggtgttccaaagacggtaatgggaaaaagctggtgaacctccgagtcttctttggaaaagcattcttgggtcaaattctgaactgcctatgtgcatcatttaattcacttaatagggtctcggtatgttcaaatcgggtgctcgaattatatggggggaatcaatgccctcagtcccctttcagtacttaccctctgccattttttaagaaaacttactgtgttgcagcaagaagaaggtcacctttttttcatggacattttgccattctttcaaggcttgtgttggttggataaacactaaagatcgagcaagggcaagtgttcattaaaatgagtttgtccagattggggccgtgatttgttactacggccatggtgatgtacgttacaacttcccgggaatggtgacaatttcaaagtggggggagactgggacaggtttgtaggaagaaaagtggacattgtgggaaagtatggactttccttgagtttgaggctactttttaaagaattgggagggtctgaccaatagaaaggaaatacgggtgaaagtaagatgacagatagt

SEQ ID NO: 501745 - DNA, 586 bp, Homo sapiens
  misc_feature (112)..(112): n is a, c, g, or t
  misc_feature (118)..(118): n is a, c, g, or t
  misc_feature (136)..(136): n is a, c, g, or t
  misc_feature (150)..(150): n is a, c, g, or t
  misc_feature (168)..(168): n is a, c, g, or t
  misc_feature (187)..(187): n is a, c, g, or t
  misc_feature (202)..(202): n is a, c, g, or t
  misc_feature (237)..(237): n is a, c, g, or t
  misc_feature (324)..(324): n is a, c, g, or t
  misc_feature (327)..(328): n is a, c, g, or t
  misc_feature (338)..(338): n is a, c, g, or t
gagcctgaggaagagggcggcgacggtggtggtgactgagcggagccggtgacaggatggctgggcacagaggtgtggtattaggagatctgcacatcccacaccggtgcancagttntgccagctaaattcaaanaactcctggtgccnggaaaaattcagcacatnctctgcacaggaaaccttngcaccaaagagagtnatgactatctcaagactctggctggtgatgtcatntgtgagaggagacttcgatgagaatctgaattatccagaacagaaagttgtgactgtggcacagttcaaaattggtctgatccatgnacnntcaagttatnccatggggagatatggcagcttagccctgttgcagagcgcaatttgatgtggacattcttatctcgggacacacacacaattttgtagcatttgagcatgaaaatacattctacattaatccaggttctgccactggggcatataatgccttgggaacccaaacattattccatcattgtgtcgatggatatccaggcttctaccaggtggtcacctatgtgtctcagctaatggagatgatgtgaca

SEQ ID NO: 501746 - DNA, 446 bp, Homo sapiens
ggctcgcggtcactggtccctggctcggttccccgcaccccggggctcacacttacccgcgcggaggagcagcggccgggtgtccacccccatcctgcggccagtctcctcgattcccctcgctctgagccgggagagccgaacagctgaagagagtcactgactcccagcccaggtgggcctgtgcacatcatgacagttttgagatgctgacacagagagacagtaactcgtctccagatgacggtttaccatcctggccagttgcagtgtggaatatttcagtcaataggtttaacagagagaactcccttccagcgagtggtgaaatttggcgaattcacatctgtcatatactttcaggcaacaggttccgagtcagtttctctgcagctgttaaaaatcacagctcagtctctctttgaataaaatatgggtaaaggcca

SEQ ID NO: 501747 - DNA, 939 bp, Homo sapiens
ctcctcctactacacgtcacgggctgtccgatggtatgtgaggtgtgcgtcgctgaggattggctcttcgcagttggaatgatcgaggacagatagtgatgagagatggggagggacgagactagggcttccctctgactctgcttggacatggagtgggacagaagatgatacgtggacctggaagatagagatggattctaatacgttccctacaacatctctccatggaaagggcgttgcaaaccgtgttcatttaagcttcgatgaaaagcatgatgttataagcttgcaagtaacagacaagatgttccaggccgatgaggaaaaatcgcttccgtctctgcctctaccttgctggcctctctggcttagcagcattggatgttgaattggtttggtcatttctcgaagtcggactgtcaggaggagccagaggggctttctgggatgtgaaggggacagtgtcagcctaagcctctggagatgcttaggatgctgaatttaaccccttctgaggcaacgtgcatgcgccccttgcaaaaaccaagggggaattgggtcacgggcctcccgcggaggtttacaagagtgggtgagtcttggagagaaccaacgactaaggtagcttagctctctgctttgttcttgggagccaagagaatgcaagatcctggtgggtgagcagtggtatgaagaggggacactggtgggtgaacagtggcatggaagtcactgatgcagcctctggccctcagtctccctatcggcaaagtggggggctcttcctatctctaaagagtttcatccctgacaggtggatgggtgaaagatccagagagtgggggtgaggggtgggccctgaagactttttgtctgtagaatctgcatattgagtgtataacccagcattaagccgggccaagatgatactggcaa

SEQ ID NO: 501748 - DNA, 433 bp, Homo sapiens
tccggaaaaggatgctgccaagaaaccgaagcaggccagtggcaggatcattcaacaaagtatccgataattttgaaatgctcgtttttaatgcctccagcaaacagcagttggatgtttcttttgaacacctccaaatgttcattagaagctcccgtttgggttttcaagaacttgttcatgtatgctgtgccgtcaagctctacactagattttattggacacctttcttgtttgcgttttcggaggcgtaatgtttttaaagggataagcacggctgctaaatgggattactagaagaccatgtcctttgaaagttaacttttcagtgactttcatactgacatttttgcatatttaaccatcaatgatctttaagttatgtacagtaatgtaagttttgcaaataaagtttaagagtaaaaaaaaaaaa

SEQ ID NO: 501749 - DNA, 285 bp, Homo sapiens
accatgttaccaataattcttgtaggtaagaacgggcagatttattagagaaagttgtgaagatatgttgcagtgggcagctcagcagagaaggggctacctgcaaagaggcaaggtgctggaggaaagtcttatagggtcctgcgtaagggtgctatgtgctgaaatgaggtcattgtgcccgcaggttgtttgtgattagctgtttctaacaattgttcatacaataattgttcattattgttctcaacttggggctctccccaacctggggacccttcctta

SEQ ID NO: 501750 - DNA, 130 bp, Homo sapiens
gtttcgtgatatgcttgatttcttgaggtatcacttattaatgatggctgtctatgtgatcatttaattgcatactctatgaccacgcacatgtaaatgccccttctgcaaggaacccagtggtacctga

SEQ ID NO: 501751 - DNA, 223 bp, Homo sapiens
tgcctccttccaacatctaatccccccttccaacttctcatacccccttccaacatctcatccccattgatgatcgttcttctctccgtattggggagtgagagggagagaacgcgatgagatgttgcaaggaggcatgagatgttggaaggcgtcatgagatgttggaaggaggcatgagatgttggaccttccaacatctcatctcggcatgagatgttgg

SEQ ID NO: 501752 - DNA, 111 bp, Homo sapiens
gctcatggcggccacaatggtatcactcgcctctttcaggttgtttttgatgtcctgcgactgtgaagctctcaccaaccccgtattttgtgtctgcaggtattgtccacc

SEQ ID NO: 501753 - DNA, 780 bp, Homo sapiens
agcggcgaggtgggcagatcaggaggtcaggagttcgagaccagcctggccaacatggtgaaaccccatctctactaaaaatacaaaaattagccatgcgtggtggtgggcatctgtaatcctagctgctcgggaggctaaggcaggagaattgcttgagcccagaggcggaggttgcagtgagccgagatcgtgccactgcactccagcctgagtgacagagagagactccgtgtgaaaaaaaaaaaaaaaataccaggtcgggtttgggaaattctttctccgtattaaacaccaaaatttaacatatagttaacttggtgttaaccaacaacagtatggccgggcgcggaagctcatgcctgtaatcccagcacttggggaggccgaggcaggcggatcacgaggtcaggagatcgagaccatccgggctaacacggtgaaaccccgtctctactaaaaatacaaaaaattagctggggtgtggtggcgggcgcctgtagtcccaactactggggaggctgaggcagtgaaaatgggtttgaacccgggaggcggagcttgcagtgagccaagatcgcaccactgcactccagccgggtcgacagcggagactccatctcaaaagaaaaaaaaacattcccagggtcgggtttcggcaatcctgccctgtataaaaacacaagaacttaagattagcttaccttgtggtaacccacacagtggttttaacacacagattgttacattgtacgatattctgagacgaccaggaaccaa

SEQ ID NO: 501754 - DNA, 306 bp, Homo sapiens
accaattcctcctcctctgatggtgaattgggctgttaaggaagtttttgattgtcatagatggtagggctttgaaaatcgacggtttcagctgccactcctggcttcaacacattgagtcactgcctagacggttctcttggtcttattcccatcctggccaatgcttaaatactatttgtcgaaaataattctttgagacagatttcagctacctcccttccaggttcgatttaacttggttgtaattgtcaatttgttgttataggccttacctgtgtgaaagaaagaaaaagaaagaaagaa

SEQ ID NO: 501755 - DNA, 359 bp, Homo sapiens
  misc_feature (39)..(39): n is a, c, g, or t
  misc_feature (282)..(282): n is a, c, g, or t
  misc_feature (294)..(294): n is a, c, g, or t
attttcgcatgttttcaacttaaaacagaaaactatgtngtgtgtggctgggcgcggtggctcacgcctacaatcccagcactttgggaggctgaggcagcggatcacaaggtcaggagatcgagaccatcctggctaacacggtgaaactcagtctctactaaaaatagaaaaaaataaaccaggcgtggtggcacggcctgtaatcctagccacttgggaggctgaggcaggagaatcgcctgaacccaggaggcggaggttgcagtgagccaagatcgnaccactgcactncagcctgggtgatggagcgagactttatctcaaaaaaaaattgtgcatgtaaaaacatgaaattt

SEQ ID NO: 501756 - DNA, 130 bp, Homo sapiens
tggggtttccccagggccccccagggggccccctttttttgggtttccaaagggggaaccccccccgggtttgaaatttggccggtttttttccaaaaaaaaggttggggtttttgtgggggggtttcca

SEQ ID NO: 501757 - DNA, 534 bp, Homo sapiens
ggccgggcgcggtggctcacgcctgtaatcccagctctcagggaggctaagaggcgggaggatagcttgagcccaggagttcgagacctgcctgggcaatatagcgagaccccgttctccagaaaaaggaaaaaaaaaaaaaaaacaaagaaacaaaaaaaaaaaaaaaaaaaaaaaaaaaacgtgtggcgggggcgcgcccgcgggcccccggaaaagcttttaaaacccacgcgcgggggggcgcggggcccccaaggggtgaatagaggaaacagaggggcacaaagacggtgttccctagagagagaaacacgcggggcacggagaaaaggggcgggggatctccccacacaaataaaaaacccccgggggggagacacccgcgagagcggtctttgagaaaacaacctccacagagagggaggtctccgaggagggagccaacaccggggagccttcacacaccacaggggagcggcacaaaggggagcctccaagatttctaaatttaaccccccgccgcgggggggc

SEQ ID NO: 501758 - DNA, 510 bp, Homo sapiens
  misc_feature (6)..(6): n is a, c, g, or t
  misc_feature (31)..(31): n is a, c, g, or t
  misc_feature (39)..(39): n is a, c, g, or t
  misc_feature (50)..(50): n is a, c, g, or t
  misc_feature (83)..(83): n is a, c, g, or t
  misc_feature (87)..(87): n is a, c, g, or t
  misc_feature (100)..(100): n is a, c, g, or t
  misc_feature (165)..(165): n is a, c, g, or t
  misc_feature (244)..(244): n is a, c, g, or t
  misc_feature (281)..(281): n is a, c, g, or t
  misc_feature (289)..(289): n is a, c, g, or t
  misc_feature (292)..(292): n is a, c, g, or t
  misc_feature (332)..(332): n is a, c, g, or t
  misc_feature (406)..(406): n is a, c, g, or t
  misc_feature (458)..(458): n is a, c, g, or t
aggggnccccaccaacattggcctcgatttnaaaacatntatcgtagccnaaaattaatgtcaaaaggaactgttctaacagntacnagagcaaaatagnaaatatttgggaattaaactgtcatgaacaaagcaaagaaaaggttagtttcaaagtgctaggcncatcaagtgagtagcttcagaaggctaggtaacatgaaataattcttaggccactctttctcatgggaatatgagctanttgttagatttcagcaaagacatccatctataatttnttcctatngtnttctaagaaaggaatctgctttagattttaaaaatactgngctttctttaatctcttgtcacatcaacctggccactgcagggcaagattttcctatcacgcaccaaggagggnggaaaggactattataggagttaaatcccattcaccaccttggacttatggntcctttctaaaaggaacccccattgtggaaacaatccaccctttaaaaacca

SEQ ID NO: 501759 - DNA, 340 bp, Homo sapiens
  misc_feature (30)..(30): n is a, c, g, or t
  misc_feature (94)..(94): n is a, c, g, or t
cccatttttaacctgtggtcagattgaaanctttgtgcctcatcaacatctacacttagaatttttgaagtagatgtcggctgggcacaagtgntcacgcctgtaatttgagcactttgggaggccaaggtgggcgaatcatatgaggtcaggagtttagagaccagcctggccaacatgatgaaaccccgtgtctactaaaaatacaaaaattagccagtaattccagctactcaggaggctgaggcacaagaattgcttgagcccaggaagcggaggttgcagtgaactgagatcatgccactgcacttcagcctgggcacagaagtagctccgtctc

SEQ ID NO: 501760 - DNA, 703 bp, Homo sapiens
  misc_feature (10)..(10): n is a, c, g, or t
  misc_feature (267)..(268): n is a, c, g, or t
  misc_feature (315)..(315): n is a, c, g, or t
  misc_feature (367)..(367): n is a, c, g, or t
gaaaaaaggngggtcctattaaaaagttttttttttttggtttgttggaaaaaggattaagatttgcaaataaaaggggccttgagctgctgataaaaggcggaagaaggtgatccagatgaaaactgttttaagagtcagatgcaaggaagattgaagatgcagatggaaaggaggttgaagatgctgccgcaaagttgttcaaagatgatgattccaatgagaagttgtttgatgaggaggaagattccagtgagaagttgtttnnccattcttataaaagggggactttgggtggttttgggagtgttgaanaagggcccctatcccctggcagcagctttattttcaggagcgatgatgatgncgatgatatttaatcccttaaacttgctttttagggagagtcccccctttacatttgcctgggcttcaggggaattactagtagggttacatgaacatgggcatagtggtaggatgccctcagattaaagccttgaagggtttccttgttccccggccccaaggggtttaaaaatatgttaattggttgtttagttaaaatgtcatagttccaatgcaagtaaactggaaacttgtttttttgtcagatttgttaaaggcacgcagaataatattttttagaggattgattgaaggttgggatattcccccataaaaatgggttggtaatttgcca

SEQ ID NO: 501761 - DNA, 162 bp, Homo sapiens
catagaggattccactttcagagtagaacagagaacaggaaaatcagcctccaggcatcagcagctgctcatgttcagtgcctgaggctccccttgccaatgtggtgaggtggagtgggtgtactttccttcctttatcaacttatcccattatcttcccca

SEQ ID NO: 501762 - DNA, 219 bp, Homo sapiens
cggcgaaacagagctaataccagtacaacatcctccagatgaatgctattccagctagcacaagttattttgaataaatatgtagaaagaattcagaattatgccccagcttacacgaatgttgggttacttaaacgacacatctacaactgtcaaaaggaagtcagcaaatgcataccaaagggcaatttagttgttacagagctgtatggacccgaa

SEQ ID NO: 501763 - DNA, 221 bp, Homo sapiens
gcaatcgtgggattcctggttttcccaatgcccaggtcccactgtgacaagcaaaatacccaacaacctgtaaagtaggcctgaccaatctgagggcagtttacatgagcaggaggtaggcccaggagagttcctgggtcctaagagttaaccctttaatcattggacaatggaggtggaaagatcgcttgaggctggaaattcaagaccagcctgtgcaa

SEQ ID NO: 501764 - DNA, 361 bp, Homo sapiens
tcaggctccagcacaaccacagtgaggcagagcatcaagtgggcttttgggttccccagttccaggattttactcttgtatggcatttctggacctgccctaagccagcggggagcccattgccctgacaggtgagtcccaggccaggcagcactcatcgcaagctgacttaagagcccttgagcctaaagggaacattggctggtagtctggcagttctccttgtggcctgggatggtgatggctacagggtgaggctcctttgcctttggaaaggggagggaagagtaggaacaagtgcgtctgtgatttgactgccagctcagcctcaatacaatagtacggcaggtagacttctaat

SEQ ID NO: 501765 - DNA, 324 bp, Homo sapiens
atctgactagctgcagatttaacatgaccattaggcattatgagaaggaagaaaaagtgctgcctcgtgtttatttagattataaaagtatggtggcacatgattttattgttcagaatagggaaggagagcttaaatataaattgttctttgataaacatcatcctgagatactaccttgcctgctccttctttgtttgatttatctgcaggctagtaccttgttctgttaaaggctattcacgcctaccggaaccctgcaccagccatggagccagagtcggaaccacaagttgatccttcacgacaggtctaaatgcaata

SEQ ID NO: 501766 - DNA, 455 bp, Homo sapiens
  misc_feature (12)..(12): n is a, c, g, or t
  misc_feature (104)..(104): n is a, c, g, or t
  misc_feature (172)..(172): n is a, c, g, or t
  misc_feature (192)..(192): n is a, c, g, or t
  misc_feature (291)..(291): n is a, c, g, or t
ctaaaatgaagnttagtgctttctttatatgtaggaaagatgggtttaggttatggcctttgccctttaagtcgtttcagggtgtcccttctacaccctccagntacgagggacttataattcctttcccaagctgcccatgggcatccccagggccctttgttccttttcntgggcttatgccccagaggntggggttggcccccatttgtatccttagtttgaggaggattggcccagcggtaggttttgagagttacaggttgcaatggtgtgggagggagccgtggntagtggaaagtgagaccacccggtccaccaccgcatcctagaggggcactcagaaaggcccagaggtggaacgtcatgcctggactccctcactatttggaaagacttttttggagtcctgtcatttaagctacaataaagctttgtttttcattggaaaaaaa

SEQ ID NO: 501767 - DNA, 315 bp, Homo sapiens
ggcgtttacggatggcgccaagctgcatgtcgccctctgatgtgcaggcagcagcctcataggcaactcctgggcccgcccgcactccccacatctcggaatgcagggccagatgttccatgtggctgctggccgagccaggcggtctgccctgcagcagctgcactggtgggctggtgaaccggccctcagccccatccccgtgtggctgcagagtggccccatggctagaggtctcgagctctggcagaggaggatgcctgggagggggcagtggtctggcgggctctcagtgccaggggcatccgcgatcca

SEQ ID NO: 501768 - DNA, 489 bp, Homo sapiens
agcgggtcgttagctcggcagtgctggcagcgctccgggcgcgcttactccattggccggccgtggattgtgagtacgtattgcagagcagcatgcgggcgtgcagagcctggtgttgggcatcctagcggggatgtgtggcacttctcctgcagcgcctagtgtgccccgtgaaagtgacatgggaggccgcgtggatgccaacctgcaacaatgtcgattacacgtctggaaggctatgaatagtcggaaattactactctccttggccaggttccaccaaacatgaacctaagacttattgagtacggtgtggtaccccagccatcaaatcattttgcttagcaacgactaagaaacttacgatcgaacatcacacctcgaattacaacagcaaatgttgcgactagagagtggcctacggccagaggagaaatacgcggcaccgcgggacgaacattgaacacgtgttttagcttgataactggg

SEQ ID NO: 501769 - DNA, 588 bp, Homo sapiens
gggaccctaggcaaacaaaaggtggaggagccatgatcaagtcagcttcatccctgggatgcaaggttggttcaacatatgcaaatcaataaacgtaattcatcacataaacaaaaccaatgacaaaaaccacatgattatctcaacagatgcagaagaagcctttgataaaattcaacaccgagtcatgctaaaaactctcaataaactaggtattgaaggaacgtatctcaaaataataagagctatttatgacaaacccatagccaatatcatacttaatgggcaaaagctggaagcattccccttgaaaaccagcacaagacaaggataccctctcttaccactcctattcaacataaagtctggccagggaaatcaggcaagagaaagaaataaagggtattcaaatagaaagacaggaagtcaaattgtctctgtttgcagatgacatgattgtatatttagaaaaccccatcgtcttaacccataaatctccttaacctgataagcaacttcagccaaattttaaggatccaaaaatcatgtgcaaaaatttacaagccttcctatattcccaataccaga

SEQ ID NO: 501770 - DNA, 221 bp, Homo sapiens
tatgcctgtgtgcctcatccaacctgacctgcgatcgagaggaatacgtccagcagatagcggatgccctgcagtacctgcagaacgtctctggagacctcttcagtcaggtgggttctgccacccacccctcacctgatgagagggccatccttgtccttgcgcgcaatcccagtcaatacagcctctgagagcatcccccttgcgggactcccgttcct

SEQ ID NO: 501771 - DNA, 1396 bp, Homo sapiens
gcgggctctcgggatgtgaccggggctcgtgccttgtggctgcaggcggctggcttcctgtaggctgtcgggatcattgagcagggttgcaggaagaggggccccgaaataccctttcttcttcagggtctaaagaaaactggcgcgctggatgcaagtacaggaacttaatacacaatggcaagagctggaaagttgaagaggagcgagtcctatagctcttgttagatgcccatgtgtagctcaggttgtcaatgccaagacacatacaactgcgcgactcacgcagctgagtacaacagccgccacgcggctcttccatacagtccatggcactcaacacgtcaaccgtctcacaggcgcgacccaacaagcttacaacacaggacgtgacttgagaaacgcaacacaggactcaagagccttctatgtcggataggaagcaaggggccacaatgcgcagcatcgacgctccacagaatcccgtacgtcccgaaggacaaggttccgctatgccgtacgactcgaagtgctcatcgagccacttgtatcacgggaggcatttggacgacgacgggggcatggcgatccaagcgtcatatacgtgcacagtgaatttctccaaccatctgggaaaaaagatttccacagtcaattggggggccaactggacactgctcgcccagtgtgaacaccaggactgggacaaccacttggttacgcgaggaaaattgacacgggaggacaactatagacatcggcactatgaaaataggggcagcacctcagaatgggcgagacgattcacggaggcacaccttatcacctgcacacacgactcaccagcaggcaacagagcaccacgccccgcagcagagcaccaaccgccaaaagcaccacggcgacactaagcgcagactctcgccgtgctacgccagacacgtagcacaaccacacgaactcaggcaacgccatccttcaccgcgagacacccaacacaacgacgcgacccgccttgcggagcgccagactaggcacaccagagacaacgggacccaaacacagacgtagtcctggcctacgccgtcaccacacgcccaccatgccaccacccggcactaacgccctgcgcgcactgacggacaaggataacacgcaaaggacgaggccttacacggaataccccccacacacaagccacgaaccgagcaaaactaatctcaacaaaaaccacccggaaagacaccgctctaagacacacacgccgcacatcaaccgacaccgaggcgaccccagcaccggcaagcccacactgaagcccaccactgaaactgcccaaaccggggcaccccagcggagtcagaccatccaccgacagtataaccacaatgacaga

SEQ ID NO: 501772 - DNA, 717 bp, Homo sapiens
agcggtgttggccaggctggtctcaaactcctgaactcatgtgatccgcctgccttggccctcaaagtgctgggattacaggcatgagccaccacacccggctattcttggtattctttattcttggttctctagcctttagaaaagaaaattctatcttggtaaggaaaatgtcatttaatcaagctccagtacagcttgtgtcaagacctagataagaccaccttctagattgtgttcctggcagtatgacattataaaactaacttgagaattgtcaggatatctccttgttccctgacgttgttattgtaagaatctactacattccttaagaagttaaccataatgccgagttgtcaccgaagagatgagtagttgttatcttgccaaggaattatcttctgtagtagcctgaatattggcgttatatccaaaaaaggcgttaacctccatcgagagacttcttctgcgcctctctctcagcatatgcttgtgatattcgaagtgtgtaatagattggagctatcaggtcacttatttctgaatacatgtatcttctttcttcatagctgtgaagcagggataccaaggaaagtgcttaactgctgtctttctctctcggtgaatgcttatcttaatgaacagctcaactgacaaaaacacctccacctaaaagcaggaaagatggcaattctacatagcagctattatccg

SEQ ID NO: 501773 - DNA, 447 bp, Homo sapiens
  misc_feature (24)..(24): n is a, c, g, or t
  misc_feature (66)..(66): n is a, c, g, or t
  misc_feature (69)..(69): n is a, c, g, or t
  misc_feature (101)..(101): n is a, c, g, or t
  misc_feature (107)..(107): n is a, c, g, or t
  misc_feature (129)..(129): n is a, c, g, or t
  misc_feature (131)..(131): n is a, c, g, or t
  misc_feature (135)..(135): n is a, c, g, or t
  misc_feature (137)..(137): n is a, c, g, or t
  misc_feature (141)..(141): n is a, c, g, or t
  misc_feature (143)..(143): n is a, c, g, or t
  misc_feature (145)..(145): n is a, c, g, or t
  misc_feature (163)..(163): n is a, c, g, or t
  misc_feature (176)..(176): n is a, c, g, or t
  misc_feature (183)..(183): n is a, c, g, or t
  misc_feature (189)..(189): n is a, c, g, or t
  misc_feature (242)..(242): n is a, c, g, or t
  misc_feature (285)..(285): n is a, c, g, or t
  misc_feature (307)..(307): n is a, c, g, or t
  misc_feature (353)..(353): n is a, c, g, or t
  misc_feature (403)..(403): n is a, c, g, or t
ctaaccaagaaacacagagaaaanaaaaaatatagaaaagtgaagattcagaaagaaaaatgacanaanaagaggataatcggtaacaagctgggcctgtnatttcnaaactacagtgcgaatgaaaanangggngngagngngncaatctacatgtttttcnaccaggtaaatanacctganagggtnacctaataaagaaaaaaggctttaaaacttttaaccacaaagaaccttccgcnggcgcacattatgaagatgggctatgcatgtggccagactaantcatttcccaggagattcagcncactgcttagctgcaggaagtggtccaacaatgacagagtatattnacatcaacaccagctcagtcaaccaaagaagcacagtaaaaatttaaaancacactgtttatatccattagtatgtcaaaatcacaatacacag

SEQ ID NO: 501774 - DNA, 833 bp, Homo sapiens
tgatctgtaatgacaagaatctgtactgcaaggtaaaacctactccccaaaaatgtgtggcttagggtctgcattcaaacgctgtagtccgatgttcatgccgaaaaatggctgggaacgttgctttatttacattcagtcagcgttgctttcagatcacactttatccacacaggaaagccagtcagcctatcatgaagtagttattaaaataaatgtaatgaatatgtctacaaagtatacgtttagtggttcattttgctaaaatgcacatatatttgatataatttagttctgacggaagttcagctagtttttctcctttgtttgacttgtcaatttctatctggtttttaagggtctgagcttagcttgtgcatgcaaggttctgggtttagttcatttcatttctttgagcacagctttttcaccttttaacttccgctcgggctattctctactcttacctaagagaaatattggccaagtcgagtttttacatataatacaacgtgtgttcttccagtacattggttcctgtccccatctctgtgaactgtcccgagtattggaacagtatgtcttcaataattcaaatgttactttggagattacatgtgttaaatatagccctagagtttattctcggacaatcaaaccagtctcttaccgcttggcacgcacaacaccacacacacagaccagcccaccagcgacacaacacgcccagaaaaaggagcgggggctcaaaaactcccggcgcccccaacacgcgcccacatcgtacaagggccccaaacgcgcttaaccagggccgcccacaacacccacgc

SEQ ID NO: 501775 - DNA, 152 bp, Homo sapiens
gctggctgtggtgtgcgctgtatccagcctttggaggcaacgctgtggatcacctgaggtcaggagtcgagacagtctgaccaatatggtgaaaccttatctctactaaaaatataaaaattagctgggcatggtggtgtgcgcctgtagtt

SEQ ID NO: 501776 - DNA, 168 bp, Homo sapiens
taagtagaggtggggtttcaccatgttggccaggctagtctccaactcctgacctcgggtgatccgcctgcctcggcctcccaaagtgctggaagtacaggagtgagctaccatgcctggccctggtttatctttttttaaattataagacattttcaaggtcgacgc

SEQ ID NO: 501777 - DNA, 288 bp, Homo sapiens
agcggacagtacaaaatagaaacttgatttttttacaaggtcctcctgtacatacaagacagcatctgctctccagtgcccgggactggcagcggggacctcagtgtaggcaggcaggccgaaggcctgccgtcgaggatcagtgattgggctgagacagacagttgcatgaaactggccggtcaggagcacccagcgagagttcatccatgctctggctggacgggaaggcaccgcggccggttgggagtatataatatatttgtcagatacacttttgtttgttcc

SEQ ID NO: 501778 - DNA, 790 bp, Homo sapiens
ctgctgtaacaaattaccataagtttggtgcttagaacaagataaaggtattattctacagttctgcagctcagaagtctgaaatgatattcacaggactaaaactaaggtgtcagcagggctgtgtttctttcttgggggctctaggggcaatccattttcttgacttttctagtttctagaggcttcctgcattctttggctcatggacctttcaaccatgcgatatgtaaacatgcagtatcgcatcttcaaattctctttgactctgatcttttgcctccattttccatgtttaaaggacacttgtgattacattgggcacacctggataatccaggctgctcttcttattttaagatcagctgcttggcaactttaatttcatctgcaatgttaattctctcttaccatatagcataacatactcacaggttctggggattaggatgggaacatatttgagaggtcataattctgcctactacattgatacacatattttctgttaacataacatttatttatgtacgatatggctttttaaactccaattaatttcgttatgagggaaggaaccaacacttaatcactcacttacaaacattttctgccttaaagtgtgggtcatgaaccagaaggtccagcttatgtaggagcctgttaaaaagggcaaggccttatttccatctcacggcctactgattgaatcagccttcactaaaacccggttaatacccgacggacaaaaaacatggatccaagggacccataggcagtataatcacgg

SEQ ID NO: 501779 - DNA, 393 bp, Homo sapiens
acgcattgtgtgcacggagtgggtgttgatggaggagcacgacgccagagtgccagtcctggaaccgcgcagagtggagcaagcaccacctgtgatctactatgtgcctgacttcatcttcaaagaagaggaggagtgtttggttcgacagggttttaatggcccaaaggcaaagtggacccagctctctgggagaaaggtacagaactggggtgggcttcctcatacccgagggatgggtcctgagagggtgtccccaagggttcagggcttcgtggacaaagagtgcctctaactctttggaggcctcccagattaccatgttctcgtggaccagaatctgtctggggagggcattatgggccacacacccttggtccgtgtgcccccctt

SEQ ID NO: 501780 - DNA, 198 bp, Homo sapiens
  misc_feature (19)..(19): n is a, c, g, or t
  misc_feature (85)..(85): n is a, c, g, or t
  misc_feature (91)..(91): n is a, c, g, or t
  misc_feature (156)..(156): n is a, c, g, or t
  misc_feature (158)..(158): n is a, c, g, or t
ctacgaacgagtgagagantatagtcagaaagtcctggaacgacagcctgataatgccaaggccttgtatcgggccggagtggcntttttnccattctggcaggactatgacccaggcccgcccactaacctccctggctgccgtggaataggcantnaaaaggtaagcaagaagggttttgaattgtaaagacaaat

SEQ ID NO: 501781 - DNA, 261 bp, Homo sapiens
gtaagcagcaggaggacaacatgtgctttatataccggggttgtagcatttagtggtgcagcaacttgcaggtggtttttcctctcactgtcttcacattttctcttttattagcacaggcagcagtcatttcactggcacaggaagcagcacaaagcaaagggcatgtctgcaaatttgaatcacagtcagcaaacatgtttcaacattgtctcgcatgggcagcaagcatgcggggtcaccgagctcgcaattcgtcaa

SEQ ID NO: 501782 - DNA, 126 bp, Homo sapiens
gtgattgctgcggaaatcatcagggtagcattttcttgactatgcagatgtgcagacctggtggctacttctgcatgtgatcgcaggtccttcactgtcattgagcagatatgccgtagcgtggga

SEQ ID NO: 501783 - DNA, 383 bp, Homo sapiens
gtaactgccaccactgtgcatgactcaatacttgcacaatacgctgcgcgtggctatgcaagtcatgagcaaacagggttccctgtctaatgtgcagtctcctctctgaatatggatcatcgtaccttatgtgacggatattaacagttcctctaaggcctttggagcgactgcctctaagaaacatccagcattcctgacaactcctagctctctctcgagataagacttgtagcctgtaaaataatacaggataaaccagttatccactcagtgaacagtcccacacattgttatatcatcatgataatgatacacagacgccccccatgtggttatgatgctagcaccctctgcatatatactctgcgcttccaacacca

SEQ ID NO: 501784 - DNA, 137 bp, Homo sapiens
agcctactacatcagacatgtcctcaaataaaagagtcagaaactgctatgtgccttaggatttgtgtccccacccaaatctcatgtagaattgaaatccccagcattggaggaggggcctggtgcgaggtgactgg

SEQ ID NO: 501785 - DNA, 169 bp, Homo sapiens
actgaagataggcagtcgtcactgatctcagattcaaccttgaccatgggcagtgaccagattgaaaggggagcaagttcggcagttggagagttgccctgttaccccctgcattgtcttgccatttgccagcctgtccagggcatgccaccacgtgggcatttcaggg

SEQ ID NO: 501786 - DNA, 270 bp, Homo sapiens
aacgatgaggtgcttctgattctgtccaggtgaatagggttggagacttgttcaagatcgacaaggagtacttgcttaatatggctacagaggagtgaggaatgctgctgtagcgatacctcattgctaccttggcttagattcttcagaatttctgatcctcttccatagcctctataatcactcttcacgatataattcctcaggatacaataccttgcctctccacggttcatatgtcttttccttttgttttggaaaaaccaacaa

SEQ ID NO: 501787 - DNA, 301 bp, Homo sapiens
acgccatatagatgccaacctatgatatagcagtctcacgaagtctggagttttgcctatccaatggccaatctcaaagtgatcagaaacttagatgagagactcagagtctattaagcctggattcataaaactgctccgtgaaagataaagtaaacacattgtgaattgacacaaagtcctttagaaaccaggcccccaggttttaacagaccataattgaggcagcacgggctctggtgcaaaatcccccaagccacttttggggaagaacccaaggccaggggcgggaataaccttt

SEQ ID NO: 501788 - DNA, 877 bp, Homo sapiens
cagagaaaggcgaagctggatgagaactcgggcttccttcagggcaactggaaggcggagggtggtggagtcctggatcggggaagaaggagaacagctgaagacagatgattatggccgacaacctgtctgtcatgtgcagacggcatcctcacgcaaacgaggaaacttgtgacgctgggctgcaggccttccagcaggaaggcatggccaacatcactggcctcaaagatcagcttctcgccgccgaaacacgttcagtccaaggccatcgaggcccggcacgccgccctcatgaagaggtggagcctagcttctgggcaactctagccgcccgctaagaagaagcttctggaggctcagagtcacttccgcaaggtggaggacctcttcctgaccttcgccagaaaggcttctgccttcaacagctggttcgaaaatgcacgaggaggacttgaacagagcccgtgcgctgtaactccttggaagaaatcaagagcttggcgcgaggcccacgacgccttccgctcctcccctcagctctgcccaggctgacttcaaccagcgtggccgagctgggacccgcagatcaagagcttccgcggtaggactccgaaccctacacctgggtttaccatggaggccctggaggagaactggaggaacctacagaaaatcatcaaggagaggggagctggaagctgcggaaggaacagcggcgggcaggagggcagaacggacaaggctgggccccggaggtttgccccagcaccgccaatggcctttcacccagtgcgatccaagagacccggagaatacctactcggactgggcatcgcattatcgacgagcgcaatccgagtctattaggtatgaa

SEQ ID NO: 501789 - DNA, 419 bp, Homo sapiens
cgaggccaggaggagggtggatctccccagagcaaagcgtcggagtactccgcctccttctacgcctactacggtggcgagattagacccagagaataggatgagacacgtcaaagtgcgagctggactggtgcaatagattcgagagctggctgtgagtggacgctttgcgtgcggatgaagacagacatacgctgaataagccgacgagactgcggctgactgattcggtgaactggagagttagtcaggtgagcaggaaatggtggacgataacaggtgttggatcattaacatggatatgacactccaggttaagcgctagatggtgagctgagcgtagctgaggcagacagtattttgcgtgcacttcccctgggcgtatgtattagcttagcaccgccttctttggacgcctg

SEQ ID NO: 501790 - DNA, 474 bp, Homo sapiens
  misc_feature (451)..(451): n is a, c, g, or t
cggtatcaattattttagctgtttcataatcattaattgttatgtaagaagaatgtctgtgtttttccaggaatgcatacttgagtgtgtagaggtaaaatgacatgcctgggatttgctttaaaataatatcagcaaagagaaaaggagagggagaagataaacaaatgtagcaaaatcatgaaaagtattgaattaggctgatgagttaatgggagttaattcaagtcgtctttatctacttttgtgtatatttgaaatttttcattataaaaacatttatacagttcagggtttttggttgtcttttatgtccgccaccactaactagattgtgtactctaaggaagggattacaacttgtttttgaatctctgttgctttatatagttgctgacattgtagcatagtgtatcatgcacatacagtgttgaataaattaataaaagcntatttaattaagtataaaaaaaa

SEQ ID NO: 501791 - DNA, 217 bp, Homo sapiens
ggcgctgagactgcaggcgagccttaccacgtcaggtgtgtcatgaagagagaggtaccacagccccggtgcctgaggccaccatttgctgggtgatcgtggggttgtattacaaccccacgatcactccaacccctgcttctgaggtcacatctcctactctgaccctcctgcctccctctgtcacagatccttgtgaaagcattgtggcccctgg

SEQ ID NO: 501792 - DNA, 251 bp, Homo sapiens
  misc_feature (19)..(19): n is a, c, g, or t
  misc_feature (35)..(35): n is a, c, g, or t
  misc_feature (163)..(163): n is a, c, g, or t
ccgagacgggctgatcatnaggtcaggagattganatcaagaccatcctggcggctgggcgtggtggctcacgcctggaatcccagcactttgggaggtcgaggtgggtggatcacgaggttgggagatcaagaccatcctggctggcacggtgaaacctgtntctactaaaagtacagaaggttagctgggcgtggtggcgggcgcctgtagtcccagctactcgggaggctgaggcaggagaatggcgt

SEQ ID NO: 501793 - DNA, 163 bp, Homo sapiens
aggtagagtctattgacgcaccccttgaatttgggctgactgtggctgggcgcagtggctcacacctgtaatcccagcactttgggagcccaagcgggggcagatcacgaggtcaggagttcgagaccagcctgaccaacatggtgaaaccctgtctctacta

SEQ ID NO: 501794 - DNA, 738 bp, Homo sapiens
  misc_feature (738)..(738): n is a, c, g, or t
gccgggcgcggtggctcacgcctgtaatcccagctctcagggaggctaagaggcgggaggatagcttgagcccaggagttcgagacctgcctgggcaatatagcgagaaccccgtttctccagaaaaagggaacaaagaaaacaaaacaaaggggcaaaaaaacaaacaaaaacaaaaacaaaaacaaacacggtgtggggccgcgcccgcgggccccgcgggaaaagcgcttcagagaaaacacacaatcgcgggtgaggaggcgcgcggggggcccacaaagagaggacacagggtgacgaacagaggggcgcacaaaagccgaggagtcccccacaagagggagaacacacgcgggggcgccacaggaaacaagaggggcgggagggagatactcctcccccagccccactacataaaaaaaaaaacagaacgcgcccgggggagggacacacaaccccggaggagccgcgcgctcgccgggggagacacaacaacaccatcccagcgagaagggggcgaggagcacaccagccgagagagaggaggggcacaacaacaatagagggggggggacagacacactaacaatacacacaaaagacggggggggcagtcaccccaccaagagaaagggagcgaaagcacccgcggcggaagagaaatgtcataaacacaaacatattatacgagcgcccaccgcgacggagcggggtcgtggggggggcggggtgatn

SEQ ID NO: 501795 - DNA, 330 bp, Homo sapiens
gcctggcccttgcctataggcggcattttgaaatgtctttgtggccgggtgtggtggctcatgcctgtaatcccagtactttgggaggctgagggaagtggatcacagggtcgggagtacgagaccagcctgcttaatattgtgaaaccctgtctctactaaaaaaaaaaaaatacgaagagcagccagccatggtgactggtgcctgtggtcccggctgctcgggaggctgaggcaggagaattggttgaattcgggaggtggaggttgcagtgagccagggtctgccactgcactccagcctgggtgatagagtgagactccatctca

SEQ ID NO: 501796 - DNA, 93 bp, Homo sapiens
ggttcgtgaactctttgaaatggccagaacaaaaaaagcctgccttatcttctttgacgaaattgaagctattggaggggctcgttctgatga

SEQ ID NO: 501797 - DNA, 554 bp, Homo sapiens
  misc_feature (166)..(166): n is a, c, g, or t
cagtgaacagctatgacaaaagatacaaggagaaaaatcacatgatcttcccagcaggtgcataaaaatcatttgacaaaataattgtccattcatgatttaaaaaaaacaaaactcagccaagcatagtggctcatgcttgtaatcccagcactttgagaggccnaggctggcagatcatgaggtcaggagatggagaccatcctggctaacatggtgaaaccccatctctactaaaacaaaacaaattagccggcgtggtggcgcatgcctgtagtcccagctactctgggaggctgaggcaggagaattgcttgaactcatgaggcggaggttgcggtgagctgagatcgtgccacagccctccagcactgcagcctgggtcacagagcaagactctgtctctaccaaaaaaaaaaaaaaaattgttggttggacagactgggaagagagagaaagggaaagggaacagaagctgtagcccaagagtctgaaaagctgggctggagtgctgagcacctgaaaaagcccaaagcgaggcaggccgcggggtg

SEQ ID NO: 501798 - DNA, 2005 bp, Homo sapiens
ggggccggggttagtagcccaggcttagctgggggggcatgaatttggcggggaggcccagggaactgaccacaagctagggaaaacttggccattaaggaagaaaagcacatccgaggtggtctgagtggagcaaggcaggaggggcccagcctttggcttttgcgagtggaggatgcagtctctttgtggttcctggtcctgtttgagaacctggggtcttgaggtggcctgtctgtgcctctcctttgtttcggcctgggctgggtggtgcttgtgagcatttgctccaggatccgcagacgtttcggtggtgacacctgccacgcacacgtgccgcactggggaccaggaacagggatgagtcaggcacagtccttgccttctgggagctcatggtccagaattgaggattcactcaacagatgtcccttgagcgcagaggatctggcagccccttctcagggggccggggcccaccgatgttgcatgctgagggtattttactttaacacccatggtgtgtctaggagactgaggtttccctggtttcatacttgctatctttcctcacgctgtgcctgtccccagcctggaaggataggtcagaaatccttcaaggtagctgtttcaggagatctttttctggccccaggtcaagttctctttggttccgtcctgagctcattacctcctggtgaatcatcacaccatatttattggacacctacagcttgctaagcattatatagaggcctgtctttgaggaaaggaaattaaacaagccctgtacagatcccccaagatgagaagtagctttagttgaggccactgctgctcttagcttctctggcccatctatgcttctagatggaacgtgtgtttaagatgcagattacaggtgtgagccaccacacccagcccaggctcattcttttaacagccttagcgcaactactaatgccaccaagagcggacaggaaggcctgggtcccatccccttgcgaagccagtaggtgaaacatggcagcttggcctggttccacttgcatcgccttttggtcctcacagtaatcctcagagtggcccaggtgggtagttggttggttggtttttttttttcagacggtgtctcgctctctcgcccaggctggagtgcagtggtgcgacctcggctcactgcaacctctgtctcctgggtttaagtgattcttcttctgcctcagcctcccaagtagctgggactacagtcatgtgccaccacgcccggctaattttttgtatttttagtagagacgggtttcaccatattgaccaggctggtctcgaactcctgacctcatgatctgcccgcctcagcctcccaaagtgctgggattacaggcgtgagccaccgcggcccaacagcgggaagtattttttccattgagtagatgagcagaatgagactcaaggggttgctcagatgggccgggcatggtggctcacgcctgtaacctcagcactgtgggaggccaagggggcagatcacttcaggtcgggagttccagaccagcctgttcaacatggcgaaaccccattctaccaaaactacaaaaattagccgggctcacgcctgaaatcccagcactttgggagactgaggaggggtcacctgaggtcaggatgtcaagatcagactggccaacagaatgaaaccctgtctctacaaaaatacaaaaattaggccgggtgccgtggctcatgcctgtaatcccagcactttgggaggccgaggcgggcagatcacaaggtcaggtgatcgagaccatcctggctaacttggtgaaaccctgtctctactaaaaaaaaaatacagaaagttagccgggcgtggcacctgtagtcccagctactctggaggctgaagcaggagaatggcatgaacccgggtggcggcgcttgcagtgagctgagctcccaccactgcactccagcctgggcgacacagcgagatttcccatct

SEQ ID NO: 501799 - DNA, 383 bp, Homo sapiens
gagagagacatacactgctgaacttccataacagtcaatggtacagtcaaacatcacatgtacagaacacacaactctagatgaactgaaattatcagataaaataaaataaaatccaattgcaggaaacacaaaaatcaaaacattagaggatcccatgaaatattcttaaacccttaatgaggattctcactggactcgagagtcatttcgtatgtagagacatatcacaagtatggaccctattaacccgagtcatagggaattctagtgggcagcctgaatggagtggcctgcatcagcacactctagcacgaaaaaatggtaaaccatgtgttttgactactgaaagactcgctcttaacttaagcctctgaatcatc

SEQ ID NO: 501800 - DNA, 107 bp, Homo sapiens
ctcactgtcgtcttcaactctccttaatgagattaacactattctcaccagacctcctaggcgaccagaacattataccctagccaaccccttgtaaaacccttccc

SEQ ID NO: 501801 - DNA, 1161 bp, Homo sapiens
  misc_feature (838)..(838): n is a, c, g, or t
  misc_feature (937)..(937): n is a, c, g, or t
gcatagtacaaagcgtagctcacgctgtcaaaggcaggttcgcgtatgacaactaagctagtcgtgtgttgtgatgtactttaattcgtgttctcagcgtcaattaacactccctcatcttcgggcttgttgttttccccctccccggaggttgtgtctttgcctctcagccaccacccccgtcggggccgcccttgcgactccctccatcgggtgtgcccggggcagcaccttttgcggccctgtttggggggaagacaaggtgtcgctgtgtccccccccctccctaaagtgacgctccgctcctgagagggtgccgccccgtgttccccttttctcttccggggcttcgcgccccaaatgagttgagaggggtaccccctctctcaagccccaccccggtcaggacgtacagggcaccgggccctggatgtcccgcacacatcggttcttgcttgaccacccaagataaggacccggaagtcgtcttcatcgggacccccttggtcccgactcaagcaccacatgcgagattctggccgaactcttctctcctctgcaagcacttaactttggccttggtggtgacggcacacagcatgtactttggcggctgtgagaattggggaactggaacacatccggcccacagattttggtggtcttgggtgggcccccacaaccccggacacccagcagagccggtgactggtggcaatcaaggccaattgggccaactggtgaatgagcgaccacgccccacggcccgggttttggtgctgggcctgcttccgccgagggcccaacaatcccaaacccacacttcgggaaaaagaanccgaccacggtgaaacgaagctgtgtaacgggccggcacactggctggcacacacccttcgggcccacacttcctaagaatgccgacccctcggctttngtgcacactcacagatggcacccacatcacgccactcactgacactgtatgattacctgcatctgaggccccctgggctacacaccctgtttgccgggctctgcaactccctgcttttgcgttctgctggccccagaaccacgggccaaaggtgctcccctgctggagcccgcaccctaagcatcctgctgccttcccacaacatttaactctccttcctcaga

SEQ ID NO: 501802 - DNA, 646 bp, Homo sapiens
ggaagggcatattgcgtgcatgtggcctaagccagaattatggttactctccagccaaacatgtcagtgagttaagcataacaagcaagcatgatgcaaacatgtctgacctacagcatagggggtgtttgtcctatgcacaattatcgatcgtcattcagttatctcccgagccttcagtagcacatattctcgtcagagcagtccctttaccggtgcagggctaaggatcgatcagtacttagccattcaatgagactatgttacagactatcgcatgtcgagatagcttggtcaaatacctgcctttccagggcacatggaccctgcagctctccacagtgctatgtgtctctggtttattagagctagagaatgccgatgtcttgtaccaagcacactgtctgtaaacgttctgttagcttagactacatcgtgctcaaccttaaatcccatagcccttggtttcagctaagacatgtttttgtaaggtcaaggttcgggcacagtgactaggccataactgcaccttcacaacatgtcatcgtaactattgttcaaagtgcaggtcttgttccaaatggagtcttacatgtctttccgatgtacatagacacagtaacagtctgatcgctcactaatgtac

SEQ ID NO: 501803 - DNA, 123 bp, Homo sapiens
cttgtgaaagctgtacaacaaaagaagtgagcaaatatttgatcttacatcacatatctttaagtactacagatttcactcatttgttcaacaactgtccctaaaatctcatcaactacatca

SEQ ID NO: 501804 - DNA, 355 bp, Homo sapiens
  misc_feature (79)..(79): n is a, c, g, or t
gtggagacggggggtttctccatgttggtcaggctggtctggagctccagacctcaggtgatacccctgcctcggcctnccaatgtgctgggattgcagctgcgaagccaccatgcccgggtgctgtgatagttgagatgtaaaccaaaggtaaaattctaagacatccaatccgactgcatggaccctgcctgttgagcaaggacattccaaaggatactgaatagaccagctttagccatgatgggaaggggaggtgtcaaacctctgctttctacatatgatgggggtggattccaacacggctgaccagccttaattttcataaaagatatccttcacaaggcacgggggt

SEQ ID NO: 501805 - DNA, 331 bp, Homo sapiens
atttattaactaagtttaaactataaattatcttaactgccatgagcggtggctcacacctacaatctcagcattttgggaggccgaggccgttggaccacctgaggtcaggagatcgagaccagcctggccaatatggtgaaaccccatctctattaaaaatacaagaattagccggtcgtggtggtgcatggctgtggtcctagctattcagcaggctgaggcgggagcatcgcttgaacccaggaggcagaggttgcagtgagccgagatggtgccactgcactccagcctgggatgacagagcgagactccatctcaaaaaaaaaaa

SEQ ID NO: 501806 - DNA, 122 bp, Homo sapiens
ataacgactacggacacctgaagtcaggacaggttaggtaacctacccaagtcttgcagatagtgaccaagccagcattccaaaccgggtaccctaatttgaaattcatcatatcttttcct

SEQ ID NO: 501807 - DNA, 1028 bp, Homo sapiens
  misc_feature (288)..(288): n is a, c, g, or t
  misc_feature (540)..(540): n is a, c, g, or t
  misc_feature (557)..(557): n is a, c, g, or t
  misc_feature (859)..(859): n is a, c, g, or t
  misc_feature (871)..(871): n is a, c, g, or t
gtctgaatctgccgggaccacccgttaaggctagatactaatcagacaccgatagtgaactagtaccgtgagtgaaaggtgaaaagaaccccgagaggggagtgaaatagattctgaaaccagtgacttacaaggagtcagagcacgttaaagtgtgatggcgtacatcttgcagttatgggccggcgagttatgttaatatgcaaggttaagcagtataaatcggagtccgtagggtaaaccgagtctgaatagggcgactttagtatattggcatatacccgaaancaggtgatctatccatgagcaggttgaagcttaggtaaaactaagtggaggaccgaaccgtagtacgctaaaaagtgcccggatgacttgtggatagcggtgaaattccaatcgaacctggagatagctggttctcttcgaaatagctttagggctagcgtatagtattgtttaatgggggtagagcactgaatgtggaatggcggcatctatagctgtactgactataatcaaactccgaataccattaanattaagctatgcagtcngaacgtgggtgataacgtccacgctcgcgagggaaacaacccagatcgtcagctaaggtcccaaaattgtgttaagtgagaaaggttgtgagatttcataaacaactaggaagttggcttagaagcagccaccttttaaatagtgcgtaattgctcactagtcaagagatcttgcgccaataatgtaacgggactcaaacacaataccgaagctacgggcacattatgtgcgttaggagagcgttttaatttcgttgaagtcagaccgtgaggactggtggagagattaaaagtgagaatgncggcatgagtancgattcgaagtgagaatcttcgacgcctattgtgaaaggtttcctgggcaaggttcgtacacccagggttagtcagagcctaagatgaggcagacatgcatagtcgatggacaacaggttaatattcctgtacttggtaaaagaatgactagagtgg

SEQ ID NO: 501808 - DNA, 746 bp, Homo sapiens
  misc_feature (258)..(258): n is a, c, g, or t
  misc_feature (275)..(275): n is a, c, g, or t
  misc_feature (577)..(577): n is a, c, g, or t
  misc_feature (589)..(589): n is a, c, g, or t
caggatcccagtgctactccacaaacaggttgaagcttaggtaaaactaagtggaggaccgaaccgtagtacgctaaaaagtgcccggatgacttgtggatagcggtgaaattccaatcgaacctggagatagctggttctcttcgaaatagctttagggctagcgtatagtattgtttaatgggggtagagcactgaatgtggaatggcggcatctatagctgtactgactataatcaaactccgaataccattaanattaagctatgcagtcngaacgtgggtgataacgtccacgctcgcgagggaaacaacccagatcgtcagctaaggtcccaaaattgtgttaagtgagaaaggttgtgagatttcataaacaactaggaagttggcttagaagcagccaccttttaaatagtgcgtaattgctcactagtcaagagatcttgcgccaataatgtaacgggactcaaacacaataccgaagctacgggcacattatgtgcgttaggagagcgttttaatttcgttgaagtcagaccgtgaggactggtggagagattaaaagtgagaatgncggcatgagtancgattcgaagtgagaatcttcgacgcctattgtgaaaggtttcctgggcaaggttcgtacacccagggttagtcagagcctaagatgaggcagacatgcatagtcgatggacaacaggttaatattcctgtacttggtaaaagaatgactagagtgg

SEQ ID NO: 501809 - DNA, 195 bp, Homo sapiens
acggttctgccccgacttgtggctcggacccagggaccttcagggcccgcagaccctcccgcgccttgagacccgaggcgccctaccggcccccctccccggttagcgggcggttgtaaggtcctacggcggcgctgcctgccttcctcctagagggtgtttcctagaaactgataaatcagatcgtgcctcttt

SEQ ID NO: 501810 - DNA, 592 bp, Homo sapiens
atggcttggagtggcccagacccgaacttcgctcctgtgcccaaacttggaactctggaaatgtggcttcgctcactggcgccttgagcttgggcgactgccgagtcctcgaaacccgacccctgcagagctgactccgggactattttagtttctaacgtcaacttgcccgattcaagagggtttgcgcaaaaaacgtagcccgttgtcctcctgctgcagctgttgttgcagctgtgtggctgcgtttagtaggaataaccaactcaaattgggaagttcttcagctcagtatccgctcctgtaattagaactttttttctttaagcgatgaaattttggacagagagatctggagtttagtttgtgactcgaagaaaaactccaaaatgtaataccttgtcccatttggggggaaagtttgggctaattcaattcgccatggaagtgtcttctttttaaagtagtttagtaggtatatgaatgtatctgtcagttcttgagagacctatggatttagcagagattttaacttaagtgcaaaaagtttcatatttaaaggcgaataaagcgaatatttcttaaattagcg

SEQ ID NO: 501811 - DNA, 100 bp, Homo sapiens
tcatgcatcactccccgtgacaccaaccaacccatgagggtagcaggtgctgcaacagttggtggtagctagtggcagtgtttttactgacattttatgt

SEQ ID NO: 501812 - DNA, 338 bp, Homo sapiens
ccgcacaagtggccgatgcgagtagcgcgcatcattccaatgacccctcccccatctcagtctcccagcactcctcccaaagacagggcctctctggaaccttcacagacctgatttctggtcctccccaaccagctccctgtccctgcttctgggcgctccttccttcctgagctcccagggcttcctcaagggtcacttatggtgaccggactattaaaaaacaaaatgatggcaggagtggcagagaagaaccatcatacccatagcagagtgccagagttttacagcactccgcatcagcacattacatatacctaaagcaacaataacatcag

SEQ ID NO: 501813 - DNA, 195 bp, Homo sapiens
gtggtagtgatctagaggatcccatacaggacgggtcatccatcgcataagagcaaagaatactattgttgccacagggctacgggcgcacctacttgagctgcacgtctgcccacaccagtcaccagcgacggcacggccatgatcaccagagcaggccttccttgccaggacctcgagtttgttcagttccac

SEQ ID NO: 501814 - DNA, 793 bp, Homo sapiens
  misc_feature (37)..(37): n is a, c, g, or t
  misc_feature (39)..(39): n is a, c, g, or t
  misc_feature (41)..(41): n is a, c, g, or t
  misc_feature (65)..(66): n is a, c, g, or t
  misc_feature (72)..(74): n is a, c, g, or t
  misc_feature (82)..(82): n is a, c, g, or t
  misc_feature (84)..(84): n is a, c, g, or t
  misc_feature (151)..(151): n is a, c, g, or t
  misc_feature (759)..(759): n is a, c, g, or t
gatccatgaccatccttttcctttttcaaaaatttancntntcataaaaacaaatacatataaannaactgnnnttgacccntntcccttctcttgtctacaaaaaagccacagatgttagaatttcttatggtttggctgtgagttcctnctcttgtctctactctttccacatactgtccatatctgtgactcctagaatgtcatctggtaggagtgtgttgcgaaaagacatccaaagccaacagtgccaagcagacctgccagagctcttgtctctgcagatccctctcagaagcctgttgtcttcaattaatcttctcaatgaaaggatcaatcagctccgtaaatcagggtctcagactcatccctgactgcacactcccacaactggcgcatgccaatctgttgccaaatgaagttcacttttctctttaaatgttactcaactcccaccactatgtatttcgctccattgcctcaatgtgggaatatcgtgatatctttctgaagtaatgtaatagttttcctttcctattcctgtcccattccaaacttccttctaaattggcacaggcttctctgtatgactgtgttcctccatcgctgcattttagctgctgtagcttctctcaatccttaattgaaattttctctgtgaacgaggtgagaaatccgtcaaatcaaccgtgatggggtggggagatcgaagttttcaatcaacaccctctaagtagctgcatcctgtgctccttttcncctgttatgttgagctcctcactgtctaaggaga

SEQ ID NO: 501815 - DNA, 1461 bp, Homo sapiens
gggaggatctgatcagaacatgggccccagaaactggggctctttcccaagggcttttgggccagccttccagtcgtccattggacacctggtagcaaactatgactaggccagaggacctagtgctccgttccacaagagtatcgaaccttgtgacaagtccaaagtgtacagaaggctctggataccctgatccagaggtgggcctgcgtactctcccaacctgggtatagaccagagcacagcagcagtactgggtgcaggccatgagggccctcatgggcattcattgaaccaagatgggcatttgacatcgcaaggactcacatagtctttctcgagagcgtacatcgcctccaagttccccaccttcaattcctcgctgggacacgtcacgtgcccaaacgtgtaaccgttggtacctaagagattagcaggcattggtaggagggatgggaatagttttccttcaatgctgccactccactaagagtcccgtgcaaaatttccgtacagcctcgtccacattcacaattttttcgtaacgcaatatcagttgtggtccctccatccttctcatgggcgcccaagaagagcgatggtgtgttggcctttttaatatcactctttcaacagacatggcgttttatttagcatggctaatttgtggcggcgcctggtaactcaatctccggggagagaatagccaatcgcggtccactttggtaacagaaaaaaggtaatacactcagtgcgttcgcggcgagggcggccagggttgacccacgtgttatggtccctaaggggggcgtaatggctaaatttgggcacgaacgtgggggggggttgtccacattcacagaagtcccccgtggtgtatatccgtaaccgtgggagaacatttctgtgcgcactgccccaaggggtcgacaaaagagcttaagcgcccaaacagttgtttggggaaaagtatgggagcaaatttatgggtcccaagtggttgcgacgttgattgccccaatcacaaaccctatctgggtgttcccccattcgtttggaaacctccgttaacgccaaaagagggctttttgccctagagcttgttcgattaccagcacattttgtgaccccaaggaaggcttcaaaaagacatctcctggggccataggccaaaatatccattgcgtctatagaaagatttgaaaaagacaaacacaagcagaaaactttggggggcgctatggtggcactggggcaaaccgatggttggtttcaattccaacttagacgcgttggagatcggcgcattaatttattataaaggaggaagaggcgagagcgttgaaggggaagtatccagttatagaattcaagagtgaacttccttgggagcttgggtgtagataggaaagattgagactattggtggaaagggcacgacatggaaaacgacaagggtac

SEQ ID NO: 501816 - DNA, 820 bp, Homo sapiens
  misc_feature (515)..(515): n is a, c, g, or t
  misc_feature (536)..(536): n is a, c, g, or t
gtacaagactgggctgggacacatggtgagacctagtctctggctacaaaataaaaaaaaatgagctgggtgtggcctcagctacccaggaggctggggtgggaggatcgcttggtgcctgggaggttcaggctgctgtgagccgagaccacgccactgaactccagcttaggccacagggcaagaccctgtcttaaaataagtattacgtaattgtcggtaatgaacgttatcaaaagtatagtgacatatagcacgggcagaaacttatagagtagagttgtagatgcagccgaaatattcttacagaagttcctctaactaagaatgctcaaatcttatcgtcacaggtcaagatggtaagaaattctagttgtagggtttaaagagcatgtgatttgtcaagaagtagtcccttcagttttaagaaagtctggggaatggggtaagcggttttcttaatgggaaatgcattgccagtcattctctactgggagggatgtcctcttagctgnagaaaatgtcttgttgaaggnagattcgtggcgctaaagccattctttgggagtgtaagtttcatagcacgtaaacatgtatagaccagatagtaagtgggtcccgtcctcttaagcagtaactgttgagagtactggatacagtgattcaaaactgtttagatatttattcgacgtggaggctaaggactttaaagattaagggcagtttagaagagggtgtacttggtcactgtgttcttgtcggatagtatttggggtaatcgtactcttctaataaataacttaaatgtataaaagcggac

SEQ ID NO: 501817 - DNA, 189 bp, Homo sapiens
cccccccccggggggggggggggttttttttttttaaccccccccccccccccctttttttggggtttttttggggggggggggggggccccccccccggggttttttcccccccccctttgggggggggggtttttccttttttttttttttcccccccccctttttttaaaaaaggggtttttttta

SEQ ID NO: 501818 - DNA, 142 bp, Homo sapiens
tagtcatgtttgtggctttctctcccgcctctctcgagcagggtcatggtggcgttggcctcttgtcactctcctttctcctttcttcccctttctctgcccgcctttcccatcctgctgtagacttcttgctttgcctctg

SEQ ID NO: 501819 - DNA, 170 bp, Homo sapiens
tcctgcaagctgaatctagagtatcccccttcgtgcgcccgtcgagtggctccttgtggagcctggggctcttccttcttcatcgtaatccaaaagatcgttattccacatcctgttcttgccataatagctaggctcccctgttctaccccgacgcgccacacaagaga

SEQ ID NO: 501820 - DNA, 4845 bp, Homo sapiens
  misc_feature (263)..(263): n is a, c, g, or t
  misc_feature (301)..(301): n is a, c, g, or t
tttatcttttaagttattgtcacaatagttactctcttttagaccctgaacattttcagtacttgctccaaatggtttagcaacttttgaagtgggattaacaagtttggccaatgaagcttcttccctgcccaccgccagaggtgctggagaaaagtaatcctggagggtcggcgtggaggcagtagagaggtttataaaagtcaaggaagtgggaagaggcttgcgagcagcaggagaggcgcagagtcagaggggcaggngcggcggcggagggagcaggaggttggggcttgagccngtcattccggcgcacgaaaacttgaagtcgctcggtagccggggaagggaaggaagagaggcaggctctttcctagaggtgccgtgatcgagggtctggcactccaagccaactcctgagaacgggaaatgggcgggagtcggtggggtggagagggcagccgtggtcgcgagagcgaaggagcggtctgagaatccggcttgagtgttaaaggctaagcgtgtctagctggacccgtggccccgaagaagcgagacaaggcgacgcggagctgtccctgacaccccgaggaccgagggacagcgaagggccggggccgccggccattgccaggcgccattaggtgacgcggccgtcacgcgatgacgcgctgaccggcagtggcctccacgtcgcaggttccgcaaagacctgtgggagcgacccgggagaaggagggccaagatggcggaagcggaggagtctccaggagacccggggacagcatcgcccaggcccctgtttgcaggcctttcagatatatccatctcacaagacatccccgtagaaggagaaatcaccattcctatgagatctcgcatccgggagtttgacagctccacattaaatgaatctgttcgcaataccatcatgcgtgatctaaaagctgttgggaaaaaattcatgcatgttttgtacccaaggaaaagtaatactcttttgagagattgggatttgtggggccctttgatcctttgtgtgacactcgcattaatgctgcaaagagactctgcagatagtgaaaaagatggagggccccaatttgcagaggtgtttgtcattgtctggtttggtgcagttaccatcaccctcaactcaaaacttcttggagggaacatatctttttttcagagcctctgtgtgctgggttactgtatacttcccttgacagtagcaatgctgatttgccggctggtacttttggctgatccaggacctgtaaacttcatggttcggctttttgtggtgattgtgatgtttgcctggtctatagttgcctccacagctttccttgctgatagccagcctccaaaccgcagagccctagctgtttatcctgttttcctgttttactttgtcatcagttggatgattctcacctttactcctcagtaaatcaggaatgggaaattaaaaccagtgaattgaaagcacatctgaaagatgcaattcaccatggagctttgtctctggcccttattttgtctaattttggaggtatttgataactgagtaggtgaggagattaaaagggagccatatagcactgtcaccccttatttgaggaactgatgtttgaaaggctgttcttttctctcttaatgtcatttctttaaaaatacatgtgcatactacacacagtatataatgcctccttaaggcatgatggagtcaccgtggtccatttgggtgacaaccagtgacttgggaagcacatagatacatcttacaagttgaatagagttgataactattttcagttttgagaataccagttcaggtgcagctcttaaacacattgccttatgactattagaatatgcctctcttttcataaataaaaatacatggtctatatccattttcttttatttctctctcttaagcttaaaaaggcaatgagagaggttaggagtgggttcatacacggagaatgagaaaacatgcattaaccaatattcagattttgatcaggggaaattctacacttgttgcaaaaaaaaaaaaaaaaaaagcaaagggcctctaaagaatcagcctctttggtccctttgtgctgtcacctttttgccatgtttaacagcatcttggttggcactctagtcttaatcttgctccttaactttgaatatgcagtctaaaatgtcagtagtcaacatgtaattttcctttgaaattctgaatattccagtgctggaacttatccaaaaagaagacctcagaaacttagattggtagatctctagtgcatattatcatgtgggcaccttctcttagggtggaatgaggcagtctggatgcagcatagttaaaaggagctgtttaatattctctgtagtctggcctcttaactagaaagtaaagctaaatcagaagcctgtatttaaccatgtgaacagggagggatttagtgttctgatggctgattaatagaacagctagatacttagagcatgacgtgggatgggatgagtttacagctgctgccttttcatggtgagcttagcagttttctcattagatgtgtttttttgggttggggaatagcaatttattttattgattttagactttatcaagctaattagctcccctttagataagtacatgttgcacatgtgcacctacttgtaatctcagatatttatgcacacaagtgtgaaggtttttcagggagcagagcatctgggacaggctgattctgagctaaacagggctcctttaaggcaatatgaactgttgccttctataaattgcacattgaggaactctaatagacaaagattaggtgtcaggcagaaaacactcattgtaaatatactattagttgataaacataggactttcttattccccagtttttctttatcatataatttaaatatttattcattttgtatttaaagactacctacacatagatatatgattccaaagtcatactttctccatccccacattagccaagtgaatacagggccaaatgggttcttggaatgataataacaaagcattacaaagtgggtccccttggttccagccttgtccagagtttttggttatatatttctatttattacaatttaccttttaaattgtaaaataaacctttgtgtggacagagccaatgtttcaatcttgaatgagtaaagaaaatactttggaactgatcctcattttgaaattggttctaaattattatccatttccaatgtctgaaattctcttacttcctgctaaaactctctttctgccaaagttgtttcgtaatctgtctcaatgactataatgtaaaattaaagaagtaaccatgcttctcaagggggaattaaaagtgtttattgaattttactcaggctaattgtttggtcagaaattcctaaggccacagctttggggggttcgtgtagatgtacatggtgggtgggttataaatattgggacttaaggcagcttgttctatgtatttatctttgctcttgggtgacttagggaatgattttatttgatttaaccttctttctgtttgccccgagaatactcgccagtggcgcttgcagttgtagcatttaccccaagataactttgcctacgaaatatttcgcttttattattttcacatcattctagtatatggactttggaaacaaaagacattgttctatttatagcattcttttttttttttagtagcggtatttccatttacaaaatatagtaactcttgattactgaaaatgtcaaatcctagaaaacgtagcatgcctatacatgatgttaacatcattctcgaacagttgttggccgaagattcatttgatgaatccaatttttttgaaatagacaattctgatgttctctttagaaataactcagtttttatcttttttcacattgaaaatcagttagatttgcttaagcctcaaagagaatgtttatgtaaattagcgctggcaatttttttttttctaaacaggaaaagggttaaatgaaggttgataaaatggatgttcaattgtctttctgaaagtgagtggcttgaagggatgaataaatattttcttaatatattcaaaaaagtgcattgctttctgtgatggaagttaagacctaaatgtctggaagttgtaaccctcaacacagcttttcctgatttgctgcaaaggcacatagctgattatagaagtgaagacggcaaggacggggactccaacaaaggaaaccctgttgcaggatttgggaactttcatgcttcagatgaaattcaggcatgtgagcatcactgcagaatgtggtgcatcattgccatcatgagtaatcacttgctgctcctacttctgagaccaagactcttttgtcatattctttagcaataggacgggtaaagactggatttaattgctgttcagagtataaaaactcaattgattccaacatatctgaatgtgcagtaaagtcttaaaagtcaaccgttaatcattaagtcttttgcctctaaagtcttttgcctctgaagaggtttattacatgagttgattttcatattttcattttggtggggttttcctgttgttgggcaaggtggggtcacaggacatgggactagtaagcattttactgtttactatatttgtctttttataaacagtatctcccaaaatgtgattagaaggctaccaagcctgtatttggacatttaattgtgtgctttatataatgtaactactaacagtatttggactgcctgttcattcctggagacaaaaatgaaaatctgtcagttc

SEQ ID NO: 501821 - DNA, 645 bp, Homo sapiens
gggggggactctcactctgtcaccaggctgaagtgcaggggcataatattagctcactggaacctccactttcccgggtcaagggattcttttgcctcagcctcctgagtaactgggactacaggcgtgcaccaccacacccaactaatttttgtatttttaggagacacggggtttctccatgttggccagactagtctgaaactcctgacctcaggtgatccgcctgccttggcctcccaaagtgctgtgattacaggcgtgagccaccgtgcctggccacaagtatgtatctgtacattttagttagatggtacagggacagctaatgggaggtaaggtcaggtggcttaggtagcctgtgtgtgatgattagtacttttttgtgtgtaggtgaagaataggacagatctcttgaaaccgctcagagaattttggaatctccagggaaacgttcaacttttgtataacttgaaaatgtatgttaagggggtaaggaaactagaatttaaaacaatagtaacaataacagatggggcgttattttttactaggcacttttgcttgcgcctttcttatatttacttgacccatttaattcggagagcaaccctttaggaacaatcttttatacaaaggaaaaag

SEQ ID NO: 501822 - DNA, 399 bp, Homo sapiens
gcacgcgagagagagagagagagagagagagagagagagagagagagagagagcgtgatgcgctcccgtgtctgcccttcctctctgccctctcctcctcccctttctcctccctttttctctttcctttctctcctctctcccctctcctcttctttccttcctccctcccctctcttcctcctccttcctctcccctccttctcttcccttcccttccttcctctcccctctccttccccttcttccttctctttcctttcctctttcccctctcttcccttttccctccccctctcttcctcttccccctctcttcttcctcttccctttcccctctcttctccctcccgcttctcccctctcctctcctcccctctcctcccccctttctccctc

SEQ ID NO: 501823 - DNA, 5008 bp, Homo sapiens
  misc_feature (263)..(263): n is a, c, g, or t
  misc_feature (301)..(301): n is a, c, g, or t
tttatcttttaagttattgtcacaatagttactctcttttagaccctgaacattttcagtacttgctccaaatggtttagcaacttttgaagtgggattaacaagtttggccaatgaagcttcttccctgcccaccgccagaggtgctggagaaaagtaatcctggagggtcggcgtggaggcagtagagaggtttataaaagtcaaggaagtgggaagaggcttgcgagcagcaggagaggcgcagagtcagaggggcaggngcggcggcggagggagcaggaggttggggcttgagccngtcattccggcgcacgaaaacttgaagtcgctcggtagccggggaagggaaggaagagaggcaggctctttcctagaggtgccgtgatcgagggtctggcactccaagccaactcctgagaacgggaaatgggcgggagtcggtggggtggagagggcagccgtggtcgcgagagcgaaggagcggtctgagaatccggcttgagtgttaaaggctaagcgtgtctagctggacccgtggccccgaagaagcgagacaaggcgacgcggagctgtccctgacaccccgaggaccgagggacagcgaagggccggggccgccggccattgccaggcgccattaggtgacgcggccgtcacgcgatgacgcgctgaccggcagtggcctccacgtcgcaggttccgcaaagacctgtgggagcgacccgggagaaggagggccaagatggcggaagcggaggagtctccaggagacccggggacagcatcgcccaggcccctgtttgcaggcctttcagatatatccatctcacaagacatccccgtagaaggagaaatcaccattcctatgagatctcgcatccgggagtttgacagctccacattaaatgaatctgttcgcaataccatcatgcgtgatctaaaagctgttgggaaaaaattcatgcatgttttgtacccaaggaaaagtaatactcttttgagagattgggatttgtggggccctttgatcctttgtgtgacactcgcattaatgctgcaaagagactctgcagatagtgaaaaagatggagggccccaatttgcagaggtgtttgtcattgtctggtttggtgcagttaccatcaccctcaactcaaaacttcttggagggaacatatctttttttcagagcctctgtgtgctgggttactgtatacttcccttgacagtagcaatgctgatttgccggctggtacttttggctgatccaggacctgtaaacttcatggttcggctttttgtggtgattgtgatgtttgcctggtctatagttgcctccacagctttccttgctgatagccagcctccaaaccgcagagccctagctgtttatcctgttttcctgttttactttgtcatcagttggatgattctcacctttactcctcagtaaatcaggaatgggaaattaaaaccagtgaattgaaagcacatctgaaagatgcaattcaccatggagctttgtctctggcccttattttgtctaattttggaggtatttgataactgagtaggtgaggagattaaaagggagccatatagcactgtcaccccttatttgaggaactgatgtttgaaaggctgttcttttctctcttaatgtcatttctttaaaaatacatgtgcatactacacacagtatataatgcctccttaaggcatgatggagtcaccgtggtccatttgggtgacaaccagtgacttgggaagcacatagatacatcttacaagttgaatagagttgataactattttcagttttgagaataccagttcaggtgcagctcttaaacacattgccttatgactattagaatatgcctctcttttcataaataaaaatacatggtctatatccattttcttttatttctctctcttaagcttaaaaaggcaatgagagaggttaggagtgggttcatacacggagaatgagaaaacatgcattaaccaatattcagattttgatcaggggaaattctacacttgttgcaaaaaaaaaaaaaaaaaaagcaaagggcctctaaagaatcagcctctttggtccctttgtgctgtcacctttttgccatgtttaacagcatcttggttggcactctagtcttaatcttgctccttaactttgaatatgcagtctaaaatgtcagtagtcaacatgtaattttcctttgaaattctgaatattccagtgctggaacttatccaaaaagaagacctcagaaacttagattggtagatctctagtgcatattatcatgtgggcaccttctcttagggtggaatgaggcagtctggatgcagcatagttaaaaggagctgtttaatattctctgtagtctggcctcttaactagaaagtaaagctaaatcagaagcctgtatttaaccatgtgaacagggagggatttagtgttctgatggctgattaatagaacagctagatacttagagcatgacgtgggatgggatgagtttacagctgctgccttttcatggtgagcttagcagttttctcattagatgtgtttttttgggttggggaatagcaatttattttattgattttagactttatcaagctaattagctcccctttagataagtacatgttgcacatgtgcacctacttgtaatctcagatatttatgcacacaagtgtgaaggtttttcagggagcagagcatctgggacaggctgattctgagctaaacagggctcctttaaggcaatatgaactgttgccttctataaattgcacattgaggaactctaatagacaaagattaggtgtcaggcagaaaacactcattgtaaatatactattagttgataaacataggactttcttattccccagtttttctttatcatataatttaaatatttattcattttgtatttaaagactacctacacatagatatatgattccaaagtcatactttctccatccccacattagccaagtgaatacagggccaaatgggttcttggaatgataataacaaagcattacaaagtgggtccccttggttccagccttgtccagagtttttggttatatatttctatttattacaatttaccttttaaattgtaaaataaacctttgtgtggacagagccaatgtttcaatcttgaatgagtaaagaaaatactttggaactgatcctcattttgaaattggttctaaattattatccatttccaatgtctgaaattctcttacttcctgctaaaactctctttctgccaaagttgtttcgtaatctgtctcaatgactataatgtaaaattaaagaagtaaccatgcttctcaagggggaattaaaagtgtttattgaattttactcaggctaattgtttggtcagaaattcctaaggccacagctttggggggttcgtgtagatgtacatggtgggtgggttataaatattgggacttaaggcagcttgttctatgtatttatctttgctcttgggtgacttagggaatgattttatttgatttaaccttctttctgtttgccccgagaatactcgccagtggcgcttgcagttgtagcatttaccccaagataactttgcctacgaaatatttcgcttttattattttcacatcattctagtatatggactttggaaacaaaagacattgttctatttatagcattcttttttttttttagtagcggtatttccatttacaaaatatagtaactcttgattactgaaaatgtcaaatcctagaaaacgtagcatgcctatacatgatgttaacatcattctcgaacagttgttggccgaagattcatttgatgaatccaatttttttgaaatagacaattctgatgttctctttagaaataactcagtttttatcttttttcacattgaaaatcagttagatttgcttaagcctcaaagagaatgtttatgtaaattagcgctggcaatttttttttttctaaacaggaaaagggttaaatgaaggttgataaaatggatgttcaattgtctttctgaaagtgagtggcttgaagggatgaataaatattttcttaatatattcaaaaaagtgcattgctttctgtgatggaagttaagacctaaatgtctggaagttgtaaccctcaacacagcttttcctgatttgctgcaaaggcacatagctgattatagaagtgaagacggcaaggacggggactccaacaaaggaaaccctgttgcaggatttgggaactttcatgcttcagatgaaattcaggcatgtgagcatcactgcagaatgtggtgcatcattgccatcatgagtaatcacttgctgctcctacttctgagaccaagactcttttgtcatattctttagcaataggacgggtaaagactggatttaattgctgttcagagtataaaaactcaattgattccaacatatctgaatgtgcagtaaagtcttaaaagtcaaccgttaatcattaagtcttttgcctctaaagtcttttgcctctgaagaggtttattacatgagttgattttcatattttcattttggtggggttttcctgttgttgggcaaggtggggtcacaggacatgggactagtaagcattttactgtttactatatttgtctttttataaacagtatctcccaaaatgtgattagaaggctaccaagcctgtatttggacatttaattgtgtgctttatataatgtaactactaacagtatttggactgcctgttcattcctggagacaaaaatgaaaatctgtcagttcaagttcttgggtaacatcaagtcattagaatttatctaaagcttatcatgatttgataagacatccattgcatgcagctgttttagctcagtgcaaaacactgaaattgtgattcttagactgtttctgagacatttggatggaaataaatgtataaatgtta

SEQ ID NO: 501824 - DNA, 245 bp, Homo sapiens
caggccaaggcagtgctgagcgccgagcagctgcgcgaacgaggaggtgcacgccggcctgggtagcctgctgcgctctactcagcaactccacggcgcgcaacgtgacctggaagctgggcagccgactgtacggacccagctcagtgagttcgctgatgacttcgtgcgcaggcacagccagccactaccaacttgcgagccactctcacagtatacactctttccggcgcacagagcacagc

SEQ ID NO: 501825 - DNA, 429 bp, Homo sapiens
tgatactgagcaggctgtgaaaccgggctgagtctgatcagtcgagcgtgtgttgagatcgtgcgcgctcagctacacaccgggcctacagcagagccgacgtcagactccacagtggtgtctctaactgctccacaacacaaaggcgatgggggctcagaaacagtgacattgtggggtgacacaagccaccacaatgggagcctcatggatgcggcagcggttgtactgttggggaccagtgagcacgtgctggggagggctcacctgtgcttcctcagtggctccacctctgcttctaagaaaactcactcattccatggcagtggcttatagagaagtcagtagacgggagcaagtgttcaacacagcaacaattctctttgtttctctagttcttagttctacacagtccagctccatcaacac

SEQ ID NO: 501826 - DNA, 5417 bp, Homo sapiens
cttgtgacaatattactgtattaaacattcctttttgttttgtcttgttttgtttagcctccacagctttccttgctgatagccagcctccaaaccgcagagccctagctgtttatcctgttttcctgttttactttgtcatcagttggatgattctcacctttactcctcagtaaatcaggaatgggaaattaaaaccagtgaattgaaagcacatctgaaagatgcaattcaccatggagctttgtctctggcccttattttgtctaattttggaggtatttgataactgagtaggtgaggagattaaaagggagccatatagcactgtcaccccttatttgaggaactgatgtttgaaaggctgttcttttctctcttaatgtcatttctttaaaaatacatgtgcatactacacacagtatataatgcctccttaaggcatgatggagtcaccgtggtccatttgggtgacaaccagtgacttgggaagcacatagatacatcttacaagttgaatagagttgataactattttcagttttgagaataccagttcaggtgcagctcttaaacacattgccttatgactattagaatatgcctctcttttcataaataaaaatacatggtctatatccattttcttttatttctctctcttaagcttaaaaaggcaatgagagaggttaggagtgggttcatacacggagaatgagaaaacatgcattaaccaatattcagattttgatcaggggaaattctacacttgttgcaaaaaaaaaaaaaaaaaaagcaaagggcctctaaagaatcagcctctttggtccctttgtgctgtcacctttttgccatgtttaacagcatcttggttggcactctagtcttaatcttgctccttaactttgaatatgcagtctaaaatgtcagtagtcaacatgtaattttcctttgaaattctgaatattccagtgctggaacttatccaaaaagaagacctcagaaacttagattggtagatctctagtgcatattatcatgtgggcaccttctcttagggtggaatgaggcagtctggatgcagcatagttaaaaggagctgtttaatattctctgtagtctggcctcttaactagaaagtaaagctaaatcagaagcctgtatttaaccatgtgaacagggagggatttagtgttctgatggctgattaatagaacagctagatacttagagcatgacgtgggatgggatgagtttacagctgctgccttttcatggtgagcttagcagttttctcattagatgtgtttttttgggttggggaatagcaatttattttattgattttagactttatcaagctaattagctcccctttagataagtacatgttgcacatgtgcacctacttgtaatctcagatatttatgcacacaagtgtgaaggtttttcagggagcagagcatctgggacaggctgattctgagctaaacagggctcctttaaggcaatatgaactgttgccttctataaattgcacattgaggaactctaatagacaaagattaggtgtcaggcagaaaacactcattgtaaatatactattagttgataaacataggactttcttattccccagtttttctttatcatataatttaaatatttattcattttgtatttaaagactacctacacatagatatatgattccaaagtcatactttctccatccccacattagccaagtgaatacagggccaaatgggttcttggaatgataataacaaagcattacaaagtgggtccccttggttccagccttgtccagagtttttggttatatatttctatttattacaatttaccttttaaattgtaaaataaacctttgtgtggacagagccaatgtttcaatcttgaatgagtaaagaaaatactttggaactgatcctcattttgaaattggttctaaattattatccatttccaatgtctgaaattctcttacttcctgctaaaactctctttctgccaaagttgtttcgtaatctgtctcaatgactataatgtaaaattaaagaagtaaccatgcttctcaagggggaattaaaagtgtttattgaattttactcaggctaattgtttggtcagaaattcctaaggccacagctttggggggttcgtgtagatgtacatggtgggtgggttataaatattgggacttaaggcagcttgttctatgtatttatctttgctcttgggtgacttagggaatgattttatttgatttaaccttctttctgtttgccccgagaatactcgccagtggcgcttgcagttgtagcatttaccccaagataactttgcctacgaaatatttcgcttttattattttcacatcattctagtatatggactttggaaacaaaagacattgttctatttatagcattcttttttttttttagtagcggtatttccatttacaaaatatagtaactcttgattactgaaaatgtcaaatcctagaaaacgtagcatgcctatacatgatgttaacatcattctcgaacagttgttggccgaagattcatttgatgaatccaatttttttgaaatagacaattctgatgttctctttagaaataactcagtttttatcttttttcacattgaaaatcagttagatttgcttaagcctcaaagagaatgtttatgtaaattagcgctggcaatttttttttttctaaacaggaaaagggttaaatgaaggttgataaaatggatgttcaattgtctttctgaaagtgagtggcttgaagggatgaataaatattttcttaatatattcaaaaaagtgcattgctttctgtgatggaagttaagacctaaatgtctggaagttgtaaccctcaacacagcttttcctgatttgctgcaaaggcacatagctgattatagaagtgaagacggcaaggacggggactccaacaaaggaaaccctgttgcaggatttgggaactttcatgcttcagatgaaattcaggcatgtgagcatcactgcagaatgtggtgcatcattgccatcatgagtaatcacttgctgctcctacttctgagaccaagactcttttgtcatattctttagcaataggacgggtaaagactggatttaattgctgttcagagtataaaaactcaattgattccaacatatctgaatgtgcagtaaagtcttaaaagtcaaccgttaatcattaagtcttttgcctctaaagtcttttgcctctgaagaggtttattacatgagttgattttcatattttcattttggtggggttttcctgttgttgggcaaggtggggtcacaggacatgggactagtaagcattttactgtttactatatttgtctttttataaacagtatctcccaaaatgtgattagaaggctaccaagcctgtatttggacatttaattgtgtgctttatataatgtaactactaacagtatttggactgcctgttcattcctggagacaaaaatgaaaatctgtcagttcaagttcttgggtaacatcaagtcattagaatttatctaaagcttatcatgatttgataagacatccattgcatgcagctgttttagctcagtgcaaaacactgaaattgtgattcttagactgtttctgagacatttggatggaaataaatgtataaatgttaattcatgtatataaattagaaacacttttctagattctgtaggcttttgttaaaaatagagaatttcttggggtttacttaggccacagaatggccaaataataataatgacaatgatattactaataataatagctaacctttatttggcacttactgtgtgccaggcactattctatttttttaagaatttttaaaataacagctttattgaaatacactttaccataaacttcacctttttattttttatttttatgagacagggactcacccaggctggagtgcagtggagcagtcatggcacactgtagcctcgacctccctgggctcaagcaatcctcccacttcagtgtcccgagtagttgggactacaggcatgcgtcactacacctaattggctaatttttgtagtttttgtagagatagggtttcgccatgttgcctaggctggtcttgaattcctgggctcaagcgatccacctgctttggcctcccaaaacagtgggattgcaggcgtgagccaccatgcctggctgaaattcaccttttaagatgtacaattcagtggtttttagtatattcacacacaaaattgcacaactatcactaacatctaattttagatcattttgtaacttcaccaagaaaccccaggtctgtcagcagtcagttccattcccccttcatcccagcctctggcaaccactaatctgctttctgtcactattgatttggccagacactattcttctgtgcttctcatgcatctcctgtaataccagtgctacaattctcattttatgtggaaaattgaggcactgagaggttaagtaaattgcccacggtcacacagtaatttgatttacaacagtaataacacattagatgagaacacagtaggacacaattttgaattccatttttatgtacctgaaatgaatacacccctcccccaaggtattttccctattgttagcctttgtaccctaggtacaaatataggtattttccctattgtgttatgtacctgaaatgaatacacccttcccccaaggtattttccctattgttagcctttgtaccctagaactgactggatgtagataacatttgttttcagagtaatggaacactgtatcagcagcatctgagaacataagaacagttggacattggaaagaggtttgttgccctcatccctccttgaacctcttttctctcccgcttccaccaccaccacacatatatacccctttttctcagtcttaagcatcaaacaatttctgcctctttctttttaattctcccagagggatggttaatgcatcacaatttaacttgtctattcaggtattaatagtcaagggatgcatctgtttgcttatagtaccagttatattcctaggaccttagagagcagtagtgtgagaatagaatgcctttctatttgggttaaactatgtgggaggaaaaagtaacagagtaaaggctttgccttaatgaagtcaagtgttctgcctggtgggaagtggccacacgctgcactgcgctgctcttgtttactctgttctttcagagcctttgtactttgccatcactgctagtaatttcttggtccttttcaatactccattttaatcttgatttttttctataaataataaatctgtgaaaaatctgtaaaaa

SEQ ID NO: 501827 - DNA, 140 bp, Homo sapiens
tagatatgtggtacgtagacgtacgtggtctgagggaacacacttaatgtattgtagagtagtggtctgagggaacacacctaatgtattgtagagtagtggtctgtgggaacacacttaatgtattgtagagaagtggc

SEQ ID NO: 501828 - DNA, 120 bp, Homo sapiens
acatgagtgctccaccggctcctgattcttactcctcaggccaggactccaatttcagatttgtactatcccttgctggccacattggaactttattagtaagatgaccatattctggtg

SEQ ID NO: 501829 - DNA, 4536 bp, Homo sapiens
  misc_feature (263)..(263): n is a, c, g, or t
  misc_feature (301)..(301): n is a, c, g, or t
tttatcttttaagttattgtcacaatagttactctcttttagaccctgaacattttcagtacttgctccaaatggtttagcaacttttgaagtgggattaacaagtttggccaatgaagcttcttccctgcccaccgccagaggtgctggagaaaagtaatcctggagggtcggcgtggaggcagtagagaggtttataaaagtcaaggaagtgggaagaggcttgcgagcagcaggagaggcgcagagtcagaggggcaggngcggcggcggagggagcaggaggttggggcttgagccngtcattccggcgcacgaaaacttgaagtcgctcggtagccggggaagggaaggaagagaggcaggctctttcctagaggtgccgtgatcgagggtctggcactccaagccaactcctgagaacgggaaatgggcgggagtcggtggggtggagagggcagccgtggtcgcgagagcgaaggagcggtctgagaatccggcttgagtgttaaaggctaagcgtgtctagctggacccgtggccccgaagaagcgagacaaggcgacgcggagctgtccctgacaccccgaggaccgagggacagcgaagggccggggccgccggccattgccaggcgccattaggtgacgcggccgtcacgcgatgacgcgctgaccggcagtggcctccacgtcgcaggttccgcaaagacctgtgggagcgacccgggagaaggagggccaagatggcggaagcggaggagtctccaggagacccggggacagcatcgcccaggcccctgtttgcaggcctttcagatatatccatctcacaagacatccccgtagaaggagaaatcaccattcctatgagatctcgcatccgggagtttgacagctccacattaaatgaatctgttcgcaataccatcatgcgtgatctaaaagctgttgggaaaaaattcatgcatgttttgtacccaaggaaaagtaatactcttttgagagattgggatttgtggggccctttgatcctttgtgtgacactcgcattaatgctgcaaagagactctgcagatagtgaaaaagatggagggccccaatttgcagaggtgtttgtcattgtctggtttggtgcagttaccatcaccctcaactcaaaacttcttggagggaacatatctttttttcagagcctctgtgtgctgggttactgtatacttcccttgacagtagcaatgctgatttgccggctggtacttttggctgatccaggacctgtaaacttcatggttcggctttttgtggtgattgtgatgtttgcctggtctatagttgcctccacagctttccttgctgatagccagcctccaaaccgcagagccctagctgtttatcctgttttcctgttttactttgtcatcagttggatgattctcacctttactcctcagtaaatcaggaatgggaaattaaaaccagtgaattgaaagcacatctgaaagatgcaattcaccatggagctttgtctctggcccttattttgtctaattttggaggtatttgataactgagtaggtgaggagattaaaagggagccatatagcactgtcaccccttatttgaggaactgatgtttgaaaggctgttcttttctctcttaatgtcatttctttaaaaatacatgtgcatactacacacagtatataatgcctccttaaggcatgatggagtcaccgtggtccatttgggtgacaaccagtgacttgggaagcacatagatacatcttacaagttgaatagagttgataactattttcagttttgagaataccagttcaggtgcagctcttaaacacattgccttatgactattagaatatgcctctcttttcataaataaaaatacatggtctatatccattttcttttatttctctctcttaagcttaaaaaggcaatgagagaggttaggagtgggttcatacacggagaatgagaaaacatgcattaaccaatattcagattttgatcaggggaaattctacacttgttgcaaaaaaaaaaaaaaaaaaagcaaagggcctctaaagaatcagcctctttggtccctttgtgctgtcacctttttgccatgtttaacagcatcttggttggcactctagtcttaatcttgctccttaactttgaatatgcagtctaaaatgtcagtagtcaacatgtaattttcctttgaaattctgaatattccagtgctggaacttatccaaaaagaagacctcagaaacttagattggtagatctctagtgcatattatcatgtgggcaccttctcttagggtggaatgaggcagtctggatgcagcatagttaaaaggagctgtttaatattctctgtagtctggcctcttaactagaaagtaaagctaaatcagaagcctgtatttaaccatgtgaacagggagggatttagtgttctgatggctgattaatagaacagctagatacttagagcatgacgtgggatgggatgagtttacagctgctgccttttcatggtgagcttagcagttttctcattagatgtgtttttttgggttggggaatagcaatttattttattgattttagactttatcaagctaattagctcccctttagataagtacatgttgcacatgtgcacctacttgtaatctcagatatttatgcacacaagtgtgaaggtttttcagggagcagagcatctgggacaggctgattctgagctaaacagggctcctttaaggcaatatgaactgttgccttctataaattgcacattgaggaactctaatagacaaagattaggtgtcaggcagaaaacactcattgtaaatatactattagttgataaacataggactttcttattccccagtttttctttatcatataatttaaatatttattcattttgtatttaaagactacctacacatagatatatgattccaaagtcatactttctccatccccacattagccaagtgaatacagggccaaatgggttcttggaatgataataacaaagcattacaaagtgggtccccttggttccagccttgtccagagtttttggttatatatttctatttattacaatttaccttttaaattgtaaaataaacctttgtgtggacagagccaatgtttcaatcttgaatgagtaaagaaaatactttggaactgatcctcattttgaaattggttctaaattattatccatttccaatgtctgaaattctcttacttcctgctaaaactctctttctgccaaagttgtttcgtaatctgtctcaatgactataatgtaaaattaaagaagtaaccatgcttctcaagggggaattaaaagtgtttattgaattttactcaggctaattgtttggtcagaaattcctaaggccacagctttggggggttcgtgtagatgtacatggtgggtgggttataaatattgggacttaaggcagcttgttctatgtatttatctttgctcttgggtgacttagggaatgattttatttgatttaaccttctttctgtttgccccgagaatactcgccagtggcgcttgcagttgtagcatttaccccaagataactttgcctacgaaatatttcgcttttattattttcacatcattctagtatatggactttggaaacaaaagacattgttctatttatagcattcttttttttttttagtagcggtatttccatttacaaaatatagtaactcttgattactgaaaatgtcaaatcctagaaaacgtagcatgcctatacatgatgttaacatcattctcgaacagttgttggccgaagattcatttgatgaatccaatttttttgaaatagacaattctgatgttctctttagaaataactcagtttttatcttttttcacattgaaaatcagttagatttgcttaagcctcaaagagaatgtttatgtaaattagcgctggcaatttttttttttctaaacaggaaaagggttaaatgaaggttgataaaatggatgttcaattgtctttctgaaagtgagtggcttgaagggatgaataaatattttcttaatatattcaaaaaagtgcattgctttctgtgatggaagttaagacctaaatgtctggaagttgtaaccctcaacacagcttttcctgatttgctgcaaaggcacatagctgattatagaagtgaagacggcaaggacggggactccaacaaaggaaaccctgttgcaggatttgggaactttcatgcttcagatgaaattcaggcatgtgagcatcactgcagaatgtggtgcatcattgccatcatgagtaatcacttgctgctcctacttctgagaccaagactcttttgtcatattctttagcaataggacgggtaaagactggatttaattgctgttcagagtataaaaactcaattgattccaacatatctgaatgtgcagtaaagtcttaaaagtcaaccgtta

SEQ ID NO: 501830 - DNA, 4135 bp, Homo sapiens
  misc_feature (263)..(263): n is a, c, g, or t
  misc_feature (301)..(301): n is a, c, g, or t
tttatcttttaagttattgtcacaatagttactctcttttagaccctgaacattttcagtacttgctccaaatggtttagcaacttttgaagtgggattaacaagtttggccaatgaagcttcttccctgcccaccgccagaggtgctggagaaaagtaatcctggagggtcggcgtggaggcagtagagaggtttataaaagtcaaggaagtgggaagaggcttgcgagcagcaggagaggcgcagagtcagaggggcaggngcggcggcggagggagcaggaggttggggcttgagccngtcattccggcgcacgaaaacttgaagtcgctcggtagccggggaagggaaggaagagaggcaggctctttcctagaggtgccgtgatcgagggtctggcactccaagccaactcctgagaacgggaaatgggcgggagtcggtggggtggagagggcagccgtggtcgcgagagcgaaggagcggtctgagaatccggcttgagtgttaaaggctaagcgtgtctagctggacccgtggccccgaagaagcgagacaaggcgacgcggagctgtccctgacaccccgaggaccgagggacagcgaagggccggggccgccggccattgccaggcgccattaggtgacgcggccgtcacgcgatgacgcgctgaccggcagtggcctccacgtcgcaggttccgcaaagacctgtgggagcgacccgggagaaggagggccaagatggcggaagcggaggagtctccaggagacccggggacagcatcgcccaggcccctgtttgcaggcctttcagatatatccatctcacaagacatccccgtagaaggagaaatcaccattcctatgagatctcgcatccgggagtttgacagctccacattaaatgaatctgttcgcaataccatcatgcgtgatctaaaagctgttgggaaaaaattcatgcatgttttgtacccaaggaaaagtaatactcttttgagagattgggatttgtggggccctttgatcctttgtgtgacactcgcattaatgctgcaaagagactctgcagatagtgaaaaagatggagggccccaatttgcagaggtgtttgtcattgtctggtttggtgcagttaccatcaccctcaactcaaaacttcttggagggaacatatctttttttcagagcctctgtgtgctgggttactgtatacttcccttgacagtagcaatgctgatttgccggctggtacttttggctgatccaggacctgtaaacttcatggttcggctttttgtggtgattgtgatgtttgcctggtctatagttgcctccacagctttccttgctgatagccagcctccaaaccgcagagccctagctgtttatcctgttttcctgttttactttgtcatcagttggatgattctcacctttactcctcagtaaatcaggaatgggaaattaaaaccagtgaattgaaagcacatctgaaagatgcaattcaccatggagctttgtctctggcccttattttgtctaattttggaggtatttgataactgagtaggtgaggagattaaaagggagccatatagcactgtcaccccttatttgaggaactgatgtttgaaaggctgttcttttctctcttaatgtcatttctttaaaaatacatgtgcatactacacacagtatataatgcctccttaaggcatgatggagtcaccgtggtccatttgggtgacaaccagtgacttgggaagcacatagatacatcttacaagttgaatagagttgataactattttcagttttgagaataccagttcaggtgcagctcttaaacacattgccttatgactattagaatatgcctctcttttcataaataaaaatacatggtctatatccattttcttttatttctctctcttaagcttaaaaaggcaatgagagaggttaggagtgggttcatacacggagaatgagaaaacatgcattaaccaatattcagattttgatcaggggaaattctacacttgttgcaaaaaaaaaaaaaaaaaaagcaaagggcctctaaagaatcagcctctttggtccctttgtgctgtcacctttttgccatgtttaacagcatcttggttggcactctagtcttaatcttgctccttaactttgaatatgcagtctaaaatgtcagtagtcaacatgtaattttcctttgaaattctgaatattccagtgctggaacttatccaaaaagaagacctcagaaacttagattggtagatctctagtgcatattatcatgtgggcaccttctcttagggtggaatgaggcagtctggatgcagcatagttaaaaggagctgtttaatattctctgtagtctggcctcttaactagaaagtaaagctaaatcagaagcctgtatttaaccatgtgaacagggagggatttagtgttctgatggctgattaatagaacagctagatacttagagcatgacgtgggatgggatgagtttacagctgctgccttttcatggtgagcttagcagttttctcattagatgtgtttttttgggttggggaatagcaatttattttattgattttagactttatcaagctaattagctcccctttagataagtacatgttgcacatgtgcacctacttgtaatctcagatatttatgcacacaagtgtgaaggtttttcagggagcagagcatctgggacaggctgattctgagctaaacagggctcctttaaggcaatatgaactgttgccttctataaattgcacattgaggaactctaatagacaaagattaggtgtcaggcagaaaacactcattgtaaatatactattagttgataaacataggactttcttattccccagtttttctttatcatataatttaaatatttattcattttgtatttaaagactacctacacatagatatatgattccaaagtcatactttctccatccccacattagccaagtgaatacagggccaaatgggttcttggaatgataataacaaagcattacaaagtgggtccccttggttccagccttgtccagagtttttggttatatatttctatttattacaatttaccttttaaattgtaaaataaacctttgtgtggacagagccaatgtttcaatcttgaatgagtaaagaaaatactttggaactgatcctcattttgaaattggttctaaattattatccatttccaatgtctgaaattctcttacttcctgctaaaactctctttctgccaaagttgtttcgtaatctgtctcaatgactataatgtaaaattaaagaagtaaccatgcttctcaagggggaattaaaagtgtttattgaattttactcaggctaattgtttggtcagaaattcctaaggccacagctttggggggttcgtgtagatgtacatggtgggtgggttataaatattgggacttaaggcagcttgttctatgtatttatctttgctcttgggtgacttagggaatgattttatttgatttaaccttctttctgtttgccccgagaatactcgccagtggcgcttgcagttgtagcatttaccccaagataactttgcctacgaaatatttcgcttttattattttcacatcattctagtatatggactttggaaacaaaagacattgttctatttatagcattcttttttttttttagtagcggtatttccatttacaaaatatagtaactcttgattactgaaaatgtcaaatcctagaaaacgtagcatgcctatacatgatgttaacatcattctcgaacagttgttggccgaagattcatttgatgaatccaatttttttgaaatagacaattctgatgttctctttagaaataactcagtttttatcttttttcacattgaaaatcagttagatttgcttaagcctcaaagagaatgtttatgtaaattagcgctggcaatttttttttttctaaacaggaaaagggttaaatgaaggttgataaaatggatgttcaattgtctttctgaaagtgagtggcttgaagggatgaataaatattttcttaatatattca

SEQ ID NO: 501831 - DNA, 4735 bp, Homo sapiens
  misc_feature (263)..(263): n is a, c, g, or t
  misc_feature (301)..(301): n is a, c, g, or t
  misc_feature (4571)..(4571): n is a, c, g, or t
  misc_feature (4583)..(4583): n is a, c, g, or t
  misc_feature (4587)..(4587): n is a, c, g, or t
  misc_feature (4590)..(4590): n is a, c, g, or t
  misc_feature (4594)..(4594): n is a, c, g, or t
  misc_feature (4602)..(4602): n is a, c, g, or t
  misc_feature (4605)..(4605): n is a, c, g, or t
  misc_feature (4609)..(4609): n is a, c, g, or t
  misc_feature (4612)..(4612): n is a, c, g, or t
  misc_feature (4615)..(4616): n is a, c, g, or t
  misc_feature (4619)..(4619): n is a, c, g, or t
  misc_feature (4624)..(4624): n is a, c, g, or t
  misc_feature (4633)..(4633): n is a, c, g, or t
tttatcttttaagttattgtcacaatagttactctcttttagaccctgaacattttcagtacttgctccaaatggtttagcaacttttgaagtgggattaacaagtttggccaatgaagcttcttccctgcccaccgccagaggtgctggagaaaagtaatcctggagggtcggcgtggaggcagtagagaggtttataaaagtcaaggaagtgggaagaggcttgcgagcagcaggagaggcgcagagtcagaggggcaggngcggcggcggagggagcaggaggttggggcttgagccngtcattccggcgcacgaaaacttgaagtcgctcggtagccggggaagggaaggaagagaggcaggctctttcctagaggtgccgtgatcgagggtctggcactccaagccaactcctgagaacgggaaatgggcgggagtcggtggggtggagagggcagccgtggtcgcgagagcgaaggagcggtctgagaatccggcttgagtgttaaaggctaagcgtgtctagctggacccgtggccccgaagaagcgagacaaggcgacgcggagctgtccctgacaccccgaggaccgagggacagcgaagggccggggccgccggccattgccaggcgccattaggtgacgcggccgtcacgcgatgacgcgctgaccggcagtggcctccacgtcgcaggttccgcaaagacctgtgggagcgacccgggagaaggagggccaagatggcggaagcggaggagtctccaggagacccggggacagcatcgcccaggcccctgtttgcaggcctttcagatatatccatctcacaagacatccccgtagaaggagaaatcaccattcctatgagatctcgcatccgggagtttgacagctccacattaaatgaatctgttcgcaataccatcatgcgtgatctaaaagctgttgggaaaaaattcatgcatgttttgtacccaaggaaaagtaatactcttttgagagattgggatttgtggggccctttgatcctttgtgtgacactcgcattaatgctgcaaagagactctgcagatagtgaaaaagatggagggccccaatttgcagaggtgtttgtcattgtctggtttggtgcagttaccatcaccctcaactcaaaacttcttggagggaacatatctttttttcagagcctctgtgtgctgggttactgtatacttcccttgacagtagcaatgctgatttgccggctggtacttttggctgatccaggacctgtaaacttcatggttcggctttttgtggtgattgtgatgtttgcctggtctatagttgcctccacagctttccttgctgatagccagcctccaaaccgcagagccctagctgtttatcctgttttcctgttttactttgtcatcagttggatgattctcacctttactcctcagtaaatcaggaatgggaaattaaaaccagtgaattgaaagcacatctgaaagatgcaattcaccatggagctttgtctctggcccttattttgtctaattttggaggtatttgataactgagtaggtgaggagattaaaagggagccatatagcactgtcaccccttatttgaggaactgatgtttgaaaggctgttcttttctctcttaatgtcatttctttaaaaatacatgtgcatactacacacagtatataatgcctccttaaggcatgatggagtcaccgtggtccatttgggtgacaaccagtgacttgggaagcacatagatacatcttacaagttgaatagagttgataactattttcagttttgagaataccagttcaggtgcagctcttaaacacattgccttatgactattagaatatgcctctcttttcataaataaaaatacatggtctatatccattttcttttatttctctctcttaagcttaaaaaggcaatgagagaggttaggagtgggttcatacacggagaatgagaaaacatgcattaaccaatattcagattttgatcaggggaaattctacacttgttgcaaaaaaaaaaaaaaaaaaagcaaagggcctctaaagaatcagcctctttggtccctttgtgctgtcacctttttgccatgtttaacagcatcttggttggcactctagtcttaatcttgctccttaactttgaatatgcagtctaaaatgtcagtagtcaacatgtaattttcctttgaaattctgaatattccagtgctggaacttatccaaaaagaagacctcagaaacttagattggtagatctctagtgcatattatcatgtgggcaccttctcttagggtggaatgaggcagtctggatgcagcatagttaaaaggagctgtttaatattctctgtagtctggcctcttaactagaaagtaaagctaaatcagaagcctgtatttaaccatgtgaacagggagggatttagtgttctgatggctgattaatagaacagctagatacttagagcatgacgtgggatgggatgagtttacagctgctgccttttcatggtgagcttagcagttttctcattagatgtgtttttttgggttggggaatagcaatttattttattgattttagactttatcaagctaattagctcccctttagataagtacatgttgcacatgtgcacctacttgtaatctcagatatttatgcacacaagtgtgaaggtttttcagggagcagagcatctgggacaggctgattctgagctaaacagggctcctttaaggcaatatgaactgttgccttctataaattgcacattgaggaactctaatagacaaagattaggtgtcaggcagaaaacactcattgtaaatatactattagttgataaacataggactttcttattccccagtttttctttatcatataatttaaatatttattcattttgtatttaaagactacctacacatagatatatgattccaaagtcatactttctccatccccacattagccaagtgaatacagggccaaatgggttcttggaatgataataacaaagcattacaaagtgggtccccttggttccagccttgtccagagtttttggttatatatttctatttattacaatttaccttttaaattgtaaaataaacctttgtgtggacagagccaatgtttcaatcttgaatgagtaaagaaaatactttggaactgatcctcattttgaaattggttctaaattattatccatttccaatgtctgaaattctcttacttcctgctaaaactctctttctgccaaagttgtttcgtaatctgtctcaatgactataatgtaaaattaaagaagtaaccatgcttctcaagggggaattaaaagtgtttattgaattttactcaggctaattgtttggtcagaaattcctaaggccacagctttggggggttcgtgtagatgtacatggtgggtgggttataaatattgggacttaaggcagcttgttctatgtatttatctttgctcttgggtgacttagggaatgattttatttgatttaaccttctttctgtttgccccgagaatactcgccagtggcgcttgcagttgtagcatttaccccaagataactttgcctacgaaatatttcgcttttattattttcacatcattctagtatatggactttggaaacaaaagacattgttctatttatagcattcttttttttttttagtagcggtatttccatttacaaaatatagtaactcttgattactgaaaatgtcaaatcctagaaaacgtagcatgcctatacatgatgttaacatcattctcgaacagttgttggccgaagattcatttgatgaatccaatttttttgaaatagacaattctgatgttctctttagaaataactcagtttttatcttttttcacattgaaaatcagttagatttgcttaagcctcaaagagaatgtttatgtaaattagcgctggcaatttttttttttctaaacaggaaaagggttaaatgaaggttgataaaatggatgttcaattgtctttctgaaagtgagtggcttgaagggatgaataaatattttcttaatatattcaaaaaagtgcattgctttctgtgatggaagttaagacctaaatgtctggaagttgtaaccctcaacacagcttttcctgatttgctgcaaaggcacatagctgattatagaagtgaagacggcaaggacggggactccaacaaaggaaaccctgttgcaggatttgggaactttcatgcttcagatgaaattcaggcatgtgagcatcactgcagaatgtggtgcatcattgccatcatgagtaatcacttgctgctcctacttctgagaccaagactcttttgtcatattctttagcaataggacgggtaaagactggatttaattgctgttcagagtataaaaactcaattgattccaacatatctgaatgtgcagtaaagtcttaaaagtcaaccgttataaaaaaaaaaaaaaaaaaaaaaaaaaaaaatttnttgggccccctnggcnccntggnaaaaactnttnttanacnccnntcngttgngggcgccgngggccccaatatgtggttagggtaaccgtgggccaaaaagcgtgtccctagaggaaaacccggggccaaggcaaaaggcgcgtgggatttttccccaattaa

SEQ ID NO: 501832 - DNA, 1604 bp, Homo sapiens
aaggctaggtagaggccgggtggtttaatcggccgtaggcccagctggcccgtgctgcgctgtgctcttcctgccctggcgccctgctgcattcctgccattcccccgatgtctggccctgctgggctactggcctgcctgctggagctgcagtgaaccttcacctccctgatggacatggctgccttcccctacgggaccctgtgctcccctgcttgcctgctgcctgctcatgtccccgctgcatgcttgcccaatgcctccatgcatgggtgccacctgatggactccatgtgatgcaccccatgtgccctgttcttcttgtgcccacatgctgccccatcctgtgacccctcatgctgaccctccttgtcctgccctcctgtgcgtgctgctggcctgtcttggatgactcttgcacctgtctgctgtgcctccgctatgacctactgcaatggcccctgctgccggtggttgtgtgtgactgtgtgtgatgtgtgttgtgctgtttcccttgatggtctctgctgtgatgtgaaatgtgtgtctgcatgctttgcaagtccgctgccatggccactcgagtgcacataccatcctgcatcctgcctggcgaacgctgtgcatacacaaaaactactgggacggcggcacgaacggggaatgacacagaaccccaggattccagggaaaccaacgggcattttagggtcccaccttgtgcaaaagcgtcggtaacccagtccaattggttcacccgcattcaagcgtataaattcacattcacacacatggaacccattggtagtgtgaggctggataggttcagatccaatattatatatgggtggcatacgtgcaaggacttcgagtggtgaaagcaccccctggcactggtgcccttacagcgcgacacgcgcagggcacgtggacagaaggccagggataagagcataaacactgtgagcccgaaagccccggcaatgcccgggtgaacattcgagcagtattatcgggagccaaaagacgtggaagaacggccacaccaaaggaagaccgccgacacagcacggcactacaagacggcggagacaccatctaaacgcaccgggggctcggtcagcaacagcgcatcaaatgagaatgagcccacaaaaacgtggacacccgtttcagaagaccttcggcacagaatccgagacagggatcctttgtggccccaagttcaacgaaggctccacaactctccacccacttttgctcaacacggctcagtgacaacacaggcggtaacacccccagtgcacatgcacggccccagcaggagacagaccacgaaagggtcgtggacactacttccaacaactagtgtgaccatgtgtgcccaacagccaagcagcaagcttaaaccacgccgcggacaaagtagttctgcgccctaacagggagggacccgagggagcgcaccctcccccaagacggggtggacgagcacacagagaaaagaggtaatacctccacagcagaggaagaacacacgcactaaagccgtggaaggcgataacacccacagctgagtgagaacccaacagacagaagcgcat

SEQ ID NO: 501833 - DNA, 4928 bp, Homo sapiens
actacaacaactaaattcacgggccgtggggacaggttatacctaattccagttttgagaataccagttcaggtgcagctcttaaacacattgccttatgactattagaatatgcctctcttttcataaataaaaatacatggtctatatccattttcttttatttctctctcttaagcttaaaaaggcaatgagagaggttaggagtgggttcatacacggagaatgagaaaacatgcattaaccaatattcagattttgatcaggggaaattctacacttgttgcaaaaaaaaaaaaaaaaaaagcaaagggcctctaaagaatcagcctctttggtccctttgtgctgtcacctttttgccatgtttaacagcatcttggttggcactctagtcttaatcttgctccttaactttgaatatgcagtctaaaatgtcagtagtcaacatgtaattttcctttgaaattctgaatattccagtgctggaacttatccaaaaagaagacctcagaaacttagattggtagatctctagtgcatattatcatgtgggcaccttctcttagggtggaatgaggcagtctggatgcagcatagttaaaaggagctgtttaatattctctgtagtctggcctcttaactagaaagtaaagctaaatcagaagcctgtatttaaccatgtgaacagggagggatttagtgttctgatggctgattaatagaacagctagatacttagagcatgacgtgggatgggatgagtttacagctgctgccttttcatggtgagcttagcagttttctcattagatgtgtttttttgggttggggaatagcaatttattttattgattttagactttatcaagctaattagctcccctttagataagtacatgttgcacatgtgcacctacttgtaatctcagatatttatgcacacaagtgtgaaggtttttcagggagcagagcatctgggacaggctgattctgagctaaacagggctcctttaaggcaatatgaactgttgccttctataaattgcacattgaggaactctaatagacaaagattaggtgtcaggcagaaaacactcattgtaaatatactattagttgataaacataggactttcttattccccagtttttctttatcatataatttaaatatttattcattttgtatttaaagactacctacacatagatatatgattccaaagtcatactttctccatccccacattagccaagtgaatacagggccaaatgggttcttggaatgataataacaaagcattacaaagtgggtccccttggttccagccttgtccagagtttttggttatatatttctatttattacaatttaccttttaaattgtaaaataaacctttgtgtggacagagccaatgtttcaatcttgaatgagtaaagaaaatactttggaactgatcctcattttgaaattggttctaaattattatccatttccaatgtctgaaattctcttacttcctgctaaaactctctttctgccaaagttgtttcgtaatctgtctcaatgactataatgtaaaattaaagaagtaaccatgcttctcaagggggaattaaaagtgtttattgaattttactcaggctaattgtttggtcagaaattcctaaggccacagctttggggggttcgtgtagatgtacatggtgggtgggttataaatattgggacttaaggcagcttgttctatgtatttatctttgctcttgggtgacttagggaatgattttatttgatttaaccttctttctgtttgccccgagaatactcgccagtggcgcttgcagttgtagcatttaccccaagataactttgcctacgaaatatttcgcttttattattttcacatcattctagtatatggactttggaaacaaaagacattgttctatttatagcattcttttttttttttagtagcggtatttccatttacaaaatatagtaactcttgattactgaaaatgtcaaatcctagaaaacgtagcatgcctatacatgatgttaacatcattctcgaacagttgttggccgaagattcatttgatgaatccaatttttttgaaatagacaattctgatgttctctttagaaataactcagtttttatcttttttcacattgaaaatcagttagatttgcttaagcctcaaagagaatgtttatgtaaattagcgctggcaatttttttttttctaaacaggaaaagggttaaatgaaggttgataaaatggatgttcaattgtctttctgaaagtgagtggcttgaagggatgaataaatattttcttaatatattcaaaaaagtgcattgctttctgtgatggaagttaagacctaaatgtctggaagttgtaaccctcaacacagcttttcctgatttgctgcaaaggcacatagctgattatagaagtgaagacggcaaggacggggactccaacaaaggaaaccctgttgcaggatttgggaactttcatgcttcagatgaaattcaggcatgtgagcatcactgcagaatgtggtgcatcattgccatcatgagtaatcacttgctgctcctacttctgagaccaagactcttttgtcatattctttagcaataggacgggtaaagactggatttaattgctgttcagagtataaaaactcaattgattccaacatatctgaatgtgcagtaaagtcttaaaagtcaaccgttaatcattaagtcttttgcctctaaagtcttttgcctctgaagaggtttattacatgagttgattttcatattttcattttggtggggttttcctgttgttgggcaaggtggggtcacaggacatgggactagtaagcattttactgtttactatatttgtctttttataaacagtatctcccaaaatgtgattagaaggctaccaagcctgtatttggacatttaattgtgtgctttatataatgtaactactaacagtatttggactgcctgttcattcctggagacaaaaatgaaaatctgtcagttcaagttcttgggtaacatcaagtcattagaatttatctaaagcttatcatgatttgataagacatccattgcatgcagctgttttagctcagtgcaaaacactgaaattgtgattcttagactgtttctgagacatttggatggaaataaatgtataaatgttaattcatgtatataaattagaaacacttttctagattctgtaggcttttgttaaaaatagagaatttcttggggtttacttaggccacagaatggccaaataataataatgacaatgatattactaataataatagctaacctttatttggcacttactgtgtgccaggcactattctatttttttaagaatttttaaaataacagctttattgaaatacactttaccataaacttcacctttttattttttatttttatgagacagggactcacccaggctggagtgcagtggagcagtcatggcacactgtagcctcgacctccctgggctcaagcaatcctcccacttcagtgtcccgagtagttgggactacaggcatgcgtcactacacctaattggctaatttttgtagtttttgtagagatagggtttcgccatgttgcctaggctggtcttgaattcctgggctcaagcgatccacctgctttggcctcccaaaacagtgggattgcaggcgtgagccaccatgcctggctgaaattcaccttttaagatgtacaattcagtggtttttagtatattcacacacaaaattgcacaactatcactaacatctaattttagatcattttgtaacttcaccaagaaaccccaggtctgtcagcagtcagttccattcccccttcatcccagcctctggcaaccactaatctgctttctgtcactattgatttggccagacactattcttctgtgcttctcatgcatctcctgtaataccagtgctacaattctcattttatgtggaaaattgaggcactgagaggttaagtaaattgcccacggtcacacagtaatttgatttacaacagtaataacacattagatgagaacacagtaggacacaattttgaattccatttttatgtacctgaaatgaatacacccctcccccaaggtattttccctattgttagcctttgtaccctaggtacaaatataggtattttccctattgtgttatgtacctgaaatgaatacacccttcccccaaggtattttccctattgttagcctttgtaccctagaactgactggatgtagataacatttgttttcagagtaatggaacactgtatcagcagcatctgagaacataagaacagttggacattggaaagaggtttgttgccctcatccctccttgaacctcttttctctcccgcttccaccaccaccacacatatatacccctttttctcagtcttaagcatcaaacaatttctgcctctttctttttaattctcccagagggatggttaatgcatcacaatttaacttgtctattcaggtattaatagtcaagggatgcatctgtttgcttatagtaccagttatattcctaggaccttagagagcagtagtgtgagaatagaatgcctttctatttgggttaaactatgtgggaggaaaaagtaacagagtaaaggctttgccttaatgaagtcaagtgttctgcctggtgggaagtggccacacgctgcactgcgctgctcttgtttactctgttctttcagagcctttgtactttgccatcactgctagtaatttcttggtccttttcaatactccattttaatcttgatttttttctataaataataaatctgtgaaaaatctgtaaaaa

SEQ ID NO: 501834 - DNA, 3749 bp, Homo sapiens
  misc_feature (263)..(263): n is a, c, g, or t
  misc_feature (301)..(301): n is a, c, g, or t
  misc_feature (3452)..(3452): n is a, c, g, or t
  misc_feature (3456)..(3456): n is a, c, g, or t
  misc_feature (3467)..(3467): n is a, c, g, or t
tttatcttttaagttattgtcacaatagttactctcttttagaccctgaacattttcagtacttgctccaaatggtttagcaacttttgaagtgggattaacaagtttggccaatgaagcttcttccctgcccaccgccagaggtgctggagaaaagtaatcctggagggtcggcgtggaggcagtagagaggtttataaaagtcaaggaagtgggaagaggcttgcgagcagcaggagaggcgcagagtcagaggggcaggngcggcggcggagggagcaggaggttggggcttgagccngtcattccggcgcacgaaaacttgaagtcgctcggtagccggggaagggaaggaagagaggcaggctctttcctagaggtgccgtgatcgagggtctggcactccaagccaactcctgagaacgggaaatgggcgggagtcggtggggtggagagggcagccgtggtcgcgagagcgaaggagcggtctgagaatccggcttgagtgttaaaggctaagcgtgtctagctggacccgtggccccgaagaagcgagacaaggcgacgcggagctgtccctgacaccccgaggaccgagggacagcgaagggccggggccgccggccattgccaggcgccattaggtgacgcggccgtcacgcgatgacgcgctgaccggcagtggcctccacgtcgcaggttccgcaaagacctgtgggagcgacccgggagaaggagggccaagatggcggaagcggaggagtctccaggagacccggggacagcatcgcccaggcccctgtttgcaggcctttcagatatatccatctcacaagacatccccgtagaaggagaaatcaccattcctatgagatctcgcatccgggagtttgacagctccacattaaatgaatctgttcgcaataccatcatgcgtgatctaaaagctgttgggaaaaaattcatgcatgttttgtacccaaggaaaagtaatactcttttgagagattgggatttgtggggccctttgatcctttgtgtgacactcgcattaatgctgcaaagagactctgcagatagtgaaaaagatggagggccccaatttgcagaggtgtttgtcattgtctggtttggtgcagttaccatcaccctcaactcaaaacttcttggagggaacatatctttttttcagagcctctgtgtgctgggttactgtatacttcccttgacagtagcaatgctgatttgccggctggtacttttggctgatccaggacctgtaaacttcatggttcggctttttgtggtgattgtgatgtttgcctggtctatagttgcctccacagctttccttgctgatagccagcctccaaaccgcagagccctagctgtttatcctgttttcctgttttactttgtcatcagttggatgattctcacctttactcctcagtaaatcaggaatgggaaattaaaaccagtgaattgaaagcacatctgaaagatgcaattcaccatggagctttgtctctggcccttattttgtctaattttggaggtatttgataactgagtaggtgaggagattaaaagggagccatatagcactgtcaccccttatttgaggaactgatgtttgaaaggctgttcttttctctcttaatgtcatttctttaaaaatacatgtgcatactacacacagtatataatgcctccttaaggcatgatggagtcaccgtggtccatttgggtgacaaccagtgacttgggaagcacatagatacatcttacaagttgaatagagttgataactattttcagttttgagaataccagttcaggtgcagctcttaaacacattgccttatgactattagaatatgcctctcttttcataaataaaaatacatggtctatatccattttcttttatttctctctcttaagcttaaaaaggcaatgagagaggttaggagtgggttcatacacggagaatgagaaaacatgcattaaccaatattcagattttgatcaggggaaattctacacttgttgcaaaaaaaaaaaaaaaaaaagcaaagggcctctaaagaatcagcctctttggtccctttgtgctgtcacctttttgccatgtttaacagcatcttggttggcactctagtcttaatcttgctccttaactttgaatatgcagtctaaaatgtcagtagtcaacatgtaattttcctttgaaattctgaatattccagtgctggaacttatccaaaaagaagacctcagaaacttagattggtagatctctagtgcatattatcatgtgggcaccttctcttagggtggaatgaggcagtctggatgcagcatagttaaaaggagctgtttaatattctctgtagtctggcctcttaactagaaagtaaagctaaatcagaagcctgtatttaaccatgtgaacagggagggatttagtgttctgatggctgattaatagaacagctagatacttagagcatgacgtgggatgggatgagtttacagctgctgccttttcatggtgagcttagcagttttctcattagatgtgtttttttgggttggggaatagcaatttattttattgattttagactttatcaagctaattagctcccctttagataagtacatgttgcacatgtgcacctacttgtaatctcagatatttatgcacacaagtgtgaaggtttttcagggagcagagcatctgggacaggctgattctgagctaaacagggctcctttaaggcaatatgaactgttgccttctataaattgcacattgaggaactctaatagacaaagattaggtgtcaggcagaaaacactcattgtaaatatactattagttgataaacataggactttcttattccccagtttttctttatcatataatttaaatatttattcattttgtatttaaagactacctacacatagatatatgattccaaagtcatactttctccatccccacattagccaagtgaatacagggccaaatgggttcttggaatgataataacaaagcattacaaagtgggtccccttggttccagccttgtccagagtttttggttatatatttctatttattacaatttaccttttaaattgtaaaataaacctttgtgtggacagagccaatgtttcaatcttgaatgagtaaagaaaatactttggaactgatcctcattttgaaattggttctaaattattatccatttccaatgtctgaaattctcttacttcctgctaaaactctctttctgccaaagttgtttcgtaatctgtctcaatgactataatgtaaaattaaagaagtaaccatgcttctcaataaaaaaaaaaaaaaaaaaaaaaaaaaaaaaaaaaaaaaaaaaaaaaacaaaaaaaaaaaaagaaaaaanaaanaacaaaaaaanaaaagaaagagagagggggcgcggcgcggaaaccaagaagaatccccgctctgaccgggcgagcgagcagcgcaccgacacgcccccctcggcttattttgactaaaggggggccccccagagggagagcggcagataaagaagcgaggggggggcggggggacgttaacacaaggatgtcggaggggagaacaacacgacgtgggcgggagaagaatgtgagagggcgagcgccacaactcgaggggggaggagagaacaaaaggcggcaagcgaacaacg

SEQ ID NO: 501835 - DNA, 1991 bp, Homo sapiens
  misc_feature (263)..(263): n is a, c, g, or t
  misc_feature (301)..(301): n is a, c, g, or t
  misc_feature (1911)..(1911): n is a, c, g, or t
  misc_feature (1918)..(1918): n is a, c, g, or t
  misc_feature (1923)..(1923): n is a, c, g, or t
  misc_feature (1925)..(1925): n is a, c, g, or t
tttatcttttaagttattgtcacaatagttactctcttttagaccctgaacattttcagtacttgctccaaatggtttagcaacttttgaagtgggattaacaagtttggccaatgaagcttcttccctgcccaccgccagaggtgctggagaaaagtaatcctggagggtcggcgtggaggcagtagagaggtttataaaagtcaaggaagtgggaagaggcttgcgagcagcaggagaggcgcagagtcagaggggcaggngcggcggcggagggagcaggaggttggggcttgagccngtcattccggcgcacgaaaacttgaagtcgctcggtagccggggaagggaaggaagagaggcaggctctttcctagaggtgccgtgatcgagggtctggcactccaagccaactcctgagaacgggaaatgggcgggagtcggtggggtggagagggcagccgtggtcgcgagagcgaaggagcggtctgagaatccggcttgagtgttaaaggctaagcgtgtctagctggacccgtggccccgaagaagcgagacaaggcgacgcggagctgtccctgacaccccgaggaccgagggacagcgaagggccggggccgccggccattgccaggcgccattaggtgacgcggccgtcacgcgatgacgcgctgaccggcagtggcctccacgtcgcaggttccgcaaagacctgtgggagcgacccgggagaaggagggccaagatggcggaagcggaggagtctccaggagacccggggacagcatcgcccaggcccctgtttgcaggcctttcagatatatccatctcacaagacatccccgtagaaggagaaatcaccattcctatgagatctcgcatccgggagtttgacagctccacattaaatgaatctgttcgcaataccatcatgcgtgatctaaaagctgttgggaaaaaattcatgcatgttttgtacccaaggaaaagtaatactcttttgagagattgggatttgtggggccctttgatcctttgtgtgacactcgcattaatgctgcaaagagactctgcagatagtgaaaaagatggagggccccaatttgcagaggtgtttgtcattgtctggtttggtgcagttaccatcaccctcaactcaaaacttcttggagggaacatatctttttttcagagcctctgtgtgctgggttactgtatacttcccttgacagtagcaatgctgatttgccggctggtacttttggctgatccaggacctgtaaacttcatggttcggctttttgtggtgattgtgatgtttgcctggtctatagttgcctccacagctttccttgctgatagccagcctccaaaccgcagagccctagctgtttatcctgttttcctgttttactttgtcatcagttggatgattctcacctttactcctcagtaaatcaggaatgggaaattaaaaccagtgaattgaaagcacatctgaaagatgcaattcaccatggagctttgtctctggcccttattttgtctaattttggaggtatttgataactgagtaggtgaggagattaaaagggagccatatagcactgtcaccccttatttgaggaactgatgtttgaaaggctgttcttttctctcttaatgtcatttctttaaaaatacatgtgcatactacacacagtatataatgcctccttaaggcatgatggagtcaccgtggtccatttgggtgacaaccagtgacttgggaagcacatagatacatcttacaagttgaatagagttgataactattttcagttttgagaataccagttcaggtgcagctcttaaacacattgccttatgactattagaatatgcctctcttttcataaataaaaatactgncttatcncttcntnattctccttaagtaaaagcaggagggtggggggtcctcccggatggggaactgcttcccatcgatt

SEQ ID NO: 501836 - DNA, 417 bp, Homo sapiens
  misc_feature (16)..(16): n is a, c, g, or t
  misc_feature (21)..(21): n is a, c, g, or t
  misc_feature (51)..(51): n is a, c, g, or t
  misc_feature (149)..(149): n is a, c, g, or t
  misc_feature (412)..(412): n is a, c, g, or t
tttaatattttataangttantaaaaagtatttttgggaccttcatatatncagaaaaatataaacaaatttgaaactttggatgtcagaaaagtataataaatcctgtagcccacttacagaaacttatataaaaaataatgatttantcttttgttaaaaattatttagtactggctggcatgatagctcatgcctgtagtcccagagctttaggaggctgaggcattaggatcacttgaagccaggaattcaagaccagcctgggcaacatagtgagaccctgtctctacaaaaaaaattaataaattagccagacatggtggtacacacctgtagacccagctacttgagaggctaaggtgggaggatcacttgagcctaggagttcaaggttacacacacgcacacntacaa

SEQ ID NO: 501837 - DNA, 291 bp, Homo sapiens
catgcttcatggatagaggggcagctatgctgccttcccagcccctctgcatactagcttctgtaatgggttgaattgtgtttgaccaaaactcatgtgtttaagtcctaactctcagtacctcagaatctaaacgttttttggaaataagggctttataactaagttaaaatgaggcctttagggtgggccctaatccaatatgagtgctgttcttttaagaaattcagcaggccaggtgtggtggctcatgcctgtaatcccagcactttagcaggccaaggcaggtga

SEQ ID NO: 501838 - DNA, 974 bp, Homo sapiens
ggaggcccgggcggcaggagccggcgctggtgaccgcggcgagggcggcggggacggagcagagcacgactgaagacgcacaggcagccgggccgggccgggccacggtgggagagcggccgtgcggcgcagcgaggcgggagtgccgggcgggccgctgggcagccaccgagccgctgaagcgacatggtgctgctcaaggagtatcgagtaatcctgcctgtgtctgtagatgagtatcaagtggggcagctgtattctgtggttgaggccagtaaaaatgaaacgggtggtggcgaaggcgtggaggtccgtggtgaatgagtgcctactgatagtggacggttgagagaggccagtaagaacacgagatctactcatctgcagtagactgaagtacccgacggttgtttcgaaatgactggcccccagagggagccctgacatatacgacgagaaggccctggaatgccttactcccgtactgtgggagcgcgatctttacaaatgagtactgttgaacgcaacgactgtgctgactttagcctggagagctggcactagatgccaggatcttggacaggcatgcgagaatgtgcactaagtctggagccgtgagcgcgtggaacacgcgttgtacgcgcagactatataagattgttgccgattcgaaagccaaggtgcttcgagcacattgactgaggaaggcaggagagaagacgccagcagtactttatcatcttatcacaagccgtgcctgggacccctttggtgtccccaattttggaaaaccaggatcttgatcagcatagaagggactggcagatatgttgtgttgggtacaaagtggtgaaccgtcacgttcaagtttgtggggcctgaagaacattgtggtccgttcagtcgtacgcaagaaaggggctgttaacaggacttccgaggcggatgtttgtgggtcaaaagtgggtgactac

SEQ ID NO: 501839 - DNA, 1519 bp, Homo sapiens
  misc_feature (263)..(263): n is a, c, g, or t
  misc_feature (301)..(301): n is a, c, g, or t
tttatcttttaagttattgtcacaatagttactctcttttagaccctgaacattttcagtacttgctccaaatggtttagcaacttttgaagtgggattaacaagtttggccaatgaagcttcttccctgcccaccgccagaggtgctggagaaaagtaatcctggagggtcggcgtggaggcagtagagaggtttataaaagtcaaggaagtgggaagaggcttgcgagcagcaggagaggcgcagagtcagaggggcaggngcggcggcggagggagcaggaggttggggcttgagccngtcattccggcgcacgaaaacttgaagtcgctcggtagccggggaagggaaggaagagaggcaggctctttcctagaggtgccgtgatcgagggtctggcactccaagccaactcctgagaacgggaaatgggcgggagtcggtggggtggagagggcagccgtggtcgcgagagcgaaggagcggtctgagaatccggcttgagtgttaaaggctaagcgtgtctagctggacccgtggccccgaagaagcgagacaaggcgacgcggagctgtccctgacaccccgaggaccgagggacagcgaagggccggggccgccggccattgccaggcgccattaggtgacgcggccgtcacgcgatgacgcgctgaccggcagtggcctccacgtcgcaggttccgcaaagacctgtgggagcgacccgggagaaggagggccaagatggcggaagcggaggagtctccaggagacccggggacagcatcgcccaggcccctgtttgcaggcctttcagatatatccatctcacaagacatccccgtagaaggagaaatcaccattcctatgagatctcgcatccgggagtttgacagctccacattaaatgaatctgttcgcaataccatcatgcgtgatctaaaagctgttgggaaaaaattcatgcatgttttgtacccaaggaaaagtaatactcttttgagagattgggatttgtggggccctttgatcctttgtgtgacactcgcattaatgctgcaaagagactctgcagatagtgaaaaagatggagggccccaatttgcagaggtgtttgtcattgtctggtttggtgcagttaccatcaccctcaactcaaaacttcttggagggaacatatctttttttcagagcctctgtgtgctgggttactgtatacttcccttgacagtagcaatgctgatttgccggctggtacttttggctgatccaggacctgtaaacttcatggttcggctttttgtggtgattgtgatgtttgcctggtctatagttggtcctcaggttgagaggaactgtactccagaagctatacttaaagaactacatctgaggagcattatgtgcacctggagctggacctgatctcagtgatgaggaatctagaagttcaaactgatagggtaatgggatgagacttttaggggccttgggaggagtgagtgtactaggcatatg

SEQ ID NO: 501840 - DNA, 198 bp, Homo sapiens
  misc_feature (124)..(124): n is a, c, g, or t
tcagtactgcatgaagagacttcattaaaactaagaaacatttattcggggagaaattttaggcatttaagcaactgtcatttttctcattttcaaacaagttcaaattcattcccgtcaattnggcaagcacagtttcgttgcaatgtcaggaccatcaaccgtttgcaagggttttccatttgcaaaacattgcat

SEQ ID NO: 501841 - DNA, 970 bp, Homo sapiens
actccaccttactaccatcacaagcttagccaaaccatttacccaacataaagtataggcgatagaaattgaaacctggcgcaactagatatagtaccgcacagggcaagagatgaaaaattatagccaagcataatatagcaaggactaacccctataccttctgcataatgaattaactagaaataactttgcaaggagagccaaagctaaggagcccctgaaaccagacgagctatcctacagaacagtcgtaaaagagcacacccgtctatgtagcagaaataagtgggaagatttataggtagaggcgacaaacctaccgagcctggtgatagctggttgtccagagatagaatcttagttcaactgtaaattggcccacagaaccctctaaatccccttgtaaatataactgttagtccaaagaggaacagctcttaggacactaggaaaaaaaccttgtagagagagtaaaacaatttagactacccatagtaggcctagaaagcagacaccaaagttaagaaagcgttcaagctcaacaccactactaaaatatcccaaagatataacctgaactcctcaagccaatggggccaatctatcaccctatagaagaactaatgttaggataagttgcatgaaacttctcctcgataagcgtgggtcagattaaagcctgaactgggcagttagcaggaccatatgtacaaatccaccaaagtcatattacccccatgtacccaaacacgctgtgcctagaagcgatcaccagctaaggaagccggaaattcccccggttcaccacatacctctgttacagataaagacggcgccgaaaatttagcggggccacagcgaagaaaaaagctctaagagcgagaaaagccgacagaatcaaaaaagagccagggcacaaacaacatatcataaacctcacacaagaaggacagaaatgtacatcaac

SEQ ID NO: 501842 - DNA, 177 bp, Homo sapiens
  misc_feature (32)..(32): n is a, c, g, or t
tttttttttttggggggggggggggccccccnccccccccttttgtgcgggggtttttaaattttttgggttccccccggggttcccttgggggtccgttttttccttttccccccccccccccgggggggtgggggggtttgtttttttttttttgattaaacctttttttcccca

SEQ ID NO: 501843 - DNA, 326 bp, Homo sapiens
  misc_feature (221)..(221): n is a, c, g, or t
gggggggggggggggggggggggggggggggggggggtggggggggggggggggggggtgggggggggaggggaggggcgggggggggggggggggggggtggggcggggggggggggggtggggcagtgtaggggggggggggggggcggggcgggagggcggcgggggggggggggtccggcgggaggggggggtcgcggggtagggggagggaaaagnaggagggggggtgggggagcgaaaaccccccccattcctccccccactcttgggccttaccgggggactcctacctttttccccttttatggtaatattttttta

SEQ ID NO: 501844 - DNA, 102 bp, Homo sapiens
ggcgggacgggacgtgcggcccagcgagttggtcggtcccggggtcaccgctacgggaagcaggcctcgccacaagactgagaaaaatggctttgtcaagcc

SEQ ID NO: 501845 - DNA, 104 bp, Homo sapiens
acgaatcctcttctgtgacagaccagctgaccaccgcctctgtgctgtggacagcacagcagagaggtggatagcacagagagaggtggacagcacagaggaga

SEQ ID NO: 501846 - DNA, 248 bp, Homo sapiens
atgggttgaggatgggaacgttataaagagcaccattctcaaagcgcaggaatcgcgagccctggggatcgctggtctacttcctaagcagcaaggaatgttatgcatttcagcgcttgctaagtcagtgcgtcctcagagagggcttgcaggctccagggaggcctgcataaggagtgaggcctgggccaagcccaacagaaagtgtcaaataacaggcctgccccttcccaaccgcatcacccgtt

SEQ ID NO: 501847 - DNA, 648 bp, Homo sapiens
  misc_feature (599)..(599): n is a, c, g, or t
atcgacattgcactattataatgctaaaatgatttctgataaaatagttcctaactcaactagaaaactataaagaatgaaagaatgagcagagtactcatgatgcctttgagtaaaatcgaaacatcatagagcgtgatctaatttccaaatcaataggcagtattgtaacattaaaggaaagctattccaatcacttagaaatacttgctaagtactgctttttacagttatgacaactgtttctatgcatatgaaccaagcaaccaaatatctataaccatggaaatatctgattagaaatatttctaatttgggccgggctcggtggctcacgcctataatcccagcaccttgggaggccaaggcaggcggatcacctgaggtcgggagttcgagaccagcctgaccaacatggtgaaaccccgtctctactaaaaatacaaaattggccgggcatggtggcccatgcctgaaattacagctgcttgggaggctgaggcaggagaatcgcttgggcccgggaggtggagattgcagtgagccgagattgagccattacactccagcctgagcaacaagagtgaaactctgtctcncaaaaaaataaagacagacatatgaccaattgtacagaatagggcaatg

SEQ ID NO: 501848 - DNA, 240 bp, Homo sapiens
cgcccgatattctggaggcttagaaccactggacactcccacaaacatcttcagacagacacatactacatgcactctacacacacacaccacgcactatacatacaaacacacggacacatacacactacacaactacacaaacagacacacactatacacacaaacacactacatgcacatacacactacacacaatcatacacacatagacacatgcacacagcacacacacgtata

SEQ ID NO: 501849 - DNA, 1538 bp, Homo sapiens
  misc_feature (721)..(721): n is a, c, g, or t
cgcgggcttgcacccagcaaagtggtgggtcgcccctttgctcgcccgctgtgttggttgttcgctagtaggccggtggggtggaactcagagaggggtgtctaattcactggtggtgagaaaagaagggcagttgacatcgataggggtgtggatgcctgcccgaagataattgtgatgacccacccggttttcctacagtgggctgtgaagattttgtgggcccccttgtaaagaccacaaaggggagtgttaaatgatatgaaggaggttgatgggcggcaatgggcggttttcccccccacatgggggcaagaattcttttggtgggaagagaaagttgaaacacacagtggggaaggattttggtgcggccgagcgagaccgcagatgttgtagaacacagtagtggccgcagcaccaccagtaagagatgtgtgtagcagtttcgcgccccactgtgttttttatagggggttttttaataatcaccgcgcgccccactcctttgttaggaggccccacagcgtggtggtgaaataatataggggaccgcgtttttagactctgctgcgcccgacgaagattctcttaaagaagaaggtgtttgtaaaaggagcccctcccgcgataatatgctcgtataaacgtcttgtgtttaggaggccttcgagacccgccactatgtataaggagggggggcttcgttgtgcgcgccccnccacaacttaggggggaacaatcctcggggagattgttctcactactaatgtgtcctcggtgagagacagaagagagttttttgtggaatgagatggactctcggtgagataatatattatgtgtcgtctctgctcgacacacgctgcgtcacaggagggatctcttttggcgcactactacgcggcgtgtgggccgtcgtcatatactattcgtgagagctctctgtttgtagttgtgtggagagggctcccaacggttctctctcaccgtgttttctctcgcgacaaaatgcggctctctactggcgcacacagtttgtagatagaggtgagagagcgatatagcgccttatatataacatatataagagagagctctctctgtagagccctgatatatctctcgagcgcccgcgccgtgtgggatatctctaagcgctctatcctcgtgtttaacacactctcactcttgttgtagaacaccacgcgccccctcgtgaggtgtccacgctggggtgggctcgcccctcgtttgtgggcacacaactcgtgtccgctctcttgttctctcgtgcgtgtgttttgtgataaagagagctgtctccactctctgcggggctggagacccacgctttcttgcacacacaacccagacacccgcgctgcacgtcacggtatggagcctcttccgcccacagtatttttattttctgtagtaaagcactttccactccaccacaatgcctaaattgtattctgttatatttttgggtttacacaccctgattcatacttataaatattttcaggttttta

SEQ ID NO: 501850 - DNA, 166 bp, Homo sapiens
ctgccctatgcccacttttaccacaaggcacagccgtacaccctcttatcccctatactagtttagctatctgaagaccagtcagcctactcatgcaaccaatagccctgtgccgtacgccttaaccggtaaggttactgcaggccacctactcgtgtcatacatt

SEQ ID NO: 501851 - DNA, 297 bp, Homo sapiens
ctgctcttagcaggatcccgttttgggcttcgtgcgacggctcatgcctataatcccaggagttagagaccagcctggacaacatggtgaaaccctgtctctacaaaaaaacacaacgattaactggtgagtggtaatgcacacctgtggtccctgctacttgggacgctgaggtgggaggattgcttgagcccaggcaggccagcaggttgcaaaatcatgctactgcacctccagcctcaggctacagagtaagcatcctgtcaaacaaaaaaacaaaccaaaagggaacgacag

SEQ ID NO: 501852 - DNA, 237 bp, Homo sapiens
tctaagaggatcccaggattcgtagatatcaactatatggctaccacctttaagctaatgaaatcataagagctacagtggtaatctcttatactggatatggcaagtgctgagaaaaaagcactgctaactaagctcagatgctgggtaagacacttaaggccagcgctgtgactgaaccatctggtttaaatgcactttctggccctggcttctccctgtccctttcacttcatg

SEQ ID NO: 501853 - DNA, 352 bp, Homo sapiens
  misc_feature (26)..(26): n is a, c, g, or t
  misc_feature (35)..(35): n is a, c, g, or t
  misc_feature (38)..(39): n is a, c, g, or t
  misc_feature (45)..(45): n is a, c, g, or t
  misc_feature (62)..(62): n is a, c, g, or t
  misc_feature (123)..(123): n is a, c, g, or t
  misc_feature (151)..(152): n is a, c, g, or t
  misc_feature (172)..(172): n is a, c, g, or t
  misc_feature (201)..(201): n is a, c, g, or t
  misc_feature (221)..(221): n is a, c, g, or t
  misc_feature (223)..(224): n is a, c, g, or t
  misc_feature (226)..(226): n is a, c, g, or t
  misc_feature (249)..(249): n is a, c, g, or t
  misc_feature (256)..(256): n is a, c, g, or t
  misc_feature (272)..(273): n is a, c, g, or t
  misc_feature (288)..(288): n is a, c, g, or t
  misc_feature (294)..(294): n is a, c, g, or t
  misc_feature (321)..(322): n is a, c, g, or t
  misc_feature (324)..(324): n is a, c, g, or t
  misc_feature (330)..(330): n is a, c, g, or t
  misc_feature (334)..(334): n is a, c, g, or t
  misc_feature (341)..(341): n is a, c, g, or t
aaaaaattaatttattattataatgncctaatttnttnntctgangattaaccatttttttntcttagaatatcaaaaagaaaaagaaaaaggtgttctagctgtttgcatcaaaggaaaaanagatttattatcaaggggcaatattttnntcttttccaaaataaatttnttaatgatacattacaaaaatagattganatcagcctgattagtataantnntnttggtaattaatccattcctggnataaaangtctttatcaaaaaannttgtagatgcttgcnttttcnttttttcaatcatggccatattatganntnctaacngganatagganaaggtgtaact

SEQ ID NO: 501854 - DNA, 219 bp, Homo sapiens
ttactgcatgcagcctgagtgcagagtcagcatctctcatctattcatcagacggagatcagcccgtactcattccaacatagctgctcagctccaatcagagccccatcttcccctggagacagctttgagaaggatgtgagagcgcaattgagagctcttaccagcccccactgctgtgatcagtcagcagcccgtctcagtgtaggcaccacacgc

SEQ ID NO: 501855 - DNA, 306 bp, Homo sapiens
tggacagaccacttgaggtcaggaattcgagactagcctggccaacatggcaaaaccccatctctactaaaaatacaaaaaattagccgagcacggtggtgcatgcctgtaatcccagctacttgggaggctgaggcacgagattccttgaacccaagaggttgaggctatgttgagctgagatcacaccactgtactccagcctggatgacagagtggagactctgtttcaaaaaaaccgaaaagacaatatagtttgattcttcatttttttaaatttgccaatctcaggataacacgttcgcg

SEQ ID NO: 501856 - DNA, 132 bp, Homo sapiens
tatcgccaacactttgtggagcaggtgcaggatcacttgaggcaggcatttgatgacagctgtgcaacataggagacctattcctacaaaaatattttaattagctaggctggtggtgcgccatatagtccc

SEQ ID NO: 501857 - DNA, 342 bp, Homo sapiens
ctctgaagaaaaaaaaaactagcatgacccatggcataagatgtttatagttgaggaaacaacctaaagattacctgcaaggacagacttctacaaaaacagaaaagcccagatgtcccaatacccataacaagatttgctttcaagataattatgcttttttttaaagatagttatgctttgatgtactcacacagtagaatgtcaaggataggtttctttaaatcaataccataataaatttggtcatgctgtctgcccatccgcatgtaggcacagcttagtttagtctttgtatagacaaagatccctataggaagaaaaactttaaagactatgtgt

SEQ ID NO: 501858 - DNA, 196 bp, Homo sapiens
tgcaagctcctgggggattacctagggcctgtgccggaatggagccctgcaggagctcagcaagaggctcgaccacaggaattatctcttggaatctccgcataggttcagtgtcgctgacctccaacagcatgtctaccactgcgacctgtgcaccccgcgcggcttcatctgccagatcggccgcagcctcctg

SEQ ID NO: 501859 - DNA, 291 bp, Homo sapiens
aatctatggcaatgggaccaagcatagtcgtgcaccatgttatctgaataaagggctaagtatccgaaactatatcttaggaactgctacaacagttggcaaaaaaaccccgaaataacccactgaaaaaatagaccagagactcgaataggtatttctccaaaaaaaaaaaaaaaaaaaaaaaaatttccaattggccagggcttacttttattcaatcccatgtaaaacccacagttaacattgctaccctctttttatttttcacggatgggccttttttcaacaaca

SEQ ID NO: 501860 - DNA, 1127 bp, Homo sapiens
agctgaatagagcatatcagctgaagcagttaactagtattaaagttgttatcatttacttcttgttgaagatctcagagcctcagatctcactataaattgtctcaagttctcaatattcaaccaaagaaattaacaatgtatataatcgtaagccgcttatagtcgtataaattgggtgtcccagtaccatggcttttaagtggtgggaccatataggaatccagtgactttccaactggtggggaatttacgaggtcagacagcatcctttgctagtagttgatacattacctgttatcagtctctttcggatacagacagtttaaaactaaggtatgcttcaatgaagagcctactggttgtacttcgaggcatagtatatgtctacacagtagacgattcaggcaagcagcagatacttattgcgacagatctgagagaagaaaaaagagaaaagcgtctaagggagaatgccatgatcggaacgggctgaatggagtaaatatcaattggaaaaacccaagactatcaaggggacacgtgcgataagatcagggtcactccatgctgacgtaatgaagccacgcgacagcgaaagaggggagaaggcccagatcaccaaggctgctatagaacggaggaaagcaacaagaggaacacagctgacaggggtgaaccaagagcgggggctacgccaaaagagtccacaggacaaacaggcgcgactgggctgggacccgacacatttggccgacaaggggtcagtgtacggcgcgaaccaccttgaaacgcgggacaacacaacaatactggaccaacagtccctgacagtagaaacaacagccagtagagaagacaagggaaagggaactgcgcaagggggcccttgcgttcacagaatagcgtggagcgttaccaagagagaccaccttaaggtaggcaaatcccaacggaactgggcagggctggtaagcggaagaaaatttagatgcacgccacgtcccaacacgaaaacgcagcacacaaataaggagccagagccggcacggcagacaaccagagagcctagtaggacaatgcaacacagcaggcatgacagcacaggcatgcggcaggggaaagcg

SEQ ID NO: 501861 - DNA, 1463 bp, Homo sapiens
gtcttttctagcgtcttttgagatgagtatcaggtttatttatattctcacttatgatcatctgatgatgaacttaatgtttccattaggtattaatggaatactaagtccctcgtgtgatattctgaaccaagcctattcctaggcctagagattataaatattcgagttcgacacagaatctaacattagacaggccaagccgtgagatgagccatgatgcctgtacagtcctcaagttgcagtagcgggtaaaccagcggatcggcattgcactcccaaaggaaagtttcaaagggctctgacagaaaagagccttaagaaatagcacgcccatatgaatatcaccacacccgttggaaagacaacaagacactaacgcacgccatgtcttccaaacaaacaaagaacttcaaaaagcgatgaacaaacaccagaccaaatacaacaacaagaataaatatacaacctaatattaatttaaaagaacagacataacagtagccccgccaacaacagttatctactccaacacgcaacacctcttttctatgaacccacggcagaagccgaacgccgagactgcgatacgagagccactaaaaccatgggcaacgtatcactactggcatctgacctaccctagcgcaacattataaaagagctgaagcaagaacatcagtccactaacgataaggagatacattccataggctgaaatacaaaacccacagcctacaagagcacgattaccctctcgcgaagcttgcagggtaaacgagagctacatagctaagatgtgggaactcttcataccgcgcgtactgcttctacagagcgcggtatatactttaagtcaattagtgagtgagccatcagaatgaggatatcacatcgaaatttcacacgtcattgtagactacaccgttccagtgtgtgcctgtctgagttgaaaccctgcgtatctgacgtccaactcatcctaacgaagaaagcagccacacgcccagaagacacgcctaagaagggcacaccagagcgaaccgagaggatcatcggggctgacagcccgagtcagtgcggctctggctcccgccgaacgccgacacgcagggcccaccgtcccataggcatcgacgcacttaacaatgactaaatcataatattattatacacacctacactcaccacctcttacctcatcacatacaatcaatagtcacgctgtatgatcaccgactatcgacaggatcataaatactcatctcatctacccctttagccactcataactaaccacactcactagcactatctatcttacaatatatcatctcacttaagacctcagagtccacaccaacgaaatatgactacaacaattagtatactaatctacatacactcagccgacatctctatctctctcctactcacccactaactaacacaagtatccgtaa

SEQ ID NO: 501862 - DNA, 364 bp, Homo sapiens
taccattttcagtttttactactaatcttagcaggtaagaattagtattttgtgttatacatttttcctttcatttaaaaattagccaggtgtggtggctcatgtctgtaatctcagcactttgggaggccgaggcaggcaggttgcttggagttccgagaccagctttggcaacacagtgaaacccatctctacaaaaagtacaaaaattagctgggcttggtgcacgcgcctgtggttctactgaagaggctgagatgggaggatcacttgagcctggtaggtggagaggttgctgtgagctgagaatgcactactgcattcacagcctgcagcctgggcgacagagcaagaccctgtctca

SEQ ID NO: 501863 - DNA, 149 bp, Homo sapiens
gctggcgcgcccggtgcctggtgctggatgaagctcgatacggcatgcatctggctgggtggtgcgccccgaacatgtgcggaagcgttttatcatgcgcctgtgcgcctgtcgcaacgtggcgcagccggtcaatatcatgagccact

SEQ ID NO: 501864 - DNA, 147 bp, Homo sapiens
catcagtggaaacctcaaataccgaacactacaacagatatactaaaaatgaaacgagaaattacaatacatgaccagagaaacccacttccacaaaaaggaagacaggaagaatggaaggggtgacgagaggcgtcagtatcgcta

SEQ ID NO: 501865 - DNA, 157 bp, Homo sapiens
aggtggaaatcaggacatgaataagaccagatctgcgggaaacagaagctgagctccgccgcatgcaagagatgattgcaaggatgcgggccgcaaatgcaggatcgcggatccaggcgcgggaataggcgacaggcgaggcctcctcgggcaacca

SEQ ID NO: 501866 - DNA, 574 bp, Homo sapiens
aagaacttttgagtgcaattagacctcacatctttctagtctcggttagtgatggtggctctaggacgaagcgggacaagctgtacggtctcgggggacttgagcttggggaatcactttcagctcgtgtgtcagcccctcttccctgtcctccacttggcacatcgaagcactatcgtccatccactatatagttcatcagagatgttaatattattattgctccactctcgtatcacggtccattttctaacgggtagaatgagagcaacgtaggtacgtggatcgaggtctgataatgaacccagggtaggagacggagacgatctcctgggcagccgttttcctcatcctttccctctcccagtccatttccaaatgtggcctccatgtgggtgctaggaacatgggaaaaaccactgctatgccatttcttctctctgttcccttcgctcacccccgacggatgtggcatgatgatgtcttctggtgtcactggtgaacaccgcctgttcctgttctggtatttcgcctgtcagtattcccctctcggccaggttgtgtcccaaaatcc

SEQ ID NO: 501867 - DNA, 87 bp, Homo sapiens
ttttttgtccaaatgtggatcgtctatcccgtcttcttccattacgttcctgttgaggtcgaggaccggcgctggtccgattcggcc

SEQ ID NO: 501868 - DNA, 285 bp, Homo sapiens
cgagctcggtccgtatctctaacattacctatgtgtagggaaaagcacacacatgtttactgcccattataaaaaattcaggatccttaaattcagggctcctctcctatacgcaacccactacatgtacatgtgtcccctttctgcattgccataggaactgtggctcgggaaaccagtgcaaatgccaatacccttgttactattattgcagtgaataacgagctgtcctttgtctctagcccagtggtctcatgtctaatgttagagatacggtaccgagcg

SEQ ID NO: 501869 - DNA, 874 bp, Homo sapiens
ccacaagacttaaatcttgctcgcagtaaacatttattgctgcagttgttttacttttatgtatttggatcagccatctaataaatactttcttatgtgtttctccccaagagctacagtttataaatacttcaaatactgcagtcaatgcttagtgctgtattttaaaacaaaataaaatggtcataaggtaacaactggtgtgtaaagtaattaagaattactccttctcttgagaaacgtatagagaaactatagataatagagctgtgtagaaaaaacagaggcagaacttgaggtcaactgtcacgtaggaaaaaagaaccttacagatgtgttctttaaaacgctatcaacacctctatccctgtaccaaagaataaattagagtcaatgcaggagggaaatgaagacactgatttttaattttatatcaggaatctatttactcatttattgatctaacatatattttattgaaagctactaatgtgccaaacactgtggtaggagtagagatacaagggtacatgagacaagagactctgtctcacatgtctttgagttacacaggatattgaacaaatacttaaaagtatgttaatttgtctttcactcaattcataattagttagttttttgtcggttaaatagtgggtaatatagcaatccagatcatcacaggtctgctcttctctactatatgtctgtctcaggaggttgtggcaaacaactgtttactaggatgatcgggggagcagaattgagactttacctaataggggtggggaaagtttgggatagaggcgttggagtggaattggtcggggactcgaaaaggggtggaaggtaaaaagttgggaataagagttgt

SEQ ID NO: 501870 - DNA, 304 bp, Homo sapiens
ttttggtctgtgtgcatgcggttctgtggtcttcgtcttcgtggagccctggtctagcctgtgagcgcgagacgaaatgattgtcgtgactgtcctcgacccatggatccacttcttgcgttcagatcgctggcctccgacgtcaaacagcctgaagtggaggttcttgaatgtgacgtgggtttctacgatgccagtggttttgagcctggttcggaggatgtccttgctcggtgggctggtagtcggcggccccaatccgatccaggcttgtccaggtagtatttggcagagtcgttgagct

SEQ ID NO: 501871 - DNA, 518 bp, Homo sapiens
ccgggttgggttccatcggcccttgtggggttccccaggttgggtcccacaaaagtggcgcccgccccggtttcaaccttgaagaattcaaggtggccggcatttccaaaaggtggggcccggcccatggcctttttttgggttccaggaaggggaacaaattcccggagttccttcaggcccaagttcaacgggttaaagaggtccgctcccaaattattctttttcccaggaaagccccgggcccccaaaaaggggacagttttttttaaaaacttaaaatggcccccccacttgccgggccggttattcccctccgggaagtttttaaaaaagagaaaggccgggttttcccttgggaaaaaaaaaattttaaaacctttgcttgtttccgtatgggccgggccaacgcccgggtttttgggatacgggcaaaaaaaacccaggaaacccccgaaccgggttttttaaaaaaaaaataaagccctcctgggggcttggaatcagtcggccgtcca

SEQ ID NO: 501872 - DNA, 1465 bp, Homo sapiens
cgagttgtttgctccctccccggtgggtgtgcttttttttggtctcgcgcactcagttggggtagcaatatttgcgtgtgcttctcttgcgggttatagtgctttctctttctcggttctgcgttcggtacacccgtctcgttggttgggtcgccgccagtcttttgttgtttctcgccgggtgggtgtgcggccgctttcctcttgtggggtggggcagtgttgttgcctcgagcggccttcttgtgggagtgttttttgggtgtctcccctctccttcccggcggtgggtattggtttcagtggtggttgtgggggggagtgtccttttttcgttgtgttgggtccttcctgtatctcgcggagctcgtgttgtttgtgttgttgtgtaacgatatcttttgttggtggctcgccccgtcgcggtctctcgttctcatctttgtttgcgcgctgttcccgcttcgcgtttttgtgaaggtggtgttcttctatagatggtagatgtgtgttggttctctcccccgcccgcgggatgttgtgtggggtcttcccgccgctgggttggctctctttggtgtgtgtttggtgttcctcgccgcgcgggttgttctgtgtggtgagaccacacctctgtcttcgcgctgcgcgcgattgtttcgtggtgtgtgtttgcacgcgcccccgcgcggcgataagagaggctcggggctcttactcccctccccccccccggaagagatagagagagcgctcccgcgctctctcccgtcggtatatgctctctctctggagagagagacgcgcgtgaggggagcagctctctcccgcgcaacgagctcgtctcgtcgggcgtggtgggcgcgcacctctcgcgcaccctcgcgcgcgctctctcgcgcgcgcggatgcgattattagtgggtgcgctcagcgcggcggaggtggagatagagagagagacaccacctctctctcgtctctctgttgtgtgcgcgtccgcgcgcatacaacaccgtcgtgcgcgcgctgtggtgtgtttttgccccccactcgagtggcggccccgtctctctctgtcgtgtggggcgcctccgcggccactctctcctctcctcacagatattgtttgtgtgtgtcgcgcgagcgtctggttgtgctctctcccgcgcgcgctcctcgcgcacatgcacacactccgtcgggcgcggggggcgccgcgacgagcgcctcttgttgttctgtgtgtgtgttcctcccacacacaggcggtcttggtgggtctttttgtttcttgtggtcttctctctctgttcactccccctttgtcgccccccccccccctcctccgctcccccccccgctgtctcccccccacacaagattttcccccttgggggtgtgtgtgtgagacaccccccgacaacagaaaaacagggaccggtgagggggttttctctcacca

SEQ ID NO: 501873 - DNA, 527 bp, Homo sapiens
  misc_feature (42)..(42): n is a, c, g, or t
  misc_feature (89)..(89): n is a, c, g, or t
  misc_feature (104)..(104): n is a, c, g, or t
  misc_feature (108)..(109): n is a, c, g, or t
  misc_feature (113)..(114): n is a, c, g, or t
  misc_feature (116)..(116): n is a, c, g, or t
  misc_feature (121)..(122): n is a, c, g, or t
  misc_feature (132)..(133): n is a, c, g, or t
  misc_feature (135)..(135): n is a, c, g, or t
  misc_feature (138)..(138): n is a, c, g, or t
  misc_feature (140)..(140): n is a, c, g, or t
  misc_feature (146)..(146): n is a, c, g, or t
  misc_feature (151)..(151): n is a, c, g, or t
  misc_feature (155)..(155): n is a, c, g, or t
  misc_feature (165)..(165): n is a, c, g, or t
  misc_feature (171)..(171): n is a, c, g, or t
  misc_feature (181)..(181): n is a, c, g, or t
  misc_feature (183)..(183): n is a, c, g, or t
  misc_feature (186)..(188): n is a, c, g, or t
  misc_feature (191)..(191): n is a, c, g, or t
  misc_feature (193)..(193): n is a, c, g, or t
  misc_feature (198)..(198): n is a, c, g, or t
  misc_feature (200)..(203): n is a, c, g, or t
  misc_feature (207)..(207): n is a, c, g, or t
  misc_feature (216)..(216): n is a, c, g, or t
  misc_feature (225)..(225): n is a, c, g, or t
  misc_feature (227)..(227): n is a, c, g, or t
  misc_feature (230)..(233): n is a, c, g, or t
  misc_feature (238)..(239): n is a, c, g, or t
  misc_feature (241)..(241): n is a, c, g, or t
  misc_feature (243)..(244): n is a, c, g, or t
  misc_feature (246)..(246): n is a, c, g, or t
  misc_feature (268)..(268): n is a, c, g, or t
  misc_feature (276)..(276): n is a, c, g, or t
  misc_feature (285)..(287): n is a, c, g, or t
  misc_feature (307)..(307): n is a, c, g, or t
  misc_feature (313)..(313): n is a, c, g, or t
  misc_feature (328)..(328): n is a, c, g, or t
  misc_feature (331)..(331): n is a, c, g, or t
  misc_feature (366)..(366): n is a, c, g, or t
  misc_feature (374)..(374): n is a, c, g, or t
  misc_feature (409)..(409): n is a, c, g, or t
  misc_feature (419)..(419): n is a, c, g, or t
  misc_feature (432)..(432): n is a, c, g, or t
  misc_feature (440)..(441): n is a, c, g, or t
  misc_feature (451)..(451): n is a, c, g, or t
  misc_feature (501)..(501): n is a, c, g, or t
ggggaaaagggttttgtacatgggggtgaaacaatataaatncaaaacttacagataagggttagctctaacactcaactctttaaaangtttaaatgaaaatngggnnaaanncnacacnntattgccctnnanatntnaactanagggntttngaaggggaanaagggnatgaaaattntnttnnnttntnctctnannnntctnttattgatnaggtaagantnaannnnccagnntncnngntttcaaatgggaaagggaaagnggaggganagaagctannnaaacttacgtcttctgcccngggggnggggggtcacccccnccncctctgcctcctcgggggcctcctcgccctccaangcctcccnggcctctgcccccaaatcctcctcggcctcctctnccaccacctngtcctccaaagcngcctctgnntccaccacgncccccgaagccaccttcacaccttaggatttggcccacgtccaaggtaantttatattccataaatttcacggtct

SEQ ID NO: 501874 - DNA, 521 bp, Homo sapiens
  misc_feature (483)..(483): n is a, c, g, or t
  misc_feature (504)..(504): n is a, c, g, or t
  misc_feature (520)..(520): n is a, c, g, or t
cacagggctggaggcaacacagggctgaacccctgtcagcctgccgggggacgcggtgcccccctccggatccgggaaacacagcgtcccagccggcgcctgcaggtgccacacttcctggtcctctctggctgcgtctgagggccttagctctggcaggggcctgcaacgggctcagcttctaggggtggcgggtgaaggcctacacctgccccaggacggccaggtccaccagcacctgcaacagacggagaactgaaggagcatcttgaagctgtggcgggtgaaggcctacacctgccccaggacggccaggtccaccagcacctgcaacagacggagaactgaaggagcatcttgaagctgtggctgtcttgaaggtgtcgccgcttgtcctcacgagcaccattttgattctcgtgccctgtgtgcatgggttggcaagcgtttctgttaagggctccttgaacgctcaagattggnctttcagggaaagttcaaggntttccgaagcagaaana

SEQ ID NO: 501875 - DNA, 396 bp, Homo sapiens
tctctaatgatcagagagttggtatcaccagatgcatcgaacacaatcgcgaggatttggcgagcacaccgtatgaaaaaagctcagacggtcgcgtctttatagatgttgaggggtattactcatggggtagagatgggggaggcgtccgcgccgtgtctgcaagttagtatcgagatccacgtcccaataccagtgcgtccggttgcggtgagcgttgtcccagctcaaggccccaggcgccggtaatattatagaaggcagagttggccaaaggcttggaatttggagcacgccatttctcgcggggtacatttcgcattacggcttcttaaccttttccttaaacttccaaagaagggctttgtggcttttcaacagaactccgggaaggat

SEQ ID NO: 501876 - DNA, 840 bp, Homo sapiens
cgcgaacacaggagtattactaggtcgatgcttggttttatattcgtcacgatggaggaggatgaggcggtgtatggtcctggtacggcgagctgggggagcaagaggaggagaagaaaaagaagaagaaaaagaagaggaagaagaagaaggaggaggaggaggaggaggagggggccgagaagagcagctcacccttcgcagcctgcgatgtggtggaagactgactgcctgctgcttcgtgtgcttggcagcgagggtggctctcctgaccctgtggtgcagactcagttgggaagttgccgaaccctggcacccacgtggagctgccacaatctgcgcgcttcacacagacgcggtttgtgtgcgtgcgtcttcgtgtgtgctcccgtcggtggtatttgcgtcgctggatcactagatgcgtctgctttgttgcttcgctccagcctttgctgcgttcgactggagttgcgggggctgagttgccactgccatgtgctgcctgactgtgtgtgcccctctagtgctttcctggaggctgctgtgctgtgcaactgtggaggccctccctgtgatctggccctgtgctgcaacctaccactgcatgtgctgggggacctcctgtgcaagccctgatgtgctgtggttgggggttggcccagtcctggtgggaccactgtccgtgcccatgccctgccggtcgtggagcgaggatgctgggatgcctgtgtggatgccgttggactgcagctgcgccttgtcgggccaccctgaagcctgcttgcactacaatcttgatgctcaccgccttcattggagaacttcaccttctccggg

SEQ ID NO: 501877 - DNA, 295 bp, Homo sapiens
cttaccaaaagtctaggttttgagtaaaatcggaaatgctggcataacagtcatgttgatcttgctttttgttttatctagccgccaaaccttctaccctcgcctttaatctttaaagcctgagaggagtcaccccgtttagctctgccttatacttactgattatctagttgtctcaacgtgtcgattacatgctaggacaatgccgtagtgctttgcatgctctagtagtgtagtcgagaaagagtgcgacctatcgcccatgagcgctagtctctttcccgacattacccgt

SEQ ID NO: 501878 - DNA, 249 bp, Homo sapiens
ggccaacctcctactcctcattgtacccattctaatcgaatggcattcctaatgcttaccgaacgacaattctaggttatatacacttacggaaaggcccaaaggttgtaggcccctaagggtaatatcaacctttggttgaggcgataaaaattttaaacaagggcctgtaaaacggcgaaaataattgaatatatatatagagggacagattgagatttgaaatggattttatagtgtgcagcattg

SEQ ID NO: 501879 - DNA, 332 bp, Homo sapiens
  misc_feature (7)..(7): n is a, c, g, or t
  misc_feature (35)..(35): n is a, c, g, or t
  misc_feature (44)..(44): n is a, c, g, or t
  misc_feature (63)..(63): n is a, c, g, or t
  misc_feature (77)..(77): n is a, c, g, or t
  misc_feature (92)..(92): n is a, c, g, or t
  misc_feature (120)..(120): n is a, c, g, or t
  misc_feature (143)..(143): n is a, c, g, or t
  misc_feature (222)..(222): n is a, c, g, or t
aacccanctgacggtgaagctgccgctgagggagnaggcagccntgatgatgccgtcatcccntgaaaagggagcantgagccggaaggcancagccctgggagggaagggcgccccccnaacccctacctgcattgggctgnccaggcaggggcctgagctacttctgcttttgttactcagagtaacaatgaaccccatggatacagaatcagggctagncgtggtggctcatgcctgtggtcccagcactttgggaggccaaggcgggaggattgcttaaggctaggagttcgagagcagcctgggcaacatggcaagaccctgtctct

SEQ ID NO: 501880 - DNA, 120 bp, Homo sapiens
  misc_feature (46)..(46): n is a, c, g, or t
tgtactaagagttctttggtggttagagagatggcctggagctcanggcaggagatgacgctgaagagttacatctactcaggattaccacctttggttcctaatttcagcattcaactc

SEQ ID NO: 501881 - DNA, 131 bp, Homo sapiens
taaagggccccctggcctgttttggggcaaggtaggttcttgggccctttgggcccccccccctcttatttggggtttaggccaacttgtttttccgtacgtggtgtgaaataaaaccccagccctgggga

SEQ ID NO: 501882 - DNA, 294 bp, Homo sapiens
agagggcgttgtgttcttgttgctcaggctggagtgcaatggcaagatcttggctcactgcaacctctgccacctgggttcaagcgattctcctgcctcagcctcccgagtagctgagattacaggtgcccgccaacacgtctggctaattttttgtatttttagtagaaatggggtttcaccatgttagccaggctgtgtttacactcctgacctactctcaaaccgactcaccttgtacatcaaacctagagggggttctccctacattctatttgcgctctcatgaactga

SEQ ID NO: 501883 - DNA, 564 bp, Homo sapiens
cgcaatctatgtcggcgagtatattcgtccgcgctgtgaatatcagtccgggcttccgtccaaccatagtgcagtttatttaaaggtgcagtgacctgaaagcttggagctctttctgactcgtgcctggtaagcatgtgaaaattgttactagtcactttgcccacagttggtcagtgtgtttgttgaaatgaatgaagtctgacatatgaaacaattgcacttcgttggtatggtacctatagaaggatgaaaaacatatgctcataccgtatacatacacataaaatgatgtgtgatcatcgagtatgatggttcgtactcggccccgtgccaacccgcatattcatcaatagataacttggataatacttaactacagtttacgaagaacaacaacaaacaaggccaggtgcaatggctcatgcctgtaatctcagcactttgagagactgaagtgcagcaccacatgaagcccaggaggtttgagaccaacctgatgccacataggaccgctcctcctcttttaataaaggggtttaattaccccagacaaacaataac

SEQ ID NO: 501884 - DNA, 330 bp, Homo sapiens
  misc_feature (12)..(12): n is a, c, g, or t
  misc_feature (61)..(61): n is a, c, g, or t
  misc_feature (138)..(138): n is a, c, g, or t
  misc_feature (167)..(167): n is a, c, g, or t
  misc_feature (170)..(170): n is a, c, g, or t
  misc_feature (178)..(178): n is a, c, g, or t
  misc_feature (181)..(182): n is a, c, g, or t
  misc_feature (189)..(189): n is a, c, g, or t
  misc_feature (197)..(197): n is a, c, g, or t
  misc_feature (205)..(207): n is a, c, g, or t
  misc_feature (210)..(210): n is a, c, g, or t
  misc_feature (213)..(216): n is a, c, g, or t
  misc_feature (218)..(218): n is a, c, g, or t
  misc_feature (220)..(223): n is a, c, g, or t
  misc_feature (227)..(228): n is a, c, g, or t
  misc_feature (233)..(235): n is a, c, g, or t
  misc_feature (238)..(239): n is a, c, g, or t
  misc_feature (250)..(250): n is a, c, g, or t
  misc_feature (269)..(269): n is a, c, g, or t
  misc_feature (290)..(290): n is a, c, g, or t
ggttgaattgtncgaaaagtcctcaacgtcctgacgggactcccctgaagccaaggcagtntgagtccattcattattctgtcttggatcttaggcaaagccccgggccccttggagcagcaccagggttcccgacanccccaccgaacagggtcaaacgtgccccnggnggggaccncgnnggcgaanccttgcgncctccgtnnnagntcnnnncntnnnncggnncgccnnnacnnttcttgggaangggctaataagacttaaanagagagcgagaagtatatagntagaagtaagactatgaaatagatatagatgagagagata

SEQ ID NO: 501885 - DNA, 273 bp, Homo sapiens
actcctacattacacgataaagaattgataaaaaataacactgtgtggtgattatcagggaacagagacacttcagggcaacactcagaaacatttggaggtatacatgtactgaaacatcacaatatgtataattattatgtacattatgtcttttttttttttaaatagagataaggtctcacttggtcacccaggcgggagtgcagcagcaaaatcatagcttggtaaacttggtaccctcaaattccggggctcaatcgatcctccgtg

SEQ ID NO: 501886 - DNA, 143 bp, Homo sapiens
atgatacgtgcttgaagtccttgcaagagttgagtactacatttgattacacgttcagctgcgtactgtggtgagttttgatgtaatattggtttctcgccaggcgcggtggcttacgcctgtaatctgagcactttgggagg

SEQ ID NO: 501887 - DNA, 195 bp, Homo sapiens
  misc_feature (54)..(54): n is a, c, g, or t
  misc_feature (126)..(126): n is a, c, g, or t
  misc_feature (154)..(154): n is a, c, g, or t
  misc_feature (160)..(160): n is a, c, g, or t
caataatgaaattccacagtatgaaaatggaagaaatcaataaaattatacgtnacctgtggcgaagtacctatcgtggacaagatattgattacatagaaatacggtctgatgccgatgaaaatntatcaccttctgataaaaggcggaattntaactnccgagtggtgatgctgaagggagacacagccttgg

SEQ ID NO: 501888 - DNA, 161 bp, Homo sapiens
agacagcagcaccagcgttgcagagaccccagacattatgctcttttgggaggtggagcaccgattattttcagatcattgacattttccttcaggagttcattgcagttatgagagtatttccaggtaccttccttacagttcaggcggtattcgcaaac

SEQ ID NO: 501889 - DNA, 335 bp, Homo sapiens
ctgccataagcacacttcccatgaaccgacgctataagcaggcgccagaagagcagtaggacactacagctccttccatctggggcagaaaggagggtgcctgggaagtacgagggctgcagtggggaggcagaggtcccagcaacacttgtacatggcaggcagcggcagtgaggggcgaggtcgtgagcgagtccatgagtccagtgaggcggcgcgcactcacttgagtgcggtaagagacccttgcgctgtatgcgatgctggatctcgccgcgccgaagcatgagctgtagaaccttgtgaatgtggtgctccgggtctttctgcttggt

SEQ ID NO: 501890 - DNA, 181 bp, Homo sapiens
aatctaggggatttagcggggtgatgcctgttgggggccatagccatgcggcgggaaaggccagagtcctaagtatttgtgaccatctttctggcccagtaacgggagtcacatggttagctaagaatgagaggatttacagcatgctgggacgtatgttttcccacaacaggtgtagggc

SEQ ID NO: 501891 - DNA, 677 bp, Homo sapiens
tgacttcttgagattccacatataagtgagatcatagagtgtaggtatcccttatccaaactgcttgggactagaagtgtctccgattttaggatggtttaggattttggaatattggcatatacctaatagagatgtctataggaatgggacccaagtcataaactatagagtttatctatgttagcgatttatatcttaatgcacataacctgaaggtaatttgatacaagatttgaaataactttgtgcatgaatacgaaagtttgtgtgcgagctgaacaatcaagaataaaagtgtcagagtgtggagatttactaactgtgtggcgatcatgtgggctgctcacgaaagttttgggattttgaaacgatttcaaattcgtggattgtcagattagagatgttcaagcctatattgggtctttctgtacctggcttatttgacttaagatcatgtgctccacttgccatataatgttcatccactttcttacaatgtgatcacgtatgcacagaattttcgttctctttggaaagctaatataatactccattgtgtgtatgtgtgctgactttatgtgtttgatccattcatctattaacgggccacttaggtggtttcctaaggcgtgagtattgtgataatggcttagtgaatgtggcagtacaaattg

SEQ ID NO: 501892 - DNA, 190 bp, Homo sapiens
tataggcttctacttgttaatttctgttttcctgagtttctctaagtgagttctttatgtctttcttgaagtcctccagcatcatgatcaaatatgattttgaaactagatcttgcttttctggtgtgtttggatattcagtttttgctttggtgggagaattgggctccgatggtgccatgtagtcttg

SEQ ID NO: 501893 - DNA, 299 bp, Homo sapiens
  misc_feature (4)..(4): n is a, c, g, or t
  misc_feature (120)..(121): n is a, c, g, or t
  misc_feature (180)..(180): n is a, c, g, or t
  misc_feature (182)..(182): n is a, c, g, or t
  misc_feature (229)..(229): n is a, c, g, or t
  misc_feature (246)..(246): n is a, c, g, or t
  misc_feature (257)..(257): n is a, c, g, or t
aagngaagtctttgccttctctgctcccttgcaggggtcctccctcaagagtacagaatccttaccaagtgtgcactccagcttcggagggcccctgacgtgggggccaatcaggctgcnnaggcacctcaacattgcatggtgatagtgggccctctctctgggcccaggggctgtggncncctcctccctcagctctctgggacctccttagccctgtctgctaggngctggggagactgatancttggggaggnaagagactgggagccaccttctccccagaaagtgtttaacgg

SEQ ID NO: 501894 - DNA, 207 bp, Homo sapiens
tgtaaatctgctccccatcacaagacctgcttgttctaacatacgatgtctgtgctcgctccctcaacggggattctctaggagctccaacggtacgcgatgcctaccagtacccggacgacgtggactaatcttcgatcctacatacttcccccattattcctagaaccaggcgacctgcgactccttgacgttggcttatccgag

SEQ ID NO: 501895 - DNA, 401 bp, Homo sapiens
tcccgcgttcatagcagcattactcaaaagtcaaacggtagcaacaacccaaatgtccatccacagatgaattaagacatgaagtgtgttctgtccatacaatggaatattatttggccataaaaaggaaggaaattctgacgcatgccacagcctgagtgaatcctacaaatattacgctaagtgaaagaagccaatcacgagtttatgtgaaatgtccagaataggcaaatctgtgtatcagagacaaagcacattggtggttgccaggtctgaggaagaggaagaggccccacctaacaggacccgctttctttggcgatgatgaaatctggactgatggcgcacaactttgtgaatatactagaaaccaatgaattaaaaactttggaagatgaaaa

SEQ ID NO: 501896 - DNA, 218 bp, Homo sapiens
gagaggaacaattgacttggtgcatgttaagttgtagactggggttgacgatcagggtagtgcatgacagtggcagtgaatcgggggtccagggtccgagatcatggcaccttcttctggattggctgacaggaatgtcctttaagcactgacaggttcaaggaccagggttctctaagttccctggctcccccttgttattggtggcagggttcttg

SEQ ID NO: 501897 - DNA, 288 bp, Homo sapiens
gtttagagagtaagggagtggaatagaatcaatccgaatgtaatggaatggaattgaacggtatggaatagaatggaatggaatggaatgcaatggaatggaatcaacccgagtacaggggaatggaatggaatggaatgcaatgggatggaatcatccgtaatggaatggaaaggaatggaatggaatggaaaggaatggaatggaatcaactcgactgcaatcgaaaggaatggaatggaattaacccgaatagaatggaatggaatggaatggaatggaatggaa

SEQ ID NO: 501898 - DNA, 329 bp, Homo sapiens
gctgcacatagagccaacctcagttgagatgccttgggaccagtacatagaaggtgtttaagattctacagttccatttcatcctttacaaaatgtccaccctgaatctacagcttgcttattgaatctttgtgaaatttgaaggggagagggaaacagtaatatgacccaacataagagaagtaccagcgagcctctgtggacacaggtgtgttcataaccaccatcgctctaatccttaggttcattctttctcatttcagtcaaaaaactgattctaaaattaaggcagactgacacccactgcgtcctaaactgtagatgcatta

SEQ ID NO: 501899 - DNA, 363 bp, Homo sapiens
  misc_feature (70)..(70): n is a, c, g, or t
  misc_feature (315)..(315): n is a, c, g, or t
ggcaaggacaggaaaatcaaacacagccaaggtctcactctgtcacccaggctggagtgcagtggcaggntcatggctcactgcagcctcagacttctgggctcaagctattctcccacctcagcctcccaagtagctaggaccacaggtgcacgccaccacacctggctaatttttaaattatttatagggacgagatctccctgtgttgctcaggcgagtctcaaactcctggagctcaagcagtcctcccaccttggcctccgtaagtgagattacaggtgtgagccaccacaactgggattgcacttcctnttagaataaccttttgcgtgtcatgttgggactcaaaacattttcaga

SEQ ID NO: 501900 - DNA, 189 bp, Homo sapiens
cgagctggtaccgccgtgatctgagtgcatgccgcggactgaggatctgaagccccagcgaggcttccgaggctcccacagcaccctcagtcattcccccagccgtgagcgagtgcagccatgtgatggcccctgacgtcccagcaaccccagtggcccctacagagtcacagccaaggtagagccgag

SEQ ID NO: 501901 - DNA, 733 bp, Homo sapiens
cctgaccggtaagtgaatttttaaaatattttagatcatatattatatgtatctacctacattattgtgtagacatgtattccatgattaaaaaaggaaaaagtaattaattctagtctgtaatacactatggcttctgttttccttttaacaatgaaggaatacttgtaaaaagtagaggctacttaggtttgacatcatctttctctctctctctcttttttttttttattttttttgttggagagggggtctcactctgtcccccgggcgtggagtgcaggggggtgatctcagcacatggcaaccttcgccctcccagtttcagagcaatttctcatgcctcagccctcccaagttcccggggacggcaaccttctacctcctgaggttcaagcaattctccgttgcctcagctctccaagatagcggggactgcgggcgtgagccaccacaccgggctaatttgggtattttagtagaggcggggttgccccatgtgggccaggcctggtatcaaacttctaacctcaagtgagtcacctgcctgggcctcccaaagtgctaggataacgggcttgagacaccacacccagctgggtttctctctatgaatatgtagagatttgccttgggttatgaactgtaataattagtaatctgaaatttaaagttggagtgacaaggggctttaattggtctagacaaaatttgttaatagggtccgattctc

SEQ ID NO: 501902 - DNA, 714 bp, Homo sapiens
  misc_feature (224)..(224): n is a, c, g, or t
  misc_feature (311)..(311): n is a, c, g, or t
  misc_feature (586)..(586): n is a, c, g, or t
agcgggagggcgtgcctaacagttgtcggctgttccgcaccttctccacaggtccgggttgtcacgtttgggtctaggctcatgggcatggtgtgcaaccagtagaccctaggagtgagatgtgcccagggagtccggggatgcgcgtgcagcaaagagagcacgctatctctgcctgactgtggtcacgtcatgtgatgtgcaatgcgacaacaggttgatgnttaggttgtctccaagtagacgcctctagccatcgttccatgctcggtagcaagatgtagccacgcattttagcagtcacacttagnatagatcttagaagggaccgtggcccagtttatgcatcgaagcatcctcctatagctctaagcatgtcggataccattcaagcagcctggacccttctccatgagatcgcatcatagtgatacccaggggtctcatcacgaagtgtagtaaggccgagatgacttggaggataagttcccgtgttgatccagtccacgatactacaagtctcccgtggaagcctggcatagcgccgatccgattccgtgttcaagcgtcgggcttatggagaggngccgaaagccctgaaagtagcacacgccaaggagccacacgtgtaccatgcttgccgggccgtgtccccaagtacatgaggggaagggggaccggaacaatggtgctgcacggaaggtgaagtccgag

SEQ ID NO: 501903 - DNA, 203 bp, Homo sapiens
ccaggtcaccgccgcccctttcgaccgcaaactggtcaggcaggcccgtgacgatgctgcggcattcgttgccagcgatggcctgatccgcggtgcacgcctggaagccgcactcgactcgctgcgccacaactgcgctcggcactccgtcggcgaccttgaactggcagaagcaattctcgtccaataactacccctgactc

SEQ ID NO: 501904 - DNA, 136 bp, Homo sapiens
gaagctgcgcgtggccttcgaactgaaagaagacgacatgcacgccatcctcaaggccgccgagttcccggtatccaagcctgagctgagcgcgctgttccgcaagttcggccacaccaactaccgcacctgcggc

SEQ ID NO: 501905 - DNA, 434 bp, Homo sapiens
  misc_feature (102)..(103): n is a, c, g, or t
  misc_feature (105)..(105): n is a, c, g, or t
  misc_feature (112)..(112): n is a, c, g, or t
cgctcccccgaagctttttctccggccccagccaggagccacggaggcgcgggttaatccacggggttacgtctcgcctggggggaaaaacctaattttttnncncccgccnccgcgaaccgcgccaacaccaaaggccggcccaaaggcgggcaccacacgaccgcgcccagccccacgcgcaaggcggccacccccgcggcccatcccaacaagccgcgcgccgcgcgcgcgaacgcgacgcaggcccacgcccccgggcacacacggacgcaacggagccacccgagcccgaaccaagccccggcccggctgcccaccccacaggccggccaaaggacgcccaaaacgccccggggatttcccccggctgtaggccttttggccggtctgcccattggccatttctacctggtattcgcttggccccctcc

SEQ ID NO: 501906 - DNA, 253 bp, Homo sapiens
  misc_feature (15)..(15): n is a, c, g, or t
  misc_feature (82)..(82): n is a, c, g, or t
gcccggctaattttnctattttttgtagagatggggtttcatcaagttggccaggctggtctcgaactcctaaccacaagtnatcctcctgcatcagcctcccaaagtgcgaggattacaggcacgagcccccatacccagcctatccttctttaattactgcctgtgtataagcttgaatgttaattacatatttgacagtcacaataagccatgagtttcgagcatatataattgggctatgggagccact

SEQ ID NO: 501907 - DNA, 252 bp, Homo sapiens
ttgagatatagaacatcttttcatctgcctattgaccatgtatgtcttctttcgaaaaagcctatatacatccttcttccttttttaaaatcacgttatatgttttgtgtgctattaagttttattagctctttatatagttagaatatcaatcctttatcagacatgtagttggcaaatactttattccattttgtaggttaccttttcactctgttgattgtttccttagctgcacagatgctttttagt

SEQ ID NO: 501908 - DNA, 1017 bp, Homo sapiens
caaaaattaaaaacttttttctaaaaaaaaagtgaaaataaaaaaaattatatgcgcttcatgggactgagtcaccaccttcccttacatacttcagttcagattgtagccatacttaaaaaaaaaaaaaaagccaaaagatgatgacaacatttttatcagtattggtgaataaacttgaacacaaatacacgaagttccatgtcatgtcttcagttggtagaagtttttcctctttaaggtaaagcgaccaacttgaactttctcgtggcaacacgattcgcagttatataagggaatcagggttccacgtctctgtatatatttatttatggtgtaactttacatggggaatggtacatatggtggagtctggtttaaagcctttttttttcattaatctggatctggttaacctctggtgaagggggtttggaatcttccctattagttctccaggtgggtccagggtacggatttaagaaatccagtgttggggggattttttctcggggattcatgaatttagccctgttgtacgcttgttaaagggtgacaaacagctggacaaatttttaacaaagtaacaataaaattttatctataatcagtattagtacatttagctttccatggaaccgaaagaaaaaaggtgatatgggaccccgggaaagatttggaaacttgagtgggttggaatacccttctatgtattggagggaagacaacacacaacagctcaatgatatgccagttgtcctccctttaaaaagcttcattggagccactaattgaatatgggtcttaaacccagggtataggaaatttccctatatgtgtaataatataaccagctcacaatgtgtgtccaaaagaaatttcacacattgcgggacccggggagaattcgggattacaggggcatttggaagaccatatacgtggcatgaataaaattagtctggaaaagtacaagcgcgacaaggtattaaatcctttgtgtgcccataaataact

SEQ ID NO: 501909 - DNA, 370 bp, Homo sapiens
  misc_feature (283)..(283): n is a, c, g, or t
  misc_feature (298)..(298): n is a, c, g, or t
  misc_feature (322)..(322): n is a, c, g, or t
cagacaggtcaccggcgagatcagccagtctattacagcactctacacgaccgtcagagtggcattctatagcacaagtccttacgggagtactgtggagggtgaatcaaagcttccagtgtaagtttattgtctggcgaaaacaccagagccaaaaattccaccaaggccctggaaagactgaagtcccctctgtctcatacagtaatcatccatgagatctcccggagcctgggtgatcattacgcccatgatacctgaggcagcgtggactctgccaggngctcctctgacccanagtggagctcactttggagagtcngagctcatgggcgttagcacctaaggatgttgcttgaaaggcacagag

SEQ ID NO: 501910 - DNA, 975 bp, Homo sapiens
  misc_feature (36)..(36): n is a, c, g, or t
  misc_feature (244)..(244): n is a, c, g, or t
  misc_feature (287)..(287): n is a, c, g, or t
  misc_feature (289)..(290): n is a, c, g, or t
  misc_feature (292)..(292): n is a, c, g, or t
  misc_feature (297)..(298): n is a, c, g, or t
  misc_feature (432)..(432): n is a, c, g, or t
  misc_feature (466)..(466): n is a, c, g, or t
  misc_feature (472)..(472): n is a, c, g, or t
  misc_feature (482)..(482): n is a, c, g, or t
  misc_feature (484)..(484): n is a, c, g, or t
  misc_feature (535)..(535): n is a, c, g, or t
  misc_feature (552)..(552): n is a, c, g, or t
  misc_feature (581)..(581): n is a, c, g, or t
  misc_feature (585)..(588): n is a, c, g, or t
  misc_feature (599)..(601): n is a, c, g, or t
  misc_feature (604)..(604): n is a, c, g, or t
  misc_feature (607)..(607): n is a, c, g, or t
  misc_feature (609)..(609): n is a, c, g, or t
  misc_feature (613)..(614): n is a, c, g, or t
  misc_feature (617)..(617): n is a, c, g, or t
  misc_feature (640)..(640): n is a, c, g, or t
  misc_feature (735)..(735): n is a, c, g, or t
  misc_feature (761)..(761): n is a, c, g, or t
  misc_feature (783)..(783): n is a, c, g, or t
  misc_feature (794)..(794): n is a, c, g, or t
  misc_feature (804)..(805): n is a, c, g, or t
  misc_feature (811)..(813): n is a, c, g, or t
  misc_feature (825)..(825): n is a, c, g, or t
  misc_feature (834)..(834): n is a, c, g, or t
  misc_feature (872)..(872): n is a, c, g, or t
  misc_feature (905)..(905): n is a, c, g, or t
gtgacaccagttgctccagaaagtttaaggggtctnttctcatctccatggacatcttcaacagcttcacctgacaacgactgttcctatgaagaagccacttgtgttttaagcagaggcaacctctctcttctcctctgtttcgtgaaggcaggggacacagatgggagagattgagccaagtcagccttctgttggttaatatggtataaagcatggctttgtgcacagcccagtgtgggantacagctttgggatgaccgcttacaaagtcccgccccgctagnanncncatannttttctatatagccataaatgcgtatatatacccatagggctagatctgtatcttagtgtagcgatgtatacatatacacatccacctacatgttgaagggcctaaccagccttgggagtattgactggtcccntacctcttatggctaagtctttgactgtgttcanttaccnagttgacccngnttgtcttttaggttaagtaagactcgagagtaaaggcaaggaggggggccngcctctgaatgcggccncggatgccttgctgctgcaaccccgcccncgcnnnnccaccgaaacnnnaanccncntttnnaancccaagccccccattacctgggnctgacaacatagaatggggttgagagaagatccgtttgggcttcacagtgtcatttgaaaaccttttttgttttgttttgtaattattgtggaanactttcaagtgaacagaaggatggtntcctactgtggatgagggatgnacaaggggatngctttgatcnnatggannntgggaggtgtgnccagaaagnttgtctgtagcgggttttgtgagagtgaacactttccnctttttgacaccttatcctgatgtatggttccnggatttggattttgattttcccaatgtagccttgaaatttccaataaactttgctctgtttttctaaaaa

SEQ ID NO: 501911 - DNA, 264 bp, Homo sapiens
gaactgtaagtccaataaacctctttcttttgtaaattgcccagtctcaagtatgtctttatcagcggcatgaaaacggactaatacattcttcttcaccttcttcaatgattataagtttcctgaggcctccccagctttgtggaactgtgagtcagttaaacctcttttctttatgaatggcgcagtctaatacaccctctctatgcatattccgggatgcagttcccccgggcaatcctcatcctgggagggtacgagctc

SEQ ID NO: 501912 - DNA, 103 bp, Homo sapiens
  misc_feature (57)..(57): n is a, c, g, or t
aggatccccgacaccaaaccctgtaggtggcctgcagtaatgttagcggttaggcgnttggtcagggctattggctgaatgagtaggctgagggtttcgatga

SEQ ID NO: 501913 - DNA, 366 bp, Homo sapiens
  misc_feature (98)..(98): n is a, c, g, or t
  misc_feature (364)..(364): n is a, c, g, or t
agaaagcctgttgctattctgatgcaccgcctcccccggcccccccctcctccccacacacacacacttaaatttttaatccttggccaggcacagtngctcacacctgtaatcccagcattttgggaggccgaggtgggcagatcacctgaggtcaggagttcaagaccagcttggccaacatggtgaaaacccgtctttactaaaaatacagaattagctgggggtggtggcacatgcctgtaatcccagctactcgggatgctgaggcaggagaatcacttgaacctggggaggcggagtttgcagtgagccgagatcgcaccactgtactccagcctggggtgacaagcgaaactccatntc

SEQ ID NO: 501914 - DNA, 669 bp, Homo sapiens
gtctctaattaccaccgctacaggacaatataaggcttcaagattgctcagcactatgtgaagaggaagaagatgaagatatatggaagaatatgaagagagtggattgttggaaacagatgaggctaccctagatacaaggaaaatagtagaagcttgtaaggcggtgaagatgctattttgcaaaccagaacttatgacctttacatcacttatgataaatattaccagactccacgattatgggcaacggcagcctttaacagttgagcacatgtatgaaaacatcagtcaggatcatgtgaagaaaacagtgaccattgaaaatcaccctatgtgttcagttcacccatgcaggcatgctgaggtgatgaagaaaatcattgagactgttgcagaaggagggggagaacttggagttcatatgatttgtacaagctgtcattccaacaatagaatatgactacacaagacacttcacaatgtaatgaagagagccataaatctatcctaattatttggctctgattttggacattgaccatattcatcaatatatacagtttctctaataggggcctatatgttatgccttaaacaaaatatggtccactaccagccttacttgttaataaaaacagagcgcttttgtccctttaaaggggtaat

SEQ ID NO: 501915 - DNA, 171 bp, Homo sapiens
tgcaggaccctgtggcagcaggtagggaattcaggtgaggacagcatgttgtccagcttggttctatctcatctgcctgtccttcccagggtgtcaccatgaccagagatctgtgtggccccacgtcaccacctgtggcctttgagatgagtcttagaaggtccaggtatg

SEQ ID NO: 501916 - DNA, 645 bp, Homo sapiens
  misc_feature (104)..(104): n is a, c, g, or t
  misc_feature (455)..(455): n is a, c, g, or t
  misc_feature (562)..(562): n is a, c, g, or t
tggccgggtggttgccccccgctggtcccccgggtgtgggggctcccctggccccgcccatgggtgagcgctgccgcagagctccgccccccctctcgtgccgnggctcttgggtctcgggggcggccggcccctcgggttccctgtcttattattaggtgttcccccgatggtgggccgccccaatctctggtcccacgcccttgttccccgcgttgcgttttctggcgtcctgggggcatatccgtttgtcttcctctctcttgccgcccgctggggttgttctctcttgtgtggcggctcgcggtgtgtccccttccggttcccccggtttgggggtattaaaagatgtccccctgtgtcccctaggttcctgggggtcaagggttccccccccaaggcaggggcagacccggcttgtgaggggggaggtttgtggaccaaggggcgggatnggcgccccggggcaaagggggcggccccccctctcactccctctttttttttgtgcctttttggcgcggggggggcttggcccgggggacccgggcccgttttttcnctcgggcgggggggggggttttttttttaaaaaaaaacgcccctgttttaaaaagaactcgagactagtctactctctctctc

SEQ ID NO: 501917 - DNA, 192 bp, Homo sapiens
  misc_feature (12)..(12): n is a, c, g, or t
  misc_feature (29)..(29): n is a, c, g, or t
  misc_feature (47)..(47): n is a, c, g, or t
attcgcgggcgngtcgaccagccgcagcngtaccaagcttcgctcgnacctcatcgctactgacaacagaagccaatccgctcaatccctcgatagggtgggctagaaactgagagagcccctccacatcctgcaagccaccttgggtgatacccaagccgatgtcgacgcggccgggaatttagtaggagt

SEQ ID NO: 501918 - DNA, 531 bp, Homo sapiens
  misc_feature (1)..(1): n is a, c, g, or t
ngatgtggggaaagggtgaatttttaaaagttgaggtttttaaacgaaataacctaaccttttaagaacgtgttaaaattcttattaaccccagtttttgggttaaattaaaacccattaattccccctccgtttggcaatgcttgagatttcataaagatgatcgaatcagttaagccaaagtaaaattctccctttttgtccttaaatgccagtgtagttgcaatccccatacactcaacttcacttaatcattagcttgagatgtctgctattacaatcaaaatcctaccaatcatccgagccccaactcgtatgctacattcttttgaaatgattccctctgtcaaaaacctttatgttgtatttctgtggggctttatagttctgttacagacatcatgttatgatttataagttattaatgtacatgaagaatcagaatcaaattttagggacttaaatatatgtaattcaataccttatccaatgtccaagcccttgacaagaagttatttatctaataataaa

SEQ ID NO: 501919 - DNA, 631 bp, Homo sapiens
  misc_feature (25)..(25): n is a, c, g, or t
  misc_feature (91)..(91): n is a, c, g, or t
  misc_feature (196)..(196): n is a, c, g, or t
  misc_feature (278)..(278): n is a, c, g, or t
  misc_feature (289)..(289): n is a, c, g, or t
  misc_feature (359)..(359): n is a, c, g, or t
  misc_feature (362)..(362): n is a, c, g, or t
  misc_feature (384)..(384): n is a, c, g, or t
  misc_feature (416)..(417): n is a, c, g, or t
  misc_feature (423)..(423): n is a, c, g, or t
  misc_feature (425)..(425): n is a, c, g, or t
  misc_feature (452)..(452): n is a, c, g, or t
  misc_feature (487)..(487): n is a, c, g, or t
  misc_feature (492)..(492): n is a, c, g, or t
  misc_feature (533)..(533): n is a, c, g, or t
  misc_feature (535)..(535): n is a, c, g, or t
  misc_feature (556)..(556): n is a, c, g, or t
  misc_feature (608)..(608): n is a, c, g, or t
aataacttaggggaatggaggagtngcggtggggagagcctaacggtagagtctcatttcgccctcacactgtcttgcacaatccccaggnctacctggaggttccacaggaagagcctgaggaggaggaggaggagatggacgtccggaagaaagggcctaaggtgtatcaccacgcactacttgccctatgttnatgccgctcccctgtggtgcgcgctgctgccctggccatgcccccttcttccctcacccctgtcttgtcagccctacttgcnggacgtgcccnggattcagcactgttctgcctccagggaaagggaggtgtaagtgaggctgggtgctgccagggttctgcnctnggctggaagtcgcagaagagcngtccaggggctggtggtcggtggagaaaactnntgggtnanactccagaggccacccctgggcctctnaggggggtctttttctttcccccatctcaggagancggtncccccacccccaccccccagtgccacagggactgtgggttncngaggttcccccggcttcaggnagggctggggtggtgggcagcggggcccaggcctgggagttaataaggaggncaggagggccctgtcccctctgg

SEQ ID NO: 501920 - DNA, 1560 bp, Homo sapiens
tttgctcccggagtgtgttctcttctctgttctcgcgtggggtggttacttctctcactttctttgtgagggctcgcccgcccgttgtgtggttcgttagtacctttggtctgttagtccttcacatgcctttcctgcggctgtgttcgcatccgtcgtggtgctcgcttccggggtacggttatagggccctcgtcttctcccctcgccctgttctcctcacttcggtggcttttcacttgtcactcgcttgggtctctctgtcttcgttttttgtttcagtcgtgaatatctgccgtcgtgccgaagtgcgtatacctgggggaatttttgaaaggggttctccttcttcccgagtgggggggaaccccctgttgttcgcatggcccactaagagggcaccacattggctgccctccttctgaagggcccttgtgcgtttaacaaacgtcgttgaagcgcgtgcttttttatagagcaactaaagtttctctccgaagagccgctttgatgcccttgtttccgggctgtcgttctctctacagggcggaacaccttctcagcgggggacctcactccagagagtgcgatggcccacgagcatctttgtgggagaaaccttctcctatggggttattttttttggaaacgaaaggcctccttcgtttgggtttcccccgtccgtgtgccgctctcgctcagtggacaacactgtgggggacgtttgtgggctctattctagttttgtctcgcctccccctttggggggtttttgcccgccctttgggtgcttatttctttaggtcgcgctttggggataattcgcgaataaagaatatgattgcgcacacgttgaccttggttaaggtagaactccctctcctctagagcgctatttgtctctcacacacactggctcactaaagaaattttctctctagcgcacacgctgtttttggaggtcctcacagcgcacaatgtgtgcgctcccccagatttgtctctcaccgatgtgtgtctcactccttgctggggactcgctgggcgcatcatacactcactctccaatagcacactgtctttgtgcgttctcaggcgcacacacattctttctgcgcccagagctcattggcctctaagaccccgcgtggagatgtggggggtctggtggcgccacacatctcctcggaggcgagactgaggcaccctatgccacacagagccacacacacagggctcctggcgccacacacaccacagctggcctccccacgcacaaacccacccgtggggttctagccctttatagcccaggctgccagggcgcacactcaacatccatagtttggtgatttgtctgtgtttgtttttctaagaaaatagatatccaaatatgctgcattggatatttgaaatattacctgtaactggtccagtgtacaaccagatttggacccccattccttgtgttacacccaaatttggtaaaaatgctgcgtctcagcctcccaccaatttaaccgcaatgggatttctccaaacaaaaaagaaaaaataaac

SEQ ID NO: 501921 - DNA, 615 bp, Homo sapiens
  misc_feature (615)..(615): n is a, c, g, or t
acagagtgtacaccacgcgcggcggggggcgcggcagaagtagcgccccccacagtgcgccgctgctgcgcgcaaccccaagccgacgccagcggacgaccaaactagctggtcggcagacagacacagacagcaggaggcaggccccaggcgtaaaacagcaggagcaagcgagagaaacaaacagcccccagcaacaccgggggaggtaccacccaagcacagacgaaggagcgccacccacaagggaagcgtacacacacgcggcgggagcgctaccacgcgcagagcaaccgcagccgcgccgccgaacaaggcgcccccacacaaccccccaccagcggcggcgaccacaagcaggaggccggaccccggcacacggcaggcctcagccacacccagtacgagcaggagagaaacaggaagagacggcaccgccgccaccgccacgcggtcgagacacccgggggagacacgaaaaaagccacgcggggaccaaccgggccgtggacaggcacgcggcgcccacccaccggcagacggagtaagcgcccaacgcgacgcacaccaaccgcccaggaggcgcacaacgggacacagagaacggcaagacan

SEQ ID NO: 501922 - DNA, 119 bp, Homo sapiens
ctattggcaagctactcttgacagacacttactggtggcaacatgttgtctgacttactgtttcaacaaaccagcaagacaagtaactgtatgcagttaataaacgccaaagggaaaca

SEQ ID NO: 501923 - DNA, 275 bp, Homo sapiens
acgtaaaccaatgaagacaaaagcattgcgtaagttgcgtcaccttgcttataagtgatataccaaaggacaagtgacgtgatacctgttacgatccaagcgtagtaactttcacgctttttgaagaatgtaagcagccaccaactgttgctgttgcgaacacaagtgcgtctactactggacgtggaccatctgtaaggcgtccaatcaggatcgctgacacggccataaaccagaccaaccgcttacgtacacccacctttaggcaagccacc

SEQ ID NO: 501924 - DNA, 178 bp, Homo sapiens
tcccgtttttccaaaaaaatgcaaaaattagcccgggttgggggcccaaccctggggtccccgctacttgggggggtgagggggaaggaaagcttgagcctaggggatcaagggtggggggagccatgcttgcccccctgccctccccccttggcaccagggggggtttttttcccca

SEQ ID NO: 501925 - DNA, 369 bp, Homo sapiens
tctctctctctctctctctctctctctctctctctctctctgtctctctctcactctctctctctctcactctcactctctctcaatctatctctctatctcactatctatatatatatatatacacacacacacacacaaatgtaaaaaaaacaccgagcgtataaataaacacacatacatacatacacacacacatacacaatataaataaacacacaaataacagcgccaaccacacacagagacatcacgcgcgcacgcacacacacaaacacgcacacacacacacacacacacacaaacagaatcaacacaaagaacacagaaaaagccataaaaaaataccccaatcaagcaacaacaatc

SEQ ID NO: 501926 - DNA, 320 bp, Homo sapiens
cgggaaggagacgctgcagccgcgggaacacccaaagacacacggtgacccaccatcccggtctctgaccatgaggccaccctggggtgctggggccctggcttctaccctgcggagatcacactgacctggcagtgggatggggaggaccaaactcaggacaccgagcttgtggagaccaggccagcaggagatggaaccttccagaggtgggcaagctgtggtggtgccttctgggagaggagcagagatacaggtcccattttcacaaggggggctccggagccctcacctgagatggagcctcttccgagccacat

SEQ ID NO: 501927 - DNA, 313 bp, Homo sapiens
ggtctctagctgtgccttgtcgttgaatgggaccatcgtttgcgatcgatgccaaacgtgtaagaattatgccgaaagagacttccagctagcacgccgcatacgtggagaacgtgcttaagaatccactatgatgggaaacatctcatactcaaaaaaaaaaaaaaaattactcttctacctgtgataggaagttctgaacgtaagatatttatataccatggggtcacaaggtacctaagtatatgattgcgagtggcaaaataggggacagaaatcaggtatgggcagtttatccatttacatttgtgtg

SEQ ID NO: 501928 - DNA, 214 bp, Homo sapiens
ggcagattcacagacgctgctagtcagcttgcagttttacctcgaaagataacagagaattatagtcaaaccagtaaacaaggaatttactttcgaaagattaatccaactgaaatctacccaaacttactcatccaaatatggataaaagtcagcagtgatacattctcttctgactttaggattttcataaaaatatgtagtaggtggatca

SEQ ID NO: 501929 - DNA, 81 bp, Homo sapiens
ctagaagattcagcaaagtacttttgtgctcttggggaatactgggggatagaggaaacctgggacacccgacagatgttt

SEQ ID NO: 501930 - DNA, 153 bp, Homo sapiens
cctatgtctcgatcgttaagtaaatagagcacatggtggccggtgcgcggtgtgctcacgccgtgtcatcccagcactgtgggaggccgaggcgggcggatcacccaaggtcggagttggagaccagcctcaacgtggagaaaccttatctct

SEQ ID NO: 501931 - DNA, 353 bp, Homo sapiens
ggattgtgggccgggcacagtggctcatgcctgtaatccttgcactttggggggctgaggagggtggatcacctgaggtcaggagttcaagaccagcctgagcaacatggagaaaccccgtctctactaaaaatacaaaattagccgggcgtggtggcacatgcctgtggtcccggctactcggaaggctgaggtaggagagtcacttgaacccggtaagcagaggttgcggtgagccgggatcgtgccattgcattctagcctggggcgataagagtgaacttttgtcccaccaccaaaattaaataaattaaataataaaggaattatgggccgggcacagtgggcttaca

SEQ ID NO: 501932 - DNA, 868 bp, Homo sapiens
  misc_feature (63)..(63): n is a, c, g, or t
  misc_feature (584)..(584): n is a, c, g, or t
  misc_feature (649)..(649): n is a, c, g, or t
ctatttgctactaaggtcacgttgtgtagtcagagcaagtgcaacaccgtttacttaccgcanagtttgtgcctgtatacacatcgaagcacagggagaggaaaagacaacttttgtcttcctctttggagtctggatggaaggacaaaaagaaatgacttacctaaggaaaatatttcccacagcagaacaccaaaagaccagacgtcactctggattgtgtacactctgtctaaaattgtttctggggccattcatttcaaatggaggcgagcctacaggggtaaaagacatggattaagaaccccaattaccaaatctcttgaagaaaaaaacttcctctgttcctgaacacaagtcctgaagctctatacaaggagtgttaactttgcaacttaaccaagtactgggtttatatttaaaatttacattttcttttttgaagtatttttgaatttttattaagcctcccgcccaagccatagttccatgatgttagccgacgttttataggctatccgcttatttaacgcctactaaatccatctccgctacgtcacacaaagaatcatgatgagacctanagatttggttatatgtgaccctattctcatcattttagtaagctatggatgtataataaaagggnttatgtgtataagtcttttggtcttaggtggtagttgtgtttgtatatgttatgaaacggaaaagtactggtctgtgtcagctgaggacgaccagcagaagctcggactttgagtcgtattcgagcgtcatagggcctcggcgatccaggccccgagcagccggtctacgtgcgaatgtttcctgctccgcgagatcgattacctgacaggcctagcgt

SEQ ID NO: 501933 - DNA, 187 bp, Homo sapiens
aagccaaacagtgaatactctgctgtgtcgcaacgggatgagactatctagtgaaggtcttcttgcattcactgccttcaaagagaatactagatatgagtactctggtgtttagttacaatcaagctactgtggctcaaacgatttcccacgattcatacgcaggtactagggtaaactactacca

SEQ ID NO: 501934 - DNA, 150 bp, Homo sapiens
  misc_feature (101)..(102): n is a, c, g, or t
ttcttgttaacccatttatgcctagtgttccattattggaatgctaagcttgtgggagtcatttacatcctactgctcaaagtcattccagggttgatttnnactgtcatcagttagccattcatcacacaacacaatgtggtttttaag

SEQ ID NO: 501935 - DNA, 105 bp, Homo sapiens
ccgttctgctccatgcatcttctgcatctcaggctctagcacccctctgctcctatgctggtccacatgacagcacttctggctccttctccagctcctcctctg

SEQ ID NO: 501936 - DNA, 163 bp, Homo sapiens
atctagagtgatcccagctgagataggaatgaatacaattacctacaataaaaaggaaaaactcactctacagttaggggtaataatcttttcactagagctcatcttaaaaattagaattttcgctctccctcgccctctccctctctctaacctttacacg

SEQ ID NO: 501937 - DNA, 264 bp, Homo sapiens
aataagctggtctggatgtcagtcgctacgcgatggtcggggcactttgtgtggccatcgtggacaggccgactccctcttccattagccatcttctatcccccacactgacagaaggccatgtcttcactgtaaactggcactgcagtcctacaagcttgatggtactcaggtgtgtctacaattacccagaagaaataaggagacattttaccccatattttgccacgtatctcatacctcccctaaaatcaatcctgacca

SEQ ID NO: 501938 - DNA, 1123 bp, Homo sapiens
  misc_feature (477)..(477): n is a, c, g, or t
gccgggcgcggtggctcacgcctgtaatcccagctctcagggaggctaagaggcgggaggatagcttgagcccaggagttcgagacctgcctgggcaatatagcgagaccccgttctccagaaaaggaaaacaaaaccaaagagacaaaaaaaaaaaaaaaaaaaaacaaaaaaacactgtgtgtggggcgcgcctgggacccggaaaaaggttttttaaaacccattcgcttggggcgcgcgcgggcccccagtagggttaggggaacactgtggcccacaagcggtgtccccgaagagaaacccgcggcgccatgcacacaggcggcttgggtttccccccaaataaaaaacgcgccgcgggggaaaccacagggcgcgtttctggggaccacaactttcccgagagtggcagcgtgcctgagaggcgaggccaaatcaagggggcgctgtatcacacaacagggaggtgcccanaaggcgagagggtcacgatatattcaaaaattaaaccgccgccggcacggaggtgagtagaaagaacacaaatagacaactactaatcaaagacataataaccaacagataaatagacgacaacgcaacaccatctctactaccgatcagcgtcaaacgacgaggacaacgacgtgacaaagatgacagacagaagagaagaagaaaacgcagtagacaaacaaagaagagaacaagagaagacatacaagaaagaagacagagcagacacgaaaagagagacgagcacgaacaggacagcacagctgagagaagagaaaacaagacaggaacgacaacacagacaaaacagaagacagcgaagcagatagacaagagattgaaacgacactatcgacagccagcatcacaccacaacgacagcacgaacagaaggcataggacacacgagagacacaagacaaactcaggcacacaaacacaaccagcagaagaagagagaggagaacgacagacaacacacacagcaacagagcacgacgcacgaaagcaatcggagactacgtcccatacacacacgaagaaccagagaatacagaccagacacgacacacagacaacagaccagaagaccagagaaacaaaa

SEQ ID NO: 501939 - DNA, 333 bp, Homo sapiens
aatagctggacccagtcgggcggcgggaacagttcgccttcccaccacaccgtgccggcctcgagccgcgtcacgctcggtgtccgacatctgcggcagcaccttgcggtagagattgaagatcggcgtcgacagcaaggcgcgcctgaccgggcgcacccccagcaggacgacggccagcagcgcgatgacgatcagcgcgacgatgactgcgtacatttcctttgtctcctttctcgaatttctcttggaacccgccggaccggccggggggactccctcttagagtcggaccttgcagggctttcaaggctttggcactgggccggtcgg

SEQ ID NO: 501940 - DNA, 272 bp, Homo sapiens
cccccggtttggggggggccttgggccctttggtttcccctcccccttttccgggcccctcccccccccgtggggcccccctgggggccgggccccgggaatcccttttttttttttggttgggggtttttttttttttttaaatggttcccgggggttttaagccccccaggttcccccccccgggggttttttttcccccccctgggtctttttttttccgggttttttttccggtttttttttccttttaatttttttggaacggttta

SEQ ID NO: 501941 - DNA, 159 bp, Homo sapiens
cccttctctatccgtatgtgtctgtcactgtatccgattccagtgtatctgtgtggggttgggtctaatagactgcacacgtaacgctgcttcagactaacacatcagatggaggtggtgctgactctctcacctggattccacgtggcatcgcctggg

SEQ ID NO: 501942 - DNA, 387 bp, Homo sapiens
cccaggaaccttatatcctagattccgggggcagaggatgatgttgaaggccttctgggccacttaaggatggtggccaggaaaggtcctgttgatctggccctgattaagggttatcgaaggggggtgattgaaggttcaaatgggggccagtctgcctataacgttaatctccatgttctgggaggtcggcaaaggcatgggcctccgggttaagcccgtttgggggataatttcctcttctttaggcatggattaagttaggcaatttccagtttgttaggtaccacactaattttggcctgggattggagggattcaggaattatttttaaaccgcgttccatattaaaggccattgttgcatggttaatagtcaaaaaaaaa

SEQ ID NO: 501943 - DNA, 853 bp, Homo sapiens
gcctgggcaatggcgggcgcccctcccccagcctcgcgtgtcgccttgcagtttgatctcggactgctgtgctagcaatcagcgagactccgtgggcgtaggaccctccgagccaggtgcgggatatagtctggtggtgcgccgttttttaagtcggtctgaaaagcgcaatattcgggtgggagtgacccgattttccaggtgcgtccgtcacccctttctttgactcggaaagggaactccctgaccccttgcgcttcccaggtgaggcaatgcctcgccctgcttcggctcgtgcacagtgcatgcacccactggcctgcatccactgtctggcactccctagtgagatgaacccggtacctcagatggaaatgcagaaatcacccgtcttctgcgtcgctcacgctgggagctgtagaccggagctgttcctattcggccatcttgggtctggattcggcattacatgtcttaacgggaaaaatcaactcaagatggattaaggacttaaacctaagacttgaacactataacaaattctagaagataacattggaaaaacccttctagacattgacttacgataacgtatttcatgaccaagaacccaaaagcaaatgcaataaaaacaaagataaataactaggacctagctgaactaagagcttttgtgcagcaaaaagaacagtcagcagagtaaacagacaagctacagagtgggagaaacatcttcaccatctatacactctgcacacaggactactattcagaatcaccaaacaacacacatcaggaaacaatctatcaaaagtgggctaggacataagagacaatctcacagaagatctaa

SEQ ID NO: 501944 - DNA, 330 bp, Homo sapiens
tttgctaaccatgttagcaaactagacggtaggtctttggtaatccttccgaagagccatcattaagactaaactaatagtctcattattccttccaccctattgcctctgggtcatgttacaaggaatgccatcattgagatcactctctgtgtggctctgtggaaacctaccatctggcaggtgacagttgccattattaaaaaaatgggactaacaagataataacatagaaattgtggcaaagttgttttttaataaaagcattgagctatggttaatttttaaaatccacatccaaaccttggcacttggagatgagctataaag

SEQ ID NO: 501945 - DNA, 398 bp, Homo sapiens
tatccccaacccggcacgcctttgcgtcctgaatggaatcatccacccgtccctcattctgcgtctggaaggaagctcatccacccatccctcatctgcgtctggaaggaagtcatccgcccatccctcatctgcgtcctgcaggatgtcacccgcccgttcctcatctgcgtccttcaggaagcatccacccgtccctcatctgcgtctggaaggaagtcatccacccgtccctcatctgcgtccggaaggaagtcatccacccgttcctcatctgcgtcctgcaggaagtcatccgcccggtcctcatctgcgtcctgaaggaagtcatccgcccgtccctcatctgcgtcctgcaggaagtcattcagccgtgcctcatctgcttccttcgggac

SEQ ID NO: 501946 - DNA, 638 bp, Homo sapiens
tctgagccggtacccctaggtccttaagcccaagggtcccttaacagtcagactaatcccctgtatgacgaggactataagtactaacctcatgtaatgaggtttaagagaaggcccagcactaaggcaggctctcaggacaagattcaaacaacagttcctctttgcccttcaatatagccccttctcatctgtcatgggctgaagaaccactggacctgtgtgtcatgctcataggtataaatccacagaccaggtgaaggcctagatggcaaaacacatgggctttgtgactccactactgacttccaggctaaggaaggactgacttagtgagctgttccaagaccactgagctcatggttccctgtggctgggacctccatcatgaccggggcttgaaagagggtactctgttcccgctgccacatttggaacagtatgacggctgcagcagaggccaaaaactaagtgatcagccccagagagtcgatgggggacactgacaaaccaatcacaaagttggtgccattagctcttagggaggagaggtggggcctgggcaaggacagcagctggagggtgaaacgcagacctggctctcagtagcggtagtgatccggcttaagggaccttgg

SEQ ID NO: 501947 - DNA, 316 bp, Homo sapiens
tgagacagtatctcgcactgttgcccaagctggagtagagtgacaccatcttggctcactgcaacctccgcctcctgggttcaagtgatttcgcctcagccttcatagtagctgagaccacagatgtgtaccactatgctcagctacttttttttacaaggggggtgaggcagggcgtggaaatggaatctcattctgtcgcccaggctggagtgcaggaacacaatctcgggtcactgcaacctccacctcccatgcccaagcgaattcttctgccttaaccttccgagcagccgggaccacaggcaacagccac

SEQ ID NO: 501948 - DNA, 933 bp, Homo sapiens
agcgcgatagtgatcggaagcgcgcggtaccagtagagaagcttcagtgacgtgcagaccacggtagaaaagaaaatcgagcgggtgacaaacgcccgacggcgcttgatcatcggtaaaacgcagcctggacgcagcgacgattgtcccgcgcaaagcgatataacgcgttcatccttctacggctccaggcattgaaagtctccgcgccataatgaccgggccgctgtggtgagactatctagatcgccaataggaagtaactgcttactatagacatccacgcccagactgaagttgacggcgtgtatattaaccaccatcaacaggcggagtgtcaggtaatggatagaccgtcaccagtgccgacttcgccagacgcaaaatgggttctcgttcacgtaacgggcagcaatacactggatgtgccgccgaaacgggtcattacgccagacggactgtcgtggcagcacgcaagcgggtacctgatcggcggcaagatagttagcggtcgaaactgtactaactctggcgtcgtctgaagcttcctggaatagcacaagatgtgcatcttagccagaagttctataatgacgacaacattcagcgcgtgatgtttgtatatgttccacaccaggaatcgaaaacgctattcggtacttaagggtcccaggggtaatgctgtcgaatgtctgaaaagaccggggaagatccattcgaaggttgacggaacaaaaggaagtggacagcggattacacatttgactgtaaccgttaaggaacctccgatcgagggcaatagaatagactcagactctccaacccatgtttctctacagtctctaattatatagaaactaacgcggtaaaactttggcaccacgtcgagcaaatctaatacagaagcaacataataaaaaaaaggaaaaagag

SEQ ID NO: 501949 - DNA, 192 bp, Homo sapiens
agggatggaaggtggtgttaaagaagagggaaggggccaggcgcagtggctcacacctgtaaccctagcactttgtaaggctgaggtgggtggatcacttgaggtcaggagttcaagaccagcctggccaatatggtgaaaccccatctctacttaaaaaaaggaaaaagagcgaaaaaaaggtcgtatcga

SEQ ID NO: 501950 - DNA, 231 bp, Homo sapiens
tctgctgactactttgttggacgacgcgacgcagttcctgaccggagcctgaccagacttttccatgaatgtgccggacgtcgggcagcgtctatatcaccttgaagaagtatgacggtcgaaccaaacccattccaaagaaaggtactgtggggggctttgagccgggagacaacaagtgtctgttacgcagctcaccgcatgggcaagcacagaagcatcagcactgtg

SEQ ID NO: 501951 - DNA, 253 bp, Homo sapiens
gccatcttggttaaaatactgcattggttttttctagcgtgtgtgtcttgtggggaatgaactgcactgatctgtattgactttgtaataaaaatagggctcccaccacctcccccatttcttgtgtcctttatttgtagcatatgcatgtcttgcaaggttagcccctaagacccctgtagaagactatagcttgcttcagttgccccatttatctctactgctatgattggattgttgactgcatggactg

SEQ ID NO: 501952 - DNA, 257 bp, Homo sapiens
taatgaaccgagcctgtcgggcacctactgtgaaaagaccgatgaatctaggctcaagcactgagcaatcatttcatattgctctccgtggagtgtggcgaatccggtcagtacttttacagcccgtggggcatagcgatgattatggtatctcgacgttaaatatgctcgtgtgtctacgtttattcctactgtaaatatattgtgtgctcacacgataaaccctaggaagccaattgatatcatagctcagatca

SEQ ID NO: 501953 - DNA, 419 bp, Homo sapiens
ggattacatggcatacgctactgcacctggccagagtgcaacattaaaaaataaaaaaaaaagattgttgacggcttttaaattcacaactcttggagacattacaaaccttctgttatctcaggcacttggaaaatctgaagctccaaagaaaagagggtccgggggtaggacatgatcaattccagttatgtaatacacttacatatgggaacaccttatatagtgcttgaccattttatagaacattttttacttctgtttaaagttaacatggatattggtgccagttcatcgataaggttctgaaatctagaaatataggtggttcctctcacttacacgattattatgtaatatacttgagcttaagaatccaagattctggatagcattgttccttggggaggctgaggagg

SEQ ID NO: 501954 - DNA, 2279 bp, Homo sapiens
atgtaaacatgtcgaaaaacctatcaacaacagttccttagtttcaccacttcaaaaaatttattctagtgtcaaatcccacattttaaataaatacagaaatgattttgatgattctccatttctcccacaagaacaaaaagcacaaataagggaaaaaccgtgtgaatgtaatgagcatggcaaagcctttagagtgtcttcaagccttgctaaccatcaagtaatccacactgcagataacccttacaaatgtaatgaatgtgacaaggtcttcagtaacagttcaaaccttgtacaacatcaaagaattcatactggagagaagccttacaagtgtcatgaatgtggcaagctcttcaatcgaatttcactccttgcacgacatcagagaatacatactggagagaaaccttacaaatgtcatgagtgtggcaaagtcttcactcaaaattctcaccttgcaaatcatcacagaatccacactggagagaaaccttacaaatgtaatgagtgtggcaaggtcttcaacagaaatgcacaccttgcacgacatcagaaaattcatagtggagagaaaccttacaaatgtaaggaatgtggcaaagcattttcagggggttcaggccttactgctcatcttgtaattcacactggagagaaactttacaaatgtaataaatgcggcaaggtcttcaatcgaaatgcacaccttaccagacatcaaagaaaccatactggagagaaaccttatgaatgtaaagaatgtggcaaggtcttcaggcacaagttttgtctaaccaatcatcatagaatgcacacgggagagcaaccttacaaatgtaatgaatttgggaggccgaggcgggtggatcatgaggtcaggagatcgagaccatcctggctaacaaggtgaaaccccatctctactaaaaatacaaaaaattagccgggcgcggtggcgggcgcctgtagtcccagctactcgggaggctgaggcaggagaatggcgtgaacccgggaagcggagcttgcagtgagccgagattgcgccactgcagtccgcagtccggcctgggcgacagagcgagactccgtctcaaaaaaaaaaaaacaaacaaacaaacaaaaaaaaacaaatgtaatgaatgtggcaaagtcttcagttacaattcacaccttgcacaacatcagagaatacatactggagagaaaccttacaaatgcagtgactgtggcaaggtatttagtcgacttccgtgccttacacgacatcaaagagttcacactggagagagaccttacaaatgtaatgaatgtggcaaagcatttagagactgttcaggccttactgcccatctactaattcacactggagagaaaccttacaaatgtaaagaatgtgccaaggtcttcaggcatagattatccctaagcaatcatcagagatttcataccggagagaaaccttacagatgtgatgaatgtggcagggacttcactcgaaattcaaaccttgcaaatcatcacagaatccatactggagagaaaccttacaaatgcagtgaatgtcacaaagtctttagtcacaattcacaccttgcacgacataggcaaattcatactggagagaagtcttacaaatgcaatgaatgtggcaaggtcttcagccacaagttatacctaaaaaaacatgagagaattcatactggggagaaaccgtacagatgtcatgaatgtggtaaggacttcactcgaaattcaaacctggcaaatcatcacagaatccatactggagagaaaccgtacagatgaaatgtgtgtggtaagatctttagtaataattcacaccttgcacagcatgagagaattcattcatgagagagttcttacaaactgagtatggcaaactcttcatgctaagttctagcattaatcaacatcagagattccatactaaagagaaatcatagcaatgtatgtgaatcaggtctcttgaggcctgccaaatgactagatatcaaaacatacatcttggatgaaaccatacagatggattatgtatgctgaggctattattcaaggaccattactatggaacatgataagatttacacaagcgataattcagtctctagttctccaatatttatgatactgcatgctgcagaaaagtcacagctccaaatacgttgaatctcatgacgcgatgcatgtcgaaggtccaagggcatgtggaaatggtcagttatattcaggcaattaaaaaacctaattat

SEQ ID NO: 501955 - DNA, 197 bp, Homo sapiens
gccccccccccggggcccgaaaaatttttttacctttttttggggctttcttttcccatttgtgggggcccgggttttttttaaaattttttaagggtcccctttgggcccgggggcccaggggtagggggcccggggcctttttttttggattttttccccaaaggggttggcccccctttttttcccccttgaga

SEQ ID NO: 501956 - DNA, 205 bp, Homo sapiens
cagtaggtgtgtcatctagtagctaatgtggcaaaatctgttgaatgagactcggagtcttggggaggccagagtcgtcatcatcctgattccacctggttccgtctggtttgtctcttcctatagcttcctcctcttgtctccagacctttcacttctcgatacacgaactccagttcaaggagggttcctgtaattagggttt

SEQ ID NO: 501957 - DNA, 1152 bp, Homo sapiens
ccggggtgggtgtatgcgccagccccaccgcttgtccctccttttcggtcgcgggtgacacgtgggaagggcgcctccctttacgtgcgcattttcgcctcgtgggtgggctcctgtgaatcccccctaatctcccaattcctctacttctctgaactccgctcgtgccccaccgtttgaccaccaaccgttcccccccagggaggttcctgtgaaatgggccccttggtgtttgttggcccgtcctctttcatttgggtataaggccccttttgagaatccccgggcgccccccacaagggagggtctgccaagatctccccacatgaacgttgggggccaccctcttggaagggaatttttgataagaggggagaaaaccctgtcacttcacacggggaaaatatacttagttggaaaaagatccacgagaccactctgggggagaaacgcttctcgcacagggatacacagggcttctctgtggaaacaccacggcccaactttcaactctcacggtccacgtaagccctctctcacgctgctgggtaaaaaaagagcttggatttcgtgcttacctcacaccgcgcccccactcgtaaaaaatattagcccctcctggtttaccccactcgtgagacagaatgtcttctctcgcggaagaaattctcgagcccacattggtgccctcgattagggatctcacaaggaccccacatgggaaaagttttcctcgtgagttattcgtggcctgttcccacgctcacaccttccgtgccacaccacggccctgttgtggacccaattgtggaataaattcaggcttcctctgtgagctggccccaccactgagccctgggaaagaggccacatgcacttgccaatttgacccaacacatgcactgctggcctggttttaaagacactttctccaccccaagctatcacacttgtgagcccacgtgtttattttgcccacgtttaacttcttaaatgacacctctttttgggccccgagggatgtaatatttataagaaaatgtgagttcacgccccatattctccttttaatggccaattatagcgccgcatagcaccttctgtggttatcccaactaaaatttaaatactccccgtttttttactccaaac

SEQ ID NO: 501958 - DNA, 448 bp, Homo sapiens
tgatgtaccccacaagctgcattcaaactcaaatctgtgggaatgagtgactcgacaaaatgtaattcggatcagatcctcatcccctgactgtgtgaaaaaagtactctccttctagtgaaggattgtcacagagtttcactggatgaaactatgacccagtattcttactgtattttacatatgcctgtaaattatttgcaaaaaagaagaagaagaggaagaaagaaaagaaagaaaagaaggaaggaaggaaggaaggaaggaaggaaggaagggagggagggaaagagagagagagtataaaaaaatgtgatcacatggaacccaccaatctctcttaaacacacacatgggagacatgcccaattaagtatcagagagccttctatctgggacatatgtgcccctagtgttacaaacacctttgatgtacactgctgaggta

SEQ ID NO: 501959 - DNA, 896 bp, Homo sapiens
ggtcattgacgccatgagcgcgctgtgcggtgtgcgtacgggtgccccagccgctgcgtgcctgcgggttggggaccagtgcaggaccgggtcgcgccgtgatatggcctgtaccacatctgaggagcgcgggccagccctgtcgcgagaaataccgcctctttctttaagaatgtaactggtcactacatttccccctttcatgatatccttctgagggtgaactctaaaagaggaaaaatggcattccctatgaaggacaagcacgaaaatgattgcacatctgacgactctgttaacatactgatcgtacgaaataccctcggggggacaactttgctaaactgcagacttggccaccaaggaagacaaatgacttcccatttaaacaaatattgtaacaggatctggacaacgcctacgcctatgtggccgaatattcttccctttaccaagggtccctatatctgccacttatgggcacccctccctcagactttgcgaagatccccatgcaaaagatcagagcccgaacctgctttggcgaatcagtggatcctattggagtggtgcgcgacaataggggctcaaaagatttcttcccctcggtggggagaaagttcatccaatggtgcaaggatcccttgggaatttggggctctttatgggctcgacgcggggcaaccccattgggcacattaatgggctcatccatgccgaattgatccctgaaagccctcaagaggtgcatggcatctggcctgctggtaacaccgtgtcaccacggggttacctgggaagcctactctcaagtgcagcatcttttagcgcccccctgggcaaccgcacacccttgcttcagggaatccacacaggttgtgcgcggaggttaaccc

SEQ ID NO: 501960 - DNA, 114 bp, Homo sapiens
ctcggaattcacggttactccatgtttggtcaggctgttctcaacactcccaacctcagtgtgatcagcaccgttctcgtgactcccaaagttgttgatcaccacaggtgacga

SEQ ID NO: 501961 - DNA, 123 bp, Homo sapiens
taaaaggacacaccacgggaaagagaagggtcacgcggaagagaagcagaagccccaggctgagcggaaggaggagaaaaacggcggctgccccttgctccttgagtgaggagattcgctcac

SEQ ID NO: 501962 - DNA, 300 bp, Homo sapiens
  misc_feature (224)..(224): n is a, c, g, or t
  misc_feature (258)..(258): n is a, c, g, or t
cctgtttttccctcttccagctgacctgtgacttatactgctcttaccgatgatacttttggaaaaaatagagcgtgtatgcaccgccccgtttgtcccatccgactcacaccccaggatatccatgggacaaacggccctgtttatatttgggtctttatgttggtgctgccaggtctctgagctccagaggtggcctcttggacagatctactgctataggnataaaagacactctgtctcgcaaatggctgcttntcaacaagcccaaagatgcttgtcggaggacggttatggaag

SEQ ID NO: 501963 - DNA, 212 bp, Homo sapiens
cgaatcgcatcaggcagcgccgagctggcgcgccatggcgggcgacttccacacctgcccattgctctgcgcaatcagcaccgccaacccaccttggcggtgcgccaaggccttgcctggcatcggcgcccatcaccatgatggaggcgcccaagccattgacctgtgccaccgaagatgcgatcaggctcacgccgtgcacgcccgtggtg

SEQ ID NO: 501964 - DNA, 685 bp, Homo sapiens
  misc_feature (292)..(292): n is a, c, g, or t
  misc_feature (311)..(311): n is a, c, g, or t
  misc_feature (317)..(317): n is a, c, g, or t
  misc_feature (319)..(320): n is a, c, g, or t
  misc_feature (333)..(334): n is a, c, g, or t
  misc_feature (338)..(338): n is a, c, g, or t
  misc_feature (348)..(348): n is a, c, g, or t
  misc_feature (350)..(350): n is a, c, g, or t
ggagccaccaaaatggtgtgtcgggtatgaggctgggactaagccaagggattcaggtgtggtgccggtgggaatgaggaagcgcccaagctttttgtctgaactcccatgcgttgtgattcctgaggatgggatgactgtatcttgattacccggagtctgggcatataccatgtgctccctaaattatgagcgaatgtggaataaaattctaaaggttttcaagatggcagcatctatgcatggtcagcccagtccttctctagaagatgcaaaatcagaagaccaatgntcatagaaatcatagaaanaaattngnnactatcttagaanngaantgacacaaantntatatcaaatggcgacattttggaacaacagctggtttctctggaatattctcaaacttcctgtcagacgcttgcttcaagggttaaacatgatgcttgtgaaagaccatatgcatcatgtggctacacttccattttggtctactgtggttactgacaaggcttttttgtaatgcgagtgctttgtatcagatactatagcaaggaaaacgtggtgttcccagaagctcactgatgtgccatagcttgggggttctatcccagttcttggggttttactaaaaatggcgcctgcaacccaagtatccatacggtcaagtggccaccaaatggag

SEQ ID NO: 501965 - DNA, 904 bp, Homo sapiens
ggaggcttgtgaccagcatggtccagatctctaccccaaatttaaaaaatggtgtgactgacttactctctttatagcccatcgtggcagagcggcggggccacttggctggtactcttttcctgatgatcttgactctccgtccaaggcaggagcgctgtttcgcctctgtacacgagctgtgccagggctgtagcttccttcttacattcccctggctgaacaagcactgtgcatgactcattcaccccccaggactaagctgtggcagcagctccgcaagaggacgcgctatgtagcaatctacactctgctgctatgatcggggccaccaacgctttggccctcttcactccagcgatccagcaattgacaagtactcttgactgtctctgaccctctacactgcccagcatggcgcagctacatgcactcccaccctccagagacattccaacagaacgcctgccctactgcgcagtcctacgcacatccaacggcgacctgggtgacagctcgcacgcacggccgacacgggctgcgcccagggcagccagcgcacgggcaccacgatgtgctgcaccaccatgccacctgctccgagcacctcgccccccgacgctgcccagaaaccccgctgcccttaagatactttttccactcctgtcacactaaccatcgttgcgccacgcatgataatcctggtaagcgcatgcatgctcccggtcgaagcacatggcttccacattgtgctgcatgagtcgactctcacacttaagtatacacccttcatttattccatccctatctgtcatccccctgccacagccttacaccatcagggtcaacgcgagccccccacgccattttgcgcctacggccttatacctaccctatacgcaac

SEQ ID NO: 501966 - DNA, 752 bp, Homo sapiens
  misc_feature (359)..(359): n is a, c, g, or t
  misc_feature (378)..(378): n is a, c, g, or t
  misc_feature (384)..(384): n is a, c, g, or t
  misc_feature (386)..(387): n is a, c, g, or t
  misc_feature (400)..(401): n is a, c, g, or t
  misc_feature (405)..(405): n is a, c, g, or t
  misc_feature (415)..(415): n is a, c, g, or t
  misc_feature (417)..(417): n is a, c, g, or t
ggagccaccaaaatggtgtgtcgggtatgaggctgggactaagccaagggattcaggtgtggtgccggtgggaatcgtgagggaagctgcccaaggaaagtgatagaccaacgatttccaaaagtgaacttaatcttgtcatgagaaacgtgaggatagacgatgtcaataagacagcctcgtgtttccgtcctccccacctgaaggagctaggaggacaagatacaaagagcctgagctgccttctcggaatgaggagacgaggaaaacaggaagcagtatcagttttcaagatggcagcatctatgcatggtcagcccagtccttctctagaagatgcaaaatcagaagaccaatgntcatagaaatcatagaaanaaattngnnactatcttagaanngaantgacacaaantntatatcaaatggcgacattttggaacaacagctggtttctctggaatattctcaaacttcctgtcagacgcttgcttcaagggttaaacatgatgcttgtgaaagaccatatgcatcatgtggctacacttccattttggtctactgtggttactgacaaggcttttttgtaatgcgagtgctttgtatcagatactatagcaaggaaaacgtggtgttcccagaagctcactgatgtgccatagcttgggggttctatcccagttcttggggttttactaaaaatggcgcctgcaacccaagtatccatacggtcaagtggccaccaaatggag

SEQ ID NO: 501967 - DNA, 474 bp, Homo sapiens
  misc_feature (126)..(126): n is a, c, g, or t
  misc_feature (292)..(292): n is a, c, g, or t
  misc_feature (360)..(360): n is a, c, g, or t
  misc_feature (439)..(439): n is a, c, g, or t
  misc_feature (469)..(469): n is a, c, g, or t
cgggaggatcgcttgagcccaggagtttaaagctgcagtgccctgtggttgcacctgtgaataactgcactccagcctgggcaacatagcgagacctcatctccaaaaaagaaaacaaaaaacaanggaatgatgttctgtagagatggcctttcacttgaggagtactcagttttcagttcttcctagctcggggcttttaaatttgaatctaaacattcttcccaccatccttttgactgttgacctggttttctctctaagtttctgtccctgctgctccttacttttnttccttttgaatctatcttatctgtctttgttcacttttaagctatatatgggcagggtgagagacantactgagcacctggtgagcaagccggcttaaagatggagaagagctctggcaccagaaccctgtcttcctccagttctnaacacggtgttgctcttcagtcaaccgggnctggc

SEQ ID NO: 501968 - DNA, 158 bp, Homo sapiens
  misc_feature (55)..(55): n is a, c, g, or t
gtccttcccacacagatttctcaagagggatcctctgagacacatgatgcggatnggctttccctttaatcacataaagtcatggtgtcaaagcccgctcagcgtcggcggctgctggaagttgacgtaggcatagcccaggtagcggcgggtgatca

SEQ ID NO: 501969 - DNA, 145 bp, Homo sapiens
tttaatgggccttttcccgattacttaaaaagttttatgtcttttatgaaatgtttgtcaaactctttgaattataggggctttggatattcagatgtttaatttttatttgttaccccaattacatatatgtttttcctgtcca

SEQ ID NO: 501970 - DNA, 708 bp, Homo sapiens
  misc_feature (37)..(37): n is a, c, g, or t
aatgagttgatcccatattcattattaataactaacncagcacccaggagctgccaagagcattcttcagctccactcaaatgcttctaactgaccctcctaagaaaatgagagcaaggggactagtgtgaatgacttacttctggctgagggtggctactggtgccttactgctgaatgttctagggcctgttttgggtagcaaagtacctggtccatgggaggatattcttgtccttatctttgtcagcagatttcccaagaaagcccccaaatgttgatcaagacagaaaataggccttttttgtcttttatggagatacactgtttaggctgatcagaaatgtctggtgatctactgcccggactatattaagccattttctagaagataggatattaatttaacaccacttgggcatattaagaaaattggagaaaattagtagtgagaatccagaaatcctcctttaacaagcaaggcacttgaggcgtctgtttaagggttcacagcccctgtctgtgtggttagatctgcccctgctcacttgactgccggttcttatctctaaatgcctttgggaatttacaatttatttggacttttggggggaattctctaatttatctgtgtttaaatgggtgctgtctcatacagtagtaagtttgcgtgagataaggtaacttttagaatgagagaaaaaaaaa

SEQ ID NO: 501971 - DNA, 444 bp, Homo sapiens
  misc_feature (412)..(412): n is a, c, g, or t
  misc_feature (430)..(430): n is a, c, g, or t
aggtttaaggtaggaggattgcctgagcccggaaggttgaggctgcagtgacccttgatctcaccactacgctctagcctgggtgacagagtgagactctgtctcacacacacacgaaaaaaaaacagtttagaattttggttccctttaaactttgagcttcttgaaaagaggagttaggttttatccatattttgcctccatctccatggtaacaagtatatatagtaagtactcaataactcataaatctattcatttaaaaattcaagggaaatttaaagctcatttgaaggttttttttctttttaattgttaaaaaacggataacatagccgggtgcggtggctagcgcctggaagtccccagcactttggggaggcttgaggcagaagggttactttgagggccnggggttggagaccagccnggggccattttagc

SEQ ID NO: 501972 - DNA, 345 bp, Homo sapiens
tatcatgttccattgcttagtatcaatgcaacttctacttaggatcatgggacttgctaccgccttgctgtaccacttgacagtatggaatcttgcataaacacacctcagttaatgccccgtgtattaagagggaggacctgatgactgatatccaggatacttgtacttctaataacatttttcatgaatcatgagaaaatttccacagatacttcccttagaaaatctgctataaactctgtatcattggtagcacaaatttgagcgaggccttgtccattttaaggtggaaataggaaggaccacaacatgacccgtaagtccagcatcggcacatcagca

SEQ ID NO: 501973 - DNA, 257 bp, Homo sapiens
gagtcagccagccagccacatgcagctttgctgataaatggataccttttcacaccatttatgaaaacaaaatttcaactctgttgcctgttctatttaagaaaaattgctgtttctactctctgtatctgattttaaaaggaaaaaaaaattcacacctggctttcaggtaactgactttggattcttacaagcaaaggtcattgtgttttttcttgagtagatacctaataaattttgcttgaaagtaaaaaaaa

SEQ ID NO: 501974 - DNA, 380 bp, Homo sapiens
tgtgagcgcgctcctgtacctcagaatagggcactgtaaggtcagtcagtgaagtctctgctctaactggccaccggggcattgtcttctgacacagccttgcatggagcctgccatctgcaaaagagagttcactccttccgctatattcatgtgagtgtatccgatttccttgataaactccagttacatggtattctgccatttgggaagttttacacactccaaagatgttgccaatcatatcttctggtgagtagcccaaatgccataagtgagcatgaatcttgtaggctgcgtcaattttggcatgcacacagtgctgcatcatctcctttaccagcagtgggtggtgctcgtcacagacccttgaacacgtt

SEQ ID NO: 501975 - DNA, 507 bp, Homo sapiens
cagcatggtttaaaagccaaaaggtagaagcaacacaaatgcctttcaataaatgaatgaataaaataaaatgtggtacagggctgggcgcggtggctcacacctgcaatcccaacacttggggaggccgaggtgggcagatcacgaggtcaagagaccatccgggccaacatgatgaaaccccgtctctacaaaaatacaaaaattagctaggtgtgatggcgcacgcctgtagtcccagatgctaaggaggccgaggcaggaggatcgcttgaacctgggagatggaggtttcagtgagctgagatcacgccactgcactccagcctgggtgacagagcgagactccgtctcacaaaaaaaaaaaaaaaaaaaaaaagcgccggggagaaaaattaattggggatcctaggataggggatttaaatggaaggggaagccaagggaaaaggggtttcttaaaggtgtataaaacttggggggaattattatacattttctacaaat

SEQ ID NO: 501976 - DNA, 232 bp, Homo sapiens
ctgtgtcctggtgtcgcacctagtttacatcatagatatataactggttcaccgtaacaatgtggtggtagcaaccctttagagaaatcatctcatcaccagaggcagatgtgtatttaccttaacagctctgaaagcttcttccgattttgaaagtcttcgtgtattccaagctttatgtttttagagaactgttcatagaatttcttgtagttctctttatcttccgcca

SEQ ID NO: 501977 - DNA, 1103 bp, Homo sapiens
  misc_feature (532)..(532): n is a, c, g, or t
  misc_feature (543)..(543): n is a, c, g, or t
  misc_feature (564)..(564): n is a, c, g, or t
  misc_feature (702)..(702): n is a, c, g, or t
gaggagctgacgggagagatcacaaggccagtcatggatgaccagcgcgaacttatttccaacaatgagtcgattgccggatgctgtgagccggggccctggggtgcccacggagcatgcagagattggcaagcacaggggcagcacgctgttactacgagggcgttgtatccactggcgggatgaactctgcatcttcgacatggccaggaccaccagcggcatacattcgctgtacgcaggcacgtgagtggccgcgcttggtacaatagcgtgaacatgatcacgcttcgccacgcaatgcatgtcacgtctggggacgcaagcgcgtggcaggcgaatgaacgcattcacgcaacagccctccccaaagggccctgttgcacgtgagaagatttgcggcaagtaggggcaaccccacggcatgctggaatgccaatgggcgactgccgcacgagtggagtagactccttgcctgctagggggcgccgagtggcgatggaacttgccgaacacatggtactggctaganccaatggaccnaagagagacgcgatgatagantagcgacacgtgcctcgcgatgagagattgcgtcgagcgcgcgcacttagaatagggttaggtaacactcgagcaaaaccttgtataaggggagaaggcgttcccgcagggaatgaaacaccttagaggtgcatcccnttagatgaagcaagcgcaaatgtgatgacccgagtaggacctgggaaaggggttcctttagacagagcattggtagtggcaacgcacttttgggctctcagtggtatttagagaatactgaagctaggggcgaacctcgctttgggaaggcaaaaaatgcctcaccttggaccagcgtccgacccggaaagaagatgtcaagcttgggaacactggatggacgccggttctttctgtgcgactggggtgttgacccaatgccaggaattctgggggcccaagtcgcgcgcagtggttgaggatgccagccatgattgcggggtcatttcaacgagtccgtgggccaggggcccccagaccaaggctaacagctttggtttgctcccttttcagggcccccc

SEQ ID NO: 501978 - DNA, 375 bp, Homo sapiens
tcccggacagctcagagacgaccttgcccacagccttggcagcgctggtagaggcaggcatgatgttctggagagcccgggggtcattacgccacagtttcccggaggcgccatccacagtcttctgggtggcagcgatggcatggactgtggtcatgagtccttccacgataccaaagttgtcatggatgaccttggccaggggtgctaagcagttggtggtgcaggaggcattgctgatgatcttgaggctgttgtcatacttctcatggttcacacccatgacgaacatgggggcatcagcagagggggcagagatgatgacccttttggctcccccctgcaaatggtctaaatgcaatcaggggatcctct

SEQ ID NO: 501979 - DNA, 321 bp, Homo sapiens
cttttggggtctttgctcagtttcagctcactgcaacctctgcctcccgggttcaagcgattcttctgcctctgcctgttgagtagctgggactacaggcacgcgccaccacgcctggctaatttttttagtatttttagtagggtttcaccatatcggccaggctggtctcgaactcttgacattgcgatcctcccgccttggcctcccaaagtgctgggattacaggcgtgagccacaacgcccagccgaactatgggttttataattagaaagcagcaaagaccccaaaagagcaaagaccccaaaaggggtaccgag

SEQ ID NO: 501980 - DNA, 1601 bp, Homo sapiens
  misc_feature (435)..(435): n is a, c, g, or t
  misc_feature (669)..(669): n is a, c, g, or t
atggcacatgcagcgcagggtaggtctacaagacgctacttcccctatcatagaagagcttatcacctttcatgatcacgccctcataatcattttccttatctggcttcctagtcctgtatgcccttttcctaacattcacaagaaaataactaatataacatctcagacgctcaggaaatagaaaccgtctgaacttatcttgcccggccatcatcctagtcctcatcgccctcccaatcccttaggcatcctttacataacagacgaggtcaagggatccctcccttaccatcaaatcaattgtgccacaatgttactgaacctacgagtacacgataacgggggactaatcttcaatcctaacatatttcccccattattcctagaaccaggggactggactccttgaggttgacaatcgagtagtactcncgatttgaagccccattcgtataatatttactcacaagaggtctgtgcactcatgagttgtcccaacattaggtttaaaaaacagatgcaattccgggatgttaaaaccaaaccatttcacggctaacacgacgggggtatacctacgcgccatggtctgaaatcttggggcaaccacagttctgcccatgtctaagaataatccctaaaatttgaaaggcgatactaataacncttactcgagaaaaaaaaaaaaaaaatggggggggaaatacacatggggggcggtgaaagtagtcgtgtccatggcccagccgcgccgctacacgcgcgacccaccccacaccgggaaggcgacggcacgacgacaagcccagacagcgacggacacaaagaccagcaaagagaggcgaagaagaggtgaaggagagcgacaagaacgaggacagaaagagaagggcggaaaaggacagagcgagagagagaggaagagagcgagaagagaggagaagaacaggacagacagggggaaaaggagagggagggagcaggagcgaatcaaaaccagggcagagacaaggtagacaggaaggggggacggacgagtgacaaaaggcgcaagagagaagggagcagcgggaggcgagaggaagagcgaggggaacagcgacggaggagggacagcggcggaagggaggaggacacaggcaagagaagccaggagaaaaccaagagaagagaacaacggagccgaaggaagggggcaggggcacaaagacaaagagaggggacaaaggaatgcgaggcgaggagtagagacgaagaagagcgagaggacgaacgagagaggagaaaaaaaagagaagggaggaagaaaagagaaggaggacaaagaagagaagaaaagaagagagagagagaaaggacagagccagaaagaagagagaggagggaggagagcgacggagaagagtagagaaggggtacaaagaaacagagcagaggaaggagaacaacggatcaacgcaccagcagacgacagagaacaagagacacacagaaaggacagacgggaggaaagtagaaggaggaaacacgggcagccaggagcgagaaaggaacggaagcaagaaagaacagacaagaaagagaaggataaaagaaaa

SEQ ID NO: 501981 - DNA, 141 bp, Homo sapiens
aagaatacaggaagagtatgtaacaacgtatctagtgtaagaatagatgacagccagtgcaaatgagtttaaataaaggcttactgcatgagaaacccagtggcctacgcaaagagaatttataatcaacatggttacctg

SEQ ID NO: 501982 - DNA, 644 bp, Homo sapiens
  misc_feature (2)..(2): n is a, c, g, or t
  misc_feature (114)..(114): n is a, c, g, or t
  misc_feature (255)..(255): n is a, c, g, or t
  misc_feature (317)..(317): n is a, c, g, or t
  misc_feature (326)..(326): n is a, c, g, or t
  misc_feature (355)..(355): n is a, c, g, or t
  misc_feature (358)..(358): n is a, c, g, or t
  misc_feature (386)..(386): n is a, c, g, or t
  misc_feature (480)..(480): n is a, c, g, or t
  misc_feature (523)..(523): n is a, c, g, or t
  misc_feature (531)..(531): n is a, c, g, or t
  misc_feature (545)..(545): n is a, c, g, or t
  misc_feature (557)..(557): n is a, c, g, or t
  misc_feature (562)..(562): n is a, c, g, or t
  misc_feature (569)..(569): n is a, c, g, or t
  misc_feature (573)..(573): n is a, c, g, or t
  misc_feature (606)..(606): n is a, c, g, or t
tncacagcaaaggcctcagtccagaacacaacataggggccagccgggatcacaatctggtcaaagctctgggagccacactgggaacaccactcccggggttgagtggcaganccaggactttgcagcaactgtggccccagacataacacaaggcagcagccctctcccacagaggcacaggaagctgacacccaaggagcacgtgggccggggacaggacggagaaggctgccgggcagtaacttggcgganatgtggtccagcaccactgccgcctgcgtctaccacactcaggccaggaagcccaggcctgngactgagcnctaggcccagctctacccagtgcagagcngcnggagtgccacagaccctcagcagccccntgccaacagaagaagtatagaggtacccagcctgcccctcggctacatgaacaagaaaggggcctaaacttcggacctggccaaggcatagaantgcccaggaaggaccggaaaggataaagaggccagccccccancaaaccantcccaagaccctantaggacacgtgngagancgcccantagngacaagtaaaggctcttctgacggactcccaangacaaagggccacacacgcaggggtgagagcccctcaa

SEQ ID NO: 501983 - DNA, 208 bp, Homo sapiens
ctctttttttcgggccccgggaacttttttttttccttccaggtaaaacccttcccccttccccccatgggtttttcagtttcccgtttggtttgttggggggttccccggcccccccccccccccctttcccccaggggtggtaaggtaaaatttttttcccaggtcaagaaatttttaaaaaaacgggggctttgccctcttttta

SEQ ID NO: 501984 - DNA, 107 bp, Homo sapiens
tcagtatgattagtcattgttgggtggtgcattcagtcggttgttgcatgcagcatcatttgtcaggtggggcaggttcagttgtggccaatcacagcaatgcattc

SEQ ID NO: 501985 - DNA, 350 bp, Homo sapiens
ccccggacccctggccttggaggggccctcccgcccccggaatttgctttggagggaaatgtttttttttttcccggggatttttttaagattgggggatggtgggtcctccccccagctgcaaacctgccccttccgccttatttccgatccccctgggtgggccgcatttttggttccccgcctgggtttataaaggggcctgggtgtggcctgtttttcttttaccccccccagggtcctttggggttttggggggcccctggtgggggcttttggggtggggttccggtcctttgccgaaaccccctttttgggtgcttttttatttaaacccgccccccccccca

SEQ ID NO: 501986 - DNA, 989 bp, Homo sapiens
ggacgcgtgggtcctggtataaaaaaagacacatagatcaatggaataggtaagagaacccagaaataaaggcatatacctacaaccatgtgatcctcaacaaaactgacaagcaatgaagtaagaacttcattcaataagtggtgctggcataactggctagccatatgcaggatattgaaactggacccctatccttcacgatatacaaaaatcaactcaagatggattaaagacttaaatataaaacctaaaagtattaaattcctagaagaaaacccaggaaatgccattctggacataagtgctggaaaagacttaatgatgaacaccccaaagcaattgcaacaaaaacaaaaattgacaagtgggacctaattaaactaaataacttctgcacagcaaaagaagctattgcagactacagaatgggagaaaatgtttacaaactgcatctgacaaagatctaatccagaatctataaagaactcaaacaaatcaacaatgagaaaaacaaccccattaaaaactgggcaaaggccatgaatagacctttctcaaaagaatacatacatgtggcaataagcatatgaaaaaaatggttaaatatcgctaatcattaaggaaatgcaatcaaagccacaatgagataccatctcagacctgtctgaatgggtattatcagaaggggtattattaaaaaatcacaacatagatgctagtgaggctgcagagaaaagcaatacttatactatgtaataattcagccttgtggaagcactggcgattctcaagactaaagcatagctcaggcagcatccatctggtgttccctagaataacttccccaagaaactgttgttctgggctattccatacaaggcgcacacggagcccacgggccccaaaaatgggaccagggacagggccaaacacgcctcgataggggccaagaaaaaatatcctaggataagccaacaatgggaaac

SEQ ID NO: 501987 - DNA, 459 bp, Homo sapiens
  misc_feature (421)..(421): n is a, c, g, or t
cttacgtatggcatcccaggactatgggacgacaaggcatgtggatcacctgatatctgcagagcgtgaccagcctgacaaacacaccgccctggctctactaacattcaccgaattagcacaggtgtggagaggtgcgcctgctaatcaagctactgaggaccatgctgcaggataatctgtcagacctggaaggcagaagtagcagcgagctgagaccgatccactgtactgacagacaacgagctggactatgcctcactgctgtattcacggatgtcttcagcctatgctagctgtgaattttcgtctgatctatgacaccgagggtcgctctgctgacagtctgttacacctgaggagccacgtacatttgtgcaaggtgagaatgatctttgaggcacatatggagtctctgatntcgtgactcatgatgcccgcatgcgttcccggtcccct

SEQ ID NO: 501988 - DNA, 181 bp, Homo sapiens
cccccccccctttccctttttatgtcagtctgggggggtttttttttcttggggggcatggttggattataagtcattcccccccctctcccggcccccttttttttttggggggcctgatttgttttgctggggccccctgggggtgggggccctttttttaaggtttgccaaccgggga

SEQ ID NO: 501989 - DNA, 850 bp, Homo sapiens
  misc_feature (479)..(479): n is a, c, g, or t
gatagtcgcttcgagactggagctagacttggggacgaagtgagttgggccacacggtgtagccgctctgaaaattgtatgcaagtgagagcgtactaggaaaggtggacaggaagagaggcggcgattgcaagccatctcgtaacactcagcaccatacacagcgtcacactgtaataatcgacgattagattttgttgtgccagacatgcttaggctcctaataattgtgtagggctatcggaccttgggaagatggctcgttgttgaacactagaagtgcatcaagcagccatcctcgttcgatgttaagatcgcgacatgtactatacatagtaaggcgtcctatgcatctacgtgcataatagcgtgtatagtgcatctctccttacgaacaagtgggtgtatgcactcactgttcccatgactgagggttgtgctttccatggtcatatcctgtgagattttacattagaatngacttgggagggagtaacctaccgcgtaatctaatcgttggacccattaaatggcattggacctcgtaatgtaaacctatgcgtcttagtgtggcctttcggacagacagctgatacataaacacactatctgcttacaaaggactcctttcgcatagataagatacagaccataggagagacaatacaaataaagaggagtcggggggcaagcggccaactccaaaaagtagacgacatcaaatcggcctcatccccaaagggaaggcggggcgtcccgcaacaacggtcccctaataaacggaagccgtgagaaccccccccagtagggaaatttcccactggtgtcggtaacaccacaacagggcggg

SEQ ID NO: 501990 - DNA, 683 bp, Homo sapiens
ggaggagtgcggaacccgcgggagagatccccagggagacacttaagggaaattaaactgcagagtgcaagagatgcctcagtcaagtcagccaaaaacagcgcgggtcatccgccaagctccagagagtgacagagccccgatgacacggacgacctcgggtgctgtcacttccctggttcagggcctcccacaggctttgaattggaacggcgagtgcctcagaatttgcgatccatgtgttctgtcttgtcctgggaagttattcatcctggtggtcaggccactcggacaaaatggattcggatctactggacctgaatcccagaattattgctgcaattaagaaagccacacgctgaaatcgcgtacaaggaggttttacagcttttctggaccagacttgaagagacatgaccaatcctcgtccagtccccgaggtctggcagcttgctgagaacgggctccttacacttgcggggaagcagcatgcttacagcactgcagactgcaccagcagaaggagcggttccccacgcagcaccagtgcctgagcctgggctgccggtgtctggacgcgtctgtccgtggtggctgccctggacggtatcactgagctggcggacgcagctcggcagggaagacccagctggcgctgcatgtctgctggtgtgcagttcccg

SEQ ID NO: 501991 - DNA, 169 bp, Homo sapiens
  misc_feature (3)..(3): n is a, c, g, or t
tancgtagtaggatgtacgtatggattcgccagagcgctgaggtagtttacgaggtggaggcatgtctgttggcattgtttgagaacttgtccagctcgaggggaatgagaagcatctggaaccggagaatgtagtgaggggttggctggtgacattccaagcttgatg

SEQ ID NO: 501992 - DNA, 370 bp, Homo sapiens
gcatggcactccagccggggcgacaagagtgaaaccccatctcaaacaaacaaacaaccaaacaaactaaaaacaaaccgtagccttactctgggtaacgggtccaggggcatggcttggtgtggtttcttacaacctaccattatgaccgctaccaactactttcgggactaaccgtttacctacccgtgttctcctccccctactatacctaccacgtgtactaccgcgactacgtactttactcactacggtacactactactctacctgcccaacagcagacgacgccgtccgcctactggggcctttcctcgtacggtgacgacgacacacggacgggcagcacgccgggacgggacgcacagtg

SEQ ID NO: 501993 - DNA, 1054 bp, Homo sapiens
gctgtagttgatgggttagctggaatttcaaactgatcacctgtggtatgagagcaatgggtaactgaagctttatgggctcgggggacagtgtcacgtgcccacgtatgtttgtattcccatttatgtctcagttttgtttaacagttggctctaagttgaatgcagtcctagtgggaatctgcctcaggaagatgattgtagtttgtgtatacaggagatggtgccttctggcatagtagtgtagtccataaaaacgtatgcttcagaggcatttcttgcaggttgtgtaaatacagtagtgtttatctataaaacattctgaaggagcagatacttctgggaaaagggttactgtgaggactcaggtctacctgaggatgaaaaaagccccttgtgaaggggaattatgaggctctatcactgcagagaaccggcggacctcttatgcgagcatcagtctattgagataactttactatactcaattttctaatctataaatggccttgggtgtactgtgggccagacgggagtgagttttcatgacaagtggtattgaaatcttggaaatgtaactaactcagtattaggaaggccgttacatattgtgagaaaggtcgtaggacgttgagagtagtgtagaatttaaaatgagggtaggataagtcgtatcgaatctggtcgtatgacgttgaggtaagggtttagaagggagtggaaaggcagaaggaaatatgcccatgggagacaagggtacacggcacacagagggaagaataggacggacatgcctgatccaagggagttcaagtgaagggcgggaaggtaaaaacgggcagtataggccgagatgaaggagagaagggggcaccgtggaagaaacagggacggcactacgtgcagggaggcaccatagaggagaagaaagcaacaagagactacggaacacaggaggaagaataaagccacagaaggcatggggaaaccatgaaggcgacagggaagcacggagtaagagagcgggatggaaggagagaaaagaaacaggcca

SEQ ID NO: 501994 - DNA, 681 bp, Homo sapiens
  misc_feature (625)..(625): n is a, c, g, or t
  misc_feature (653)..(653): n is a, c, g, or t
  misc_feature (656)..(656): n is a, c, g, or t
ggaaacatgcagcatgtagtaatttatgacagcttctttcacttagcatgaggttttcaaagttcattgatgtggtagcatttgtcagtactctgtgcctttttatggctgaataatattttatcatatggatttaccacattttatcattttatttatccatcatcagttgattgacatttgagttgcttctactttttgagtattatcaataattctgttatgaacattcttgtacaattttttggtagacatttatcttcatatttcttggatatatacctaggagcagaattgctgcgtcagatggtaatgctgtttaaccttttcaggaactgtcagactgttctgaagtgggtacattattttacattccaaccagcagtgtatgagaattccagtttccccacatcctcatcaacagttgttattgtctgtcttttttattatattcatctgtaatgtgaagtgtttatctcattgtggttttgatttacatttccctgatggttgatgattttcaacatcttttcatatacttattaggcattatgtatcctctttggagaatgtctgttcagatcctttacctactttagaattggtttatctttttaatattganctggaatagtttttaaaaaatatatccnaanatacaagtctcttatcaagataata

SEQ ID NO: 501995 - DNA, 1267 bp, Homo sapiens
  misc_feature (1267)..(1267): n is a, c, g, or t
gcggagagattcgtatccctgctgcgtgggggtccctgtgagttccccgtgcccagaccagacccgcgtgggcgccctcagcagcccgcccgtcttgcactcggagagcggtcctggcagtgaatggcctggccagtgtgcaccctggttctgggcccctgcgccctggtgctggcaagatggccactgcccccagcagagactgtgctgcctctaggacaccatcggtggacctgaggaccagctttatccagtggactctaaccatttcccacccccttttggcccacactcacaacgaacaacacaccttcccacagtcttctacctctattacttggtctcgcccattgcccacaaatgccattccaaccaaacagaaataaaccaaaagtatcacaccaataacctataacactacagaatccaagggccatcaagctcaaagcaaatgaggttgtggatcatcaccataacagaggagaaagggaggaaggacaggaagcccaagagaacccagaaaggtaacacacaacacaaggagacgacacacagcgacacaagagacacagacaagaggccaccactacgcacacgtgacaattataagctgaaacaataataaccgacatataataacaattatacgtaatatcatcattcaccaacaaccacacatcctaaccatctccagtacccacacacacactaaacccaaaacaaatcctaacacaccccacacaaccacaaaaacaatcacaacactaccaaactcaaataccaactcacttctcaatcaacactatataatcacccaataacacatgcacaagaaacaaaaatacaatcttcacccactttacatacacccccatccgccagcatctaaccacctattcaccaatcttcatatgtacatcatgcgaataaataactcatgacaaatacaaactcaaaccaatagactataaatagcaccagcgccctacccaccacaccacactccaatctcactagtcattccttattcctctatacaccaccaacctcatcgatagtagacaacaatcacaccataatacacttccatctcataaaatatacttacactgaactaccgccatcaccctcaataccactctaactagatcacatcaatatctcttactagtattgacacagccacacatcacaccttacctacctccccacattctcatactcacctcatccacgtccaccatacatttaccactccacacgagtn

SEQ ID NO: 501996 - DNA, 947 bp, Homo sapiens
tcggccttggttttggtaaaggacccaggtatggctaatgtggcccaggcgggtctcaaatcccggggctccggcgtcagcctcccaaaatagcggggatggcgagcatttggaaccaccgcactcagcggctttttatataaaaagtagagatggggtcctctctcgtgttcacccaggcgtggaattgcaggggccaccatccgggctcacgtgcagcctcgaacctcccaggctcagtgcgatccttcccacctcgagcctctcaagcagccgggactacagggtgtgcatcaacgcacagaccagaccgcatttacatcactgcatctcgaggcaacacgggggcacctgggcggatgatccacccaagagagaggagacaccgaggggggcaccaaacaatgcgccacacagggcaaaccatcaaacccctcagggggcaccaacggtgaatctccaccgggccttgaagatgatccccaaagataaaggggggctacaaacggggggggtgaggccaacacaaacgccgggcatagtaggacggacactatagtagggaaacacaaggggggcatctcacacagtggttggcccccaggagcgggcccacgcaaaaacccgcgggcaccacaccgcaagaacgcctcccaacgagagggacaagccccaaaagggtgcggggaccacacaccgtggagcccgcgcagggggcacacccaaagccaccaaagagcgccaagtgtaggagcgggccccacacccgaggagaaagagactgccccagagaggataaaacggggaaaggagacggcccaacgtgacggcgccgcggctgtagagaacccccacaactctaaacgcaagtggccgaaacagcgcggggcaccaggggaaaagacaaagacaccacgctagcagacacacacaaacacggagaggtg

SEQ ID NO: 501997 - DNA, 245 bp, Homo sapiens
atccccggtctgggtacacagtttgcctagacaggctattccaaaaagtcatttgtttctttaattgttcagaaccatgttgtcagcatgaggcagtctggaacgaggggagggtaaagacaggagtctcccagtattactaacctggacagagcagagcattgccccgagagctgagagcctgagcaattgagcttcctttgattgggaggcagaagaaggatgccccagagtgaggaagcgag

SEQ ID NO: 501998 - DNA, 852 bp, Homo sapiens
  misc_feature (12)..(12): n is a, c, g, or t
  misc_feature (128)..(128): n is a, c, g, or t
  misc_feature (202)..(202): n is a, c, g, or t
  misc_feature (602)..(602): n is a, c, g, or t
ctccataatatnggccgccctcttcttaatagcccgcgggagtattattctccctctttggttgttttacgcctccctcgcaagacataggtgttttgtttttttctttctgcgcaacagaaagagantatttttctttgaagcgcgcacgttgttgtaacacacgctctcagacgcgctgttgtcgcgcccctttctctcnccctcacattttagtggagggggcacctctgggcgccccacaccactggcgtctctctccccccgcgttatattctctccctctaaggatagttctccacacgctctctctctgtagcacacactctcgctttgttttttcttctcggcctctacgggagggtgtttctcacttccccctcgtggggttcccccctcatggttgtgtatatatggtggagacccacccccgcgctcccccgcagtttatttgttctagcccctcgtctttgtattacccacttttttttctgggttgttctctatattatgtataccccgctctctctccacgccgctctctcgaggtgtcttgtctgaggtcttctccctctctacaccttttctggcgggggtatttnttcgggcggcacacatatttgttgttgaacaacaccgggtgtctccccgtagattctcaccgtccattatttggggcgcaacactttctcctccactattgtggttcgatcccgccccaccgtattatgtccccgttacactcgccccacaataccatttgggtctttcgaaccccccccccttttctgcccctttttaaaaatggttttatatttttttttttttccctttttttaggggggtttttta

SEQ ID NO: 501999 - DNA, 190 bp, Homo sapiens
gaatttagtaccatctctactaaataatacaaatttagcagagagcgttatggctacaccctgctgtttgcagctactcaggaggctgaggccggagctatcacttgaacccaggaagcagaggttgtggtgagccgagatcgtaccactgcatttaagcctggcatacatgagcgagactcctgttcac

SEQ ID NO: 502000 - DNA, 332 bp, Homo sapiens
gcctccctgggccacccaacacagacagtggtgttgccccgcattgggcccattgcccagcagaacctggctttgcagctggccgagaagttgggcagcctggtggagaacaacgaacgggtgtttgaccccaagcagggcccctacgggggatacttccgagaccagaaggacgggtaccgcaaaaacgagggctacatgcgccgcggtggttacccccagcagcagtttcagacggcctattgagctttccactttgtttcccgcctgggccatccaaccttgaagtcctaaaccacccctcagtcaataaaggtttgtttaaagttgga

SEQ ID NO: 502001 - DNA, 123 bp, Homo sapiens
ctcgcttgctcctcacgtcctagcttcatcaaacactggttcctggcactcctgtctgctgctgtcttcctagattctctgaatccacttctgtgtagcacctgggtcagttgtcaacttaat

SEQ ID NO: 502002 - DNA, 146 bp, Homo sapiens
atcactcgtcaaaagaggcaaacagcctggcaatatggtgaaacaccgtatctagtacaaatagaaaaatgagctgggcgtggtggcgggcacctataatcccgggtgagctcaggcaggctgaacgcacaagtaatcgctatgaa

SEQ ID NO: 502003 - DNA, 164 bp, Homo sapiens
  misc_feature (33)..(33): n is a, c, g, or t
tgagtatttgacaaattgtaaatgaacaccgangctgtcgctacttctttattcattgcgaacctgacaggactggacgcgaggacggggctttgtagaatgctttgctggtggtagctgttgttcctctcttgttttttcgagacgcctttttgtcaacataa

SEQ ID NO: 502004 - DNA, 956 bp, Homo sapiens
  misc_feature (383)..(383): n is a, c, g, or t
  misc_feature (387)..(387): n is a, c, g, or t
  misc_feature (478)..(478): n is a, c, g, or t
  misc_feature (555)..(555): n is a, c, g, or t
  misc_feature (938)..(938): n is a, c, g, or t
ctaactctctagcactaatgacttacctatctaatctgcccaccacaataaaaatgcagaattaatgttaaacatcactttgttcaaccagatcactctcctacttaagaaggtacacagactttcttctgccccatattttggttaaaatctccccgcttagttctcatagctgttagtccataaccttttgtcccccttcctccttgatgtacactccaggctttggccacctgacccttccccggccctatctcgtactctcccatgcctttccatctcttcttcattgggaaagcttaataattcaaccttcaaattccagctccacttctatctttccccacagagccttccaagatgatttcaccttcctttctacnactncagctactcagacagagaactacacggtttagtagcataaagctctttgtgtagtttcatctctccaaaaagaatgaaaacacttagcaancttgtgccttaaagctttctgtctccccctgagcacctaataggtacggcatattcatcagataaataatttaacangtattgattatctgtggtttcaaataatcgattatctgatgtcactcaaaccaatctaattcttatcagagattctgcaaatgataggaaaaatgcaagaggcattataaattagctataaaacagatatcccttattgacatattcctttcatactactcccacgtcatatacacatttttagttatccaggtagagctggtcagaaaaggtagccaaattatgttaccaaatggcaagtctttattccactgaggtacaggtcctcaaaattatacgaataacttgttttttttcggtggtgtctgtttctgttttttaacacggagtctcgctctgtcacccaagctgggatgccagctggggtgatctcgggtcacggncacctctggctccaggtt

SEQ ID NO: 502005 - DNA, 820 bp, Homo sapiens
  misc_feature (201)..(201): n is a, c, g, or t
  misc_feature (253)..(253): n is a, c, g, or t
  misc_feature (378)..(378): n is a, c, g, or t
  misc_feature (440)..(440): n is a, c, g, or t
  misc_feature (443)..(443): n is a, c, g, or t
  misc_feature (820)..(820): n is a, c, g, or t
ggaagtgaggatacttctggcgagcgccggttgctgtttcttctcaggctcagggaccggccgcggcccgtagggtgttttaactcaaatgggtgatgaaaaggactcttggaaagtgaaaactttagatgaaattcttcaggaaaagaaacgaaggaaggaacaagaggagaaagcagagataaaacgcttaaaaaatgnaagccatatttttttaagtaagtggttttcttaaaggagatttaatttcttngccctcatttttccattagaacaatacttcgatgaagttctttgtacttctaaatgtcgcaggtgagcccaaaatctattctaaaaattaacaaaaatattcaaatattcagttgacattaaagncagatttaacacactaaagctgtgtctagattgagcatacatggagaataaaatacgttgantgntaagtcattagcaaaactggactaatttttctcgtttcattattagtatattcataatactatctctaagtatttttaatatagtgggaactgcctgaaattaatataacctcttttacatctttcttggttgcatggtaatgtactcaggacacttttagtaattggggtagaggcctggcaaggactcttgtgctagattgtgctcattgggtgtcggagtcaggctcctggctcatttttgctccgtttgattccaatacggtggcaccgttggtttcctggggctgggctttgttgaggaccgggcggggccccccgggggaggcccccattttgcggcggggccccctggtcttcttttctttattcttacn

SEQ ID NO: 502006 - DNA, 816 bp, Homo sapiens
  misc_feature (197)..(197): n is a, c, g, or t
  misc_feature (249)..(249): n is a, c, g, or t
  misc_feature (374)..(374): n is a, c, g, or t
  misc_feature (436)..(436): n is a, c, g, or t
  misc_feature (439)..(439): n is a, c, g, or t
  misc_feature (816)..(816): n is a, c, g, or t
gaaatagcccagtgcccgggtcaggtggccttgttcgcgagcacatctcggagcatctccccggtctcaagtgttttaactcaaatgggtgatgaaaaggactcttggaaagtgaaaactttagatgaaattcttcaggaaaagaaacgaaggaaggaacaagaggagaaagcagagataaaacgcttaaaaaatgnaagccatatttttttaagtaagtggttttcttaaaggagatttaatttcttngccctcatttttccattagaacaatacttcgatgaagttctttgtacttctaaatgtcgcaggtgagcccaaaatctattctaaaaattaacaaaaatattcaaatattcagttgacattaaagncagatttaacacactaaagctgtgtctagattgagcatacatggagaataaaatacgttgantgntaagtcattagcaaaactggactaatttttctcgtttcattattagtatattcataatactatctctaagtatttttaatatagtgggaactgcctgaaattaatataacctcttttacatctttcttggttgcatggtaatgtactcaggacacttttagtaattggggtagaggcctggcaaggactcttgtgctagattgtgctcattgggtgtcggagtcaggctcctggctcatttttgctccgtttgattccaatacggtggcaccgttggtttcctggggctgggctttgttgaggaccgggcggggccccccgggggaggcccccattttgcggcggggccccctggtcttcttttctttattcttacn

SEQ ID NO: 502007 - DNA, 1090 bp, Homo sapiens
  misc_feature (316)..(316): n is a, c, g, or t
  misc_feature (430)..(430): n is a, c, g, or t
agcgggcgtggtctagctgcgcactgagtgctatgtgctacgcgctgggaatacgccacgctgggccattgagtctgtgcacaatgaagtacatcgagggtttattaccgccgggctgtccatgccaatcgactgcgctaacttgggcgaaagttccagtggaccgttgctgcgtagatcgttacggagacagggtgcgtcaatggtttaaggcccctatgacaatgggatgcgcagacaatgaaattacctaggagtgcatactaaagatcggtagcacagctatgaacgtgcccttttgaagcgtgtggccatnctgtcgtggacggaactgaaggcagtcattgtcgtcttaccagtagggtagtgaggctcagcttggaggcatacgaggaagacagttgatccagtttgacgagattgacagtancaagtggagtcccaaagactttgagatgacccggcaacaggttgagccaatgcaagtcttgcatcgcaaggaagccttgaatgacagttggataacacttggagctcaggaataaaaggtagggcaaccgtgaaagatgttagacacttgccatgcagtatgcttggcttaacccgcgttcaaaagaaggggtttactctgcacaatgggctgatgcccagcgcttcgtgtttgatagagcccaacaccttcataaggatgagcaccggagaaagactttacaagttagtgattggcggtacaacaccccactgagtccaaggttccctatggaacactccccactcaaacagtattttcggatccttcagagcaggggtttctagcaccttcggggaaggtactcaaaacacgccttatttcattttttttacacttgcgctaggacgttgttgtttgggaccctcgataggacttcacctttcctcgtgtgtcaagaaaaagttgattcgcctccgactcccgttatattcggggcatttccaaagcgctcacgtggtttccccaagagaatctactctttgcaattcccttcctttccggaggggccataccctacgagaaggaccaagacccaaggcattggaaagccaagtgatc

SEQ ID NO: 502008 - DNA, 358 bp, Homo sapiens
caagagtgaggatgcatgttcatgtactgggaaaggcagggctgggggaccactctggcttagttctcattataactcatgaaagtaagaggtcatgtttcatgaagcctgagagcttcacggaagctccagcctacctgggcaacctgtggtccatcttcctggaagccccgcccagctttctcccttgcgggaaacccgactgtgtcaggatgtttatccagattagttttctttgttaaagcacgttcttttgcagctttctaagaaaaggttttgcaggaggtaattttcggggtcttgtgcccctgttctgtccttggatcatttagccgggtatagcatgcaccattatgcc

SEQ ID NO: 502009 - DNA, 224 bp, Homo sapiens
ctgccttcctttgagctctgttgggccgcgggatcttagttttctttcgtctatttcccagctcattcttttcttctcgcacgtccttctaagggggggtgttgtggttttctgtctttgtttcgcttctgagaaagcattcgcctttcttcctctcccaacataacaatcgtggtaacagaatgcgactgctgatttaccgatgtatttaatgtaagtcaaaa

SEQ ID NO: 502010 - DNA, 277 bp, Homo sapiens
ctgaagtggtcttatgttttctgcctccagactctattttcctgcctcaatataatgggggagtctcttcaacaaattgtgttacaaaaactgaatatccatattcagaggaataaaactagacctctatctcttgccatctaaaaaaaattaaatcaaaacggattagagacaaatctaagacatcaaactatgaaactactacaaaaaacattggtgaaactctccaggaaattaaactgaacaaagatgtcttgagtaatacccacaagcacag

SEQ ID NO: 502011 - DNA, 423 bp, Homo sapiens
ggattaatgttggttgaaacacagcagctgtggagttcagtccaggcatgaagactacatctgcttccccaagtagggtgtcaggtcgcatgtttcagtcctccaccatcttgcgctgtgagcagcgctatacctgtgcgttgtctgaaagccttccgtatattctccagctaaatggtcgtttggtagcccttgcatttatcaaactagcatgaggccttctacctttgaatgctccgtgatagaccatttcagctagccacatttcgtatgtgtgagattcctaaagcctttctcctcgtttctttttctcccaactcctattttgtttggtatgtgaattccccttttgaaatgtatagtgaataggttgttgcactggtggcaattcctcatgtagcataataaaattaatttgaccca

SEQ ID NO: 502012 - DNA, 505 bp, Homo sapiens
agtcaatctagaggatcccgggggagacgggggtctcaaaaacaacacaacaaaaagacattccttaaatttagaaaagggagcccactggagaaatggagtaggcaaaagaaaaaatatctaagggtgtctaatggtcaagtactccactaaggctttctcccaaagccctacccttatccatttagggaagggctctcaaatcctccttctaaggtacacttccccgggggcatctggaacatccacatcgtggtctggcggggactggtttctgggggaggaatccttccagtcgggtcacactggagtctactcttcaggtacctcaggcaaaacgggatgggatgagaaaccaccattttcccttatttcttggctatattccatatatcggggagaaaacaaacctacctaattctctagcagggagtccttcagaaagttagtcggtaatcccaggcagtgtgggagggcagggggggcagatcacaaggtcaagaga

SEQ ID NO: 502013 - DNA, 147 bp, Homo sapiens
catcccgggaaagacgctatgatcctctccagtgggtacggatgactctgatacaagaatgcctgtgttcaaatcccaggtctacattatacagctgtgtggctttagcgccattaccttgacctctctgtgcctgggtttcctcat

SEQ ID NO: 502014 - DNA, 838 bp, Homo sapiens
  misc_feature (351)..(351): n is a, c, g, or t
  misc_feature (456)..(456): n is a, c, g, or t
  misc_feature (475)..(475): n is a, c, g, or t
  misc_feature (562)..(562): n is a, c, g, or t
  misc_feature (566)..(566): n is a, c, g, or t
  misc_feature (628)..(628): n is a, c, g, or t
cggcgaatacggtggggtatacagagaccagcagaatggccaccatgacgggtgggcctgagcttgacgatgctgtggcatatggatataccggatgaggtgcctcctgcaggacggatggatcttcatggtcctccttcaacggctattgtgccccagcgactgtgtacttttgatccctcatgcttggactgtcggattggatgctctcccgtatccgaatccaaatcgtagagaatacacatccaaacacgaagactagatagaacgggagatcgcaggaacgcgtacgctccttcggtcgctcattcgtgtgactagcgttgctcgtagagtgcggagcacatcatnggactcttcaatatgcacgtagtcagcacgcggtactcctcttcgtaccacaaaacattaacctgtgtcagtcagcatacagacgattgcactagcatgtagtcntgggagtcgtggccttgangtggcgctcatggtgcatcggtgctatggtgtcttgggcgtatgtgtctatgactgtgtaatttctccatgtcctggggtgtttccncaantagcgcacctatgagcatccctgtcgaggagaccgtgtggctaggtgtcgcacgtccctgtngcgggtgttttgtgctgtggagcaatccccacacaagagtgatagaaccgcgcaggaacgagagagcagtgttacgtgttgggcatgtcgggctggtcagctagcatgtcaactagatccagtaatatagccggaggagcgtccctagagtcccaaagtgagaccatcccttggtgcggtagtggtggataccatcggcccccaccataa

SEQ ID NO: 502015 - DNA, 133 bp, Homo sapiens
agtactcggcaccggttcgaggtgctgaaggcagctaagaacaagaaaaaaagaagccggcggggcgcgtgggggcctggggccaagagcgcagtcaggccgcgggccagaacaactccaacgcggcaggcaa

SEQ ID NO: 502016 - DNA, 265 bp, Homo sapiens
  misc_feature (39)..(39): n is a, c, g, or t
  misc_feature (47)..(47): n is a, c, g, or t
  misc_feature (52)..(53): n is a, c, g, or t
ggttacaaattacaacataaaaaaaaaagttgtatagtntaccaagngcagnnctcaggagggtaacgttcacactacaatatcaattgcaactcaacaagttctccagtcgccaaggagcttaattataatctagacactcatacgtctacagggaggatcaaggcagcctgagaagaaggaagcgcgtaatgtagaaagcaacagaaaaaaggaaacggaacttcttggttctttttctaaaaatgaatcagttccctttttc

SEQ ID NO: 502017 - DNA, 515 bp, Homo sapiens
gactcggtacatgtgcagaggaggcagacaaattcagcatgaagtgtgagaatcatatacgctactgacaatgatactgaaaaatacagtgacacatgagcaaatagcgaaggtacagaatcgctttagtattttgagcgcatcacttagaaatcactaatgtaactcaaaaaatttttggtgcaactaaacatagggcatctatcagaaagcaaggtatttcagttgccaaaacgtcgctgcatatactttttgacgcaatgtggatcacagattctagtgccagaacagtcaaatctcaccagtcggagacgagctcgttagtttaaaggaaaaatcaaagtcttcacagtgctctgatactgcacttcgaaatatatcaaaaacagtgacaaaaggggaatagaaataatagtaagcttgagaaaactactcctagcaaaagacaaatgtctgaagcatcacatgattgtaactggtgcagatagatacactatgagaagtccagtgcttta

SEQ ID NO: 502018 - DNA, 883 bp, Homo sapiens
  misc_feature (1)..(1): n is a, c, g, or t
  misc_feature (304)..(304): n is a, c, g, or t
  misc_feature (347)..(347): n is a, c, g, or t
  misc_feature (356)..(356): n is a, c, g, or t
  misc_feature (386)..(386): n is a, c, g, or t
  misc_feature (394)..(394): n is a, c, g, or t
  misc_feature (401)..(401): n is a, c, g, or t
  misc_feature (407)..(407): n is a, c, g, or t
  misc_feature (463)..(469): n is a, c, g, or t
  misc_feature (471)..(474): n is a, c, g, or t
  misc_feature (476)..(476): n is a, c, g, or t
  misc_feature (478)..(479): n is a, c, g, or t
  misc_feature (481)..(481): n is a, c, g, or t
  misc_feature (488)..(488): n is a, c, g, or t
  misc_feature (513)..(513): n is a, c, g, or t
  misc_feature (529)..(529): n is a, c, g, or t
  misc_feature (537)..(537): n is a, c, g, or t
  misc_feature (540)..(541): n is a, c, g, or t
  misc_feature (678)..(678): n is a, c, g, or t
  misc_feature (756)..(759): n is a, c, g, or t
  misc_feature (765)..(766): n is a, c, g, or t
  misc_feature (779)..(779): n is a, c, g, or t
  misc_feature (787)..(787): n is a, c, g, or t
  misc_feature (875)..(875): n is a, c, g, or t
nttggaaaagtcagcctcttacacaaggttttgtatctatacttttactctgtcaattacagtgggattttaaatgcattgaatataattcattgaatgtctatatctttctgcctcgatttaagtgatattaggttaaaaaaatatttacagttttcattctggtccaccttccctccttatccttatactgaatccatttctctacttttcaggtaagtgaaaggggtcacaaaatttttaggtttgtgtggaggggaaaaatgcatccagcaattctaagcacaacaattttctgtaaggncttctctgaaaaaagagaaggaattacttattaaaactaagcncacttagcnacttctttcccaatcctatctttattcgtntgcctggngccaaanttttcnggccctttttaatttgcaaaccttaaaaaaaaaaaaacaaaaaaacaaaacccccnnnnnnntnnnngngnnanacatagnactaagcgagagagcggatataaangggaccacggggaatnaaaggggnaannttccaggaaaaaaaaattccaatagcttcacagtttaactgaggttttggaaaaacttaagtgaattcagctgatgtttgaaatatctgtctacatttaattagatgtgttgtatttaccaaggaggcacaaatatntagttctgtagattttaatactaacttttccagtaagaaaaataataccaggtgatttcaaaaagggcagtgatctannnncccccnnaatgcatctttgnacaggggngcagaaatagctaatttaatgaaaacaaaccttaagcactttacttggcttctaataagcatcccaagaaaaggtacctgagaggggntgacaagt

SEQ ID NO: 502019 - DNA, 1460 bp, Homo sapiens
gcaaggtccagcctctcctgacctcatctacaaaatccccagagccccctggagccttggcctcccatggccagggatgtacctggctgcatggtgagggcaaggcatccaggagagccctggaaccagactgctagagacagaagaccgagctagaaagaaagaagggcaagagagaacgcaggtgcaacaacagggagaccgacaataaaagagaggaaccacaacacacaaaaacgagacgcgcaaaccacagaccaaggacaacaaaccacacagaaaagagcaaaaaaggcaacaagacagaaaacaaagaacaacacagaaaaaaaaacaaaaacaaaccagcgaccgaacaaacacacgcacaaaacaacgagaaagagaagaagaaagaaaaacaaatagcagaagaaaacaaccataggagcaagaggcaggcaacgcacgagaaaagagaggaagcaacaaaggaaccgaaggagagacgagaaaaaggagagaaacgaaaagagagcgcaccacgacagaacagaaaaagacaacaaaacgaagaaagaaggaagacagcgaaacaaacgaacaaaaggaagagaacaacacaaaacgagacgaagaagcagaagaacaaagaaacaggagcgaacgagaacaacaaacgaaaggcacagaaaaagacacagaagcaaagagaagcaacgaaaacaaaaggccagaaaaaccaacacaaaaggaggcaaacacacaacagagaaaagaagaacaaagcacgcgaagaaacgaacaagagagcaaggagaaaaggacacaacacaccggacaacaacagaccacaaaacaagcacaagacacacagaagcacccgaaaacagtagagagaccgcgcaaaacaaagcaaaaaccacaagagacacacaaagaacaaagagaaacacacaagcacaaaagccagaacacaagacagaacaaaagaaaaggagaagaccaccaagataagacgacagaaggacagaagagccacagagccacacaccacaagagcacagaaaccaacaaagaaggccgacagaggaacacagaaaaagacacaacagaagaacaaaacaagagaaggacagcaggacaccaaaacaccaacaagaccaacgaaagcagcaaaagagaagacgaaggggacaacaaaggcgaagaaacaaaaacacaacaagagaaaacacacacggacacggcaacgcacaaccacactcatcagaaaaagtgaaagaaaaacaaagaacgaacacagaaagaaacagtgacacagggaaaaagaagcaagagaagccaaaaacgagcacgcacggagcagcactacaaaacaaaaagaggagaaagagagaacgacaacaagagaaaaaacaagaaaagcaagagaaacaaaacgaaagacaggagacgacaacaacaggcaacgacaagcg

SEQ ID NO: 502020 - DNA, 386 bp, Homo sapiens
tattttggaaaatacagattttaaaaatcacacctcagtctcccaaagtgctgggattgtaggtgtgagccactatgcctggccgaaactgggtaatttataaagaaaaggaatttatttcctacagttctagatgctgagaaatgcagggtcaaggggccacatctgatgagtccttcttgctggtggggactctgccgagtcatgaggcagcgcagggtatcacatggtgagggcgtggagtgtcccttcaggagggcagactcagtgagcccaatcccaatcgtcttttaaagccctcgtctttcaatactgccaccatggggattaagtttcactgtgcgttttggacgggaccaacatttaaagcatagcactcatcttag

SEQ ID NO: 502021 - DNA, 1226 bp, Homo sapiens
aaggctggtacctgccccgggagttacgggcatctgcgcggctgtcctgggcgctctgcctgagctcggtggccgctggcagccgatgtcgaactgcgggagccgatgctggagctgccgcggcgcagtctggcctggcgaccaccagggcctgaggatgaagccaagtctgctgtgccggcccctgtcctgcttccttatgctgctagccctggcctctcgaccaccctgacatcaacaaccctttggcagtgcccacctggggaggagaccgaactggacccagtggcagggcacattatgcagtgccctgcacccaccaggaaccttactcagcatgcatggggctccagcccatgaacagcacaccatgccctgtatgcagcactatatggaggaggctggaggcccaggtgggcatggcaacatcgagatacactctgtggagactgctggccctgggtaggttatgggccttggaggtgtacaaacagcagtaccatgtcaagccaatgttatcctgaggcaaccctctggggataacatcaatggacatgtgactgacgttggcgagggcagcgagggaccccgcaaaaatggacacatgaaggggtggcacagacaggatgcacaacaaaaaagggatggttgaagacccacgaagaaagcaccttgcaagacaccggaaaaccacggggacaaacaaggaagggaccaccaaaaagggaaagaaaaaggagacggaaccaaaaaaacaagacgaagaacacaaatacagaccaaacacagacgccaggaaacatacgcagagagatacaaagagagaaacaagaaaagaaagacaaaacacaagaggggatacacaaaccaaccacacaaaaacacgcacaaggagaaacacaagacgagaaaaggaggcacaacacagaaacgaaagagaaaacaccaccacacataaaaacgaaggaacagaaaaaagaaaaaaaaaaaaaaacagaagcaaaaacagacaaaaaaagagaaaaagccaaacgaaaagaaaacaacaaaaagcgaggatcaagagaaaagacacagaaaccacaagaaaaagagaaaacgacgaaaacagaagagaaacacaagaaaaacaacacacaaaacaaaacaaaaaaacacaacaaacaccaaacaagcacgaacgaaaaaaaaaagaacacaaacaccagcacagcaaacacaaacga

SEQ ID NO: 502022 - DNA, 846 bp, Homo sapiens
agcggagcggaagtggctgcgtcgtcgacgctgggctttcgggtcccgcgcccagagatgggctccaaggcaaagaagcgcgtgctgctgcccacccgccagcgcccacgtgagcaactgagatgcgggtggcgcggcagagtcatttcaccatcctggccggaagggatggggtgtactatgttgtccaggctggtctctactctggggctcagtgtcctcccgctcggctccaaagtgctggattaccaggcgtgagcaccacactggtgcatcgtcatgtagaagaacccggtggcagctcactcgggactgcagggaaccctgcctttgggggcagtagtgaggggtgccagaggatgggtggtcagagagtgatgtgtgtgtctgttcaacccccattcccttcaggatgatggaggatgcggaggccccgggagagcagctctaccagcaaagcgggcctacgtggctgcaaccagcggctgaagcaggcgggcaacgtgctgaggcagaggtgtgagctcctgcagcgagccggcgaggacctggagcgggaggtggcccagatgaagccggcagcattaccggcagccgcagctgcctcctcaggctcgactctcggggcctgcaggcttgggcagcgcacaagtggcctgaccccaggctttccctgggggtcgtcggcccagaatggcattcacggggtccagcccacgtgcgtgttgacacacggcgccgcccatgaattgtgggctgcggttcatcgtcgtctcattcctgccgagttggtgggaccacccagttgtccggtcctggtgacctgcgggccactgggtcttgaga

SEQ ID NO: 502023 - DNA, 150 bp, Homo sapiens
attggcatagaaatcgtaatggccaagggcaatttctgtcaggacaagtgagaaaggactacctagagccaaccagatcctctgtaaactgtaagatcacaattttaccagttaaaaacagttccaccatatcctgcagacagcatatca

SEQ ID NO: 502024 - DNA, 724 bp, Homo sapiens
agctgttccagtgttaacgacggcagtgtatccgcgtactgatttacgtatacgattacatatggcataggaaaatccaagatttgagcattccacatgtataaattataccccaatagaaaaagtttatttaaatgagttttagattctctaggcattcaacaattttctggactttgatttgagaggaagatacatttcagaagtaccctgggaaaatggaaagttgttcaaagtataacaatgagtatttataaaaaggcaaataaactaaaagttctactacaattttgaacaattccaataaatgtctgaagaccccattcagaagtggttatggtgcaaatcccacatctccaaaaccaggaccgtcatctcttctgctactctccatttcttcctgccttctctatctccattaacattctgccattcattcacaaggactcaagccagaaatgtaggaacgtggactcctctccctcccccatcaaattatttccagctccagtttccatgaaatcaggcacctttccattcattctactgcagccaagctcccaccattttgggcttagcccacggtagctgcttcttactagtctctacctccttgctggactaacttctcaaattgagattagatcatatgactcctctgctttggatttttccagtgacttcctgtccctttttaggccaagatcccacttttttttttgag

SEQ ID NO: 502025 - DNA, 374 bp, Homo sapiens
gcgtcgacatgggcttgaaccattgtgcctggcctgagagttattatttaatgggcatggagttacgatttgggaagatgaaaaagttctgggccaggcgcagtggctcatgcctgtaatcccagcattttgggaggccaaggtgggtggatcacctgagaggtcaggagttcaagaacagcctggccaacatggtgaaaccccatctctactaaagtacaaaaattagcccggcgaggtggcaggtccctgtaatcccagctactcgggaagctgaggcaggagaatcgcttgaacctgggaggcggagatcacagtgagccaagatcgtgccactgcactccagcctgggcgacagagtaagactgagtctc

SEQ ID NO: 502026 - DNA, 178 bp, Homo sapiens
cgctgctgctgcggtcgcatctcacagctaccccgttccatttctcaccatggcccccttctccccttctggccttccacagttctccgtttgcacatcaatttgctcactcaacccacccaagcatctgcacctgcggcggtgtcagcccttgcacacgggtcccgcagctcgcaca

SEQ ID NO: 502027 - DNA, 534 bp, Homo sapiens
ttggataccaatgacccgatgaggtgctggagtatttatagccacttcggcgggggaaccttgtggaacccaccacttgaatgtactcccagtcgtaagcgcatagtatgattatcatacgttccactagtctgtctctcggctcacccctgaatgcccttcccaaggatccgtgcacagcatgtcctattggccaaacacacctcagcccctgtattgtctattgtccatgtctgacatggttatcgagacacccgcgttcagcagcatatcacatgcacatgggtatgtaccatatgcatctcatcgtgtgtgtactgtgatagctatgtagctcgattctgcgtctagcctcatggacgctcgttcgcacatttgctcccagccccagttgctgtcacatgtcgtcccagatgtccttgccatggccacagacatatctgccgtctcctggaaacgctggggctgcccttacagagagctggcagccccagcagtcgggcctgctttgcagaaaagactggacccaactcc

SEQ ID NO: 502028 - DNA, 454 bp, Homo sapiens
gacctagaggatcctatctgaggaggagctgaggaatactcccagtgtatccaagagaggcgcagatacagcaacacgggattcaagcccagagagtaaagagaatagagtgatctaaaaggaacattgaacataagggtgtttcaattgttcccaaaaggtaaaggaataaaactatatgaccagaacagctaattattacaaatgcagagtttaaaaggaccgaagttctaaaatgcgttaatgaaaaatgaaacacaaacagaaagttccagacaaaaagtgggataactccaaagacagatctgagcagcatctgcccttgagccccactgaccgagatggaaaccagaaacaggatgttgtgtgctgggagcagatacaggagtgtctagcagggcagctcactccaccatactcaggccactccaccatactcagatcctcctcagct

SEQ ID NO: 502029 - DNA, 693 bp, Homo sapiens
agcctcctataatcagtattgatatcctgcagtctctcatagaggaaggggggtaactccccttcacagagccagatgtatttaacctcctgtcttctgtgataaagtcctcctggtttccctccttgcctttctggccattctcagttacccttaaaatgttgggatttgggccaggcgcagtggctcaagcctgtaatcccagcactttgggaggccaaggtgggcagatcacctgaggtcaggagttctagaccagcctgagcaacatggagacaccccgtctctaccaaaaatataagaaactagccaggtgtggtggttgaggcctgtaatctcagccactggggaggctgaggcaggagaatcgtttgaaaccaggcggaggaggttgcagtgagcagagattgtgccactgcactccaccctgtgcgacggagcaagactctgtctcaataaaaaagttctgataacataatgtggaaagagctgcattaagctggatttccttcaatgcctgagggttttactttggtttcagtaaatgatacagagttaatggattaccaggatgtttctctctgacacatgattgcccatggtagatatgggaataggccagtttacattgatttacatgcttagatgatctctaaatggcaattggtggaagcctctgaatttcaatgtgga

SEQ ID NO: 502030 - DNA, 493 bp, Homo sapiens
taaataactaaccttgtgcctagaaatatagaagaattcatttactgtttaacagggcaaagtatacatcttgatagtggtcatccattagggattaaaaaaattgtaattttaaatggcatttctttgactgataattgtaaggaattgtcaatatgcacacagattagtgttttgtcttggggaagaaaccctgaagtctgcaagacagtatgaatttaattcaccttcactgtttaacttgcaaaaaccattgtgaatcaaaggttgctaaaaggtttttaaaggagagtaaagttgctcttggtagagctggctggcccagcgccacgtgagcacagtgcgtttaataactcgcccactaaggggcaggtggcttaactgtgagaacttctcagccttacaatcagcagctctgactctcctcggcatgcaaggcgctcgcacacactaaagggctgagcgcccagcactggccgactcctccatacag

SEQ ID NO: 502031 - DNA, 438 bp, Homo sapiens
ggtcgacggagacagtaaaaatatcggtggttgcaaagggttggagcctggggttagtgcagtgaaaatactctgcatgatactgtcatggtggatacatttcactatacatttgtgcaaacccgtaggatgaataacaccgagagcactaatataaactatgggctttgggggatatgatgtgtcagtatggcgtcatcagttgtaacgagtgcacccctctggtgcaggatgttgataatggtaaaggttatgcatctgtggggacaagtatatgaggtatctgtttaccttcctctccatgttgctgtgaacctaaaactgatcttgaaaaaaaaaatcttggccaggcgcagtggctcacgcctgtaatcctagcactttgggaggccaaggtgagctgatcacctgaggttgggagttcgagaccagcctgac

SEQ ID NO: 502032 - DNA, 273 bp, Homo sapiens
gttgacgtgtggaacacaattgttcatctgccaaactcatcaattgtcacttaaattggtgaattacacagtaagtaaattatatcccaataaagctgatttaacaaataaaagcaatgaaatatatgttgaagacttttatactggtgggaatgtttgataacttacccatccaagaaacagttccaatttgttagatttgaacacatcaacatgtaaatacttaaaaaaaaaaaatttcaaaagttatcggtggaaaggtaagtgtctctc

SEQ ID NO: 502033 - DNA, 501 bp, Homo sapiens
  misc_feature (149)..(149): n is a, c, g, or t
  misc_feature (153)..(153): n is a, c, g, or t
  misc_feature (170)..(170): n is a, c, g, or t
  misc_feature (203)..(203): n is a, c, g, or t
  misc_feature (256)..(256): n is a, c, g, or t
  misc_feature (258)..(258): n is a, c, g, or t
  misc_feature (262)..(262): n is a, c, g, or t
  misc_feature (268)..(268): n is a, c, g, or t
  misc_feature (279)..(279): n is a, c, g, or t
  misc_feature (300)..(300): n is a, c, g, or t
  misc_feature (304)..(304): n is a, c, g, or t
  misc_feature (321)..(321): n is a, c, g, or t
  misc_feature (325)..(325): n is a, c, g, or t
  misc_feature (359)..(359): n is a, c, g, or t
  misc_feature (362)..(362): n is a, c, g, or t
attgccctcgtcggagtgagtctgccaaaaaagaggtggttgctgaagtggtattagccccgcaggtagttgccgaagcagctaaaactgcgaagcggaagcgagagagtgagagtgaaagtgacgagactcctccagcagctcctcanttgntcaagaaggaaaagaanaagagtaagaaggacaagaaggccaaagctggnctggagagcggggccgacctggagatggggacagtgataccaccaagaagaanangaanaagaanaaagcaaagangtagaattggtttctgagtantgangccacttgaagctggangagnaactaaagccttattgagcatgttatagatcctntgntgctgatagagtggaacatagggtctaaacagggttgaagagttctggcacattttaaccttgtacctttgagaccttcggtgatggtacccttgaggttgaacatcccaattttgccccggttttggtatgggtggtg

SEQ ID NO: 502034 - DNA, 207 bp, Homo sapiens
  misc_feature (163)..(163): n is a, c, g, or t
ctaagtaatgctatataatggagaagaattgaaaatgcacaaaaaaattcatctacatatcagaactgcagtgaacttaacttatgtaactaaacagttagcaggtgccaaactatgagggtctgtatccacgtaacacaggtagttacaaaaacatgttatngtactgtgtaaagatgcatagtcatctcatttggttggctttgt

SEQ ID NO: 502035 - DNA, 901 bp, Homo sapiens
tgggagcgatctggagtgccgcccgcggccccgaagctcggctctcgagccgccggccggcctgtgccggtgtccgtagtgcgctgctgccctcggctggggccctatgtgtgtgctggcccgcccgaggccgcccgaggcttagtgcctccaccagacgccctggcctccgctcgggccatccacatgggtgcctcccgaatgagctgccgcagacgcccggccctgcatggtcagtgtaaagagattataaactcttccactgaaatgaaaaaacattttctaaaagctgcatattactccaagaaaaaaacccacaaattgtttatgacgtgttagtgccgtgaattgaagagaagaggtcatccagaaggctgtgatggagtttgatctccacccgaaggccaggattgaagataggcaagtcaaaatgcttctcagaactcttctgtgtgcacaatattatcaggctgggcaagaaaccagtgtaggcagatcatgttgcaaaagaggtgcttcttggaggccaagacccagcgtccctcaagagcggcctaggaagctcgcaagggacctggtgtgagcgcaagctctctgaagaaaccttgtttctgagttgcgcagaaacctcggatctgagaagaatcatggcgcctcgaccgtgggtgtggtaacctacagcggttgtagacaccccccctttgctttggtaacccccagtggctgttttgtggcgcacatgtgggggctgtgtgtgagccccccttactgctccggggacctggcagaggtgataggctgtgcacaacagacgcggctacttcacgagtaattaaccctgtgctgaaggtggctatcaccagtctgttcaaccggccagaaaaaaagcatcttgacccat

SEQ ID NO: 502036 - DNA, 679 bp, Homo sapiens
  misc_feature (679)..(679): n is a, c, g, or t
taaggttggagggggaatgcgggaaatggtaaggggtatggagacttattcatattaagtaagtgctaggggtgaggtggataggaagtttttctcataggagggtgtatgagtgggctcgtagcgcaatcgggggtatgcgtgtctcgaattcataaaaaacagggaggttaaaagtagggtctgggtgacaaaattatgtgtggtgtagaagtttcagggagaaaggtgcgctcaatatgatgtggtcccataggaagaaatgtgtaggtgggtagaggggtgtatatctataaataagtggtgggtgatatcacggcatattgaacaaactagggacgaaagagggaccgtggcaggcgcatactccccaatgttgagaaacgccgtggcaccacctacctctcgggaaactcacacctttgaggcaaacagggacaacacacagcggggatacacggctggcgatcacaccgtgcgcccgcgtgttcgagaaccaactacaacctccacacaccacaacgggcgcccaacaggacgcacccatcagacgcggaccaaagcgaagcataacacacaacaagaggagccaccaaagactgcacgacgacgaaacaacaggagcagcgacacaagagacaacacagcgaagcacacacaaacacacaaagcaagagan

SEQ ID NO: 502037 - DNA, 510 bp, Homo sapiens
acgtactccggggtagtcagggacatgatgctatccggcttaggagcatggagtcctatcgtgtagtcctgtccccacttacaccggaggatcacatgcccgaacaggaaacaaataataatgaccccattaatagttccggacaacagacaactcttttaagttaggtcgtgtagagaaatccacgggtcacaactttattcccaaaatggtgctttatttatttacagcaagaactaagactacttcttatccgtgaacaatgggcgtggaaggtgcttaggatgcgttggtgtctttggcaattatcactgctttttcttaatgcagatggtcagtaggacagaaggtaacattgatgacacgctcattggtggacatgcctccgctgaaggccccgagggcgaaggtaccgaaagcacagtaatcacaggtgtcgatatagtcatgaaccatcacctgcaggaaacaaggttcacaaaagaagcctaccacgcagtacaatcaaag

SEQ ID NO: 502038 - DNA, 691 bp, Homo sapiens
  misc_feature (544)..(544): n is a, c, g, or t
  misc_feature (571)..(571): n is a, c, g, or t
aaggaaggaaggtgagacgtgtgctaatgaagtcccctggcaaggcatattctgctaggtcttaagaaagaccctgtttgtcttgatgccctgatttccaggcccagtggagcatcagtggcacctctggctctgtagctggcctactccatctgccctgcctgaagagtcgagctttgaggtcggagtcatccaacgcaggcagccatctgtgagagactacaacacagctgtgcagggcagcttttaaacaggtagcgacagtcttgactacatgctcccacccacgccctatcccagctgtactctctgagtctgacattgaaggggcagccatggcggatcctgcctgtacttccagcactatgcaaggccagcgtgaatggatcactgtaggacagcagttctctcgcctgagcagcctagaggaacctgatccttactcttccttcaattaatagctgcgcatgtgatgctagtagcgctaatggattggttacagcgttagagcctgtgatcccagctactcgttagtctagggcangagtatctcttgaacctggcatgtgangattgccttgagctgcaatgacacaattgacctacaggctgtgtgacatagccagaccatggtctaatatacggagagggactaagtagtaccctacagattgagtactgccaatgctct

SEQ ID NO: 502039 - DNA, 118 bp, Homo sapiens
catgatacgactcgagtgagtacctataagtacatgacaacacttctcaactccgcactagcctgcgtcagattaataacactgaaatgacgattaacagcccaatatctacaatcta

SEQ ID NO: 502040 - DNA, 374 bp, Homo sapiens
aaacaaattgattgggtagggccgtgtgcagtgctacattgcctgtcatctccgtacttcgaggactgcgatggctgggaggatcactgaagtccagtagttctagaccagcctgggcaacacagtgacatctgatctataccgcaccccgccccacaatatgtgtgtgtgtgtgtgtgtgtgtgtgtgtgtgtgtgtgtgtgtagagacagactcatgtagagccaggtgtgtgggcggcgcggtcttgaactccggggtctcaagcaagtgctctctctttggtctctcagagccagagattacgggcgtgaggtagtgtgcgctggaatatggggggagtgcattatcattccttctgtgagcgatgagtt

SEQ ID NO: 502041 - DNA, 319 bp, Homo sapiens
gaggatcgtggagctggtcatccaggcattagttcatgggactaacagagattattactccattactattaactatcgggaaaaatgaactgggaacagaagatgttgctaaatttgcataagaagagtgggatggaaggtttgacacttcaggactacagtgaacatggtaaacacaatgaatcagtggtaaaagagatgtgggaatcagccaagaattacaataaggctgtagaagaagaagataagatgacacctgaacagctggcaataaagaatgtgggcaagcaggaccccaaacgtcattgggaggaacatg

SEQ ID NO: 502042 - DNA, 85 bp, Homo sapiens
ccgcttttttttttttataccatcaggtatcatgaatttataatctgaaagaggacttaaaataataattaaaacttaaaaaaaa

SEQ ID NO: 502043 - DNA, 856 bp, Homo sapiens
tctcgtgttacttctggcgctgtaattcatggtcgctagtcctatcgctacgttgcgtcacggtgtcattgtatttggtggtgagtagtgtccgtgcctaactaactctcctcctctctgaaatgtgatttcctgttgcgtctctctttttctctcttttttgttagtagaatgcctctcgactccaaccatcctttactggctccagtttgccggaatatgtctgctgtccatgtcctgtcgtaagtctatgttctggataatcacccccaaagcccattcgtctgcgctagatccccttaatgatgctgtcatgcatccttcaaggtccagtcttgtgataagtgtgtcgcctcaagatggcctccagggccatgcctctcgtgatggatatgctaggtttttctctcatgggatcctcatagtgagccacgtcagttgtccccaaaatggtcgtgtctcaccaagagcccttctcctaaatggagaatgccctgcgttcgtgaggcccatcctggtgtgctggagcatgccatcactgcccgcacctggaagcgagatccttctgataagcacaactttggccagagaggcagaagatggtctgcaggcaactgcagtaagcggcgcctgcattcgctcggtggctttgagctacccgcatctgcgtcagtgccaggtccacaccaacatgcagcgtggagatctggctctctatagcatttctctgatacttccgctacttttaggcctggtctaaattccaagatagataacactcaagactacataaagtacgtgatctccagtactgacacactgttattttctagctgttatttgctatttggtacac

SEQ ID NO: 502044 - DNA, 134 bp, Homo sapiens
taaaggcaaaatatgcagcaagtttaatacctgaaggttaacataaatgacaacaggacacagatgcaatgctacagtcaaatgtggttggggatggaagggggcaaaagggaccctggattttattacaacaa

SEQ ID NO: 502045 - DNA, 259 bp, Homo sapiens
atcgtggtatcagagcaaacaaaacaaaacagaacaaaaaagggaggggggactggtcgaaatgaacgaaggtgggagcgagatcgaggaaaggggggagaatttttttttcttcttcccatttctttaaaaaaccaacacaagaaaacacacacacacaaccaacgtttgttcccgagtagaaacataaatagcggagaatcgaacactctgttcttctctcttccaaagaaaaaaaaaaacacgttcacgttacgga

SEQ ID NO: 502046 - DNA, 421 bp, Homo sapiens
gcctggtgtgattccgtcctgcgcggttgttctctggagcggctgttcttttatctccgtccagccttctctcctacctaagtgctgtgcctgcaccctgatggaagattcgatggacatggactattgagccccctgaggccccagaactatcttttcggttgtgaactaaaggccgacaaagattatcactttaaggtggactaatgctgacccatgagcaccagttatctttaagaacggtcagttcagcgggctggtgcaaaggatgagttgcaccatggttgaagcagaggcaatgaattacgaaggcagtccaattcaaacgtaacactggcaacctttgccacttgtctgtacagccaagggttcccctgtgggggctttgacattaacaccaccaggtggtcttcaaggtctg

SEQ ID NO: 502047 - DNA, 1132 bp, Homo sapiens
ctgtcagtgtcactgacggcagcgtgctgctctgggtggaagctcctctttcacctggcccggacagagggagaggaggcttccaccagagaggagccgggaaggtttcaaagggcacaggaaccaggtgatttgcctgtcagagtccactgaggcagtgtgctgtctcaggctccacgacgagacgtgcgccttgggacgtgcagagccagcagtgccataccggaccgggcgcccacgacaggcaccctgtcaccaatgcccgccatccatgcaggacgccacgattagacaatgctgcagcatcagacatcacagggcaccagccgtgccgatgcaccaaattcaacaaagccaccactgcgggcgccgagccacgccgaccgagcacgcgccaagaggcgcctcacatctgcgccctgcggcctaccacccagcaagggacatcggaaaccacaccgcataccatgtgaacccgcgccgcgcagccagccaggcacggccggtaccgggtgccaacacacccgctgggaccacacgacgccgatgacctcgcgaccgaccacgacacccaggacgccgcgccacaagcgcggcaccgcagcgcagtgacagcatcgaacggtacgcacacccacgcaccacacaccccacacccggcaccaccgcgcaccgaccccctacccagacggcatacatcagcagccgcgtccgcgccaagacacagagcacgcaccaacccgggcaccgaccgcgcacagggcgacgccccacgcgctccacaagacacagcacgcacccagagcgatgatgcccacacacaagagcaacgctagcccactctccccagcaccatggtcacgcgactggacgaaaacacaaccatcaccgaaacccaccaagaaacacacgacgaccacccacacacaccgtctcaccacgacaccaccacagacgggtacacaggctcaaactgccgaccggtcactcctatcagtcgccaacagacccaccactgacccacagcccagaacaccgcacccaaccccgctaaccacacacagctcaacaacagccgaacacgaggcacccaacaacacacaccacacaacccaagacacccaaagcacag

SEQ ID NO: 502048 - DNA, 467 bp, Homo sapiens
  misc_feature (25)..(25): n is a, c, g, or t
gcatcaaataatgtaaaagtaaaanactgcatccaaaggacagcagcttcaaagattaaaggaacatcagcccacacagatgagaaaaagccagtgcaagaacaatggcaactcaaaaacccagtgtcttcttacctcaaaacaatcacactggctccccagcaatgatacttaaccaggccaaaatggctaaaatgacagacatagaattcagaatctggatagccatagagatcatcaagattcaggagaaagttgaaatgtaatccaaggaatccagtaaaatgagacaagagctgaaaaatgaaatagtcattttatgaaagaaccaaaattatctgatagagctgaaaaactcactagaaggatttcataatacaatgggaagtattaacagcagaatagaccaagctgaggaaagaatctcagagcttggagaccaattcttctaaacagctcagtcagac

SEQ ID NO: 502049 - DNA, 322 bp, Homo sapiens
  misc_feature (85)..(85): n is a, c, g, or t
ccccccccctttaaaaaaaaacccggggggtggggcaagggggtttccgccctaaaaccccgccggagaaaaaaggttttttgancggggggaatttccaattaaaaatttccccccggcattaaagaaattcccccccggggaaatccctttggctttcaaatttatttaaaaaaatgagccgggccaaagcccaatgcaaaaggcaggcctttataaaaggggccccttttgcccccagcccaaaaaattatgggaaaattgggggaactgagggaaaattcaaaggggggtttgaaatgggaaccaaggagaattttta

SEQ ID NO: 502050 - DNA, 143 bp, Homo sapiens
ccagagtcaaacagtgcaatcctaccagcagtatggtagagtcatgtttctccacatcttcaccaacatttattgttcatcctttttatttagtcagcctggtaagaccaatgatgctgagcatcttttcatgtgcttatcag

SEQ ID NO: 502051 - DNA, 1116 bp, Homo sapiens
cgcctttctcactgtagatggatgtgggtgtgggattcgcaggagtctatcctatcttcgggtttggattaagttcctaacgccacttgcacaaactaggggtttgggcgtcggctagtgtttttgttatgtgtttgtcttctccagtggtgtgggcaattaaagtaattaacctttctaagaggcaaccccgacccagtgcgacaagtaatagagtgtggttcggcattgggtggaggacgagttcccaatcaccatttcagttctattagcgcaagttacgtatatttgtcataaacagtggtgctcaggaatacgtggtgccatacgaagtctcatttattctcctcattgtgaaatttaccggctcgtgcagtggggaccagacctaaggaaaagcaaacagtgggtgttagaaaaagaggatttaaccgtgtggggagtctaggaaagtgcgccagcgttaactcatgtgccaagtgtgggtgtgtgacgaaaaagttttattagtgaaaataagcccaaagaggggagagtgtgaggaaggaagtgggggaacatttttcttgaggggacattgtgtgggtggacgagaaacattctgtggaagacacaagaggaagaaggcctttgtgtgaggagtgcgttggttccaaaagaggaaaaagtgggaagaagtttatacagaggaggtcgtcgcgaaagctactgtggacggtgctacgcggactggggcgccagacaagcaccgttgttgacaaaacccgtggagcaggcgggcggaacaaaaacaaacggggcgccgaacgctacaccatgtgaaaaagactaccttgtggatacaacggggacaaggattttggtggaagaccatttcgtaactcctatatcaaacaacgaaaagtttatccacaagggggacaaacttccgacgttggggaccagcccatcttactggaccgccagcaaggtcgtgccctgtttggaagccacaccgcccaatgtcctaaacaatgtgttgtggcccatttcaccagacaacctgtgggaggaggagatttgagatggaccagctggagggcaggtgtcaacgccgcgcgcgtgggcaatataccc

SEQ ID NO: 502052 - DNA, 258 bp, Homo sapiens
ggggcatggcagggtccccgtggacgtggccgcgcagttccggcgtgtgcggagaggagtgagcgtgaaggtctcccggcctgcagcagctgcgaactctgcgccgggaagttctctggcgggggatgggagggcggtttacggcgtttggggtaggtttagtcgcgtctaagatccacacgtcatctttcgcctccgaagttcgagggtaactttcgttccctcctggccttcgcgacaccctcgagtcggacggag

SEQ ID NO: 502053 - DNA, 130 bp, Homo sapiens
ttgctgtctcatatgaaagtctcaagggtggcagaattggtcagatttttccattttcctgtatttccattttaacactgacagtcaagttgcctaaagtgtttgaacaaatactgacatgtaaagggga

SEQ ID NO: 502054 - DNA, 1181 bp, Homo sapiens
  misc_feature (439)..(439): n is a, c, g, or t
  misc_feature (494)..(494): n is a, c, g, or t
  misc_feature (567)..(567): n is a, c, g, or t
  misc_feature (576)..(576): n is a, c, g, or t
cgcagtgtcctatgcttgtgatcccagtactttgggaggccgaggcaagtggatcacaaagtcaggagttcgagaccagcctggccaatatggtgaaaccccatctctcctaaaaatacaaaaattagccaggtgtggcggcgggcgcctgcagtcccagctacttgggaggctgaggcagaagaatcgcttgaacccgggaggcggaggttgcagtgagctaagatcgcaccactgcactccagcctgggagacagagcaagactccatctcaaaaaataataataataataaaataaaaattaaattaaaaaataaagcaagctacagaacagtctgtatatgacctttttttcaacagacacagatttatacatgcccccataaaatatctgggaagtctcggccacctgatatcagacggacttgcacctgttgntttatatgcctctgtattaattgcttccctcgacacatgcaccatatactacttntaataaaatatattttaaagtactctttagaatgaccattaagaaaaaacaaaaaacaaggatgggaacatgnaaagaacantagaagcaaaaacagtaacagaaaagacaagaagaaagtaaagaaagagaagagggagggaaggctgaggccatacataagaaaatttacaacagaaagaagctgaacaaggacgttcaatggacttacgaacctttaaaaccagaggaccccaccaattatagcagatttaacttgcacaggtaacacaagcccgaaaagaagcacgcttaacacaggtttaacggaagttaagtggttctaaaagcatatccaaaggcagaaccggttggtccaaggcttcacttgaatcccagcatttggaggccaagtggccaatcccccgagttagagttcggacaacctggcaacattgtgaacctcgtttattaatcacaaattgacacggttgtggggccctgaaccccctttgggaggttagctctggaattttggccggcagacctgttccgggctcttttccctgcttcaatgggctcaaggggagtcttccaaatcaccatcaccgtgggcgtctgcctatcttgcttcgccttcatctgcgcatctctctctgccaatgtctatcggctccagtgccctctactcctgtcccttctcctccc

SEQ ID NO: 502055 - DNA, 231 bp, Homo sapiens
tatcctcccatgatggggggagctactgtaatactatgtaaattggagaaaccacaatactcatcacgaggatagactatagtacacatgatgaggtattaagtatcattgaaaaagagagagtcctacatgtccgcatggaaggatctcaggagacactgttaaagtttggggaaaattgaaagacaatacctgtatacatatgatactagtgatgtaaatcacatcaca

SEQ ID NO: 502056 - DNA, 1368 bp, Homo sapiens
  misc_feature (1172)..(1172): n is a, c, g, or t
  misc_feature (1234)..(1234): n is a, c, g, or t
ggactagacagtgcccatcgggggtggcgggtcgcgcggcctcatacggagcctgggagagatttctctgagagatgtgtgtaacagtaggcacatgtcctcgtgactccgtggacatcggctggcgtgacaggaatgtctcgcaggataaaacgcgagtattgggcctattgcccatggttcgaagcagtaggaaccgtgacataccgccatacgacttgctacgagaataagaagctttatctcagcttgtctgagtcaggcttaacgtctgagtaccgggtaagaaggcaatcagcgacagccgtatgatataccgacagagggtaaaggggctcgtagctctagtcgtatgtggatgattagctcggttcaaatcctgcatacagtgcgtaggcaccaggatggactaccttcttagaggggcatcccgagagatacttcgtaagcgggatgacaggtacatcgcttggggcacttgagtcgagcggaaaccgatggacaattgcaacatcatttcgatatgcacagcgattggaatgagttgggtcgacccctggaggagcccacaccgtggccaatgaatggcatggggaaagcgctgggctcgaggaggcgtttgtggccatcttcgggttccgtggaacacattagtcgcgcgcgccgagggaaaaattgttggacccttcaatagaggcccgaatcagtgcgggaaggaggccacctaaaaacgggatcttcccgaagttcgatccaagacccatttaatcgggggaaccataagtaggtatgcccctaaaggagtgattgtggctgttagtggggccacatttttagcgaaggctgtggtttccaccagaggggaacgtggaaacggaaagagcccgatggttgcgataaccaatgcctatgtggcggtggtctcctaatacaggggtagggtttgcaccaagaacattattccgttagcggcggcgcccaactatgtaccacaggccgtatggcgccacacaacctcccggttacctcctcacgtgccaagattccataggcgcgtgtgactcggcgacacttaagggggggagaacttaaacccagggcgttggggtggataccgacaagatggcctacatttgggggcgaaaagcccccatgtgggggtgctataaggntcctaggtgcggacacagaagcccctccggccaagatgaagacccaattatgtgccacaagnatttcttgtggcgcccagagtcagacggcaaagatgggcgttaggcttcgcataggacaacttctgaccctggggggtgggaaccatgaggttccaatactttctgccacacgccattttgcgcacatttcacc

SEQ ID NO: 502057 - DNA, 123 bp, Homo sapiens
actggacaggcggattaagaaggctggggagaaagaagagggtggcagctctggtgcagcgccagagcagggagcaggtgaagagtggctggacttggcttgccccacccccacctccaggcc

SEQ ID NO: 502058 - DNA, 336 bp, Homo sapiens
catagctgatactggggattgtcaccgtgtctagctagttgatacagagaaatgaggcatgtgcatagtggcgggcgcttgttagtcgcagctacttggtaggctgaggcagaagaatggcgtgaacccgggaggcggagattgcagtgagccgagactgcgccactgacatgccagccggggcaacagagcgagactccatcgtcaaaaaaaaaagaatcgaaccgtgtggtgcaggaacaggatccgtgtgccctatataatttctcgtgattcacaaactctaagacgggttaactgtggagcagtggaaaaactcttggacttttgcaaacc

SEQ ID NO: 502059 - DNA, 841 bp, Homo sapiens
  misc_feature (333)..(333): n is a, c, g, or t
gctggggaagactgtcgcggaaaaagttgggggtcgcagagacgagggcgttggagggtggttggggagagaggcgcggttttcccaggaggttgtggcgtggtcccccccgggtgttccggtccggtgtgtcgaaaagtcccgggggggcactttttcgaggggcccccccgtgaggcgcctgtgtcatgtccgcgggtcgcagcagcaccaatggttggggctacaccgacgctgcccgtcatgcggcccgcgccagtgtgtggcgcggcctcatggctgcggcgcccggggtttggataatctcgcggcgccggcgtggacacagacgcngtgtggggaccaaagagacttgtgatgggtaatcccccagccaattatggggccctgcacacgcaaggagagcctctgtgaaaaaaaagtgccatagggccacccgccgttcataatcccccgtgcaagacaaccctcgccaaattataaaagtcccccaacaccctttcgggccccactgtgtttccccgacccccctacgattcctgttggggccagcttaataacagcagttctggcttataagccccctgccaataacacactgctggcaatccctcccccgtgtttacactcgacacaatgcactcgcgtctttttaccaaccggcgtcacctttgctcacacattaaacccacgattccttcctcatatgagagacccccctttccctgggcgacgcacaccattcctcccttctcgaccggcgggggaacaagcagttcaatctcgagcacagttacgtgccccccccaaaaaaacaaaaccccccgaaataaacaaaaca

SEQ ID NO: 502060 - DNA, 827 bp, Homo sapiens
ctaaagctgatagtggaagtatgtacctcatgggtagaagttgaaaagatgaaatgaggagagaatgtaagacagcttgctattgacaagtctagctcacttccagtcatagagccctcctatagaaagtaacaagaaaaacaatagtacataagaacattgttttggaccgtcccatcggagcctacctagtaatatggtcttctctagaacacggactgcgttattgcggagcgtgggccataatgccggatggagacaaggcaataaggagagcaacatagagaggggcgaaccacggatagaggagagaaacctcggaggccaaagaatcgacaagggagagtagagaacgacatcagacacagcgacgaaagaaaaaccagccagccgggtgccagcaaaaagccgcatccagctgaactcgaaaaggaaccaaattcacacgacagagaagagcaaaacgccgcgaagtacaaacattacaccagtggaagcgacacaaactgagacatgggacactaacgatagtcacgcaaaaggcccattaaagcatttccaaggaaatgacataaccctcgaaccctagcaggggtacaccaggaaaacgataaaagggccagacaacatgcggcacacacaaacaaaggagaaatagagaaccgcaaccaaggagcaccacacggcgaagacccaaaactacacacgtagcgacgaagacgccagcatacgggagcaaaaccacgcgcgcccggagagcacgacgaaaatcacagaaaccaaaaggcctcacaatacaacaaccaaacacaacggcagggcacaca

SEQ ID NO: 502061 - DNA, 259 bp, Homo sapiens
cttatatgattggaatataaattgtgatttgggatggctttacatcttgcctaccattgcatacacattggggtttcttcaaaatgtgtgtatcatacttctttagcgaggggggttgttttcttctgtttattttctgatactcctacaggagccaaatttgtaattaagagacacttaattttgttaatcctgtctgggacacttaagtaacatctaaagcattattgctttagaatgctctaataatatttcctgt

SEQ ID NO: 502062 - DNA, 865 bp, Homo sapiens
atctccccaaagtagcatagccagtttccagatgggccacagactggggaggagaatcagtggcccagccagaagttacagggtgctgagggttgaggtgagagtgcacctctgctcttgttgggagtgggtggcttgcttggaaataggcccagggtgcgtctgccagcctccggcctctccctcctgagttgccttcttgttggtggcttttcttcttgaacccacctgtgtaaatgagtgttttcagattacacgtgggtttccccttttgattctgtaaatatgtcccagagagaattcgtggtgctgagggcaattctgtcttgtgagtgaatgaaggcctggacattcagcctgtgagagtctgaggcttttctgaacgggatgtaggtgacgccttcgtatgcggtctcagaccataagtgtgtactacacagaacgctgtgtctctctaagttctaggtcattgctgcttgaggactgtctctggtaacactgccatgggtttgactacggtggctgctgtgctgctttggcagcaaagggggtgcatttcagggctggtgggccaccacgcgatgcatgatgaagtatctgtggctcatggccttctagggactggctcccgttgcaacagggtgcccacgctggagctcttaacccaatcttgcctgcaggggagtggaaaggggtgggcccctactttgttcaacccaataaccacttatttaccaaattacagcttacgccaggaatacagccatggaccttaagaggagaccggttgcagacgtccacgacctactagcacttggcacaatgcttgatagaacctccacacattactcgcggcccaacgcga

SEQ ID NO: 502063 - DNA, 273 bp, Homo sapiens
gggccccttttggcccggtgttagccccaggcattttccccccgccccttccggggggccaaccagggggtgggcaaacgtgggggccccttaacccaaatgccctttttaccagggagctgggccggcctttggcaggccccccccttactttttttgcccggcttaggttgtggggggggcctcctggggggccccattcccccagctttgggttttatgttttttttttttttggggccgccagtgcccccattaagggtccgaagttta

SEQ ID NO: 502064 - DNA, 363 bp, Homo sapiens
aaccatacatgtctgatgacattatttggcattctcactggacagcacctttcaacattaagaaatagtggccgggcatggtggctcatgcctgtaaccccagcactttgggagaccaaggcaggtggatcacctgaggtcagaagttcaagaccagcctggtcaacatggtgaaaccctgtctctactaaatatacaaaaattagccaggcatggtggcaagcgcctgtaatcccagctactcgggaggctgaggcaggagaattgcttaaagccaggaggtggaggttgcagtgagcctagacagtgccactgcactccagcgtgggtgacagagcgagactctgtcatcagacaatgtat

SEQ ID NO: 502065 - DNA, 1004 bp, Homo sapiens
ctcctagtcctcattgtacccattctaatcgcaatggcattcctactgcttaccgagatcgaaactattctaggctatatacaactacgcaaaggccccaatcgattgtagagcccgctacgaggctactactacaccctatccgctgacttccatagaacactcttgcaccaatagagcccctaatacacccgacacatctaccatcatcctctacatcatcgccccgatcttaattctcaccatccgttcttctacaaattaacccccctcgacccatagccaaccgccctgatcgatcatcgactctagcgcctctcgtattcatatctacatctagtctctgagccatacgcgattcaactccatcgctcgtattcagtgttaacatcaatgtccccttaggtgcagctcaaagccctggaagcactaacgaatgccactcgtctccgttctatgtcacgccaactgatgattgctacatcatcgagaaaatttccttgactaactggagcgtgccatgtgtcctcgctacttgcaactccgatctcgatcatctggtcaggaatgctcgcatgatcattcggtgacgttctatcgaagcattgcagccctaatcttatgagccctgcaaaaactagccatcccgaggcccctgaacgctctctgaacgagcagaactgcgattcaggatgccaaacactgagaggtacactagtccaagtaagggccgcctggccggcccatccctgaattgcttcatacgtcagactactacatcttccttataaagatagtccttcaccactagatgctgactacaacgtctttgccttctaatccataaaaccccacaaataattcgctctaaccaaacataccccgtactaacacttaacaactcccaaacgcataaccctcaacctctttaaaatctcactccaataaaacctcctcccaataaccctacccacaaaaaaaacccacaaaaacaccactcacct

SEQ ID NO: 502066 - DNA, 120 bp, Homo sapiens
gatgccgcgctggcgcgcctggcaagcgccagtcgtccggccagatgcgcgcgccgatccgcaccaaggccaactttctttaaggaaaagccatgtccgccgcatccaactacaccgaga

SEQ ID NO: 502067 - DNA, 162 bp, Homo sapiens
cagctacaagtagggctaaaaactggcaagtggcattacactaacccctccaatggagtttggcttggatggaatgaaacaatgacctcactcctgttgcttagtgaggagctacctgtctattcttgctgcccatgttcataagtccctgaaatgaaatgc

SEQ ID NO: 502068 - DNA, 948 bp, Homo sapiens
tgctgctctgctcttccttcgctcggttgtcttcgtcgtgttaggttcttttcctgcggatcgacgctcaatctctcttttcttgtctctctcttctctctctttttggttgtgcgcgtgtggtgcttccctcactcacgtatgtgcccaccttctgacgtcttttgtcctctttgtttctctcatcgtcttcgtctttctgtctgtgcttttcctttccttgtcttcctccggctccagctcgttatcatagaacgacacgctccatctccctctctcttggttctcttggcgcgacgctctcgtcccacacgcgcgtgtgtgttcttttccttcttccttattgtgtttcgctgctctctgcctaggtacgctcattctttgtcactctctctttctcacgccatctctcgcgcgggtcttcttttttcttcctcggattgcgcggttgttgtccttcactctctcgcgattatatacatggacactctcctctctctctttttgtgggtctggcggtctcttttttctctctcgtgcgaggcgtgccctcacccccgccccgcgctatttgtcttttctgtttcttgggtgtgtcgtccccccccgcggggtggcttctgtcttgttttgttcttttgttggtgcgcccgcgcgcagacgttctctctccactcctcgctgcgttgcgtcgtcacggtgccgcccgccccgcccgtcgcggagcttggttgtgtgcatggctgtcctttcttctttttttcttctagtgacgtgttgttcttttgtattagcatgaggttctttcttcttgctggcgccgcccaccaccctccgcgcttactgctactaccatgcatctaataaccagaggactgagcgccgcctccccctcccccctcccccccccccccctctctttttcatgttttctctctctctctaaca

SEQ ID NO: 502069 - DNA, 352 bp, Homo sapiens
gcgtcgacaaacaccatctctgggactcatgatcatgtctgcaggctttggtcattgcctgggcatcctgaagcctccttagcagggtgagggggtagaatcaggccggttggacagagccttcctaagataactgctttggaacaactgatgagcctccagttacaaaaccctgcttgagttctccactgtaacttccccaagcaccaagctgcctgtccctccttcctccagcaaaggttctgacatctgcagaccccagggatatgcacaccatcaaacagcctgctctgtcctctgcaaaccaccatcaccctgtcacctcatcaggtgcagccaccagccatcccca

SEQ ID NO: 502070 - DNA, 180 bp, Homo sapiens
  misc_feature (117)..(117): n is a, c, g, or t
  misc_feature (126)..(126): n is a, c, g, or t
aggcaggcagctgcaggtgtgagctgcagttcccataatctgggcacaccccaggcgcagctagagactgagtagaggaggtggctcgcaggctagccgggaagcaggagcagaccncgtgctgtngaacgatgagttggcgctgtctggctcttccacatctagcttcttggtcatggt

SEQ ID NO: 502071 - DNA, 120 bp, Homo sapiens
ccctgtgatgtgaagagggtgttgagatgttgatgtgggtaggtttgcggaagggtagggagtgggtgtgggaagttgtggagggtggaaggtgtgaggatgatgtagtgggtgatgtgg

SEQ ID NO: 502072 - DNA, 132 bp, Homo sapiens
ggggcagacttgcactgaatcttcaatcccagtcatttccagtaaaggacatcacaggtaaactgaaggaccctgctgaactttcagtagtcctgccgagtctgttctaggcttataccagaatggccatct

SEQ ID NO: 502073 - DNA, 249 bp, Homo sapiens
ccacaaccctggacaacatcccacaaatcagtacataggactaagtgcccagttatgccaggagtcttgctaccatgaagtgagctatgatctctggccagtgacaatcgtctagcgagtccttcctgccattctgcagacctgttagccacatgcatgcaggacaggcggtatcttactgcaaagccattcacagcaaagcagctgaggcgcttcagaactcctagtgagacaacagctgattcctat

SEQ ID NO: 502074 - DNA, 1699 bp, Homo sapiens
  misc_feature (1449)..(1449): n is a, c, g, or t
gggcagggcacattcaagttggtggagctcgcaaacatcccattcaatcatgtcatctgtctcaccaacatgtcatggaggatcacattatcaacatattgcaacacctcaagatacatcatcatcagttatgggccaaggcctcttcattccaatcatttcaccacatcacatcagagcatgcatcatcaccaagcacacacatcacagttttctcttatatgtgcgcacattctcttcatccatccactccaaagcttggtctcgttatgtcaaatttcaagccaatactatcttcacacacactcaagcgcacatctcaagtctcccaggatgttcaacgcgttcacacacacaccacgtgcttgtaatataagcgctgtgagcccatctcccattattgggccgccacattttttcacactacaccaaggtcgttatacgcaacgatggggatctcgctcgcgcggttcaaacacaggttcacttccaagggttgagcgttacacaccccactgttacaccgccaacagcaccacatagtcgcccaacccaccgacagaaccccaatatcccgttgtggcgctacacaccattgtccttcaatttcaaagcgcaaaaacacctctgatacacccatatctacacagcagtggcgggcaatatatttccacaacaaacaatgtactcctataagacattccgcaacagcagagcaccgatacagccagaaaggattctccctcaggaggaccgtgttcttcccactctatcaagcaccacgtattctatagtatacgaccacactactattcccacattcaaggataaaaagggaacatacgccacctcatacggagaggctcattcacccgcaactacacttcacagacgcagggactacacacacaggggccgcacacaaattctcacagtcgcaccacacgcttaccacccaacaagtgctgacatcttccaaattgacaatcgaaagagcggtagcaactttcttgatacgtgggcagacggcatctcacgctacactagtacacatttcgtcgtgaaaacaacacaccacaacagtatcattgcggacacaagacaaatgtcagggcaaactcacttatattcaacggaggacaactaacctatacttagctcaccaccacatcttgatttcatccacacacgccctcacttctcttcacaagcaacagacgggctatcttaacagccaagcactagaatacaacaacacacgtcggtgtggggcaaacaacacaagcggagtaatctatcaattacagtggcacactcgtggatgcacaacgaaacgcaattccccttactatgataggccaccaaaagatcacgtcagaacaagcgaaaagccacatatatgataaagccattaaccaatcaaacaccaccagaggaaactttacaaanaattccaactagtatatcacctgtgcacagggaagagagacacaataatgcaacataatgacacaacactatgtaatcacatgaactatacatctaacaacccccacatggaaaccacagaaatgaaagacattgaataactctctatcccacatcctacaaccaacgcgcaccacgaccctgtggaacagccacttgtagtaagtacaccgcaacactgtcgtcctcagggcatcacactaagcaggac

SEQ ID NO: 502075 - DNA, 1493 bp, Homo sapiens
ggtcgtcctctagtggtgcccctcgttgtgttggaaggcagggtcttctttttctccggggggggggacacgacacatagtggggggtcgtttcacacagatgtgttcaacgaagaagattgtgtgcgttggtgtctcacaagaagaggagttttttgtcgcttctgatggtggacacacaacaacgtttgttgttgggggtggataccacagcccctcccaagtgtgtggggtcgccctcccccccccctctgtggggggaagacgacacacgcgcttggggggtgttttgtgccatcacggtgctgctgtcactagagcggtgtgggagttttttttttctcttctgttgcgtggtgcctccctctgtctccctgcctggggtccccctcttaatatttttgtgccgcgcctccccgcgggcgtttttgttgcccccccccccctgtgtgtttatttgtgtgggagggtgttgtgccccaacacgaccccggcgggcgttgtcactccaactgggtggggcaacgatcggcccacaacagggtgttggtggtctctctgtagagtccttccgtagtatgagggtgattaaatagatgtggtttgttgttttccccgccccgcgtgtctgtgtggggtgtacaagatgctgctgcggagaaatgagtatgggggccgcgcctcctccaagtattgtctcttgaagacagtattctctgcggtgatgattattgtctcctccccccactctcctgtgttgagaatagaatatgggtgtttccctctggcgcacacagcgccacactctcgtgtgtgttctctagaagagctctttctccacagagcctattttccacccctctctcgggggttcgcctcttttgtctctgttgtctgtgagataatatgggacgcccgaccccacttttccgcgtgtggggtgtgtgtctactctcacacacaccacgcggggagacacaagagagagggtgtgcctggggagagcctgcgcacacagagtctctcccacatgtgtctctcgccccgaaatagcctctcagagaaggggtaaaatgagagatatatatatatctccctctaatatctcctgtccacccccaacctctcttataactcaccgtggggtggggatagaaccgggtgttccacgagacacttgttttgtttttccaattgtgggcccatctctataagtgttatagtatggtgtaaaagagctgtggtgtataatagaatataccaacagcgcgctcttgttaaaccctctctcacagagagaggagaaaggaggaatttgtttttggagcccactcttggtgttttttttttgcgtgtggcacggtctttataagttatttatagttttttaaaatgcacgtacactttttatatatgggaacacacacacttggcccacaaaatttgttcaccacagaattttggggccccctttaaaaagatttaatggagga

SEQ ID NO: 502076 - DNA, 85 bp, Homo sapiens
ttcggcacgaggtcatttgtcaacagatctttttttttccccctatcagttgatttttcttatttacagataacttctttagggg

SEQ ID NO: 502077 - DNA, 1046 bp, Homo sapiens
ctagaaattatataagaaagtcttgaaagattaaatgagttcacatcccactcctaagaaattatctgggatcctggagaaatacaaagtgaaaagatctgtggcttatagtatcttgggcttaacaaccaaatttaatatgcaaacaggatcataaattaactaatatctaacaaagttgggtcagaaaattttcaaaactagaagatgaatgagctaaactgtaatgcttagttatgccttttttttcttttccccttttttttattttttttgggggaagaggggggccccccttttgggcgcccagggggggggggtggcgggggggggccaaacctcggggcccaaagggaaaggccccgcctcccagggttcaggccaattcccgggtgccagggggcgcacccaaataaaggcgtgcgacagtgggggggttcccggacaaaaacttccgggaaaaacttagcgggggaacttgggcgggcaacagggggggcgactcacaccggatgttgcggaccagaggatgtggcctaaaatactcgggcagacacaggagaccacaccagggccaggggcctccccaaagggtgcgtgggctataaacaagcggtggagcccacacgggcaaagtggggcctaagagtaagtcatgacaaaccaggggagaggagaggccaaaaaaaacccgggggaattgtacgaagcttgcagcacacaaaaggttgtggccccccaattggtgtgcccaacggtgggggagctcaaagggaacacattggggccaggtcaagcggtaaaggccacaacaaaacgttccatgggaaagccacaaatataccggggggcgggtgcgaacacaaacacaacgtggacgtcgcaactgacaggcccagagaagcacgagcgcacacggggtaaccacaactgcctcaggaaggagcagaaactaacaggaggagacaggcgtgcgccaaacaaccatcgtgctcacaaacaacagaacgcgtagtgcagcactgcacacaagcaacacgcgctcg

SEQ ID NO: 502078 - DNA, 174 bp, Homo sapiens
tgagaatcagattgagtccaaggcagcctatgtccttttttaccaacgccaggacgtggggcgacgcctgctgtccccggccgggttatttggggccccagcctcccctgcctgcagctccccccccagctttgagttcatggatgttaatttagagccctgggtcctgcccca

SEQ ID NO: 502079 - DNA, 457 bp, Homo sapiens
  misc_feature (16)..(16): n is a, c, g, or t
  misc_feature (42)..(42): n is a, c, g, or t
  misc_feature (44)..(44): n is a, c, g, or t
  misc_feature (353)..(353): n is a, c, g, or t
  misc_feature (360)..(360): n is a, c, g, or t
aagttcggaacgaggntgcgtgccttggaggactgctctgancnctgtgcagattggtgctgatgattcttaccagttgtgtgcaagaaaagaaatcagagacgctgcctgcctgctcccatctctcgcgcgctctctctctcttctgctctctccctccctttgcaaacattggatttaaacctgctcagaattcagcacagaggaaggcagcagcggtagagcaagcagaagcagtagcaagcccggcagctgagagcaccgcagcgtcgagatgtaccatcctgcctactgggtcgtcttctcggcgacaactgccctgctcttcatcccatggagtgccccgtgcgcanggacgantgccaccttccccaaagctatggacaacgtgacggtccggcaggggggagagcgccaccctcaggtgtaccataagatgaccgggtaaccgggtggc

SEQ ID NO: 502080 - DNA, 130 bp, Homo sapiens
gagtgtgtacaagatctctgttacaaaaccactttcctggtggatacaaaaaggtctttggaactcatctcatgctatacatggtgaaagatgcacttcggtcttttgtcagatcctccgagtgctttcc

SEQ ID NO: 502081 - DNA, 364 bp, Homo sapiens
cctggtgaaagcacaccccacagagtaggagtaggccggcacaagcagctcaaacgcctagttacagaattttctggggtttaaataccttctcgaggtttcccactggttattttgtgtacaccctaagtaaatgaagtacctgcaatcagtctgattggttgcagaaagcaaccaatcagaggcttaagtgaagttacaaagttacaccccatccaatgtcttattggttgcagaaagtgaccaatcagaggcaaaagtgaagttacaaagttatactcctttgcaaatgaagacttggcccatgaccagcctgattggttgcaggaggggaccagaggtactttcagtttttcatctgcca

SEQ ID NO: 502082 - DNA, 444 bp, Homo sapiens
  misc_feature (289)..(289): n is a, c, g, or t
  misc_feature (335)..(335): n is a, c, g, or t
  misc_feature (390)..(390): n is a, c, g, or t
  misc_feature (417)..(417): n is a, c, g, or t
  misc_feature (438)..(438): n is a, c, g, or t
agggctcggcgtggtggctcatacccataataccagcactttgggaggccaaggtgtgcagagctcacctgtagtcttagctacgcgtgaggctgaagtgggagaatggcttgagcccaggaagtggagggtgtagtgagcggagatcatgccactgcactccagcctgggtgacagaaccagaccctgtctcaaaaaaaataaagttatatgatttacactacctgacttcaagccttgctagaaatgtccaacacttaagaggtaggcaaggtgtcctcagacactncagacagaacacagaaagcaattaaccataacagaaattattgatnaaattcggacttcattcaaaattggaaaacctctgattatttatttattgagatnggagtctgggattcacacccgtttttnctaggcctctttgtggagggnccaggg

SEQ ID NO: 502083 - DNA, 101 bp, Homo sapiens
  misc_feature (12)..(12): n is a, c, g, or t
  misc_feature (82)..(82): n is a, c, g, or t
ggcctattcctnctgctttcattgcacagtattcagcattcttgagcgtaacaagcctacattgcctgcggccctgcctttnttgtgatcctgaagacttt

SEQ ID NO: 502084 - DNA, 1010 bp, Homo sapiens
agccaacctgagggcgttcctgtctggggctgcagcgtggcgggaggtaatggcatgtgccagtgcctggctggtgctgcagagcgcctgtgcacctggtgtccacgcctcgtggtgacgggcttccaggatgttctgggcgctggggcggcccatccgcatcccccaagacccacacctcctggcctgatgcctcccagctgcctgtgggaaccacctcctgtcctgctgttgcttggccctgcatcctaggcagctggccatgactgccctccccagcctggcatgccccccttgacctgggacgatgagcatacgactggtgtaaggtgcaaggctcgatgccccgttgccctactggaccacgagggagtagggttcgcatcataccctttgtcccctcgtgatacgagacctcaatgcgaagcctgggtcgcctggacccttggggccaatcaggcggtgcaaacttgcccccaaggaacgatcatcttctgcttcatgctacgagtggctgactgacccttctcccaccctactgacatgctcagctacagtgccacgcgaaggggggcagggaccctgggccggaagcccaccgaggatggagacaaacgagcgacaggggtggaccaattccacctcctttgcaaacggagttaccaaagttccaggactattaacccccacatctgatgttccgaggcgcttgtggtgagcaactgaaagtaaccagcaattgggggcgaagaacggcgtcgttaatcggggcccctgcaaacatggtacataggagagggtctgcagcaccccgacgggagacaccgagtgcgtgtccaattaggcaccagcactcaccgagtgggcacattgtgtgattggccccaccagttactgccgttgaaacgacctggggggacatgtgggaaccccaatgggaacatgcagaacgtccgggtgtcaatcccgctaacagggcatgtgttcccgccgattctgtacaagctccg

SEQ ID NO: 502085 - DNA, 273 bp, Homo sapiens
cgtcgacccacgagcgtgagatatgtgacttcgggtgagctcgaattggttatacacccgaagttgaacagcatgaatgccttcatgccgttcaccattacttctgcacatagggtgcattgaagttctgaggaacatttcggctgtcctgtcgagtccattatctgatggactcacaggtcatacagccatgcgttgcacacagtttgtgtgggcagtccggtggtcaattgaaaggcttggaccaattggtctatccttccttttgtcgac

SEQ ID NO: 502086 - DNA, 599 bp, Homo sapiens
  misc_feature (496)..(496): n is a, c, g, or t
  misc_feature (501)..(501): n is a, c, g, or t
  misc_feature (508)..(508): n is a, c, g, or t
  misc_feature (561)..(561): n is a, c, g, or t
  misc_feature (599)..(599): n is a, c, g, or t
tgaaaccctgtctctactaaaaatacaaaaattagctgggcgtggtggcaggcacctgtaatcccagctacttgggatgctgaggcaggataatcgtttgaacctgggaggcagaggttgcagtgagctgagatcacaccactacactctagcctggacaacagagtgagactccatctcaaaaaaaaaaaaagtagacatctatttatacatatatatacacacacatatatacacatacgtacatatatatatacacacagacatatatatatatacacacacatacatatatatatacacacatgtatatatataatttacacataattacacagcttttttaaagagaagtaggttatctcaagcatttcaaggccagacacggtgtctcacgcctgtaatcccagcactttgggtggccgaggcaggtggatcacctgaggtcagttcaagaccagcctggcttaacgtgtgaaactccgtctctactaanaacanaggtggngagaattgcttgactaggaagttgaggttgagtgagccaagatggtgccacgnacttcagcctgagcaatgagcgaaactctgtccaaaan

SEQ ID NO: 502087 - DNA, 1247 bp, Homo sapiens
caactcattgagttgtataagtcgtcgaggttgtgctggaaacctaataatgatcatgctggttcaagtcgtcttatggtaaatgacttatagtgaagcttatttataggctatcataatctgtacgattattcatccaaaccgatgtctagagaagtcgggggataagatgttcttatatattctcctaggaatttgttctaaatccttgccctatgatacgttaaacgggatgtggtctaccttatctgaaaggatatatcccttctctgaggatgtcttgggtggcatgcacttaggagaataacaagaggaaagttatctaatagcgttaaacagcttcatggtagccgacactcgctcaggagtgcagtacatgccagtatagtcatgcattgttagaatagtagggagccaatttatagcattagcgattacagctgcttctcttctcttctcctcgtgcatgttctctacactgctctcatgcacctctgtgctctctcctcgtcttcttctcctcttctactacaaagacagcacaacacagaacacaggaacacagacacaggactacatagagatggtgtaccgctgtcattgtcgttgaagaggtgggacgtggagacactaagaaaaataaacgagacaaatatgtagatgaagagataggtaactttgaggttcgcataaaagtagaagtaatataagaagtggagagcataagtgtggtaataaagtgtggggagaaaatcacggagtggtataaatgaaaccgatgtcatcgcaagaagaagggtgtggacccgcgtgggcacagcacatcactgggagtagcgagctggtgaatcagaagccaggaggataatcgcaagacgtgcggagacaattaggtggcagcacaaaaaacaaggaggtcggtaggagcatacacaaagcagaagagaaagccaagccagacgtctgcaacaaatatgacaacgaacaatagcagcagacaccacaaggagtagggagaaaacacgcacaaaggatggggcaaccccacaaaagagtaagagagcggcgacacacgaagaatgggggaagaccaaaaggatggcgagagagagaggagagacaaccaaaagatacagagaaaaagagaggacaaacacaagacaacacaaggaccaccccgggcaaagaaagtaagaacacaaaaacaggacaataaaaaaggaaaaagaaaagacaagccacagaaa

SEQ ID NO: 502088 - DNA, 395 bp, Homo sapiens
cgatggaatcatatggcgcgattacttgtggtccactcagctgctctcagacaaaactccttccaagaaacgtgcgcgtactgcaggcccaggaagcctgtaaggaggatcaaggcgcctgaaggcgactctcatgccaatgactgaagtggatctctacatttctacccagagaatcaaagtgctgaacgccgacacacaggagacaatgatggaccaccctctgagtaccatttcctacattgcggacattgggaacatcgttgtgctgctggcccgccggcggatgcctcgctccaactcaccaggagaacgtggaagcgtcccacccatcccaggatgggaaaaggcagtacaagatgatctgccacgtcttcgggtcgatagggtcccga

SEQ ID NO: 502089 - DNA, 407 bp, Homo sapiens
cgaggtgactctaaatccgtctactcgccagtgcattgttgcagtcttgttgctgccaccaagcgggcagaaagggttgaatgtaaaaggaacgtaagggctgagagcaggggctcacccctgtaatcccagcactgtgggaggctgaggcaggtgggtcacccctgtaatcccagcactgtgggaggccgaggtgggcggatcacctgaggtcaggagttcgagaccagcctggccaacacagagaaatcccgtctctactaaaaatacaaaattagccaggcgtggtggcacatgcctgtaatccctgctactcggaaggctgaggcaggaagatctcttgagctcaggcatttgaggctgcagtgagctaggactgcaccactgcactctagcccaggtggcag

SEQ ID NO: 502090 - DNA, 302 bp, Homo sapiens
tgatctcgtgttgtgcctaagtcttcttcctcctcgtgttgtttctgatgttggctgtgcattgtgcgcaagattatatctaggatctgtgtaaggacttggtgtttccaatagattttagcagtcctattttactgattttggcctgtaacccctgagaaaaccgattttacacggttgggtagaatttgtagtaatgatccacagggcatgcatgttgtgtatcagattgcgtttagcaccattcttcttaattgtctgatcaagcttcacagcaattattaaagattatttaaatttga

SEQ ID NO: 502091 - DNA, 216 bp, Homo sapiens
  misc_feature (27)..(27): n is a, c, g, or t
  misc_feature (70)..(70): n is a, c, g, or t
  misc_feature (97)..(97): n is a, c, g, or t
  misc_feature (149)..(149): n is a, c, g, or t
agatacggaaaatgaaaaagaaataantccccactttcagtttttaatttccagttaactgacacaaganttcttttaaaacaaaggttaataaaangaagcataggccaggcgcggtggctcacacctgtaatcccagcactttgggnagccgaggtgggcggttcatgaggtcaagagatcaagaccatcctggccaacatggcgaaaccccgt

SEQ ID NO: 502092 - DNA, 314 bp, Homo sapiens
tgggccaaatctcggggtgttccgcaaaaaaaaatccaaaaaattccaaatgcagtgatatccttttaaaatgcagatttccaaaacatatttttttccaggtggccttttggtgtctggctggctgagtgtaaaagttgtttatctggacgatctgtctctctgcttccaaagaaatttgggagtgagtggcagctcctgcgccagcctcgcgggacacgtgttgtacataagcctctgcagtgctcctctttgtaaaggggggggtacctgcttggtttttatttaagaagaaataaccacgactttttttc

SEQ ID NO: 502093 - DNA, 137 bp, Homo sapiens
ccccgggggcccctttttttttgggggaaaaaaccgggtgttcctcccccccgaaaaaaaaagaaataaaaattttttccaacacaaatgaatcggttttcttaaatcaaagtttaatgtataaagttaaaaaaaaa

SEQ ID NO: 502094 - DNA, 227 bp, Homo sapiens
gtccgacaggtgggcgactcgcggtcgatgtggtgatcgtggtgctgaacaccacggtgctgcgtcctgcgccggctcggcgacgatccgccagcgaccgtcccccgagacggcccggacggtggctggggccggtcggcaggctcctgggcagctgcggcgacgggtcccgggtcgggatctccgccttgttcccgaacccgtcctgcagcgggaccccgttcggg

SEQ ID NO: 502095 - DNA, 252 bp, Homo sapiens
cgatctagaggatccctgagagaccgtgtgcatgggggagtccctggtgctcagtgagttgaggattcagagttgtcactactgtggctcaggttgctgctgtcgcaaaggtttgaacacagacctaggaatttttacatgccaaagacacagccaaacacacacacacacaggcacacgcacacatatacacacacatatagaaggggtttcctatcaccaagcatgggaccattgcaacacggtctctca

SEQ ID NO: 502096 - DNA, 552 bp, Homo sapiens
ctgggactgcgggtgcacgccaccatgcccagctaatttttgtatttcttgtagagatggagttttaccatgttgcccagactgtcctcgaaccccttggactcaagtgatccacccgtctcagccttccaaggtgctgggattacaggtgtgagccaccgcacccggcccactactcccccaacattttatttaagcgttagctgggcatatgtggcgcacacctttggtcctagctaccagaggggttgaggtgggaggatcacttgagcccaggagtttgaggctgcagtgagccatgatcatgccactgtgctgcagcctgggtgacagaactagaccctgtctcctaaaaaattaaggctgggcacggtggctcacacctgtgatcccagcgctttgggaggccaaggcaggtggatcatttgagatcaggagttccgagaccagtctgaccaatatggtgaaaccctgtctctgctaaaaatgcaaaaattagctgggcatggtggcgggcatctgtggtcccagctactggggaggctgagacgg

SEQ ID NO: 502097 - DNA, 904 bp, Homo sapiens
agcggggtcgccgccgcgccggcgcctagcccgccgggtcaggcggccaggcctcgccgccgcatgaaaaagagcctctcagcccccttgacccggaatttgaagaggtctacatgattctggggctagagagcaggaaaactccgttagtgctgaggaaccagtggatgcgtttgccctgattcccaaaccaccagtttcatgctgcgctagaggagtcctgacagaagtccaatctcaatcaaaagccagaggccccctcgatcatcgctcactccagtcgccagtccagaccgaagacggcgaatgacaggaaacatgcccgagcaccgcgaaaagcccgcaacaaaggcacccaacgatcagggaggtgggacaacaattcgaggagtcacaaccaacagacagagccgacagcactgtcaaggacctccaggtgaccccgtagggatagagcagaagcctagggacaaggaacgagaccaatgagagtggcaaaacgaagagaacagcacgaaaggggatgggcgaccgcaaggcaacagcaacaacgtccaagaagagaaacaggagaaaccgaaggaagaacacttggttggattggaaatgatgcacccaggacactgagtgtggaacgcacacgaaacagctcggtgcgaggcgccatgagtaccagtattgggcataactcatggttggatagagtaagcacaaactcgtggtgggtgaattatacatcctattcaaacagagctaatcaagaacgacatatataaactattgaagattatgtaagtgtcacacccaattattggacaatttgggtcacacgaaataagcaagctttttatgtcgagacgagcgccaattaaccctgacacgcgcgacattatctgttcacaat

SEQ ID NO: 502098 - DNA, 1291 bp, Homo sapiens
atccggccacaatattttaaattacgtacaaagatctgacgatgtgttcacccagggaacccattttcacccacgtggtcgtggttgggccgccaggtctttgtggtcttcgtctctttcagcaatgtgggtgaggcggatacccttttcctcggggaagagaaatccagtggttgtggtgtgcccttgggccaattaacaaaaagtgtgtggaaagtctcgagtgtggcaacagcgtgtgtgccagtgggccactcttttcagcggtaaaccagcgttcaaagagaactccagggtgtgccctcttcttcgtggtgggtggactcacaccaatattcttttccataggtgtatagcacctctccagtgtcacccatatacaacaggtttatccacggtggtcgaaactttgtatgtgaaattcgagaaaaatcttgggcaaggtcctctataaattcaaactcgtgaagtgggtattcatctccaccttgggagtgcaggcggcactcggggaataaggcggaagtgggtggcgggccatctcagtggagtctcaccgagaagtgagagcggaattccttcttgtggtgccccaccaagaggactcttttcttcaacttttgggcaaacaaacgtggggtaccttggggccctcacctcgagggggtgtaaatacggaagtgttacacagaaaaaggcagacccgtgggggtgctcacataaaaatcaaacaccgggcaaaaatccctctctaccccgcggaccttgggctccaaagtggggaggatgtgaaaattctcagtgaaaattcccaacgcaccagggggctaacgccgtatacatacctcccacgttaccgggcacacttttgtgccacaattcccgaacatcttcttaacaatgggaacacccggttttgcctatcggcaaaaagctcccactgcctgtaacaaaccttgtccaatcccatcccacgaggatcacaagggggcccataacctcaccaacacttcgggtgtccccccccaggcggacaccctctcgacccgagcgcgggaggaacaaacatctcacgtaccacaactctttgtgcggcggcacacccgggcggaattcgaccagcaagggaggcaacaaaccaccaccccgggccccaatctcatacacaggagcaaatccaaccaagggtttagggcagacactgcgccaccccggctaccaacatgcgctcctgggggaaccacgggtcagtctacaaaaaataggcacgaagcagcgagacacaacagaa

SEQ ID NO: 502099 - DNA, 161 bp, Homo sapiens
aaacattgcggacggactgatcagagggaactaggggtcggctgaaaggattatgggtggaaaacattggctcttccttggggagtgatgctgggtgaaatgggaacgatgagtggctcagacctgacagagtaaaatagagctagtaaatagccaacggc

SEQ ID NO: 502100 - DNA, 362 bp, Homo sapiens
caggaaagtaaaacaggattcaaccctaattagaaaatgtggatattaactgtcatgcaaatgtttattagcctctagaattaacttttttttagccggatgcggtggctcgcgcctgtaatccagcactttgggaggctgaggtgtgtggatcacttgagatcagagttcagggccggcctggtgaaaccctctctctactaaaaatacaaaaattggccaggtgtggtggcgtgcgcctgtggtcccggctactcgggaggctgaggcaggagagttgcctgaacccgggaggcagaggtgcagtgagccgagatcacgccaactgcactccagcctgggtgacagagggagactgtctc

SEQ ID NO: 502101 - DNA, 255 bp, Homo sapiens
agctcggtacccgatcattttcttcttccggctggcttgtctgactgggaggctgcttatctcctcttggccacccaggttgaggtcattgtttaaagggccctagcaaaccaacatagcagctgacagatgaggcaacagagtctcctcaaggccaatggcttacccaagattgcccatgcattcggtgagtatttttgagctctgaccatgtacctgacttcttctgggcacccaccggaagaagaaaatgat

SEQ ID NO: 502102 - DNA, 316 bp, Homo sapiens
ttttccccccaaattttttccccgggggcccccccctttgttttttttaaaaaccccccttggaaatttaaaaattggggggggggccccctttcctggggtttgtttgttcccaaggttttgtgggggggggccccctttttttccaaagggggccctcttttttttgcccctttcccaatggggggcccttgggggccctttgggggggccaaaaatggggttttttttttttttaataacccccccgggtttttccttttgttttcttgggtttttttttgggcccccgggaaataaattttgtttttggtta

SEQ ID NO: 502103 - DNA, 332 bp, Homo sapiens
caggatccccttgtccctggagtagggactaactatagcacaaagtcatatgtgtctttgctatttgtgaaatgtttggtctttctaatcttctataggttttgttgggtttttgcttaagttttgatccaaatcctattttcagctgataatatttaattatctattgttttttataatgatgtaccaatgagtggagattcctccttataatgtatgataggttatggaaaaatgtaaaatattcaactttttcatcctttttttgaaatttgtattaaaaaagcaatgttttattcatttttaatcaataaaaagtaaaatgtaaaaaa

SEQ ID NO: 502104 - DNA, 379 bp, Homo sapiens
atgaagtctcctcagcaacagtgagaagcctttctataccctcctctcttcctcctctcctgcacttttgagaacagtgaaactttgctctgggaggcaggaggtggaaaagccacacgaagaggaagaatggaagccagtgactcagtttaacaggagacactagagtcaatgtgataccacaccttccccaaacataaggtccaaaaagcttctctcctgttgccaaaaattcttctatcaccccgttgtactcctccttggcagcatcaatcaggcagggctcagcccacacccggctcctaaagacaagagagcagagaaagcagaatggtgtttagagaccatcgcagtgacctgatcctgaaagcacctgtag

SEQ ID NO: 502105 - DNA, 239 bp, Homo sapiens
cttagaggatccccacaattattcgggctatgtggagcaagctgtcttgcattatgaagctatattgggctctagagaaagtgagaatggaaagaatgtgagagatacgttagaccataccaaacaaaccacagatttccataatttttaaaccaaacacatgcaatataagcccttcccaaggcattaactgctctgaggcccgggcttacttggccattagcactgcaatacgatat

SEQ ID NO: 502106 - DNA, 406 bp, Homo sapiens
gctgtctagaggatcccggaatgccggcggcacagtattcctgattgggagcgtgcagggggcctggaaagcatcacggcgaggccagaaagtcattagcgagcataagaacgggcgcttctaccagttgtgaagtggtcaggctcaccaccgatgaccttctatgaagtcaacttggatgatggctccttcagcgacaatctttatcctgaggacatagtgagccaggactgtctccagttgggtcctcctgctgaaggggaagtggtccaagtgagatggacagacggccaagtctatggagccaagttggtggcctcccaccctatccaaatgtaccaggtggagttggaggatggctcacaactggtggttaagagagatgatgtatacacactggatgaag

SEQ ID NO: 502107 - DNA, 1616 bp, Homo sapiens
  misc_feature (302)..(302): n is a, c, g, or t
  misc_feature (311)..(311): n is a, c, g, or t
  misc_feature (702)..(702): n is a, c, g, or t
ctgtgcgcgcgcggcgcggggtcattgtaggccgcctttgtggctagagaggtgctcgtctactgagcttgctaggtccggcgcatccggctgcgcgcgccctaccgtactggcatatgctccctgaaataccaccacggtgggctatcgtgtatcagatgcacgtatgctagtgaggccctaggggtggttggagcgaaatgggcgcgattccagcgcgtgcatcctggcagcctggattagaacatcttgcatcccgtgatggtctaggacacggcactccgacactagtggtgtcctgnagatcatcnaagagagtagattgggtctgtacgaaggatgaccttggagtcgagtcggtggtgatggacatctgtcgccacgagatggtcaagcgtctgtcgaaagagtcgggagtgggcagggtcccctttttcaccctgggacgtccactacgattgggaaaccctcttataacacaggggcggaaaggacttgacagtgctcgtggggcagcgaacacgcttgcaagagtaaaggcgccggtcaagccccaggagctaagccctacacattgcgaaactcgaggtgacaattcgaggaggccttccgggtcaaaaatcataccttcctacctggcggacgcaatatatggttactgtataccctgcggtgaaaaccgcggggagactgattccctcntttgcaaatatgttggcccgaatggcaaattatcgtaagggaatttgccacaaatacaaaaaacgccaaaagaacataaagccgtgagaaccatgggcattgggggggtataatcctgatttgccccttcccgggtgtagctggaagaattccacgtgggtactataccaatagtgtgcgcatccgcctgtgggttggaaaaacgaaggtactaaataggcaaggaattagcaacgtggttggcgacgagccagacagaccgggccgggaaaaaaccgggggccaccaacgtatctacgacagtcctggaggggggagacccccggagaagctcgggccaatccactggttgggcaagacacgggggaaagaaaacccggggccccaggaaataccctgggcccgtccggaagagccgacacgaaggggtgtgaaccagaatatcactccagggcggccagaggacgaaggcccagctggcagggtacctgggcgcacgggccaggggtaaaaggctgaaaagactatacggaaaaccaggggtggcagctcgtgaccaccacattactgtggcacatccacacgactcacggcaatcgtggccgtacaaccagtaaggttaacgctcgcgctttcccaacatgtggtccagtggctcatcacaaatactaagtaggcctccaccaactgtggagtgtaccaccagtgtggtccagcacccggaggtataatgacacccagaccgccccgcgaagtaactacaaccatgtaggagcgataccaactaagcagtcgctattgaagaccaacaaaataatagctgcgacgacggaacacatactgatccaaaatagacgatcagacaccgtagtcactttcgcctttcgtgatatcttctccgtcgctctatagga

SEQ ID NO: 502108 - DNA, 174 bp, Homo sapiens
agcgcaaaccgttcatcatttggtgcttagtctatagtaagggctctctgtggttggactatactccagctaccgttaaatgaggacagatcaccttaaaacatgtacatttgattcataacaaggaaaattgggtctatgatttattgccaatcttggcctaaaagaaattgc

SEQ ID NO: 502109 - DNA, 386 bp, Homo sapiens
agtaaaataagaaattgatagatttcagcctttttgtagctgttctcagtcatttttgcaatatacagtatacttagattggagccatggcatcttcagttgaaaagaacctggtagcatctagtccaggcatcatgaatggccatacctatggagccaggtgggtgacatatagcagtaggattgtggccagtggaaagtgactccttgtctaaacgtggctactgcaactctcttccaggcatcgggtgtcatgtcaaaatgaaagattagtttttcaaggtgttttgagcagtattagatctatatgttatataaaatcttctgacttttcaatgttgtcaacatatccagttttttgaaacaaataaatatgccaaaacaaa

SEQ ID NO: 502110 - DNA, 364 bp, Homo sapiens
aaagccatttctaagctatatacagtaggtagcttttttgttttttcttttaggcggagtttcactctggttggcccaggatagagtgcaagggtgcgatctgggctcaccgcaacctcggcctccggggttcaagtgattctccggcctcagcctcccaagtagctggattacaggcatgcgccaccatgcccagctaatttggtatttcaagtagagacagggtttctccatgtgggtcaggcgggactcgaactcctaacctcaggtgatctgtctgcctcggcctcccaaagtgtggggataacaggcgtgagccatggcgccgggccgggacggtccatccttaaaggcagaggcctaa

SEQ ID NO: 502111 - DNA, 953 bp, Homo sapiens
  misc_feature (745)..(745): n is a, c, g, or t
gtaccagtgtgctgctgcatcaaagtgagaaaaagcttgggagaagtgatatcagtacctgatttcagacaatcaggttttagttgtcctgaaaagcagtgtccttactctcactacgtttgtgagtgtctgcatggcatcggtgtgcagggattggcatcgcgtctttgacgtcctatgtgggcctgttgccccgctgcgatagcggcgcatttgagtttttggcctttctgctccgtgcgtgtgggtgccactttagactgcctgggtgtgccgttgcgggaaatgggcgccaaaggttaagctccgcatatctggcaccgtaggtgatgcttgcgtcccttggattacatgacaggaagtcgatcagccttgaaagatcccaagtggcagtgctgcatttctggccgacgttgaatcacgggtgggcaagtgcgtagataagggacagaaaagtgggaggtagggacggtatggccagggggaacgccgacggattgaatggaacgtgatcctctgttttccttttgtcaactgggtcgagcatgaagactgtccgagatggctgcgaggggtggtagtccatcaccagaggtccagcgtttctgttaggggtaacccagttacagggggccacgaagggtgatcatgacgcgctgaatcacgatgacccgtaagtgcaatgtgtcgttcacatagacattggcggagctcaggcagtctggtgtccctgacgggaattctnaggcaagtttcactgttaacggcccttacgtggaaattagtccccagcccagatgctcgtggaatctcggaaaatgaacgcaaggccttggagtgacactgaaggagagagacgcgtaaagggcgaacacaatattagggggggaaaaaaaaaatgcgccccaaaaaattgcgcgaatgtcttcactctgtgtaacggcacaatatta

SEQ ID NO: 502112 - DNA, 151 bp, Homo sapiens
cttgatgtatcccagtcactgtgagacttccatgtgcccgttgtctccttgccgcgggtcccgcacgctctcctccaggccctccagctgggacttgatctatctcatactctcgctcggccatgctggctcattcctccagctcgcagta

SEQ ID NO: 502113 - DNA, 490 bp, Homo sapiens
  misc_feature (99)..(100): n is a, c, g, or t
  misc_feature (466)..(466): n is a, c, g, or t
ttcggatgcgaagtgtcagaaaggatcgcaagtaaaagaggtgtgctacttgactaagtgacccctaagggtgagttagaacaaacaggtagaagtgtnnggagacagatatgggctcagcataaggaagagctttgtcataattgcctgaagagcaatcggccaatcctggagaagatggcaatgagtttatgaacaggatgagttcaaatagactggttcttaacatggagggactgtcatagacagggttcaagtattggatgaggctgggactaggtaacttttggagcctctgcttatagtctcatattctttgatacttgtctgaaatgtaaaactttttgaaggtaggtgttatttaaactctgatttcaatgtgagggaaacgttatgataatgatataaggttgaaaaactttcaaagaaagaaaactattcttgcccagatgtctacctggagtanccacttgacactttgcatccagag

SEQ ID NO: 502114 - DNA, 209 bp, Homo sapiens
ccagaggtgtattggtaccagtgggcaattcttaacacggacatttacaaatgctgctttctgtattacaacaaaatgatatgcaataacagaaattggaaaaagggagcaaaggcagagtgccaagtatgtactagaggtctttctacgcggtgcctgacagcaatgcagattcagcataacaaatgtagactttgcaacatgtggcc

SEQ ID NO: 502115 - DNA, 269 bp, Homo sapiens
ctatccctctaaattcttcacttcctgaacatgacaaacaaacaaaaagagccactgcagggcccttggactaaatccaggcctgagttgctgggcagtaggtcagtcttgtccagacatgggatataaataactcgagtcagacaggtgggtcatcacatgaactaatccagcctgcaaagtggcctgtgcaatcttcagtctctgtccagcacctgcctccctctggaataggccggaatatattgcggtaccgtagctcagaattc

SEQ ID NO: 502116 - DNA, 80 bp, Homo sapiens
  misc_feature (66)..(66): n is a, c, g, or t
gggctgcaggattcggcacgaggatgatcagacagaggaggaacctattttgcttcttgaatctgnagatgagctacttg

SEQ ID NO: 502117 - DNA, 790 bp, Homo sapiens
  misc_feature (5)..(5): n is a, c, g, or t
  misc_feature (19)..(19): n is a, c, g, or t
  misc_feature (25)..(25): n is a, c, g, or t
  misc_feature (32)..(32): n is a, c, g, or t
  misc_feature (41)..(41): n is a, c, g, or t
  misc_feature (47)..(48): n is a, c, g, or t
  misc_feature (53)..(54): n is a, c, g, or t
  misc_feature (59)..(59): n is a, c, g, or t
  misc_feature (61)..(61): n is a, c, g, or t
  misc_feature (64)..(64): n is a, c, g, or t
  misc_feature (95)..(96): n is a, c, g, or t
  misc_feature (104)..(104): n is a, c, g, or t
  misc_feature (112)..(112): n is a, c, g, or t
  misc_feature (120)..(120): n is a, c, g, or t
  misc_feature (128)..(128): n is a, c, g, or t
  misc_feature (132)..(132): n is a, c, g, or t
  misc_feature (134)..(134): n is a, c, g, or t
  misc_feature (136)..(136): n is a, c, g, or t
  misc_feature (138)..(138): n is a, c, g, or t
  misc_feature (148)..(148): n is a, c, g, or t
  misc_feature (178)..(178): n is a, c, g, or t
  misc_feature (186)..(186): n is a, c, g, or t
  misc_feature (189)..(189): n is a, c, g, or t
  misc_feature (193)..(193): n is a, c, g, or t
  misc_feature (196)..(196): n is a, c, g, or t
  misc_feature (199)..(199): n is a, c, g, or t
  misc_feature (204)..(204): n is a, c, g, or t
  misc_feature (208)..(208): n is a, c, g, or t
  misc_feature (210)..(210): n is a, c, g, or t
  misc_feature (214)..(214): n is a, c, g, or t
  misc_feature (225)..(225): n is a, c, g, or t
  misc_feature (230)..(230): n is a, c, g, or t
  misc_feature (233)..(233): n is a, c, g, or t
  misc_feature (236)..(236): n is a, c, g, or t
  misc_feature (243)..(243): n is a, c, g, or t
  misc_feature (263)..(263): n is a, c, g, or t
  misc_feature (265)..(265): n is a, c, g, or t
  misc_feature (268)..(268): n is a, c, g, or t
  misc_feature (288)..(288): n is a, c, g, or t
  misc_feature (290)..(290): n is a, c, g, or t
  misc_feature (296)..(297): n is a, c, g, or t
  misc_feature (301)..(301): n is a, c, g, or t
  misc_feature (307)..(307): n is a, c, g, or t
  misc_feature (325)..(326): n is a, c, g, or t
  misc_feature (330)..(330): n is a, c, g, or t
  misc_feature (332)..(332): n is a, c, g, or t
  misc_feature (344)..(344): n is a, c, g, or t
  misc_feature (368)..(368): n is a, c, g, or t
  misc_feature (387)..(387): n is a, c, g, or t
  misc_feature (389)..(389): n is a, c, g, or t
  misc_feature (398)..(398): n is a, c, g, or t
  misc_feature (402)..(402): n is a, c, g, or t
  misc_feature (419)..(419): n is a, c, g, or t
  misc_feature (424)..(425): n is a, c, g, or t
  misc_feature (427)..(427): n is a, c, g, or t
  misc_feature (435)..(435): n is a, c, g, or t
  misc_feature (437)..(437): n is a, c, g, or t
  misc_feature (446)..(446): n is a, c, g, or t
  misc_feature (451)..(451): n is a, c, g, or t
  misc_feature (460)..(460): n is a, c, g, or t
  misc_feature (467)..(467): n is a, c, g, or t
  misc_feature (475)..(475): n is a, c, g, or t
  misc_feature (478)..(478): n is a, c, g, or t
  misc_feature (489)..(489): n is a, c, g, or t
  misc_feature (500)..(501): n is a, c, g, or t
  misc_feature (543)..(543): n is a, c, g, or t
  misc_feature (546)..(546): n is a, c, g, or t
  misc_feature (579)..(579): n is a, c, g, or t
  misc_feature (581)..(581): n is a, c, g, or t
  misc_feature (592)..(592): n is a, c, g, or t
  misc_feature (636)..(636): n is a, c, g, or t
  misc_feature (658)..(658): n is a, c, g, or t
  misc_feature (679)..(679): n is a, c, g, or t
  misc_feature (684)..(684): n is a, c, g, or t
  misc_feature (686)..(686): n is a, c, g, or t
  misc_feature (692)..(692): n is a, c, g, or t
  misc_feature (741)..(741): n is a, c, g, or t
taaanctcttgtgctgcancaatanaaaaaanttcggttanttttannaaaannaaaancnaancccttgttttctgggaaaaaaaaaatgcaannaattgaanttgaaaangtggaaancgcctcantcanananantcattctcanaatgtaaaaaaaacctgaacctccttctanctggcaancanaaantancangtggnaaangnaaancgaaggtgggnttganaancangctccanctttctcctcaatagcaaangncangctgccttttaaaaaaaaanancaaaanngaanccaatncctcctcctcccccaaannaagnantccaatcggcantggccaaaaaaaaaaaaaaaaaantctaacctctcctgggaananaaaaatttntttntttttttttaaaaaaanaaatnnantgtttttntnttttccaanaaggncgaagttanggttttntaagaagnaantgcttaattanctcaataaaanngctgctgttggggggtgcgggtgctgctgtgggaggattttnaangtggtgtgttttcaagcctcactcactcatccncncattcccaaanattcagcatccgtgcacactcctcacttccaggtttttcaaaanatgggagatttccagtgggggncctcaggttatcatcccaatngtaananatcaancttggttcttcagtttcctcagttcttttgttgcccatgtagcaagggnttttgctttgttagtcttcgatctccgcccttcagttaaaaattcatgg

SEQ ID NO: 502118 - DNA, 161 bp, Homo sapiens
agacttagaggatccagcggtcactggctaccggggatcggtgtgcatggcctcaaggtcggtgtcgatgatcgctgagaccatcgtcgaaggaggttcgcgtaggagccgttgcacgtgcaaccgttcccaggtaacggccggtagggagttcggtggga

SEQ ID NO: 502119 - DNA, 422 bp, Homo sapiens
cctagctgtgatacttataatacattgctctgtatatgacgtctcacttggattcttcctcctttacttaattcgagctcttactctgtcatcgcttccaccggatgcttatcgcacaaatgcctcctattttgtactcatccttattacgatcctatagctttcttactgtatgtaagtttgttctggttttttaaacggagtctcactcagttgcccaggctggtgtacagtggtatgatgttggctcaccgcaacctccacctcccaggtgcaagcaattgtcctgtctcagcttcccgagtaactgagactacaggtgtgccaccacgcccagctaatttttgtatttttagtagagatgtggtttcactatgttggctgggctggtctcaatctcctggcctcaagtgatccacctg

SEQ ID NO: 502120 - DNA, 142 bp, Homo sapiens
cagggagcctggggtaattccttttactccacaaagcatccggtctcactttcagcatgtctttgtcatcgtcaaagtgcataatccatgtaccgaaaatgtgtgttatcgtgttggagtttccactgatctaaagatgtgc

SEQ ID NO: 502121 - DNA, 166 bp, Homo sapiens
  misc_feature (2)..(2): n is a, c, g, or t
  misc_feature (87)..(87): n is a, c, g, or t
  misc_feature (105)..(105): n is a, c, g, or t
  misc_feature (112)..(112): n is a, c, g, or t
  misc_feature (137)..(138): n is a, c, g, or t
  misc_feature (145)..(145): n is a, c, g, or t
  misc_feature (148)..(149): n is a, c, g, or t
  misc_feature (156)..(156): n is a, c, g, or t
  misc_feature (158)..(159): n is a, c, g, or t
  misc_feature (163)..(163): n is a, c, g, or t
tntaaacattaccagtcaagtatatacaaaattgaagtatgccattcaagccagattgtaattttaaaataacaaacctctaaatanctaagtaatgtacaatgngtaaaantccaattaaacacaggtataaatcnnatataantcnnggccctntnntgcnggg

SEQ ID NO: 502122 - DNA, 549 bp, Homo sapiens
  misc_feature (508)..(508): n is a, c, g, or t
ggcgtctggctcccgctctcacagccatgggcagtacattgagctccatagagacagctgccggggcaagtgagagccgggactgggcactgggcgactctgttgcctcgctgaggaaacataacttaaacatgggctaaaggagatcctaagaagccgagaggcaagaatgtcatcatatgcatttttggtgcaaactttgtcgggaggagcataaggaatgaagcaccgcagatgcgttcagtcaagcttctcagagtttactaagaagtgctcgagatgatggtggaatgaccatgtactgcttaaagagaagaggaggactttgagagatatgggagatagcggacgataggctccgtctattgacacacgagcaaatgaaagagctataatcccttcccaaatgtggggacgacaagagaagacgaaaggttcgaacggacttcccaaattgcaagcactcacagaaggaccttgcctattcgggacctttcctttcccgtcntacgtggcttcttgacggtattcggcctcaaagaaattcga

SEQ ID NO: 502123 - DNA, 275 bp, Homo sapiens
ggactgttggatacaggcttagcactgtgctggtcttgggctttaaagagacttattggttgtccacgattgaaacatggacaaccatatcaaaatgttattggacaaaaagggtctgatcaaaacccagcaaagcctgtctgtttagattcttattggcctctctctgcggcattccttcctccggggtatgagtcaggaccttctctggaatgagggtcttatgacccacaatcagattagagtgctactctggggaggtgggaggagaggaa

SEQ ID NO: 502124 - DNA, 535 bp, Homo sapiens
  misc_feature (535)..(535): n is a, c, g, or t
tttaagcaaatcatttaaccataagccacccagtaacaatgtagctaaggggccctctcaattaaaattaaatactaaccctgattttataagttcctaaatccaaggtcttatgagttttaaaataacagttggggaaatgttttgattatctgattcgaaatataaattaagtgtatgcaaattttggcagaatatggggggaactatttgaatctttggggggtaacagactgtaaaactgaagtgtttctggggaattcttaagttaaggtgtgaaaaagagagccagcctcgggagttggagctgacccgggtgtctcattggataacagaacagggcctgtgtccaaagtgggggcagggcacattttggtcccacaatgagttgatcaacctggggactgggggtaacacacaagtgcgcccctggataggccctctcacaccccctaggcaactctgggggaagtttaaagccagctggagagggaatcccgtttcagggtcaacaagccatacgttttccaggagn

SEQ ID NO: 502125 - DNA, 124 bp, Homo sapiens
acacccagcagacatgctttccctcaatctcggtcttgcactgcggcgcgcgcacacacacacacacacacacacacacacacacaaagtttgtttcctgtggcatttaaaaaaaaacaaaaaa

SEQ ID NO: 502126 - DNA, 818 bp, Homo sapiens
agcggagaccgcaggaagccgggaggggaggccggccggggagacctcaggaagccgggaggggaggccggcccgggagaccgcaggaagccggaagccgggtctctaggaagccgagggagtgtgtgagcccagcaggccgggaaactgggacccgagacccccgagggacagcatgagagggaagaggaagagtggctggacgtctttcggggagcagttaggcgctggcatggtcttccaacccttgctccggccgacgacgagggcattggtttcgggagaaattgaaccagaaacgctctgtcctgggagcagcagtcacgggaccggggttcagggtagggcccaggctgaaagtggggattcggggaaagtctacccactgagtgaggccagcacacgcggggtgaagaaccccaaaagtcttgctccggccctgaagtggccttgagcttccgcaacaagcgacactgcaggtattgacagtaggcaggagcatctggaggattactggcaaggccccattctccaacaggtcagacaggacggggtcgcagcgcaagacacctgaagccacttacgtgtcatccctggtctcaaagccttcattttcaggcaatctaggaagaacaagccccaaagtccctgtctcttgtaaccttcagtgaagtacattggctgaaaggctccgtactaagtgtgtatacagcttgagggaccgaccatgcgacgtataacgtctgcatttcccaggagacgaaattccaagtgccttgtgccttgaaagggagtgcccagccagggtaaccaaacac

SEQ ID NO: 502127 - DNA, 393 bp, Homo sapiens
cacagagcgagatcgcgccactgtactctagactgtgcgacagggcacgactccatctcacaaaaaaaaaaaacaaaaactttgtgaatatttggtaatttcatctatttccagacctttttgaatacctttagataacgcgaggtattaattttggaagaatcatttttttcaatttttaatttcaatggaaagagatttagaaaccctttggctggaattaataaatgattatagtaagggtgcaggatataagggtaccatacaaaaatcaagcgctctcctgtataccagtaatgagacaagtagaatttgaaattaaaagccattccatttacattagcaccggaagtggaatacttaaggataaatccactatgtaagagctattgg

SEQ ID NO: 502128 - DNA, 194 bp, Homo sapiens
gctttgaaaccaaattaaaaaccccttccttgggaaggcaaagttttttggggcttgatcaaaccttttatatggttggggcttctctcttcgggagatgatattttgtttaaggagccctcttttcagttcatcaagttcatcaaaaatttgagggccccctctgggcccaaataaatatgagctgggggtta

SEQ ID NO: 502129 - DNA, 499 bp, Homo sapiens
  misc_feature (109)..(109): n is a, c, g, or t
ctgtaactgttaacacagaaaaacatgaaaagctcaggcccaagaaaggccttggagccagccaaacagaatgtgttctaatggacatggatgatgttgaacagaaaanagtttacaagtgctttgtggttgcactaatgtatactcactgccattttaagagggggaagtacattttaaaatatatttgaatgtcatgtactgatatgcagtagcttattgtttttctagttgcagagaatgtgaagtttaatctcttaaaatatttagatggtctactttttcattgaatttgtcaatatgtaattgcgttgtaaaatattatatatatatatatatatatatatatatatatatatatatatatatatatatatgcttaacttcccaagtgttctgcattgaaccacttagggaaaattttgtttgtttttatgttttgtaatttttaaaattaagtaaagactggatcaaaataattgcatccaacctggaccgt

SEQ ID NO: 502130 - DNA, 553 bp, Homo sapiens
tgtatattatattataattgagaaataccatttgactacattccactatcccagggtgacataatgcatttaaattcgggatttcggggtggagtatcattgtttaagctcggagttgtcaagtatgagtccctcaggaaaaaaaaaaaaattctgtgtcaaaaaccaacctgattcttagctcttaaaactattgctacttaaatttccaactaattaataacattctcaaaaaatctctataaagttcagacattcgccacagtacttcttacaattttgagaactgtttcctccaaaaattacattgatgtaaattccccaagcacataactctaacatttaaaccttttttctttaaaaccatggtttttgctgcttaactttcacacagttctgatactgttaatatctgggaagagtattcttgagatatcagtggtaaaagctaaactagtctaaattatactatgagaataccttcattgttgatgtgcagaagaataacaagtcagatttgtcttcagaagtcgtaacaataaacaataaagag

SEQ ID NO: 502131 - DNA, 1019 bp, Homo sapiens
tattacccccccctcctcctccatatatgggggaccctcccccacaaactctattccccccccctctctctccacaacacacgccccctctctctgtgcggggtgggggcttcctccacccccactcgtgtgtgttgttggtgggtgctaccagagaggactactctattgtagtgtagtggtggattgccgcccacactgttgtagatgacacacatgttggcacaacaccacaagctgccaggacactaccactgatgacgtcgccgctggtgtggacgtcccacacaccacgtgtgttgtgcgcccacatcactcccgcccgccgcgtgcacagctgtgttgagtgtcagtgtgtgagtcactacctccacagacatactctcgcgcgtgcgtgtaggtagtggagtgagtgtgtgtgcatcacacacacagcactcatccccccgccacatcacgcatcgtgttgtagtcatcatatcacgcagcgcagggtgtgttttgacacatctaattcgttagtgggcgcgcgggtgtgtgtgttcctttctcatctcatcacccgctcagtgtgtgtgtcgacaccctgcgagtagtgtgtagtgtgtctacttcactcactcgctgtgctgtgatgggagagacactcacacacgcgcagtgtgtgtgtgtatgatgatgagagagagagatgagacgctctctctcatgtgagaggagtaatactccagcgaggggtgggtagcatctcaccctgctgagtgatgttgggttgggcgacctactgggttcccccccctctcctactatgttgtgtgagggtgggtgggagagctgtggtctcgtcatctctgctggtgtgctggtcgttgtgttttatcaatggggcgctccctagtaacaaactcatctttttgttggtgaccgatcaacacaaccaccctcgttgttttgatgggggtagttcctacactcaccattgataagtattatatcctcccccctaacattttatactg

SEQ ID NO: 502132 - DNA, 246 bp, Homo sapiens
aaaacaaagaacaacaacaacaaaacaaaggccaggtttggtgactgacacctgtaaaactagcactttgagaggctgaagcgggacgattgcttgaggccaggagttggagatcagcctgggcaaaaaagcgagaccccatctctaccaaaaaaaaaaaaaaagatggctggatgtggtggcacatacctgtggttcccagctacttggggaggctgaggtggggaggattcacgtgagcccagg

SEQ ID NO: 502133 - DNA, 170 bp, Homo sapiens
caaatgaacagcaagaagcgattgaacacattgatgaatgtacaaaatgaaatagacatgactataatgaacaagccagtgagtgagatatttgaaatgtcgaacagtaaatatacacaaactacctgccaacccatttttcacatgcaagatgtgtccgcaatttgatc

SEQ ID NO: 502134 - DNA, 119 bp, Homo sapiens
  misc_feature (17)..(17): n is a, c, g, or t
  misc_feature (72)..(72): n is a, c, g, or t
cgcacgggcgcataggnggtctcagtctgcagttgcgcttatcagtatctagctgagtgtgttggaggagtnaaggggctgtcgcaaacgcctctgccgcgtaatgggccggcatcgga

SEQ ID NO: 502135 - DNA, 135 bp, Homo sapiens
ctgagtatctaagatccgtctactgcagtgtgagcaagtacactatttgcacacacatcttaggacacagtgattgtgtacaacgcagctccacagtacatgttacatgaagtacctccattcttccatgtatgt

SEQ ID NO: 502136 - DNA, 823 bp, Homo sapiens
  misc_feature (574)..(574): n is a, c, g, or t
  misc_feature (577)..(577): n is a, c, g, or t
  misc_feature (597)..(597): n is a, c, g, or t
gagcgggtcaacgaccatgatctctggacccacactacagtaacaagtttgtcagtcattttcagataaggtgcaaatcaagggatggctttgtccccacttcggcgcagggaaaatatgccagtcattgttatgatgtaaacaaccgaaggggtggacggtgaggataagaagaaccgagataatatttggccagagctacgtgtagcacaggcagccagggcggcagctgcacctgcgagcagcgcatggcggcaggcgcggcctccgggcgtggtggtgggcgtggccgggcggcgggggcgtggccgggcggcggggctgggcggtgccgccggttggaagtgggtggagttgcccttggaggcggcaccggacctgggcccgaggcccgacgagcctgtcgggctgagccgagtggccccacagagccggcgcgctcccgcctgcagggggagagcagacggggcgcggggaccggccaggccgcggcgggtgctgtttctgtttcactttccttcactctgaggccggcgcgctggcgggcgaggagcggcggcggtggcggtcgtgnacntgggaaagcggaaccaccanaaggagtgatgatcaacgatctcattgatcattctggatgctagttcctcatgcctcaggacatcctactgggaacgaccacaccagctcctgggcattcagacttgcctctacttagcgaccctctttggccagactactaaagccagtcttacttagccacgaatggctaccaaggaaaccttggtgaacagattcaattcttccattactggctatacactga

SEQ ID NO: 502137 - DNA, 494 bp, Homo sapiens
  misc_feature (40)..(40): n is a, c, g, or t
tttgtcaatgatctggtctgagtacacactatttataagntttttttaaactataaaatacacattacatgggcgggcgtggtgctcatgcctgtcacctttttacagtacagttaaagctttggtacttccacaccatcacagaagtgctgtcctttgttagagcttgcccattctacctccctgagtgtccagtgtgtctattagaggagcagtctgtaggctgaattgagaagctagcggtctagggtctgatttggctgacaattacagacttgaacagtatgaaatgtacatgcctttctgtagatgaaatagtttgataaagctaactttcatacatggattcatgaaaggaaaggatggagaccattacccagcttcgtaattaccgtgtctaggacatcaggcttcaatgtacataggttttagagctcaggaatgaaatattaatatgagatatacttaaacgactttacacctagaattcattc

SEQ ID NO: 502138 - DNA, 336 bp, Homo sapiens
tgtctgcagctgacgactcggggtggagctgactgctgtagtttgagggtcatgcagttgaggacttcgggaggagctgatgttgttcgcgtggagggcctctcagagtggagcctcagggatgcgctgtcgatcttgactgaggttcatggaggctggtgactcggacaggcgcggatgttctagctagtggatcttccagctgcagaccaagagaggagctgatgtactaattttaggttcttgcaggtgcagacctggagaggagctgatgttctagatagagggtcatgcagctgaagactcggggaggagctgatgttgtaatttgagggt

SEQ ID NO: 502139 - DNA, 212 bp, Homo sapiens
ttctcccgatgcatatcaccggggttcaaataaagcccttctgagggatgcccgattccatagctgaaagtcagtgctgacgaggactgtcgtgtaaatccaatggaggtgtgtcccagagcagggctgtatatattcgtgctccgagggctgcgcggctccgcgacgggtcagcggcggggcgcgggcgctgcccatgcagcccgcggccg

SEQ ID NO: 502140 - DNA, 246 bp, Homo sapiens
aaaaaaagaaccttttaaaacccccccccttaaaccccccccttttttgttttttgcccaggggttttttccttttttggggggttttttttttgggggaaaaaaattttttccccccaaaagcccccccttttttccccccccctttttttggtggggggggggggggggggccccctttttttttttttttttttagggggggggggccccaagggaaaaaaaccggggggggggcccctttta

SEQ ID NO: 502141 - DNA, 1199 bp, Homo sapiens
  misc_feature (385)..(385): n is a, c, g, or t
  misc_feature (452)..(452): n is a, c, g, or t
  misc_feature (636)..(636): n is a, c, g, or t
  misc_feature (793)..(793): n is a, c, g, or t
  misc_feature (958)..(958): n is a, c, g, or t
  misc_feature (1054)..(1054): n is a, c, g, or t
ggaaaaaggaaaataggaaatctgtaaaaataatagaagacttggaggatgcaagaaacacatgaaaaagaggctttgcagaagctttggccacagatgttcattgagcttgttagggatgcagtcatataaattcccaatacaacaccctatatgaagctccgcctacagcagataacagaccaaaaacaaaaatgggctctagttaaacgccaaaacgagaaaagagtgggcgtggttcttttgagggggcggaggtcgtgcgccccgctctccttcgcgggagggttagttaatgatcatcggctcgacgaccttctgtgcctgctcgtctcggtcgctgtccgcagcgcctcctccctccacaggcggtcgtacggccccnccatcgagtatggccgccacccccttcaccccgcccccgcgcccgcccgccgcgttccatcaccttnacggagcgcaagagaattaagagcaccgtcggcaagcagcgcgcccgccgcgcgagggatccccacgcgggcgacgctgggtcgtgcggtgcgagacgcgcggggggcgtgtggaggtcgcgccgtcgcgccgtgcggcgctgatccttgtcgcggcgccgcagtcaccgctcgctattaattntatataatccaacgttattactacgtatttcaccgtcatttcacctattattccaccaccatatccaacgaatatcaacgataacaccaccaaaataaatcacacccacacatccaccgtatactatcacaatatccaccctcaccattcaattaantcctacaactcactccacccaaatataacacacatcctccgcattccaacacgccataccaaccatccatcacacccacatagcatccaaacaagaacgaacctaaacgacgcgctccataatacacctccattaacccgccgataatcgcgcacttctccgccntcccgaccagttgttcgcccccgcgacaataggtccaaacacacacaatacacgggctggtgccgcgccaactcgagcgcctacagctcgcgattngtcgaccggtaccgaacagtccagccaataccacgaccccaataaccacatccacaacaaacgaataataaatatattccaaccaccacacataattctatctccctcccacacatctaacatcacaacacacctccaaacgaat

SEQ ID NO: 502142 - DNA, 935 bp, Homo sapiens
gtgggcatttgagttgtgcggctgaagcagtctggggagaggcaaaaagcaatggcaggaggtgggacagaggaatgtgggccccaaactatgggggcagctgctactcagtgccagctgtacgtcgccatggggggaagcgggacagagccgcgggtcttcggatttcccccaatggcaggaggtgggacagaggacatgtgggccccaaactatgggggcagctgctactcagtgccagctgttcgtcagccatggggggaagcgaggaccagagaccgacgggtctacgggctttttcaagaggacgcataactccggattgtacatatgaactgtaccatgactttggtaaagacaatctgtgacggatgacagtgaaggagggacgactcatcgtcaatttcacacacgatactcgacacggagtcctcgagctggacacggggcagcaccaggcggaggacagtgtcttccttctgcaggacgcagcgccggggactactccaccaacatcactctccatccttggtccagcagcaactctgcacagagccggcataactcacaggtcaacaacacacgctacgacggcgcactggtgccaatacaccttgacgctgggatacacagatcacacgaggacaatctgtgatggtgacaggaagagaccactactctccagggacagaggacacaagacccgacggaaggcaggactggccgacagacacggagaaaagggacccacactaaacagaaccaggactaaaagtcacacgcagccggctggtcccacgccagggagcacctaccaacaacgcacacatacaaccacaatggaagaaacaatgacaggagacaaaggacgcagacaacagagcacacaaaacagaggagaaacacacaggacagaagcaacaaaccaacaacaa

SEQ ID NO: 502143 - DNA, 380 bp, Homo sapiens
ctgcctgcggccagacggagtctcactctgtcaccaggctggagtacagtggtgtgatctcggctcactgcaacctccgcctcccaggttcaagcgattctcctgcctcagcctctcaagtagctgagattacagacgtgtgtcaccatgccctgttaatttttgtttgtttgttttgttttttgtcttgttttgtttcgttttttgtttttttttttttgagacggaagctctgctctgtcgcccaggctgaattgcaggggccccgttctcggctctcaccgcgagttccgcctcgcggttgcatgccatctccggcctcacctcccgattgctggacctagggcttcgccccacacccattattttggtattttcag

SEQ ID NO: 502144 - DNA, 1110 bp, Homo sapiens
  misc_feature (89)..(90): n is a, c, g, or t
  misc_feature (113)..(113): n is a, c, g, or t
  misc_feature (143)..(143): n is a, c, g, or t
  misc_feature (161)..(161): n is a, c, g, or t
  misc_feature (172)..(172): n is a, c, g, or t
  misc_feature (174)..(174): n is a, c, g, or t
  misc_feature (181)..(181): n is a, c, g, or t
  misc_feature (186)..(186): n is a, c, g, or t
  misc_feature (194)..(194): n is a, c, g, or t
  misc_feature (203)..(204): n is a, c, g, or t
  misc_feature (206)..(206): n is a, c, g, or t
  misc_feature (213)..(213): n is a, c, g, or t
  misc_feature (216)..(216): n is a, c, g, or t
  misc_feature (223)..(223): n is a, c, g, or t
  misc_feature (234)..(235): n is a, c, g, or t
  misc_feature (244)..(244): n is a, c, g, or t
  misc_feature (251)..(251): n is a, c, g, or t
  misc_feature (253)..(253): n is a, c, g, or t
  misc_feature (255)..(255): n is a, c, g, or t
  misc_feature (257)..(257): n is a, c, g, or t
  misc_feature (262)..(262): n is a, c, g, or t
  misc_feature (272)..(272): n is a, c, g, or t
  misc_feature (276)..(276): n is a, c, g, or t
  misc_feature (278)..(278): n is a, c, g, or t
  misc_feature (281)..(281): n is a, c, g, or t
  misc_feature (284)..(284): n is a, c, g, or t
  misc_feature (296)..(296): n is a, c, g, or t
  misc_feature (307)..(308): n is a, c, g, or t
  misc_feature (318)..(318): n is a, c, g, or t
  misc_feature (403)..(403): n is a, c, g, or t
  misc_feature (405)..(405): n is a, c, g, or t
  misc_feature (1110)..(1110): n is a, c, g, or t
tatttgggaacgctgcaaggcctttaatcagccttctgtgacataggtagcagcccacggagatcctaagctggctgtcttgtgtgcannctgagtggggtggtgcaggccgntagtctgcccgtcactttggatcatagccntgggcctggcggcacacnagcacttgcgntntcgggcntgtcnatttcctnccacttggnnanataactnganatttccnccttttctttnnagcttgatngcattgncnanantttancagccagtantgangnttncangttaatatgtgncaaaatatttnngtaattattntctaatccctttctgagtactctggggccctgcatttatgaggcacctaccttcattttgctaacgcttattctgaataaaagtntntgattccttaaagacgaaaaaaagaaatcgtaaaccaagaagcaaagaggagcgaggaggagcgcccataaacagcaataaccacgggcgtgcgaggcccacaatcggttcggctggcactgctaccagagggagggaatcccaggaggaggccccgcttacaaagtggcgcaaggctaacccaaggatgacattgaccgggggcccgcaccccattgttaccagatcggtccccgaaattggagcaaaagagggggcctgcctgtgggcgaacaaccatcgggataggaaggaactccgcgtaatcgaaggcaggacggggagataccaaccttagcgctagagatgcgccccacacaaatgcgaggattcaaatgagacgctgaaaagtgggggcgaaaactaagtcccacagcatctgttgggaaaaggtgcacaatagacaagcgcatttgaagagaaacagttagcggggccacaaaatttggccccattcccaattggcctttggtagaaaagaggtttgccccgtccattgcaccgatgtgcaacatatagtattggcctgtaaaagcagatccaaatctataacgtcgaagcggatggtagtacactcgacaaaagaaaagcgagtagtccgaccatagcaataccgccccaacacatcggacgctgcaaccacgggacaaaatcaggagatacacn

SEQ ID NO: 502145 - DNA, 165 bp, Homo sapiens
actcctaccgtgtctctgaaagatattccatcagctgtgttaaagccagggcagttctgctagcagctgtttcacctctgtttcagagaagactccctactggagaacagagctgtttagacttttctgcatgatgagaacttagcagttgttgatttccagaaa

SEQ ID NO: 502146 - DNA, 242 bp, Homo sapiens
gagtcggaccccggtacgctttggtctgcattgttgtgcctgagcactatcaccacctaacatcctgtgcatttccgcttagttatctctttgttcatgctggagctcagaaaatgataacccaaaatcaaggtcccagaagcaaaagtttttctccgaccttctcctgccctcctatctctcacccctcatcctcccccaggctagccataaaatctggaatacctcttcccaaagggggt

SEQ ID NO: 502147 - DNA, 85 bp, Homo sapiens
agatttattttatgtatatgagtacactttagctgtacagatggttgttggtcgacgcggccgcgaatttagtagtagtaggcgg

SEQ ID NO: 502148 - DNA, 515 bp, Homo sapiens
ctatgttcctatcgttgatccctttctctcgctctttgtcgttcccgttctcgccatctcgtgtcgtcgtctcccgttctcgtctctctctcctccgtctctcttttctctttctcgttcccgttctttgtccctgtgtcgttccctctctctttcccgttctcgttcgtggtctcggtctctatccctttcacgattctctctcgttgtgcgtctttctctcatgccgtgccctaacacgctctctttctagttctctctctttttctctttcccgtagtgcccgttcaggtcccctcgtctctcatcgcgctccgcgtctcgttctcggttcccgatctctctcactagccctttcatctctcctataatccagtctgtcgactcaacgttcctctcttctttcatcacgctcaagctcgtcattccttccctgatgtcgaattggtgagcttggtctttgatctctctctctttcaggatatctatctctttcaggatagctacttcgagtt

SEQ ID NO: 502149 - DNA, 305 bp, Homo sapiens
acttctcgatgaaattaatcccacagccacagtaacatcaatgcagcaggagtcggggactacggttcttcgacctggaagggatattctcccaatctgtgtagttagcagccccacagcacttaaaatctgcctgcatcctgtccaggatcgaagcagtgtggttatttttcgggtaattctccatctgctgccggacgttgttattaaactctgacatcaccttatctctaaacacatagccagcaatggctgcggacacctccaccaacatgatacgagacagaacgatggcaaacgtgatc

SEQ ID NO: 502150 - DNA, 348 bp, Homo sapiens
  misc_feature (42)..(42): n is a, c, g, or t
cttgaggatcccgtagcagcgcagcacataatgaaaactccntaatcatctttggagctccatgctgcagtggcagtggctctgtgatcgagtgatgatccattcatggaacacactggacttgtcagctgaacagaatgagcagctttagtgtgctgtgtgcggtttccaacactggtgagactgctatgtgctgtgggtgtggcaaggacctgatactaaacccccgatcttgggcagggggcttcgtctatacttacaagcttgtgaacatggggaaaaactgggggttttggacaagactccttttggaagagtgtcctgttgctattgccccattccagggga

SEQ ID NO: 502151 - DNA, 276 bp, Homo sapiens
acatcttctgggtggccgaagaatcagaataggtgttgataaagaattgggtctccacctccagcggggtcgaagaaagtagtatttagatttcggtctgtaaggagtatagtgatacctgctgctaatactggcagtgagagaagtagtaggacggctgtaattagtacctcggccgcgaccacgctacagtcacatcaaaccgaccaggtctattctatggccaatgctctgaaatttgcggctcaaatcacagcttcatacccattgtacctg

SEQ ID NO: 502152 - DNA, 964 bp, Homo sapiens
atctcttccggttctaatgccgcttcggtgatacctgaggacttaatggtgctaggacatgtgaccaagggtccaccgtaatccacacctacatactgactatgtcgccgataaatggttcgtagaaatggtatcaataaatcccgatcatacatgatacgaactctctttaacgaggggtggtaacccatagtttccatgagagagagcatcgcagcgtttgccagaaggaagctgcaactacacaagggcctacaagaaagactgccgggtcccacagatgcgccaatggcgcaattgcagtgctaacgttgctcagtagtgcttatcaataggcaccatcgttaaaaagctccagagagaggagtttacagctcgcaggcattcccaaaacaaggggtcgtcgacgtcagctaaggcttacgagtcgaactttgcgcgtaacgagttaggcgcgagcccccgaatagctgtggggtaaagcgtggcttcgatgtccccgtaatagcgctaacgggggtctcaaagggcctaggtagtccccggtgcactctataagggcgcaaatgtgcgcgaatgagccacatgggaattctagaaggcagagggccacctcaagatgcttgcattggacaccaagatttgcaggtttaccaagcattcaaggggctacccgcaaatcggtaacacctgagggcccctaaccaaagagggtcttcaagaagggttaagacactatttcattgtattggcaaggcgccaaattggaaggtgacacacggaccggggaacttttgcacgcgcagacccactcaatcccggcccggggcccttgtgggcggtgaaccaatcgatgccattggagggaataagaggcgttcatacttggatgagtaagtttggtgagaacaataaacgccgctgagagccattatacgaacacatacacatatgaatacaacag

SEQ ID NO: 502153 - DNA, 81 bp, Homo sapiens
cccagccccaaccagacctctctgtacttctgtgccagcagccctcgtgggactagcggtatgaacgagcagtacttcggg

SEQ ID NO: 502154 - DNA, 204 bp, Homo sapiens
tctagaggtatccccagatcgagcgaggagacaaactcatctgcctcagtccctctggacacgcctcatgccaggtgcatatgtggacaggggccatgctcctgtgcgtttccaaagttggaggagagctcgccaggctcacggtactcgaaggccacgaattctacagtgaagtcctcacggagtaccacggtgggagccagg

SEQ ID NO: 502155 - DNA, 101 bp, Homo sapiens
gcggccgcctactactactactgctcgaattcaagcttctaacgatgtacggggacatgtggaatgctggacaataaagcgagtgctgccaccctccaaaa

SEQ ID NO: 502156 - DNA, 139 bp, Homo sapiens
aatgcagcggactcggattagcgagcagagtgtcttctcttctgctaacagctgggtcaaacttcttctgcttcttctccaagttggaggcgacctggcgcgtggtggtccagtgtccacctgtgaggctcgtccagct

SEQ ID NO: 502157 - DNA, 909 bp, Homo sapiens
  misc_feature (1)..(1): n is a, c, g, or t
nccttatatttgtccttctgatggtgtaacaacgtatcccctaattgccctcttaaaagtcccccctctaaagcaaatccccttttaacgaaatgtttggttcaaaaagaaaaccctcctcttccgaacctagaacgctccctccagtgctacgggatcgtgtccctctcaatcaaagatccgtccaccccaggtgacaccttcgcgtcgaccccaaggatccctgaaatgggttctcctccccacactttttcaaaaacgtcgtctttccgtattccccccctacccttatgattattatggaagaggtgaacacccgatcacaagatgtcccttaaagaattttttggttaaaatagcccccctaataccgctttcttttctatgagacacccctccccgacgcaccgtcttggtcgctgctataggaccacccccacttatttttctcagggactccgccccaaatacctccgcccccccaaacttgaatacccactgccctcacctacagtgaataattactccccgcccgcgggctattatctcctttgtaccatccttatgcgcccccacttcaaaaaattctgtgaggaggctcccacaattcagctccatagaccttcttgtcaagacccctgtcaaccgcactaattgagctataagcctcccctttaataagaaaacatcaaacgaagacgtcaatggtacaaaaacaatggtgttaccaccgagaagtcaaccattcttcgtctttcatggaagaacaatacaccacaattccccttcaattacaaataaattaagccctatatttgttgtatattatttcgagcacccggtaataacatttgaccattataatcgaccccccccttttcagggaatgagaaaacatcccacataaca

SEQ ID NO: 502158 - DNA, 297 bp, Homo sapiens
aagactgaataatccacgtactaatctataataatatactcaacttacgaagtgctacatctctctataccacgtcgctctgtcacatgactgcactgagttgaaagactggttctggttcaagaggaaatcctgatcaaaatggatatcaaagctccactaagaaacacaagcatgtttcaaagagaaatctgaatccccaaatcattattcacaatctattattaattacaatttgagatatatcaccagttactactaggtagtaaatatgtctcactaatgacaatctagtac

SEQ ID NO: 502159 - DNA, 541 bp, Homo sapiens
gcacgaggtctcaactatagaaattgtgggctgggctttatttaccactacacattatcaggtgttagaaaatgtagactgggttagacaaattatcttctaagttctagaaggggtttgtaatcaaaacatatttgataggaggctacgggagagttgtctagaagaggtaagacctgaaactgtttgttctctcccactagaattaaatggatgtttagactggctactttgccctaaaccagcacttgggggaggtctactgggtggatgggtgggatttggggggctgatagtctgaacattatatttgactgtaatgaaacctacaaagtagggtcagaatcataaagggagaatattcccctctgggacctattctgcagggtctaataaaaagattaattggaatgtaaaaataataaaatggaagaaaactctaggggagggcccgggaaccaaaaatcggacatatatgagggtgaataaccaaatgaatggggcgtgagtttaacaacgattgagaaatggtgaaaaaccc

SEQ ID NO: 502160 - DNA, 237 bp, Homo sapiens
ccccccatcaagtacccaaaaaagatagagtttgtttttaacctggcccaaactgtcccagggaaaatttcacgagcccagcttttaaacaaagagtggaaaatgtcccgaaaaacccgggcccagttaaacatttaaaaaacattcctttgggttccccccttttttttcttttttttccccttggggccctggccctcctaaaataaaatgagatttttttttaaaaaaccttga

SEQ ID NO: 502161 - DNA, 205 bp, Homo sapiens
  misc_feature (28)..(28): n is a, c, g, or t
  misc_feature (61)..(61): n is a, c, g, or t
  misc_feature (74)..(74): n is a, c, g, or t
  misc_feature (120)..(120): n is a, c, g, or t
  misc_feature (165)..(165): n is a, c, g, or t
  misc_feature (175)..(175): n is a, c, g, or t
ccagcccgacctgttcaaggacattttnaatatgctcatgcaccatgaccggtttaaagtnttcgcagattatnaagactacattaaatgccaggagaaagtcagcgccttgtacaagancccaagagagtggacgcggatggtgatccggaacatagccacctntggcaagtcntccagtgaccgtaccattgcccagtatgcc

SEQ ID NO: 502162 - DNA, 453 bp, Homo sapiens
agtaaaagccaaggcccaaaatgtggcaaggcaaaggttaaaaaaaaaggaagagcaagtttttttttgcctagcaagctcccttcaaagccaattataagataattttttcgagaagtcgaaaccaaaggaataggctccaaacatcccccgtttggagcaagggtgaaggaaaaaaaaaaaaggccaaatgtctgtttgtatttagccagtttttgttttttttttccacgcagctacaaggcccccagttatgcaaagccccaagttatgccaagtcatcagttatcctataaattatttaccctgtcattaaataattaacccccttttttgcttctgtaaccctccttataaaaatcctgcccagtttttgttcaatcctcacctttttgaatgtaaatcccctaaactaatcccccccttaaaataaacatctcccttttttccata

SEQ ID NO: 502163 - DNA, 848 bp, Homo sapiens
tatgaaaccaagttttgctctgtggccaggctgaattgcaggggtgcaatctcggctcactgcaacctctgcctcctcggtcacaagtgattcttctgcctcggcctcccgattagctggaactacggcgcgtgccccacgcccagctaattttcggtgttttaagcagaaatagggtttcactattttggccaggatggtctccatctcttaaccttgtgatccatcgcttcccaaagtgctgggattataggcatgagctaccgtgctgggcccttattttctctttaacctccagcctcctactggtccttccttacttctggtctgtgtggggtatgacatacgttggccccgtgtatagccatttcaaagggcaaaagaagggcctgcactttctttattttaagtgtgctgacattttggtggcccgtggtctacattaattagtaaagtcctggccaactcagttttctctaaaatccaaagcaggcctaaaaattctgccagggttaaaaactaaacctaccgggaagggaacaaaactcatagcatttcctaatctccatctccccaaaggttgtggacatcctccccaaagtgtcctttcccagctcgtggaacctccttccagaacgtcagaactctggctgtatacgggctactggcccattcctttttccgctgtctctataggccccaagaactaggtttgcagggcagctcgtggtggatttcccccctccaagggtatccccctctctgaaaacatctcgttgttctatcgctaaaacctcggataacctcatacccgttctcacccggatccggtcagaataccattccgt

SEQ ID NO: 502164 - DNA, 368 bp, Homo sapiens
ccaagggtattaagaggttcctgtggccaatttaaagtcgcctccccatataattcttcccatatattttgctacatagccgggtgcgctctttaacctgtcctaagaacgctggccgggttccggggtgtctaaccttggcctccccttgcaaggttattccaagtaaatccattatccagaaggtatagggttaagcccttgctattatacgctgggtatataattttccctctttcccttgcggccatatatattgtgcccaggttccatttctctatcgcatacactatatgggggtatatggtgtgtctaagtgtgtctgatagtaatgtagagtgtctcgcgtgcagtactcgcacagcccg

SEQ ID NO: 502165 - DNA, 674 bp, Homo sapiens
tggaaatatcattactttacttatagggtcccaggcatttaaaatattcattcacaggggaggctacatcaagcaaggggaggtccagccctctggcaaggtggggatgagaggctcatactagcaaagacagtgggcaccggagtaggctcccgggttagcagtgcgggtgcgtgtagagaaaattcaggtgacgtacagtggcctcgggtctcgggacacaaaatcgtgtacgggagaggaacagtgcacggcgtgaaattaaggcgactggtagtgaactacttcacaaatggccgggaaacacttaaacgctaaagtcaagtgactacttcccacaacagaaaaacaaaaacaaagacagaaaccaaacagacacagaagacaccaacacaagccaacgaccacacacgcccactcaacaacacacctccaccaacacacaagacaaacgacacgaacagaacaaagaaacacacacaccaccgaagcacaaccaacgcaactcaccgcaccaccgagcagacgcgcgtgctcagaccagacgccgacacaacaaacacacccgacgaccccgataagcaacaaggcaccactgcggagcaccgcaacacgcatctcgcgccaccaggagcgccagacacacagcaagagaggggagggaatcaaaaggg

SEQ ID NO: 502166 - DNA, 283 bp, Homo sapiens
aatgaagcaacatgaagacatttcctagtgaaccaggttggagagactcagctgtgagttgacctgcagaaaaaacaaaaaagaaaaaaccaacgaacaaacaaaaaacaataaagagaggcttcagacagaagggagataacgtcagttagaaacaaagaaaaaaaagcattgagtgaaagcaacagagagggcaaatgtgcaggtggatctaagtcaacatggattgcacagacaatggttacttttaaaatacatgccaaattcagatgaataacaaaaa

SEQ ID NO: 502167 - DNA, 834 bp, Homo sapiens
  misc_feature (181)..(181): n is a, c, g, or t
  misc_feature (212)..(212): n is a, c, g, or t
  misc_feature (224)..(224): n is a, c, g, or t
  misc_feature (278)..(278): n is a, c, g, or t
  misc_feature (310)..(310): n is a, c, g, or t
  misc_feature (322)..(323): n is a, c, g, or t
  misc_feature (325)..(325): n is a, c, g, or t
  misc_feature (328)..(330): n is a, c, g, or t
  misc_feature (339)..(340): n is a, c, g, or t
  misc_feature (345)..(347): n is a, c, g, or t
  misc_feature (357)..(357): n is a, c, g, or t
  misc_feature (364)..(366): n is a, c, g, or t
  misc_feature (369)..(369): n is a, c, g, or t
  misc_feature (377)..(377): n is a, c, g, or t
  misc_feature (385)..(386): n is a, c, g, or t
  misc_feature (409)..(409): n is a, c, g, or t
  misc_feature (425)..(425): n is a, c, g, or t
  misc_feature (427)..(427): n is a, c, g, or t
  misc_feature (508)..(508): n is a, c, g, or t
  misc_feature (522)..(522): n is a, c, g, or t
  misc_feature (531)..(531): n is a, c, g, or t
  misc_feature (550)..(550): n is a, c, g, or t
  misc_feature (574)..(574): n is a, c, g, or t
  misc_feature (586)..(586): n is a, c, g, or t
  misc_feature (673)..(673): n is a, c, g, or t
  misc_feature (680)..(680): n is a, c, g, or t
  misc_feature (682)..(682): n is a, c, g, or t
  misc_feature (687)..(687): n is a, c, g, or t
  misc_feature (706)..(706): n is a, c, g, or t
  misc_feature (710)..(710): n is a, c, g, or t
  misc_feature (780)..(780): n is a, c, g, or t
acagtgatcatcacccacaaggacaggttgctgggatgaggcaccctttcctttcatgtttaggttcttctcacctgcatttcactttcctaaaggtcccagccacacagcgttcttttagggattaaagtagtaggaaaaaaataaagagaacacaacatccatccttaaagaaaaaaantaaatccactttatggtggacttcagctatngacaaatttggnatcagtgttctccagtctgaacatagtcttctgttacctgggagagagtggtcnggtactgccagctcagggcagccaaaagcatnacaaacgacagnnanatnnnggattattnncttcnnnaaatcatctnacatttnnnaanattcttcntccggatnntggagattatcttcctttttttnctagaagatgggtctnantcggggattctatgataaatctcttccatatactgatatatgatggctttgacagctggcatattggtggcatccatcatnagggtcactgcttnccctttccnaatcttcactgcccctttnaacacctgctggttattataacangcagccaaagtngcaatggccatcacctgtggaatagcacagaagttaaacacactctggtttctgagtctcgaaaggtaggtgatgacatctgggatntggtgantncattngttataagttcattcaggnactnacggccaagtcaatattctccggcttagcaaaatccctaacttcttaacatacctgctccaaacctcttnaggccagaactctcttcctccttgctggtcttcagatagtcacggatgatgttt

SEQ ID NO: 502168 - DNA, 251 bp, Homo sapiens
agcctgggcaacaaagcaagactctgtctaaaaacaaaaaaaaagaaagaaagaaagaagggggagggaaagaggaaagaaagaaggaagcaagcaaggaaagaaggaaggaaggaaggaaagaaagagagagagaaagaaagagagaaagaaggaaagaaagaaaaagaaagaatgaaagaaagaaagaaagaaagaaagaatgaaagaaagaaagaaagaaagaaagaaagaaagaaagaaagagaaag

SEQ ID NO: 502169 - DNA, 685 bp, Homo sapiens
  misc_feature (181)..(181): n is a, c, g, or t
  misc_feature (212)..(212): n is a, c, g, or t
  misc_feature (224)..(224): n is a, c, g, or t
  misc_feature (278)..(278): n is a, c, g, or t
  misc_feature (359)..(359): n is a, c, g, or t
  misc_feature (373)..(373): n is a, c, g, or t
  misc_feature (382)..(382): n is a, c, g, or t
  misc_feature (401)..(401): n is a, c, g, or t
  misc_feature (425)..(425): n is a, c, g, or t
  misc_feature (437)..(437): n is a, c, g, or t
  misc_feature (524)..(524): n is a, c, g, or t
  misc_feature (531)..(531): n is a, c, g, or t
  misc_feature (533)..(533): n is a, c, g, or t
  misc_feature (538)..(538): n is a, c, g, or t
  misc_feature (557)..(557): n is a, c, g, or t
  misc_feature (561)..(561): n is a, c, g, or t
  misc_feature (631)..(631): n is a, c, g, or t
acagtgatcatcacccacaaggacaggttgctgggatgaggcaccctttcctttcatgtttaggttcttctcacctgcatttcactttcctaaaggtcccagccacacagcgttcttttagggattaaagtagtaggaaaaaaataaagagaacacaacatccatccttaaagaaaaaaantaaatccactttatggtggacttcagctatngacaaatttggnatcagtgttctccagtctgaacatagtcttctgttacctgggagagagtggtcnggtaggattctatgataaatctcttccatatactgatatatgatggctttgacagctggcatattggtggcatccatcatnagggtcactgcttnccctttccnaatcttcactgcccctttnaacacctgctggttattataacangcagccaaagtngcaatggccatcacctgtggaatagcacagaagttaaacacactctggtttctgagtctcgaaaggtaggtgatgacatctgggatntggtgantncattngttataagttcattcaggnactnacggccaagtcaatattctccggcttagcaaaatccctaacttcttaacatacctgctccaaacctcttnaggccagaactctcttcctccttgctggtcttcagatagtcacggatgatgttt

SEQ ID NO: 502170 - DNA, 81 bp, Homo sapiens
  misc_feature (3)..(3): n is a, c, g, or t
agngcgcaggagcaaggggaaaaggagaaccccaggcgggaacggtgcagccgcaaacgcgcgcgcaacagcgcgcggccc

SEQ ID NO: 502171 - DNA, 105 bp, Homo sapiens
actggactgccggaagaggagacccagctggcttcacttctcgagaagatacgccctgtaccgccaaaccccgtttccagtatcacccgttaactgctcgagaac

SEQ ID NO: 502172 - DNA, 107 bp, Homo sapiens
ttgcgtaagacgtgttagtctacaacaatacatcttgtaaaaactcaataaattatatatatagatatatataacttgtaacatctaataacatcggaacctgcaca

SEQ ID NO: 502173 - DNA, 510 bp, Homo sapiens
cttttttttaatagtatgtaaaacatcatatatttttagttttgtgggtattaggcctgtatataaacggggaacatgaaattttcagatagaaacatgcgccgcattttgaatacatcacctagtgcgggttgttcatccccttaatcatttatgccagatgcaaacaatacatcacacccttttagtgatatttataggtacaatgaaattgctgaggactatactatccctggtgctctatgacataccaggtatcattcatcctttactaaggtgcctacggtcatgaagtatcacggtacatagtcaggaggtgcatgcaagatacgtgcgggaacttgtaccatgtgggtagactgaacagatcacgttatctgctagctattaaggcgaccatgcatcagccatcttatctaatgctcagtctatgcctactctctgctctttttatgacactaacgagagttgatccgcatcatatgtgcatccacactgatcatccagctt

SEQ ID NO: 502174 - DNA, 457 bp, Homo sapiens
gccgcctactactactaaattcgcggccgcgtcgacacgcgacgtgccctgctggaagaacaggaacgcttgaagactggcagcgttacggaaccaatccagttgatctactgagcgcttgggaacatcggcagttggagctcatgctcgccaatctttgagaccccatcacccttcttcgtcatccaaaatgctactggttaaagcgctactctgtccaggctggaagctgaagtatcagacctatgtagtgcttccctgaaggatcacctgtcagaaaaaacgcccgatcaaaagggaaaagcacgcgccagttgtgaggaggcctctttctctaggagtgcgcccaaattcactcagctttccagcagagagcagatcatctgcacgcgtcaaacgaagtatatccctacaatcacccgagaaatggctggctatctcagtcaatgggtttggc

SEQ ID NO: 502175 - DNA, 176 bp, Homo sapiens
aagacaaaacgaaatgttggtcactcggcgtgtgccagcaacttcgtccactatgactttctgcgagtttggttactcggcgtgtgcatcggactcgcggcgttttggaccctaagtctggatggacgaagttgttgcaggtcaggatggacaaatctcagtggacgaagttgttg

SEQ ID NO: 502176 - DNA, 372 bp, Homo sapiens
  misc_feature (30)..(30): n is a, c, g, or t
  misc_feature (149)..(149): n is a, c, g, or t
  misc_feature (155)..(155): n is a, c, g, or t
  misc_feature (170)..(171): n is a, c, g, or t
  misc_feature (174)..(174): n is a, c, g, or t
  misc_feature (204)..(204): n is a, c, g, or t
  misc_feature (208)..(208): n is a, c, g, or t
  misc_feature (222)..(222): n is a, c, g, or t
  misc_feature (318)..(318): n is a, c, g, or t
atagacgacaccagatccttctgaggcagnttcaacttggccatcatcggcttgcttttgacgccctgattgaccaaacaaccccgcaaaaccatctggggtttgggccgcattcttttgcaagttttgcacggtgaccacccattttnttactntgttataggccgaanngcncaatcttggctcacataggcggtcgagcantcgncgcttgcccggcantatttaccacttttttggtttcaggttggcgctggaaccaagaatttggttgtgtaccagaataaacgacgccaccaccaactacggcagcgactnccccactattatagagaatgtttcatcacgtgccctccattttaatcaacgtgg

SEQ ID NO: 502177 - DNA, 494 bp, Homo sapiens
ccgaccgcaggtacaattttaacaattggggtgggtgttatgggggcacaggcaccaaagtccgccaaggccccttgaagagggggggttacaaggttcagggccaggagcccttcggggtcaccaagcctggcccccccaagtccaaagcaagggccaaagccaagaaagggaggggaaggggttagaggccaagcttggatgccaaggggccctgggggtcaaatggggctgggcccaggccttccttttccagggccggaaatgtgacccaccagggcctttggttgggtggttgggtttaatcaatcaggccgcgcctggtccttttcattccccggccccccccttaggggcccaaaggggggggggacaggggatttggggaggtttgggcctcccccaaagcaaggggggtcccagggccgggtttggtttttccccacaattccattattaagaaacacatcaaataaatgggttttttcccccca

SEQ ID NO: 502178 - DNA, 1365 bp, Homo sapiens
  misc_feature (1088)..(1088): n is a, c, g, or t
  misc_feature (1156)..(1156): n is a, c, g, or t
  misc_feature (1237)..(1237): n is a, c, g, or t
ggcccccttctacacagggccccttatttttgggggtttatacaccacaatgtggggacgaaatatatatcgccccaccatttttgtgaagaagcgcccctttcctcacgggccgtttttttgttagcacccacaacgtgtgttaaaacaccaaagtccggcccccactaggggtttttgtacacacaaggcaacttttctacgacgcgactttttcctatattgggggttgttataaggaacacccccggttttttttcgccccacgtatatttttacctccccgagttttcttcgtagataataaatctccacatgttcccaccgctgttaatatgttagaaaactttggggtataaaaaataagagatatgataatttggggggaaatgtcggttttttttccttctggggggcctcctcttaaaaaagtgtccccccacaccgtcggagaaattatattaaaaacaacctcattatggagaaaaatgtggcacacactctttgggtggtctacaaccccacattctccacacttattaggaggatatagagatatatcccccgagatatattctctgtgtggacaacattgtcacactaataatattataggagagagattattgggcgccccccacaacttgtgtcacacacccacaatactgtgctgtgtatagtttttattaatggcaacgactctgctgctgggctcttaattattattataaaaaatataatatggtgtgtacaacacactactggcacactctgtgttgtggtgttgtattatgagatataattatagagagtagtgtgtggtctctgtgcggtgtttctacggaagcgacacaagagtatagaacacactctgtttggtctgcacacagattggtgttacacacatcttataagagggtgtttcttctcgcggagagagaaatgttattatgagaacacgccacgggctcgtgtgtgtctatatttgagacacatccacagagaaattttccacctcttataacccacacaaatataatataagagaacacttttataattctgtgatataatttgacacacacacnctcttgttgtgagagtacacacactcttccccctctatattatatataacgcttctgcacattgtccnttctcgaggcttctaccactctttcttataaaatgcacgcttgggttgtttataaaatataaaagagacacattcactttntgtgagatttttaacaccaggcttcacgtaaaatatccacccacgtaataagtaactggtgaatttttcagcatataaatcgacataccttaaaaggttaataaaattcagctcttttcccatttcca

SEQ ID NO: 502179 - DNA, 124 bp, Homo sapiens
gaataatagcagttctaccggacaaccctaacataaccattcttaattgaactatttatattatcctaactactaccgaggtcctactactcaacttaaactccagcaccacgaccctactact

SEQ ID NO: 502180 - DNA, 118 bp, Homo sapiens
caggacatttcagtatcgtgataggtatatgaatggcactgcccagaatggaaacgctgtaaatttgcacatggagatgccgaaacttcatgcaatgtggaagacaagaagagaatgc

SEQ ID NO: 502181 - DNA, 813 bp, Homo sapiens
  misc_feature (134)..(134): n is a, c, g, or t
  misc_feature (391)..(391): n is a, c, g, or t
  misc_feature (416)..(416): n is a, c, g, or t
  misc_feature (428)..(428): n is a, c, g, or t
catgcccacacccacgagcaccgtctgataggaagccttttcctctgacgctgtccgcaatctcttcaggtttcacgcatgtgtggtgcggctcccatttcatcatcaagtttgaaagaaccccacatttttcntgcgcgtcatctctgacacggcctccctctgctactccatcctgaaagccaagaacgcaggtatttgcaggtgcctggcctcagtggcagcagtgcctgcctgctggtgttagtgtgtcaggagactgagtgaatctgggcttaggaagttcttaccccttttcgcatcaggaagtggtttaacccaaccactgtcaggctcgtctgcccgccctctcgtggggtgagcagagcacctgatggaagggacaggagcngtctgggagctgccatccttcccancttgctctgccnggggaagcgctggggggcctggtctctcctgtttgccccatggtgggatttggggggcctggcctctcctgtttgccctgtggtgggattgggctgtctcccgtccatggcacttagggcccttgtgcaaacccaggccaagggcttaggaggaggccaggcccaggctaccccacccctctcaggagcagaggccgcgtatcaccacgacagagccccgcgccgtcctctgcttcccagtcaccgtcctctgcccctggacactttgtccagcatcagggaggtttctgatccgtctgaaattcaagccatgtcgaacctgcggtcctgagcttaacagcttctactttctgttcttaactgtgttgtggaagtttcacctagc

SEQ ID NO: 502182 - DNA, 120 bp, Homo sapiens
cacgcatgttgtcactactgtccagtcagatcgtggcacccaaggacagttagaggctcgtgtgcatgcccctgcctcttcaggctctccaggcttacagaataattgcttgtcccgctg

SEQ ID NO: 502183 - DNA, 573 bp, Homo sapiens
gaagagaaaatgttgtaaatgaccgacaatgactgtgcggttaagtcggcttgcatccactactagggacgggtcccagagaacgaggcaagctgatgttcagtcgaagtggctcaagagatagagagctaaaccgtatgtgcaagggcgtctatgtgcacgcgatctgaaagtattttcttgccaatatttgtcgtggtgattgatctcgttcatggaacctattcttggtcgactgtaatcaatgagagactgacgagcagatccacatacatcttacccatgctctttcaggtagactgtgctgagacgtagaactgtggtggctagttatgattgtcctatattagtggatgaaagaacttctttgcctgtagaacaccggtcatcagattcatgactcattgaggtgtgaaaaatacgtggaaaaatcccatatagccgtcgtaattggcttgaccaacatcatgaaaatcttgttacatacgacctttacttgaattccacaagaacaggagaacactaggcctgtaaatcgactggataaggtgccaaaatacagtatgtgaatac

SEQ ID NO: 502184 - DNA, 1020 bp, Homo sapiens
gctgaaacggcaacggcggcgtacatcgcgcggatgtgaggccacaggggcagcggggtccagaggaggcagcggcggcagcaggagaggccgccggcagacgccgtgggtgactgcaagagagaggagcctcctcgcatcatggcaaccagggcgggattcaatgcccagctccccaggtcggcatcgctctgacgccggaatataccgtaggacattctataagcgcattctagagtgtgcacgagtgcgagacattcgtgactcaggcatctgtcgactaggctagtttccagcatgactcaggtgagccttgcgaggttctatgtgccatcatgttaacctgtgtgccttgagaacacattgcgtgcgtatcaggcaggaatactggtccttcaacataaaatagttggcatggcggctcagcaagttgcagggcgttttgccattcatggatggacgtcgctgctacagatgtggactctattcctatttaatgcagactgggagggaaaggaaccctcaaatcttttcagagctctggtcgtccacctcattgcgctcacacaattctaagtagacagtgccgtagcatgataggctggggaccatgctatgtgcaaagtaagcagcaaaggtccgtagggctttcgatggcaggtatgaaaggtgccgcgaccgctgttgcagtctggccttcggaaggcaaaaatgaactcgagctgaggctggtgcgggcaggaaccatcgacttgtgggggaggactcacagcaagttaaagtgacaggaccagcccgatcagtagacaggttgtgtgagggggcacgggaccttcaacggcatctaagtggtctctggccaccggacttctcagacattgactcaagaacgtgttgaagcttggacgataaattctgaaatggcgggaccccagtgagccaggcacgctctggtcaaaaagcctcgccaatctggctccaaccttaacgggcgccccgggagtgccaacaacttttaaa

SEQ ID NO: 502185 - DNA, 255 bp, Homo sapiens
  misc_feature (20)..(20): n is a, c, g, or t
  misc_feature (27)..(27): n is a, c, g, or t
  misc_feature (33)..(33): n is a, c, g, or t
  misc_feature (60)..(60): n is a, c, g, or t
  misc_feature (67)..(67): n is a, c, g, or t
  misc_feature (77)..(77): n is a, c, g, or t
  misc_feature (85)..(85): n is a, c, g, or t
  misc_feature (90)..(90): n is a, c, g, or t
  misc_feature (103)..(103): n is a, c, g, or t
  misc_feature (117)..(118): n is a, c, g, or t
  misc_feature (133)..(133): n is a, c, g, or t
  misc_feature (186)..(187): n is a, c, g, or t
  misc_feature (207)..(207): n is a, c, g, or t
  misc_feature (223)..(223): n is a, c, g, or t
  misc_feature (225)..(225): n is a, c, g, or t
  misc_feature (243)..(243): n is a, c, g, or t
gaagggagggttagggtgangtttttntggttntaggaatttagtgttaaaaattagatnaaggaanaagaaggtanaggaaggnaaagntttaagtaagatnatggggtggaaggnngaaaggggttagtantggatggagatggagggttgtaggggagagatttataaattttttttgtgtanntattggagggtgaagagttnaagggtgatttgtttntnaaaggtaaaagaattggnttggaagaaagg

SEQ ID NO: 502186 - DNA, 120 bp, Homo sapiens
accaggcagacatgggacagagcggtaagggaggggagcaggatctcacatgcctgcccaacctattctgccctcaggtggagagtgtagactgcaggatccccactcaacaaccagttc

SEQ ID NO: 502187 - DNA, 304 bp, Homo sapiens
  misc_feature (257)..(257): n is a, c, g, or t
cccccccccccccccacagaatcgtatctactaaacagcttggtttcaggccaggcgcagtggctcacatttgtaatcccagcactttgggaggccaaggtgggcggatcacttgaggccagtagttcaagaccagactgcccaatacggtgaaaccccagctctactaaaaagaaaacacaaaaattagccgagtgcagtagtgcacgtctgtggcttgagcctgggaggcagaggctgcagtgagccaagactcnctgcactccagcctgggcaacagagcaagaatgtctgaaaaaaaaaa

SEQ ID NO: 502188 - DNA, 256 bp, Homo sapiens
gatggaatcaacctaagtgtccaacagatgaatagagaaagaaaatgtatatgtacacaatagaatattactcagccataaaaaataatgaaatcctgtcattggtagcaatgtgcatggaactggaggtcattaggttaagtgaaataagccaagcacagagacaaatattgcatcttctcacttatatgtgggagcttaaaaagtagatgccataaagataaagagcagactggtagttgctggaggccacgga

SEQ ID NO: 502189 - DNA, 1215 bp, Homo sapiens
  misc_feature (1046)..(1046): n is a, c, g, or t
agcgggagctagtgaaccagcggccagccccgcgcagcgcagtcgcagccctgaagaagcccggtcagcgcacgtgcccgcgagacctgcaaacttgtgccaccggctctgccctgtccccggtggatgcccgaacgcctccgcgagccctcacaccctccctgccagtctccagtccatgtggctgcgttcgaagtgctgcatcaagtgtctgggaggagtcccctacgcctccctggtggccaccatcctctgtttctcccgtgggtgtccttatatcttgcggctgtggtgcatgtggctctcgctggcaccgtggtgattcttgagcaaggacttctccaccaaagccagtgaccatgccttgttgatcgaggtgatcacctgatgcgagtcatgtgctatcctattgttaacacttcgtcgtcacccttttgaccttactcgtcattgggactcattcctgttgtacaagaaagggcgttaaaggcaccgaccaaaggtgcccgtagagaagagacttgtgcgggtggaggttggccagacataccagctttgctgggcccgaattgccatccacggtggaaattggttgccagttgttgcttctccttcaagcgcttaatttgttgccgtttgagaaccgttgggctctcggcctggagagtcgtcgttgttcgggtaatctccaccgcctggggtttggcccctggtcgttggtacttctttttattacagaaccattattggggccaggctttcggttgacacgatccgtttccacacgttcaaccccgcaagaacccattccgggggtagcccaacaaggtctctgttgagaaagggccagggactacttgcctggatgggaacttttctccagaagcaaagattaccagggcatattttgggagttcccccttggggcgcatggtcgtcattgccgcgcggtgggcacgcccctttatggtgtggtgcctgtccttgccctctgtgtcgcgagcacaccggagtccgtgcccacacatgccgacaccgagtgcttntcttaccccatgtgtgcgttcattctgagccagggtcgtgccattgactggggcccatggctggtgcggggcagtcttggggtgaggccccgccggtgttcgactctgagcccccctgtgcgtgtgattcttcacctttacgtggagtcttcggagaccttagtgacct

SEQ ID NO: 502190 - DNA, 379 bp, Homo sapiens
ctcttaccccacgggagaacgtgaacaggaagcagaaggtctagctgtccgaggtcaacgacttctggatcgtgttcttcctggggagctattacaattcctcggaacggtcctgggctccactccgggacccacccagccgcgaggagatctttctgtactacgaggctggacatctatctttctacagtgccaccgatgggacactgctattcatctttcccgagatccccttctcggggacgctgcagcccctcttctcacccctgtccagcagcccgaccccgatgactatctgccggccgaaaggtgagtccggagacaccctggctccccagtgactcggcccctcctgtaggagtcctgttgcctctcctgc

SEQ ID NO: 502191 - DNA, 134 bp, Homo sapiens
aactgccttatggccaagtcatcactattggcaatgagcgcttccgctgtgcctgagacactcttccagccctccttcatttggtatcgaatctgcttgcatcatgaacacttacaatagcagtcatgacgtgt

SEQ ID NO: 502192 - DNA, 159 bp, Homo sapiens
  misc_feature (29)..(29): n is a, c, g, or t
  misc_feature (67)..(67): n is a, c, g, or t
  misc_feature (112)..(112): n is a, c, g, or t
ttcctgtaggcctttagatacgcagcctntcccaagaattgcagaaagcatccagtcctacccaaanagccctaggggagtagaacagagcccccccccacccgccccccanaatttcactgaagcactttcatcatccttcctctccttttctgtctt

SEQ ID NO: 502193 - DNA, 458 bp, Homo sapiens
gccgttgcatgtttcattaactgacagtttgcccatttgcttctatggctaggttatgtaaactgcactgatgaactaaattaaagccttggccgatttatactataaattcattgatggctagaaccaacactgtttacttgtgagaattgtcagtgcaacttttacctcccagtattgttcagagcgattgaaactaattaaacgccctgttcttgacgatgcaaacccccaatctgtaatactttggtttaatacatagagctaacaatgaaactgttggaggtgatggcatttgtagccctgctggttgtttcaccactgggcaaatttttaccattaaattgcccttcacttctacaatcctgcgtttaagttttgagagtcaaacgccctcgtttatgtggctgtggagaatcggcctttcattacttgggcacaattttattcatgcctgg

SEQ ID NO: 502194 - DNA, 205 bp, Homo sapiens
aaccccccctttttggcccccccggggcactggggggggggggttggggttcccccccccccccccttttgccccccccccccggggggggcccgttttggcttttttgccccatttgggtttttgggggtttttcccccccccccccccccccccccgccaaaaaaaccccccaaaggggcttttttggggccccggggcccca

SEQ ID NO: 502195 - DNA, 384 bp, Homo sapiens
tcatagaggatctcacccgactagccgacagccccacgtagtacagctagtggggtagaagagtgcatagaacacaggcacctaacaggcccggggacctaagcacgaagacatacccgcagcacatatgaagaccaagccgctatctaggccgggagcagataagtcgggctattcaggaaggaggtccatttctaactgcaaggtcctacaggccgccctggtaccccctatgcacactactatgctataccgtagggaatcagacaccctagaacactaaactacatactaccacagtacacctaccgtagaatgaagaagtaagaccctgtacgggactagtacgggggggttacctgagctacgaatatcgtaatacat

SEQ ID NO: 502196 - DNA, 331 bp, Homo sapiens
tgtgatctagaggatcccgagctctctctgtgggggaaggggagagatcccaggtgttcacatttccaccacagagtcctgcaatcccagccatgggagagcctcttgaccctcagaggctctcagactaacatggtggagctgccttgagaccatgctagggaattggtccaaggagggaactcacacggggtcccacatgcatcccctgagtcctaagcagctgtagcgtggtacgatttggagagcccagccctcaccagacagcatcctttcctagggcctgacagcacctgcgtctccacatctctcaagcccccacagagagcgt

SEQ ID NO: 502197 - DNA, 179 bp, Homo sapiens
aatatttgacatgtgggaggagatgtggcaccattattgagttctgaggccatacagatggaacatagttttatgggacatacgatgatggagcaccaactcatgatgaggcacgcggctcattgctgatttggggagcacatctattactaatctgggtttggagacactgggtttct

SEQ ID NO: 502198 - DNA, 111 bp, Homo sapiens
gctgattctagagcatccccttctacggtctcatcactgtagttaaaggcaaagcaccataggtaaagctgatcaactgtccagagtactcaagcttacggaatctatgct

SEQ ID NO: 502199 - DNA, 173 bp, Homo sapiens
  misc_feature (79)..(79): n is a, c, g, or t
gcggtttgaacctcagattaatgcggaggaaagtgaaattcgttattctacatggaagaaagctgtgatgaagtcaatnggttgggttacaactcaatctccagaaagtggtattccataaaacctaccaactcatggattcccaagatgtgagctttttacataatgaaaga

SEQ ID NO: 502200 - DNA, 422 bp, Homo sapiens
  misc_feature (13)..(13): n is a, c, g, or t
  misc_feature (416)..(416): n is a, c, g, or t
gagacggagcttnactctgtcactcaggctggagcgcaatggtgtgatcttggctcactgcaacctccacctcccgggttcaagcaattctcctgcctcagcctcctgagtagctgggattacaggtgtgtaccaccacgcctgggtaattgtttttgtatttttagtagtggggggtggggtttcatcattttgaccagggctggtctcgaactcttgacctcagatgatccgcccacctcggcctcccaaagtgctggggattgcatgtgtaagccaccgttcctgggctcatatttaaattaattatatcacaacaagatctgcaagttcatactcagagtatatattttgaactattaatgggttcaaaatagtttaaggatatattttattaattttaatttctcacttantttcac

SEQ ID NO: 502201 - DNA, 103 bp, Homo sapiens
tgccttaaaggcagaagcacagagcctggctcggggcgctgcagtactggagccccatagttgaaaattatcttcctcccagctcctacccactcctgtccag

SEQ ID NO: 502202 - DNA, 518 bp, Homo sapiens
  misc_feature (136)..(136): n is a, c, g, or t
acgaacccaaagggaaaagaggaaggccccccatttatgttttttaggccttttagaaaacatggagttgttcctttggccccatatatgcgaatttataaaaaaggtgatattgtagacatcaaggggatgggtnctgttccaaaagggatgcccccccagtgtttccctggccaaactggaaaagttttcaatgtttccccgcctgctgttggccttgttgttaaccaaccagtttagggcaagatttttgcccaaaaaattaatgtgggtatttggcccctttagcccttttaaagcccagatagcttcctttaacgtgtgtagggaaatgttcccaaaaaaaaaaaagcccaaaaaaaagggtcctgggttttatttaagggccagcctgctccccccaaaaaagcccccttttttagaacccatgggaaggagccttagctgctgggacctttttccttttaatttatgggataattggtgtttaaaaaaaaaattaagggcctttggggtta

SEQ ID NO: 502203 - DNA, 240 bp, Homo sapiens
  misc_feature (1)..(1): n is a, c, g, or t
  misc_feature (10)..(10): n is a, c, g, or t
  misc_feature (15)..(15): n is a, c, g, or t
  misc_feature (69)..(69): n is a, c, g, or t
  misc_feature (114)..(114): n is a, c, g, or t
  misc_feature (206)..(206): n is a, c, g, or t
nctgcaggantcggnacgagcggatgcaacacatgctaaggaagcaaaggaagccttcctggaactcantctaggagtggctaggaaaggttttacaaaaaggaaacacttganctggatactgattgacaagtaggttcaccaggcagataagggaggaaaattttgtaacagagggaaagcactggcaaaagcaggaaattcantgtgcttcagagaggagaaagcccacatatggga

SEQ ID NO: 502204 - DNA, 768 bp, Homo sapiens
  misc_feature (14)..(14): n is a, c, g, or t
  misc_feature (33)..(33): n is a, c, g, or t
  misc_feature (51)..(51): n is a, c, g, or t
  misc_feature (61)..(61): n is a, c, g, or t
  misc_feature (88)..(88): n is a, c, g, or t
  misc_feature (105)..(105): n is a, c, g, or t
  misc_feature (128)..(128): n is a, c, g, or t
  misc_feature (327)..(327): n is a, c, g, or t
  misc_feature (462)..(462): n is a, c, g, or t
  misc_feature (536)..(536): n is a, c, g, or t
  misc_feature (542)..(542): n is a, c, g, or t
  misc_feature (549)..(549): n is a, c, g, or t
  misc_feature (557)..(557): n is a, c, g, or t
acccatagggaaancccaaggttaaaccttttngggggaattgcccatacngtctccgttnacattctccccggcgagtgccccaagngttacaatttctccaanaccctggccaacacttatttccnattttttttttttttttttataacttggatgtgaagtagtttctcattgtggctttgatttgcatttccctaatgactaatgaagttgagcatctttttgcatattttttggccgatttgtaaatcttcagagaaatgtctaaggcctttgcccatttatgaattgggttatttttgttgttgtcgagttatacaagtnctttatatgttccatgtattaatcctttatcagatgtatgatctgcagatattttctgctattctgtgggtgatgttttcactctttttaaattaattaatcggttttttagaatagagatgggatctcactatnttgctcagggtggtctcaaactcttgggcttaagtgatccacctgcatcagcctcccaaagtgttgagattacnggtatnagccacngtacccanactaactttatttttttaagttgttgttattattattttttgagatggagtctcactctgtcacctagcctggagtgcagtggcgtgatctctgctcacctcagttaacgcctcccccgttcaagtgattctcctgttttagtcccccgagtccctgggattacaggcacgtgacaccactgctggctgatgagttcgtgtatactctaga

SEQ ID NO: 502205 - DNA, 135 bp, Homo sapiens
ccctagagttaccgggtgctgctctctggcttcgctgttacgcctgagcagtgcctggtcatgatcaatatctccatctcctgtgatcataatgcgtttctcaattcttgcttcagaaattccaccttttacagt

SEQ ID NO: 502206 - DNA, 231 bp, Homo sapiens
gctgtcatagtcccagaggataagcaatacctatttttgactgagtttcccagcccagacccagggacccttggccccaagctcagctttaaaaaccgccccaacccctccagctccaaatttgagcctcccccacatagactgaaactcccctggccccagccctttcctgcctggcctggcctgggacacctcctttttgccaggaggcaataaaagccagccccggga

SEQ ID NO: 502207 - DNA, 519 bp, Homo sapiens
  misc_feature (513)..(513): n is a, c, g, or t
ggtatcgctttggtatgtttccgtgtgtggttgcctttttattacacagcttttaatattttttttccttgtagtgctgacgactgaatccagggccttgtgcatgctcaggaggtgctctcccactgagctgtgtctgcagcccttaggatttcagtataaagttgcagatgaatattttatattagacaatctactcattaccttaatattttataactaccctagacctagttccttttatctttgacttatcccactggtttgtcactttaggagaaatacaaaggtgagaataggtgtcagataacgtggtatggttacttttcgtagacgaggtaaaagtattgggtttatatttccctaccatatgcatgcaaaagtttaagttgacaagtcataatgtctgcagcttattttaaattgaaactgatcagtgactgttgaattgtgatcaccccttaaacttgtctgtacctatgtttaaatgtaataaaaattgaggcaaaaatnatttaa

SEQ ID NO: 502208 - DNA, 420 bp, Homo sapiens
tgagatagagtctcactctttcacccaggctggagtgcagtggtgcaatgtcagctcactgcaacctctatctccgaggttcaagcgattctcgtgcctcagcctccagagtagctgggattacaaggcatgtatcaccatacccagctaatttgtatttttagtagagacagggcttcaccacgttagccaggctggtctcgaactcctggcttcaagtgatccacccatctcagcctcccaaagtgccggaattacagatgtgagccaccgtgccctgcccaaagaaatttttaatattaaaatttattacaggaatgtgatactgattagaactgactataagagtaacctcagttaaacacgttttctaacttctatcaaaaatcgctttcggccaggcgcagtggctcacgcctg

SEQ ID NO: 502209 - DNA, 455 bp, Homo sapiens
  misc_feature (449)..(449): n is a, c, g, or t
ctgcttacaaagaattgagagtaacatgttagattatatggtaatctagagtttgagacattggagatgataattaagttgtacttttcaaatagccaatatgttggaacaaaaagatgcctgagacagccacatgcaaggtgtgatcttttattgagaaataaagtcagaaaaaaaaaaaaaaccctgtaagacgtttgagggatctttaggagaaatacaaaggtgagaataggtgtcagataacgtggtatggttacttttcgtagacgaggtaaaagtattgggtttatatttccctaccatatgcatgcaaaagtttaagttgacaagtcataatgtctgcagcttattttaaattgaaactgatcagtgactgttgaattgtgatcaccccttaaacttgtctgtacctatgtttaaatgtaataaaaattgaggcaaaaatnatttaa

SEQ ID NO: 502210 - DNA, 747 bp, Homo sapiens
agcggagtctgcgctcgggctgcaggagaagatggcgcgtctccataggagttaaagtccctcgtccttgtcgcttgtcggaagaacttgtaagacggacaggaacaaggagtacgcgcctgcacggtacacgttaccgctggggccttgtagagatgatgaaggatagtagacactatacaagggtggacgatggccgatgagtatcattcggtgcctagcccaaggcacgaacattatgagaagaccagtaatgatactaagccgtgaataggttatggaatgatgtgtaccctagaattaccgcaaggaagcatcgcttccggtcaggttagcatttatggtgacaataatagtgtatagtatcgaactggaatacatagtatagtgtccaagtggggactaggtgagatagccccggaggcatacctatgtgttatgcgcaatattggcatatcatttttcatactaagggcatacacatatgtcccgtaccttccaatgacgctatagaaccgtcttagttgattgttccaaaagtagaaacgagactacagttgaaagccttcccgagcatgtcccaaccctagggagaagggaaccaaaagcagttggcacaacccaaattattagatttccctcatgatgtgaattcttccaagaactttgttcctatagaaattccaaaacaacccctttcgtaccgtccatgttcaattggttctttggattttaaagtaattcaca

SEQ ID NO: 502211 - DNA, 259 bp, Homo sapiens
aaaagattaatatgggtgtttatttgggggcattttaagttttaaaaaaagggaggcagatggagattatcccccacaaatatatttaaatggttttttgttaatttgaatttaaaaccccccccctatttaaagtaattagttacgcatttagttccatggccagtttttttttttaatcaatttcagtaagacaaaatattctaaaatgtttaaatagcctcattcaatcttacattttgacattccagcaatcatt

SEQ ID NO: 502212 - DNA, 735 bp, Homo sapiens
cttctgcgtcctgctgaagctctgtgctctccaggcacttccaacaccactaggtgcctggttctcttgactccaccaggtaaacagagccaccatgtctcgtccagtcgagatgtgtccttccggagcgggggcagtcgtagcttcagcagccgtctctgccatcatcccgtgctgtctcccgcaccagacttacatctccgtgatgccggtccgggggtaggacggtaggatggtggcttcgagcaaggtcagccttgtcgggtgcttgtggagtgggtggctatgcgtcagtcgcggagcactctacaatctgagggaggcctccaagaggatatccatcagacactagttggtgtgcagcttcaggaaccggttcggtgctggtgctggaggcggctatggctttggaggtggtgccggctagtggactctgggcttgtcggcggtggagcatggctggtggctttgggctcggtggcggagcgtggcgttggaggtggcttcggtggcgcctggcgtttccgtgtctgacctcctggaaggtatccaagaggtcactgtcaaccagagtctcctgactcccctcaacctgcgaatcgaccccagcatccagagggtgaggaccgaggagcgcggagcagatcaagagcctcaacaatcagtttgcctccttcatcgacaaggctgcggttcctggagcagcagaacaaggttctggacacaagtggaccc

SEQ ID NO: 502213 - DNA, 679 bp, Homo sapiens
caggattatatacggagttctttggaccttctttcatgtatagactaaaatagtggtgctatcaatcgatgtgcatcatgagtactactccaatagaaagtatggggcatgtcaaagtatacagtacaccactttcatacatgtacaacataggtggatgaagaatgtctcttagcagtaatactggatgtagcctctggttttaccagctgcaaactctaggactattatataagtaaaaatctctcttgtgatactggaaagtgattagaatgtgcaaactgatatagtagctatcatccgcctcttaaagggtaccaccacaggaaagtccatttaagatgttggtaggtttaacaaagttggaatgctggcactgttgaattgggcaacagttcttcagacctggctcagagctacaatgcatttagtatattaaagcagctgacatgatgactttttgcgagccttcccaggcactggagtttatctgttaatttgccgcactaggtcataaaagatctcattaacatttatttttgattttgcagaagattctaagaatgcacagttgtaccattgtcttgctagattttgaccttgttccttccctacaactctttcatcttccaagtcacacttatttaccacaaggatcattggacctcctcagtgtctt

SEQ ID NO: 502214 - DNA, 313 bp, Homo sapiens
gactctagattatcccaatcgcacgacaaggagtgagaccactgacgcgcaccaccacgcccagctagttttttgtattttttttttgagatgaggttttgccatgttgcgcaggctgatctcaaacttctgggctaaagcaatctgcctacctcagcctcccagaatgctggggtaacaggtttgagccattggccctagcctaagtttggctaagtccctgtttactacattctaaaattttaaattgaatttctgtttttgggtcactaagggtttttggttggttggtctgttttggttttggtttaag

SEQ ID NO: 502215 - DNA, 185 bp, Homo sapiens
cgaactgggggtacacttggcttactagaacgtaacacctttggtttaacaccgactctttaaacactgtgaaaagaccaacacagactgggaggagaaccacgttatgcacatagccaacaaacgctccttttatgtctgtgtgtctatatatatgcgtgtgtgtgtgtgtgtgtgtgtgtgtg

SEQ ID NO: 502216 - DNA, 524 bp, Homo sapiens
cgggacctgccagttgcattgggggaatgttgacatttgaggtgggcaggcaggatgcctgcgttttaaaatatttgggtgagtaactgatccaaccaagggaaggttgattgattaaatctgaagtgggattcttggtaaaatgaagacttttatttgggaatgaaaaaccttaaaaaaatgttgtcatcgttgaagtgtgcattttccctgcattttttcccaacaaaattttgttgggggttatgttactgaagaatgaacagatgagtaagtggaggtgttatgtaaaggcatattgtactcgaaatctgaagacctgcagcagatgtaaattacaactcttgttttaactttttaaaagtgtgtgaaaatgtcaaaatataaatgagtcaagtgttattttactgtgtgatgggtggatgaggctgtccaatgtaccatttgaatgaattctcacgcatggtttgacagtgcaagaattctgtatcatttacaaactcaataaaaagtgagtatatgga

SEQ ID NO: 502217 - DNA, 393 bp, Homo sapiens
tagaggtaagaaaataagtttatgtttgaccaggcacggtggctcacgcctgtaatcctagcacttagggaggctgaggcgggcagatcaggaggtcaagagatcggaccatcctagccaacatggtgaagcctcgtctctactaaaaattcaaaacttagctggccatgatgacacacgcctgtagtcccagctactcaggaggctgaggcaggagaatcacttgaacccaggaggcagaggttgcggtggaccgagatcatgccactgcattccaacccggcgacagaacaaagactccatctcaggagggtccgtggcttcattcttgaagtcagtgagaccaagaacccaccaattccagacacacttatacacttggcactgggaggt

SEQ ID NO: 502218 - DNA, 469 bp, Homo sapiens
tgtgcgtcctgcgacacctgggccaggtccatccctgctgtcagtgcctatccggggccatatcctcccccaggccccacacaggagagggctgggccagataggttgacgcagctcccacccgcagaacttggcgagctacgacgtctgcagcatcctcctgggcacctcgacgctgctggtgtgggtgggcgtgatccgttacctgaccttcttccacaactacaatatcctcatcgccacactgcggtgtggccctgcccagcgtcatgcgcttctgctgctgctgtggctgtcatctacctgggctactgcttctgtggctggatcgtgctggggccctatcatgtgaagttccgctcactctccatggtgtctgagtgcctgttctcgctcatcaatggggacgacatgtttgtgacgttcgccgccatgcaggcgcagcagggccgcagcagcctggtgtggc

SEQ ID NO: 502219 - DNA, 303 bp, Homo sapiens
ccgtaccgatggccatgcattgctgtctgcacactccatcaggaggaagggcatgaaagtcacatgcagtacagtgaaactcatctggtgtcacacactgcccagcagtgagggtgagagctcgtgctccacactgctgtgctgtgccttgtgcttgctccgagatgcaatcctgcttgctccagacttcatgccatgtggccatctgggactgtgcatggtgccatctgggacgggttgggtgatccctctagatgtcgaccctgcagtgcattgcaatgctttggcaacttggcccgtcgg

SEQ ID NO: 502220 - DNA, 713 bp, Homo sapiens
  misc_feature (43)..(43): n is a, c, g, or t
  misc_feature (46)..(46): n is a, c, g, or t
  misc_feature (48)..(48): n is a, c, g, or t
  misc_feature (54)..(54): n is a, c, g, or t
  misc_feature (69)..(69): n is a, c, g, or t
  misc_feature (85)..(85): n is a, c, g, or t
  misc_feature (92)..(92): n is a, c, g, or t
  misc_feature (95)..(95): n is a, c, g, or t
  misc_feature (101)..(101): n is a, c, g, or t
  misc_feature (105)..(105): n is a, c, g, or t
  misc_feature (109)..(111): n is a, c, g, or t
  misc_feature (119)..(119): n is a, c, g, or t
  misc_feature (127)..(127): n is a, c, g, or t
  misc_feature (129)..(130): n is a, c, g, or t
  misc_feature (140)..(140): n is a, c, g, or t
  misc_feature (146)..(146): n is a, c, g, or t
  misc_feature (151)..(151): n is a, c, g, or t
  misc_feature (160)..(161): n is a, c, g, or t
  misc_feature (167)..(167): n is a, c, g, or t
  misc_feature (170)..(170): n is a, c, g, or t
  misc_feature (182)..(182): n is a, c, g, or t
  misc_feature (184)..(185): n is a, c, g, or t
  misc_feature (187)..(187): n is a, c, g, or t
  misc_feature (189)..(189): n is a, c, g, or t
  misc_feature (198)..(198): n is a, c, g, or t
  misc_feature (218)..(218): n is a, c, g, or t
  misc_feature (223)..(223): n is a, c, g, or t
  misc_feature (226)..(226): n is a, c, g, or t
  misc_feature (230)..(230): n is a, c, g, or t
  misc_feature (234)..(234): n is a, c, g, or t
  misc_feature (242)..(242): n is a, c, g, or t
  misc_feature (269)..(269): n is a, c, g, or t
  misc_feature (281)..(281): n is a, c, g, or t
  misc_feature (283)..(283): n is a, c, g, or t
  misc_feature (287)..(287): n is a, c, g, or t
  misc_feature (293)..(293): n is a, c, g, or t
  misc_feature (296)..(297): n is a, c, g, or t
  misc_feature (299)..(299): n is a, c, g, or t
  misc_feature (305)..(305): n is a, c, g, or t
  misc_feature (315)..(318): n is a, c, g, or t
  misc_feature (323)..(323): n is a, c, g, or t
  misc_feature (331)..(332): n is a, c, g, or t
  misc_feature (336)..(336): n is a, c, g, or t
  misc_feature (338)..(338): n is a, c, g, or t
  misc_feature (344)..(344): n is a, c, g, or t
  misc_feature (346)..(346): n is a, c, g, or t
  misc_feature (348)..(348): n is a, c, g, or t
  misc_feature (357)..(357): n is a, c, g, or t
  misc_feature (363)..(363): n is a, c, g, or t
  misc_feature (369)..(370): n is a, c, g, or t
  misc_feature (382)..(382): n is a, c, g, or t
  misc_feature (384)..(384): n is a, c, g, or t
  misc_feature (386)..(386): n is a, c, g, or t
  misc_feature (404)..(404): n is a, c, g, or t
  misc_feature (412)..(412): n is a, c, g, or t
  misc_feature (415)..(415): n is a, c, g, or t
  misc_feature (419)..(419): n is a, c, g, or t
  misc_feature (421)..(421): n is a, c, g, or t
  misc_feature (426)..(426): n is a, c, g, or t
  misc_feature (433)..(433): n is a, c, g, or t
  misc_feature (437)..(437): n is a, c, g, or t
  misc_feature (439)..(441): n is a, c, g, or t
  misc_feature (444)..(444): n is a, c, g, or t
  misc_feature (448)..(448): n is a, c, g, or t
  misc_feature (451)..(451): n is a, c, g, or t
  misc_feature (455)..(455): n is a, c, g, or t
  misc_feature (460)..(460): n is a, c, g, or t
  misc_feature (464)..(464): n is a, c, g, or t
  misc_feature (483)..(483): n is a, c, g, or t
  misc_feature (497)..(497): n is a, c, g, or t
  misc_feature (509)..(509): n is a, c, g, or t
  misc_feature (544)..(545): n is a, c, g, or t
  misc_feature (562)..(562): n is a, c, g, or t
  misc_feature (692)..(692): n is a, c, g, or t
gcaccctccccactgggctcctggttgcagagctccaagtccncananagaaangcctgtttgagaagnagcgggaaagaaagangcaagcncanaggccntganattnnngtgggctnaggtcccnannggctcaggcncctgcntcccnaggaaaggnnaaaaanaanaggggagtcccntnnangnacttgcttnaggtgctgaaacaggcgcanctccnagnagcnactnagggaaanaaagtggtgctgggaaaaaaagggganaaagtggaaaananaagnaaagcntcnnanaaaaanaaaaaaaaannnnacagnaaaaacannaaananaaaaanantntgggaaaanagggcnccttcnnaaaaaaaggtcnancnaagcagaaaaaaagcgcngactcaanaanaagnanttggnacaaaanaaantnnnacntganaanaaanaatcnaaanaaaaaaaaaaaaaaaactnaaatctgtgaaatngaggaacaaaangaggaggtgcaattgaaagagttcggattgaccgnnaaaacagaaacccaccngcatcaagggaagagcatagaaacatgaacttggagagaaccccagggtagtagcccctcagtgcaatgtaggagtccaaggggtaaaaacatacagggggggaagacctctccgtgttcagctggagtncaggatagtggactggacatg

SEQ ID NO: 502221 - DNA, 848 bp, Homo sapiens
  misc_feature (15)..(15): n is a, c, g, or t
  misc_feature (80)..(80): n is a, c, g, or t
  misc_feature (84)..(84): n is a, c, g, or t
  misc_feature (100)..(100): n is a, c, g, or t
  misc_feature (103)..(103): n is a, c, g, or t
  misc_feature (105)..(105): n is a, c, g, or t
  misc_feature (116)..(116): n is a, c, g, or t
  misc_feature (147)..(147): n is a, c, g, or t
  misc_feature (162)..(162): n is a, c, g, or t
  misc_feature (177)..(177): n is a, c, g, or t
  misc_feature (181)..(181): n is a, c, g, or t
  misc_feature (192)..(192): n is a, c, g, or t
  misc_feature (226)..(226): n is a, c, g, or t
  misc_feature (236)..(236): n is a, c, g, or t
  misc_feature (241)..(241): n is a, c, g, or t
  misc_feature (248)..(248): n is a, c, g, or t
  misc_feature (271)..(273): n is a, c, g, or t
  misc_feature (276)..(277): n is a, c, g, or t
  misc_feature (345)..(345): n is a, c, g, or t
  misc_feature (348)..(350): n is a, c, g, or t
  misc_feature (357)..(357): n is a, c, g, or t
  misc_feature (367)..(368): n is a, c, g, or t
  misc_feature (410)..(410): n is a, c, g, or t
  misc_feature (441)..(441): n is a, c, g, or t
  misc_feature (447)..(447): n is a, c, g, or t
  misc_feature (452)..(453): n is a, c, g, or t
  misc_feature (474)..(474): n is a, c, g, or t
  misc_feature (495)..(495): n is a, c, g, or t
  misc_feature (535)..(535): n is a, c, g, or t
  misc_feature (589)..(589): n is a, c, g, or t
actggatgatttttnttttgaacatttgccccactacactgttttggggatagctggttaagcaagttaaagatatttanattnatattggaattttagnaantntttttcaggtnaaatatataatttcaagtgcttttaatgaanttatttttaattggntagggagcaaaaaanaagngagctctgctnttagttagttaaccttgttcttctcttaaatagnacagcggcanggtanttaaaantccaggaagcatgggattttatnnngcnngattttgggcacatgaaataatagctctaggaaaatgcgcatcttaatgactctttgtaaagagaggnatnnnttacaantgtgatgttnncttacataaaagttaccccataagttaatcctaacttttatncttgaattttatttcatcccaatagcttgtntcattngcacnnctttgtattttgattgacctntagaatggatgttaggaaacncaaaattgaacacagtgaaacaaatggtatttgaagaaangtaataccctttatattctatttatgatacccataatcaaatgagattattttnccacataaatgttttaaatatcagatttttagtttgcagttttaggaaaatgctttagatagaaaaggttcttatgcattgaatttggagtactaccaacaatgaatgaatttattttttatattcttacacattttattggtcattgtcacagatagtaaatactaaaaatttcaggtcagtttgttttgaaactgaaattggaaataaatctggaaatgttttgttgccctaaaataataaaatgaatttttctgga

SEQ ID NO: 502222 - DNA, 716 bp, Homo sapiens
  misc_feature (339)..(339): n is a, c, g, or t
  misc_feature (425)..(425): n is a, c, g, or t
  misc_feature (476)..(476): n is a, c, g, or t
  misc_feature (483)..(483): n is a, c, g, or t
  misc_feature (525)..(525): n is a, c, g, or t
  misc_feature (542)..(542): n is a, c, g, or t
  misc_feature (556)..(556): n is a, c, g, or t
  misc_feature (563)..(563): n is a, c, g, or t
  misc_feature (570)..(570): n is a, c, g, or t
  misc_feature (585)..(585): n is a, c, g, or t
ctgatagtctttttccacattagatcatctctagaaattggttgttttacaatacataagatgtcaatagttaattggtagtgtttttacttgagacaggttctggctctattacccaggctggcatgcagtgatatgatctcagcttgctataacctctgcctcccaggctcaagtgctcctcccacctcagcctcagaagtggttggaaatacaggtgtgtgccacagacacccagctaattgtcatctacccgcctcagcttcccaaactgttgggattgcaggtatgagccactgtgcccagcagaaattacatttacaaattaatatgaagacntggtgataactaacatatttataacatgaaatctgctcatccaggaacatagaatgcaaatctttcattccactcagcaaaatttngtcctgtccttgataaaagtcctgcacatctaagtttattcctaggtattnaattttngctgaaatacctgaaaaaatacttcatcactatatcttctangtgattatagctaacantggggaaggctatngattttnatataanagaacttttaaccantaatcttaaaaattgtttttctcagttggttcctttggatatttttaggtaaacaatcatgtcaactgaaaataatgataaattttctataaagactatgacatcacaggaaaatacagtaaatacttttt

SEQ ID NO: 502223 - DNA, 242 bp, Homo sapiens
ggggggggcccccccccccccgggggggggtttttttccccccaaaaaaaaaaaattttttttttggggcccgcgccaatttttttaaaaggggggggggccccccttttttcccaaaaaaaaaggtttttcccccccccgggggccccccccgtttggggttttttttggggggggggtttttcccccccccgggggggttttttttttttttggccccctttttaaggggggccccccca

SEQ ID NO: 502224 - DNA, 299 bp, Homo sapiens
  misc_feature (2)..(2): n is a, c, g, or t
  misc_feature (57)..(57): n is a, c, g, or t
  misc_feature (72)..(72): n is a, c, g, or t
  misc_feature (135)..(135): n is a, c, g, or t
  misc_feature (275)..(275): n is a, c, g, or t
antcaaagagtcccagaaggcctctcaattctctgtccatcaagactagcagcgggnctggagtcggctaangcagtgccacacactcgcagccctcacccacccccagcaatgagagtacagacacggcctctnagatcggcagtgctttcaactcgccactggctcgcctatccgctcagccaacccgacgcggccctccagccctgtcaccttccacatctccaaggtgctttttggagaggatgacagcctgctgcgtgttgactgcatanggtacaaccgtgctgttcgtgatt

SEQ ID NO: 502225 - DNA, 150 bp, Homo sapiens
  misc_feature (92)..(92): n is a, c, g, or t
gacctgggcaccttcacgggctactaagccctggccctggcctggcgctgcccgcggacggcggcgtggtgacctgcgaggtggacgcgcanccccggagctgggacggcccctgtggaggcaggccgaggcggacgacaagatcgacct

SEQ ID NO: 502226 - DNA, 228 bp, Homo sapiens
agggtttttttttgggggttgggggtttttcccccaaacaatttcccgggccccccttttggggggggggtgattttgggcccaaaaattggggtttgggggccctttggtttgttggggtccccccccccccgggggggggggggcctttggaaacaaaaaaattttgggggcccccccttctttttttttcccccccggtttttaaaatatttttttaaaagccca

SEQ ID NO: 502227 - DNA, 110 bp, Homo sapiens
gggctcccctgtgtaactgacacttagggagatttggaagctgggtgtgggctttgggttcatcaccaagtttgaggcagagtctgcactccctaaaagcaaagggggaa

SEQ ID NO: 502228 - DNA, 370 bp, Homo sapiens
tgactaatatacactcccaccaacgataatgtgtactgatgtctgccacatcctctccagcatctgttgtatcctaacattgataagtaatcgccattctaactggtgtgccttggcatctcattgaagttttgatttgcatgtctctagtgaccagtgatgatgagcttatcttcatgttggtagctagcataaatgtcttcttatgaaactgttcatatccttagcccactttttgatagggttgtatttttcttgtaaatttaagttccttgtagattctggatattagccctttgtcagatggatagattccagaaattttccccattctgtaggtggcctgttgattctgatggtagaaccgact

SEQ ID NO: 502229 - DNA, 410 bp, Homo sapiens
ggacctaaaagcttagctgcccctcttacgtgtcgaactacgattcagtcctgaactccgatcctctcctgtctctggtaggcatgcagccttctcgaaagtgtcttcccatttctttgatacataactctgtgttctttcttcctgtggctagcatgcacgtcggatatattgaagtataagcatagtctctccgggctgagagatttctagctacttcatcaggcaccagtattaagtaatagtccttgacataaactgtttgagtaatcatttccatcataccctatcggatagagacacatagctcctagtacctgtacatcgagcctagtctgagataccgtgtgtagagtgagctaagatctctggtagtaagcctgcgctactcgttcatgaattgatattag

SEQ ID NO: 502230 - DNA, 592 bp, Homo sapiens
  misc_feature (24)..(24): n is a, c, g, or t
  misc_feature (49)..(49): n is a, c, g, or t
  misc_feature (135)..(135): n is a, c, g, or t
tggagaaatatcaaaaggtttatngaaacatactcagctcagacgtacnggcttatgaagcggtcagtcctcccccggcccccaaacactaacctttttcatttttctttaagggttaagggcttagtgggtagntttatatagaaacaagcaagtgtaggtgattagagttatcgtgcagagggacccaccctcatttatacattccagtgccgctcgaggttaaaactcgtgcttgtgaactcgagtgctagaaggttagtgcgtggccaaacaggtgcagagaaacagtgggggccttggaagtggccgagaagtgttcgaaagtgctaaatacacaaaggaagtgactgtgctcaggacagagtggaaaccatgtgacagaaacaaggggctgggaaaagggcgtgtttccagggaaccgtgcagaaaaaccaaaacaaaatatcccccacaccgctccaaagagcaacaagaaaccctcagtggtgatccattccatccaggaattttcaccatagcacgggaaaggacccgaggggtcacggctgggtgaggcacgcgagaggtcatctctgaatcctagggggac

SEQ ID NO: 502231 - DNA, 218 bp, Homo sapiens
gtaaagtttaccacaaccaccaccccatcatactctttcaccccacagcacccaatcctaccctccattcgctaacctcacctaaaatcactcaccaagacctcaaccctgacctccatgcctagatactcctcaatagccatcgctgtagtatatccacagacaaccatcattccccctaaataaattaaaaaactattaaacccatatacctcccc

SEQ ID NO: 502232 - DNA, 763 bp, Homo sapiens
gctatcaggggctgggtcgggaaatcggagcgggtttgaggaaggagtcggggctgagggagagaggaggatggagagcggtggtgtgcgtcttctctctccgtcgacggtggggcgctcatcgttcctcctcggtctacttgcataatccaccagttgtcttgatttagaattgtggattacattgaagtgctagatcatggtgtgtcaaacatcagacaagtggagtaatcccaggacattgacttggccactcaccatggtcacctgtattacggctcagtgtcatgcgcccctggttcatcttccttctccaagttacctgtgggccacctgtggaatatatatcgtggtagccaagtggccctgtgctaattcaccggtgaaccctcggctgagaacagacggaggaagcgaaattccaagatgcagctcagtgcatcaaagcctagcaggtcccttcagtctgccttttcatggcctgccacgggatctacagtaggacaaaagcgtgacactggtctttgacagttaagagctaaagaaagctgcctataggaagtatctcccatgcacttaccaacattctatcgtggtattacaacttattgggtatgcaatgaatcacttcttagaatggtattgtcctggagggcagaatatgccattcctatttgactcactctgcgttcggtctgggacctaaacaagtgcttgacgcaacaataatggtgtgatgatactaaagggtgaccgcgacatg

SEQ ID NO: 502233 - DNA, 347 bp, Homo sapiens
tccccacctcgtaccccagaagctgtgtggagcagaaatataaaatctcatcgtggaagtgtacatgaacaatacaatgaaatgatgttgagaaattggggtgtggggtgggtgttaagttgtaaggatcagtttccttttttaaagaatggtataagactatctttggagccgctttttttttctttttcatttttttaaaagattgagtggtacactaataaatgagagtttgaaattagaggtaatttatgttttatatacagatttcaagacatttgctaattttgtagtttcatgtgattagtttccaaaggttacagataataaagaaatcagaaatggtg

SEQ ID NO: 502234 - DNA, 179 bp, Homo sapiens
gtatcgaattgagctggtacccccatcaagaggactcgggatggtgcttctactgcccggactgcaaagccaggaatgagttgatgtttgtcgacatggccggcggcgccgtcgagctggttcagccggagcgagcgagcccgccgcacaaggtcgttgcaacggcccgagcgctggag

SEQ ID NO: 502235 - DNA, 1040 bp, Homo sapiens
  misc_feature (2)..(3): n is a, c, g, or t
  misc_feature (505)..(505): n is a, c, g, or t
  misc_feature (526)..(526): n is a, c, g, or t
  misc_feature (585)..(585): n is a, c, g, or t
  misc_feature (596)..(596): n is a, c, g, or t
  misc_feature (638)..(638): n is a, c, g, or t
  misc_feature (640)..(640): n is a, c, g, or t
  misc_feature (650)..(650): n is a, c, g, or t
  misc_feature (657)..(657): n is a, c, g, or t
  misc_feature (695)..(695): n is a, c, g, or t
  misc_feature (732)..(733): n is a, c, g, or t
  misc_feature (737)..(737): n is a, c, g, or t
  misc_feature (740)..(740): n is a, c, g, or t
  misc_feature (779)..(780): n is a, c, g, or t
  misc_feature (821)..(821): n is a, c, g, or t
  misc_feature (936)..(937): n is a, c, g, or t
  misc_feature (1006)..(1006): n is a, c, g, or t
  misc_feature (1010)..(1010): n is a, c, g, or t
  misc_feature (1034)..(1034): n is a, c, g, or t
cnnccggctgcaggaattcggcacgagattacaggcatgagtcactgcacctggcctgggaataacagtttaaggccagcctcttaaaatgaaagttattgtggcaacttctaaaagatgggttgaaaagagaggaaactggggataacatcataaatagattattatattatccctggtgaaagaaaatgaaggcctgaaacaaggcagagaaggcaaagataaacttgatatctaatggaatatgggtaagtaaccatataagttatcagccaaaatgggacatgcttaagagtcaaagaaggcactattaataattactccagcatatcaaaataccacattataccccataaatacatacaatttgtcaactaataattttttttttaattcatgagggggataagaagaagaaaaacattcctgcaggactagtctgggcagaagaggagttgtggaactagatatgaggagaaagagaggaaggaggcacagagcagtnggagcttgctgcctggaagantgacggtatgataaagagatgggatgatgtgaaataatcacattggtaatatgaagtgngtttgatcacntcagtgtacccagaacgacactcgtatcatgtcagatagggncnaatgtgtttnagtatgnatgaggaagggtgcagctaaggagtgcatctgatcatnatagacagactgcagattggatatgacttctgtgcanngtgngtnatggcattatagcatatgatatgactataaatactgatnngatgtgactagctgatgaaaaaggcaagtttgcactgcaangatagatctctgcttgcagcaccatatatattatatattattttttagtagcagtctgtcagtgtatcacagactgcgccagtgcaggcaacttcataagtgataatatacaaannttacattactttttatctatttttcggggggaatattgtgacattcttttgccggtgttatcactcttncttncattatggtccgtctttctcgctncttccc

SEQ ID NO: 502236 - DNA, 172 bp, Homo sapiens
agttagaggatcctgttattacagtgtgttgagtcagaattctaggagtggtggacatggttgttgtagtccagcatttggaggtgaggtggaggattgctgagacaggagtttgagaacagaggaaagaaaatgacaatgtggaactgtaaaaaaaaaaaatttttttttt

SEQ ID NO: 502237 - DNA, 965 bp, Homo sapiens
  misc_feature (2)..(3): n is a, c, g, or t
  misc_feature (505)..(505): n is a, c, g, or t
  misc_feature (526)..(526): n is a, c, g, or t
  misc_feature (585)..(585): n is a, c, g, or t
  misc_feature (596)..(596): n is a, c, g, or t
  misc_feature (638)..(638): n is a, c, g, or t
  misc_feature (640)..(640): n is a, c, g, or t
  misc_feature (650)..(650): n is a, c, g, or t
  misc_feature (657)..(657): n is a, c, g, or t
  misc_feature (695)..(695): n is a, c, g, or t
  misc_feature (732)..(733): n is a, c, g, or t
  misc_feature (737)..(737): n is a, c, g, or t
  misc_feature (740)..(740): n is a, c, g, or t
  misc_feature (779)..(780): n is a, c, g, or t
  misc_feature (886)..(886): n is a, c, g, or t
cnnccggctgcaggaattcggcacgagattacaggcatgagtcactgcacctggcctgggaataacagtttaaggccagcctcttaaaatgaaagttattgtggcaacttctaaaagatgggttgaaaagagaggaaactggggataacatcataaatagattattatattatccctggtgaaagaaaatgaaggcctgaaacaaggcagagaaggcaaagataaacttgatatctaatggaatatgggtaagtaaccatataagttatcagccaaaatgggacatgcttaagagtcaaagaaggcactattaataattactccagcatatcaaaataccacattataccccataaatacatacaatttgtcaactaataattttttttttaattcatgagggggataagaagaagaaaaacattcctgcaggactagtctgggcagaagaggagttgtggaactagatatgaggagaaagagaggaaggaggcacagagcagtnggagcttgctgcctggaagantgacggtatgataaagagatgggatgatgtgaaataatcacattggtaatatgaagtgngtttgatcacntcagtgtacccagaacgacactcgtatcatgtcagatagggncnaatgtgtttnagtatgnatgaggaagggtgcagctaaggagtgcatctgatcatnatagacagactgcagattggatatgacttctgtgcanngtgngtnatggcattatagcatatgatatgactataaatactgatnngatgtgactagctgatgattttgtagcagtctgtcagtgtaacataagctgcaccgattgcagtacacgttcatagagtaatagagttacatgcaatgttctcacnaaacccatccttttttagggggaattttacagggtcttccttttgacccgtttaactttttggagacaacctttgatat

SEQ ID NO: 502238 - DNA, 204 bp, Homo sapiens
gggccccccgggcccgggtaaaaaaatttttttggattttgttccccgggaaccaaagaaaaaaatggccgttgtagccaaagttgccgaattaaaaaaaaaaattggctttttattttttttttttggtttaaaaatttggaaaggatttttcccttttgccaaacaggggtgtccccccttattaaagccttttccaaatga

SEQ ID NO: 502239 - DNA, 241 bp, Homo sapiens
tccatgatggagagatgactttaatggggtggcaggaagagaacctcaagcagagcaaggctgcagcagcaaaagagcaggtttttgggtatgatagatcaggcgataagcacaggtggaaaagggttgggtgccaggccctcaagccaggctaagaacattggcaacaggatgcgggattccctcattgacaggctcaactgagtcacctttcaagttggtcccatgggctcctggctct

SEQ ID NO: 502240 - DNA, 686 bp, Homo sapiens
  misc_feature (619)..(619): n is a, c, g, or t
agcggggcatgctgtccgccgtgctgctccggcgccggcgggacttggccgcactcgtccgtcacgcccgtgcctatgtccgaggccgcgcgcacggcaccggctgccgcctctgggccctaaccagatgtccttcaccttccgcctctcccacgctgggtgattcttcaacggtgccaagcgtccggcaggtggacgtgcccacgctgaccgggagtcttcggcatcctggcggcccacgtgcgccacagctgcaggtcctagcggccggggctggtcgtggtgcatgcagaggacggcaccacacgtccaatatactttcgtgagcagcggttccgatcgacagtgaacgccgactcttcgagtgcagcttgttggccgaagtaggccgctgaggcttggaccatgtaggacctgggggcagccaaggcaaactatggagaaggtcccaggcggagctaggtggggacagctgatcgaggctcatcgcggagtcagacgatccagatccgaatacgaggtccaacgaggccctggtgaaggccctggagtaggcgagccagccgccaaggttgacctcgagcttctggagctcgacgtcgtggatgaacgtgaccancagtcgcgcgcccctattgagaagagccgtgaagcacgaaaacatgaagaagacctccggaggaggg

SEQ ID NO: 502241 - DNA, 144 bp, Homo sapiens
cgccaaactggatttcactggcctgtgacacatgtttaacggccgcggtaccctataccgtgcagcggttgcataatcacttgttccttaaatagggacatgtataactggctccacgatggttcaactgtctcttacttttat

SEQ ID NO: 502242 - DNA, 609 bp, Homo sapiens
  misc_feature (595)..(595): n is a, c, g, or t
  misc_feature (602)..(603): n is a, c, g, or t
ttttgggggtgggggggggaacccctccccccccccccccccccccccccccccgcgggtggttttttttaaaaaaaaaccccttcccccccccccaccaaaaaggaggggggggggttcaccccaccccctctcttttttttttttgtggtgggaagacccacccctcttttttttttttacacccccctttttttttttggggggggggggtttccccgcgggggggggggaaaatttttttttccccaaaaccagcggggtggtaaaaataagggcccgctggggggttttttttttggtccccaaacacggttttttttccccccccggggaaaaaaaaaaaaagggggggtggtgtttcccccgcgggggaaaaatattttggggggggggctttccccccggggggggggggaaaaaaagtttccccccccctttgcggccccccccctttaataaaaaacccccggtagaaattaggtgggtgggggggcgcccttttggggccccccaatagaggaggttaaacccccgggcttttgttaaaaacgcccctgggggtggaaaccaagccccccaaaaagatggcccngctcatnnaaaggc

SEQ ID NO: 502243 - DNA, 849 bp, Homo sapiens
cccatctcagttattgcgataacctccccgaaaaaaaaaagtttgtcggcgacgactctcttatctaccacgcgctaccgatggaatctgactctgtcacccaagctggagtccagtggcatgatctgggctgactgcaatctccatctcccggcttcaacagattctactacctcagcatatatagtagctgggagtagaggtgtgtgacaccacacctgagtaatttttgtattcttcatacagacagagtgcgactatgtaggccaggctgttttaaaactcctgacctaagcatgctcccacatgcgcctagcaaactgctgaaaggacaggagtggcccactgtacccgaactactgggttattttgacaactaaatattgagtatatatcagcacaacgactccgcttgcataacagccatcataatctgaccactcttcggaccccgcgcccagaccctcatatcatagacataacaacatgcggggctcgaatcaacagccaacacaaactcgactcatgggcacaccccttgtcatctcttaatcgtgactacacgcccctacatggtagcgacactcccgaaccgctatcacaaacgagactccctgttaaacccagctccattcctcgtccgcgtgtagcgtagcttctatttcgcagttgcgcccctacccagctcaacgctcgatctcgtacagagtagttatgcctcagtctacatcgcccctgcagcctctattgcgtcggccacgcgtgcaacttcgatttttgtccccctcagattgctagcgttgtgcgctcgcacgtgactctgtgatcccgctcatataaaaagtcgtt

SEQ ID NO: 502244 - DNA, 300 bp, Homo sapiens
catacctgtctgtctgctcccagctatcttgggtgttcttgcgacggcctggggcctcgctaaggatgtccttttccctcacggccacggctttaacggtgtctgttgcgagttcttcgctagtacatcttaaagctgtcaagatgggtctagcagaccttgcaagagaaataacatcagcattactctccttgagcaatgccaccattatcaatgacaaggtctcgaatgctatgctaaaagaagactgtaccgctttgatggaagcagatgctatattaaactagtgaagcaactaag

SEQ ID NO: 502245 - DNA, 151 bp, Homo sapiens
  misc_feature (46)..(46): n is a, c, g, or t
  misc_feature (94)..(94): n is a, c, g, or t
  misc_feature (122)..(122): n is a, c, g, or t
atgtgaaataatgaggatctgactgctcagatttccccaacttgtncttactttatcatgaatgtaagaaatagagcacagtggaatgaatacntgctagatcacactagcaaagaaacagnttggtttaaaaaatgcttcatttgggcca

SEQ ID NO: 502246 - DNA, 268 bp, Homo sapiens
tcccagcctggcgacagagcaagactccatctcaaaaaaaaatacatataaataaagtagaaggaaccagtcctggttctggtgaggttctggagggccagttatcatgtttggagctggttaagggtttggaggagatgggtgggatttagaatgaatgcttatggcaccacagttgaatgtgtgcctggatagagaaacgctgtcatcagtgtgtatcactgattctcacccggtgcagttttgctctccctaggagtgcttgcaa

SEQ ID NO: 502247 - DNA, 328 bp, Homo sapiens
acgatgacgaggaccacgaacagccagaggaacaggcgaccgcggcgggagagtgcctggacgttctcgtcctcctccgggtcgtccagctccgaggcggcggcgtatgcgcgctggctgcggagcgagaggagcgagaggatgaagaagacgagggcgagggcgaggagcacgtagcccacgaaggcgaacggtgcgatggcggtgaacatgggcgttatgcccctttcggtttgatgcgctcggatgggtgccacccgcactctgctcggagatcatgagaaatgtccgcgagtggtgcacggggggtttgcagcatcttctgttt

SEQ ID NO: 502248 - DNA, 104 bp, Homo sapiens
actcgtccataaaaaataaaggcatatggcatattctaacttaggaagccacaatgtactatggaccatcatgacattgggtcgcattaactagtaagtaaaga

SEQ ID NO: 502249 - DNA, 248 bp, Homo sapiens
gtcgctcaatattcatcaacaacgactaatcaccacacaacaatgactaatcacactaacctcaaaacaaataataagccatacacaacactaaaggacgaacctgatctcttatactagatatccttaatcattatatattgccacaacataacctccatcggactcactgcctcactctctttacaccaagccacccaaactatctataaaccatagccatggcacatccccattatgacgcgggc

SEQ ID NO: 502250 - DNA, 90 bp, Homo sapiens
tggagacggagtcgtgctctgactccaaggctggagtgcagtggcacgagcttggcttactgaccctgtgcctgatgggttcaagcaaga

SEQ ID NO: 502251 - DNA, 301 bp, Homo sapiens
ttcctgacgtcaggtgatctgccgcctctgcctcccaaagtgcggggattacatgcgtgagccagtgctcccggccaaaagttcatattttactaactatgacttgtcaatcagagtttagcagattactttaagtacctccaggctgaggcaggagaatcacttgaacccgggaggcagaggttgcggtgcagcccgagcatggcacctattgcactccgagcctgggcgcacaagatgtgaaactccgatctacagcaaaacggcaagcaagcaagcaagcaggaagcaggaggcaagc

SEQ ID NO: 502252 - DNA, 174 bp, Homo sapiens
cccagcgatgtcattcttactctattgcgtgctctgactctgtttgagattgttatgctactaaatttatgtgtcaactggagtttttacaactcaggtgagttttagctttactggggagggggtgatctaaaacaccctttacgccggcttctattgacttggcttatcgag

SEQ ID NO: 502253 - DNA, 337 bp, Homo sapiens
  misc_feature (166)..(166): n is a, c, g, or t
ctgtggttggtgtatggaccgcctgtactgagatatcgtgctgacaaaatcttcataataagctcttcggatacccaagaggaaatgatactttgagggttgcaccccaaccacgcacatctcccagacctgggcctccctggcgctattacctctcatatagatnaggcccaggatcatcattaacagacccaatctggggccatctcctcccagatcctcctcctcctcctcctccagaggttttagtttgttgatcaggatgtaagtttggtgcttgcggtcaaactgtttcagctcaaaaccaaagacataccgcaaatcccgaaggtcacct

SEQ ID NO: 502254 - DNA, 723 bp, Homo sapiens
gggcgtattttctgttgccttccccgtgggtggagagcctgatgcatgaggttcgtggtatcgaaccactaggactagagacgctgcctgtgagcatgtggctgtaggccgttcatccagacgactcgtgatacacacatctacttcggtctacaggttcatcaccccttgatggggcagcctcttcccctcatcacagactatgctgttcagccacatgtgagcgcgggggcagtcgaaggtgagtccatgctctcatgtcctgccgatgctgagatgggggcccgacatggcttgagccccttgaatgtcattgcggaggatgggaccatgacctccctctgcggggactggttgcagggtcttcaccgtgtttgtggcccgggaacaagataatgtctgtgctgagtgaacggggcctattcctggggtcatccagataccaacccatggtactgcccatcttgcagccgttctggggatgtgatagaatacctgctgaagaaccagttggtttgtccgctgccaggaaactgggggcccgagctgccaaggctgtggagtctgggggccctggagctcagtccctccttccaccagaagaactgccagcactggttttcccatattggggactggtgtgtctcccggcagctgtggtgggggccatcagaattccagcctacctggttgtagaggaccatgcgcagggcagaagaggac

SEQ ID NO: 502255 - DNA, 173 bp, Homo sapiens
caggacgatagaagattctcatctatcgctaatacagctccagagtcatcccatcgtggatacatagtcccccagcagacacgtggtccttaaacatcgtgtaccaattcttcaggacaatctatgttccaacgggtaccagttagggctgcaatcagcttcttacggtcccc

SEQ ID NO: 502256 - DNA, 283 bp, Homo sapiens
ggaggagagcaaggagggccagaggaggagaaggagatggagtcttagggccaggttgaggcagggttccaggccttagaggtgcttctggggcgggggaattcagcaagtttccccttccctctttccacccaagttccagccttggtcttgtcttttcatccctcttcccacgacagaggaggtgtggcctgcatgtcatcgtgttctgtgtccctgcatgtacccacctccacccttctttgcgcggacccatacataatttaataaatctgaaaaaaaa

SEQ ID NO: 502257 - DNA, 204 bp, Homo sapiens
ccaacactcactactacaacacttgcaacattacaataagtatagcgatagaattgaacctgcgcaataatatagtacccaaggaaagatgaaaatttttaccagcataatttagcaaggctaaccctttacctctgcataatgaattaactagaataactttgcaaggagagcaaagctaagaccccgaaccagcgggctcct

SEQ ID NO: 502258 - DNA, 103 bp, Homo sapiens
aaaaaaaaccttttggaagctggttaaatggacccctcaggttgacctgggtttaagccccccggtccttgtggtttaagaaaaattaaaaccaaaagggtcc

SEQ ID NO: 502259 - DNA, 1545 bp, Homo sapiens
  misc_feature (1200)..(1200): n is a, c, g, or t
gacaaaacatagctgctcagtcacaggaaagacaccaggacaggagaagaggacagtgacagaggtgaggagagtgggctagggaagttgagcggagtaacgggggcattagctggtcctcgacgcaaggagggggacagggacgggcgtgtcgctgactggagacttggtaggtcttttcctcggagggtgcgggggctcgcctcgtgcgggtgcaggcatgccctgtggggtgtcgaagtacaaacgagactctaggtccagaggcgtggtgcacgctgggcgcactcgtggttgccgcgtggggcggtgacccttgtctaccttgccctgggggaggtgccctttgttcctctgtcccactcttccgtttgtcctcatgccgcccgatggctttgccggttgtgcgctttcgtagatccatcggaagaggaggcctgggtcgattttgcctggatctccccaggggtcgttgggcccgtggagtgatgccttgggtcgcttcatgagctccatcgtggtcgacgcctgtgctcattgaccaccaagacaagggggacggtgcaccaatgcttgggccttttccgacacgccaccggggttcttcgctttggaagctatcgctcgtagtggcactcgttcctccgaagcgagaccacttaagacgctgcggccacggtttgtcttatcctcccatggggaaactcgtttggacctaggtaccagtcccgccaacgggaagggggtaacccctggtcgcaagcgtgcctcccttggtgataagccaagcaggggcggtgggttgcaaagggggtgtctgccgccctgtgtggccctgtttggttggggttgctatggccgtcttcgagctcgctccgaggacaacccttgggcagttttgtgccccttgtgctgcaagttttccgtttccttgtgggggcgggttccgccttaggttaggtgttgcgtaatttgggggcccctccgtcccttggcagggacctgtagggtaaggcactcgttgttgaacaaccgcgaggttgttaggaggagctccttggccccttaaaacaggtgggggggttgccaagggctccccaatcttatcctcggtgagagcggatagggccggaaggacccggcaaattggcaccccattggttgggaagggccctccatcggcatggggcacgcctggangtgtgcccaggctgtgttttgccccgagcaaagggtgttgccagttgccattccgttaaaggccgggcacttgtgggctgccatggggttgtacttgtgcgaaaaacgtggtttggtttgaccacgggaagatactggtcgcactgtgtgggtcccttggaaaaggaaaatcacccttgttagatgagcccctttggaaaccgcagggtccctgtggtttgtcgttgtaacgagggcggaacattgtgtgtgtgaaacacaaacccacccagggacgggttgtgatgtcccaaagagcgaatccacaggcaaatattgtctgttaagtgagaagtggcccacacc

SEQ ID NO: 502260 - DNA, 1632 bp, Homo sapiens
  misc_feature (1465)..(1465): n is a, c, g, or t
ggactgattagaagcacgatttactagagtcgacttcttctcctatttcgctcgcttagcagatcataccgcgcagtctgcatctaacacggtaactagctgttaataagaggttgctgtatcgttcctgtaccctcgtcagctgcagtggtaagacgactatgcagcggcaggatgaggctgagttcttgttacacagtgagattagctgtcactcttgctgactgcatcgagccctttgacgagcgtggagcagattcctagctataaggcctgacaaatatttcaaggacgactactacgcttccacaagtcgcacttccagctatatccacaagggagagtaggcgataccgctgggatgcggactgggcacacaatgatgggcacacaagtacccatgacattcacctcctatgcgtatttcgcgccattggctcgaaaataagaccgataactatccatcagcatagcgcttgatagttctgctggagaatacacagccgtggtgcatgcttgtgactcgaattcgcgcgcgcgatgggccttctggataggtcaagcaagtgacttgcgaagctgtcgcggagaaatccacttaaactaggcaactcaggcctactcgagttagacaggggattggaggcacccagagagttcgcgagccttcctcgttgatatccgccacagggcaaataacgggcatgtagagtcaagcagtagctctcagttggagcgggcgccacaagagaaacatgtctgtgaacaacagcaagtacccgtcccagtagaagtccacatgcacacacccaggaggaaaatggaacctcataggcggcaggcgaagaaagcaggaggagctaggagcagcaaatcgtaggccccataagaattgccgacggacaggtcccacggtgaccataggggacacacaccttgaggcgccccacgcggaggaactcccgaagtgcaataggaccaatggcagatgaggccgcagagaagctgcgccatcacacccgtacttgaaagtcgtggaaacgagagcgcgcaggaagaccgcaagggcagagagaatgcaccggtggggacccaagaagccaatgggaccgaatacacagggagagataaagaccccaggtgctggaaaggagccgaagagacaacgacagggcagcggaaggccaacagtggcgaacaccagagcatgaaaaagaaagggaaacaagaagttaagggagagctaagaggcaaaccaaacacgaacagacaagccgaagacaactaacgaccagaccaaacagcaaaaaacggggccaaaacaagcagtggtcgaggattgcatgtagggatagataggggggatgatgacctgcacgcgctgctctctgtgggaacagcagaacagacaggaaaaagcgagcgactgagtagaggtgggcttgtgcgcgtcagcagggcgtgncatatggatgtatcttagatacgactgtgaactcatactagcgcacgagtcgtaactgaccgcagcggcctggaatgcgctgcagcgtgctgcttccatggtggcctgcgcgtaccatggatgctgcagtcgacgatgatagaagtaggagacagtgagtatgaatg

SEQ ID NO: 502261 - DNA, 517 bp, Homo sapiens
gctctcgccaggcgtcctcgtggaagtgacatcgtctttaaaccctgcgtggcaatccctgacgcaccgccgtgatgcccagggaacgacacgggcgacctggaagtccaactacttccttaacgatcatccaactattgggatgattatccgaacatgtttcattgtgggacgcagacaactgtgggcctccaacgccagatgccagcaagatccgcaatgtccctttcgctgggcaagcgcctgtgcgtgcctgcatggcgcaaagaacacccatgatgcctgcaaggcccatccgaggcgcacctggttacaaaccaacccaagctctggacgacaactgctgcctcatatccggggcacatgtggccctctggtgttcaccacaggaggacctcactgagcatcagggacattgttgctgggccaactaaggtgccagcatgctgcacacgtgactgggttgcccattgccaccatgttcaccgtcacactgttgcccaggcccaatgaaaca

SEQ ID NO: 502262 - DNA, 642 bp, Homo sapiens
agcggggggacctggctgggcgccgggacgggaggagtcccggcggtcgcctcggactttgctcccacaagtcctgcctcggaggcgggggagctggatccagcagccgcctggagcgtccgagtcaccgtcgccggggctcccgtgctccccagaacggtgggacgcggggctcggcgagccgccagcggaacatggcgccctggacgctgtggctgctgctggcagacgcgtcgtgggctgggtgccggtgctcttcatcaccttcgtggtcgtctggtcctactacgcgtacgtggtggagctctgcgtgtttactatttgttggacaatgaagaccacatggaaagaccgttgttgtacctgtgtggctttgccatctgtgcttggtgatgtctgtatggtcctatggatgacaattttcacatctcccgcttccccctccagagagttctactgtgtccaattctgaaaaggaacgttatgaaccagaattcaggcaagaaagacaacaagaacattgggacgaagagcagcaagagctttacctatctataccacatcagcttcgaaaagcctcatgcagtctacaaaatagaaaggagctccaatgagctggacaggggaagtcggttagcaaag

SEQ ID NO: 502263 - DNA, 540 bp, Homo sapiens
aggcgtaatcgaagaaggaagctctctgcccctcctaagctggagcccatagcgaaggcttttaaggcccagaaggccagtgttgaaaggggtcccccagccccccaaaagaagaagatcccgcacgtctaccccaccttccggcggccgaagaccactgcgactccggagacagccccaatatcctcggaagagcgctccccggagaaaccagcttgacccactatgcgtatcatcaagtttccgctgacccctgagtctgcccatgaagaagatagaagaccaaccaacacacttgtgttcattgtggatgtttaagccccaccagcacccagattaaaccaggctgtgaagaaactgtatgaccattgatgtggcccaggtccaccaccctgattcggcctgatggagagaagaaggcatatgttcgactggctcctgattacgatgctttggatgttgcccaccaaattggggtcatctaaactgagtcccgctgcctaattctgaaaaaaaaaaaatatatcttttccacccatt

SEQ ID NO: 502264 - DNA, 255 bp, Homo sapiens
gagcaaagtttttggctttttgctttttttttttagacttagccttgctttgccacccagcctggagggcaggggcgagatcttggttaactacagcctccgcctcccgggttcaagcgattcttgggcctcagtcttctgagtagctggaattacagacatgcaccaccacacctggctaatttttctgtttttttatagaattgggggcccaactttgggccccagccttggggcacagggcccaatttaagt

SEQ ID NO: 502265 - DNA, 295 bp, Homo sapiens
agcgcttctccgctaggtctcttcatctaggtcagtgtttcttattattgagttcctgcattgagggcatatggaagagcgatttatcggtggaatgtcattatctctttttgcgctctccaacgcctggttatacatgctaaccaacttgaccccacgcttaaacggtgtgttagcctgtggatcgctcgcaaacttgtagtcgataaggtcggttactaatttagttagttttctgtatgctccaccgaacgtaacctgatcgctgtctaacaaatcgtcttttatgtcgttg

SEQ ID NO: 502266 - DNA, 1117 bp, Homo sapiens
  misc_feature (317)..(317): n is a, c, g, or t
  misc_feature (373)..(373): n is a, c, g, or t
  misc_feature (448)..(448): n is a, c, g, or t
agcggggtagtggcgatctggagcggaagtggagctaccgccaccgccgccgccgattcctggagccggggtagtctgccgccgccgccgcgctgcagccactgcaggcaccgtgccgccgcctgagtagtgggcttaggaaggaagacggtcatctcgctcggaggcttcgctccggacagggtcctttggttccactgtcatgccgctccccactgtggaaattgacgaactgggactacacacatcgtgacgcttgtgtacaagcaaatgccaaagactcggctgaagccagtggcgcttgaggcggactactngactgcatcacttgcggcttgcatgccccattgacatgcgtcatgctccatcacgnacaccaccgggtgccagctgatagctccatcccaagctgagacgacgacgaaacatgcgtggtctccatcgtgtnttgcgcctaccaaaggacattgttgcgtacgggctgccccgcacggcttccttccctgggctgttgtcactcttcccagccattgacgcgaggacaacagagagggaatgacgaagaacgcaagcagaatgggcaaagaagtaccgtgacgaacgatacgaggcagaactgcaggacatcttgcaatgatgttctggagctgttggacaaatatcttattcccaatgcttacacaaacagaacagtccggtgttctacttgaaactgaccatggagattatttacgggtatctttctgaagtggcatctggacgacaacgataacaaaaccacctgtgttcgaactcccagcagggcttacccaggaacgcatttgcagattagtaccgaaagacactgccggcttacaccacccaatttcggctgggcctggccactacattttctcagtcttctactatgagactcctacactcctcctgcaaagggcccttgtagccctgggcacaaacgggccattttgattgacgcaattgctgactttggcatacgcttaattgcacaagtcttctaaagcacagcacccggctctgccgctacttagggccaactcaatctggggccatgccaaaaccgtggaaacaaggaaacctctggagtgaaacacaa

SEQ ID NO: 502267 - DNA, 256 bp, Homo sapiens
tcacgctctaatacaaaacaagggtaaatgtcatcatatcctatttttacggcctcttgctgggagagacggtgggggtgggaggtagtgttatacacatggcactttcaatttgtttattggaactcagcacatttaggggcagttggatgaaattgcaaatatagaaggggcataagcaatttactagtgctatctacacgaaatgatgatggagacggaaagccttgctttcctctttttagaatttattttc

SEQ ID NO: 502268 - DNA, 609 bp, Homo sapiens
gcaccaaagtttgaagaactactacgaacaatggggaaagcttacagactgtgtggtatctgagggatcctgcaagcaaatcgatcaagaggattggttcttgtaactttctcatccatggctgaggttgatgctgccatgggtgcgagacctcacttcaattgatgggagagtagttaagccaaaacgtgctgtagcaagagaggaatctggaccaccaggggctcatgtacctgtgacaaagctgtgagttcggcgggaattaaagaagatactgaggaacatcaccttagagattactttgaggaatatggactaattcgataccattgagataattcactgatagcgcagtctggagagaaaagaggctatggttcggttactttccgatgaccatgatcctgtggataaaatcgtattgcagaacataccataccatcaatggtcctaatgcaaaagtgggaaaggctttgtctagacaagaaatgcaggaagttcagagttctaggagtggaagaggaggcaactttggctttggggattcacgtggtggcggtaaaagctaagcttttaccgcacaacagaaagatattggaacggatggtg

SEQ ID NO: 502269 - DNA, 120 bp, Homo sapiens
ttcccagaaaaggggaggagagaatgcaagatgcacagagagaacaggagaacccacactcagggtggaaaggaagagaggaggaaagcgggcagagaaggaggagagcgcctgcagctg

SEQ ID NO: 502270 - DNA, 632 bp, Homo sapiens
tggaggcgcaatggccacctgaggacttcctggggctcttcctcgggctactccttctgaggacgagtacgttgggctactcggatgtgtgaccagcagagttccagctcgcggctccgaatctgccgtctcacggcgcgggctccttactctggatggtggccactttcgcctaggcctggcgtcttcagacttctctactgtgtgggctggcaccgacctggtaccgcctgaccacagctgccgtccctccattgacggtcttcgttttagccaggcgcttctcgtccctgaagagcgttcctctggttcctgctgccgactgcgtcttgcttgacgtgcctgacgtatggtgcttggtatttctagccctatgggctgcagactgttccaccctgctttggtttcctggtgggcagcgaagtgacagtcagtgaggcctgtgatgaggggctggtgaagcccagagactcagtcgccacgatttccgaggcttgatcagcgtgtaatgtcccgggtacacgtctctggagcggcgtctggaagctcttgctgctgaattttcctcccacttggcagaaggaggccatgctgctggcacgtcttggagctgcggcccaggggctcctggg

SEQ ID NO: 502271 - DNA, 1115 bp, Homo sapiens
gtggcgcgcaggaggaagtgcgccgctgcgggaccctggaggaccgtatccccagtcccatcgtgggctacgcaggctattccaatcaagttctctgaaaagcaacaggcttctcagctacctctatgtgatgagcacacggcgttcggacgatagggcaccgaagtcgcgacctggcctcagaagaggactcttctttggtccatcgaagtgttggcacgccgcgatagctgcagcagtaggagagcgctgttcccgcgctcactgatcacacctgtgtgcctcagtccagtctgtcacagttgcaggagaagccggagcctggcctggagaggcccacaaggacgtcaaggctcgaagttctcttgtgtcatccaaatgccatgctatccgggttctccaggtagccatacgttgggtggttccatgaacgaccaagtggggtgtcagccgtggcctgtgggccctgcaagggtcacccgcgtgtcgtggtgtccacagaaggagccatctcctgtgagagtagtgtgcagttcagcaagctggagtcagtgagcatacgacagagctctgttgctcacgagcgcgctgaggccacctgagagtgtaggcaaagttgagacgacggttcctatcgtggacggcgattattgcacgcgagtagaagattcagcctcggacgtgcacatggaaagcctccaaagtggccgagaggggacgggcatgtgcacgtgggcgtgtccccggtggacagcaagggcacgggggcttggcgtccgcatagcgttgacccgccgcgcgggggcgacccccggactgggacacccttggtgacaattccccgcgcgccgggtaaacagaggaagaggccacagacacataaaggccgattaggcacgggggattgccatgggaacgccatgggggaacggcaatgcaacaggcggaaagacgcacagccactaaaggtacgccagtaaaacatacaggaacggccatgggcacttaccaaacacccttatcataaacacgggcacccgtcgcggaccaagagacgagctccgaagagggcaaccgcacgcgccaccacaagcaatgggggaggcgcgaatact

SEQ ID NO: 502272 - DNA, 295 bp, Homo sapiens
ctgaagcctgggggatggatgccctggttgctgaagagcgaggcggacacgccaaggggaatgaagtgaggccagtggccgggtctgctgacgtccgcaccactcagactacttgcacctctgcagcacgtgcacgcccacttgtcacccctccagaacatcctccccattgagttctggcgcgtattgactcttcagagttcagcagtctgattctcctgtttgggtcctgctggcacaatcttggcacccaggtgcttcagtacgtcctggtgtaccgaggctcgaacttcgt

SEQ ID NO: 502273 - DNA, 842 bp, Homo sapiens
  misc_feature (224)..(224): n is a, c, g, or t
  misc_feature (303)..(303): n is a, c, g, or t
  misc_feature (330)..(330): n is a, c, g, or t
  misc_feature (334)..(335): n is a, c, g, or t
  misc_feature (339)..(343): n is a, c, g, or t
  misc_feature (345)..(346): n is a, c, g, or t
  misc_feature (351)..(351): n is a, c, g, or t
  misc_feature (362)..(362): n is a, c, g, or t
  misc_feature (367)..(367): n is a, c, g, or t
  misc_feature (370)..(371): n is a, c, g, or t
  misc_feature (374)..(374): n is a, c, g, or t
  misc_feature (381)..(381): n is a, c, g, or t
  misc_feature (408)..(409): n is a, c, g, or t
  misc_feature (418)..(418): n is a, c, g, or t
  misc_feature (423)..(423): n is a, c, g, or t
  misc_feature (432)..(432): n is a, c, g, or t
  misc_feature (438)..(439): n is a, c, g, or t
  misc_feature (441)..(446): n is a, c, g, or t
  misc_feature (504)..(504): n is a, c, g, or t
  misc_feature (516)..(516): n is a, c, g, or t
  misc_feature (524)..(526): n is a, c, g, or t
  misc_feature (531)..(531): n is a, c, g, or t
  misc_feature (535)..(535): n is a, c, g, or t
  misc_feature (539)..(539): n is a, c, g, or t
  misc_feature (541)..(541): n is a, c, g, or t
  misc_feature (543)..(543): n is a, c, g, or t
  misc_feature (545)..(545): n is a, c, g, or t
  misc_feature (548)..(549): n is a, c, g, or t
  misc_feature (562)..(563): n is a, c, g, or t
  misc_feature (565)..(568): n is a, c, g, or t
  misc_feature (579)..(579): n is a, c, g, or t
  misc_feature (594)..(594): n is a, c, g, or t
  misc_feature (605)..(605): n is a, c, g, or t
  misc_feature (626)..(626): n is a, c, g, or t
  misc_feature (646)..(646): n is a, c, g, or t
  misc_feature (655)..(655): n is a, c, g, or t
  misc_feature (665)..(665): n is a, c, g, or t
  misc_feature (676)..(676): n is a, c, g, or t
  misc_feature (699)..(699): n is a, c, g, or t
  misc_feature (702)..(702): n is a, c, g, or t
  misc_feature (744)..(744): n is a, c, g, or t
  misc_feature (758)..(758): n is a, c, g, or t
  misc_feature (768)..(768): n is a, c, g, or t
  misc_feature (809)..(809): n is a, c, g, or t
tacaacatatacattgttttcagttctttacattgaatctcaaagacaaactttttttataggttaccacagaacaaaagctgtgactcatgtttttatttcataaactattataagttaaagtgaatagatttttttaatattccttgtagcattttacaagtgcaacagaaaacttgaagaaccaaattaagatagctgtagttcattagataaatgtggcntgtggtcatcacgttgttcacagcaaatttttgaaaaaataagcaccaatcattcttgcaaagaacaattttatctaanagggttgagaagggttaaatgcgaggntttnnattnnnnngnnaggcnatagatgggcngtgtnggnnctnatcccanacactgctaccctcgtacatataatgnnctgaaaagngagcngtcacgtangtggtnntnnnnnntttttttaagaaaccaattctgacccccaactcaatggttttgtgatattacacaaangccactaaacantaccaccnnngccanccanacantntnanacnnatcaaaactcccnntnnnnaaacatctagnaaataaatcaaaaanccaaagatcantgctggtgatattagcatacnagaaacccttaatatgctgntactatganttgttttaanctactgtttantcacatattaaagagccagctgntgntcttacagttaaaaaaactgtgtagccacattactgttttcnacgtcctgtgtggnaagttgctancactgtacaattttgcttgagcctttattttacaacagggntttacctctaactcagaattgcacgtaagaagg

SEQ ID NO: 502274 - DNA, 267 bp, Homo sapiens
  misc_feature (3)..(3): n is a, c, g, or t
  misc_feature (11)..(11): n is a, c, g, or t
  misc_feature (45)..(45): n is a, c, g, or t
  misc_feature (126)..(126): n is a, c, g, or t
  misc_feature (138)..(138): n is a, c, g, or t
  misc_feature (167)..(167): n is a, c, g, or t
  misc_feature (263)..(264): n is a, c, g, or t
gantcggcatnggacttgtccaaaaaaattctaatcaaaagaggnaaattttggaatatgccaggaatagtggaattttattttttaaatttttttataggcccatatgctctatctcaagaaacnagatgttgtaanatgtccatgattaaacttattgggcagantatttctgtggttaatctctgtagttctatgaggttctcttgtttctgtttctgcttgcctttttacgtttttccttgtcctttccgtgttcttgnntgt

SEQ ID NO: 502275 - DNA, 292 bp, Homo sapiens
catccagtgctgcctgtatctgtgcctggtcagttctgtctgttgccaaaaatgcggttactccctgtctaactgtttacaacgtcttgctgtagatgcctgatgcagctcaaatgctggtataacaaaatgtgcacctgtgcatataatttgagcgatagattgtctgcgcgtgcgagtgcctgtactgcctgctgcctgaaagttgtgttgttccctgtgctgctgatacactccgctgcagtgtaatgacacggttttttgcggaactggttgagaaaggcgtgatcac

SEQ ID NO: 502276 - DNA, 118 bp, Homo sapiens
tgatggccaggtgttaatacagagggctcttacaactactggggtcttgacattcatccatatcaaagcactgcagtttcacaggatcatagtacgtcccttgcttacagtagcattc

SEQ ID NO: 502277 - DNA, 435 bp, Homo sapiens
  misc_feature (327)..(328): n is a, c, g, or t
  misc_feature (408)..(408): n is a, c, g, or t
  misc_feature (426)..(426): n is a, c, g, or t
tcatctccagtaaactgtaaacaggactactgcatgtactctgttgggaatggaaggccagaactccataccgtggatggatgggtacttaggaaacaactcagcatttgtagtcagaccacttgtaacttagtggtttgttgagtaaccattttgcaggaaatacttccatttaaaaacataaaagattaatgttccaattatttgtatcaatcaggaccatttttgtggggcacttgggaactatttgtttttcaaacagacatttgcaagactgaacataatagataaatcagttacctctgaaaatgtgaaagaaaggaaaannaaaagaaccaggtggtcaaacttaaattgacatcatcttgttaaagcatatttaatttcactaagagaaatttaatatcngagacttttatatactcnattacctag

SEQ ID NO: 502278 - DNA, 398 bp, Homo sapiens
cgcttaatgttaaagatgacgaaacagtcacctttagcgtttagagttctgatcaaacaaatctaaaagttaacgcacaaaattatattatcaatgttcccatcaaacaataaagaacaaaattaaacacaggtgcattgtcttaaataaataatccttggatgagacctcttaacagtgaccttcatttgacactgaaaatacaggatctcatcttttgctttatttctaaattttgaaagttaatttttcttaatactttttttcacctgttcttgtttgttatgatcatggtccctattatcttttgactgttaaaatcctctcttctgatgtgtcttttatttttttatgtcttttataatagaaaaaaatattttataaagaaagaagatgtc

SEQ ID NO: 502279 - DNA, 818 bp, Homo sapiens
aacataactgactccatcttgctttctaatctcacaagctaacttgcctttgctcaggtggcataggccaagctaactatgggaggaatttagttcatagtttagagtaaggatgggccaggcatggtggcttacacctctaatacctttgggagaccgaggcaggtgaatcacctgaggtcaggagttcgagatcggcctggtcagcatgacgaaaccctgtctctactgaaaaaaaataaaaattggctggcgtggtggcgggcacctgtggtcccggctgctcgggaggctgaggcaggagaatcgctttaacccgggatgtggcaggttgcagtgagccgttattgtgccattgtactccagcctgggtgacaagagcgaaactccatctcaaaacaaaaataagatgaatacacaataagaagaatataagtaaggatgataatagtgtcttcccaaaactactccactcccttgagagcaaagccacgctttgtaacatctatcgatagaccagaaggttagcatgcatggtaggggctggatcatcgatcgacaagagagggagtccgggcaccggacacccagggctggagttgccacgggtgccaagctatcagccgcaagtggcgagtcgtctgacccctgggggatacacagcgggcatccccgtgccgtaagcccgcaggaataggcatggggatctgaagcggcccggcgaacacagagcccgggaatcttaacagcaccgatatacaaagacaacggcgccacaacactgtggagcaactggaacacaggaacaccagagtagg

SEQ ID NO: 502280 - DNA, 282 bp, Homo sapiens
agggggggggtaaaccgggggggtttttgcccccttttccggggggaccccggggtttttgcccccccccccccccaaagggccctttcccagggggttggggggcctggggggcggggcccggggggggcccgcccgtttttggggggcccccgggggggggggtgggaaggggcccggcccctggggccccccccccccgggtttccttttttcccccgtttttttggccccccggtttttcccaaaagggggttttttttccccctttccccccttcca

SEQ ID NO: 502281 - DNA, 528 bp, Homo sapiens
  misc_feature (4)..(4): n is a, c, g, or t
  misc_feature (33)..(33): n is a, c, g, or t
  misc_feature (51)..(51): n is a, c, g, or t
  misc_feature (96)..(96): n is a, c, g, or t
  misc_feature (117)..(117): n is a, c, g, or t
  misc_feature (287)..(287): n is a, c, g, or t
  misc_feature (338)..(338): n is a, c, g, or t
  misc_feature (342)..(342): n is a, c, g, or t
  misc_feature (350)..(350): n is a, c, g, or t
  misc_feature (365)..(365): n is a, c, g, or t
  misc_feature (377)..(377): n is a, c, g, or t
  misc_feature (405)..(405): n is a, c, g, or t
  misc_feature (523)..(524): n is a, c, g, or t
tggnggtgttgaaaaaaggggtttaaaaccccngagaccctaacctaaaanacctcccctgaccccgcctgttgccccgttccatttttgtgcccnaaggaaagtagcctgcccccnagtgtaatgtccttgcccttctcccgccgtccattgttggaaagaggagagatgccatccgaagcagtccccagcctgccttttcatttattacctccttcctttcccaggaccgacagaagtccagggaggagtcccctgggttatgtcccaaacttagcacctgcaantgttgggatgtggatggatgtgtgcataagagagagagagaatatgtgtgntagntgtcgtcncgagcgacacacatnacaagtgcgaangagttgcggttgctccatgttctgactnagggcaatttgattctgcacttggggtctgtctgtacagttactcatgtcattgtaatgatttcactcctaactgtgacatttttatcaaatgtgtgaataaatacataaagattggnnaaaa

SEQ ID NO: 502282 - DNA, 1033 bp, Homo sapiens
actagtgctaggaatttaccagtctcagttctaggcatactatgtatatcgctcacagctcatatcctccctactatgcctagaaggaataatactatggcagctgtgcagtaatagcgtactctcataaccgctcaagcgacccactcccgtgcttagccaatattgtgcgctattgccatactagtcgttgccgcctgcgaatcggcggtgggcgtaggcctactagtcatgaagctccatcacatattggcctagactacgtacatggaccttattaccctagctccggaatgctggaaagctaaatcggcccaacaattagattgacgtaccgactggcgtgactttccaggatggaccacataagtttgaatcaacacaaagcgcagtcccacgaggctaattattaggcgatcgagccctctactatctctgaaccaaatcaggcaagaagcctatttgggcgtgatgtccccatactcgtttgtacgtccgacgtaccgcatgagagaatgccgcgcatcacgtagaatacgtagacgtactctggaacttgctaacaccatcgacaaatcatgtgcatggcggagggtccagagtagatgcagggaacagactatcacgaaaaaaactcgtctacctctctatggtaagtctgccctgcaatgtctccttgattgatcgacattgggcttgcaccgaaactgaatcatattgttactatcttgctttcgaataccgaagcgatatacccatcgtgggttattatcagccgatagatggctaacagtcatgaccggatgagcgtaggccgtacttcatatttacatgctaagaaagctgcgtcccttactcatggactacctgaaatgaacacgcctgggtcgactgagatttatcggtccctctggcgccgagacctaaatcctgacacacacttacgggagggataccgcgggttagtaggaacgtggaacactgaaacaaaattggccccctggatatgccggccaaaagggttacaagaaca

SEQ ID NO: 502283 - DNA, 121 bp, Homo sapiens
acgtcagatgtaacatccggttcagggtgctgagtgaggttagtgggagtgggcaatcggtactcttggaggaagaaaaactgtccttccttctccaaaaaaaggaaaaattataataata

SEQ ID NO: 502284 - DNA, 630 bp, Homo sapiens
ggtattggatctagagagagagagttattatcatagagtgcgcttgcaagagacgatatgcatgcgaaagctcgaagcaacgcatgtacttctatgacttgcaccttaagacattacattactgatgatatgatactcaaaacgcgacataacaatgactatatgcggctatcatagaactaagaggagaaattcttctctatactcaaactgaagcaagtcagacgtcacattacttattgtgaagtctaacactgaatgcctgatattaatacatgcaaggctgtataacaagaccagatagaactatagggatctcactcacatgttaaagaaacattatgcagtgttgtgccataccagtgagatcatagataaggttgctggtctagttatcacactgtgagaacagtcaggagcatatgtcattcacatactgtaggaatgagactggacataatgcactatccacaggccagatgagtctgttacgagtttgtgtgaggtactctatacactgtgacacattcagtgtctaatgctagacgttatgaccaatactgatcagtgtgtgtgacgtgccaaggattaccaagtcccaagtggaccacttgataagccacctgttat

SEQ ID NO: 502285 - DNA, 857 bp, Homo sapiens
  misc_feature (327)..(327): n is a, c, g, or t
aagtgtacgctcgctatacgggatgctgcatggctactggacacattactcgacttgtggttgctcctttcacatacgggtggcgtgatgtctgactggtcaagatcatcacagagccttcacgaagctcatcatacagctggacgagtctgtgataaccagcattgcactggtgatgagtcctgagaaccacagtctcatccagatctggtggcacccagactccttacaggaaaatctggaagggagagaaatcacacactttgatcttcgcaaaaaggaggcctggagacagtctgttcctcactgccctgagctccctgcggncacctaatgcagcttcgggagatctcaaacagcaggctccacgtcctcacttgaagtcatcctcacccagttcacctctggggagggcggccttgggactttctctacggctgcaggtgacacttgtccagctggtttctcttcctcactctaacagaaatgctttcttaaaagcttctgcaggggaggggctcatttctcggcttggagagtaagctggtggggtgggacccaagctctcacttttaatcccctttcttgggagaagacggcccgaaggaggtgttgactcaccacacaggcagtgggatgtgcgttggtcctttgcacaaagttgtgaacagtgcgtcctgggtctatctggcccaaaagaaagggcgccaagaagtgttcaccgtggtcgctttccaactgtttccccttgaaggcaacatttaaccatgctttggacttgaacaggccggaaaacagctccagggaaggtatgcacccggcagaagaagggaaagtcaagggctacaaatggggag

SEQ ID NO: 502286 - DNA, 622 bp, Homo sapiens
tggggaaatcaaaaattttttttttccccccaaaaaaaaacccaaaatttccggggaaaaaaaaaaaaaaaaccaaccccaatccccccagggggtttttaaccaaaaaaaaggggccccccttttttaaaaggagcatttttaccatataaaaaagttgctatcacaacttacatagatagtgtggtttcccccctgtgtagtaacaaattttctcccctcccccacatgaggagggccccactaaaacacgcgtagatcacgacgtctgtatcattacacagcgagagtaataatacacctcagcaccgcctctgtactcaaaaagtagaaactctgctattcaatgaagtgggaacaacaacacacggaggagtgtcgccccccgagggggagtggtgaagacgacgataacacatcacctctctctctcgaagaagaaacaggcgatcttgagctaggatctgcgccccccaaattaagaaaagaacacaacacctgtgttgtcaccagggggtgcaccgaggaaagtacttgggaccaccccgtgtagttagcgcggcgcagagttctaccgacacccaccaatggagagagggagaagtcctggggaaacacgagt

SEQ ID NO: 502287 - DNA, 300 bp, Homo sapiens
gtgtcaggctgcctccgtttttgggtactgtgttgtgttttgctctgtctaaaaacatctgcatagttttcaactggaaaaggaaaaaacttaaaaatgggatgtcctaaaatgaagctgctcaagtcacagaacaccgagggccaaggagatggatgactgggagcgctggcccggaacagccctgcaactgtggggcctgcacacagccctccacagtgggcactgcagggcaggcccaacccttaagataacaggagtcagctctccacttttacagttggcaaacagcctccggga

SEQ ID NO: 502288 - DNA, 243 bp, Homo sapiens
aactgttttggatgatctgaggtgtggagttttagacccccctgtgcaacacggggaaactctgtgtctactataaacacacaaaaactatccgggcgtgtggggtgtggggagattccttgtattccacctacttgggagggtgaggccggaaaaccgcctgaacccaagagggggaggccggaacgagccaaaattgcacctttggacttcagcccgggaaacaaaaaaaaactttgtctg

SEQ ID NO: 502289 - DNA, 355 bp, Homo sapiens
  misc_feature (5)..(5): n is a, c, g, or t
ggtantaacaactggttaaaacagctttagataagaataatgccctggcaggcttgtaaggctgcctgatgacttcttagaacttggtgttaagaagcgagtagcttatgagatggagtcttgcctgttgccaggctggagtacagtgagagaatctcggctcactgcagcctccacctcctgggttcaagcgaacctcctgccttttaatcctgagcagctgggattacgggcgcataccaccaaatctggctaattattataatttttagtagagctggggtttagccatgttggccaggttggtctcaaactcctgaccctcacagtgagaatgtgatagccggggtaccga

SEQ ID NO: 502290 - DNA, 123 bp, Homo sapiens
ggtatttctctgctgattcttctagactccacattcagtctcgcggagttgctggcaggctgtatcggagggggacgctgaaggctggtggctgacagggcgccacggcactgcgtacttctc

SEQ ID NO: 502291 - DNA, 553 bp, Homo sapiens
gtgctcaacataattaatcatcaaggaaatgcatataaaaaccactcgaagtactacctctcaccagttaggctagctgttatcaaaaaaaacaaaagacaacaaatgtgtgatggtgtggaataaaaggaactctgtgcactgtggtgggaatgtagatggtacagccattatggaaaacagaatggaagtttctaaagaaaaataaaactaccatacgatccagcaatccctcttctgggcatatactcaaagtaaatgaaatcaccaccttgtaaatatatctgcagtccgtgttcattgcagcattattcatagtagccaacatggagacaactgaagtgtccgttgacagatgaataaagaaactgtgtatatatatgcctacacacaatggaatattattcatccctaaaaaaaaaaaaaccaggatttctggccattggctacaacttggaatgggcctgaaaggacacggtgctaaatgaaataagcagacgaaaaaaagatccgtgttaaatttcacaatattttgtgggaatcctagcaaaac

SEQ ID NO: 502292 - DNA, 307 bp, Homo sapiens
  misc_feature (42)..(42): n is a, c, g, or t
  misc_feature (72)..(72): n is a, c, g, or t
catttccctcaactaccactttttcaatctcatttccttctntacaactaatttttctacatcaacttttcnttacctcattcccacattcctccaattattaataccccttaccaccatccccatcaatatcacaacattaatatatataccctcacttctttttattcccttccacactcattcccccaccacacttaatctcccctcctcacattttccatttatacccctttaatattttattttcctatttatcctcaccttttcatttaccatcaataaattacccttttctcaaaaaaaa

SEQ ID NO: 502293 - DNA, 265 bp, Homo sapiens
ggcgtgactgcacgagcggacgtcttcgagagaagaggtcggacgcgagaggctcaactatggtcacaccttggcccacgctattgaggcccacaagcatttcacgtggcgtcatggcgaggctgacgcggtgggcatggtgtttgcggccgaactgtcgcaccggtacctgggactgtccgatgaggtcgttgcgcgcacccgcactatcctgtctgagatcggattgcctgttacctgtgacgagattaagtgggcagatccg

SEQ ID NO: 502294 - DNA, 421 bp, Homo sapiens
taatcccagcactttgtggaggctgacacaggcagacaatgaggtcaggagatcaagactatctgtgctaacacagtgaaacccctgtctctactaaaaatacaaaaaactagcagggcatgtgttggcggtgcaggtactttggccagtctgaaacacgtgacgaattggtgtgcaaccgtggcgacggcggaagctttgcacgttgatgccaactgcactccaggccttgtggcgccacatggcgagaactctggtcttctaccgcattacccatttaaccaataccacgtaacaacttcaacaccaaaacttaacacacactacccacacaaggtaaccccaaaggcgcaacgccaagacacttttgtcacccacaactactttggttaccctcccattcccaaaaaattaacccata

SEQ ID NO: 502295 - DNA, 117 bp, Homo sapiens
tccgtgaatgcagcctgctgaggctgagaagagggctggggctgtctgcggcgtggtttgctgttggccagttggagtcgttggagtggcaggagtggcggaagggaggccctgttg

SEQ ID NO: 502296 - DNA, 167 bp, Homo sapiens
actcgacatgatcgcttctggggcctcagggggctcatgtccatatccatcgagtcttccatcgggtggcggcacgcacttgtggttggagagaaggcggacggagattatcgaccgctgctccagataaccaccgcggtggtcccgatctcgattccgtaatcgtg

SEQ ID NO: 502297 - DNA, 169 bp, Homo sapiens
  misc_feature (20)..(20): n is a, c, g, or t
tatacgaatcgagctggtancccctgactaggccgacagcagagtccaggcgtctgtgtcagctcccagccctggctgcctgcctgagccatctgggctgtccacggtggagagtgtggtgcttgtgactgctggtgtgtgctggtaaaaaagtaagaacaaaaaaatg

SEQ ID NO: 502298 - DNA, 163 bp, Homo sapiens
atccatgtcttgtcatagatgtagtccgggggcacagaaaacagtagatgcctccgtacatcagatcaatggccaggttgtgccggcttcgccttcgcatgctcgtgaatatgcttctgtgtgaaacagccgaagaagacacagcagcaccaggaattcgccg

SEQ ID NO: 502299 - DNA, 523 bp, Homo sapiens
aatagagggacatacagtgcatccactggtgcctgcagcgtatggtgtcaatacactgatgttaatacgaaggtacagactgctcggactattaaaagcaccaaaataaaactagttcacagatagcaagacttcatttcaggagtcggtagtgggaagtacgaagtgtttaatcccaagttttggtgccctaaaatggctagtagtatagttaattctcaattctctagctgtgatcttctgtgccttctatctcttcctaaggaaaaccacattagatgaacccagggctcagtcattttagggagagggttgagacaacactgccagcaacacagctggaatcacccgagtcgggaacattaaagttcctgagagaatatgaaacatctatcaacataatatttctccctacttttacagtaaaatattggaagtaaataaatatagggaatgcaacagctggctaggagtgttttacattcagttgtttggaagcataacacattcagctcctttgaat

SEQ ID NO: 502300 - DNA, 438 bp, Homo sapiens
  misc_feature (438)..(438): n is a, c, g, or t
tgaacttttaattccaaggtagcattctatcttaacacataactttaggtgaatatttgttatgcaagaagtacactaaaattatctgcagtgtaaaatgatagataaaagttgtgtatggtacctaagcatttagatgatggcattttctctctgttgagtttgttaatgttcacaaaagcaaacactgtgattaaggttaatgttttaatttttattactgttctctttcacctacttttaccctccaaaacatatattttaaaataatataggaatgggcattatgtcctgttttaaatctatttctatttatttctttacattcatttaatttttttttaattttttaagaaaaattaatccaaattttgagcaagttttagctcttaatatttgaagccatccatctacctggattctttgccttttatgctn

SEQ ID NO: 502301 - DNA, 512 bp, Homo sapiens
cagagcaccgttgcatatatatgagacggggcccgttaagtcctctcctctccccctacttcttctcctccggggcttactcagtgattccaggggcaaagggtcccatgagccacgtgacaggtgtgttcttgggccacatatatccaccatgtggtccagggcctcgcgggcgttggcgacactgctcacggctctgggccagaatgcttgctggacaggtcctgcaaagagttggatgctggaaaacggtggctggagggtcctcccacctggcggcggggccttgttgcacctggttcccttcacattggtggggaggccctgaattgctggacccccaggggaggtacaggtgtgcttgcagttgttgggcatttgtcccggaacatgggtgggcgcccgggactcgacctgttcttgggttgggcggctccttctctgggggcctgtgagcttgttctggttccagctgaggcacatcttggtgcagcttctcctgggcttcaaca

SEQ ID NO: 502302 - DNA, 244 bp, Homo sapiens
aaaaaattaaagacgcccctggcggccccttttcctgggcccagtgatgtttccccggggcctgtacacaaccgagcagcatttccgttgaaggacttgcatccccctttcgggcagtgctggacgtgttccggagaccccccgggagggggcccccattccttgtaccccccccgtgcaggttgtggccggttttttccccaggttgaacatggaaataaaagccaacttgtattaaaacaaa

SEQ ID NO: 502303 - DNA, 356 bp, Homo sapiens
tgggtgatacagaatggattcgccccttgctttttttctccggtgtgtgcattccggggatttatcctcaagtgcatttgtgaccataggtaattttagttcatttcaaatgttttggttattcagggtcccttgggcagtataacaaaatgtagcttttgaatattgcccacctctatgcggcatatccttcttgggatatagtagctaagacctttgtaaacggccttttggttaggtatggagtttggtctttggggagtgggccttttttagccattcctgttttttgggactgaatgttcaaagtgaaacaatgtttggattctgggcagaataagggactcttcggtcta

SEQ ID NO: 502304 - DNA, 137 bp, Homo sapiens
tagaaaggacgtcagatgtgtaatcagagtatcttgtatgcacgcccctgtaagtagtataatctcttcatgcttaacatacctacctattattatcccgacgatattgtaatatagggtacctgagactcgacctc

SEQ ID NO: 502305 - DNA, 219 bp, Homo sapiens
ggccgaggcagatcctgtgacatatacgggtacaacattcatttatgtgtgtagcaagaaaaagacatcttaaaatcttaatttatctgactattgcatttgtttttctttttttcttttttctttttttttttttttttggaaatggagtctccctctgtgtgtctccgggcggaaatgtgcaggggcgcgattcttcgagctcatgtgaaagctcca

SEQ ID NO: 502306 - DNA, 179 bp, Homo sapiens
gtttcttcataccttcttccctggccttaagctctgtgccacctttgagatgaaaggcttgtcctgtctcccgtcactgcccccaggccatgtttccctcatcattttcacttccactgcatggagggaccacaccaggtcaataccaactacagtgatcaagttcaactgcacggcgt

SEQ ID NO: 502307 - DNA, 763 bp, Homo sapiens
tcggttgggcgcaacgggttctaggctggaggcagctcgaggagccgcggttcgccgccccggctcggcctggcagatagcagaggcagcaggtccgtgccgggggggcatgttgctgttaaccagtggggccaggggatgttacggtggacagctgcacctggagggcgggccccgtctagggctgagaccatgctgcagctggctgtcgggcagtcgggctatacgtccttcgggggttacggggtctggtgagagactatgagcacgactgcgctcgagcagtagagtgtgcacaattttcaatgcaggtgtccgttggctgttggacaacagctgcccgccggtgaagtctgccatgcgtgggcagagctcggctgtggtaccgctacatgcgctatggacactcatccgtgcctcatcgacgacatcagtcctcctttggggcgggcggaatgatcgccgaaggggcctgcgaatgtgctctatgtcctttgacgtcaagtacgcacaatgtggttcagcaccgccgatgtgtcagggacagttcctggggcccggtgatggacattcaggctgtgtcctatggcagagtcctgtagcctgtttgggggctacggagcacgcaggcggtgctgtttgttccactgacgtgtcgcaagctagataccagtcgcattggcatgcctcttatctgttccggggcgcctgcggctgggggacttccttcggccatggtggaggcctggttgtgggggcggcc

SEQ ID NO: 502308 - DNA, 262 bp, Homo sapiens
gagagacactggagacattgagcagcagcagtggggatggcaggcagagatgaggacaggaacatttaccttgtgtgtctctcagcttctcagatgaccaacatggtgctgcatgatggtgctgaagatggagaacccaccaagcctcgctaggagccacctagactggatgcagagcatggccccatgcacccgcagagcagacactgcgatgacagcggacgacacagaagcgcccgctatgactctagcaccgggccac

SEQ ID NO: 502309 - DNA, 564 bp, Homo sapiens
  misc_feature (9)..(9): n is a, c, g, or t
caacgaggncctcagctactgggaggccgaagtgggaggatctctgagcccaggaggtggaggctgcagtgagccaggatcatgccactacactccagcctgggtgacagagtgagacctcatctcaaaaaacaagaaaaacattctaaaatattttaaataggtaaacgaaataaaaatttaaaacaatatcaaaattatatcaaaatcataatatatcaaaattggtggagtgcaacaaagataataattagaacaaggaagatataaaaatcaattatgcaagctacttccaccttaaaaagctagaatagtataggcaaagtaaacctgagtagaaaacaggaaatagagagtagaaacaaatgcaatagcaaacaaaaaaatagagaaaacaataaaaataatgaaactaaaagctagttctctaaaaagatcaagacggccaagacgcagtggctcacgcctgtaatctcaacacacggagaggttgaggcaggcggactgcttgagcccagatgtttgagaccagcctgggcaacatgatgaaacctgtctctacaa

SEQ ID NO: 502310 - DNA, 167 bp, Homo sapiens
tgcttccctcctctatctttaaagaacggctcagtattcaatcagtcatgaagaacctgattagcactctgtgagtgttgtaaagaaacaaagaaactctaatattgaatctcttaaatttagtgtatgtaaacagcttacaaatacgtattgtctaaatgctatca

SEQ ID NO: 502311 - DNA, 421 bp, Homo sapiens
  misc_feature (421)..(421): n is a, c, g, or t
tctctctctctctctctctctctctctctctctctctctgcctgtgccggaaccagcacgaggatgactcagacattgacatagatatggacaaagacaatgctgagatcatggtcatgctccaggaggcaatgcaggagcatgtgaatgcaaatagagacagagctaaccctgtcactgaccctgtgagtgtggctgttacattcacgttcacagagggtgaggacgtcaaccgcgcaagccttataactagcaccaacaccaacacaagctaaggtgacgcctatgcatcaccagtacagaattcaaacactaccacgttagcgacggctacagttgcagctgttgctgcagcatcagtctccatctcacactgacacacagccacagccaatgcagaggtaattagagatggcaatgn

SEQ ID NO: 502312 - DNA, 707 bp, Homo sapiens
acatggccctgctccctccctcagtctgtagcctcaggaggggactgctttgcctgtgagtgggagggagctaccgtgtgagtagttcccaacagaccatctgaagtcattttcccaggtggcaggagaaacacagagccagacgttacactgcttttcaaagagagttgcctctgctgccccagcgaggatggcgacacaaacagcggtggtgtcagcggacagcggtggtgtcagcggtgaccgaggcagggccgagactccagggtcttcgggttcaagctgtgccccctcgcgcagttcagcacctgccagcacttccaagtgtgtgattgtcacgcttgcctgattactccttcctttgggctcccatagcaatttgtacattactgtggaattgatcaaattgctttataactagctgtttatgtgtctttaatctgtgtcattttggatggcaggaaatgctctttcggtaatttttttgtccacactgactggaatactggttggcacatagtaggtattcaacagttttttatcgagggaatgaaagctctctaaaccacagcaatcatttgtagacaaagactcttagggtgtaatgtgatttaacatctgatttttggaaaatagttactgagatcattccgacaataatagagtgcaataccctacctttaataaaggatattttactcctttta

SEQ ID NO: 502313 - DNA, 200 bp, Homo sapiens
tgccagtttattcccaattactattctttcctttccttctcccttatccctctataagtatctagtgtcatagaaacatggatgttatagatttactatactcctgcaatgtacgatagatctttattctctaagttcatatccaattatttgcaggaccataaattctttctctaatacttagggcgctcgtgccgtgt

SEQ ID NO: 502314 - DNA, 106 bp, Homo sapiens
gcaggagaactggtgtgaacccccggagatggagcttgcagtgacgccgcgacctgcaccactgcactccagcctgcacgaatgagcaatgaccccatctcaaaaa

SEQ ID NO: 502315 - DNA, 161 bp, Homo sapiens
gaggagtatggttgcagatgctgctatttcatagaggaattgacaggaagagacaccaccacgtgagtggagcctgcgagcttaactttgacgtcaacactgggaaagtctcaccctggcccgtgacacggaacaggacttagatccagattgactatgct

SEQ ID NO: 502316 - DNA, 396 bp, Homo sapiens
aacggcggtccggtcgaggtgacgcagatcgtgctctcgacgcagcatcttgacgagtccctcgactcggccgacgtgcgcgccatcgtcgagccctacatcctcaaggccctgccggagggctgggtcaacgagggcaccgtctggcacgtcaatccgaccggcaagttcgtgatcggcggtcctgatggcgtatcggctcaccggccgcaagatcatcgtcgacactacggcggtgcgggccccacggcgcggtgccttctcgggcaaggaccgaccaaggtcgactcgctgcgtacgccgcccggtatctggccaagaacgtcgtcgccccgctcgcccgccgcgccacgatccagctctcctagccatcggcgtgccaagcccctgtcgatc

SEQ ID NO: 502317 - DNA, 876 bp, Homo sapiens
cgcagtggctcacgcctgtaattccagcacttgggaggccaaggtgggcagatcacgaggtcaggagttcgagaccagcctgaccaacatggcaaaaccccgtctctactaaaaatacaaaaattagccgggcttggtgatgcacgcctgtaatcccagctactcaggaggctgaggcaggagaatcgctttggaccctggaggtggaggttgcagtgagccaagatcgtcgccattgcactccaagcacatccagcctaggaagccagagggagagactgtctcaaaaataaataaataaataaataaaaacaaataatttggcctcaagtggttacaggacatatgattatagttatccgccaaagagtatttgggggcttcatacttaattattttagctttgttctaactcctctctttataaatttttgtctctttaagacaaggtaaagacagtatgtaaatcagtgagcattccctcgctgatggaaaacagcactgtagtgatatgtctagcttaaagtaaagtctaacatagttgttattaatgcccaggggtgttaagggttgaccacagtttgaaagtgttatgtcagtaacaggttccctgtttatgggcactctaaaaattaacttgcaatataaattacaaaattggttactggtgtatctttttaaagagtgcttggacatttctggttaaaaggttccggtacacttgggctatggcgaaattctacgtagatgggaagttaggaggtcataataatggctgtggcaactgggacagaaataattagggtgtaataaaaaacagaaggagggaaccgaacccagtatagattaatttgggggacattacagaggggagaa

SEQ ID NO: 502318 - DNA, 129 bp, Homo sapiens
gaggatcccctcgcaaggatgaggaattggcaggtcttaaggtcaatccctgtattgctttaagtggttagggggtggtttgatcacatattgtagaatacgtcatttcagttcctcgatccttgggag

SEQ ID NO: 502319 - DNA, 96 bp, Homo sapiens
  misc_feature (51)..(51): n is a, c, g, or t
  misc_feature (68)..(68): n is a, c, g, or t
cgagaagacgacagaaggggaagaaaaaagaaaaagggaagaaaaaaaagnagaaggggagaaaaganaaaaggaaaagagaagaagggaagaagg

SEQ ID NO: 502320 - DNA, 313 bp, Homo sapiens
gggtaggaccgagggtactccacgctggagatgtagcctgatgcctccgtgtacagatcgctgttgtactcagcctgtcaggaatgcctgtctttctgaagctcatatcctgtacggcaggaaacagaatatcctccaacgtatttgtgacacacgtgctggcactggggctggggatccttctcccctaatttgctccgggaagcacattcatcaaggtccacagcttggtagtaggccaggaagcccttgtagaacatgatggtcccattctcctcgttggagaagtctgtgtggaaggtcaacagcatct

SEQ ID NO: 502321 - DNA, 1682 bp, Homo sapiens
  misc_feature (311)..(311): n is a, c, g, or t
tccccgagaaccaattttcattcctgttggcccaaggtaaagtgcaggggcgtgatctctgctctttggcaactgtgccgccctcccgggttcaagcaatttcttcatgtgcattcagcctctcccaagttaccgtgggacatacaggcgttgagcataccatgtgcccggctataattttgtggatatttttaagtataaagagtggggtttccattattgtgttgtgcgccgaggctgtggtctctctcgaacactctcctttaacctctcgaggtgtgattctccacccacacctgtgtggcctctcncgcgaaagtgtgccgtggagatatctcacgaggcgctatgaagcccaagtgtggccccccgggccttgtggacacctgtgtgactgtgtctctttatattcaactcccacaaaaacacatttttgtgaacactgtggcacattattgtggctctctccgagaaaaatatgtgggcacaaccagagacacttatataaatgtgaaataaagcccctgtgtgcccctatatgccacaaactctctctctcctgtgtgtggtgggtgagaaaaatagagagggcccccctctctgtgttgtcttaccaaaaacatcttatcaccctgtgtgtttgtctaaaaaaggagacttctttgttgtttccacaaaggccccaaaccggggcggttccctcgtagggggcttctcccttctcgttggggcccccacacggggggttgttgaaccacctattttttggggcggggctcttatcccctccttttgaaggagagaacgtttttgttggggggccccctttaaaccgcgtgttatttttctcccccaaaagaggcgccgggtggggtcgcccgggggggattctatctcctcacacattatagtttgtggggtcctccgtggatagaagggggggcttcaccacacatccacgaggcccccccgggacgaaggttataataatgaggatggggtgaaggagacggcatactatctctctccctatttactgcagcaccacacaatctactggggcatgtgtttcatattaaggcggcgaaaaccatctcccccgggggtgtggtttccccccacaagcggttttctctcttccttttgtggtcgacaacaatctgtgttctctctctgggaggggcggctttttgcggggatttttgcaacacaccgaggatgggtgcgcccccccacggcttttgtgttgttctccaccaagatttggttttctcccacgagataaacacaaccgtgggcggttcatgggaagcgtttccccaagaacataagagttgtttcccccgtggtgtaacccaattattctttttcttttattgtgtaacagccaacaacttcctctttgacaacccacactgtcggtgtagccaacaatataacacccaccttttttaactaaccccccaacctaacttaaccaagctaacaaacaacaaacacctcacgaggcgggaacacactacattcatcagtcgggagggggggagagaacgaaaaacgaagtgatacataactcggcacgcagtaggtggcaccataatcagtgttattcctggtccacccccactttgtttcttaccacacgcaggggaaaaaatcggggcccccatgaaggaggcgga

SEQ ID NO: 502322 - DNA, 347 bp, Homo sapiens
tcaaactcctgggctcaagccatcctcctgcctcagcctcccaactaactaggactacaggcacatgccactacacccagctaattttttttatttttactcttgctatgttgccgaggttagtcttgaactcctgggctaaagcaatcctcccacctcagcctctcgatgctgggattacatacagattttactagtttatctttttgagttctggaggcacttttattttccctatgactcacctatattcccacaaatgtgtttaaagcaatttataatgaggttaattttcttgtctcatttccagggttaagaagattcccaaatgactgtaaaattaaata

SEQ ID NO: 502323 - DNA, 1007 bp, Homo sapiens
ggcctgctaacggtccggcagtcccgcgtatacaacaaaaacacacaaagatgtaaaaaagcttcaaataaggtcatggatataaaactggcccacaaattaaaactttacctagaaaatctgactagggataataaaaacaaggcaactgtgtgtaacacgcaaataataaccgtaactttaactttgtgtggtactttggggtttttaagcattttccctgttatttacaccagaaactgattaacaggaaaataatacctgcttatatctgtgtaatacctatttggtaaatgtaaaaacgaaggcttagaatgctagaaacaccttgccaggattacccagtgattgggagaccatggtcgaacctcatctcatggatggctgaaacccatccctattctacctgacacccacatttcagagttttccaaaatgtggttccacagacaaccagcatcaaaattgctgggtataattattctaagaaggcaaatcctagaccttacctcaggggttagagcctctgatacaaatttcctgtgtacccatatgcacaaggtgtcactaccactttaaaaggcatgttgtagactctagggtgtacacaagggtcaggacatactacaaacacctctaaagataggtctaggacaatgtgctagaccacccttgcaaacccagtaatacatgcttagcacaaggctctaacattgcccgggcatgtattagtacccctccccggagacgtgacaaaattgtggtcaattgtacaaaaagccaaaattgctctaggaagaaaagaagcacaatataagtgggtcaatccctttaccatgcacagaaataatctttagagccaaacagattataaccgaagggacttacaaaataaacctgactatgaaactcggaataactattaatgtatatacaaacattataacctagctccccaaatgtagttccacaaattaaaacaaacaaatgagtaattgaaaaacgtt

SEQ ID NO: 502324 - DNA, 836 bp, Homo sapiens
gtcccagctactcggattctaaggcaggagaatcacttgagcccagaagtttgagatcagcgtgaacaatacagcaagaccccatctctacaaattaaaaaattaactaggcatcgtggcacgcgtctactcaagaggctgagacggaaggatcacttgagcccaggagtttgagactaggctgggtgacatagtgagaccctgtccctacaaaataaaaaaagatttaaaaaaattagccaggtgctatggcatgtgcctatagttccagctacttgggaagctgaagtgggaggatgttgcatgtgaattgaagtgggtggtctaggctcgcaggtgagctgtatcactccactgactccagcctgggcaaacagaacgagaccctgtctcaaaaacgagacaaagccaaaaaaaaaaaatcccccagagtggtctgttggatgaacacccagtcattatggactagcaggtgcacatttggctgatgaatccgaggggtagcgaagaatacttatagcttaagacttttctcaaacacaattttaattaagtactcttctgcaacaaaatgctatgcccaaatagaacaaaatagaataaggcaaagtagatgaatggccaaacaagataggatgagagagtcagcctacataaggaacagattgttaataaccattacgcagtcgggatcagccgggaggaatgtccaagggggtatgtacaggatagaagacaataaaaaagaagacaaaaataaaaggaagacttaccgaaaacaaacaggaagacaagagagccagaaacaaaaggaaaggcaaacacccatgcgccta

SEQ ID NO: 502325 - DNA, 99 bp, Homo sapiens
ttccttttttttccccccttttttttttggggggggttggaagggatttaatttttggggggagggtgggggggcctttattaaaggggaaccccccca

SEQ ID NO: 502326 - DNA, 544 bp, Homo sapiens
  misc_feature (305)..(305): n is a, c, g, or t
agaggttgcatatcaatttgccaaatattgatgttcaggtttttctaatattaacttgttattggaatttggatacttcataattaatgaaagaaaatattggcagtttatcctttagttctaatcacctctcgtttccctcctaggtcttgtcagcaatacagactggttgacaggcctagcagtactgtcagatttccttggttcaaagctcagtctttttactttctagatatataagttttagcaagtttccctcacccacttaaatagaaagtaattaatggcgctgtactttttggaanctgtgcacaagagctcaagtgataaaattctatggtgtagtactctggcaatagtaccctggcccagaaatgagagaccctaacccacttagcgtgctaatagtgtattttgtacttcttaaagcagtgaaagattcttgaaaatcttatacttctgcgtaaaatcactacctatactcttaaaaattttcactatgggctcctaccttaaattaaaaaatattttccaaaacacggga

SEQ ID NO: 502327 - DNA, 267 bp, Homo sapiens
tatgagctctgttatctcctcgaattggggagggtcagggccattatttcttgagcatcatctagctgatacgatataaggaagttatcacttctaaggaccaagaagaattatgaaaagtgaactacacctatgagatttaggggaggtcatcaaatatagcactatatacatgatgggagtcccagaaggggaggagagaaaggctcagacagattatgtgacagaaataagggtcaaaacgcctcccaaattttaggagataca

SEQ ID NO: 502328 - DNA, 502 bp, Homo sapiens
tgctagtactctcgctgtcagtgacatttccatgaaatccacggtgttctacactctcgctgtgggtgccatttccatgatatccacagtgttctaaactctccctgtggtgccatttccatgatatccacggtgttctaaactctcgctgtcggtgccatttccatgatatccacggtgttctaaactctcgctgtcggtgccatttccatgatatccacggtgttctaaactttcgctgtgggtgccatttccatgatatccacggtgttctaaactctccctgtgggtgccatttccatgatatccacgacgttctaagctctccctgtcggtgccatttgcatgatatccatggtgttctaaactctcgctgtgggtgccatttgcatgatatccacggtgttctaaactctcgctgtgggtgccatttccatgatatccacggtgttctaaactctccctgtaggtgccatttccatgatatccacgacgttcaaag

SEQ ID NO: 502329 - DNA, 374 bp, Homo sapiens
  misc_feature (323)..(323): n is a, c, g, or t
  misc_feature (367)..(367): n is a, c, g, or t
aataagcaatcatattcttacgattattcacatgtaagtacttaacagtaagggatatggcgtaccattaatacaattaaaaaataatgcgtggagggtaactaagcagcatagttgtatcactggaatacctgtaaccgctattaaacagcagcagatgcagggggctgggagggtctttttccccttggagacgcggaataaactgtgttgtgtgcctgcattttgactgtggtctgtcacatgaggtcaaggtgggaattttttacttgtgggtatttaaaaatgtttgggattttgggagcatttcttgattttggggnttgttttgatgaggggacggctccaaccctattactttttatanttgttca

SEQ ID NO: 502330 - DNA, 513 bp, Homo sapiens
  misc_feature (163)..(163): n is a, c, g, or t
  misc_feature (281)..(281): n is a, c, g, or t
  misc_feature (335)..(335): n is a, c, g, or t
  misc_feature (337)..(337): n is a, c, g, or t
ctcgaggccaagaattcggcatccccgccatcatcgtcacctcctgactggtctgatcaaggccgtctgtgtcgtcatcgtgtctacaacggcaacgcggcctgccagcgatcgcgaatcgcggcccgatagttgtcgtcgaaccggttagctcgcgggtaanaatccttccaggcgaagggcttacacgcgtcgatgagcacgatacccatcgacaggtcacccgcatcgcgtttcgcaggcgacagtcgcggatcgatcgccgttgtcggtgtgcgcangacgtggatggattcggtcgggtcgacgcgagtgaacagcgcccagagcacatnantgatgtcggtgatatcgatgtcatcgtcgacgacgacacagtagcggtccatgccgcccgttctctttcgtcccgctgccgccaacaacgcatgcatggcgttcccggtgccggtctgctccatctatatcaccatcatcaactggcgcgcatatgcccacacgcccttgatgttt

SEQ ID NO: 502331 - DNA, 697 bp, Homo sapiens
  misc_feature (605)..(605): n is a, c, g, or t
  misc_feature (616)..(616): n is a, c, g, or t
  misc_feature (638)..(638): n is a, c, g, or t
gcctccagctttgttctttttgcttaggattgcctttgctattcaggctcttttttggttccatatgaattttaaaatagttttttctagttctgtgaagaatgttgttggtagtttgataggaataacattgaatgtgtaaattgcttatgttttcccatttgtttgtgtcatctctgatttctttgaagagtgtttttaattcttgttgtagagatctttctagagtattcctaggtgttttattctttttgtggcagttgtgaatgggattatgtttctgatttggctcttggcttaactgttggtatatgggaatgctagtggtttttgtatgttgcttttgtatcctgagacttcgctgaatttatgtatcagcttaaggagcttttgggctgagactatggggttttctagatatagaatcatgttgtctgcaaacagagggtagtttgacttcctctctttttatttggaggcactttatttctttctcttgactgattgctctggccagggcttccaatattatgttgaataagaatggtgagagagggcatccttgtcttttgccagttttcaaggggaatgcttccagcttttgnccattcaatantatgttggctgtggatttgtcntccaatgggtccttaatatttttgaaggtttgttccatccaataatgttatttactgga

SEQ ID NO: 502332 - DNA, 1730 bp, Homo sapiens
  misc_feature (1018)..(1018): n is a, c, g, or t
tccaaaaaacccagtttttttttaattgtggtaaagctctgccataaatcttctaccgtgtgccaagggtctccccgtccacacttcgcaccaggttgtgctccggtgttacccagcaaacagaagtctcgtggccattcagcagaaccgaggcccagggaaggtgtgcccgtggggtgtggtttcgtgccttggcgtgcgtggtacgtagatataacttctcttgtgcgtatcagtgtctcatctctataacaagagagatctctttcccctctctataaatctcccaaatctcttgagaggtgctgtgggcgcccgtggtggcacgcatcaacaccgccaagataagcggagatataagggctgtagaaccaacaggggggcgtgtgagagataaatgtgtctcccccaacaacatatctatcgcgcgtgtgataaaagggtgtgtttgagacccatctgcgggagaggatctccccatatacacacaagtggccctgtggccacatctcgtgtgtgtgccctatcacacaatatggccaccgaggagagaggggaaaatctcaccataatctgtgggagagaaaatataaacgagtctccacccgcgggtgtctacaacgagaaaaatcagccgcgtgtgtgtgttggcccccacaatgtgtgtgaggtgtgagtgtctcctctactcgacggctgatgggacgacaagatttgataacccccgcggagggtctccacaatacatctctgtttgtacacccacaagctgtatatgctccccccacaaggccccacagtagagagagtaaaacccacagatctaagaaataagagggagatatcagcaatgaagacatagatagagagcagccagacaacaaagcgcgcgagagacaaacaaagagaacacacacccccaaactcactctgtaagaagcgtgcggggccctcaatacaatatccccaggggggacacaacacgatgtgataatatttggaggccgcagccagcaanccccccacgggggagtaaaactcacccaacatgaagcctctttgaaagcgagcttattaatactcaaaacggaagttgtgcggcatggctcctgatgtaaaccccaacaggccgactataagtataatacgagtacaatgaagaggcgcccccgttggatcccccacatgaggctgttagcaacacacgctgtcctaaagcacaacccacctctctgtgtaagttgaaggcccgcacgagaaacagccctccctcccccaaaaaatagcctcgattgttgcctaatagttggatagcgacgcccaccctcataacacaacagagtatgtatttttgcacaaacaatctttgtcagagagaaacatcccccccgcaagaagtgacggagcacacactgtaaaacagaacgcaaagctaaatgcaagtaaccacacgagagagacagtccccccgtagcaacccccgcgatgtggtgtagtgacaataaaacacatacatcccaaagagacagtcgatggagatataacacctcgagacgcaacccactcgtcttgcgtgagaaaaccgcgcgagcccaacaatacaacccacggtacagcaagaaggagcgccacgaagcacccccaccaccaaggagcgagacaaaaacacagccgcagcgacacaacatacgtcagacgaagcgtagacgaagtccgagaacgacacaaca

SEQ ID NO: 502333 - DNA, 292 bp, Homo sapiens
aagccccggccctggcctccccaacccccccttttttttttttgagacggagtcctgctccagcctgggcaacagggtgagactctgtctcaaaaaaaaaaaaaaagtactaaaagattagaaataaaatcaataacaaagatactaggcatggtggctcacatctgtagacccagctactctagaggctgaggtgggatgactgcttgagctcaggagtttgaaagtagcctggccaacatagcaagaccccatctctatttaaaataaaataaaattttttttaaaaaag

SEQ ID NO: 502334 - DNA, 213 bp, Homo sapiens
  misc_feature (23)..(23): n is a, c, g, or t
ctactctgacggactccccgggntctcatggattacttgccatggtttgtgcacattaactttaataaaggtgtggcaccgctcaaggacacagtggaaggaatgtgtagttctgctatggggagtcatgggaagaggcagagaaggttctacaaacggagaccacacacttggtcggaggtcttcaacgagacggacactcggcgtcccgag

SEQ ID NO: 502335 - DNA, 174 bp, Homo sapiens
tagagagatcttgagcaggtccaagcacaaaactagtatgaccggagagactcaatttagaacgatgcagcatctgaaaacctttaccccaggaaaggaggggtgcctgcatggcattcatggagctctggaacaagacatttattcaaacgatgatggcccctcgagaccgga

SEQ ID NO: 502336 - DNA, 167 bp, Homo sapiens
  misc_feature (108)..(108): n is a, c, g, or t
  misc_feature (126)..(126): n is a, c, g, or t
tcccgtagtccttagcaagtagacatctttaattcaaaaaatacatgcacatatatacaatagtgatgggaatgttatctttatccaaaacattatagagtttatctncagatatactggagtacntggtcactcagtctggtaaactaaacccccagcagggtggt

SEQ ID NO: 502337 - DNA, 190 bp, Homo sapiens
acacgcaactggggaactggagcaatatgactctgcttatgttttagcaaagagactggtggcatttgcccctgccatagagttctgtggaactttgaacttgagagagatgatttaggtatctggtggaagaaatttctaagtggcaaagtgttcaagaagaagcagcgcataaaagtttggaaaatgg

SEQ ID NO: 502338 - DNA, 332 bp, Homo sapiens
agaaaaaaaagtgaagaagtctgactttggagaatggcagttgagtttgtgtgtgcccaccagtggagactgtgggctgggcacacgggagggcactcggactggagctgagttcaagcaaaccatgaagacccagagatgtaagatcccctgcaactggaagaagcaattttgcgcggagtgcaaataccagttccaggccttgggagaatgttacctgcacacagccctgagacagaactggagtctgagcgagccctgacaatgccgatgcaaaagctttaccattccaagcctgtggaaatgccagccaacctaagcagatctaggag

SEQ ID NO: 502339 - DNA, 871 bp, Homo sapiens
agcggggtgtgacagcagctgaagggcagaggaggcggcgcggggtgtcctgtcctcgccatgaggccgccgcaggcgccgtgtgtccggaaaggtgttcattcagctgatgatcgtacggcagtggcacagcgctgccagttgccatgaccaaggttccctgcggagctggagaaccggattgataggcagcagtttgatagaaacagttctgaactctaatagtaagcctttatgcacgaagcacgagcaagctcggcggccagtcatatctcgaaggttcgttctggcttgtttaacagcatataccatcttccgtatgccgtggaagctcattatgacgaaggttctgaagaaagtctccgaaatacgattcaccgagcagaatgagaagatctatgctccacaaggtcctcctccgtgtacagaccctattgagcgaggactgcgaggttacttgaaagttaccattctattgaagactagagcgcatgcagcagtggaacgataaaccgaagaattaaagatcccacttccagcctgggcccctcatgtatccacttggtccgaccgaagagatgtccctagctccgtactccagagcatcattcctttctatctgctgccagagccacggtgccatttactcccaaggactcactttctaaaattccacacctggagtgacctactagttcgctcagcatccactttgtgtctccaaattgtgtaggaactctgtaatcttttgattaagttgctgaagaaaacccaatgaagcacttcacttttttttattcagggccattcactaaaaccacagtgggtcagcccagtgcaaagcttggtatcctgccaacggtacatacca

SEQ ID NO: 502340 - DNA, 129 bp, Homo sapiens
  misc_feature (7)..(7): n is a, c, g, or t
acagggnattgggtgggatttagccatagcatctttaacattcttattggcaagtcctagataatgatctatcggggccggaggccgttcataaataacaggaacacggaagagtgaaatgaggccaaa

SEQ ID NO: 502341 - DNA, 342 bp, Homo sapiens
ggtcgctctagacgatcccttatctcgcgtgcgcatcatcgtttcaccactgttagcttcgtttacatcaaactccatcaacgcgccatcgctctcaatcgccccaacgcttgttaccatgataatcatgcacgaaaatcagccacaaaggacgccgctgaagggccaatgatcccgctattatgagagcgcaacgtaccgccgggcaccatcacttcaaagcgcgggttgtggtaaagaatatgcgccacacgcagtgctgttggttgattatcctgcaaatgattatggttaagtaacgcccgggcaacatgctcaacagtcgtaccaatggtgataaat

SEQ ID NO: 502342 - DNA, 132 bp, Homo sapiens
ggatcttaaccactgtcgtctacttcccctggatctgaagatctggatggcaggaacgagctcttatatgactatttcaccctggcatgtgctcagcactcagcacgtgctcgatgggatgtgcaggtgcac

SEQ ID NO: 502343 - DNA, 160 bp, Homo sapiens
gaacatcttctatagctttaataggtgtctgtctccattttcatcttcttcataattggcatggtctctctttctggcacactttttcccaattgtccccacggatgggggaaccttttagaatcgaacttgcagccttccagcttggcacttggcctcg

SEQ ID NO: 502344 - DNA, 765 bp, Homo sapiens
ctgtaaaagttccttcctcctcttttcccgcaaggctctcccttgtcgctaataaaacatgttgcttgcctgtgtttgggtcccccccccccccctgttaagaaaaaccccactctgtgggtttaagacccacactaacattgggctgggatgtcctctcgcaagtaattcttccaaccaactctgttctgcctacacgcacactcccaccggtgctccctctattaataaaatatatttcttcaatccatcgttctgctggagcacactcaaaatatatcttatttgtaaaacacacatcagtgatattcagcccgagtgcggtgctgaaaaattatactgctccacagctgaggggctgcctctctgcttctatgaaagctagggtgctaggtgtcgccgcacgctcgcatgtgcatgtgtgttttgcatgtataatagcgttctgttgtatgtatgtagggggtgcgacgcgcatatacaattaaatttgtgtgtgtgaccaaagaaaacttttgtgtgagtgaccaaaacccatttctctggagtggccgcacacaagttcttgttcgaatgcaatgagtagtggatgacaaatcctccgttcggggtccacaatagtagactataccccctgaagaacttatcttcttcacgtattttccactcttctagactaataggcagaaaaaattttcttccactaaaaatattctttgaatttatttatctcatttctccccacaatacaaaatacaaaaaaca

SEQ ID NO: 502345 - DNA, 868 bp, Homo sapiens
  misc_feature (690)..(691): n is a, c, g, or t
  misc_feature (694)..(694): n is a, c, g, or t
  misc_feature (700)..(700): n is a, c, g, or t
  misc_feature (705)..(705): n is a, c, g, or t
  misc_feature (724)..(725): n is a, c, g, or t
  misc_feature (732)..(732): n is a, c, g, or t
gcaataaagttttagtgagcacagactcccttttcttgggcaagatggcggagtacgacttgactactcgcatcgcgcacttttggatcggcatctagtctttccgcttcttgaatttctctctgtaaaggagatatataatgaaaaggaattattacaaggtaaattgggaccttcttagtgataccaacatggtagacttggctatggatgtatacaaaaacctttattctggatgatattcctcatgctttgagagagaaaagaaccacagtggttgcacaactgaaacagcttcaggcagaaacagaaccaatggtgaagatgtttgaagatccagaaactacaaggcaaatgcagtcaaccagggatggtaggatgctctttgactacctggcggacaagcatggttttaggcaggaatatttagatacactctacagatatgcaaaattccagtacgaatgtgggaattactcaggagcagcagaatatctttatttttaagagtgctggttccagcaacagatagaaatgcttaagttcactctggggaaagctggcctctgaaatcttaactgcagaatgggatgcagcatggaagaccttacaggttacaagagaccatagataataattcgtgtgagttctccacttcagtctctcaggagagaacatggtcatccatgnnctngtggtnctcantcacccaagtcggataatnntgactcntctttataagccacatatcttatgccattccgacatggtcccactcttcggtttggcagggctacacaggttcggaagtggggtcagatcattaattcacaggctccctaaccccagtcgggttgtccgcagcgga

SEQ ID NO: 502346 - DNA, 812 bp, Homo sapiens
gcaataaagttttagtgagcacagactcccttttcttgggcaagatggcggagtacgacttgactactcgcatcgcgcacttttggatcggcatctagtctttccgcttcttgaatttctctctgtaaaggagatatataatgaaaaggaattattacaaggtaaattgggaccttcttagtgataccaacatggtagacttggctatggatgtatacaaaaacctttattctggatgatattcctcatgctttgagagagaaaagaaccacagtggttgcacaactgaaacagcttcaggcagaaacagaaccaatggtgaagatgtttgaagatccagaaactacaaggcaaatgcagtcaaccagggatggtaggatgctctttgactacctggcggacaagcatggttttaggcaggaatatttagatacactctacagatatgcaaaattccagtacgaatgtgggaattactcaggagcagcagaatatctttatttttaagagtgctgatggagtcttgctatgttgcccaggctgatctcatactcctggcctgaagtgatcctccctcctcagcctttcaatgctttgggatttacagccatgagcctctgcaccctgcctgtcataagatttctctagttaatcctagaagttggtaaaatagaccttatactagagactttttgtcttcacaacacttggaagagtttgtttctttaagcacatgaactagtcatgcacacgagaggtctattactgcgtagatccagcatactgcaggggaaagtaacatgcagaatagt

SEQ ID NO: 502347 - DNA, 221 bp, Homo sapiens
ataacatgggatagggaagacaaatgaatgactgtaccagtggataaataacatttttcatttcattacatttttttttttgagacagagtcttactctgttgcccaggctgaagtgcagtggcgcgatcccagctcactgcaacctctgcctccagggttcaagcaattttcctgcctcaatctcccaggatactgggattacaggcattcttcatcagc

SEQ ID NO: 502348 - DNA, 172 bp, Homo sapiens
  misc_feature (16)..(16): n is a, c, g, or t
  misc_feature (75)..(75): n is a, c, g, or t
  misc_feature (85)..(86): n is a, c, g, or t
  misc_feature (91)..(91): n is a, c, g, or t
  misc_feature (107)..(107): n is a, c, g, or t
  misc_feature (118)..(118): n is a, c, g, or t
  misc_feature (123)..(123): n is a, c, g, or t
  misc_feature (128)..(128): n is a, c, g, or t
  misc_feature (161)..(161): n is a, c, g, or t
gggtggagagagaggngtgaaggcagcagggcaggggaggggagggtggggggaggagccaactggggaggcctngagggccagnnaagcnagttagggccagggcnagaatcgcgcntcaanggaanaacagccctagttgccctaaagagcccctaacnctttgctggct

SEQ ID NO: 502349 - DNA, 337 bp, Homo sapiens
  misc_feature (36)..(36): n is a, c, g, or t
  misc_feature (320)..(320): n is a, c, g, or t
  misc_feature (327)..(327): n is a, c, g, or t
gagtgatactctgcctcaaaaaaacaaaagtatttncaggacaaaggcatgtgagtgtgcagtctctgtaacctggcaggagccagtccatggtcagtggtcctcttatgaggagaaagttactggaatcagtctcttgtccagtcaaagctgtagttacggctggtggaacagggttcccgttcatgtctgtgaactgggtgagctgtgatcattttaacattgcttatctttaggtcagtgcttgtttagttgttgaataaaaagaaaaaccttgtggcagttagaacacagtttgttatttaagtttaggggagtgngacttancccttgactg

SEQ ID NO: 502350 - DNA, 660 bp, Homo sapiens
  misc_feature (21)..(21): n is a, c, g, or t
ggcggaagcggagaccatgtnccgagcggcggtccggggcagctccggcgggcggctcattgctacgattcagagtaccctggtaatagctgagcatgcaaattgattccctagcacccattactttaaataccattatctgagccacacgcctgtggaggtgaagtgtcctgcttagtagctggaaccaaatgtgaccaggttggccacaagatctctgtaaggtagcaggcataagcaaaaagttcctgggtggctcagcatgattgtgtacaacaggcctacttccagaggaacctggacaccattgatttgtggcaatcaagaagcagttcaattaccacacacactcttgtgctgtggagcatctgccttctggaaagaacctttttgcccagagtagcaaggcaaacttgaggttgcccccgatttctgacattccatttgcaatcaatgtcaccttgacaccattgtggtgagaactatttttattgcagcgaaaatgctctattgtaccagtgacagttgttgctgacgcaaacgtgacaccgtgtttcgtgtccggtggaaacaatctttggatgctggagccaacaagttgggcggtagtgccagttccagaaaaggcattcaagtacttcaccagtggaaatctccgag

SEQ ID NO: 502351 - DNA, 237 bp, Homo sapiens
cagcgaacaggcaaggaatgtactctacctggagagtctcactcgagttctagagaaatcaagttgtatccccacagtgctacacatgaccttattttataatagattcttcaagtaaaatgtggtcaaaggaaccaataaattgcctcacgtcataattttaaacttaagtgtacggaagactaattacagtgagtctttgcattggtatctttagcccacaaatctttttggctc

SEQ ID NO: 502352 - DNA, 105 bp, Homo sapiens
gcggccgcctactactactaaattagcggccgtgcgacggaagaaagaaaagatagaagagagagagcaagaaagaaatcaagagaaagaaaagagaggtcgacg

SEQ ID NO: 502353 - DNA, 279 bp, Homo sapiens
  misc_feature (251)..(251): n is a, c, g, or t
gctgtgagccatctgcctccttagggactggctattatttcttcatcttattggtagagtaatgggtgcaacgcggcacagaccctttgtcaaatgtgctgaaaagctctgtgctctactcacccagaaaactgcctcatacaattgacacacattttgtacgcgattttcatgggggttccctggatttccctaaccacctttttatgtggtctcataccaacctctgtccttcgcgataaactatctcnaactcatagagagtgtgacatagagggc

SEQ ID NO: 502354 - DNA, 189 bp, Homo sapiens
ccgagatcccgccactgcactccagcctgggcgacagagcgagactccgtctcaaaaaaaaaaaaaaaaaaaaaaaatttttttcaaaaaggccatcaaggccataaacgggatttctcggccgggatctggggcaaaggtaaacttggaaaacctccggggaaaggaggtcaccatttctagggtacc

SEQ ID NO: 502355 - DNA, 869 bp, Homo sapiens
  misc_feature (263)..(263): n is a, c, g, or t
acgctgtcgcgccctttgggcgggttataaccgcgcgcccgcaggtcgtgttttttccgcgcctccttatatgggccctatgttctcccccgctgcgtagtgtgcagggccctcccagatctcatttgttgcgggggaaacccggccgccatactttcttggtgttggccggtcccccttatatcagaagcgttttcaccgtggtccgcgcgtccccggacatatttgtcgcccggggtttctcgcgccattatctcgcgccncgcgggtatattacgcctgggttccacctatataagacagcttggctcgtattgaacccctgctcactcgcgctccctgcccgctgcgttggaaacgcacaagtgtgggcgccccattcccaacagagggtttttccgcccccttcgggagacacacacggttgggcgccaaacaccctctatatgtttccaatgttcgcacacaccacattggcgccttcaatatcagggcaattatcccttcatcacccttcatccccataggtttgaacattattggccgccccccgcattgtattttcatcgccccactccacgatcacgttcgccgcaaaacacccacatgttgggatgacccaggcccccgcccctgccgctctgttttaggggcatgctccctccttgtaggtttggtaggccccagcgccccgcgcccctctgtttgtggccggtgtcccaccccctgttttcgcggaccgccctctagcacatcgccctgccctcttgtctccaataactcggggtcgtagcccctgcccccattcgctgggcctatcgcaggacgcccgcctattacgccgcggccccccttcccccaacaaaaca

SEQ ID NO: 502356 - DNA, 383 bp, Homo sapiens
ctctagagtgatcccctgccaaaggcgtagtacaatacgaatgtacttaatgccatttaattgtacacttgaaactggttacgatagcgccgtggtgctatgtgctcgcgcctgtaatcccagcactattgggaggccaaggcgagtggatcatgaggtcaggagttcaagatcagcctggccaaaatagtgaaaccctgtctctactaaaaatacaaaaatcagccgggcatggtggcatgcgccttgtagttcccagcttcttggggcggctgaggcaggagaatcacttgaccccgggaagtggcggttgcagtgacctgagatcatgccattgcaactccagcttggggtactacgccttatggcagggtaccgagctc

SEQ ID NO: 502357 - DNA, 134 bp, Homo sapiens
tgccctcctgaaaggagttgaactctaggcaggcagaatggtcccactgtccggtccatgggccccatggctcatcatcatcccaggacgcggaggcccacggagtctgtgtcacggggtcgaactaatgccct

SEQ ID NO: 502358 - DNA, 778 bp, Homo sapiens
tgggttatcaatattggggtttaatttaaaaacagggaaaaaaaaaataaatttcggaaaaataaaaatacggggcggggggaggggcccaggccggaacccccagattttggggaaggcggagaggcgaggttgggcccgcctggaccccaggagtttcgagaaccacctccgtcgccacccgcagtgagacccccctctcatacaaaaaatacaaaatttaccccagggttggtgggtggctgcaccgtgtagtcccagctactggaaaaggcatgagggtgggagggctcactctgaccccaggagtcgccaggtaacaggtggaccccctgagtgggccattttccctccaccgctgcgccaagcagcagccaagcactccttgttcctaaaacaaacaaacacaacagcacatttcgccggacagcgggcgcgggcacacgggggccgggcaaccccctagagcggcgccccgggcctcggagacacccactggcaaggggggggccccacaacgccgcggcacccttgcaacagcgcggctgccccatcccccagagccaagaccccgctgccgcgcgtacccccagagggggaacgtcgggggagccgacacaccaaccatcgccaacgtgcccggggtccccagaggccgcggcccgttgcagtatcaccgcaccccccgcgccggcataatacccgcccctggccgcccccagcagtgactacccggaggcctcttatcggccacacgagggactcccgcccacagggc

SEQ ID NO: 502359 - DNA, 475 bp, Homo sapiens
  misc_feature (66)..(66): n is a, c, g, or t
tacggcttttatcttgctcttgagagtttcccacaccttgccgagcttatcgaccagccacgtctntactccgttataaagcttggcgagaatgggcccgatcatgtcccagttcttccacaccagataaacggcgccgactgcagcagccatcccgccagcggcacgagcacaggcgatagggcaacaacaagcccggccagggctgggatggcaccggccgtgatgaccgaaactgagcggatggcgctcgcaacaggcacgatgacagggagaaagcgcccagcgcagagaccacggcgccgatgccgatcgccaccggacctagcaccgccgccaccccaccgatgatcgtgacccacttcagagtttccgggctgacctcggcgagcttatcgacaaagttcccaaggcggtgacgatcgttgtgacgaattccagaatgccagattgcgcgatcgtgatggcgagggtt

SEQ ID NO: 502360 - DNA, 228 bp, Homo sapiens
ggtctgtgctgggggtccggtggctggaacgctgagcagtcatggttcgccaggcaatcgtttcacttctgagagtctcatatgctcagatgagaaaacggaggctattgcaggaaggagcttctcatatttacacagccgaaaaactcctcagacaagcgcgcttcccatacgactcaccagaaccagcacaagaaaatcatacgcgagcaaaagaaccacacgggt

SEQ ID NO: 502361 - DNA, 265 bp, Homo sapiens
ttgccagggtttgggggggggtcatgggggtccccacccccctccccagggtttggggagttgaggagccaaccccacccccctgccaggatcccctcgggggtccccccccacccaaaaagggttttcgggggggggggtgggcagcgcctatgtttttttggaaattcctgcacccccaaaagaacttcccagggggccagggctggattttgcccctctgtgaggaacaagggggcccaaaaaaaacctttttgctttttta

SEQ ID NO: 502362 - DNA, 350 bp, Homo sapiens
ccacaggatatatgtgtcctgtgatagaggttagggtaaagagtgtgctccatactccaactttttttcagcagcaaaccccttaatgcaaataaattcttaccttgaaccccaatatgtaagacagctacaagggaacctgttctgttagaggcgcaaattgcacagcttgctcagctccccacccctttcatctccccaaggactcttgaggcaaccctataggaaactctcagggctctgccaaccagtttgaaaaccagtggcatagtttgtcctgagcaagtcagagaccccacaccacaagtgcgtgccacaagctggctcagagtctgtggtgtcacgcgtgc

SEQ ID NO: 502363 - DNA, 222 bp, Homo sapiens
cctaggaggagaacttttactatacctatttgaatctacagcatcctgcagatgatggtacctaacttgtgtatgcatgttgatttatacatgaaagacaagatccatcttctattagaatcaggctgagcctcgatatacacatatgatattgccaaactgatgtgagtaccactgtatgaactaaaaacagaatgattaaaagattaatttaaaggaagg

SEQ ID NO: 502364 - DNA, 366 bp, Homo sapiens
  misc_feature (5)..(5): n is a, c, g, or t
  misc_feature (47)..(47): n is a, c, g, or t
  misc_feature (237)..(237): n is a, c, g, or t
ttaancctatatttataaacttgttttcccaatagtctgcaaaaacnttaaaaagtaggaagaagccagccacagtggctatcatcccacattcacagtggcctatcatcccagcattctgggaggctgaggtgagaggatcactagagcccaggggtttgagactaatgtgggccacataatgagacccccatctctacaaaaaaattaaaaaattagctaggcatggtggcacanacctgtactgccagctactctggtggctgaggtgggaggattgcttgaacccaggagtttgaggctgcagtaagctaggattgcaccactgcattccagcctgtgtgccagagcaaaatactgtctcca

SEQ ID NO: 502365 - DNA, 794 bp, Homo sapiens
aaataaaccccttataccgggggttttttagacacgcaaacccccctataataaggggagcccccttttgtatgagggcattttcccccggaggggggtttccctcccaccttaaaggagctgtttccctctttatcaccttctaagcagcgaagtggaaggctgctttttactattttgtgacaagccgttaggggctcacccgccatctttttagagggggtacttccaattttccccccccgcctggatgtttcccccttcgttctcaagaaacaatgtggtgtgtgaaccatcggaaaagaatcccccatgaaacccccgcgttcctcttttgtccttaacattaagcccgtgcccacaacctgtgacaaccggtggccgagctttaagtgtttcatgtcattgaacgttggccccgtgtgtctatcatcgggagccacgcagtcattatactataaaagcttcaagcggaacaaaatgtctggctcaggcatgtgaatatagcagccatctgctttgatatggctgtttgccaggtcctttgcctgcgtccaaatgttccactcacccagtgtcaaactcaccaaagttagtaatgacggtcgtgcatcataacgcttcatagagaatacgtatggtctcgttgcatgtccgccagtagttttaccggcaagaagggtttctaagcttagtgttgcccagtgttctcgttccctgtagcccgattcgttcagaggtgcatgtcccacctcaccttatgttgcagccaaaggtaccaatcaatgcccttg

SEQ ID NO: 502366 - DNA, 412 bp, Homo sapiens
gctcagggtgtgatatcaggtggcttccaaacttgtcggcagtttaaagatggtgggccacgactccgccttttccgagtgaaccccactgacagaataaggagcatttggatctcttggtaaaggccatgtggtataaagcggtccaaaagaagtcctccatgttggtgcctaggacttccgaggggagatacagatgttatccagcttgaccggcatggagagaccccgtctccattacaactacaacatcagcctggccatgtggctcttgcgtcctgtcccttaaagttcataggcttcggccgataatttgttttgtgtcagcttttggagttttctttggggcatcatagcatgcttgatcttgcccgattgggttaccagtattaaatgccgtgtcttcttagaa

SEQ ID NO: 502367 - DNA, 146 bp, Homo sapiens
tggtgtagctgttctagaggataccctgatcgccgtgcagactggcccgtgtccagtcgcagcgcttggagtgaggcgttcaccagtccgttgttttgatcgaaaactgccgagaagatggctgccacgactgacgatggacagca

SEQ ID NO: 502368 - DNA, 122 bp, Homo sapiens
gatgtcgctcttctgcttgtcatgcagctgatcatactgcttcacaatgagcagaaaacagctttctagatcagtacactaacccagccagaattgcaaaatgtactacagcgcttcacaag

SEQ ID NO: 502369 - DNA, 548 bp, Homo sapiens
tgcacctccacccgccggtcgctgctgacctcagcccttcaaagctgtcctccagttggtctggggtgcctcatcctgctgggttcctcctcccgccctcctcacctgcctctgcacctgccacagggcatcaccacttgcgggtgaagccagcctcctgggagggaggccctgagctgatgggttgtccaccggtgcaggcgcacaggctgggctcacacaggccccaggagtctgtggcaatgccctggagtccccggagcctggcactgtctggatatccatgacggccactcctctcctcgggcctgagcctgccccaccccggaagggctgccccccgggtcccctgtggctgggcatccagacccactctccccttcatgtctgatgtgccccctgcccccaggcacgtgcaggaagaagcacagaacgtggctggcacccgccctgaggcccggctctgttcccatcttctcttttcctaaagagcggcaagggagcctgtgacccgtggccacgtggctgcccccttggacccgcggccg

SEQ ID NO: 502370 - DNA, 752 bp, Homo sapiens
ggagagagcttcttatagccgccctactgtctattctagattccttaggtcccctccgtctcacctccatgcctttgtgtggcggccggaagaagacagggcgaaggaagaggaggaggacgaacgacgaatacgagggaaggatgtgtttgagttgctttatgccttcacgttaaggctcactggtacctataggggaacctgagctgttcagtaggtgatcagacagcacttagtggacttgggcaagtggtgctttgtgagttttatttgtggaaggaggtggggatgagaagaggatcaaatccacttatttgttcttgtttgtatacccgagcctaggaagaacgtccaacgggtagcaaacaggctgctaggccttactaggccacggacgcacactagtcccgtgcgcaactacaagactctacgcatcgacttttctgtcgacttgccagtgctgcagtgtatgccacaggcagcccttgagatacagactgcgctcgttgcccggtgcgcaccggataatactgctcgttccaacacatatccaccaccctcctcttacaggcgtggcacggcctcttgcgatagtcacgtttacacttctctcactgcctcattccacccgctcccctccccatttctactcaactgccgcatagagagctccgcttgcctctacagcggtcccacgagactacccagtccaacccacactcgcgcctcgtgccccagccgtaacaaccggc

SEQ ID NO: 502371 - DNA, 676 bp, Homo sapiens
tgggtcgtagcggaatcgggggtatgctgtccgaatccataaaaacagggaggttaaaagtagggtctgggtgacaaaatatgtggtgtaaagtccaggggaaagtgcgtcatatgtggtccctaggaaaatggtaggggtgagggtgtaattataataaggttggtgtatccggctatgaagaatagggcgaaggggcctgcggcgtatccgatgttgaagcctgagactagttcggacctccccttcggcaaggctcgaagggggtccggtgggctctctgctaggtggtggagataaactcatattatggccaagggtcatgagtggcaggagtaactcagaggtgttctggtgtggtgataagggtggagaggttaaaggagccacttattagtaagtgtgtgatagctagaagtgagggctaggggtgacttcatatgagatggttggggctactgcccgcagggcgccgatcagggcgaagttggagttggaggctcacccggatcagaggatggagtaaaccggctaggctaaagggggctagaataaataggaggcctaggtggaggttgaccagggggttggggtatggggagggggggtccatagtaaaaaaggcgaatggtgagagcaagggcggggcgggaatgacaaggtgaggaaaatgggg

SEQ ID NO: 502372 - DNA, 704 bp, Homo sapiens
cacttgaggtcaggagttcaagaccagcctgggcaacatggcgaaaccctgtctctactaaaaatacaaaaattagccgggtgtggtggcacttctctgtaatctcagcttctcaggaggctgagacaggagaatcgcttgaacccgggaggcagaggttgcagtgagctgagatcatgccactgcactccggcctaggtgacagagggaaactccatctccaggaaaaaaaaaaaaaacccaggggggttaccaattcaatcaacctatttgggaggcatatcgggggcctaactctaagaagttttaaggtacggtgcggggacaccatttttaaaagggaaatcagggggctagaaaaggtatatggggctgggtagggataaggtccataacgttcagtggtacttcatggcctccttataattggaagtcagatggggaaccattaaagatccaactttcgcggtcgggtaatagaaggtaaaattctagaggtcattaactttgggaaaaaggctggttttaagcaattaaatttagaagttggcaaatagggtgccttgctaagaaaatataatcgggggagtggggataggctcaacgtaacgtcttcaggagagggtgtaactgggggaagatgctcatacttttcgcgaagggtgattgatccccacatataggatgaatctgaggggaaactg

SEQ ID NO: 502373 - DNA, 115 bp, Homo sapiens
atgggagccgaggctgtcgggccgaggggaaatgatatactggaataagaataatggagaactcctgctcatatacagcaagtactggactttgttcgacaccacgaacataaca

SEQ ID NO: 502374 - DNA, 128 bp, Homo sapiens
cccccccccccccccggggttttttttttccccccctttgaaatttttttttttgggggaccccggggcttttttttaatttaaaaaaaaacccccccccccaacccccaaaaaaaagggggttttta

SEQ ID NO: 502375 - DNA, 130 bp, Homo sapiens
agtgcagtggtgagatctcggctcagtacgagctcgctcgcgggttcacagcatttgtcctgcctcagcctaccaggtagctgggacgtgcaggcgcctgtcagtcacgccatggtctaagtttgcgtat

SEQ ID NO: 502376 - DNA, 959 bp, Homo sapiens
  misc_feature (8)..(8): n is a, c, g, or t
  misc_feature (21)..(21): n is a, c, g, or t
  misc_feature (41)..(41): n is a, c, g, or t
  misc_feature (43)..(43): n is a, c, g, or t
  misc_feature (52)..(52): n is a, c, g, or t
  misc_feature (56)..(56): n is a, c, g, or t
  misc_feature (61)..(61): n is a, c, g, or t
  misc_feature (82)..(82): n is a, c, g, or t
  misc_feature (84)..(84): n is a, c, g, or t
  misc_feature (88)..(88): n is a, c, g, or t
  misc_feature (93)..(93): n is a, c, g, or t
  misc_feature (111)..(111): n is a, c, g, or t
  misc_feature (116)..(116): n is a, c, g, or t
  misc_feature (123)..(123): n is a, c, g, or t
  misc_feature (125)..(125): n is a, c, g, or t
  misc_feature (127)..(127): n is a, c, g, or t
  misc_feature (130)..(130): n is a, c, g, or t
  misc_feature (135)..(135): n is a, c, g, or t
  misc_feature (141)..(142): n is a, c, g, or t
  misc_feature (164)..(164): n is a, c, g, or t
  misc_feature (177)..(177): n is a, c, g, or t
  misc_feature (184)..(184): n is a, c, g, or t
  misc_feature (194)..(194): n is a, c, g, or t
  misc_feature (210)..(212): n is a, c, g, or t
  misc_feature (214)..(214): n is a, c, g, or t
  misc_feature (217)..(217): n is a, c, g, or t
  misc_feature (229)..(229): n is a, c, g, or t
  misc_feature (237)..(239): n is a, c, g, or t
  misc_feature (244)..(244): n is a, c, g, or t
  misc_feature (248)..(248): n is a, c, g, or t
  misc_feature (256)..(256): n is a, c, g, or t
  misc_feature (259)..(259): n is a, c, g, or t
  misc_feature (263)..(263): n is a, c, g, or t
  misc_feature (267)..(268): n is a, c, g, or t
  misc_feature (270)..(270): n is a, c, g, or t
  misc_feature (283)..(283): n is a, c, g, or t
  misc_feature (299)..(299): n is a, c, g, or t
  misc_feature (301)..(301): n is a, c, g, or t
  misc_feature (303)..(303): n is a, c, g, or t
  misc_feature (309)..(309): n is a, c, g, or t
  misc_feature (312)..(312): n is a, c, g, or t
  misc_feature (314)..(314): n is a, c, g, or t
  misc_feature (322)..(322): n is a, c, g, or t
  misc_feature (326)..(326): n is a, c, g, or t
  misc_feature (330)..(330): n is a, c, g, or t
  misc_feature (335)..(335): n is a, c, g, or t
  misc_feature (352)..(352): n is a, c, g, or t
  misc_feature (362)..(362): n is a, c, g, or t
  misc_feature (372)..(372): n is a, c, g, or t
  misc_feature (382)..(382): n is a, c, g, or t
  misc_feature (387)..(387): n is a, c, g, or t
  misc_feature (404)..(404): n is a, c, g, or t
  misc_feature (432)..(432): n is a, c, g, or t
  misc_feature (442)..(442): n is a, c, g, or t
  misc_feature (444)..(444): n is a, c, g, or t
  misc_feature (455)..(455): n is a, c, g, or t
  misc_feature (465)..(465): n is a, c, g, or t
  misc_feature (469)..(469): n is a, c, g, or t
  misc_feature (481)..(481): n is a, c, g, or t
  misc_feature (503)..(503): n is a, c, g, or t
  misc_feature (506)..(506): n is a, c, g, or t
  misc_feature (509)..(509): n is a, c, g, or t
  misc_feature (618)..(618): n is a, c, g, or t
  misc_feature (934)..(934): n is a, c, g, or t
ggcccacnccggggggctgcncagaaagcagaggcccagcncngaccagacnccangccanggcccgagaccctcacagccncngggnaggcngggagccccccaatccanggccncagggcnangngantgagnggggcnngggcccccccagcgcgagcganagcaacaagaccnggagganggaacagaangggagagccacggggnnncngcngaaggagaacancaggcccnnncagcncgangagagcancgngacncccnngnaccaggacaccangggaccctcccagcangncnatgccnacncncaagaaanggcncccncccangccccagagcggcatcnaaagcacatnggcaagaccngggcacagcnggagngggggcctgagcccccngagcgggggaagagcccccttacccacnacaccatctncnggaccaacgcncagaaccagncctnctccgccatccngaatgcctccgcccgcgggctntgnccnccatggcctggagcccgccagtctgtatcacatccacctcatggctgccagccaggctggggccaccaacagtacagtcctcaccctgatgaccttgaccccagagggncgggagctacacatcatcctgggcctgttcggcctcctgctgttgctcacctgcctctgtggaactgcctggctctgttgcagccccaacaggaagaatcccctctggccaagtgtcccagacccagctcacagcagcctgggctcctgggtgcccacaatcatggaggaggatgccttccagctgcccggccttggcacgccacccatcaccaagctcacagtgctggtaggaggatgaaaagaagccggtgccctgggagtcccataacagctcagagacctgtggcctccccactctggttcagacctatgtnctccagggggaccaagagcagtttc

SEQ ID NO: 502377 - DNA, 556 bp, Homo sapiens
  misc_feature (404)..(404): n is a, c, g, or t
gggaggagtggccatgtcgcgcttgaacacatgcgagagcacatatcgcgctatgcgctaaggccaacagtccctacagtcgagctgtcttaacctacagtaccattgacattattccaagaagatagcgacatgtgacctattgcagcactgcatgattctgtaacgaggacttgcacatcaagtttctccggctgacttcaaccacagtcagatttttgtagccgttgtgtaagacttaactagtccagtgagagcagccgttgacatgcctgacacaaatgacgtcagtattgttggatacatgtacgctatccgcaggaaggcgtagtgatgtttttaacagtagctaataattaccacatggcactacatatctatgagttgacgcactgctgtccagnccaaatatgcttacactataaatgtttcttttgatttcacatgttcatttaccctccaattgttaaaccttctctacagagtgagttttattaagaatacttcaggctattcgtgcaccacgaggtagcgtatttatggttatattatgtgg

SEQ ID NO: 502378 - DNA, 204 bp, Homo sapiens
cgcattttaggccactagtctgtgactttggacaggagatatttgggaaatgtaaactacttaaatggttgggagaatgtgtatcgggaataatgggaagtaaagctgggacatcgttttgagacgcagtctatcttttaattttcccctgggtccagcatggtatctttggatttcttaaggtttttatcacatgtttggtta

SEQ ID NO: 502379 - DNA, 622 bp, Homo sapiens
ggaagcttgaaatgcatgtggctagatttatgctaaaatgattctcaggttagcatttttagtagacacttcaaaggtttttttttgttggttttctagaagtgtaataaaagcttaggagttaatttatgaaggaagcaagtacataggttagagatgtgtcccagtattgtagtttggatttgtcctgtgaagtatgttgtttcatagttatgtggttgaaaaaggatttagaaatgtcatgtgcactgtggtcagaataattagtaagatatatcttatacaatgttggattccctgtccttgcatagtttttattgcaggtagatttgcgttgggcatcaggtggagtgcaccgaagaggatgaaatgattcttcgaaaaggctatagagtccgaaaggaatgatgtcttttgacaccgaattgtcttcctttaaaaatctgtgaggaattggtgttggccttactttttcattcattctgctcacaatgctaagtggtatccgaggttcttaatatgagatttaacaatcgttaaaatgtttcttattttcagcacttacatcattggtacacagggtcaaatagggcaaataagttgtcttgtatactagattgag

SEQ ID NO: 502380 - DNA, 588 bp, Homo sapiens
  misc_feature (9)..(9): n is a, c, g, or t
  misc_feature (111)..(112): n is a, c, g, or t
  misc_feature (114)..(115): n is a, c, g, or t
  misc_feature (118)..(118): n is a, c, g, or t
  misc_feature (167)..(168): n is a, c, g, or t
  misc_feature (180)..(180): n is a, c, g, or t
  misc_feature (188)..(188): n is a, c, g, or t
  misc_feature (250)..(250): n is a, c, g, or t
  misc_feature (285)..(285): n is a, c, g, or t
  misc_feature (289)..(289): n is a, c, g, or t
  misc_feature (306)..(307): n is a, c, g, or t
  misc_feature (316)..(317): n is a, c, g, or t
  misc_feature (466)..(466): n is a, c, g, or t
  misc_feature (556)..(556): n is a, c, g, or t
caaatgacnaagctcgcaaagctacacaaccacatacaacccgcaacccttcgaagccacacaaaccgcaaaagaaaaccaagaaccttcggaccccggaccccccccccnncnnccncaagagcagcaagaaagccagcagccggagcccagccggggcgaaggcnncgccgagccggnaacctaancccaacaaaaaaaaaagaaacaagcccagaaaacatcaaaaggcagcagaaacgccaagccnaaacagccccgcaggagaaaaaagaaaaagaaacnaaanaagccaagaggaaagcnngaacagganncggccaaaaacagagggcccaattccttaatgaacccaaaaaaaagggggtccccaacaaccaggcctggcctcctggtgtttgcggtcacagtggcccctgggcaggggcacccaggctgacccttaggtgctgctgctgggtctgtnttggctttggggtgtgctgggagggtcaccaggtcccttttccttcctgtgccctttgaaagctaagtgtttgtgtggctgtggagctcnagggtctgtgaataaaggcggcggccctggga

SEQ ID NO: 502381 - DNA, 914 bp, Homo sapiens
  misc_feature (37)..(37): n is a, c, g, or t
  misc_feature (40)..(40): n is a, c, g, or t
  misc_feature (50)..(50): n is a, c, g, or t
  misc_feature (52)..(52): n is a, c, g, or t
  misc_feature (188)..(188): n is a, c, g, or t
  misc_feature (404)..(404): n is a, c, g, or t
  misc_feature (494)..(494): n is a, c, g, or t
ctccccggcctccggaagatcaggatcaggagggganaanaaggagcctntnctgcctcccaggctgctgggactgggctggttttgtcctttgaagtggtcaggatacaggacaagggcagccccaccccatccagcctgggctccccgcagacccttgctgctcccgtggcctggacacgctgggnagcttctcacacctacccctaccgtccagcctggcctcttccctgaatcagcttcaagatggcaccagctctttgggcctaggatactgccgggcccccccaaagggggttcccccgagcaaacacagggtgtgcgtctgctgttgtctgccggtcacagtggcccctgggcaggggcacccaggctgacccttaggtgctgctgctgggtctgtnttggctttggggtgtgctgggagggtcaccaggtcccttttccttcctgtgccctttgaaagctaagtgtttgtgtggctgtggagctcnagggtctgtgaataaaggcggcggccctgggaaaaaacaataaaccacaaacaaaaataactaataaagcaacacaaataacacaaaaaacacacttcaattctccaatacatcaatgactcctccacctacaccacaatcagacaaacacgagcggcgcgcccggccacatactaataacctccccgtcggggcgggaccacacacccacatgccgacccatcaatgatctcatgcccgccacgggaggccccctctatagaggacgacacatcctaacatcgctcgcaccgcggcgcctatcacaaccagcgagagagcagcaacgcgctcctcgatcactgctgcgccgaccccactcgcggcgcctgcccgcgcaacaccacaagaagaacccgagccaacacccgtgtgtgctcc

SEQ ID NO: 502382 - DNA, 253 bp, Homo sapiens
  misc_feature (37)..(37): n is a, c, g, or t
  misc_feature (40)..(40): n is a, c, g, or t
  misc_feature (50)..(50): n is a, c, g, or t
  misc_feature (52)..(52): n is a, c, g, or t
  misc_feature (221)..(221): n is a, c, g, or t
ctccccggcctccggaagatcaggatcaggagggganaanaaggagcctntnctgcctcccaggctgctgggactgggctggttttgtcctttgaagtggtcaggatacaggacaagggcagccccaccccatccagcctgggctccccgcagacccttgctgctcccttttccttcctgtgccctttgaaagctaagtgtttgtgtggctgtggagctcnagggtctgtgaataaaggcggcggccctggga

SEQ ID NO: 502383 - DNA, 673 bp, Homo sapiens
  misc_feature (335)..(335): n is a, c, g, or t
  misc_feature (551)..(551): n is a, c, g, or t
  misc_feature (641)..(641): n is a, c, g, or t
caggctgccccatcatggcgtctgggccctgcaccctcctgccctcccccagccacctggctgcatttttgaagctgcctggcccccaggcgcctcgtactctgaccgtctctcgctctccctctcacgcctccttgccccttggcacgcgtgcaaggactcgagtgagcggcgtagagagacatggacgccatcgtgcatgcctcccaggctgctgggactgggctggttttgtcctttgaagtggtcaggatacaggacaagggcagccccaccccatccagcctgggctccccgcagacccttgctgctcccgtggcctggacacgctgggnagcttctcacacctacccctaccgtccagcctggcctcttccctgaatcagcttcaagatggcaccagctctttgggcctaggatactgccgggcccccccaaagggggttcccccgagcaaacacagggtgtgcgtctgctgttgtctgccggtcacagtggcccctgggcaggggcacccaggctgacccttaggtgctgctgctgggtctgtnttggctttggggtgtgctgggagggtcaccaggtcccttttccttcctgtgccctttgaaagctaagtgtttgtgtggctgtggagctcnagggtctgtgaataaaggcggcggccctggga

SEQ ID NO: 502384 - DNA, 124 bp, Homo sapiens
gctcagtagttctttatagcagtgtgaaaacagactaaggacccttcgggttgaaggaatgtagccattcgctggttgactacttcctttctattcatctctatttcccgggaggtgtttatcc

SEQ ID NO: 502385 - DNA, 355 bp, Homo sapiens
tccattctggcacgctacgcatcctcttcccagttcagcggcagtaatgtgtgtgggaaaccgggatgctgtattaatccaaaggaagatcatgtctgaaacatcagctagtcatcataaacatatacttctggcgggtaggcatgttacagccctggaggcataatatactgattatggccacaacggcgggacccccggaaggcggtcgggaggacgcttttcctgaagtcgtagcgtctgagcttcgagtcgtgactgtgacagccctgtcgctgcctaggctgaggcccaggctactgccactattgagactggaggagacactgaccactgggggaggtgcagagactgt

SEQ ID NO: 502386 - DNA, 189 bp, Homo sapiens
tcaagcttctaacgatgtacggggacatggctaggccggaggtcattaggagggctgagagggcccctgttaggggtcatgtctgtaataccagcactttggaagactaaggcgggagaactgcttgggcccaagagttcaagaccagcctgggcaacatagtgagacctcacctccacaaaaaattga

SEQ ID NO: 502387 - DNA, 839 bp, Homo sapiens
caaggtcttgtcccacgagtacaactgagcagcgcagcagtgaacctggggtctttgccctgtggtctctgatggctttgttgttgggtatgctgttcacgacaggctggataggctgcaatgtctcttcctacccagggccgcaatgcccgggagttttcatccaatgtgtggagaaggccttagaagacatgttttgatagccttagaaggcaatatccatcaaaagtaacttgtgggcagatgaaagagctaccatcactttcctcatcatgaatatactgggagtgccgggcatggtggactcatgcgctgtaagtcccatgcagttttcgagaggcctgagagcgggtggatcaccttgaggtctaggagatttgagacacaacactggccaatacataggtgaaacctctgtactctacctcacaaatacagagagagattagcatgggatgtgagtggcatgtcgcctgatgagatcgccaggctaacttgggatggttgaagcagactaacttgctctgaaccccacggatggtggagagttgctagtgagtcttgtagatcacacacacatgcatcataacaggacctgggcggagcagagcgagactgtcgtcggaaaactaaaagaaaaaaaaactggggcctgtgtagccagtgggtgctattctgtgaaactaatcataagctgcctaggcagccagctacaggcgttgagctataaattcatggttttaaagctaaacgtaatttccacgtggggactagatcacaactgaagataacaagagatttaagttttaagggcattaatcagtacgaccaggttggaa

SEQ ID NO: 502388 - DNA, 409 bp, Homo sapiens
agttatatttttttaactcttatttcaggttcaagggtacatgtgcaggtttgttatataggtttgtgtgtcttgggggtttggggtttggtgtacagattatttcaccacccagtaataagcatagtacctaataggtaggttttttggtttggtttggtttggtttggtttgtgacggagtcttgctctgtcgcccaggctggattgcagtggtgcgatctcggttcactggaaccttcggcttccaggttcgagggattcttctggctcagccttcctattagctggaattacaggcatgtgccaccatgctgggctaatttttgtattttcagtagagaccgagtttcatcatgttggccaggctggtctcgcccctgaccttgggtgataccctgtcttcggct

SEQ ID NO: 502389 - DNA, 851 bp, Homo sapiens
gcccaaacccactccaccttactaccagacaaccttaagcaataccatatacccaaataaagtataggcgatagaaatcgaaacctggcgcaatagatatagtaccgcaagggagagatgagaaaattataaccaagcataatatagcaaggagcctaacccctatgccttctgcataatgaattaactaggaaataactttgcaaggagagccaaaggtaagatccccgaaatcagacgagctaccgtaagaacagctaggataagagcacacccgtctatgtagcacaagatagtgggaagattgtataggtagaggcgacaaacctaccgagcctggtgatatgctggttgtccgaagatagaagtcttacgttcaagcgtttctaacatgtagccacagtaacctctaaatccccttggtaaagtcttagactgttagtccagagaggagacagctgcttgggacagctgaaggaagaaaaaccgttgtaggagagagtaaaagatttacgacccatagtaggcctgaaagcgagccagcgaaggttaagaacagcgttcaagctcaatacccactactaaaaaatcccaaacatattactgaagtcctcacacccaatttggaccaatcttatcagcctcatagaagaactaagtgttagtataagtaacatgaaaaacattctcctccgataagactgcgtcgagattaaaacactgaactgacgaatgaacagccaatatctaagatcagcaacgagttcattattacctcatgtaaccaacacaggctgctcatagaaggttcaaaaagtaaggactgggaatcttacccgctgtgtcaaaac

SEQ ID NO: 502390 - DNA, 688 bp, Homo sapiens
cgagccgtggcaccggcatcggctgacactgctgcctccagctagttatttctgtcctcttccgttcttcacccctacaccttgtgagtgtgaacttctcacctgagtggctgtaaatgactcgtttgaaaatggagatgccaatgaaccaacggaatcttctcagaatggcaaacatgtatatcatttcagatgtgagttaatttcatgaagtgaaaatggtgtcaatgcttgaaaaaacaacgtacatggatcctactggtaaaactagaacttgtggaatcatgtgaaactgtacaaccatggaaatgatgcagacttgcgtgatgtgtgtctgctgtgtcatcccctgtgcttgcatgatgaacacttcactatgatgttgtatctgttcttggtgaaacatgttccgaccaccaatgggtgggctacttgcatagagttccctgcagtgtctcatagatgatgtgtgaaaccccagaagcagctgctctccgtggagcttgcaagaagaaactggctacaaatgtggtgacatttgccgaatagaactaccatccgtgtctagtatgtgacccagtgcttgtacaacacatgtaactatacacatctgtgacatgtcaccattaacggagatgatgccgaaaacgcaagggctaagccaaaagccagggattggcagagttcg

SEQ ID NO: 502391 - DNA, 104 bp, Homo sapiens
cagtatgtatcgaatgcggtatctgttatgatattatatttcgttaaattaagaatggttatgttagggttgtacggtagaactgctattattcatcctatttg

SEQ ID NO: 502392 - DNA, 883 bp, Homo sapiens
tccttctgggtgtctactattatcttagtggggatccacctcacataccatcatctgtctccaaacgaaacgcttctttattatcaggggtcatttctccttctgttgttttcctcccccgcagaaagatttattgttttttttcaccccaagcttttgtttttcggacaccgtttttttccacccatcctcattcattgtgctctcctcctctcccccccctgattggcggcgcgccttttgctcgcccctcctccacggggttgttctctcctccccagtttatttactctcctccttcgtactgattggtgtcccccccttgcttttgatttacacctcctccgctttttttttttctccttcctcgcgcgagcgagtgtttacatttctccctcgcgggttgtcccccccctctttgtttttatttattagggataccctccccccggcttccccccactaatttttttttcgtcccacaccctgcttgtgtttttatacacacgctcttttttctctctggggggtgtgtctttttttctatcccctcctctccctccccctcccccggcggtttttgtgtgtttcccctctccccttttgttcgcccgcggatgctttttctgcggtgctacacacactactcttttttggttgaccccgcgctgttctcccccgaatttttccctgctatttttgtggggcacatcttcttcttctcatctattgttggtttgtcccccccacaatgatgtttttcttctcttacaccccaccaccaccactacttgtgtgggttgttgaaccccccccccattggccctttttataaaaggggttgtttttttttttttttccccttttttgggggggggtttta

SEQ ID NO: 502393 - DNA, 315 bp, Homo sapiens
  misc_feature (208)..(208): n is a, c, g, or t
  misc_feature (210)..(210): n is a, c, g, or t
  misc_feature (213)..(214): n is a, c, g, or t
  misc_feature (219)..(221): n is a, c, g, or t
  misc_feature (224)..(224): n is a, c, g, or t
  misc_feature (227)..(227): n is a, c, g, or t
  misc_feature (241)..(241): n is a, c, g, or t
  misc_feature (243)..(244): n is a, c, g, or t
  misc_feature (258)..(258): n is a, c, g, or t
  misc_feature (268)..(268): n is a, c, g, or t
  misc_feature (278)..(278): n is a, c, g, or t
ttacatttctttaaacctgttttactactatggcactttgataaaatgtcaggaaccaactttactggcaaaaggtccatgtaccaccagtgctggagcatctgttctacatgtggatatctatgaatggtaatgttttccttcatgtaagtgcctattcagagtttcagaattttaaaatgccaatattttcatggtcatttgcatntngtnngctgnnntanttnaaagagattttgananncaattgtatttaancagcctcaanttgtgcaacnatgatgtataataaagaatttgtagcagaagaaaagg

SEQ ID NO: 502394 - DNA, 118 bp, Homo sapiens
gcccttttctccgtcactatctacctctccctagattacctccagcatactatcaatctcacccactctctacctcactgcctccatgccttctactagcaaagaatatgttggctat

SEQ ID NO: 502395 - DNA, 464 bp, Homo sapiens
actagggcagacgtagatacattcgagtgcatcaagagtagtaacagagagacagattacactgaccatcgctctctacgctgcctcctagattacttctccagtaatattcatccctgtagcattgttcgttccgtggtccatcatagacttctcactgtgatatatcaactcagacccatacattaatcagttcttcaaatcatctcactccacttcctaattaccatcataatcttagttaccgctcaacaacctattccaactgttcatcggctgaacgggcgtaggaattatatccttcttgctcatcagtatgatgatacgccctgagcagcatccaacacagcagccattcaagcaatcctatacaaccgtatcggcgatataggttacatcctcgccttagcatgcttgctcctccacacagacatggcccttctgtttcaggttggtgccacagt

SEQ ID NO: 502396 - DNA, 554 bp, Homo sapiens
tattttccctcaaaagagaactgtagtttatgaaactgtagttttggctttggatgaaagggcatatgaaaagactttaagaccaatcatatgaggaatatttagagcatggagatagtaatgaagattgcggaaatgttaagagatttaaatcttggtgaaatgaaaagtggagtaccagtgttggcagtatccttagcattggaggggaaggctagtcatagagagatgacatctaagcttctttctgacctttgtgggacagtaatgagcacagctgatgtgtcaagaatcatttgagtaaatcgttgaaagatctacctgaattagcactggatactcctagagcaccacagttggtgggccagtttattgctagagctgtcggagatggaatgtcatgtaatacctatattgatacttacaaaggaactgtagattgtgtgcaggctacagctgctctggataaggctaccgtgcttctgagtatgtctaaaggtggaaacgcgtaaagatagtgctgtggggctctggaggtgggcagcaatctgtca

SEQ ID NO: 502397 - DNA, 851 bp, Homo sapiens
tatgaagctgagaaactacgtggagctgccaaggtcaggcaaagacccctgactccactagttacttgcgctatgctagagtgtatctgtcctgtgctgtctataggatcggagtgaagcaccaagcgggacttgaaagctgcacagcctgtaaattacctttattcaattaatgcacaaacaaacggggagatgttggaggccgaaggaatgagggtcgtgaccaacgtcagtataccactggaggctctgtgagcaagacagcaagactgttctcatgaaatgccggatgtctggcgaactgagcaaaactctgtctgccgccaggaactggaatgctagggggcagtcatcgtcccaggtcccgatgctccttgaggttatccaacatgtgaacatccagaaccttgttgaacaacagaaacggaatcatgtggggcctgtgttaaatcacaataggctgtaccgacagattataccctttccgtccctattcacgtctaagcctaagtacactagtactgacagggctgtcacaaggctcagtgtcccgtgtttccccctaactactcaacggaagacccctctgaccccgttctattacaaaaccagaattgcttttggtcagtgtctccaatttctggcatttcggtcgtccctctcggttcgggtccagacagacaaccggcggaaaaggtaccctgcactgtgttcgactgccaccgtggtattgtgccggggtgttgaccctcagggtgtggtgaggtaatcccctcataacccctttatcattccttgcctaattcgctctccatccagcctcttgcaaagcacgtattccacgtcatacg

SEQ ID NO: 502398 - DNA, 708 bp, Homo sapiens
  misc_feature (586)..(586): n is a, c, g, or t
  misc_feature (589)..(589): n is a, c, g, or t
tatgaatgtaaaaagaaaagattaaaaatacaaataagattaactcagcttccaaagttcatatagggtaagaatttgcattgaaaatctgatgaaagtgtttgaactctatgttctctcccaagagtcatactccttttaaaatttgctaacagcgaacttcatattttaatttaacattgagctgaagcctctaaaagtgacatttctacatggaaggtgtgccagattcctggagagggcatatggaatgtgcggaatatgagcaacctgtttgtaggcatctggaggcactggaaaagggatgaggttaacctgaaaaccactggattcaggattagagtagcctctcttgccgctgatcctgaagttgtatcttatggaagcattgtcagaccacagaacgcttgctactgaaaacacagggctgaattaataattgctaatctatattttatttatgatgtgctagtcagtgttgtaagcacttgatgtattatttcatttaattattacaattcccttaaaatgggtgcaattgctatctctattttataactgaagaaattgaagtgagcttaaatanttngtagaagttcacgtatctcataagtggtacacctaggatttgaactcctgttcgcacaaagcatgtatcgtaacttgttatttgttgtttgggatgagtggtttgaggggaagatcctg

SEQ ID NO: 502399 - DNA, 116 bp, Homo sapiens
  misc_feature (20)..(20): n is a, c, g, or t
tgatgatctgcggagcttanaatagcgagggtgtcgagcaagttgctgggaggagagcagacacttgacactgcatttatctttgatttgtggtttttattctctgtggataggtt

SEQ ID NO: 502400 - DNA, 251 bp, Homo sapiens
tgtggctacttacgctcgcgactacgccgtgtggtcgcttacgcagaagatggcgaccatcgtgccggtcatcacgatcacggccccgcagtcccggccgtcgctctattgggcggcgcgtctctacgaagatgtctaccgagccgaagagctggccgaccgcaacgaggtcgcgtcaccagccttcatgcctggcacattcgaggcgctcgcgcggtaaccgtgcgggcgtcctcgccagaggatcagcc

SEQ ID NO: 502401 - DNA, 331 bp, Homo sapiens
  misc_feature (10)..(10): n is a, c, g, or t
  misc_feature (12)..(12): n is a, c, g, or t
  misc_feature (56)..(56): n is a, c, g, or t
  misc_feature (67)..(67): n is a, c, g, or t
  misc_feature (78)..(78): n is a, c, g, or t
  misc_feature (149)..(149): n is a, c, g, or t
  misc_feature (152)..(152): n is a, c, g, or t
  misc_feature (157)..(157): n is a, c, g, or t
  misc_feature (160)..(160): n is a, c, g, or t
  misc_feature (165)..(165): n is a, c, g, or t
  misc_feature (170)..(170): n is a, c, g, or t
  misc_feature (173)..(173): n is a, c, g, or t
  misc_feature (232)..(232): n is a, c, g, or t
  misc_feature (235)..(235): n is a, c, g, or t
  misc_feature (249)..(249): n is a, c, g, or t
  misc_feature (294)..(294): n is a, c, g, or t
  misc_feature (314)..(314): n is a, c, g, or t
  misc_feature (328)..(328): n is a, c, g, or t
gggggcacanangggcactagaccatttatactctgatatctgctctggagatggnggactaacatnctacatacctntctggagaaattctcaaagcgcagtgcattttacagaacaaagtggacttaacaatatgaagaactttctnggnactcngcncaatngggcnatnacaactttacagacgcattttccgtgctccaccaggactgtccgcgcgccccagcccanatnccttctttgagagncagactgagagagacggatcggccagatatcccgattctctatgnctgggccgtgaatcgccgancaaggctgaacccncgc

SEQ ID NO: 502402 - DNA, 418 bp, Homo sapiens
  misc_feature (30)..(30): n is a, c, g, or t
taggcacaagtgggcccccagttcacgggntgcgcctcagctgttggccgccttggccccgtggctcacctgaagcctgggccgtgcaggtgaggggagaatggcgcctgctttgtcatctctaagaggcccaagcccaggatcttgcttgggtcctcagctgggcagtcctcagggaaaccatggtttccactcgccgttttagccctctcccttccaaggacctagatgtgcgtagaaccttttaggacagattcatttaacaaccaaaacacccgtggctacatacagttgctaggcatcctgtatacacaggacatgtcctatattaaatgatcttgtcctgtgttgactttgggaggacaccctaaatgtcttatatttagctttttccaataaattacaaaaactcaaaaaa

SEQ ID NO: 502403 - DNA, 1263 bp, Homo sapiens
gggcagctcagctccggagagcctggcggcgcggcggtgcatggctcgggtggcgtggggtgctgctgtggttgctgctgggcatgctgccggtggcggcagtactgagaagtacagcttccggggcttcccgcccggaggacctgatgcctgctgtgcctgctggctgtactgtggcactgctcttggagcagtactgagggtgagatgagcttggcgctgatgagctgcgctgctaccttggagtgctggctgctgctgtgctgcacctggctcctgcgctgacatgcgagtgccttctgtccacgccaaatcttgcagcgtggtccctgtgccctgcggccaagccctgatccccgaacggctggactgctggcagactgagttgggccttgctggaggcttgctggcttcttcgtggcctgcgtccctgtgatgtcgaatgccttgccttgcccttgcggtgctgcttgcctgaagcgggcactggcttgcccccggtctttcccagggttgcgccttacccgcggtcctggcgggccaggccttgcttgccgttgaactttacccaagagggccggtcctttgagcccttaacccaaggtaaccttggcacttaagcggccggcattggctccacagcgtgccctttaaacccgttgcctttgtgcacggacagggggcggggatggcgcagggctggtgcaccttaacaagcccttttacgcttccgcaggaaggtgaagacccccgtgaaagcgccaccggacagtcttttgcactctgtgcgcccaacggttaattcttcaaagcatagccttaattcaagcgggggaactttgccattggggaaccggataccgtgcacgtgcaacctcgagtgattccccctttcacagtggtgaaacccccttaagaaggggcccgcccaagatggcgcctataacggaaaggggacccgggtggtttcaccgtttcaccgggagcggacattttggatgccacaagtgccctaccaataaacgcataacctagtggacgcggtggcgctgaaattttttcccccggtcataatagtcgaaggccgacccggtgaaagtcggaccacatgtgggacagtccgtgcgggtcccatttgggtcacacggaaagttaacaccatatggcgcacgtgctacatatattgcgccacagggggttggccatatttggacacgcgcgactatgacgcaaaccggtgggtagccccccaatttgaagcgc

SEQ ID NO: 502404 - DNA, 348 bp, Homo sapiens
cttttgcagttggtgtcaatagttttcttgttagctccctcctttgagtcccttttaataccatcagccaaatgtaccactcaccattttttcaacaaagaccccatggcttcctttaggaaatcctcagagaagaaaaaaatacagaatgtggaaagaacaacgctgcttggctcttttcttttcaaactataagaggacattttcccatgcaaacaatttatagttcagttgccatattgtgggctacatatggacatttattgtttaaactgaaaaatatcccccccttattacattgttttttttaatcagaaatgtataccaaggccctacttttaccctcca

SEQ ID NO: 502405 - DNA, 130 bp, Homo sapiens
tggacatgtatcgtccagcaggcatctactcctctctctgtccagctgggcatagttccaactgcatcaagccagatgggcttctggagttcgccaagcagctggcgcgctggggccgtggagcctttgg

SEQ ID NO: 502406 - DNA, 234 bp, Homo sapiens
  misc_feature (104)..(104): n is a, c, g, or t
  misc_feature (120)..(120): n is a, c, g, or t
tattgctcgagcctggcagtttgagactgtagtgagtatgaccacgccactgctctccagcatgtgtgacagagcaagccccatctcaaaaaaaaaaaaaaagnaaattccagagggagnaaagtattcacagattataagccaagcagttgaaggggaaaataaacatgttaccaatttctttttttaattttttggtttctttgtgtgagactacagagcaagccccatctc

SEQ ID NO: 502407 - DNA, 114 bp, Homo sapiens
cccggcacgaggctagatccggggacagctttgtacaagaaagcggggtctaatgatgatgatgatgatggaaggcacagcgtgcttaccacaaagggggatcttggcctcgtg

SEQ ID NO: 502408 - DNA, 321 bp, Homo sapiens
  misc_feature (73)..(73): n is a, c, g, or t
  misc_feature (91)..(91): n is a, c, g, or t
cttagaaacatgaaccaaataagtagtataaagagacatttggccagttaggtggctcatgcttgtgatcccnaagcgcttggagccgagnggggtggatcacttgaggtcagaagtttgagaccagcctggccggcatgcggagccgcgtctctactaaaaatgcagaaattagctggatgtggtggtgggtacctgtggtgccagctactcgggtgtctggggcacaggaatcgctcgaacccaaaaggcggaggtttcagtgagcaaagattgtgccactgcactccaacctgggagacagagtgagactctgtctca

SEQ ID NO: 502409 - DNA, 771 bp, Homo sapiens
gcatgagcattagtgtcagtgtaatctagagtgaccccagctatgtcacgtgtggcaggcacaagaacagatgtcaatgagctatgcacgaggtggacactccagatgtgtgcgctggcacagctggcaggggcccgtagggtggctcatagaagcgtcaccctcgttgacggcttgcacttaccacgctgtcagagcgacggttgtggacgatttaccagcggtgagttcctggcgactgctgcgatcggttgcgactgcagctgagcaggagagcctcaagcgctccaaggtagctcaacctggtgcatggacgagatcaagagggccgtgtcagaaaggcaggacgactgcgcagacggagacggtaatcgcacctggggcacgcactaacagaaggaccccgcgattgaagccgtgcgaacggtgtcacacgcagcgagcgtgcgtgtcgacctggccagcaggctgtctggacgcaaggtagagcaggtgctgcaggcccgcgggtgcgcgtgggccagggccgcaccggagtgtcggtggtgatgggcatcccgatcgtgcgggcgaggtgcactcgtacctgactggacacgtcgtgaactcgctcatttccgagctgagcccgcaggagaaggaggactcggtcatcgtggtgctgatcgccgagaatgactcaaagttacacttcggcagtgagagagaactatcaagggcttgtgcgccacggagatgcattctgggctctggaggtcatttatcgttagc

SEQ ID NO: 502410 - DNA, 230 bp, Homo sapiens
agctggaaagacaggtgcatgccaccatgcctggctgatttttgagcttatagttgagacggaggttcaccatgttggccagcctgatctcgaactcctgacctaaagtgatccacccaccttgtctttccagaacgattatagacgagagccactgcacccagctggccctagagttacgatagagatcgtgggctgactgtgaattagggcgcttacagggaaatgac

SEQ ID NO: 502411 - DNA, 702 bp, Homo sapiens
ttggtcggcatcggatttgtcggcagactatagttgtctgtaaaaagtagctcctagaagctatatatgcgaccaggaccttgacctcatatcaacatggtcggtcattgaccatggtagatccagggcaagatctcaccgaggtagtagtccgatctgatctgataattggctggtgacagtctgggcccaggtacggcatgtgtaaaacattttgagcaagagaggctagctgtaagatgggaacagggctccgttacaagatatgcgcttgcatcgtgtgagaagtagaagtaggaaggcttgaggggttgaagtgtggaatatcacccaaattagatgatcggtcctgtgctcggaaatctttgagcaccgagccaatgtcaccaatgttgcagctactcatggtgagggctccctagggcacacaagaaggccacttgtatccaaacataaccgatgcattcacgaggcaaacgatctacagtgctggagcttggtgcgtgactctgaattgtaaagctgctcgcgatgtgaggggaacttttgaacggccggggaatctgccaagatatggtgcgagacccctgagggagcaatgccccttctgtggcttcacaacagttgggttgtgagaaacaacgtaactttgtcgggatagttacacaacaagtggttcccagctgagccaactctatagca

SEQ ID NO: 502412 - DNA, 225 bp, Homo sapiens
agggatctcttgtgagattatcaatatccatacaatcaaacctctggatgaagagattattctgaaatctgtagaaaaaaccggtaagcttgtaactgcagaggaacataattttctgggtggtttgggagaatctgttgccggagttttggcaagaaaaaggccaacaccacaggaatttgttgctgttgtcgaagcggccgcgaatttagtagtagtaggcgg

SEQ ID NO: 502413 - DNA, 158 bp, Homo sapiens
accatacatgatggagctagcagacttaacgttaccacggacacagtatgagtgacccttgagtcagtaaccgtacacgagaagaaattcaggaagtcagaagtaagagtgaccctcttatgcttctcaacggccaggatggtgaacagaaatcttgc

SEQ ID NO: 502414 - DNA, 205 bp, Homo sapiens
  misc_feature (18)..(18): n is a, c, g, or t
ttttttcataaaggagcnctaaaatttgccagtcacttctgcatacattgagatgatcatatggtttttgtttttaattctgatgatgtgatgtatcacattttttaacttgcatatattaaaccacctctgcatcccttggacataacccactagatgattttgaattatctttttgatgtactgctggattcagttgtcgacg

SEQ ID NO: 502415 - DNA, 368 bp, Homo sapiens
cctattcaagtctggaccaagggttcacacaacggtcacatgggcaaggacccggttctacaagggacacgtgcaacagcaaggtgcagcgttggaattcaatgggaacgaacaacgaagccagaatccagtcatccagcaatgttaaaaggccccagtgcaacgaagggcgacagtgcatcaaccctatattaggaagtcagaagcgagaagcaccggaaggttgcgctgagcttggctgcatcgcatgggtcttggatgtcgggattcgaccacttggccgatgggaatggtctgtcacaaatttgctcctttttttttatccgccacacgtaatacgcctgctcctgtcatatagcgatggttca

SEQ ID NO: 502416 - DNA, 219 bp, Homo sapiens
  misc_feature (72)..(72): n is a, c, g, or t
aggaaaaaaacccagcccaaagttatattccctcccttttactgattttttttttttctatctggtccatcngcgggattcatttctccaatctcatgtcccttttggtgtgggagtcggggtaggggggactcttgtcaaaaggcccattggggcatgtgtgtttgctagctcccttgtccatgaaaaaattttatgatattaaaaaaaatcttttga

SEQ ID NO: 502417 - DNA, 608 bp, Homo sapiens
  misc_feature (259)..(259): n is a, c, g, or t
tggaaattgggaaagggggaaaaccttgtgtttatttggtttgattgtgtccaattcaccccctgtgttaaaaaaaccagggggccataaagaaaaggggggggccttgtgaaaattccgggattagggttcccgggggttccccagcccctataaactaattttcttgacccccctctcttgagaggacagtctcgcgcggggggtggaaaaggggctgcacaagagaggggaagttcccagtgtgtgtaccaccacngtggtctcgtgttttcttacacaagatagaggagagtggtggaagagtggatgtgactatagtgtcttcttctatatatcacgagacacctatacaaaaacaagatgtgaccaaataatgtagaaattattcctactctccctccactatagtgtggtggcgctcttctatcttatcttctctatatctttctcttatttcaacaaaaaaacaagcggtgctgtgaacaaccagacaacagtcgagacggtaagaacggaagagacaacacaacgagaaacgaagtagcacgatatcatgtattgaggaaacgagcacactatgacttgaaggtaggcactaggaggta

SEQ ID NO: 502418 - DNA, 531 bp, Homo sapiens
  misc_feature (7)..(7): n is a, c, g, or t
  misc_feature (75)..(76): n is a, c, g, or t
  misc_feature (78)..(79): n is a, c, g, or t
  misc_feature (83)..(83): n is a, c, g, or t
  misc_feature (104)..(104): n is a, c, g, or t
  misc_feature (106)..(107): n is a, c, g, or t
  misc_feature (127)..(127): n is a, c, g, or t
  misc_feature (134)..(134): n is a, c, g, or t
  misc_feature (137)..(137): n is a, c, g, or t
  misc_feature (143)..(145): n is a, c, g, or t
  misc_feature (174)..(174): n is a, c, g, or t
  misc_feature (183)..(183): n is a, c, g, or t
  misc_feature (185)..(185): n is a, c, g, or t
  misc_feature (204)..(204): n is a, c, g, or t
  misc_feature (213)..(213): n is a, c, g, or t
  misc_feature (222)..(222): n is a, c, g, or t
  misc_feature (225)..(225): n is a, c, g, or t
  misc_feature (231)..(231): n is a, c, g, or t
  misc_feature (234)..(234): n is a, c, g, or t
  misc_feature (238)..(238): n is a, c, g, or t
  misc_feature (267)..(267): n is a, c, g, or t
  misc_feature (271)..(271): n is a, c, g, or t
  misc_feature (288)..(288): n is a, c, g, or t
  misc_feature (316)..(316): n is a, c, g, or t
  misc_feature (320)..(320): n is a, c, g, or t
  misc_feature (325)..(325): n is a, c, g, or t
  misc_feature (366)..(366): n is a, c, g, or t
  misc_feature (369)..(370): n is a, c, g, or t
  misc_feature (374)..(374): n is a, c, g, or t
  misc_feature (382)..(382): n is a, c, g, or t
  misc_feature (386)..(387): n is a, c, g, or t
  misc_feature (396)..(396): n is a, c, g, or t
  misc_feature (400)..(400): n is a, c, g, or t
  misc_feature (405)..(405): n is a, c, g, or t
  misc_feature (416)..(416): n is a, c, g, or t
  misc_feature (420)..(420): n is a, c, g, or t
  misc_feature (436)..(436): n is a, c, g, or t
  misc_feature (441)..(441): n is a, c, g, or t
  misc_feature (445)..(445): n is a, c, g, or t
  misc_feature (447)..(447): n is a, c, g, or t
  misc_feature (484)..(484): n is a, c, g, or t
  misc_feature (494)..(497): n is a, c, g, or t
  misc_feature (525)..(525): n is a, c, g, or t
gcttgtncccgttggctctcgttcttaccttgggccctcttacctgccaaagcctacaaggcccttaattctaanncnncccncccttcccacaaccataaaancnnacagtccagtcaccttggantgccggntcngccagnnnctccactacgtgggcattatctccctggntggggtggngncctgtactgtagccttggnctttttttnagttagttnggntcttcnttntttnctccccaagaggggacactccctcatgantgtnactcactggcacaattnctgcctctcagcgggcatcagctggganctgnggggnacccctgtggcctcttgtggccctctctagaagaacttgangtnncagntctgtggnatcnngagccttcntttnttccncctcccgctcngggngctctgcgtgatttgncagcncggntngttgtgaggtgccagtacattgctcgttttttttttntggggttggnnnngggccaggccccatttgggggccaggtnaagggt

SEQ ID NO: 502419 - DNA, 1755 bp, Homo sapiens
gcttaagcatgaagcatactgacatttcaaccagacgcacaaaggagatctctcagtggcagcggagtggaaaattgccatgaatgctagttagggtagaaagactgtattgtataaacagacctttttagtgcattactttttaaagtggatatctgtggtggttccactttaatactgaaacaccgaaaggcatttctatatttttaatcatgttctaaagtgctcttatgagagacttgtgggccatcagtattagtgatttcatactgcagtgctggcattgcagatatttttttaaattggtgctgctttgcccaatcatgttaaaactcagggggatataaaaataacattcacactggctatcttcttaagaacagaaagactgaactgtcctatggttagaaggaattgatgcttatgtagtgccttctgttgtcctacatgtttcacagttcagctgctagtcttgaagcttttccttagcttcattatgatacgtaattttataaggtattctgttgagtgatcattgtttaaaaaaaaagtttcttgctacccattgtgtttattaatagacatgatgggtttttttcagttgtcatatagattttcattattttcccttccattttcaaaatttaatgttaccagtttctccaaagacaagaaggcatctagtattaatgatggaagagtttattttctcttaccctttactaatttaaacatgctgggattacaggtgtgagccaccgcacctggccagaagccactaactaaaataggcacacatgacacagcatgtggttaatagctgtgtcttgaattatcctctaaataaccaaatttagttgtatgtatttgtaaaggatatggcttcagaagctatcttttgttctctgtcgatataactcttaagggcattcctgacccaagaaagactccttgcgtttgtaactgtggtctaatacccaaatgtgccctgttcttatggatacagtctcttgaagcatacctcaaagtcatagagagaatatggcatttgaaagaaatcgtttgccttggatcatatgagttattttgtgaaacaacagctgacttttcagaaaaggagcaactacttttatatgctaaaagtatttcataactttctgggaaaccttatttaggtataaatggtcatcttattatttttcaaaaaggtatattttaataattgtacaatttatatacagtttgtgaccagaatttgtaagttgttggtgtcatatcaaggatcttttaaattatgccactacaggatgtatcatttcaagtctattttgcacagctaaacagtagcaaaagatgccaattagcatgataatggtgtcttcatttttactgtatttaactgaaacctaacacatgttgaaaaccatatcatacctagtttatctcttaatttcaaactatgtacttgtaaaaatgatgtaaatttgcactgggaacctgggaaagagtgactgataatttttggtgcgtgatttttagatttgtctttttttttttaagaagaatttgttactatgtaaaccctgacattaaatgttttatctctaccagcatcaggaggaatcactgctttaagggtattatgtaatgcctagtgccttctatttacagtgaaaaagaggttttgtgaaggcatttatggtcattaccaaaaactaaattaaaggccttggattttaaaaaaaaaaccaaaaa

SEQ ID NO: 502420 - DNA, 1812 bp, Homo sapiens
gcttaagcatgaagcatactgacatttcaaccagacgcacaaaggagatctctcagtggcagcggagtggaaaattgccatgaatgctagttagggtagaaagactgtattgtataaacagacctttttagtgcattactttttaaagtggatatctgtggtggttccactttaatactgaaacaccgaaaggcatttctatatttttaatcatgttctaaagtgctcttatgagagacttgtgggccatcagtattagtgatttcatactgcagtgctggcattgcagatatttttttaaattggtgctgctttgcccaatcatgttaaaactcagggggatataaaaataacattcacactggctatcttcttaagaacagaaagactgaactgtcctatggttagaaggaattgatgcttatgtagtgccttctgttgtcctacatgtttcacagttcagctgctagtcttgaagcttttccttagcttcattatgatacgtaattttataaggtattctgttgagtgatcattgtttaaaaaaaaagtttcttgctacccattgtgtttattaatagacatgatgggtttttttcagttgtcatatagattttcattattttcccttccattttcaaaatttaatgttaccagtttctccaaagacaagaaggcatctagtattaatgatggaagagtttattttctcttaccctttactaatttaaacatcaggctggtctcaaactcccgacctcaggtgatccgcccgcctcggcctcccaaagtgctgggattacaggtgtgagccaccgcacctggccagaagccactaactaaaataggcacacatgacacagcatgtggttaatagctgtgtcttgaattatcctctaaataaccaaatttagttgtatgtatttgtaaaggatatggcttcagaagctatcttttgttctctgtcgatataactcttaagggcattcctgacccaagaaagactccttgcgtttgtaactgtggtctaatacccaaatgtgccctgttcttatggatacagtctcttgaagcatacctcaaagtcatagagagaatatggcatttgaaagaaatcgtttgccttggatcatatgagttattttgtgaaacaacagctgacttttcagaaaaggagcaactacttttatatgctaaaagtatttcataactttctgggaaaccttatttaggtataaatggtcatcttattatttttcaaaaaggtatattttaataattgtacaatttatatacagtttgtgaccagaatttgtaagttgttggtgtcatatcaaggatcttttaaattatgccactacaggatgtatcatttcaagtctattttgcacagctaaacagtagcaaaagatgccaattagcatgataatggtgtcttcatttttactgtatttaactgaaacctaacacatgttgaaaaccatatcatacctagtttatctcttaatttcaaactatgtacttgtaaaaatgatgtaaatttgcactgggaacctgggaaagagtgactgataatttttggtgcgtgatttttagatttgtctttttttttttaagaagaatttgttactatgtaaaccctgacattaaatgttttatctctaccagcatcaggaggaatcactgctttaagggtattatgtaatgcctagtgccttctatttacagtgaaaaagaggttttgtgaaggcatttatggtcattaccaaaaactaaattaaaggccttggattttaaaaaaaaaaccaaaaa

SEQ ID NO: 502421 - DNA, 210 bp, Homo sapiens
ttcgatagtcgaaactgaagaagatagagacgcaagagaaaaatccactgccttcaaagaaacgattgaacaggagaagcaagcaggcgaatcgtaatgaggcgtgcgcgccaatatgcactgtacttcacagcattgcttcttattactctttagctgtttaactttgtaagatgcaagaggttggatcagttaatgactgtgctgccc

SEQ ID NO: 502422 - DNA, 1248 bp, Homo sapiens
  misc_feature (135)..(135): n is a, c, g, or t
tgttgcccaggctgagtgcaatggcgcagtctcggctgactgcaacctccacctcccgggtgcaagtgattgtcctgcctcagcctcctgagtagctgggattacaggtatgtgccaccacgcctggctaatttngtatttttagtggagatggggtttctccatgttggtcaggctggtctcaaactcccgacctcaggtgatccgcccgcctcggcctcccaaagtgctgggattacaggtgtgagccaccgcacctggccagaagccactaactaaaataggcacacatgacacagcatgtggttaatagctgtgtcttgaattatcctctaaataaccaaatttagttgtatgtatttgtaaaggatatggcttcagaagctatcttttgttctctgtcgatataactcttaagggcattcctgacccaagaaagactccttgcgtttgtaactgtggtctaatacccaaatgtgccctgttcttatggatacagtctcttgaagcatacctcaaagtcatagagagaatatggcatttgaaagaaatcgtttgccttggatcatatgagttattttgtgaaacaacagctgacttttcagaaaaggagcaactacttttatatgctaaaagtatttcataactttctgggaaaccttatttaggtataaatggtcatcttattatttttcaaaaaggtatattttaataattgtacaatttatatacagtttgtgaccagaatttgtaagttgttggtgtcatatcaaggatcttttaaattatgccactacaggatgtatcatttcaagtctattttgcacagctaaacagtagcaaaagatgccaattagcatgataatggtgtcttcatttttactgtatttaactgaaacctaacacatgttgaaaaccatatcatacctagtttatctcttaatttcaaactatgtacttgtaaaaatgatgtaaatttgcactgggaacctgggaaagagtgactgataatttttggtgcgtgatttttagatttgtctttttttttttaagaagaatttgttactatgtaaaccctgacattaaatgttttatctctaccagcatcaggaggaatcactgctttaagggtattatgtaatgcctagtgccttctatttacagtgaaaaagaggttttgtgaaggcatttatggtcattaccaaaaactaaattaaaggccttggattttaaaaaaaaaaccaaaaa

SEQ ID NO: 502423 - DNA, 93 bp, Homo sapiens
  misc_feature (48)..(48): n is a, c, g, or t
  misc_feature (86)..(86): n is a, c, g, or t
gcacagcgaggtcggcagcggcacagcgaggtcggcagcggcacgagngtcggcagcggcacagcgaggtcggcagcggcacaagngtcggca

SEQ ID NO: 502424 - DNA, 1689 bp, Homo sapiens
gcttaagcatgaagcatactgacatttcaaccagacgcacaaaggagatctctcagtggcagcggagtggaaaattgccatgaatgctagttagggtagaaagactgtattgtataaacagacctttttagtgcattactttttaaagtggatatctgtggtggttccactttaatactgaaacaccgaaaggcatttctatatttttaatcatgttctaaagtgctcttatgagagacttgtgggccatcagtattagtgatttcatactgcagtgctggcattgcagatatttttttaaattggtgctgctttgcccaatcatgttaaaactcagggggatataaaaataacattcacactggctatcttcttaagaacagaaagactgaactgtcctatggttagaaggaattgatgcttatgtagtgccttctgttgtcctacatgtttcacagttcagctgctagtcttgaagcttttccttagcttcattatgatacgtaattttataaggtattctgttgagtgatcattgtttaaaaaaaaagtttcttgctacccattgtgtttattaatagacatgatgggtttttttcagttgtcatatagattttcattattttcccttccattttcaaaatttaatgttaccagtttctccaaagtgctgggattacaggtgtgagccaccgcacctggccagaagccactaactaaaataggcacacatgacacagcatgtggttaatagctgtgtcttgaattatcctctaaataaccaaatttagttgtatgtatttgtaaaggatatggcttcagaagctatcttttgttctctgtcgatataactcttaagggcattcctgacccaagaaagactccttgcgtttgtaactgtggtctaatacccaaatgtgccctgttcttatggatacagtctcttgaagcatacctcaaagtcatagagagaatatggcatttgaaagaaatcgtttgccttggatcatatgagttattttgtgaaacaacagctgacttttcagaaaaggagcaactacttttatatgctaaaagtatttcataactttctgggaaaccttatttaggtataaatggtcatcttattatttttcaaaaaggtatattttaataattgtacaatttatatacagtttgtgaccagaatttgtaagttgttggtgtcatatcaaggatcttttaaattatgccactacaggatgtatcatttcaagtctattttgcacagctaaacagtagcaaaagatgccaattagcatgataatggtgtcttcatttttactgtatttaactgaaacctaacacatgttgaaaaccatatcatacctagtttatctcttaatttcaaactatgtacttgtaaaaatgatgtaaatttgcactgggaacctgggaaagagtgactgataatttttggtgcgtgatttttagatttgtctttttttttttaagaagaatttgttactatgtaaaccctgacattaaatgttttatctctaccagcatcaggaggaatcactgctttaagggtattatgtaatgcctagtgccttctatttacagtgaaaaagaggttttgtgaaggcatttatggtcattaccaaaaactaaattaaaggccttggattttaaaaaaaaaaccaaaaa

SEQ ID NO: 502425 - DNA, 1097 bp, Homo sapiens
  misc_feature (680)..(680): n is a, c, g, or t
  misc_feature (749)..(749): n is a, c, g, or t
  misc_feature (1097)..(1097): n is a, c, g, or t
cagagcgagactctgactcaagaaaatgatactttattctagtcgggacggagcgaatcttgctctagttgccctggccgttctctaactccgggcctttaaggcgagccatgcctgcctacggcctgtcctgaagtgtctggttgttagcaggattgtgagatccgaccatccaacctgagctcatgactaactagtcctctgcatattttacgatgattgttacaatagtacacaaatactagaataacacgtactcttagaactggtgaagatacccaggctattgactaaatactgactgttgcctattgaagcttggctcatccacatggtcaatctctccgtcgacagaacaactcactgtcccatctttgaaggtagttgtacgaccccatgtccgcagaagactccagttcattgtggaggccctagcttgtctaatattccatttcattcacaattgtggcagatatgtgtcagtggagactaacattttcgacatagtcgcgggggttctgcaaggggagatcccattggggtaacggaccttgaactcctacattcgtgcacatagtatctactcgctcgcgatgatcttcgaatacttgcgcgctgctaacaaaccaatgccccatgggctactcaaatgaaactaggccatataagacctattacgnttggagcacgaaattgggcttaatttgcagaacatggcttctcttctgggcaaaggctttaaaagtctntctcacctttgcactctagtcgattttatcccccatagagggtacactgtctgggcttaacctttgaagtgggggttccaatggtacaacagggcttctctagcaaaatccatatagcgtttgtcgaatagtcatttcgttcagaatggaaaacctataccccaaggaaattcttgtgggggaccagttgagccccttgtggttccattcttgcggccctgatttatctgaatcgcagtacgtggagcaagtattttgtagccttgccattgggataagcggggtcctccttagaattcccccagggaattggctattgggttattagactggactttggaagctccn

SEQ ID NO: 502426 - DNA, 216 bp, Homo sapiens
gaagtaatatcaaaatacagtctcatcccttaggaaggcagattaccatatcaaaagaagagtaataaagtaagtaactatattacaaggcagaaggctataggtatcaacaacaacaaacaaaaaaaggcagggacaaacacacaggcagccagcaaaggatacttctaggctacagcaaagcaaggcacatatttatgggcaataggtcaacta

SEQ ID NO: 502427 - DNA, 648 bp, Homo sapiens
  misc_feature (138)..(138): n is a, c, g, or t
  misc_feature (142)..(142): n is a, c, g, or t
  misc_feature (151)..(151): n is a, c, g, or t
  misc_feature (167)..(167): n is a, c, g, or t
  misc_feature (250)..(250): n is a, c, g, or t
  misc_feature (273)..(274): n is a, c, g, or t
  misc_feature (279)..(279): n is a, c, g, or t
  misc_feature (291)..(291): n is a, c, g, or t
  misc_feature (300)..(300): n is a, c, g, or t
  misc_feature (303)..(303): n is a, c, g, or t
  misc_feature (345)..(345): n is a, c, g, or t
  misc_feature (354)..(354): n is a, c, g, or t
  misc_feature (381)..(381): n is a, c, g, or t
  misc_feature (392)..(392): n is a, c, g, or t
  misc_feature (401)..(401): n is a, c, g, or t
  misc_feature (441)..(441): n is a, c, g, or t
  misc_feature (467)..(467): n is a, c, g, or t
  misc_feature (472)..(472): n is a, c, g, or t
  misc_feature (474)..(474): n is a, c, g, or t
  misc_feature (476)..(476): n is a, c, g, or t
  misc_feature (480)..(481): n is a, c, g, or t
  misc_feature (488)..(488): n is a, c, g, or t
  misc_feature (512)..(512): n is a, c, g, or t
  misc_feature (517)..(517): n is a, c, g, or t
  misc_feature (537)..(537): n is a, c, g, or t
  misc_feature (539)..(539): n is a, c, g, or t
  misc_feature (541)..(541): n is a, c, g, or t
  misc_feature (543)..(543): n is a, c, g, or t
  misc_feature (568)..(568): n is a, c, g, or t
  misc_feature (574)..(574): n is a, c, g, or t
  misc_feature (596)..(596): n is a, c, g, or t
tattatataaaaagcagaattaagctgggcacatgtgcttgtaatctcagttataagggaggctgaggtgggagaatcgagatactcagccagcctggcaatgtagcaaagactccatctcaaaaaaaaaaaacagantggncaaattttntgggaatctatggacnttccatgagcttaaacactttggaggtgggataacatttagttgaaaatacctaagaaagtgtgtcttctttaaagcctgggntttaatcatgggaaatggtgtgnngtgtnggttggtatccnatgtgggantcngtatgtctgatccataatcatttagatattggaatgatctcnggggatggnaggttgggccatttgaccattattatnatcaagtggtngtatgctanggtaagttgacgccatagcattatacagttatcttcatgntcttgaatgatatctgtatataagcnatgtntnanctcnngtccaanggtagaatgaaaaacccattctantgtcnccactcagagatagtaccgnantncngggtatccttctataaactcctaantttggntcctttatttgtaacttaatanggctactaaagacaagtcctaaaggtaaggtctaacaagtgctacaacgtga

SEQ ID NO: 502428 - DNA, 374 bp, Homo sapiens
agcgttcagaggtcacctgcagcccatgtacaccagggtctatagtcatatcgtttcgtactctgatatctaataacgtcactacttagctgtaccaatggatctcttatgcaactttcagagatggagtcttgctctgttgctgggccggagtgcagtggcatgatcttggcttactgcaacctctgcctcctgggttcaagtgactctcttgcctcagcctcccgagtagctggaattacaggtgcccgccaccacgcctggctaatttttgtacttttagtagagacggggtttcaccatgttggccagaatggtcttgatctcctgacctcatgattcgcccccctcggcctcccaaagtgctggtatta

SEQ ID NO: 502429 - DNA, 454 bp, Homo sapiens
  misc_feature (165)..(165): n is a, c, g, or t
  misc_feature (174)..(174): n is a, c, g, or t
  misc_feature (198)..(198): n is a, c, g, or t
  misc_feature (225)..(225): n is a, c, g, or t
  misc_feature (261)..(261): n is a, c, g, or t
  misc_feature (265)..(265): n is a, c, g, or t
  misc_feature (275)..(275): n is a, c, g, or t
  misc_feature (280)..(280): n is a, c, g, or t
  misc_feature (315)..(315): n is a, c, g, or t
  misc_feature (321)..(321): n is a, c, g, or t
  misc_feature (344)..(345): n is a, c, g, or t
  misc_feature (358)..(358): n is a, c, g, or t
  misc_feature (360)..(360): n is a, c, g, or t
  misc_feature (389)..(389): n is a, c, g, or t
  misc_feature (394)..(394): n is a, c, g, or t
  misc_feature (396)..(396): n is a, c, g, or t
  misc_feature (409)..(409): n is a, c, g, or t
  misc_feature (414)..(414): n is a, c, g, or t
  misc_feature (423)..(423): n is a, c, g, or t
  misc_feature (425)..(425): n is a, c, g, or t
  misc_feature (429)..(429): n is a, c, g, or t
cccccgggctgcagaaattgggcacaaaaggtgtttgtgaaaaacaagtttggggcttggtgagtttgtgggcccaccaccttttgatttgtccagggtattaacgtgtcagggttaagtgttttgggattttttaaaaggcggccaaaacccagttgttttttnttgggggtntgtcagggttgaaaagtccaaccngtaggccccagtttcctttttaagttnaggttttgggccaaaaccccgggggttgttacttgntttnagtggaaagnggttngcatttaccccggtaaaggtattcatttttaattnaggaanggtttttttggtacccaattttnnattttttaaaaanangccaacaaatttgggttttttactgttangtganancattaggccccancaacnggtcattgngnaagnaaaaataaaagtgctccggtaccca

SEQ ID NO: 502430 - DNA, 842 bp, Homo sapiens
ctcgggtggctgcgctgcgcggggaaatggccacggggacagaccatgtggtgggactcgggctcgtcgccgttagcctgagtcatcttcacctactacagggcctgggtgacttctcttggtgtgtcattctccccgtccgctgctcaccttccccgagccctggcaccggcagagcaactactatataggctctaggcagcggcgctggcttcattgcctgcctcatctcttgaactctccagaacaactctatgaggaagatgccagtggtaccgcattttatagatgagatagctgaggctaggggagaaggatctggtcccacagatggcatccttgagccgctatgagcttataactctgttgtccggcgttgctttgagcttctcggcgggagtcggttccttctgggttagcctgctgactcttaggcatggcaaacgccagtgatctttgtgaaggccttcaggatatattgcgcttgtgggaaaacttgtggttattgcttaacgaagtgcagtgtgtctggaagtgcagaactgtggtatcctttagagaaaagaaatattagtgaagaagccctggaggcccaggtcgggagtcagtcgatggattcctcaagtaccatttgctaggctgtgaggtgccttagggcaggtctctagtgcccttgtgctcttgtccccagcatcaagctatagcaggcaccaaagcaagtgccggtaaataccagtaagaaatttagggaaaggaaggaagacaggatgacccaaatgcgtcagtcttaaagagaagcaatgcagtccagtcctctgaagtgggtcaggcccttagatggg

SEQ ID NO: 502431 - DNA, 112 bp, Homo sapiens
catccctggccttaactttggaatttggagattaaatgcaaacatgtgaaaggctcatgaatatggatgcccctggaattttataaattttaaaataaaacccgaaaccaga

SEQ ID NO: 502432 - DNA, 312 bp, Homo sapiens
  misc_feature (72)..(72): n is a, c, g, or t
  misc_feature (88)..(88): n is a, c, g, or t
  misc_feature (123)..(123): n is a, c, g, or t
  misc_feature (143)..(144): n is a, c, g, or t
  misc_feature (152)..(152): n is a, c, g, or t
  misc_feature (266)..(266): n is a, c, g, or t
gatagtgatttgacttacaaatgggccaaagacacttcaacctcaaaaccaaagagaaatctctgcttgcangatacaaagaaagtanctctccctcttatgaaaagcaaccaggaactctantccagttatgagggccatgnntggtgtgngcagagctatcaagcaagcattcttcctagcacgctgcgctgccaaagcacagtgcagaacccaggcaaatcacattcatgcgcgcacacttgctcttaacgatcatcaccctntattctatctcaactttggccccatcaaatctaatgataaacaaaa

SEQ ID NO: 502433 - DNA, 372 bp, Homo sapiens
  misc_feature (56)..(56): n is a, c, g, or t
  misc_feature (98)..(98): n is a, c, g, or t
  misc_feature (136)..(136): n is a, c, g, or t
  misc_feature (291)..(291): n is a, c, g, or t
  misc_feature (321)..(322): n is a, c, g, or t
  misc_feature (372)..(372): n is a, c, g, or t
acaactcgagctcgtaccctacttcgtacgcctcatcactgacgtctcatcactgnttctattctattctattctattctgttctgttctattctgtnttattctattctgttttattctgttctgttctattctnttctattctattctattctattctgttctattatattctgttctattgtattctgttctcttctgttctattttttctgttctgttctgttctattctattctattctaatctgttctattctgttctattctattatattgtgttctattccantctattctattctgttctattcagttctgnnctgttctattagcttctgttctattccatcagtgatgagacgtagaaggn

SEQ ID NO: 502434 - DNA, 388 bp, Homo sapiens
ggttttagatttacagaacagctgcagatggagcagagagttcccatgtatccctcatatcagttttctccattgtcagtgttgtacattactagggtacatttgccgcacaataagaaaccaacgtgggtgcgtcactgtgagttaaactctatccttgattcagattttactcatgtatccgctcctgtccttttctgtcctgggtcccattcaggacgctcgatgacatctatcctccgggtcttcttagtgtcttccggtttatgatggcttgtctctccttgtttttcgtgacgttgagagtactgaggagtgccggtcagatattttgtagattgcgcctcattttgggtttctctgatattttccttatagtgagaaggag

SEQ ID NO: 502435 - DNA, 763 bp, Homo sapiens
gaataatggcgtgttgcctaccaggtgaatatgtggctatgcaaatgataaaattcgccagcttaccaagatgggacccacagcacttttgattgaattggaggactggagatgacacaaagtcaaggctcactatggaggtaccactgtacacaatgtatccaacaaataccagatctcacagaacatgtttacaggatcatcccggcatgccctcatgaatggagcatctcatccgatggcagacaacaggaccatgtccactcacaacagcatgttcttcatcacgtgtgacagagacaatgacgcgctggttgacatcacattccagacatcagcgttctaaagaagacggtgctagatggtggttaatagatgacatgcatccaatccaaacggcatatactactgggggtggacagtacacctgggacatggcagagcatgagacacatgatggatgcctatggatgaattggaaggcgtcatggtactcaatggaaaagatgagtctctagatcacgaccttttttctacaagcattgaccccaatacgtacatttttgctcttcgtgatgtgacaacatttagtggcattaaggttattggaatttgcttgtatacattatatatctgctcaaactctccaatggtagtatcggcaggttaacaatagctttttggacattatcgggcaagacccaatggttaagtattcatagccttgatttttcttttgacctgattttggggggggcgggcc

SEQ ID NO: 502436 - DNA, 184 bp, Homo sapiens
ctgtggcttggctccgcgtttagcgctgattggctgcgtgcttgactgcttgtcccttttgatcgtggtgacttagagggtgcactccctgtaaccggggatgcttgcatgtgtaactcttacctaagacgctcatagacaaggctaggacccaaaccctactcacagccaggacattcttccg

SEQ ID NO: 502437 - DNA, 494 bp, Homo sapiens
taggcggtcctctactcccctgacacaaaatcattcaagaagaaatagataccagcctgagcaacatggcaaaatcccatctctacaaaacatcaaaaaaaaaaaattagtcggggcatgggggtgcacaccggtaatcccaggtagctgccactacaggtgctgcaccaccacgcccggctaattttggtatttttagtagagacggggtttcaccatattagccaggggggtctggaactccggacctggtaatccacccgcctcggcctcccaaagtgcggggattacaggcgtgagccacctggccgggccaaaaatctcagaattctttaagacggttttaatggctccatcagtaatttggaagcactttcctttttttttttccccctttgggtcccttccccaaagccaccatggggtgggtatgattgttggaggggaaagaggaggggtaggaggatgctgggttgaggggattgaggggatcg

SEQ ID NO: 502438 - DNA, 333 bp, Homo sapiens
tcgcttccatatcaatgagtgctttcgcgatcttgtcgcctgtgaacggcttggtcaggtagagatatgcgcctgccaagagccctttctgtatgtcgaaaggtgaactcgcactggaaagcatggcgatgggtaggtgcttgaattgagtcgaagctcgtaggattgaggcaagcttcaatccgtccaggttaggcatttcgatgtcgatgaagcacgcatcaggcctagcctcgcgaataacacgcagggcctcgtacccatcctttgcgaggtgaacctcgatatcagctttctgcagaaagccggcccccatcttccgcattccggggg

SEQ ID NO: 502439 - DNA, 104 bp, Homo sapiens
gcggcttctgcatcaggtactcagagtcaacagaggtcaatacattatgtatacatactgacactctcttgcacaggaaactcttactcatttttttttctgag

SEQ ID NO: 502440 - DNA, 584 bp, Homo sapiens
  misc_feature (308)..(308): n is a, c, g, or t
atatttgtgttttttttgagagatttgctcttgttgaccacgatggagtgcagtggcatgatcttggctcactgtaacctctgtgtcctgggttcaagtgattctcctgcgctcagccttccgaatagctgggattacaggcacccaccaccatgccagctaattttttggatttttagtagagacagggtttcaccatgttggtcaggctgtgcttgaacccctgacctcaggtgatccacctacctctggcttcaaagtgctgtgattacaggcatgagccaccgcgcccagacagagagaggttntaaatatatatgggtactttaatattaagttataacataattttcatggtattgaaaagctctttcatctaggatcacacaacttcagtgtcagaatcatattgaggtgggggaattcgtattagtcaggtttctctaaagggacagaaacaatatggtagatgtatatacgcatgggagtttatttgggagaattgcttacatggacataaagggaagtcccacaattggccgtttggaaactggggaccagggaaccccttttggttcccgggc

SEQ ID NO: 502441 - DNA, 841 bp, Homo sapiens
  misc_feature (93)..(93): n is a, c, g, or t
  misc_feature (176)..(176): n is a, c, g, or t
  misc_feature (197)..(197): n is a, c, g, or t
  misc_feature (210)..(210): n is a, c, g, or t
  misc_feature (217)..(217): n is a, c, g, or t
  misc_feature (251)..(252): n is a, c, g, or t
  misc_feature (272)..(273): n is a, c, g, or t
  misc_feature (288)..(288): n is a, c, g, or t
  misc_feature (302)..(302): n is a, c, g, or t
  misc_feature (321)..(321): n is a, c, g, or t
  misc_feature (324)..(324): n is a, c, g, or t
  misc_feature (331)..(331): n is a, c, g, or t
  misc_feature (337)..(337): n is a, c, g, or t
  misc_feature (370)..(370): n is a, c, g, or t
  misc_feature (390)..(390): n is a, c, g, or t
  misc_feature (458)..(458): n is a, c, g, or t
  misc_feature (467)..(467): n is a, c, g, or t
  misc_feature (469)..(469): n is a, c, g, or t
  misc_feature (477)..(478): n is a, c, g, or t
  misc_feature (490)..(490): n is a, c, g, or t
  misc_feature (504)..(504): n is a, c, g, or t
  misc_feature (600)..(601): n is a, c, g, or t
  misc_feature (603)..(603): n is a, c, g, or t
  misc_feature (680)..(680): n is a, c, g, or t
  misc_feature (684)..(684): n is a, c, g, or t
  misc_feature (694)..(694): n is a, c, g, or t
  misc_feature (707)..(707): n is a, c, g, or t
  misc_feature (710)..(710): n is a, c, g, or t
  misc_feature (716)..(716): n is a, c, g, or t
  misc_feature (726)..(726): n is a, c, g, or t
  misc_feature (728)..(728): n is a, c, g, or t
  misc_feature (731)..(731): n is a, c, g, or t
  misc_feature (743)..(743): n is a, c, g, or t
  misc_feature (751)..(751): n is a, c, g, or t
  misc_feature (755)..(755): n is a, c, g, or t
  misc_feature (763)..(763): n is a, c, g, or t
  misc_feature (829)..(829): n is a, c, g, or t
gacacgagagaacaaggggggacaaaaaagcaggcgggaccgggccggaaggcccgggagcagcggacagccgggcgcagacagcggctgganccgaggcccagctccacagaggagaacacgcaggcagcagagaccagggggccccccccagcccctgccggcacacagcgcancaccgggaaggggcgccggcncacagcagcacgnggaaacngcgggaacccgcccaccacggccgaaggcacganngaagcccagccacccaaagnngcggaggggaagganggccggcgacgggnccacaaggggccccagaancgnccgggcnacttcngggacaaaggggaaaggacggaccgcgaccagnacaggagagtcggagagagnggatgggaaaagaagtagagtaggggccgtcagacagtgggtaagagaaacagtagatggccaactcngcccggcgnanccagaagnncacccggaaggnggcaggaaccgacnccggacacagcataaagcgaggggaggagacgagagaataaaggcgacatggcacctgcaccggagacggggagacgcccaagcccgacagcgccnncngctacggaaaccccagtgaggccagggaggcggggcgcttaatcgtggagccggtatacgcgggacgcaagcgaccnaggngggaggaagnggcagagcggccnggngggggngggggggcancnggncaaaaccaacangacccccnagcnaggggggngcacaaaggagagggcaggacccgaggaaggggaaagacggaacccagggaggtccaggtgcaggnacccagggaccc

SEQ ID NO: 502442 - DNA, 292 bp, Homo sapiens
aggaaagcataagtaagtaccagaaaagacaacatatcgccgaccacacgtgatgaatacaaacccacacgattagccctgatggcctaaggaacaatggcatgctgatctaggatcctctaagcacaacgcctgatcgcctcctccgtgtggtagccaggccaatacaggctgctaacttcatcaccacattgcactcgctcatacctggaatccttgctcctagcttcaccagcaaatcgtaagcgctccttcctacttcctagcttccttcaccacatcgcactggctc

SEQ ID NO: 502443 - DNA, 106 bp, Homo sapiens
  misc_feature (36)..(36): n is a, c, g, or t
  misc_feature (94)..(94): n is a, c, g, or t
cacacctacctcaacatgctggaagaagcagaaaancgcgatcaccgccggctggccaagcagctcgacctgttccacatgcaggaagaggcgncgggcatggtgt

SEQ ID NO: 502444 - DNA, 475 bp, Homo sapiens
gcacccatccttctttcttttatgaaaatatatgattgacttgtctttcctgacaggtttctttcctggtttttctcctcacagaggccaatgtaccttgaagccaacaaataaacttacatttcagggcttctcacttgcaagacccttctgatgccacatgtctactctggcaccccagcagcagcgcacaacacaacactgttctgttgctgggaggtcacctgggtcagggttcctaagtcttggagtggggtcaggctactaccatcactatctccactttacttggagtccaacaaaagccctcccatgatgcattcgaggacattagatctcatgtcccaatccaaggagaagatctgaaggaaacgctcttctctgctccttgcccggggtcaccttgatccaaacttcctggctaccttatgtcaccccccacttcagctcaagatttgggaaggtggtgggaacc

SEQ ID NO: 502445 - DNA, 832 bp, Homo sapiens
cggtgctgtcacgtctcctgtgctgcgcggcttccgtgatccttgatttgcgctctatgatgcgcccggctgttgtgatccgatatgtccatgcagaggctgtggacaccgatggctcataggagcatccagactgccctgcctcccggcctgtactggtggcgtcctcaaggcccagtctttcctgttcggggtgtatgtcggtaggcaagtacttggttgaccctcgattatactacggtcgcgcgcggattgttcgtcgtgttggcccgatgcccttcgggccgtgtcctgcttgccgtcttggagttgactgctcgtttggcatgcatccctgctacgaggattgcgctcggctttgagcagttggctcttcccgtgccagaacccggctctcggattctgaacgtcgtttgatcagtgggccaggtaacactcactatgcatcgtagtggccccagctgcttcgcaaggtctaccgagccaggatgcctggagccgctgctacaggtaggtctccaattggggatgcttgcgccaactggaggaggctactaccactattcctactcggtggtgaggggccttgcgacgcggatccgttgcccgtggaacatcctacattcccaggattgaccaacctatggacgaggcctgttctttacgggagatccttgcaaggttgcagaagggaagatcaagacgggagcaggaggctgcagatcttggtaccgcaggttaagcgccggcgctgcgtcgccggagacttgtcgccggtccttgtccccaggctgcttgttgttccgttgaagggttggtcaataaaccttgc

SEQ ID NO: 502446 - DNA, 930 bp, Homo sapiens
cagagccccccacagctggcggctgccctctgaccccgcaaaacataggacttcagaggctggacctacagacccagatgagaagtgctccctaccctcacctcaagacgaccatggcaccatcccagactggaagctacagctgctatcccggcgccggcaggaggaggcgtccggttcgaggccgagagaaagcagaatctgggagctgcctgtcccagattgccatgcctggaaacgagggctcctggagcgccgcccgggccaagcttgggctgtccccatgggagagcctagccctgtgctagggactgtagaggctggacctcctagacccggcatgacgtctgcgtgtccgttctggaggcctatctgggccagtgcacctagaaccgattcagtccaggcaggagcggcagcaagcagctagcaagcaacgaacaacgggagtgaagagctgcatacgcagagagaaagcctgggcctctggaggcccgggatgcggagacccagccctggggagatgcgggatcggagcccccaagggcagagagtcgagagaacgagagactaagtccgagggagaccacgagacgaggaggctgcggcatagggggagcccaagagttgagcctgaggccctctggaggctcgggcactggacggcaaagcccagcgaaacgtgggagacaggagctcccgactgtcagcagcgcctgcaacatgcgccgcttgagtcctgcagaaagcgtccaggagcggacgcgctgacgactagcacgagtcgtccgagtagcaacagccccaggacgaacacgaggctcgcaacggttcacgtgtcgccacggggcactctgccctaccgagaggttggcgccttgactgagggccccttactggacaacctgactcctgagacccccggcaact

SEQ ID NO: 502447 - DNA, 963 bp, Homo sapiens
  misc_feature (963)..(963): n is a, c, g, or t
cgtactgtgatactgcagcgcacctataagaatcgcgcctcgtccgggtcctcaggtacgagtgccgcccatcagttgaactgctccgacgcgaaccccagtaccaaggtaatttctattgcacgagatcatgctacgagtgaaggatcctaaagagagtcactgtatttttatactaggagttcttggacctgacgctacatccacaaaatgtgattttcccattatgaagtttacactctacttcttggcttatgaggataaaaatgacatccctaaagaagcaagatgaaaaatagcctgggcgctctccagaaaagctacacttgagctgacacacaattggggcactgaagatgatgcgagccagagttaccacaatggcaattcagaaccctcgaggatatcgtgcttgtaaaagggtttgaacgaacctgggagtcaaacttttgtgaaggaacccccttgatgatggtaaaatgcaacggcctggcatttattcaacgatcctgagtggctactggactgaaattttgaattcctaagccaaatggcacccttaatgtacgtgctgtgagaattctccttttgaggattccgaagacaggaaacactgtgattcaaggatattactaccagaagcatttagggagtgctggatcacgtggcccgatcaaatcattcttcagtccatttccccataccctatatcaagttgtccttttcaacctaactgttccgccatcgtggttacaacagggtaatcccatgcctgatatcagttgggtacctcttttatcggtatcactaaacacgtccctaacgtggtatcccttctttgccctagatatttccttcacactgctgacatctttaaaaaaaacatgtgggcggtctcgggacagacacaaaatatcgggagaatgttttcaaacgctcaaaaggcacatacagtgagatatn

SEQ ID NO: 502448 - DNA, 353 bp, Homo sapiens
cgcaccgttagacacttacgatctcaaaaaaaaaaaggaacaggtcttgcccctgttgcccaggctggagtgccgtggcacgatcatagctcactgtggcctcaaatttcctgggctcgactgattctcctgcctcagtctcccaagtagctgggaccgcaggtacatgccaccatgctaggctaattttattttaatttttagaaaataaaatattttttattttatttaggcaacatgctatgttgcctagacgggtcttgaactcctggcttcaggctatcctcttgcctcggccaaccaaagtgctgggattgcaggtgtgaactgccatgcctggctttctattctct

SEQ ID NO: 502449 - DNA, 113 bp, Homo sapiens
gctatctagaggatcctcaaagtgcctcttctatatctacaagatgacagtcaagaacttttaaatcgtctaagaaagaccagcatagctgtactttattcaataaaaatgat

SEQ ID NO: 502450 - DNA, 128 bp, Homo sapiens
ccttagggggataagtgtataacctgatggtgattttctcgtgtgaatgacgggttctatgttgttcatgtggtgggtgattgacccccattgtgttgtggtacgatgtgtcgagggagtatcgggct

SEQ ID NO: 502451 - DNA, 315 bp, Homo sapiens
cggacgcgtggggtgacaagcggtgcggcctcccagctctctaagatccgagtcgtccgggaatcccttgcccgtgttctcaccagttattacccagactcagaaagaaacctccgggaattttacaagggccagaagtaccagcccctggaccttcggccttagaagacacgtgccatgcgccggccggctccacaagcacgaggagaacctgaagacccagaagcagcagcggaaggagcggctgtaccccctgcggaagtaccggtcaaggcctgaggggcgcattgtccaattaagcacagctggctgaga

SEQ ID NO: 502452 - DNA, 358 bp, Homo sapiens
  misc_feature (17)..(17): n is a, c, g, or t
  misc_feature (47)..(47): n is a, c, g, or t
  misc_feature (72)..(72): n is a, c, g, or t
  misc_feature (89)..(89): n is a, c, g, or t
  misc_feature (117)..(117): n is a, c, g, or t
  misc_feature (247)..(247): n is a, c, g, or t
  misc_feature (264)..(264): n is a, c, g, or t
  misc_feature (275)..(275): n is a, c, g, or t
  misc_feature (284)..(284): n is a, c, g, or t
  misc_feature (295)..(295): n is a, c, g, or t
taacttaaaccccagtngttaataatggtgccatcttttaggaaaangccatgccttggtattttccctttncaaaaagccagattatnggccgggtttttgttggctccattcccngttaatccccaggcacttttggaaggccgagggcaaggaaggattgcttgagcccaggagtttgagagcagcctgggcaacatatcaagactctgtctctttaaaaaaaaaaaaaattacccagggcatngttgttccacacctttngtcccacctantcgggaggnttaaattcgangatcacttgagcccaggaggttgaggctgcagtgagctgtgattgtgccactgcactccagcc

SEQ ID NO: 502453 - DNA, 690 bp, Homo sapiens
accttatgccctaatgtcgtatatataagcggctccggagctagagacgatacgtgccatgcgcaagagctgtggtggatgcgaaagaatcacgtaccgagcttctgaccgactctgacttgacagaaaacagtaggatgaaagtggacggattcagagcgcatacaaccactatgatgatttgatcatcataacatgatcagatctagtacgaagccttatgcaaaccctgcaaactgccatatgagaaatctgagaatggaaccacagtgggtcccaatcagctgggtttactgatgattcagtaaggttaacaatgaaaattaaactcttaaaaagtgactgcaacaaataaaccttctactgagaaaatacatcacagatagaagattatctgctaagtccaggcatttttatggtgtagattgaaataatagtacacttctgaatttttatataaaatgtggttggaaggtgtactaatatataatttatcttaatttttctaactttgtatggataatctttctattcatatcacatagagaaatgcgttgaagcatttagtatatgttttgatttagtacccttgcctttttcatcaaaggaattttcaaatcattcactctaacattggtctcatattttcactgtgatcatgaatatacttgacatagtttgtaagctgtt

SEQ ID NO: 502454 - DNA, 952 bp, Homo sapiens
cctatcggtactgcgcgggtccttctgcccctgtgtcccgcctgatttctctctattgatggtggtccccctgcgcccgtcgcccctcggctaaattgttgccacggtggtcattttatgtctcccttctgcgtgcgcccccttttgcccccctgttgcccgtgggtttgtcagcgccccctgggtcgtgttgtacaccacggggaggtcactaccgttatggccccagggtgactgggtttttttagtacccggacggcgtgggtggttgtagccccactggtcaggtactgttttcatgcttctgtcgctgtggacgctgtgtgccccccgcgcgtggccccgatttggaatcgtgcctctcgggcgctcaatcacagtatgtcactttacaacgctggtctaacggttatatgtcggcaaattcgtccttcgattcttcagcgcgcagaacggccgtgtatgtctcgtggttgctgtaataaaattcacaccacccatgggtccccctttaatttatcgtaccacaacaagatatgctgttattgactacaacacaaccaccaccccacccctgctagtagttcccacaaacagcccactcctcttcgctaaaaggttcctgaacataaaagggccttgtaacatttttttaattttttaatgaggccccccctaaacatttgtttcgccaatatacccccaacgtggggaccctggaccaattcgcctcacactgttctaatccttgtcaatatccccctcgattcccctcgcatttcccgccaccccctccttaacgcgtgtccaaacgaacgttccagtagatactgtcattactactcactatactgcgctagctctctctcagccgaactgaccgagcgcaagcagaccccctgagtcgaaggaagcggcggcccattttcagcatagcatacattatacgaag

SEQ ID NO: 502455 - DNA, 157 bp, Homo sapiens
tgatctcactcatctactactcgtgacgcttccagctctgcttttgaaagcaagatgagcacactcagctgagaggtcataataggcatgatcgacatgtttcacacatacaccagacgtgatgacaagattgacaagccatgcctgctgacgatga

SEQ ID NO: 502456 - DNA, 322 bp, Homo sapiens
tctccgagacagggtcttgccctgtcgcaagcagtggcatgatcttgcctctctgcaacctccgcctcttgggctaaggcctttttgccacctcagcctcctaagcaggtgggaccacaggcgcttgccaccaggcctggccaatttatatatatattttttggagagatggggtttcaccatgctgcccaggctggtctcgaacttctgagctaaagtgatccacccaccttggcctcccaaagtgccgggatgacaggcgtgagccaccaggcccagccctaaaatatgactttttcaagcaaaaagtttaacattgtct

SEQ ID NO: 502457 - DNA, 283 bp, Homo sapiens
ttttttggggttttccccccccttacccccccccgggggggttttgcccccccgattggccggggctttaacctttaggggggttcccggtttttgcccctttccggggttttttttcccctttttccccccctttttttttcccccccccaggcccttgggataaacccacccggggttggttttttttttgggagcccccccgggggtttttttgggggcttttttttttgggtttccccccccggggtttttttttgccccccttaccttttttttttga

SEQ ID NO: 502458 - DNA, 155 bp, Homo sapiens
gccaggagatccagatgagcagcagatgtacatcttctagtcatcggtgccaagcgtaccctgaccatcagccagtgctcattagcggacgacgcagcctaccagtgcgtggtgggttgcagaagtgtagcacggagctctttatgaaagagccc

SEQ ID NO: 502459 - DNA, 142 bp, Homo sapiens
  misc_feature (45)..(45): n is a, c, g, or t
catcatgtccagctaaacctcggcccagaagccctttaaggctgncagttacgtctcatctcccggtgtgatgctgacaccagcggcctggagtcgtgtaaaggaggggagccttaccaagactcctgcaaaaacccttgga

SEQ ID NO: 502460 - DNA, 787 bp, Homo sapiens
  misc_feature (18)..(18): n is a, c, g, or t
  misc_feature (62)..(62): n is a, c, g, or t
  misc_feature (122)..(123): n is a, c, g, or t
  misc_feature (180)..(180): n is a, c, g, or t
  misc_feature (189)..(189): n is a, c, g, or t
  misc_feature (274)..(274): n is a, c, g, or t
  misc_feature (301)..(301): n is a, c, g, or t
  misc_feature (308)..(308): n is a, c, g, or t
  misc_feature (311)..(311): n is a, c, g, or t
  misc_feature (349)..(349): n is a, c, g, or t
  misc_feature (357)..(357): n is a, c, g, or t
  misc_feature (376)..(376): n is a, c, g, or t
  misc_feature (388)..(388): n is a, c, g, or t
  misc_feature (438)..(438): n is a, c, g, or t
  misc_feature (445)..(445): n is a, c, g, or t
  misc_feature (460)..(460): n is a, c, g, or t
  misc_feature (469)..(469): n is a, c, g, or t
  misc_feature (483)..(483): n is a, c, g, or t
  misc_feature (516)..(516): n is a, c, g, or t
  misc_feature (542)..(542): n is a, c, g, or t
  misc_feature (553)..(553): n is a, c, g, or t
  misc_feature (573)..(573): n is a, c, g, or t
  misc_feature (603)..(603): n is a, c, g, or t
  misc_feature (608)..(608): n is a, c, g, or t
  misc_feature (633)..(633): n is a, c, g, or t
  misc_feature (642)..(642): n is a, c, g, or t
  misc_feature (653)..(653): n is a, c, g, or t
  misc_feature (662)..(662): n is a, c, g, or t
  misc_feature (693)..(693): n is a, c, g, or t
  misc_feature (695)..(695): n is a, c, g, or t
  misc_feature (711)..(711): n is a, c, g, or t
  misc_feature (718)..(718): n is a, c, g, or t
  misc_feature (724)..(724): n is a, c, g, or t
  misc_feature (774)..(774): n is a, c, g, or t
agcgcagcgcacttgctnctaagcaacaacaacaacaataacaaaaagctgcctcgcagcanagcgcagcgcgcagcgcgcgcaacaaaacaacacaagcacatttcctcttttctccctcnngcccaccccccgcccacatcccctgcatcatgcgcgctctcagcagcaacacatccntatttgccntttagcataaaagccagcattcacccacatttcactcattttctctattttttaaaagtgccccagcattgtctcaaagcatagncagaagctagggagcattaaacaaaanatctggnaanccacaaaagcttagctagctttcagcatgcatctgggngctttggnctgctgtgcagggggtggncagcaatgcagngctagggcgccctccagttcgctattcttttctgccagcctttccgcttncttcagncttcctccaacatgnggggggagngttaggcgccactnccgcagggttcaaacttccaatggttcaaaagngttggagggggacttcaaaaacttgnccccttctctngcctcgcaggggttttcagnccacccttttcaacccattttatttttccnaaaanctcggcaattcaaatggaaattctnaaaagttgncgggggggggnaacattcgngccagaggttcaaattgggttaatttgcctngncagggtttcgttttgngttgttncaacancaagaataaaaaacttttgggttccttttcagtgttatagagggggccangccgcctcacccc

SEQ ID NO: 502461 - DNA, 154 bp, Homo sapiens
acagagaaaacaaatagttgtcgtctcttcaacgaatcgagaatagcgtacaaaaaaaaccttacatcacttacgaatgaatacatttacaggcgtacctgcaaaccgcttccaactcaacgcaagtaacagcccaacggtgaccggcgacttc

SEQ ID NO: 502462 - DNA, 240 bp, Homo sapiens
gctcaacttccagacgggcctcctggtgcctgcgcatatcttcgcattgggcccgcgccagcctttcacgggggacaccatcggccttgaacatcatcaaggggcaattgaggaggggctattttggcacgggcagggttcaattggctacacgggtgttggtctaactccagcggggcgtgttggagccccgggactttgtcctggacgtgagattgaagtcgtctcgaggcagagtct

SEQ ID NO: 502463 - DNA, 332 bp, Homo sapiens
ggcccaggcccaggagggcaacgggggggccgggaaccccaaggagccagggcgacgggccgccggcagggaggagggggagggggccggcgggaaggagtcatgcgcggaaggccgcggagcgaccgcgacgggggacagaggaaggacgccccagaaaacggcagagaagacgggaccagccccggagaggaccaggaggagcagccgggaccggcagggaacggggcgcacggcgcggcagacggggggagaagggcagagccacagaagggcgggccggccccgccggggacaggaggccggcaggaaagagcgacagacacagcaaa

SEQ ID NO: 502464 - DNA, 356 bp, Homo sapiens
  misc_feature (193)..(193): n is a, c, g, or t
  misc_feature (229)..(229): n is a, c, g, or t
  misc_feature (242)..(242): n is a, c, g, or t
  misc_feature (244)..(244): n is a, c, g, or t
  misc_feature (249)..(249): n is a, c, g, or t
gccgacgctgatggaccctgatttatacaacatctctgcagtcaatccataactggcaataactaagaagtcaaaaaatgactgcgctcatgtggatgcatctacatgtattatcatggaacactttgactgtttattcagcatttactctaggccaggaattgtgataaataattacttatgtaatcatgtntaatccttgcactattaccaagaaggagatagtatngattattcatatntnatgantgagaactgaggcttacagagttcactagattatttgtctagagtcccccagctgggaaatggaggtgctaagattcttaccctgactgactacgtcggctaattca

SEQ ID NO: 502465 - DNA, 326 bp, Homo sapiens
ggatggcatcccctggaattgtgcaaaggccccatttaccatgaacaccttttgacccatgccctttaaagctgggaccctgagtgagggggagtgaaaggggcgtggttgaatcaactgtgttacaggcccgcatggaatattaggtagaggttaaaaacaaaaaatgaggatagccaggtgtggtggtgctcccctgtagtcccagctactcatgaggctgaggcgggaggattgcttgagcccgggaggttgagggtgcagtaagctatgattgtattagtgcccttctagcgtgggcaacagagtgaaaccgcatttttaga

SEQ ID NO: 502466 - DNA, 216 bp, Homo sapiens
tgaacactgtttcaggactgcagcacctcaacttgctctccctgtatgacaacaatgctgcagaccatcagcaaggggctctacgcccctctgcagtccataccagacactccactatagcccaaaacccatttgtagtgcgactgcacacttgaatgtggctaggcctgactcaccgtcctagtgacaaccccacatctgatgacaatgctgggg

SEQ ID NO: 502467 - DNA, 249 bp, Homo sapiens
gcgagtgatctagaggatcctggcaggctctctacctccgggagggagcgcatggaacctagacggggttctggtgtaccctgggataatggatgtccaggcatgggaccttgattttccacacggcaaaaggagggaacggaactaaatcatctccaaggttctttctggcaattagactccttatctctcagcaagatgatgtgtactcagcgtcttccaccccaacggggaccacctctctagcgg

SEQ ID NO: 502468 - DNA, 339 bp, Homo sapiens
agttttgggggttattttttattttaaaaaaaaaatgacttatttaccccaagctatttttttcccttctggctgtaaggtttggacagactggtttggtaaaagctaaacctttgtgtcttttgcccttttaaaggaattgttaacattggaattgagggtatggacaaaaaagttggggtccaccccctttaaaaagtcatattttttcccaaaaatagaaaatccttttacataagaattttaaggatttgccataaatatatggaaatagattggatggattcctatatttttatttttccttttattattaagtaaaagatccttaaaagtgaa

SEQ ID NO: 502469 - DNA, 769 bp, Homo sapiens
tttttaaccaaggccaaattggttcataatttttttggttaaaaagtggggtttgtgccatgtgttcccccagttctgggttctctccaacctcgctgtgggcctcaggtgtgaactcgtgccggcctctcgtgccttctctatacagagggcgtgggaattggccaggacttaacccaccaaacacgtgtggacctctcctttatcttttataaagtctccgcggtaacaaaagagttcgcttttgtgctccctccagtgaaaccctgtaaaacacttgcttgtggtgtgtgtggtctctctctgttgtcgcaaaactcgtggacactctttttctatcagagtgttcaatagagagagtggtgggctctgagactatgtgagagagtctatacaatctctcactcgcgtctcagaatcgagtggtgcggcagaggagagaaaaaacccgatgtgtctcaaccacgacgaataactactgtgggtcgtctcatccctagcgtagagcggcgccacaatacagacaacataacgctctcccgtggtgggaaccaaccccccctcatggggttgtcgcccactataacatactaagctatcataaccgcccaacgttgtagtaatactgtagtaactaatccacgtgcggcgccaccaccacactcttgtttttgcaaacacatatacacccctggtggtgagcaccccggcaggcacacacaataccaaaaaatactcaacccacacgctagtgtggagcaactcaaaa

SEQ ID NO: 502470 - DNA, 801 bp, Homo sapiens
ggcctgggaaggacagagggaacgggtcctggcggctgctttgctaaagggcccgtgttctgttgcgggaagcttccgggggtcgctcgtgcgtgcgagcccaagcccctcctcacatcacaacttccccgttcctgcgtgccccgtgagtcgagccaaagtcggctaacggtacttctcaggtccgccagagatgtgtgacttcagaacgcgcagctagatttctacgcatacatgttgcaaagtaactctggagttctgtatggtagtaaaatgccggataagaaaattctgcattgaaagaatgtctaactgcttactataatgatccagccttttaatgaatgaatgcaaacatggaatacctgaaggaaagggaaagaattcatgaaaagctggaattcctacgaagaaaaggctacagaagcttccaagcaagcatgtaagcgagatactcgaaatgacattcaggaactctaatattccatggaaagctcattttatagtcctttaacataatgggatctcaagccatgataatgtttggggcttttaccctttaattaattgcgaaagattattgagctttcaatctggacaaagtaaacttatttttaatgctcagagaagaaactccacatgggacaacttggacacacgaaacaatggcattggtgtgcgcgtcaccacacggttggcccgaatgaatggagcttgtttaggcacacaagccgttgttgatgcgcgcgggtccccgcacagatggtgtggtgtatcaagtgcgggttccgacagtggctc

SEQ ID NO: 502471 - DNA, 805 bp, Homo sapiens
gggagtgtctgcatgccatgtctgtctggtaacatcagacagaagcttcagctgtgtgtgcaggtggcctctaaggtaccaggagcagctgggcacgcaggccctggatggagctcttagaatccttcgagagttacatacaggactctacatacttcctgggctcaatcgtgaacttcagccgaggacccagatgtgcatctagaaactaacagttcaggctgctcgtgtaatgacatgggtcagagtcactggaggtggacgtaggatatgccgagagtagcagcgtgatacaacgccatcagcgtgtgaagaacttcctgaaggagggcaagctcacgagatcacagacttcccctcatcatcggtgtgtgatcgttttggcttatgtccatgagccttggtcctataatttatgaccgcaagcagacctgccagaggtacattgagatctacgtgcagacaggtcaacccgtagccggacccaggtgtgattggagggctgcttgatgtggattgtgctgagcgaaagtgactcaaggcactcaatcatgggccatgtgcagcggaccaggagcctcgtacctgcgtgagtgaggcgtggcagaaacgtacgcacgcacggaaccatacggactgcacacgacacggacagcagacagccatgcgaagaggaaggcaccgaagaatccagggaagcgcactgacgagagaaggcctggcgcacgcacacacagcgccggggacagaacatctaacaataggagggggccaccaacaggacccgcaagcgccacaccggaga

SEQ ID NO: 502472 - DNA, 439 bp, Homo sapiens
  misc_feature (17)..(17): n is a, c, g, or t
  misc_feature (32)..(32): n is a, c, g, or t
  misc_feature (78)..(78): n is a, c, g, or t
aatgttggacctgtccnggtgaggggataagnggattaccccaaatgttatgccagatttttttaaataattataatngggaaataatatatccacccaaaatagaaagtccttagagccttccttttaactaaccagtaaaatacatgtaatatgttttataattttccccaaattatttgtaattattgatatagcataattagtgtgttgtatactatcagaatttaatatttaaataatgattgcagagtttgaattctgggggtgatatattcaaagacataaattaattatattaaccctcatgttatgagctaagaaaaaatttcttgagaaagcagtggggcaatgtgtccttttttatgattaattcctaagctgtcactaaaggaagaataacgagtttgctataaatatgcattttgacaaaaaaaaa

SEQ ID NO: 502473 - DNA, 435 bp, Homo sapiens
gggacctttatatcagagaacacctattatgttctgactagagataacccacttcagggcatctttcaggatcatagtgcaactgcagtcagaatagcgcgtactatgcccacgtagggacttgacctgcaagagcagtttctccacctctggggccaaagtctcggcacatctcagcagagcccatggtgctcaaagtgcacaaggacagagacattgtaatggctgaatcccctgactcaggtcaatagcagggttagggaggacgggcagtcgaacctctgagaaaatcagtcctttacaatacccacaacaggcagtcccctaggatttccaaggtccctactctcccatctccctaattccaagtgattgccagaaccctctcacttcttgatgctgttggtaatgagcaggtgggcatcgtgcctctca

SEQ ID NO: 502474 - DNA, 105 bp, Homo sapiens
tggctgatctagaggtccccctcacattggcagtggaagtccccctgctgctggcagagtttatgccaggcccacttgaaaccatcccctacacgtgtccccgtg

SEQ ID NO: 502475 - DNA, 1034 bp, Homo sapiens
tgtgactcatgataggggctcttgtaaagtcacagctccgtggctctccctctccctccccctccccctctccctccatctcatgactccctctctctcctctgtctccctactctctccatggtctacctctgatgcctagctgaagctggatgtagtgccggcatcttggtcactgcaagctccctgcctgatactcctgcctcagctgcctgtgcctgggattgcaggcggtctgccgcctatgcctgactggtttgcgttccacttcttataatcgctggagaacggaggtttcgctgtgttggccgggatggtctccgagactcgtaaccccgaagctgatctgccagaccttaggatctcccgaggtgccgggtatcgctaacaggagctctcgtcccacttcagtgttcaatgttgcccagtcctgaagtgccagtggccatgatcctcaggatcgattatcaacactaccaccttaccatgccgcacgtgccttggcaataccacaaagtgcctgagatcgagctttctgcccggccgacaacacccctctgagaaaactgagagaacatcctgtgactggtcagccccatcgtctgggatgtacacgaccccgcctattgacccggcgccagctctggacacgtcgaggcaccgcttggaccaggttgcccatctgaactgaaggtgcttccctggcccgggccgcccagtactcggacattagcgacagattctctgccccggggcccgaccgggagttgaagtgccccactgtcacggcagaacccatcggtgacagaagggacgccttagccgaccaacacgtctcaaaaatgggaagccccgcccgcagcagccccgtgaagcaagatcctacctgtagacccgcagtaagcatgcagaccacagcgagttccgcacacccacgcacaccgacaagactggccaccccacacagacagacaggacgcaaccgaccgtgtgtagaggacgcacccgcaaaagcaacaagccagcacacacaa

SEQ ID NO: 502476 - DNA, 169 bp, Homo sapiens
catgcacatacaggcagacacacacagctgcatgcacacaacaggcgaacatgcacacaggtggccacatacaaggcagatacacacaatcacatgcacacacaggtcgacacacagtcgcatgcccacaggtggacacagccacacacagatagacacacagttgcac

SEQ ID NO: 502477 - DNA, 524 bp, Homo sapiens
  misc_feature (12)..(12): n is a, c, g, or t
  misc_feature (32)..(32): n is a, c, g, or t
  misc_feature (128)..(128): n is a, c, g, or t
  misc_feature (233)..(233): n is a, c, g, or t
  misc_feature (326)..(326): n is a, c, g, or t
  misc_feature (508)..(508): n is a, c, g, or t
attttaccacgncttaaaagttaagcatgtgnaacaaatctcttaggaccattacttaattttaaacttaatcagtgtgtgtccacagagcaccagtgggcttcgtgagttcttgaagtcactttggncccaaaagagttatcgcccgggtctagcaatttagcagtacagctgttccacgcgggccagggcgggcatgaagtaagtcccgccgactacgtgcccggcacagntggtccctgcggcgaacgttcgggcgctaccagaactccgagctgctgatcagcaagctgccgctcctgcgagagtcggcgttggacccgtgncacgagagcgaggctgaagaactttgtgacacaatagtccacctccctgcaaaggctctgtcagagactcacatctttcctgatggatagctgtgaagcattctcttacccaccctactgcatgttgcaaagtattctttaaaatgaagtgagtaaaatacttggatgacgttatcttgagnccaaggaagattgcta

SEQ ID NO: 502478 - DNA, 197 bp, Homo sapiens
tcgtacgtcccaactacttacgacttacttccgaccgcctggtcggctacgacatctgacttccggatgacccgaaaactcagaatcggtgttggtatagaatggggtctcctcctccggcggggtcgccgtacggtggtgttgcggttgcggtctgttagtcgtatagtgatggtccgagcggagccgggtaccga

SEQ ID NO: 502479 - DNA, 240 bp, Homo sapiens
atgtaatatcactgaacagcaacgcgccccagaggtggatagtctgcagaagctctcaacacacatgggctggccaggaaccatatcaacaagggcggcatcaccagacttcaagaatgtagggccatcttccagctattttaccatgaacggcgatccatcttattccttcgagctcagcataacttgcatgcaatagtgagcctgtgtggcaataccaatacagtgggcatacgccgg

SEQ ID NO: 502480 - DNA, 84 bp, Homo sapiens
gtgtcgagttcccaaaaagctccgcaggggctgtagggaggttgaagcatatgaagaaaacaccagccttgaacagatacgtag

SEQ ID NO: 502481 - DNA, 146 bp, Homo sapiens
atgagtaaatcttgggtagaggctgcggagcatgatcatgccactacagtccagcctgtcaacagagcaagaccccgtctcaaaaaaaaaagaaggtcctttcccacaatgtgtggtgtgaagataggtgtctatgcaaatagctg

SEQ ID NO: 502482 - DNA, 463 bp, Homo sapiens
  misc_feature (31)..(31): n is a, c, g, or t
tcactatttgggcagggagttcaaaaatagncaccaataaaatttgttgcctagattgacttttcctctcacaataggtttctctgaagcatgtgatgcttgctgtttgatacagcattttacccacagtagaacttctttcagagttggaattaatcttcccaaaccctgccactgctttattagctaagtttctatgatattctaaatccttcgttgtcattcagcagtgttcacaaggagttgattccatctcaaaaaaacactttctttgctcatacatagaaagcatcttcttattttttaaagttttattatgggattgcggcaattaataatggaaaagcttgttttattgtaaaaattaccagtatgtgacacagagacaagaagcaagcagatgccattggaaaaatggtgccagtagacttgcttgttgcagggttgccacaaaccttcagtt

SEQ ID NO: 502483 - DNA, 786 bp, Homo sapiens
  misc_feature (12)..(12): n is a, c, g, or t
  misc_feature (23)..(23): n is a, c, g, or t
  misc_feature (51)..(51): n is a, c, g, or t
  misc_feature (277)..(278): n is a, c, g, or t
  misc_feature (280)..(280): n is a, c, g, or t
  misc_feature (283)..(284): n is a, c, g, or t
  misc_feature (286)..(286): n is a, c, g, or t
  misc_feature (292)..(293): n is a, c, g, or t
  misc_feature (297)..(297): n is a, c, g, or t
  misc_feature (300)..(300): n is a, c, g, or t
  misc_feature (303)..(303): n is a, c, g, or t
  misc_feature (309)..(309): n is a, c, g, or t
  misc_feature (312)..(312): n is a, c, g, or t
  misc_feature (315)..(315): n is a, c, g, or t
  misc_feature (318)..(318): n is a, c, g, or t
  misc_feature (321)..(321): n is a, c, g, or t
  misc_feature (323)..(323): n is a, c, g, or t
  misc_feature (325)..(326): n is a, c, g, or t
  misc_feature (334)..(334): n is a, c, g, or t
  misc_feature (343)..(343): n is a, c, g, or t
  misc_feature (355)..(355): n is a, c, g, or t
  misc_feature (358)..(359): n is a, c, g, or t
  misc_feature (365)..(365): n is a, c, g, or t
  misc_feature (367)..(367): n is a, c, g, or t
  misc_feature (372)..(372): n is a, c, g, or t
  misc_feature (382)..(383): n is a, c, g, or t
  misc_feature (385)..(385): n is a, c, g, or t
  misc_feature (397)..(398): n is a, c, g, or t
  misc_feature (403)..(403): n is a, c, g, or t
  misc_feature (407)..(407): n is a, c, g, or t
  misc_feature (409)..(409): n is a, c, g, or t
  misc_feature (427)..(427): n is a, c, g, or t
  misc_feature (430)..(432): n is a, c, g, or t
  misc_feature (434)..(434): n is a, c, g, or t
  misc_feature (439)..(440): n is a, c, g, or t
  misc_feature (442)..(442): n is a, c, g, or t
  misc_feature (446)..(447): n is a, c, g, or t
  misc_feature (449)..(449): n is a, c, g, or t
  misc_feature (452)..(452): n is a, c, g, or t
  misc_feature (458)..(458): n is a, c, g, or t
  misc_feature (460)..(460): n is a, c, g, or t
  misc_feature (463)..(463): n is a, c, g, or t
  misc_feature (468)..(468): n is a, c, g, or t
  misc_feature (472)..(472): n is a, c, g, or t
  misc_feature (478)..(478): n is a, c, g, or t
  misc_feature (483)..(484): n is a, c, g, or t
  misc_feature (488)..(488): n is a, c, g, or t
  misc_feature (490)..(490): n is a, c, g, or t
  misc_feature (493)..(493): n is a, c, g, or t
  misc_feature (495)..(495): n is a, c, g, or t
  misc_feature (500)..(501): n is a, c, g, or t
  misc_feature (505)..(505): n is a, c, g, or t
  misc_feature (512)..(512): n is a, c, g, or t
  misc_feature (514)..(514): n is a, c, g, or t
  misc_feature (517)..(517): n is a, c, g, or t
  misc_feature (520)..(520): n is a, c, g, or t
  misc_feature (523)..(523): n is a, c, g, or t
  misc_feature (526)..(527): n is a, c, g, or t
  misc_feature (533)..(533): n is a, c, g, or t
  misc_feature (538)..(538): n is a, c, g, or t
  misc_feature (542)..(542): n is a, c, g, or t
  misc_feature (557)..(557): n is a, c, g, or t
  misc_feature (560)..(560): n is a, c, g, or t
  misc_feature (564)..(564): n is a, c, g, or t
  misc_feature (567)..(567): n is a, c, g, or t
  misc_feature (571)..(572): n is a, c, g, or t
  misc_feature (576)..(576): n is a, c, g, or t
  misc_feature (582)..(582): n is a, c, g, or t
  misc_feature (586)..(586): n is a, c, g, or t
  misc_feature (593)..(593): n is a, c, g, or t
  misc_feature (595)..(595): n is a, c, g, or t
  misc_feature (600)..(600): n is a, c, g, or t
  misc_feature (603)..(604): n is a, c, g, or t
  misc_feature (607)..(607): n is a, c, g, or t
  misc_feature (609)..(609): n is a, c, g, or t
  misc_feature (611)..(611): n is a, c, g, or t
  misc_feature (617)..(617): n is a, c, g, or t
  misc_feature (621)..(621): n is a, c, g, or t
  misc_feature (631)..(631): n is a, c, g, or t
  misc_feature (633)..(633): n is a, c, g, or t
  misc_feature (637)..(638): n is a, c, g, or t
  misc_feature (649)..(650): n is a, c, g, or t
  misc_feature (652)..(652): n is a, c, g, or t
  misc_feature (654)..(655): n is a, c, g, or t
  misc_feature (662)..(662): n is a, c, g, or t
  misc_feature (668)..(668): n is a, c, g, or t
  misc_feature (671)..(671): n is a, c, g, or t
  misc_feature (674)..(674): n is a, c, g, or t
  misc_feature (686)..(686): n is a, c, g, or t
  misc_feature (693)..(694): n is a, c, g, or t
  misc_feature (704)..(705): n is a, c, g, or t
  misc_feature (712)..(712): n is a, c, g, or t
  misc_feature (715)..(715): n is a, c, g, or t
  misc_feature (747)..(747): n is a, c, g, or t
aacatggcgggngtggaggaggnagcggcctccgggagccacctgaatggngacctggatccagacgacagggaagaaggagctgcctctacggctgaggaagcagccaagaaaaaaagacgaaagaagaagaagagcaaagggccttctgcagcaggggaacaggaacctgataaagaatcaggagcctcagtggatgaagtagcaagacagttggaaagatcagcattggaagataaagaaagagatgaagatgatgaagatggagatggcgatnnanatnnancaaatnnaaanaanaanaaaaanaanaanaanaananannaaaaaaanttgaaaaanaaaattccttanttnnaatatntnaaatntattttaatnntntatttttaaaannaaaanaatnanaataaaaaaaaaaaaaanatnnnanaaaanntngttnnanaantaaaantnaanaaaanaaanaattanattanngaantnaananatttnnaatnatttttnanaanatnganaannaaatanaaaanttanaaaataactaatcanctncatnaanactnncatnaaaatnatanaaatttntnaaaanttnnaanantntttaancaanttaataaaananaatnnattaaatgcanncntnncattttntaatgnatnttntcttaataattntgctgcnnattataattnnaatgcgnctnaaaaaaaactattaaactatgcatgcaatttntaaaatagcatttgcaaaaatataagctgctagcattat

SEQ ID NO: 502484 - DNA, 349 bp, Homo sapiens
cgctgggttctcttgcagagtaagccatttggggtcatcctgaagcctggtgccgctggccgagagcgttggtgactctgacggcggtgtggatggagtgcttccgggaagccgcctataccaagaggctcggcacagagaaggaggtcgaggtgattgggggagcagacaagtaccactccgtgtgtcggctctgctacttcaagaaggcctcaggccagcctgccgggccggacaacaaagagaactgcccagtgccaggaaagccaggggaagccgtggctgccaggaagctctttgccccacagcagattctgcaatgcagctctgcgaggaacgcacgtcgggt

SEQ ID NO: 502485 - DNA, 817 bp, Homo sapiens
  misc_feature (168)..(168): n is a, c, g, or t
  misc_feature (470)..(470): n is a, c, g, or t
gcggtccgtgctggtagcctgggcggctctcctccagctcctttctcgtggcgtgaacctggtggtgatgcctgcccacccgagtgtgccggagatctagcgcttcgttaccttgctgtaccgccatggagaccgttcaccagtgcacatcacactaatcccgatggnaccccataatcagagcaagacaggaactggtgcccctagaggcggtgttggtcaggataaacactatagtgcagggagatgcgtacatgcactggtgaagcgtgtggccatggtccctggctgcgcagtcgactctatgcacgcgcctgtcctaaacgcctttcttattcacctcgtgccatatgcagggctttagttggtgacggaaggccgagcgaaggatcgtgtctggaactcggggaagcttcctttctactgtatgctgtcctgcagtgcccaggctctgtgcctgtgagcctccntttccctcgtacccaaagcgggggactgtcatgtcgctttcgagacctcgcagaagaacaattgcgtccgtttgagtccacgtccagtaagtatcccctttgttgtcgagcaacccttgtgtgtcctctatttgcaatcatttgcaggttgcaaactagggtgtccgtagcgtcgagagggctcttccccctgatgtggtgggcccccctagttgttcgcgccccgagtttgaatggtaggggccattgcttcagcttagaaagaaccgacgtagcccccggggcgaggtaccaactccgaagaaggttgtccaagcatattgcacgaggtttgcttcttggaaccg

SEQ ID NO: 502486 - DNA, 1568 bp, Homo sapiens
  misc_feature (363)..(363): n is a, c, g, or t
  misc_feature (489)..(489): n is a, c, g, or t
  misc_feature (636)..(636): n is a, c, g, or t
gtgcactcgatgcggctgctagggcggcgatcatcgtctgcgtgggacacgttctctcgggcgacgagagagatccgggacgagttttgtagtcatgcagagaaatgcctgtggacacgtactcgcatatattcttgtgtatggaagtcgccgcatggcgatcggaggatcgacccaggtcgatgcacccagcaatgtcagacagtcgagcggtcagaacatcacagacgtgcgtaactacaacgcatccaacgccgtatcttcaacgtggcgtggcatacagaacgcgtacatggtagttggggaagacgtacgtgtctacgcaagacaatgagaagacgaacgaagcgggcgccacatggnacattacatccgagcgaaaaatgactgaacatgagggggaacaccgtcggtgggagcccacgtgtaaggggatgaataaacttggaaagggatgaaggagcagcacaaggaaaggtacgtgcatanggataggagctagagagaggaagcgaggagaaagagcacgagtaggtgtacctggacatgtagatgtgttgaaatagaggtgcattggatagaagtggctgaggagacttgtacgagagataggatgagtcaaggattcatattgtncgagaggggtcgacgggcgccatgtggtaggacttgaattagaattggaggcgaagtagaacctgtactgatgcaaaagtaaacaactagaggaatacgactaggtagaggcatcacgaacagactgtattggagtcattagacaaggcaaaggtcatttggcgaaaggctaggaatttaactggggcgaaagcaagacggtgaaacggactggcgcataggaatgatacaaggttttctacacatatccacggtggcgtggaggtatactgcgaaaaggtgggaggttaactgacgtaaccgtcggtaaaacaaaggaggggcgcaagaggggtgacacaattggcgagaagcggggaaggggaaaaacacccgtcttgaattagtaggaagccgtgggaaggtttcaaaccggaaacttttaccaccgaacatagggaactgtgggatggaattcgccagaacacaagttagacggttgttgggcttaaccgggacgggaccatacttaagcttcgtgggacacaggaatgggcaaaaggttatgaataaggccgaaaaaggcaggatggggaagagaacattggaaagcgtgcgaaaaaagggtctgagtggccacaattggtgtagtgtttaaggagatacaaaacccgggggggcgcgggcgaccaactgggtggcacggagcgtgttccagagattgacccacccttaccacattgctgtgacgtttatattcagacaaattatccacggacacttgtacgcggggggtgaaccccgcgagtttcatatagacactgagacgagaaacacacatgtcaatagtgcgtttcacaaccaacaaacgcgtgcccgcacaaatacccacaaggagcagcacacagcaccaaacagatgatagaggacacacagcgcgcaaacacaacagc

SEQ ID NO: 502487 - DNA, 1721 bp, Homo sapiens
gttctagatcgcgagcggtcgccctttttattttgatcggtcaccctgaatgttaatatttcttatcctaccaggcttcggaataattctcccatattggaaactaactaaccccggaagaaaaaagaaccattcgggatacataggtatggtgctctggactctatgtattatcaatcgggtctgcctaagggtttaatcgttgtgagtcaacaccattatatttatcatgaaagagaattaagacggtacaactacacgagacgcaatattttacacctctccggcccacgcaatacaatctactccgcttattcccctaccggagcgggtcaagacgataattgtacgcttagactctcagcctagaactatcacatggcgaagcaaaatattagaaatgtgaactctgggctgtgcaggtgtgcctctgtgacgcgccatagcgatattcgattctctattcttttctcaaccgcgatcacggttgagccctgtgcactgtgagccattgtgtgatttttgtaagctaaacactctcaatctcgccgcttcaggaactatgtctgatatcgataaacacgcggacacacgcagtatacgataacgctttgggtaagggcatacaactttctcgcatctataagtgtttcctgtattctcataataagagcgaggccgtgagtattgtgtggcacatgtcaaatacgagaggggccatgtcggacttttcacgctgtgaaagtttgtaccctcataatctctctatctaaggggccattaagaagctcacctatgaggcagtctcgataaaaccacatatagcggctcacagaaacaatgtacccaattcttcaccgagctttaggtcgaaatatgtaaacaactgcggagagcggataaaagagttttgataaaacccttaatatcatttttcgcccaacacaaaaagacatcattgattacctgcggggaccgataatccgcggggcacaggtggccccccgcgacagcggtaataagcgttcggagaatacgataaaacccctcaggcagtgtggcaatttacccactcacacacgctgttggcaacagtttagttcgttatatgtccatactccgtggatcaggggccctccacatcttcccaacttttcgtccttacgtataatacgcaggcgcacggtccacgtcactgtcaaccattataaacgtgtatcatcccctgtggcaccttggggacgatcagaaggcgcccatttccgcgttttagcgcaaacaggcgaaaacagagggttccggtaaacctatatgctgtaagacaaagaaaaacgcgcattctccgttataaacctcggggggagcggcggacatacaattggtgatatgggcgcccacgccagctccgaatagctccaacacaatattctaatagacagccgcggttatacttattaaaatatctctcactcagacaaacaaagagggacgggagaatgagtaggcaccccccaaacagtcgaggtgttaagtgcacacaccaacaagtggttgcccgtccacttgtctttaatacaagcaaccaacactagtcagatctagcgtctacgtagtaaacacacaaaacaaaagtagagggggggctcagataaattacagacgagcaagacgatactcacacgaccttattagaggctgatacaaagcgagtataaatacgt

SEQ ID NO: 502488 - DNA, 1006 bp, Homo sapiens
gttcctgccagagcgagctgcaccgggcgctgtgcgcggctggccgcttcacagagctgcagccacgaggacctcatacatcatccccatccccgaactgcgacctgcaaactgtgcaacttccaccccaatgcagtgtcacccagctctgtgatgggcagctgtgtgcaatgtgctggtgtgtggacctggaagacgggggtgaaggcttcctgtggggtgccatggatgccaaagtggggagcttggacttgccaccacgctggctgacatgcttatcgagagtgaggcctgccagcaggccagtggactcagcgtcccctgctactcctgtgctactggaggctgcagagctgagccagagtggagtctgagtctgagtcctgtctactgcctgactggccagaagtttccctcaaatgcgcgtgtgcaacgtgtgcgtgtgcgtgcgtagtgtagatagtagtaaagcgagcatgggtgtgcccttggggtaagccagagcctggggtgtactctaaggtagtaacaccgcccaagaggactgacgctctggcacttagcccaagacggtctgcagccctggatgatgtttccagattcgatcctggatacagctcactcactcattccttcactcatccgagaccacctaacaccgacttactgaccatggtacctaacgtgccagctctagtaaacagacttggggaggtccaatactgactaccctctgaccatggcatgtgaagaaatcctaataacggagagattcacaccctgtggggcgcaagacaaaatctcatttacccagacccccagaccacagcgccacgtcacccatgtcccaactgccatgtcatctcaagaaaaccgacacgaggaaaccttagaaaccgtggtgtatacatttggataagggaccaacagcacaacacacctcagatcaacaattgagcaccatatatcttatcctgactatcaaaagattgactggacacgatca

SEQ ID NO: 502489 - DNA, 375 bp, Homo sapiens
tggatggccctcagggtcttgggggcccctttggtttgaggggggggaaggggccaaccgcccagttgtttagggtttttggaggccgggctcccgtattttgcttgaaaaccacggggcctttccccagttggggtgagcgctcagagggcctggggccctcattcttgcccacgcctcccggaccccagaacggggcttcaagtcagacagatccctgccttggtgggcagtttttccttccaaggaggaaggggaagaaaagggcctgtgggtggctcaggcccaagcaggccccggggtccaccccagccccgcccagggtgttgccagtgcccacttttacaaatttaatttaaagcaagtcccgtttta

SEQ ID NO: 502490 - DNA, 941 bp, Homo sapiens
ctcacaggaagggaggaaaacaggaatcacgcagaagcgtaagtccccctggcccgggaaggggtgaagggatgtgcgggggggcaggcggccgagcggggtgggggcggctctgcccttcctcgcccccttccagggcctagactgggaaggagagggatgccgccaagctcgggtcctgcagggccccggccttctggtgtgggatctggcttgggaaggcccggcgctgcggctgctgctgaaattcttgagactggttgacaagggatcccatggtttcatttcgcaccgggcctctccagggatggagagggtcctgactggcagtgtcgaagccacggggtctctccttggtccctggctcccctcacagccctccctgcccatggagctccgggcttccgcacacatttctctcctttttaacggctcatttctttgggttcagcagtacctgggtccccagtgccctccttctgaggctctctcctttgagtggccaccctcccccagaacacctggagcgcggaactgggagtgccgtggacaccagccctccctggcccagagcctctgcctctcctgggcctcccaagagtaaaacctctccacgccagaccaggctgaaacctggatttgaaaccagcgctgtcgcactccttgaactgtatcaggggttttcagtagcgggacgggaaccagaacccaaaagaggtccttccttgtcttgaattcctcccgactgagttagcatcttggagggtcacggttcaggaattcagtatctgagaagagaaagagaccgaaagggggttccccatgaggacttgtggctggaaaaaagcgtcaactccatacataattgacgagagttatctgggccagatggaggacgtgacccggaaacactccaggggtcggaggactgggcgaagggg

SEQ ID NO: 502491 - DNA, 267 bp, Homo sapiens
  misc_feature (182)..(182): n is a, c, g, or t
gatcctcggccctggtgttgatgagtggttctctgaattcatctggagagactggatcacgctacaaccttagccatgcccttgccttgttttggtctccatattaccacccatgatgtgaagatctggaaaatctttcttaaccccagaagatgccacctttacaaacacagagcccatanaacgccaaatgacgaacagacaggtgagttctcccagcccaaaccctcatcatagtagttctccccccgaggttctggggccggt

SEQ ID NO: 502492 - DNA, 88 bp, Homo sapiens
ggcctgtgtcatacgccattttgtgagaagcaaggggttctccatgtttcctgagcgttttcttcgctcttgcctccgccctccttta

SEQ ID NO: 502493 - DNA, 260 bp, Homo sapiens
  misc_feature (138)..(138): n is a, c, g, or t
  misc_feature (173)..(173): n is a, c, g, or t
  misc_feature (246)..(246): n is a, c, g, or t
tctttttcatcgatctcttcctttgttgggggctcacaacgccagagcgccggaacccagcggccaccttcacgcggcttctcggtaaatacttcatcatcgctatacgattaagcgtcacgacaggaatattgcaanggccgtgccaactcaaaaaaaccttaaaaatcaangaaaataaatcagacgttggatttttagccaaaaaactgtcgcctattgacgacaggctaagtcacacaaaantgaaatatagttat

SEQ ID NO: 502494 - DNA, 955 bp, Homo sapiens
ttatgtccgtgggtgttgcctccagctatgcccgggttgcgtgcggtccggcccccggccggagacccttctgattgggcttcgcccggcggacgatggtttttgctctcctgcgggggggaggcgagtccttgggttcccgattagagtggtgctggggtgatattcagctgcgctgctccggtgcgtggggtgtgcgttgtttgaccgcccccccctgtggcccggcgcgggcttctggtgggtctccccccctgcggagggccgtggtccccctggtcctccctaatgggcgggtgtccaagccccatgtgtggagcaggcgcgccgctgtgctagtgactttgactccgcagtagatgcgcggtcatcatcgttgcgatgagttcacgcgcacgtttttttccacgggagtccccctctctgttacaagagacgcgttcttttagaaaaaacgagtctctgtcttctggtagacagatcgtgttagtaatatcgccgcccccccgttgtagaggtgaagaaaattaattgttggggtaacgaaaaactttttgtgggagaataagggttgtgtacgtggtcctgttcaatacacgcaggcgctcgcactaatagacgggcgagagggtgagtgtttgacccccctcgttggggagagtaccacgcaaattttatatcccactgaaattgcgggacaaacccccttctttcgcccgtgatttgctctcccgctagcatcacccacctgcaatagacctaccacccctctttctcaccagctcttctaagaacggaccaacaaagtcttcttatcatctctccatggcaggaaaaatatgctttgcatgcccctttcgttgtacaagacttgtccccaaccgcgtcactgtttaaagaacaacccccggtacaattccaagggaaaactcccctttcgtcccaaaaaaaacaa

SEQ ID NO: 502495 - DNA, 458 bp, Homo sapiens
  misc_feature (180)..(180): n is a, c, g, or t
ttagaggacctccattggatagcggatagggagtaccttggtactgactctacccgcaggcctggggtgggtcaggcgcaagatgctctgaggctcacatccagcaggcgtgtgctggcacccagtgtgttcacctcagtcacattaatccggtactggctccagaactcagccccgtgnacaacacagcgggcagcccctatgggatcctgtgggcatggccaggcgcctgtggatggactcctcctctggctatcagctcctaggactgtcttcttcctgtaggaggtgaggtagcgggtgggtaaaccgctgatctggctgggactccaagtgcaagagaagttctcatagtcggctgcttgcgaggagacaaacagggcgggctggagggtagcccaagctgcagggtcactgtgcccccaagtgcaccatccagggtctggcagatgtaggtg

SEQ ID NO: 502496 - DNA, 103 bp, Homo sapiens
tacctcttcatgaaataagcggaggtacttccctggggaatttcctttctctttctttctttcgagacagagtcttgctctgtcgcccaggctgatgggagaa

SEQ ID NO: 502497 - DNA, 341 bp, Homo sapiens
  misc_feature (92)..(92): n is a, c, g, or t
  misc_feature (95)..(95): n is a, c, g, or t
  misc_feature (139)..(139): n is a, c, g, or t
  misc_feature (151)..(151): n is a, c, g, or t
  misc_feature (184)..(184): n is a, c, g, or t
  misc_feature (202)..(202): n is a, c, g, or t
tgtacgatcctgtcaggaaggggtcacacctgcacttgggcttgttgcccagtgtgcctgatccagcagtgggttccggtagtagacacagnggnggtccatgtacatgcgggcgtccagtggttcagggcatgggcangccatctaggtnttggaaaaaatcgtcatcatagatgcgctccgngtcaggacccacacggtnctggtggcttgtcacccggatatgtggatcatttggcgcacagctgcagcagccgtgtcagacttcaacttcgtgacatcccagggccggaaaagaaactgtcgattcagatttgacttctcaatggtgagttccagct

SEQ ID NO: 502498 - DNA, 403 bp, Homo sapiens
agaacagtcacttggcacaggagtcactgaaagggccgcagggtgctgtggtggggagataagaaccatgagagaagttggcacaaaggagttatgggacaaagggtccaagataggcagaaaagaaaattgtgccagttgatggggaagaaaagaagtcagagggcttagatactgagtgggacagaacatcttcatgtgcactctcatctcttgtagtcagcaacaggtatccacggggagagccctacatcatctgctaccctgaaggatctggaggtaagaggctctgggcagaggtgcagtgaccctgcagggcagccctccaacctcctcctccaggtgggacggggtgcccctctgccagctgagacagtccacacacaccccagccctaatgatt

SEQ ID NO: 502499 - DNA, 399 bp, Homo sapiens
  misc_feature (58)..(58): n is a, c, g, or t
  misc_feature (95)..(95): n is a, c, g, or t
  misc_feature (204)..(204): n is a, c, g, or t
  misc_feature (217)..(217): n is a, c, g, or t
  misc_feature (245)..(245): n is a, c, g, or t
  misc_feature (321)..(321): n is a, c, g, or t
  misc_feature (395)..(395): n is a, c, g, or t
gctgtggccctccagaacatgagcagaaagaaccgtttaaggccaagtaattgccaanccatggttggaaaacctcaacctaaggggaaagggtnccccaatgtattaaagcaatggggctgcctcctccccccaatccctcccctaacaaatccgttgtgtggacttcctcatcctaaaaggttagtggcttttgcttgggancagtgctctctantgatgttcttgctggtctccagacacantcctgttgcattaagacttgaaagacttgtagatgtgtgatgttcaggcacaggatgctgaaagctatgttactantcttagtttgtaaattgtccttttgataccatcatcttgttttctttttgtaggtataaataaaaacactgttnacaa

SEQ ID NO: 502500 - DNA, 403 bp, Homo sapiens
tgtcccacctgaggctcttctgcttcttaacaccacagagctgccttctttcctttcttacctaccacagtcttctggcctgcaagcgccgcgcattctctatctgatttggcttgtagtgccgctgctgcagcagctgccttatccacccggagcttgtgatacctggcctggcgaagaatggtgttccggcgcatggtctttgcatatgggtttagcttcaacatgattctcaagtttttcagtgggttcttctttaggactctgcgatggatcttcttgcgtggtgctcgaagggctctttggatctctgggcttttcaagattctgctaagatctgtattaatcatcttgtgcatgggaagatagtagttactcttgagggaagcggctttacgccaag

SEQ ID NO: 502501 - DNA, 640 bp, Homo sapiens
cgtggcaagatggcggacgagaaggacagggaagagataatagtagcagaatttcagcaagaaaaatcagagaggcgattgaagtcttgaccatgagtcgagataatacagggatgtgagagtagatgggaacaatgtatcaggtcaattaggatgctgtccatacggaaggagagctaggatgatcgtgatgcgaggtagaggaagaagaacccactggatacgttcgattcgaaaaatttcttccggtgatgactagaaatacttaccagaaagaaaatagcgaggaccaagttccaggaagatgtcctgccttcgagcttgggaggttctgagattcagctaaacggtgggtttcttactaaggacgagctgatcaagtatatgactgaggaaggtgagcctttttctcacgaggaaatggaagaaatgtggtctgctgcaattgatccagaatcaaatgcaattaattactaggactatataacatagatggtgatagatgaaaatgaaatgttctaaagataatttctgattgcaggaacaattttagaaatgcgttgttcttgttaatttcacatcttatcttaggattcctatatgtgatattgaataacttgtgacataattatttaagaga

SEQ ID NO: 502502 - DNA, 107 bp, Homo sapiens
ctgtggctatactcactctcatcactcttccaagctgccagaactcaccttagcttgaagttgaagctgattcagtgtcgattaagaaggattcacgttacaattgg

SEQ ID NO: 502503 - DNA, 134 bp, Homo sapiens
agagaagaaaataaatagcttggttgaattataagttattttagagtacgaggcttcataacttagctttttatttttttgaagactaaacacttttggagggtaagagaatagaggggtccgggctgtctaga

SEQ ID NO: 502504 - DNA, 150 bp, Homo sapiens
tcagctcagtcttcagagcagtttccctgagccctcaggacagctttttttattcatagtcattacttgtgcatttcaaagcacccgatggttgcataattctgatgataaatatggctttggaagacaagagagttaggggtagggtcc

SEQ ID NO: 502505 - DNA, 1556 bp, Homo sapiens
  misc_feature (49)..(49): n is a, c, g, or t
  misc_feature (189)..(189): n is a, c, g, or t
  misc_feature (1014)..(1014): n is a, c, g, or t
tcctcgtcgcgggcggtggagtgaaaggatatttctctcctccccctcnctcggggtgatgatgagcccccgtcgttttatatagtaactagggccgctcgctcttgtcgctggtggtgttgtgctctcctttcatcgtcgcagttgtgttgtgccccgccgccccgtccgggtttgggtgtggtgttntctgctgccgtctgtgcctcaagcaaatgtgacccgtcccgtgttcatctccaacaacaagggacgggtttgctctggtgtggggtaatatagaatgcgccctctcctccctcttgggctgtgtgctcgtccgttccactatatatatctttgcccttcttcctcctgtctcgtgatgaatgagagaaagtattggggttccgctaacacatcaggggaaatgagtattttcgtgtgttgtttgtgttgttccctgcctgtgggaaggaaaaaaaagaaccgccccctccttaatacatccggcgggggaggaagtagaaggaagagccccccagccgtgcgtcaagcaatccccccgccttccctccggaaggcagggaggtgtgtttttggcgggaagaaagataaaagctcgaactacctctctctctctcctcggggttattaccactgtggtgtgatggttctccagtggctctccctgcggtggcgtgggcggtgaaaaaggggaatatgtaaatttccgcccccgcggcgaaagcgtgcggtgttaaatagtggaggggtaagggcaaggaaggaaaaacaatgcgtggtgatgaaaagaaggggggtgccccaccaagcaggaagatttctcccccaccccgggcggaatgatatataataggcgggaagaaaaaataggcgggaaaaaaatagtttttccttcccttttcctcccccttgggagaatgtcctaacactcggccccaccaggaggggagaccctggaagaagttctcttttgttgtctgctgggggcaaccaacaaggccaacaggncttttgggggaagaacaagaagaattggtgagactcgctgaatccctctttttttggggttcctctggaagacgtactcacaaaaaatatttccacaaaaaacagggagaggttcctgaaacagtctctgtcacaatctctgtgtgtgttttgagagagacctttctgtgtgggtgtggggtgtctataacagagaaaaaagggagaagagaagagaagtgtctctgaacaccccacactccctcacacagagaagagaaataaggcaacccacacagaggagaatagaaaggtgtataagctcggctctgtgtcccgagaaaattaaaaaggtggaatgagaaatggcacaaaattatgtcgcctttcgtcgagagaggtgccctttctgagatgaaatgtggtgctggggggtttaatggcaaagtcacactttgagcacagaacacattaattgtggcacaaagttgtttgacttactgtttctaaccaaccagaagacaagtaactgtatgaggttaataaaagacatggacttacca

SEQ ID NO: 502506 - DNA, 124 bp, Homo sapiens
ggtttactgtcccccccttttcacctcctcattttttgggggtttttttgttttccttttttcaccctcctccctccccttagccatcacttttgggaagtaaaaaacttgatttagggccgga

SEQ ID NO: 502507 - DNA, 878 bp, Homo sapiens
gtgtagaaaaacaatctatgagaagtgtacttccggttgtctgtgatactatatctgggctgatctgaccagtgaaatgacattgccctataggacctctgaggttctatgtagcttgcagatgtacatagtatcccagtgatctgcaaaattaatgccttaccaagaaaaaatcttttcctctctgtatcagttaattctgacaggtagtgatatctgtcttcattataggccttatttccatatatctctatactttatagatattttagtatataaagaaaacagtctttctgtgtatacctacggatgagggtattattataaactgccaacaaatatccaagacatggtcaataaactaatataaatactttagaaaagagtgaccaggacatgtatagaaatgtctgttacctgtagaccttaaaaacaaacaaaaagaacaaaacagaatattggagcatagaaatcattatgatatactccttatatctccttgtaatcttatgtctcctgagtacatatcacacatacatgttgggggattcatgcatgctagattatatcaaggtgtaaccatggtgtctactatatgctgttgataaagcttatacctaaaaatgaaaacacagaggagataaagcgccccatccataacaatcggggactagctatgactaacaacagagaaaaaaacgaagaaccaacacaatgtgacagaaagaaagtaagagaacgcaaaagaagaaacaggagagaaaccagggggcaaggcaacacaggagaaaacaagagaggaagggaggggagagagacccaagaccaagaggaagaggaaaagacaagagcgagcaacacgtgagacaaaagaccag

SEQ ID NO: 502508 - DNA, 350 bp, Homo sapiens
  misc_feature (305)..(305): n is a, c, g, or t
gagtactcactaagcatacactacgacatgatatcttctgtatgtatacgtcataaaggagggaataatattagaggactgtcttccattgcacattcaaagtctatttattcaagctcttatgtgctacattacatcatcatagagccatttagataacctagcaatttctaagccacatcatttcaaatgtcacagaagtggttaagataaactactttatgcatctgtggataatgtcattatgggaagtttatcttaagccacaagtaccctttggcatacaattacgacaaccgattctntcattggtcctgtaagtgacattgaatactagtattattaaaaat

SEQ ID NO: 502509 - DNA, 287 bp, Homo sapiens
ccgggcacatccctgtggggacatgctaatatagtatttttggtagagacggggttcaccatgttggccaggatggtctcgaactcctgacctcgtgatcgtgtctagcctcggcctcccaaagtactgggattacaggcgtgagccaccacacctggacacgttactgaatatttctgtgcctaggtttcttcatgtgaaatgggattgttgtgagaacacaaagggattcccagggcagttcctagtgcatagtctggctgcctttgtgtgtgtgtgtgtgtgtg

SEQ ID NO: 502510 - DNA, 191 bp, Homo sapiens
gtagttaagcgaggaaatcatgcgcggtaaaaaaactctgcgttgtctgatggcgttggcgctgcccgccgcgttgctgatggggtgcagttcgccatccggcatcgcggttaaccgggggcaaacggtggtgatggatccttcggtgctgaccgccggcatttttgccgatacgccctctgtctcgaacg

SEQ ID NO: 502511 - DNA, 177 bp, Homo sapiens
aatcgagctcggcccaggtcagtcttactatttttaagcgctacaattcatgtggcaacaagtacattcacactgttgtgcaactattaccaccatccatctccagaactttttaattcaacccaaactgaaactctacccactaaacaaaaacttcacaataccgcctccctccag

SEQ ID NO: 502512 - DNA, 303 bp, Homo sapiens
gactcgggggaaaaaggtgagaagggggtgagagataaaacactacaaactgggttcagtgtatattgctcagatgatgggtgcaccaaaatctcacaaatcaccactaaagaatttacttatgtaaccaaataccacctcttccccaataacctagggaaataaaattttttggaaaaaagaatatgtgggatttttgcattatttcttgtaactgcatgtgaatctacaattttcttttcttttcttcttttattttttttttggacggagtttcactcttgttgcccatgcttcagagtc

SEQ ID NO: 502513 - DNA, 104 bp, Homo sapiens
ggtaccaatggccgtcgcaggcggtgctcaaggattgctgttacgctacgaactcgatcagcaggtgcgcttcaccccagtctccgaagacgactatcggcagt

SEQ ID NO: 502514 - DNA, 112 bp, Homo sapiens
ccataatcgagctcgctccattaacctgtatcaaacccttcatcaaaccctgtcatcaaacccttcatcaaaccctcgtacaagtagaccactacagccagcggttatttgg

SEQ ID NO: 502515 - DNA, 361 bp, Homo sapiens
aaaaaaaaaaaacccctattttttccatgtggttggcctgtttttttttggcccccaaaaccaaccctttttacccccgttacccatggggcttgtctttcccccccatgttgtccttttattttgctttggttcccccctatttcgttttcccccttggaaaacttaaccccccaaatggtttttgtttttcttaaaaccggccctttttatgggcccccttccccaccaaagattttttacttttttccggggtttacctttttttccggaacctggccgttttttttcctttcccaaattttttttttttttttgggtttttttaatttcctttttttaattaattcccccaattgga

SEQ ID NO: 502516 - DNA, 235 bp, Homo sapiens
gaacacccagcaacctgagcaagtcccggccctgcctcagcgagcccggcagcgtcccgggacagctcagtgaaggagggccagtgaaccacgagccagggctggggcttgcatgtcattgtctatgaacgcgtcaagactggccttgcaccgtgctatatgaacctccctgagactcactgagactgctgagtgaattctcgtcagtgtcagtgtgtcatcatcagctcatgct

SEQ ID NO: 502517 - DNA, 313 bp, Homo sapiens
acactgggttcgagttccactgggttcgagttcagaggagggccatggagacagtgctgacagcaaaggtacctgagacccgggcatctttgaggaagagaatgggatagaaggacagggcggaagtctaactggttccagcccacagacgggccatagcacagcagcagagccgcctggggaagtgaccgctgcaagactcctagactcggaaagggaggggggcgagactggaatcacagggagacatgtcacccaaacttcgagctttgaatcccattaatgacctggtcattttccaagcaactttctg

SEQ ID NO: 502518 - DNA, 841 bp, Homo sapiens
agtattcatttttttttttcctcattaaactttttaaagggggtcccaaaatcctggggccaaatttggggccaagtggttcccataaaaaagtcctgggatttaaaaaactaataacttaaaacggccacacgcaaaaaagaaaaccaaaggggcccacaaaaaaattctccttaccctatcggagggtatatacacagaggctataggtacatcataaacccagtctttaaactactaaagtcttaatggggccaattggaaacaacacagttctggaaaccggttcttccaccagtggtataacgcaggggggtgggcagggtcatacaggggatatattataccatatatagccttctggacgcttctggggcagacgtgggtgagactctaggcccaggccccaagacagctctattctgggcgccacgggctataagggatagagacccccccaacgggccacatcgagcgtgctggtcactctatacaataccacgagaaacacgcaaaaaagcgagaccccaaaagggtgggactcagtcctgagaaaaacgccctccaaacgacacaactatgagggggtctagacgcgacagaggagcaaccccccaatatatccacaacaccacagggggggcagggcaattacaaccccaaagaatatttcacaaaaagatatactaaggggcccaattcttacccgacaggtataataacacccagagaaacgggggcagatccatatcatgtataagcccttatacaggcgccccacgggaaaactctttgggccactgggccacaatggggcgaacgccggtgggggggaaatccc

SEQ ID NO: 502519 - DNA, 213 bp, Homo sapiens
aattccagtttgcttaagtactggggtttgccttgcttgcggcgagacatggtggtctacaggacgaacagacaacaacagcggcggcggcggcaggcggacgacgactcggttcacatcgggagagcagggttagaaagaaggagactccagagaaaatatcttaatcagtgccttttgacatccaaaataaattagaaataatacaaagat

SEQ ID NO: 502520 - DNA, 1226 bp, Homo sapiens
  misc_feature (1226)..(1226): n is a, c, g, or t
cgccagccgagccacatcgctcagacagcatggggaaggtgaaggtcggagtcaacggattaggtcgtattgggcgcctggtcaccgaggactgcttttaagctcgtggtaaagctgtgatattgttgccatcaatgaccaccttcattgagcctcaagctagcatggtttacatgttccaatagtgattcgcacccatggccaaattccatgtgacaccgtcagaggctgatgaacgggaagcttgtcatcaactggcaaatcccagtcacgcatgcgttccaggagcgagatccctccaaaagtcaagtggggcgatgctggcggctgagatactgtcagtggcacgtcctacttggcctgtacttctagcaaccagtggcagaaggcgtggggcatacagttatgcatggggggaagccagaaagggttcatcagtctcatgagcccactcgtgcgtgatgcccccatgttcgtcatgggtgtgaaccatgagaagtactgacgaacagcgctcaagatcagtcaagcaatgtcctccatgcaagcatcaacttgcgttagcaaccctggccaagggtcatccatgagaactttggtatcgtggaaggactcatgaccacatgtgcatgcccatcattggcacccagaagactgtggatgagccctccgaggaaactgtggcgtgatggccagcggggactctccagaacattcatccttgcctctactgggcgctgccaaagagtgtgcggccaggacatccatgagctgaacgggaagctcactgttatggccttcaggtgtcccaatggcaacggttgtcagtcggtggacctgagcttgacgacttaggaaggatccgtgcaaactattgattgactcaaggaaggaggtgaaagcagcagtaggagggcccgtcaagggaacatcagagactcactgacacccaggtggtcttccctgaataacaaagtgaacacacatccattcacatttgaaagacatggggtagcaattgccctaaagacagttagtaaggccaatccggatagaacgaatttatcacaacaggggtggccatacacacaacatcacaaagaaaaacgacgacaccacactatagaagagaaacacatgggagtcatcatacacaaaccacagtaaccataagaagagcgcatctgctacacatcggcttgcttttcgtggaaacatactagaan

SEQ ID NO: 502521 - DNA, 202 bp, Homo sapiens
aagcccccagattatattgaattagttgcatgcccgcgcaatttgttcttcccatgagcagcagagtcgagtgttagagtgcaggcaatccagagcggggagaggctgggcggagtttgggggcctggaggctgggcctggttacttggtgactgtgcagagccctctctggggggctgcagttcaatcttgttgggagctt

SEQ ID NO: 502522 - DNA, 554 bp, Homo sapiens
gggtgcttaattttgcatattgtggagtttaattttcatttctgattgttaatatcttttattcttatccaaactgttttccagatcttctcagttaatgaaagacgtaatttacttcttgatgttgtaaaagtaatcatcctttttaaaccaacttttttttgagatggaggttgcagtgagctgagatcgtgccactgcactccagccttggtgacagcaagattccatccccaaaaaataaaaataacaaaaataaaaagaatcagaagtatccatatgttgttgaggtattaactcacaatatacagataagtgaaagaacaaagggcaaaatagtacacaaatatgctgtgttttatctaagaaggggataatatgagtacactcatatacataagtatcttgttatatttttcttaaaaaactaattggccgggtgtagtggctcattcctgtaatcccagcactttgggaggcttcagcaggaggattgcgtgaggccagtggttcgagactggctttgggcaatgtagctagacccagtttctacg

SEQ ID NO: 502523 - DNA, 596 bp, Homo sapiens
gtttctggtctagagacaccacaaaagccgcggtgcttttgcaccagcaggtcgccgcgtctgaacgaccaatgagtgttttgtacgcgctcttaaagcgtcttacctaagcaggtgttctggaaacagcaccccgttgggcatagaagagttcaggggaagtcagtgtaacaagtgggcacaagaatcagcgagtcttccgtgcacccctctttgcagatcaccaaaacccgtgggccaaaaccaccgtgggtaaaacgcccaggaacactgcacccccacattcagggaagaggcaacagcagggccgattacacgtagggcccaagacgagcatagagactatctccggctgaatacaaccgggaaacacctccgcttggctaaggtcaaaaaacccaaagaatatacccgggccctcgtaagagcacagcccaccgtaaggcccagaccaacttcggggtaagctcgaaaagcacaagacgaatcgccccaacacccgaggcagggcacgaaagtaggccccagggcgcaccaagtaagtgccccagccaccccccccgcgggaattccaaatttaaaccccccacacaaca

SEQ ID NO: 502524 - DNA, 413 bp, Homo sapiens
  misc_feature (14)..(14): n is a, c, g, or t
  misc_feature (43)..(43): n is a, c, g, or t
  misc_feature (139)..(139): n is a, c, g, or t
  misc_feature (377)..(377): n is a, c, g, or t
  misc_feature (389)..(389): n is a, c, g, or t
  misc_feature (396)..(397): n is a, c, g, or t
  misc_feature (408)..(408): n is a, c, g, or t
aacttacccccccngttaaaaacaaattgaccctttggaaaantctgtatgtggaacccatatgctccccccactgtaaactatggaagggccctaactttcacataaaaaattggaaggctcggccgggcgctggtcncacgcctgtaatccccagcactttgggaggccgaggcgggcggatcacgaggtcaggagatcgagaccatccctggctaacacggtgaaaccccgtctctactaaaaatacaaaaaattagccgggcgtggtagcgggcgcctgtagtcccagctactcgggaggctgaggcaggagaatggcgtgaacctgggaggcggagcttgcagtgagccgagatcgcgccactgcactccancctgggcgacangaagtcnntccgtctgcangaaaa

SEQ ID NO: 502525 - DNA, 220 bp, Homo sapiens
gtaagaggatgacgtgcgtggcttgatctcattttaccgcaactctgcctcctgggtttaagcgattctcctgccttagcctcccaagtatgctgggactacaggcgcgcaccaccacgcccaggtcagttttgtatttttagtatagtagagacggggtttcaccatagttggccagagtcacgtctgggcgatacctctagatgtcgaccgtgcatgg

SEQ ID NO: 502526 - DNA, 1366 bp, Homo sapiens
ggaggatgaagatgatgacagatgatgaagaggaagacagaattggagagtgggcgtcgctttcatctacagggacaagaggtcccccaggtgtcgagatttgctaggcttctgggccagaaaagaggagctttgctaggggacatcttggcatggctcggtgttacgacttctagaaagcacgtgctgagtgtgtgacaccaatgacacaccgtcagggccgatagtgctcgagggctcgagaaccgatggtacccatgacagagcctcattgctggaggaatcatgatgccactgttactcttttggagccaagccatagtgcataaatgcgaagtgggcgtaggaatcgccttcgaacatagcaacagacctcgaacgaccttgttgggcccttgagggcgtgtagagttcgtcgaggcgatcgttgggcaagactttgcgaagacaagcattgcaaggccacgcaagcagaactatcgaaggggccattctttctaggaacgcccaggggggcaggtttggactgagaggcatcaataatcttgagcacgtagcaatggcgtacatttccctcgaaatgcggccactacactcgtgagatgggcataatgtcgattcccaaatacccatgggcacaggtagacgccaacgtggggcaagaactaaggacgtcaatctcgcacgcttgaacgaataaacaatatcctcgcattggggcttttctcgcgttggaagcgtaaaccaaaagccgctcggggggtagagaaccattgtcgccttatgggctatttgcgaaggacaccaagcggagtgctaaaacctttccgattgttgtgtggtacaccggaacgccaaacaaaggggacaggaaacagtgtcttcttggaaccaatagggttccttttggttaagcttaagtgagggagtttcattggggccatgtgtgcgagaaaacaacaggctcaattttatagaagcgaagcgaggcgacaattcgtttggcttaacaaaagacaacaatttatgggttcccatatttgaggcggggaaaaagcgttctcggtttttcgaattacagaggagagtaaaacggcacggcggctaggattggggcggggcccccctagattggctattatacaaaccggcgggatatcgccggcgaagaaggaatctcgggtggggctccccccaccaaggggtgtggggctccccccagatataatcggggtgagagagcctaggtagaaaggaccaagacatataagtaaccgttaggggagcgacgcggaatggaacaccggggatgagggtccctgataacaaccacagcgcaggtccggggtgggaacactggggggat

SEQ ID NO: 502527 - DNA, 454 bp, Homo sapiens
  misc_feature (3)..(3): n is a, c, g, or t
  misc_feature (18)..(18): n is a, c, g, or t
  misc_feature (281)..(281): n is a, c, g, or t
agntaatccggtgggccnaaaaaattgtccccctaatgtcctgtttaagattgaccccatgttgtaacccccctcaaaatgatgagataaactttttatttccattggtgtgcctggttccttaaaagttacccctttgagttccttatggaagaataagtatggaaaatcagcccaagttaattctgaaaataaataatattacgaacaaggacaggcacggtggctcacacttgtaatcccagcactttgggaggccgaggtgggaggatcacgtgagncccaggagtttgagaacatgctgatcaacatagtgagaccttcatctctacaaaaagtaaaaaaaattagctgggcatggcaacctgtgctgtagttccaactgctcaggagactgaggtgggaggactgcttgggcctgggaggtggacgctgcagtgagctgcggttgcac

SEQ ID NO: 502528 - DNA, 470 bp, Homo sapiens
  misc_feature (246)..(246): n is a, c, g, or t
ttatgggtcatgggttgattcaggtgctggcagatcacatgctaacctgtctagtgttctctctgtactcattcttctggtagcagcacagtgtcagcctgatggagaagggaggccctcatgagagaggagctgagtctcacctcccgggcccatacatttctctctgaccgtacattctgtgcacagggaagtgggccctctctggtcgtgagactgaagtccccgtgctgtgttgagcagtgnagggtgggggtggctcaggtagaatggagggtacttgactcctgttttttgagggagagttgcctttaaagttggagggatgctgttggcttcctgcagctgcttgctgccttttgatgacgcccctgtgcattggggccttcaagtgtaggtggaataggcagggttggaaaggctcttttctccccacagtccaggagaggcagtgctggggtggcagaatt

SEQ ID NO: 502529 - DNA, 222 bp, Homo sapiens
cacttcatttaatcttcacaacacctgtgagataggtacctcatgccaaattaagaagacgctctgtgaggtcagaaactggcccaggtctcacagctgactagtgaggagctgagatttgctaggatgacctgacactctgaattctctaaattccacctccttaacacaatacatgtagtcagggaaggcctgactttatattattcacatggccactca

SEQ ID NO: 502530 - DNA, 715 bp, Homo sapiens
cgcgagtcgtcccgacgggatcgctggaatatacggcatgaactttaagcacatgccggagctggacacggctacggatactttgtcgtgctcggagtgatagcgatatcgtgcgttttcctatttgtgcgcttcaagaaggctaagtggctgtgaatactgcccatcgttttcttcgccgtcatctgacggttacagcgggccttatacgggagcttgtccaatccaactcaagatgaaggtgcgtccatgacatagcagctgaccgacgctctacaagcagttcagtccttcatcgccaagggctaagaccgcgaatagcgcgtcaaggacagcaatctcgtcgatctcgagccaggatcaaccatcggtccgtgcggcatctgcgtcgacgcggcgtttcgcctcggaagcggtgatgatggcgataacgcctccaccctctacgcgatcaccgatccggcgaccgagcataagggcctgttgatcgacgcgttcgatgaaatctgctaccgcgacccagttcaagagtcgggacctcaatgtagaagaagtcgactaacgagcattcgcgtcatccgatcaagcaagctggagacatttatgaaagccatgggttacaaggttccgggacccatcgccgcggatgcgcgctggtcgaatcaattgcctcggctgtgctgcggatagaatccgttgagggaggcgccggcac

SEQ ID NO: 502531 - DNA, 611 bp, Homo sapiens
gtctcattctgtcactcaggctggagtgcagtggcgtgatctcagctcactgcaacctccactcccaggttcaagtgattctcctgcctcagcctcccaagtagctgggattacaggcgcctgccaccacgcccagctaatttttgtgtttttattagagacagggtttcaccaagttggccagactggtctcaaactcctgacctcgtgatccacccgcctgggcctcccacagtgctgggatgacaggcgtgagctaccacacccggctgatttatccttttatttgggctcctttcactcagcgtctttaagcttcatacgcgaaagatgcttcagagattcctttttcaggctgaatatctgctgcgtggctaggccactttttgtttaatcctctctcctctggtggacaccaggactgtgctgttttggttgctgtaagcgcgggtgcacacgcctgcctgaggctgtgttttggccgttgtgagtgtgggtgcacacacctgcctgaggctctgctttgttgtgagtgcgggtgcacacacctgcctgaggctgtgttttgggtgttgtgagtgtgggtgcacacacctgcctgaggctgtgtt

SEQ ID NO: 502532 - DNA, 942 bp, Homo sapiens
ggagagacgagataactagtctcgcgtatgctgtgtgtgggcccgggggccctgtggccctgggatgggaatctggggtgtttccgtggaggtttctgtgtgctccggtgccggggtcgctttcgtacttgggccgtggccgaggccgcggagctcgcggaggcaaggccgaggataaggagtggaaagcacgataaacaagttgggccgcttggtcaacggcacatgaaagatcaagtccctggaggatgatctatctcttctccctgcccattaaggaatcagagatcattgattaactatcctgggggcctctctcaaggatgaggtattgaagattatgccagtgcagaagcagaccgtgccggacacgcaccaggttcaagggcatctggtctgctatacggggactaacaataggacacgtacggtctagaggtagtaaagtagctaccaaaggcagagtaggacaccgcacataccagcggggccataaatacctaagggccaaacatactccataggtaccccggtgccgcagcaggcatactggggggcaacacagattcgggcaagacacacaaaactggacccatagaaagggtagacagggccgctagcggctcatgtgctggttacgtctccaaccctggacacccacgtggacaccttggcaattccgtcctaacgaaaacctgtggcctaaaagaaggctgcaccatgaatgggctggtatagaatagacagcatagacctacagaaccgaagataaaacagaccaccatgggcaagtaagcgaaaggcaactttgtatgccattcttaagacaacagttactgaaaccagaactcggaagaaagagattacagagactaccaacaggggtaggtgcaactcgcaagaaaacaacgactccgacaggaacaactcaaggggcacaac

SEQ ID NO: 502533 - DNA, 470 bp, Homo sapiens
  misc_feature (8)..(8): n is a, c, g, or t
  misc_feature (10)..(10): n is a, c, g, or t
  misc_feature (12)..(12): n is a, c, g, or t
  misc_feature (134)..(134): n is a, c, g, or t
  misc_feature (137)..(137): n is a, c, g, or t
  misc_feature (167)..(167): n is a, c, g, or t
  misc_feature (169)..(169): n is a, c, g, or t
  misc_feature (344)..(344): n is a, c, g, or t
  misc_feature (346)..(346): n is a, c, g, or t
  misc_feature (441)..(441): n is a, c, g, or t
atcagcangntncgggctgaagattgcttctcttctctcctccaaggtctagtgacggagcccgcgcgcgctgacccatgcggcagaaggcggtatccttttcttgtgctacctgctgctcttcacttgcagtnggntggaggcaggtaagaaaaagtgctcggagntncggaacagcggctccgggttctggaaggccctgaccttcatggccgtcggaggaggactcgcagtcgccgggctgcccgcgctgggctttcaccggcgccggcatcgcggccaactcggtggctgcctcgctgatgagctggtctgcgatcctgaatgggggcggcgtgcccggngngggcttagtggccacgctggcagagccttcggggcttggttggcagcagcgttcgttcataaggtaattattggtggccttgatgggtaacgcancccacaagtattttcgatagtgaggattt

SEQ ID NO: 502534 - DNA, 1200 bp, Homo sapiens
atgacataaatgacgagcaatgccataccaagacaccagatgatgatacacagctacacatgatggacacttacatgccatgtcatgcgccatcttaggcactctattgccacctccacgagcgttcacaaagacaagtactatgctcagaaagcgtacacaaaactacaacgacaccatacacaacgacatagagagattcacagccactaatagaaatacactgacatccactatatcatcaccaaactaaattcgactgcgcagcacacgcacgtatggaacatcggctccactccgaacaaaccacaggatttagccaaacttgagacaacgaacagtagaaactaagccaagacacgcaccactcaattatcacatcaacactcatttacaaaaaagagactcatatcagatgtccccaccatacgaaaacaacttgcgcgaaccccaacagagagttcaaggaagatccacagacacccacatggtcatgatcatgtaaaatacacagactccaaatctatcgacaccacaccaaagcgcctaccacaacacctaggaacacttcacattagataaacgactccctccgataactcacatctaacatccacacacataacccaatcacccaaacacatgctacccatccacctaacacaaccaccacccccatgatctctccaacagaacaaccacagtatcaatcaacacacacaaacataaatacaattcgccacaacccaattattccatacacaaaacgcacagacatataaaactactaagcacaacacacatattaataacataacactcctaccctgacaataaaccaaatcccaatgctaataaacaaatcccaccaaatgagcacacccaaaacacacaatcggcatacaacgacgagatcctaatcacaacaaggacacatatgcagcgccaaacacgattttcactactcttacgtgcacaacatacaggtacaccaacacctacagcatagcccaaagacgccacgtacaactcgacacaacacacaagtacaacagacgaatcgagccagaccacccgtacacaacaaccactaggaccccacatgcgaacaccacctcaacagagcagttaccacaaatcagccaacatagcgaccattgaaacatcgaccaagcgagacatcacacaaccaggctaccc

SEQ ID NO: 502535 - DNA, 612 bp, Homo sapiens
gagagggaggtacgctctctttgcccaggcaggagttaaattgtgcaatctaggcccactgcaacctctgcctaccgggtttacgccattatcctgccaagtggaggctggaatgagctgacaccacaccaccgcactccagtctgtactacagaacgagactccataccagaccgtaagtggcctgggaggcaaagaagccccgtagttgcaggatgctctcccggacttgccctgaggccaaaagttaatagggccaactattgccctgcttgaaaagaagtattacagtttccgggaggccttcttttgccagggaagaggattgcaaagggtggccccacaactggttgaaacaaggcccggaggttaaaggtccttaagggaaccccgaacgtggacaaaaccgggaacaccaaaaggagccccgcgcacagtgtcttttgggccccttctctgaaccaggttaaggggtagagccctttttaaaaggaataagacagggaaattcccaagacaccaggtttgtaaaaaaaagagtctttttttgaaacccccagagcacacaaaaaaaaatttgggtttgggacccccaacacctttggggaacac

SEQ ID NO: 502536 - DNA, 761 bp, Homo sapiens
aatgattcagctgacttgaggacaaggcctagcatttggctgagcagagccctcttcttgcctcaagctggtggtaggctaggctatggacaatggacagtctggttggtccaaacggtaagaatccggtatgatcccctgggaggtacaggtgacctctgcaactatgcatgatttctcaaacttcaagattcatgtctgtgatgtattatgctgtggatataagtttagtagggcggtcatttcctactctgagttactggttacctagccagtccactgggctgtgacttgtgtccttaagtcaggtcactatctgcctcccaccctgggggcaggactgaagtatagaacgagcatcatggctgtgcatgcaggctgtggtttgaaaactgcagcccaggagggcactttcagctgccctcaataatgtgaagtggattcagtgctaggagtcctaaggacgcaatgactggattatctcatctgactgtgtgcagaatcctgttgaatgtccctgtcttctattggttgggcagaagctctgcatatggttgaaacatttccaaggatctggttcaaaccaactttttcctggtcatggcccggtccgaagagggattagtcctatttccactcggtcccgttggatcttctgacaacggagcgtctttattgttagagtcacaaagactcaaatctctgatacggaaggaaaggaaagggacttaggttcctttaaagagctcaatattcctgag

SEQ ID NO: 502537 - DNA, 605 bp, Homo sapiens
gtaatactagtatatcgctcacacctcatatactccgtactatgcctagaaggaataatactatcgctggtcattataggtactgtcataaccctgaacacccactccatcttagccaacagtgcgcctattgccatactagcctatgccgcctgcgaagcagcgatgggcctagccctactagcctcaatctccaacacatacggcctacactacgtgcatagcctaaacctactccagtgctaacactaatcgaccgaacacttatattactaccactgacatgactttccaaccccctactatatcataacctgaacatcaacctattaagctgttccccaaccttcaactacgaccgcctaacagcctctctgctaatactagctacctgactgctaccccttacaatcatgacaggccaacgtcacttatccagcgaaccactatcacgaatataactctagctctctatactagatctcgctacaatctacctaagtattacattcacaggcacagcactactggtatatatatcttcttcggaaccacactgatgcccacctttgctatcataccccgatgaggcaaccagtcagcgc

SEQ ID NO: 502538 - DNA, 196 bp, Homo sapiens
gtacaggtaacgcctggtgctccacccactcccaggagacaaaagccttcatacatctcaagtgggggacacaaaagggggacgggggggcacgaaggtcatcattcaaaataaaacaaaataaaaaagtattaaggcgaagattcaaaaacattttgcattacataatttacacgaaagcaatgctatcacctca

SEQ ID NO: 502539 - DNA, 724 bp, Homo sapiens
cagtcaatcagactgtcgacatgccagaaagatgtcgacattactactgaagggacgcacagttatcgtgaagggccccagagggaaacctgacggtggagggacttcaatcacatcaatgtagaactcagacttcttggaaagaacaaacagaggctccgggttgacgaaaatggtggggtaacagcaacaggaacgggctaccgtgtcggactatttgttagctcatgtacagaaatcatgatcaagggtgtcacactgggagctgccgttacaagatgaggtctgtgtatgctcacttccccagtcaacgattgtttatccaggagaatgggtctcttgtttagaaaatccagaaattagcttgtggtgaaaaatgatactccgcaagggttcgggatgagaccaggagttgctagttcaggggatctcgaagcccatgaagaggatgaatgaatccttgaaggacatgacattgagcttgtttcaaattcgagaggctttgattcagcaagccacaacagttaaaaacgaggatatcaggaaatttggatggtatctatgtctctgaaagaggaactgttcagcaggctgatgactaagatctaagagtgacctggctacagaaagattgatggcagatgacacttaaggacctaacttggtgaatatctacacatggatgccgataccaaagacctattgattcgggaaacaacgccag

SEQ ID NO: 502540 - DNA, 392 bp, Homo sapiens
tccgaattccggccatgggatctaattaaactaaagagcttctgcacagcaaaagattctaccatcagagtgaacaggcaacctacaaaatgggagaaaattttcgcaacctactcatctgacaaagagctaatacccagaatctacaatgaactcaaacaaatttacaaaaaaaaaaaaaaccaaccccccccttaaaaagggggccgaggtatttaaccaaccctttttaaaaaaaagacttttttgcggccaaaaaacacttaaaaaaatggctaataatcatgggccataagaaaaatgcaattaaaacccacagggggttcccttttcacacaagtgggagggcaattctttaaaaggccggaaaccggggcctgaagggattgtgg

SEQ ID NO: 502541 - DNA, 297 bp, Homo sapiens
  misc_feature (214)..(214): n is a, c, g, or t
gatcctatatctagaaaaccccatcatctcagcccaaaagctttttaagctgataagcaacttcagcaatgtctcaggatacaaaatcaatgtgcaaaaccgctagcattcctataaaccaacgacaggcaagcagagagctgaatcatgaatgaactcccattcacaattgctacagaaagaataagttatctagggaattacagcttaacanggggaagcgaagggacccctttcaagggaggaacttacaaaccacttgcttcaaaggaaatccaggaggagggacacaatggg

SEQ ID NO: 502542 - DNA, 302 bp, Homo sapiens
aattaatgacacatcctggcggggagcaccagatcttcaaagggcgctcatggtacttcccagaccagacggccaattccctgacagcacggcatccagtccttttcatgtattattattatatttttcgagaaggtctcactctgtcaccaggctggagtgcagaggtgcgatcacagctcatagcagactccactttccaggctcaggtcattctcccacctcagcctcccaagtagctcgaacaaccggtgcatgccaccacgcccagctaattttttcttttatttttagtaaagaca

SEQ ID NO: 502543 - DNA, 104 bp, Homo sapiens
gagcggcgttaaaccaactgggacatttcaagttgagaagagtagttgaaaagacagaaaataccattttaaaatagatatcaggagttcccgttgtggctcag

SEQ ID NO: 502544 - DNA, 125 bp, Homo sapiens
ccgaacactctaacacatccttaggaatagcatgtatttgtaggaagcaacaaagctttccatagagaaacttgtctatgtaccttaatactttgtttaggatgaggagtctttgtgtccctgta

SEQ ID NO: 502545 - DNA, 519 bp, Homo sapiens
  misc_feature (114)..(114): n is a, c, g, or t
  misc_feature (123)..(123): n is a, c, g, or t
  misc_feature (187)..(187): n is a, c, g, or t
  misc_feature (365)..(365): n is a, c, g, or t
  misc_feature (389)..(389): n is a, c, g, or t
  misc_feature (407)..(407): n is a, c, g, or t
  misc_feature (454)..(454): n is a, c, g, or t
  misc_feature (463)..(463): n is a, c, g, or t
  misc_feature (496)..(496): n is a, c, g, or t
gccgtggtgcgtgcctcgaccctgccattgtcagtgttcatggtgggtgtgggtggtcctaactttaggccatggaccacttggccgttgatggtggcccctgcatacacgttntgggcaggntgctgcccgcgacattgtgcagtttgtaccctaccgccggttccagaatgcccctcgggaggcnttggcacagaccgtgctcgcagaagtgcccacacaactggtctcatacttcagggcccagggttgggccccgctcaagccacttccaccctcagccaaggatcctgcacaggccccccaggcctaggttcccttggaggctgtggcaagtcctcaatcctgtgtcccaggggtccctntgggccacaacccaacccttctcnctttcctcagctgtagcnctttgtattttttgatacttttatacttgtttctgcttttgctgctnttgatcccncctttgctcctgacaaccctcattcaataaagnccagtgaaggcccaaaaaaaaaa

SEQ ID NO: 502546 - DNA, 855 bp, Homo sapiens
ggttctacaccaggcagtccccaatatcccggcccagtgagcccagcagctcggggccgtcctcgtattacactgacccaggaggacctggggatgaaccctgtcgggaattccgatggcaatggcatttccacggtcccagccaagatcaccccaggggacgtgtgtgctgcccgcgcccgctcctagacctatctgcaattacagcctgctgagccccgtaccgaacaaggtagtgagaggcctgaagtaggctggggtgcgccatcgtgcaagaggacgcagacaggatgagggcccgttgaccctggaccttgctgtacttcgttgatgtccacttctcatgaacgtgtctcgatgggctgctaacgggcagttcctctgatatcctcacaggaagcacagctctctttcaggctttccatggagtaccatatatgaactcacactttgtctcctctgtcgcttctgtctctgacgcagtctgtaagcttctcaccatggtcagtgtggtgacggatccccgaggggcttgacacttccttaacgaggtgcgcagttggacccacgaattcctgaacgagcgacgaagacgcacgtcgaggaacgaacgcacggcgcgcggccagcgacgcgtcacgaacgcgcgccagttgttactcacacgatcacaccagggcaacattcccctccacccggcgccaagtgggcacctcacactctgacccgcggaggacaacctacataaacagacaataccccccaaggacctggtggagcccacatcgaccggcagttactaccacagactctctgccgaccctaataaaccgacggggcgctcttcccagccca

SEQ ID NO: 502547 - DNA, 159 bp, Homo sapiens
agtatttagagtctgtaatgtcggtcgagagcgtatgatggcagtgaggggcgcaatgatctagctatatatcgatatacgtagcgtaacgtaaacggtactctagaatatagtaggatgcgaaatttaaagagtgatattgatcgagcgcagatctgt

SEQ ID NO: 502548 - DNA, 307 bp, Homo sapiens
tccttacgactagccgacagtggggcggatacattctcgtgcactcccgcccagcctagcccaagactttggatacggggcgagatgaaggggagagggttgtttggtttcggacgacccttagctctgacacggaagagaagtacctataccacacctgcctgttacgttccctccccttttcccagcgcactgttgagggcagcctctccagctctcttgtttatgcaaacgccgagcgcctgggaggctcggtaaggaggagtcttccacggagccggcccgccccctgttggggtagtcgaag

SEQ ID NO: 502549 - DNA, 383 bp, Homo sapiens
  misc_feature (134)..(134): n is a, c, g, or t
cggtggtgttatacaacacaatggccaaaaaaggtttctggagctggcaaggttcccaagtttgcccaaaaagctcagaagggtaaaatgaaaatatccctaaaacccgcccccccccttttaaacaatggggnaaagacggtttcaaaactgtttgtttccattggccccttaagtttagtaataaaaaactggttaattaaaaccagggcttgttaaaccctcaaaaagaaaagaaaattttttttgggcccccttggtttttttttttggggggggcaagtttaaaatattagtttttaaaaacagggctttttaaaggaaaccacttggccaaaaatttgtcccagaatttttaggccccttaaaaaagtttaatgtga

SEQ ID NO: 502550 - DNA, 665 bp, Homo sapiens
gagcgatccctagaggtattcagcagagaatcgtatctctgtgggagagggcaagagagacagtgtggggccgaaggtgacttgtgtgatgcctgtgtcgggggaaaaccttgtggaagaagctctgttgtctcgggagcatgtcttggaattggagaacagcaagggccccagcctggcctctttagagggggaagaagataaggggaagagcagctcatcccaggtggtggggccagtgcaggaggaagagtatgtagcagagaagttgccaagtaggttcatcgagtcggctcacacagagctggcaaaggacgatgcggcgccagcacccccagtcgcagacgccaaagcccaggatagaggtgtcgagggagaactgggcaatgaggagagcttggatagaaatgaggagggcttggatagaaatgaggagggcttggatcgaaatgaggagagcttggatagaaatgaggagggcttggatagaaatgaggagattaagcgggctgccttccagataatctcccaagtgatctcagaagcaaccgaacaggtgctggccaccacggttggcaacgttgcaggtcgtgtgtgtcagggcagtcagctccaagggcaaaaggacagagctgtgtccagttcaccgaaaactgcttggcccc

SEQ ID NO: 502551 - DNA, 496 bp, Homo sapiens
  misc_feature (74)..(74): n is a, c, g, or t
  misc_feature (308)..(309): n is a, c, g, or t
  misc_feature (389)..(389): n is a, c, g, or t
  misc_feature (392)..(392): n is a, c, g, or t
  misc_feature (394)..(395): n is a, c, g, or t
  misc_feature (398)..(398): n is a, c, g, or t
  misc_feature (401)..(401): n is a, c, g, or t
  misc_feature (403)..(406): n is a, c, g, or t
  misc_feature (408)..(409): n is a, c, g, or t
atccacgtgccattgtgggagcagcagaaattggcaggggccatgtaaattgtgaagactggggaaatgatgcnttggttacctccaggggtctcaggtaggcagtcccccattgggtgctccagattggggttccgtgggtcagaaggaaggcccagtggttccacacaggcaggtgaccatggtgggggcctttggttctgcagccccttcaaggaagctctacatgaaagtgtgggtcttctctccctgcagcacccccacattcactcatttgtgcattcatacatgcatgtatacatgcaaanncacatgcctctactttcttccttaattgtgtatctatgtgtgttttcttctttttctcttcctttctcccataaccaccntgnanntgncangnnnntnnagatcctcccaattaagtggtagcccttaacactgcatgatggacactcccaagtttcccctcaaagcctccttggggggatcctct

SEQ ID NO: 502552 - DNA, 629 bp, Homo sapiens
ttttctccccggagatttttgggttttcttcccccccgagatattgggcacacagttctacactggaaaacctcgggaaaaggtgggtgggcctttgttccctcgggcgttggagccgctaaactccccggagccccacaaaaagcttgttacttccttgaaaagaaacactctgaattgagtgggcgacccctcctcagagtgttgcgccccctctacacacgccactactgtctctcgggtgggctgtggaatttgtgaccgcctatcccccccgcccaagatggaacacgagctgccacaggggcaagaaaaaagagattccccacagaggggattcacaagaattaaattctttttgttggaaagagtggtaataaactacacattcacccttatagccccacaaggtactctggtggataatcccctctgggaccaaactgttgtcaataaagggatagttcttcagagatcctcggcttctttaaaggcaagggcccgcacggggggcacaaggttcaaaatttgtaagagaagaataacaacaacaggcaagaaacaaagggtttttcccaaaaacttcggttttaaaagctttgtttttgatccatttaaaattataaaga

SEQ ID NO: 502553 - DNA, 253 bp, Homo sapiens
cgcccagcattgactgcacatgtgaacatatgaggtgcccaacaaccagcatgtgaaggtgcgcttcaaattacttctacctgctggagccctggcgtgcatgcgggcacatgccccatggactatgtggagatcaacggggagaaatactgcggagcgaggtcccagtccgtcgtccccagcaaccgcaacaagatcacagttcgcttccattcagatcagtcctacacctgacccggcttcttcgctgaat

SEQ ID NO: 502554 - DNA, 473 bp, Homo sapiens
tctcagtgtgatagactatgcgttgccaagcttcctgtccaggtttgtacctgccacagaaatatcttgaaagtttatctaacagctggagccatgaaaaaaaaaaaaaaaaaaaaaccatgggagcttggtaaaacggggggggttttgccaacgggaagagcccaagaaaaagtacgaggttgccaaggtggttggctgcaagaggtgcccaaggtgggagcgcggggaattggcggtttgggggaagctgggggtgccttctaccactggttctttctgggccccagtgatgtgtcctctcttaacggtgcacacattctttcatgaagatgaccaagcccatacataaccggggcatgaacaccccattggtggttatttctgcattcaggaacaagtgggtcctatggcccagctctctgatgaatgggcgagtatagagggggagataatagggctatttctcatgg

SEQ ID NO: 502555 - DNA, 152 bp, Homo sapiens
tccaaaatgatgtagaacctcctatgaatctataattattctaaataaaaactaaaaccagccgtggacaacataacaaaacccactctacaaaaaatacaaaaaaaatttgccaggcatggggacacagagcctgcagtcccagctacctg

SEQ ID NO: 502556 - DNA, 430 bp, Homo sapiens
  misc_feature (58)..(58): n is a, c, g, or t
  misc_feature (99)..(99): n is a, c, g, or t
  misc_feature (111)..(111): n is a, c, g, or t
  misc_feature (210)..(210): n is a, c, g, or t
caggctggttcgagctccggcctcgggtggtccgcctgctacggcttcagggtgctgngattgcaggcgtgagcactggtctggcttctataattttgntagtcacgatgngaacaaacaaaacagcttagaaccagagatctgacccctcaagcaatacatcaatttcccttcacaaggaaacgtcggggctacatgagtatctgtgtngaatgcggtctggaaaatgatcctatggattttccgggctgttgccactgctgtacaacattcaggtgccacatccacctgtgccattaagcttttttgggacatgggagatgcctctttcctgctgtatgacatgcatttgggacagttggcaagaaatgaccaaatcggggggacaacatccaagcttcttacctgtagatagaatcaggcctcactt

SEQ ID NO: 502557 - DNA, 908 bp, Homo sapiens
  misc_feature (29)..(29): n is a, c, g, or t
  misc_feature (96)..(96): n is a, c, g, or t
  misc_feature (157)..(157): n is a, c, g, or t
  misc_feature (252)..(252): n is a, c, g, or t
  misc_feature (254)..(254): n is a, c, g, or t
  misc_feature (260)..(260): n is a, c, g, or t
  misc_feature (266)..(266): n is a, c, g, or t
  misc_feature (268)..(268): n is a, c, g, or t
  misc_feature (277)..(277): n is a, c, g, or t
  misc_feature (280)..(280): n is a, c, g, or t
  misc_feature (286)..(286): n is a, c, g, or t
  misc_feature (293)..(293): n is a, c, g, or t
  misc_feature (298)..(298): n is a, c, g, or t
  misc_feature (300)..(300): n is a, c, g, or t
  misc_feature (306)..(306): n is a, c, g, or t
  misc_feature (323)..(323): n is a, c, g, or t
  misc_feature (332)..(332): n is a, c, g, or t
  misc_feature (334)..(334): n is a, c, g, or t
  misc_feature (336)..(336): n is a, c, g, or t
  misc_feature (339)..(339): n is a, c, g, or t
  misc_feature (342)..(342): n is a, c, g, or t
  misc_feature (347)..(347): n is a, c, g, or t
  misc_feature (364)..(364): n is a, c, g, or t
  misc_feature (368)..(368): n is a, c, g, or t
  misc_feature (378)..(378): n is a, c, g, or t
  misc_feature (380)..(380): n is a, c, g, or t
  misc_feature (445)..(445): n is a, c, g, or t
  misc_feature (456)..(457): n is a, c, g, or t
  misc_feature (461)..(461): n is a, c, g, or t
  misc_feature (632)..(632): n is a, c, g, or t
cccagctttaagatatctagcagaaactntagctgaggactaaggaattctgcagcttgcagatgtttaagaaaataatggccagattttttgggnccttcccaaagatgttaagtgaacctacagttagctaattaggacaagctctatttttcanccctgggccctgacaagtttttaccacaggaatatgtatcatggaagaatagaggttattctgtaatggaaaagtgttgcctgccaccaccctcngnagagcngagcangnctgtgaaanagnctgcanggccaanggggncngggagnaaagggaacaagggggnagggcgaangncnganganaaagnagtggaggggaaaaaanatcngagtatattntntttttttttttttttttttttttttgtttctcgtggaagaccttagtaaaatcaaagatcagtgngttcatctgtnntttnttttttacttgctttcttactgacagcaaccaggaatttttttatcctgcagagcaagttttcaaaatgtaaatacttcctctgtttaacagtccttggaccattctgatccagttcaccagtaggttggacagcatataatttgcatcattttgtcccttgtaaatcaanatgttctgcagattattcctttaacggccggacttttggctgtttcctaatgaaacatgtagtggttattatttagagtttatagccgtattgctagcaccttgtagtatgtcatcattctgctcatgattccaaggatcagcctggatgcctagaggactagatcaccttagtttgattctattttttagcttgcaaaaagtgacttatattccaaagaaattaaaatgttgaaatccaaatcctagaaataaaatgagttaacttcaaaaaaaa

SEQ ID NO: 502558 - DNA, 135 bp, Homo sapiens
aatgatatacatggcaatgaggctgaccacaagaactggccagagagagggactggggcatgttgctctctgtttgcccagcactctacgatctttgtagattatgttgtatagatcatgcctgcgaacctatta

SEQ ID NO: 502559 - DNA, 955 bp, Homo sapiens
  misc_feature (29)..(29): n is a, c, g, or t
  misc_feature (96)..(96): n is a, c, g, or t
  misc_feature (157)..(157): n is a, c, g, or t
  misc_feature (252)..(252): n is a, c, g, or t
  misc_feature (254)..(254): n is a, c, g, or t
  misc_feature (260)..(260): n is a, c, g, or t
  misc_feature (266)..(266): n is a, c, g, or t
  misc_feature (268)..(268): n is a, c, g, or t
  misc_feature (277)..(277): n is a, c, g, or t
  misc_feature (280)..(280): n is a, c, g, or t
  misc_feature (286)..(286): n is a, c, g, or t
  misc_feature (293)..(293): n is a, c, g, or t
  misc_feature (298)..(298): n is a, c, g, or t
  misc_feature (300)..(300): n is a, c, g, or t
  misc_feature (306)..(306): n is a, c, g, or t
  misc_feature (323)..(323): n is a, c, g, or t
  misc_feature (332)..(332): n is a, c, g, or t
  misc_feature (334)..(334): n is a, c, g, or t
  misc_feature (336)..(336): n is a, c, g, or t
  misc_feature (339)..(339): n is a, c, g, or t
  misc_feature (342)..(342): n is a, c, g, or t
  misc_feature (347)..(347): n is a, c, g, or t
  misc_feature (364)..(364): n is a, c, g, or t
  misc_feature (368)..(368): n is a, c, g, or t
  misc_feature (378)..(378): n is a, c, g, or t
  misc_feature (380)..(380): n is a, c, g, or t
  misc_feature (445)..(445): n is a, c, g, or t
  misc_feature (456)..(457): n is a, c, g, or t
  misc_feature (461)..(461): n is a, c, g, or t
  misc_feature (679)..(679): n is a, c, g, or t
cccagctttaagatatctagcagaaactntagctgaggactaaggaattctgcagcttgcagatgtttaagaaaataatggccagattttttgggnccttcccaaagatgttaagtgaacctacagttagctaattaggacaagctctatttttcanccctgggccctgacaagtttttaccacaggaatatgtatcatggaagaatagaggttattctgtaatggaaaagtgttgcctgccaccaccctcngnagagcngagcangnctgtgaaanagnctgcanggccaanggggncngggagnaaagggaacaagggggnagggcgaangncnganganaaagnagtggaggggaaaaaanatcngagtatattntntttttttttttttttttttttttttgtttctcgtggaagaccttagtaaaatcaaagatcagtgngttcatctgtnntttnttttttacttgctttcttactgacagcaaccaggaatttttttatcctgcagagcaagttttcaaaatgtaaatacttcctctgtttaacagtccttggaccattctgatccagttcaccagtaggttggacagcatataatttgcatcattttgtcccttgtaaattatatgctgtccaacctactggtgaactggatataatttacaagggacaanatgttctgcagattattcctttaacggccggacttttggctgtttcctaatgaaacatgtagtggttattatttagagtttatagccgtattgctagcaccttgtagtatgtcatcattctgctcatgattccaaggatcagcctggatgcctagaggactagatcaccttagtttgattctattttttagcttgcaaaaagtgacttatattccaaagaaattaaaatgttgaaatccaaatcctagaaataaaatgagttaacttcaaaaaaaa

SEQ ID NO: 502560 - DNA, 392 bp, Homo sapiens
gtacctctggattgtgtccctgcttgtttatgatagttaatgaaagctgcctattgtctggagggagaggcttagtgcatgaagcctattactttacaatggtgcccttcagaatgtctgctgggctcagaaggctcttagtcgtgcttgagagtgagcctttcgaagagatactcgcccagcccagcctccgggccacccagcctgtggaggttggtcaggtgttcacccatcttcttgataagcttcacttcctcatctaggaatgtgagtctccaggaagtcacagagatgggggtcctgtgctgggaatgaacccagggcatgaagatccaaaagggcctggtacaagctatttctccagtgccatgaaagcttacatggcgtcttgg

SEQ ID NO: 502561 - DNA, 170 bp, Homo sapiens
cgcttcacacgatttgactgccatcatcttcgtggtcggccagcagcagctaccacatggtcatccgggaggacaaccagaccaaccgcctgcaggacgctctgaaccccttcaataccatctggaacaacagatggctgcgcaccatctctgtgatcctctagattcta

SEQ ID NO: 502562 - DNA, 1074 bp, Homo sapiens
  misc_feature (292)..(292): n is a, c, g, or t
agcgcctcggcagtgcgtacatgcctgcattcaagatggaacgtctagaagaatcatccctttcgcaggccactgagacatagcccacaaaacatccaatttcgaacgttggaactgataggaatcggtcgataacatcttcgatagcttatgcttgactggagcatatgtcgatatgagctcagcaaagcccgttggacgtcggcatggactggctcatgtgagttgaccagaactgtgcaagaggatgattgtcggtctcgaactcctagtcggcatggaaagaacagantatgatcgaacgtgtttgatccacgcaagtcgaagacgtcaggtggttaggtcattcgcaacctccactggcatccgctggtacgcagtacattggttacctttgaagatgagagtgcgtgccactttcctgattcacctggagcacagacgtggagaaacccagcgcacgcaaacaagcatacatgaaggaatacgtatcacaagtcaccctgctgggttatggcacttctagtcgaggaatcggcacacctatgcttgggcagcctggtatccttcaccacgttccgaggttacctatcctgctagacaatcacaaggggaaggcactcagaagggcactaatttcccattgcgggacattgactcttgggtattactcgtaaaccgcgctagccacctagccgtccccgttcactatggggggcggtataccctccatagcagatgtacggccgtaatggccacgtacagtgtcctgggcaaaaagcctttcccctcacaacttacataccttcctaaaagtaggaacatgaccttgactttgtcccccgtgacccacaataccatgcatgaacataaatggaaacataggcctgcacgtaaccactctacaccggcacgacaccgggctcaatacaaataccccgcatacggggacaaccagagaagggctacccacccaaaggaaattccacagaccagaaacacaggggtatacagcgtacccgacccgacgtgtatccccagggaaaggccgaaccaagaacgccgcggccgcgc

SEQ ID NO: 502563 - DNA, 678 bp, Homo sapiens
  misc_feature (517)..(517): n is a, c, g, or t
catattcaaggatacattatttatctatacagcgtttctacatggcatagctttcaaattctctttgtgaagtatctggcggttataatagctccacccccatctccattcctaccggtcaagagaacagcaaaggcactagaaccttcattgcatgactgtctggattggtagtatacatgtatttctggaaatgtacttcttcaaacgaatatttttctactttggatttttttttttttttatccattcgcagaacccctttgctgatgcaactaagggtgacgacttactcccggcagggaactgaggattacattcatataagaatccagcaacggaacggcagaaaagacactgactacgtgttcagggcattgcagatgattatgcacaaaaagaacacttgtgaaagctttcaaaaagaaatttgcctgtcaatggtcactgtgcattgacacatcctgaaatcacggagcaggttatctcagcttcaaggtgcaccaaagaaaaaccnatctgcccagtttcctctgtggcaggttgcaggtgcatgggggtgcttaatgttgtacaccttggagaattgcgttttcacacaattgtcatttacagaggccacacatgcattgtgtttccctaactaagttacaaaaatcatacgcattgcacggcaaa

SEQ ID NO: 502564 - DNA, 713 bp, Homo sapiens
gctggtggagcctggctcgccggcgagaaggcggggtgtggcgggggaccggctggtggaggtgaacggcgaaaacgtggagaaggagacccaccagcaggtggtgagcctgcatcctgcgccgcactcaacgcctgtgctgcctgctgtgtgtgtctgacccctgatgactggactgagcatgctgcatgaagctctggctgtccagtgtcctgatgatggatgcttgcttgcgctgcccaggaatgcgcctggggcatggcctgatgcctgcctggcctgcctgccgagtgtgcatgggtggcttggcaacgaaaatgagcctcgctgaggccgacaagagccaccctggagcagcgcgagcttcggcctcggctctgtaccatgaagaagggccccagtggctatggcttcaacctgcacagctgacaagtccaagccaggccagttcatccggtcagtggacccagactccccggctgaggcttcaggggctccgggccccaggatcgcattgtggcaggtgaacggggtcttgcattggcgggcgaccgccgccattgggggacgttggtgtgccgccatcagggctggccggggacgagaccacgctgctggtggtggccaggggcacctgaccgagtcttccgaatgcgagtgtccatctcacgagcccctgatggtcctgcctgtcccttcaccatgggggccta

SEQ ID NO: 502565 - DNA, 545 bp, Homo sapiens
cttttggggtctttgctgaatttttttctcagttctaggagctctctgaaggagtctttagggatttcacggtaaacgatcatatcatcagcaaacagtgacagtgtgacttcctctttaccaagttggatgccctttatttctttctcttgtctaattgctctggctaggacttccagtactatgttgaagaggagtggtgagagcaggcatccttgtcttgttccagttctcagagggaatgctttcaatttttccccattcagtattatgttggctgtggttttgcatagacggcttttattacactgatgtatgtcccttatatgccaattttgctgagagttttaatcataaagtgatgctggattttgtctaatgttttttctgcatctattgagatgatcatgtgatttttgtttttaattctgtttatgtgacatatcatatgtactgacttgggtatgttaaactatccctgcatccctgatatgaaacccacttgaccggggcgtattatctttttgataatgtggtggattcag

SEQ ID NO: 502566 - DNA, 1378 bp, Homo sapiens
  misc_feature (505)..(505): n is a, c, g, or t
  misc_feature (580)..(580): n is a, c, g, or t
  misc_feature (981)..(981): n is a, c, g, or t
  misc_feature (992)..(992): n is a, c, g, or t
actttctccttcttctgtccctctccgttgctgtgtctctgcttgcctcttctttcttttctcttcctcttgctgtttcccgcctgtcgcttactggtgtctatcgtcctgtctcttgtgtctgttactcctctgtgaactcgagctcgttccgcttctcgtccgccgttctcgtcgagtccttccgtccttactttctttggtcgcttatggtatctgttctgtccgtcctgattccgctttctttcttgcttcctcgtcctctcacctcgttcccgcgtgtcttgtgtcttttgtctctatagagtggctccaccccgacgcggtgtgtcggcgcgaggagggcgcccaggggtggtgtagtgatcttgtgttgtaggtttgtcggctgcccccccgcctgtcctgatgagacgtccgctctgtttagttgcgtggggtgaacaagaaattctcgtggtgtgcgccgtcgtcatcttgtccaatgtggggcgtccgcccccanagagcgtcttgtcgcccgccccttttttttacggcgacgaccgaggtgtactgaaaaaaaaaaagtcttttgggntgattttatagcgcgccccgtttgcggagccgctgagtttgtcggtcgccccccgtggctccgtccatgaacaaaagacaggggtgaacacctgtcgcccactggtaaagggatcaatatatataaggggcccgcggtgaaaagtgttgtcgttacgaccacgcgcaccaatgttaggccccggtgggtaggtatgaaggccgccccctggttgtttgaaaagagataacgaaggtttgtgcaaataggggcgtagacaaaaatgggaaagcagctacagaaagaacccttggtggtgagacaacaaggcgcaacgcctcatgggtccgccgctcttgccgaatagatgtcttgctccataatatacgcgcgggcgcccacctgtggctgtccacgcctcnccatatttagnctcccgccacaccattggtgagggcgcgcgcctcacacgcgggtatctgtacccacacgttcacgtgcgggttaccacgcacaccgccgcaccgtggcccacacacactgtaggggagaaacgcaccttttcttagttactttctaaatagcgccacgcgaaatacattacggagcgcgcgagtgatatgtagggcggccacgctagataggacacagtatgtcgccggcgggaggtgggagtgcgcgcgaggtaatgggcgggagacaaccacagcaggggtggggcgagtccgcgggcgtccagaggtgattgcgccccgacccccccgcccccacgcgacgcacgcgtggcgacaacatcccccgccccatcaaagaacgaga

SEQ ID NO: 502567 - DNA, 155 bp, Homo sapiens
tgttacactgagggaaagggtggggttaggctgtgatattaatttgcctcaataatgttaatctggactggttcaagaacaaagttaaagtttccacgcgcaaactttgttttcaaaactgccgacattgcgaacacaagtggctaggcttcacg

SEQ ID NO: 502568 - DNA, 454 bp, Homo sapiens
  misc_feature (129)..(129): n is a, c, g, or t
  misc_feature (146)..(146): n is a, c, g, or t
  misc_feature (156)..(156): n is a, c, g, or t
  misc_feature (230)..(230): n is a, c, g, or t
  misc_feature (398)..(398): n is a, c, g, or t
  misc_feature (401)..(401): n is a, c, g, or t
aaaaatgatgtggtaaacatacccccatatttatttgaaagaatgcaatccccccacatcattgttgccaaatatgaacagtgcaaaaaactgcagttcccttttgcacccaaccctatttgcatcaanaattttccctaactggnccatgttaanaaatgtgtgtgggccgggtgcagtggctcatgcctataatgtcagcactttgggagcccaaggcaggtggatcnccttaggtcaggagttggagaccagcctggccaacatggtgaatctccatctctactaaaaatacaacaattagccagacatggtggcacgcatctgtaatcccagctacttgggaggctgaggcaggagaatcacttgaatccgggaggcagaatttacagttagcntgnggcgccattgtactccagcctcagtgacaagggaaagctccaaaaaaaaaaaa

SEQ ID NO: 502569 - DNA, 129 bp, Homo sapiens
ctaccatgtgagctctccatcttatatagctcatccccagatactgcaggtccaacaggcaaggtcaaagccccactcctgagctccaaattttccagcagggaggatcctcctgggccactcagtggg

SEQ ID NO: 502570 - DNA, 127 bp, Homo sapiens
tgtcactagaggatcccctcccaagcatgaggaactggactgagccatgtgctggataatagtcggttatctaatgagctctatatgcattgccgcagtatcctatggtactatgctactgtataga

SEQ ID NO: 502571 - DNA, 350 bp, Homo sapiens
  misc_feature (116)..(116): n is a, c, g, or t
  misc_feature (210)..(210): n is a, c, g, or t
  misc_feature (307)..(307): n is a, c, g, or t
gaaaatgcagattcactgagccagactaaggcatcagtgactgttcctctacctgcctctcacatggagattgtgtattcagtgaaaggctgatcaaagacccaaaggaatgcaanagtttatctcttatctacctatgacctgcgagctgcccaccacccccagttgttgcgcctttccagacagaaccagtgtacatcttacacgtantgattgatgtcctgtgtctccctaatatgtatcaaagcaagctgtgcctcgaccaccttgggcacatatcctcaggacatcatcctgaggctgtgtnactggcatgtccttaaccttggcaaaataaactttctaaattg

SEQ ID NO: 502572 - DNA, 916 bp, Homo sapiens
  misc_feature (561)..(561): n is a, c, g, or t
caagtgcttgccaaaaaagttgtggcttgccaaacgaaagtgtgtgaggactgtcaacgcgcttcgggatacaatgacccctccacgcttggggcccccccacactggtggaacccgccgggcggccctcaaatgtgaccaaagggcattctgcctaagagctcccaaagtgggtccccgaagaaacaggctaggcgggaaaatcgggaggcccctcttctctaatcactcgctctcgggcgacaccacaggtctaaagcgttttctcgccccgggaatgagtccatgagcaagcccctcgttagacaagaagggttattcaaagatcgccctcttttggagagtgcggcttcaccacgaagcccccccccggaaagttgcggagagtttttcctaccgcgcccactctgcggtctgcgccatcacaagaaaaacccccccgcggccaccaccccggaggcggagagcgcacctcctgggccgcacgcccaaaaaactgggggtcaaagagaagaagaacgccgcctacccccccccggaagaaccaaacccctgggcgtngaactacacccacaagggagccgtgccctcggcaagtaaaacagtcgagccagaatgggcccgctgtgaccacaaggaggcgagcgaactcctatcggggggacaataaagcgccccgggtttcccacgatccctgcaaacggtggacagatcagaagcacgtcttgtacatgcgttagcacggccaatgtggcataaatatgattactggcggcgagacccccccctgtgctagaaacctgcgcccttctcgctgtgcaggcgtttcttgtaaatcggatcccccaccaacgcccaaacaaggctcgcccaccgagaagaaatttttacaagaaaccataaaacggacaaaaca

SEQ ID NO: 502573 - DNA, 436 bp, Homo sapiens
attattggaaataaccacgtctcagcagtgctagttctcagtttggagaatgggaaatcgaaaggatcagattcagagacctacaagatggggtactaacaccacccccaccgcccccaccaccacccccagctcctgaggtgctggccagtgcacccccactcccaccctcaaccgcggcccctgtaggccaaggcgccaggcaggacgacagcagcagcagcgcatctccttcagtcctgggagggggtgacggaaccagcagtgtgtggagaccagcttcaaggagcggaaggctggcttgaggccacacagctggggcggggacttgtctgcctgtacttcatggggggacggctccacccggcctgcgccactgtgttcttaagaggcttccagagaaaacggcacaccaatcaataaagaactgagcaga

SEQ ID NO: 502574 - DNA, 116 bp, Homo sapiens
cggtccccgccgggagcagacagatctggtaaacttaatggtctctgctgtattaagttcaagtcttcatggttaggttttccggggccagaggaggttgagatctagttccatag

SEQ ID NO: 502575 - DNA, 374 bp, Homo sapiens
tttttttttgagacagagtggactccgttacccaggctggagcacaggggcacaatctcgactcactgaaacctccccctgccaggttccagcgattatcctgcctgagcctcccaagtagccgggaccacaggcatgtgccaccatgcccagccaatcctgcacctccagtagagacagggtttcgccatattggtcaggctggccttgaactccgaccccaggcgatccacccgccccggcctcccaaagtgctgggattacaggcatgagccaccgcacccagccattttcaaccataaacatttattctgctaaataaatatatactatacttatataaagcaaagaggatttaaatttctcctaattgt

SEQ ID NO: 502576 - DNA, 185 bp, Homo sapiens
  misc_feature (10)..(10): n is a, c, g, or t
ttggggggcnaaaaaaaaaaaggttttttggcccctaaattccccaaccttgggttttttgggcaaattttgaaaaatttttaaagggcaaatttttaaaaattttttaatccaaaaacccgggaactttaaaaaaaggtcccgggggcttttttaaaaaaaaaggtggggggtttgaaaattta

SEQ ID NO: 502577 - DNA, 296 bp, Homo sapiens
cgtttttgttactcttgtgagtctcattttattttaaaatacaatgtttaaaagtatacatagtaacagactttctttggggaggggaggtagattctgctctagcagacgtacctcgctttatagacacccgcttgattccattctgagagaggaccgagaataaatagttatcccgactgtgaacagggcagacttgacggggattctaacatcaaggcgctttcgatatttccacagccaacatgcatccactagggtcatatcacagtacgacttcagcaatgaatattcct

SEQ ID NO: 502578 - DNA, 752 bp, Homo sapiens
  misc_feature (752)..(752): n is a, c, g, or t
agcggagtggcggcggagatggaggagggaggccggtgataatgtgtcggtgcaggcccagcagtctccaggcggcggcccccggcggcacggacaagaaatgcctgatcggcgatatggtagacgtgctgggatgccgcgtggagcaatggaacgaagatacaggagcttgtctgatagaggtataaacatcgttcaagatgaattggaggatgctcgttgtacacgactagggtgagaatggatacatcccgtgttatcgagccatgcgctggcagcgaatttgctgaatggtccgacttcggttcgttcatacgactatatctcagtgacattcatgtgcccatagccatcttctaaattttcgtgacgtccacagatatgagcgaacatgaatggaaggtctatgagaacatggtccctggtggagaactaagacgtttgtgcatgctgacatcattctcacgttgtgggaccatgaccatgagtggggaggcgtgagatgccgtcaagatatccgtgatatatgggctccgaggacggaacttggtactgatggggtcagtgagtagtgtcaggcatctggcaggagaagtggctaaggagtggcaggagctgtgatgaccgcagagaaggtccgagcgtgagcctctgctcactctggtgacaccgaaatcggtcccctataacattggccacaatgcagagcatgaggcttgcgaactgttatggaaattgacgcaggtggacan

SEQ ID NO: 502579 - DNA, 643 bp, Homo sapiens
  misc_feature (347)..(348): n is a, c, g, or t
  misc_feature (397)..(397): n is a, c, g, or t
agcagtgtctcacacctctaatcccagcactttgggaggtcgaggtggacagataacctgaggtcaggagttcaagaccagcatggccaacatggtgaaaccccgtctctactaaaaatataaaaattagctacgcatgggccgggtgcggtggctcatgcctgtaatcccagcactttgggaggctgaggcgggcagatcatgaggtcaggagatcgagaccatcctggttaacatggtgaaaccccatctctactaaaaatataaaaaattagccaggcatggtggtgggcgcctgtagtcccagctactcgggaggctgaggtaggagaatggcatgaacccgnnaggtagagcttgcagtgagctgagatagcaccactgcactccagcctgngtgacagagcgaaactccgtctcaaaaagaggcaggagaatcactagaagctgggaggcagaggttgcagtgagctgagattgtgccagtgccctcctgggcaacaagagtgaaactctgtctcaaaacataaaggccaagtcattttccccattaaacatgttattaagacaatacgttgcacattatataattaagtgtccttaaatgttggtgactgaatttggtcaggtcaccaatattctg

SEQ ID NO: 502580 - DNA, 289 bp, Homo sapiens
  misc_feature (46)..(47): n is a, c, g, or t
cttttgatttcttttaaccctcacccgcggggcgggggtttttttnnggggggggggggtccccccccccctctctccgggcctggtgtgacaaaaaattctccccccggggggggatttttgggttttcctttttttttccctttggtttcccccctttttccccccccggggcccttgggatttagggagggtttggggggggggccccccccccttttttttccccccccccccccccctgtttttttggcccctttttcctttaaaaagggggtttttgttttta

SEQ ID NO: 502581 - DNA, 1542 bp, Homo sapiens
  misc_feature (1280)..(1280): n is a, c, g, or t
cgggttccggtgttggtgggtggtcttctaggtcgtcgggggtacgggctggtcgcgtagcgatggctgctggtggccctcgtctgctggccggagggggtgacttcttgtcctttgagctgcggccttgttgcgctctggcgctgtatgggggcgtgtgtgccttctgaggggggatttcgtccccccgggcgtgcgtgggttccctagttgggtatgtgttggtgccggctcgtcttttgtgtttgctgcgggtttgtatgtgcggagggtaggtggttgccccttggagttctgtcgtaaaaggtttttctccccgctgggggggggcttttgtgagggcgtcttctgccctccatgtgttggggggattggtgccagctgggccggttgtgtgccctaaggggagtgtttcccaggggcgttcgccccaggggtgtgatcgcatgtgtgatttgtgggtcttgctgtcgcgtttgtggaacggtgcctcaagggcgcagagtttgggatgttctcgcccccgcggtggtgcgatgtcttccgacgtcgggggccctctatcgccgcacttgggtttgttgaggctgtgttggcccgctccgccccggagtggttttcttcccgcggttgtgtgagaaaggggtgggcgctggtgtttgtctggcgccccgttgttcgccgtgttggtgctcccgccaccgccatggtaggtgttgtgcgttgtgggaatttctgtggggcagcgcagttggtaggaggggcgtttccccccagttttgtggcgcgtgacgcggctgttggatgaaacgacttgggagttccgcagttgtgtggacctcagcggcccgccccttgggggccgcatatatgtgaggtcgtgtgtcctccaatcgccggtttttcggtgtctttgttttctatggtgtgtgttgcccccataggttttatctgtatggcgcttgcttagatgcgccccacgtttttgcgttttttgcccgccagcgcgtatttgggggcgcccagtgtgtgcgagttgcgctcgccccggagggtgagagaactctgtcgttcacaggctgagaaaggtgttgtgggtgccacttggtcacggtatataaaaggggcttatatttggtgttcactgtttagacgttgtgcctcgccgcaaagattttttctttccagaggccaccacaggtgctctatggaggcaccacccagcaggcacaacgcccaaaggctcttttcccctggagaaaggctcttgttttgtatcnctaagaagagttataaccccactttacccacacctgagaaggtatgctcttttatatgtaactccgctggggaggcactgtacacgaggctctgggtaatagcaccacgctttaccaccccacccacgagttcgtgtacctaccacgtcgggcttgggttttcaataccacgaacgttaattttgaagaggaaaaagtccaaaggtgcttcagccttgtactgtgtatatatatttaaaaaaaaacccaaaaaaaataaaaa

SEQ ID NO: 502582 - DNA, 954 bp, Homo sapiens
gctgacgggcacgctgactggaggctggcggacaggcgaaaggaccctgggcaggaccagaggagcgagagcagaagaaccacacccagcagcaatgtcagcggaagtggcacactcagagggggtagacgagtcagaaaaaaagaactcgtggggccctagaaaaggagaacccaacatgagaagtggtgaccctctcggagctcctgacaaggcaccgggcaccacgggaagctacaacgaccgggcaagaaaacacccagttgtgtcaacggacttcttgacggggcaacattaaagaagggcgctgtttaacgcagtggccaccacggcacttttacttcaacattaactcaagcctcgaggcaggaacaattggagcgcacccaaggaccattccagcctttgtgccctcttgtgtaacttccccatggagctgacacctgaaaaggtaggcgctgaccaaggacatggaggtaatcccttggggggaaacactgtgaggagcatggtgctgttgccccagggtttgcccagaaagttcgtggagcgattcacttacaattggggcaggaacgagcgggagctactgttggcccatgtcatacacccgctacgtgggggatctctccggggggccagggtgctgcaagaagggtggccagcgagcacttgaattcccccagcacaggggaaagggccccagtctacctggtcggagatggtggaccaggccagcagtaaggagtccaacggcggatgaagcctggctgacttgaagcaacgacgtcgggagggccacaagttgagataacggacgtacgcggcagggggcacgggccgaagacggggggtccggacagcgagaaacgcgaactccggggaaaaaggggggcagtctacaatgtgggaaccacaccggggagtggaagaacacaacccaactcacacaag

SEQ ID NO: 502583 - DNA, 146 bp, Homo sapiens
tacatactatcagcactgtaatctgggtgggaccatgtcacttgtacactggagaagataggcatttgagtggatgagagggcttatggagtgggaatgcaaaaattctctgctacggactttatcaggtgaacataacagacttg

SEQ ID NO: 502584 - DNA, 154 bp, Homo sapiens
gtatttaggcagctgcttaaactctgagcttccatattttacctgtataaattaggcataccatgtagtggtaggaaataaatgaataaatttgggtgaaacatacctagcattgtacttggctatggcatattaaggctatatttcctggtac

SEQ ID NO: 502585 - DNA, 279 bp, Homo sapiens
  misc_feature (2)..(2): n is a, c, g, or t
  misc_feature (86)..(87): n is a, c, g, or t
  misc_feature (109)..(109): n is a, c, g, or t
  misc_feature (207)..(207): n is a, c, g, or t
gnggcttgggcttgcgccgttgttgagaaagatgctggtttcgagttttggagatccttgatataaaagaaacaaagacctgcttnnttgttttgatgattccttggcnctaacctccgcttgtgatggaccctagaaatactgctatgttcggattgggttctgattccgaaggtttttcacgacagagtccttctgccctctgtnctggcacattggtcagtccgagagacgtggagctcgcccctctcgctgtggcggacgaggcccttcgctaac

SEQ ID NO: 502586 - DNA, 371 bp, Homo sapiens
ttgtgcattcaacgtaacacaaagacgccagaatcgatttgtttcacgcctctaatcttatattttcgtccaagtagaggcggacgggatcaccagaggtcaggagttgaagaccagactggtcggctgggcgcggtggctcacacctgtaatcccagcactttgggaggccgaggcgggcggaccacgaggtcaggagatcgagaccatcgtgaaaccctgtctctactaaaaatacaaaaaaattagctgggtgcggtggcgggcgcctgcagtcccagccactcgggaggctgaggcaggataatggcgtgaacccagaaggcgaagcttgcagtgagccaagatcgtgcagagcgagactccgtctc

SEQ ID NO: 502587 - DNA, 191 bp, Homo sapiens
gccgagatgtctcgctccgtggccttagctgtgctcgcgctactctctcttctggctggagctatccagcgtacttccaaagattcaaggtttacttcacggccaatccaggcggagattggaaggcaaaatttcccggaattgcccatgtgtccttgggttcaacccacccacaaatgaaggtggctctc

SEQ ID NO: 502588 - DNA, 826 bp, Homo sapiens
  misc_feature (310)..(310): n is a, c, g, or t
tcttttgtgacagagtctcgctctgttgcccaagctggggtgcagtggtgaggtctcggctgactgcaacgtccgcctcccaggttcaagcgattctaactgcgtcagactccccagtagctgtgactacaggcaggcgccactacacctggctaatttttgtatttttagtagagatgggggctcaccatgttggtcaggctgaggcggaggaccctttgcaccactgcactccagcctgagcaacagagtgagacccagtctcagaacaaaaaaacagaaacaggagaaaaaccatccatataagcanagaggtacttaaaatgttgcaaaactaaattccaaataacgtctgtggattctacaaaatctaggaaatacacatttccaataaatctttgtacattcatctgtaatgcatttccttaggtgatttgagtcctttaggagtaaatctgtatctttagctgtcccagaagtaatcacaggcgttcattgtctattcaatgacaaagtattgtgaactattctatgaaataataaaatatcagtgttttcagagtacatggccttttcagtagccttttcagtgtggtggcacgtgttcccagttctgccagtggatattgttatctttgatctacaactgggaagctaaaacccagaaagttacttgtctaagactatacacctccaagaaggcagaactgtggctgctatttccaactttctagtctctgaacatgtaataaagaactgatttccaatttacaatgaataatagaatttacaatgaataatataatttactataatataacaaccg

SEQ ID NO: 502589 - DNA, 1256 bp, Homo sapiens
  misc_feature (489)..(489): n is a, c, g, or t
  misc_feature (582)..(582): n is a, c, g, or t
  misc_feature (946)..(946): n is a, c, g, or t
taccctttatctccgtatagtatattcgtttattagtgtacgctcttgccttatgcttcttgttgtccttatctctactcgctatgtcgtctcccaagaagttctatactgatattattctgtactctctgactcgactgcactagtgtctgacttgtgtttgatccacaagtagtgctgtgctactactacacttaagtacacttgtgtgctcacgatggattcaacagatgggatactcaggctaaacgtctcacacaggtacgtcaactctgtgcgcggacgaccgtagtcatggattttgtcgaccgcatcctactatgacatctcgttctcatattacagcacgaatttttgaattatctggtgctatcttctaccctgtacttgtacatctctatggtttaccccctttttacgttagacaatctcttgaatcaaaacaccagcttggttgctcgtaatcgagcagcggtgggctaccttacntacgcttgacatgtgacgtaacgtcaaaaccctgtgcaattcttagtcatgcatcattgtttgccagtactgacctgttgcatggtttctcgngagatcatgatcgttagtccattcgtctctggtttccctccttacatggtagtcatcgcacgttttgccatcgcacgccatttagatccgtgtccccctacttgaaactcttcgtgccgttatgcgtccagttgcttcacgacaaccttaatgtccgctgcagactgagttacacgtcttaacgctttcgctatatgccccatcataggatccgggattgattaaccatgaatgaatgtctaccccatatattagtatcgcaagaccccgtctctaaagcgctacatacgactactactcacgatcatgtgactataatcgcacacttacactatatacacacaacacatcgtcgttgatgatnatcacgcggtgcactgtctgaacaaccagtagtccggccatctggccagatatcttttactcaattgagcttgcagtgctatgggtcgatacctgacgtcacctgtttacataactggtgtgtcggtgtccaatacctccgttatatacacagctgtgttattagacaattatagatccaccatccatcatcgattacatgttgtcactgatacagtctagacgatacgaactgccgttgtggtccaatcaccaggcgctaacactacttggatgtgctacttcatatattcctcgtatcagcacgccat

SEQ ID NO: 502590 - DNA, 516 bp, Homo sapiens
  misc_feature (17)..(17): n is a, c, g, or t
  misc_feature (70)..(70): n is a, c, g, or t
  misc_feature (189)..(189): n is a, c, g, or t
acaaagaggagggaaanggagcaccgaacgtgtctagtctctagttcctgctgggaagatggagccgccngaatgtgtctagtccctagttcctgcgggaagatggaaccgccatcttgaacgtgtctagtccctagttctgccgggaagatggagccgccatcttgaacgtgtctagtccctagttcntgcccggaagatggagccgccatcttgaacgtgtctagtcgttagttcctcccgggaagatggagccgccatcttgaacgtgtctagtccctaggtcctcccgacattcacccgtacaagctcccagctggcttgtgtatgtctgcagctcgacttgacaggctgttcattgttagaaaatgacttggggctgcttttcgttaaggagaaaagctgccgggcgcagtggctcacacctgtcatcccagcacttttggaggctgaggcgggtggatcattaggtcaggggttcgagacgagcctgaccagtgaaaccgcgtctctact

SEQ ID NO: 502591 - DNA, 195 bp, Homo sapiens
cgtctccgtgtatgttgctgtgtaatttattttgctcaacaagataaattatccaaataaccagagtggaaattaatttacagtaactacatgccaccttaagtactatgctctattgcttaaatgtcacttagtgtgaactttattgtactgggtaatttaatttcttaaattaacttttcttcaaacactatc

SEQ ID NO: 502592 - DNA, 394 bp, Homo sapiens
ctagaggatccctgcattcccgggacgctccgtcctgccctttgctcctctcctatgccttcccagtgctggctccattttgaaccactccggacacgcaggggaagctagatcatccatgagataaatacggatgtacagaagcaatggattaacgaaggaggtcatgggcagtgtggcttctgagccagtttaggttcctggggatagcagacagtctactgcctacgatacagactgaaccttcctgctcactttctgtcctatctcttcctgcacccttataaaccatttgttagtagatcattatgacatcatctgctatggctccttcttttcaccggacttactccgggcctccgtatcactagctgttgccttttacatcctgcta

SEQ ID NO: 502593 - DNA, 171 bp, Homo sapiens
aacaagcctggttagctggggtgccaggcctccctcaggcagcaggcagggtggcatggcaattcaagggtgttcagtccatgttcagctatgtttccagtgtgctgagcatcagtcagtcagtggtctgtgtgtgctaggcagtttcaagtttgcagtagtcaggcaatg

SEQ ID NO: 502594 - DNA, 357 bp, Homo sapiens
  misc_feature (319)..(319): n is a, c, g, or t
tatattgtttattcaccataatttaatacagtaatgttatgccttttacctttttaaattcctatgccttcaattaaaagtgaattacaggctgggtgtggtgtcctcacacctgtagtccccagcactttgagaggcccaaaatgggaggacccacttgagccctaggagtttgagacccagcaagaccttatctctgctaaaaatttaaaaatattatctgagtgtggtggtgcatgtctgtagtcccagccacttgggaggttgaggttggaggattgctttagcccaggaactgcaaggctgcagtgagctgtgntcaaaccactgcactccagcctgggcaacagagcaaga

SEQ ID NO: 502595 - DNA, 350 bp, Homo sapiens
gaccagaatattgctttcagtctcccccaaaagaaaccagtacccaaagcagcactcctgatttcccccattcctaatctccactgctgccaactactaatctaacttactgtctctatggacttgcctattctggtcctttcttataaatggaacgacgcaacatgcagcccatggttttctggctgctttcactgagcataatattttcaagattcacccaggtggtaacacatatcagtgcttcattcctttttatggctgaataatactccatggcatggacagaccatatttgtcttatctgttcatcactgacagacatttgggttcgttccattttttggctg

SEQ ID NO: 502596 - DNA, 132 bp, Homo sapiens
gatcgctctggagatcaggattttaagaacacctgagcaacatagtgagatcctttctctaccacaataaagcacttagccaggcctgatggcatgcgtctgtagtcgtagctacttgggaggctgaagtgg

SEQ ID NO: 502597 - DNA, 349 bp, Homo sapiens
gacttcttttttttgccagtctcctttttatatcatacagctctgccataaacttctcagcgtctgccaacggtcacctcgccacactcgcaccaggttgtccgccgtagccagcaaacagagtctgcccatcagcagcccaggccagggacgtccactcggctcgttctgccctgctcctggtactgaccacttcttgcttcacctcatccacaatgatctttccctctaaatcccccatctcgctcgcggggcctgtggcgccacacacccactagcggttagggcctgcgcacacggcgttgaccacgtccccccatctaccgtgtacaggcgctcgccctcgttg

SEQ ID NO: 502598 - DNA, 594 bp, Homo sapiens
gctgggttctctgctcagagtatcataagactgaaatcaaggtgttttctgggctgaattcccacctggaaactctaagtaaaaaccctcttccaagctcattcttgttggcagaattcagttcattacagatgtagcactagaggtccctgtttccttgttggtgatcatctagggtccactcaaatcctagatgttcctgcattccctgccacatgccctcctccaccttccaaccagcagcagtgcttcaaatctctgacttcctccatctctgacttctaaacccagatttaaagagttcatgtgattgggtttgttggcccagataatctccctattaaagtcaacttgggactttacctctgcaaaatcccttttgccatataatgtaacaaaatcacagagtgatgtctcatcattttcacaggtccaaactcaaggggaggagattatataagtcattgggggtcattctagaattctgtctaccacaaggactctcagaaactatagaggaaattaagttgaaatttaagaagccaaagaaagaaagaaggaaagaaagaaagaaagagaaagaaagaaaggaag

SEQ ID NO: 502599 - DNA, 651 bp, Homo sapiens
  misc_feature (615)..(615): n is a, c, g, or t
catatcatcagagaaaatcatctcactaaaggaagacagggaggaaaaagaaggaaaacagaccacaaaaacccagaaaacaaataataaaatggcaggagtaaattcttaattaccaataataccactgaatataatggattcaactatttaatcaaaagtcatagagtggctagatgaattttaaaagcaaacccattgacttgtttcctacaagaaacacacttcccctataaagacacgtgtacactgaaaataaaaggatggaagaatatatcccatgtcaagggaaaccaaacaagagcaaaagttgctgcactgatatcagacaaaatatatttctagacaaaaactgtaacaagagacaaggtcgctatataatgataaaagggtcaatttagcaagaatatataacaattttaagtatatgtgcagtcaaccctggagcacccagatatatgaagcaaatattattagaggtaaagaaagagatagacactaatacaataatagctggagacttcaccccactttcagcattaggcaaatcttttagacagatattaacaaaaaaactcaatctgcactatagaccaaatggatctaatagatatntacaaaacttttcacccaatggctatggaatataaa

SEQ ID NO: 502600 - DNA, 1134 bp, Homo sapiens
  misc_feature (332)..(332): n is a, c, g, or t
gaaagcgaggaaggaagctcctgccccgtccgtaactgtctgatagccataggcgaaggctttaaaggccaggaaggcagatgttgaaaggtgtccgacagtccaccaacagacagaaggaagcatccggcacgtcaactccacgcttccggcggccgtaagacactgcgactccggagactagccgcaaattatcgctcgtgatggagcgcgtcccaggagaaacagagcttgaccacgtttgctactcattcatagttatccgactgatccactgatgtctgccattgaagaagatacgaaagacataacaacgacagcttgttgttcanttggtgggagtgttaacacgcctaagcgaagcaccaggattaatagcaggcctgtcgaagcaaggctgtgatgacgatgtgatgctggccgaaggtcaaacaaccctgattcgggcctgatgggagaggacgaaggcatatgttcgactggctcctgattaggatggctcttggatgttgccaacaaaattggggatcgatcgtaaagctggagtccagctgggctaattctgaatatatagtatatatatatcttttcgaccatggaaatagaaggcacctcaaatcttgcggggacccacaaggcggggaggcggaaacaggacgtaacctaatagtgggcgctgccccaaaccgggattcctagacccagattgctgtgcccacaggggaagactggagagatgccccataagtggggagctcgcaatacactattcgcaaataaacacgccaggtaaaaccgtgctataacgtgatcgttgcaacacacaccacacacagtagtgaacacacacaacaccccggtgtctgtgtgtcacacagcgaagcgcacataactcgacacaacacaagacactggacaaaacaagaaggaggggaacaaaaacaaccacacgacacacaaaaaaacacacaagagaagcacgaaaaaaaggacaccacgcaaccgcagagaaaaaaaagaaagaacacaaacgcacaaaaaacatacttaaagaagaacgaaaaacaaagaacaagaagagaaagcagaacgaacccacccaaagaagcaaaagcaaaaacaaaccatgtaaca

SEQ ID NO: 502601 - DNA, 467 bp, Homo sapiens
tacctcctcgtgctcgggggggtctaatatataaccggggcttttttttttgtggatacccttccatgtttccctcggattagaagcccctcattccccccctggctgtgtgtggcccccccactcattggttagtaccccccggcggtcgctcttttcacgcctctcgttcgcgggttctttttcctctggtgcccccgcgggtgcgcatggtaaatcactcttgttctcccacgggactacttctgtggcctctctgtgggccctcttttggggcgcactcttgagaaccctgtggtgccccaaaaacgcgcgtcgggtgctcgcgctgccccgtgatttcccgcgggtaatctttcactggggccccctcgataagaaaagccccgcttttcccaaagaaaaaagggtttttcccccgaccattttccccttgggggggttcccaaaaaaattttttcccccca

SEQ ID NO: 502602 - DNA, 540 bp, Homo sapiens
gcgggcgcagttgatcacgcctgtaatcccagcactttgggaggccaaggggggtggatcacgaggtcaggagatcgagaccatcctggctaacacggtgaaaccctgtctctactaaaaaaaacaaaaaaaattagctgggcgtgctagcgggcacctgtagtcccagctactcaggaggctgaggcaggagaatggcgtgaacccgggaggcggagtttgcagtgagccgagatcgcgccacgtgatttccagcctgggggacagagtgagactctgtgcctcaaaaggaaaaggaaaacaaagaaaaggggggtacacattggtttggctctacgtgacagttaataccacaactcagaggcattttttttccctttcaattcttcttctaaatgtccaacacttttctgatttggtgattggaggttgtagataagcttcctgaggctccattgagacggtatatacgtgacacttaacagtctagccttcctcggtgcatatagatatatgatgggggcatcgataaacaccggg

SEQ ID NO: 502603 - DNA, 154 bp, Homo sapiens
ttcacatccagtccaagtctcagcttcttaacccaagaaaagagacattgcagagtgagtcctcccaccttgggggctggccaggcggaccaagagcaagtgttgttggggcctgccagtacagaggagaatgggcatgtgttgtgtgatgccc

SEQ ID NO: 502604 - DNA, 512 bp, Homo sapiens
gagcaggaaaacgaaaggggcctgataccccccatctgtgcaggtcctcctgctttgttggctcataaataaggttttggaagtaaagttcaacacccctccttgctaaagacaaaatgatgaatggaggtcattcacctcttctgagaatcgtgtggaaaaagacggccttattcttacaaaccgggggcctgggaccagcttcgagtttgcgcttgcaattgttaaagccctgaatggcaaggaggtggcggctcaagtgaaggctccccttgtttttaaagactaaagcagcgaactgcgccgatcccttaaagaaacaggccgttaggaatccattctccctgtgttcgctttaaacaaaacagtggtaggttaatgtgttcaaaagtccctgtccttactacttttgcggaagtatggaagtcccaactacccaaagatttttcagcctacaaattgtgtttaaacatttttaacccttgtttgcagaataaacagggcctttagca

SEQ ID NO: 502605 - DNA, 304 bp, Homo sapiens
ggactacatacttccgaaataatgcactttcagttttcactttaaagacaccacaagccttttaaaagccctatgaggtaaaatttataaagggtggagaacacaagtttgtagaatccttcccaactcccacttccatcaaatctcaagaaatcctcctgctttaaaacataaacaatctcacaggatttttattggaccatattgcggaaaggaaaactgcattcctattctttttgatactaccagttttacggattttgtttccacttcttgtcaaaaaaacacgtatgttgctgatatg

SEQ ID NO: 502606 - DNA, 1167 bp, Homo sapiens
ggctgcccgggcagcggctggacaggctggcgcagcgcaagcgcctggggtgaccagcgtgacctcggccacccagtgccggcacccaaggtctccaaagctagccacgaccccctggtcacccaaatcatcccacacctcaccacaccaacgggatcagtgggagtccagagagcattcgccagacatccctggatggccaggtgggcaatgcaggcccagagggaagaccgactggagcgtgacgagaatgacaaagcacatgttggcaagatcacccgtcaacacgccgtgcgaccgacacacacagacatcccacaggtgcctggacgcaagcccacaacatgtgacccatgacttgcacgaccaaatggacttcagagtgcattgacaagcagcctggacaacggatgagaacagaggacatccggggagacccatccaccaatccacataggggaacccccacatcgacatgccctcatttttcacgatccatttccgagaaaccatcccacagcgacacattgaagggccatcaccatattggcaccccggacaagacaacgaaggcatcttgtacatagccaacaccccaaagggagacattccatgaagacccccaaagacacaccattccaacacagacagaggacccaccaaagagcgcacgactagcaggcaattagcaccaaacaaccaagagcatagcccacagatacgaacccaggacggtatccccaaaaaagtagggagcccacacacaaggagcccggatgcacccaccaagaacaaccccacgccccacgcaatatacagcggatgacagaggagcacaatccgagaaggccgagtggcagcaagggacacacaaggagatggccagaggacaacagagcccgcaacaagacgtactggcccagcgagagcaccagaacagaccaagaagccatgtgaaacaagcacccgaatccacaaacaccgggcgattgggacgagaagagacccacggcagggcccatgggccaacaggcggacacagcaggaaaagcggatcccgcgcaaagacgcacagcaagacacaccccaataacccaaggatacaacgaggggaacaacggagacccgatataacaacccaccacacacaaacgtaccgagatcaac

SEQ ID NO: 502607 - DNA, 850 bp, Homo sapiens
  misc_feature (584)..(584): n is a, c, g, or t
gtcatatgtatgtacagtgggataaccttggtcctcagggacagtgtgtgactctagtggtcttcctatccagtctcttgcctaatagatatctgggacctctactggctttaatgacaggaaataatgttatgttgaggttatgcttccttgtcatttgctgattgttcctactaagaatgtaggcatttcgagagttagatccatgcctttcagccattttgagaataattgtcagaaggaatgaaattatgcagaatgtggccaattatctcttgtatcaatctggtatcttttggcagaaccctcgatgtactataaacttgtgatacagttaaaagacaatatatagtagtagtagtatattcttgacatgcattaaaatagcagccctcgtcccagctaatcgtatgccatcttggtattggggaacgagaaattcccaaatatagcccattgtctgcgtgctggtgttcccccgatttgtatgggatcccggagttcccgtgagtgttcgtgtggtaaactgatattgtagaacaatcggacacacggagactgatatcacgactactgttctagangagctgagaacattagtggcgttgtaactactacgtgagactcctaacgttgaagactctccaaaagcaaaacagtttggttctaagatcatttatcgtgatgtacgataacacagggtagaagaaaccttgtagtgtctccacatacatgggccaatgtcgaattgccttgttggtttgccacccacttgggctatttcagtaatttacttggggacaattgcttatatttggaaccactaaacaaacaaaacacccaacccaaa

SEQ ID NO: 502608 - DNA, 388 bp, Homo sapiens
  misc_feature (12)..(12): n is a, c, g, or t
ttcttaatgagngctaaggatgacaggccctgtgtcactgttttctagcgcaatctctcttgagaacccaaaatcgtgggcagctggttcctgatgcaccaaggttttctctgggtgaaaaggaaagctcactcgtcctgggagagggcctcggatcgccaccaccgctgctgtcgtctccactaaagaaaccttctgtactttcttcccagttacatattttgtattgtattgttttgttttaaacagtaatttacttaaaaaaaaaaaaaacaaacaagctgttatgtactgggcgtggtggcacatgcctgtaagccagtcttggctatgtagtaagcatccgtgacattgcaacataataaagcaaaccccctgtgacaagttt

SEQ ID NO: 502609 - DNA, 324 bp, Homo sapiens
agtatttttctgagttaaaagcataactaaagttacttgtacgctttgctttctaatgcttttactgagtggtaaagatgagccacctatttttgtataatagccagatactattatactccgaatacaaatattgaaaaaatgacaggaaaacccctagatcaaacttggtcaatccatggcctctgggctgtatgtggccccaggatgactttgaatgcagcctaacacaaattcataaactttcttaaagcgttgtgagatatcataagggcaggtttaattctcttctattccccacaacagcaatcgaacgtgaaaggg

SEQ ID NO: 502610 - DNA, 119 bp, Homo sapiens
taaacctgatctattgatgtttgctgcactggctgtccaggatgaagtcattccttttcagcatgcaggtttcaatgggctggatttctggggcattcacatgtgctcaatttcaaccc

SEQ ID NO: 502611 - DNA, 271 bp, Homo sapiens
ggtacggcagctatccggttcactcacacctaggcattgtgcgatgacatcattgtgtcggttctgatccgatcacagtatctgtaaagatcatcttgcaggcatacagcataaactagagagctgcaccatgttctttctaggcctttcataaatagctttagcatcctcagcacttttgtccttaaaaatcaagaagctcctggaagacttctggatataccaggcttgtaccaaattgaaccggatagcttgcggggtaccgagctcg

SEQ ID NO: 502612 - DNA, 419 bp, Homo sapiens
  misc_feature (31)..(31): n is a, c, g, or t
  misc_feature (114)..(114): n is a, c, g, or t
gaaagcaagcaggtttgagaccctggcagancaggggagtggttctctctggtccatttccctctaagaccctggaaactgctgctgtgtccctttcagtgctgggcctagagnctgccacaagttgcagatgtggggtcttgggaagtagatacgttcatcttagtatctctcaatgacaatgtccactgattgactggaaacgtttggaaaaacacaaaaacaagttggaaggaaattacttctgttgttcaggccacacccttgtcccttcttcagtctctaccaacaagcgttttgccttatgggtgcagctcaccggcagctgcctcattcatttcccaggttctaagagctttctatgggggcgggtacctcggtgcgcattagggaatgaggacgaagctaaaattggacct

SEQ ID NO: 502613 - DNA, 214 bp, Homo sapiens
  misc_feature (146)..(146): n is a, c, g, or t
  misc_feature (185)..(185): n is a, c, g, or t
  misc_feature (205)..(205): n is a, c, g, or t
tttttcttattatgaactatattttcctgactctttgcatgtgtagttccttttgatttcaagaagtcagcatcttgagcaatgaaaaattatttcaacaaaattttaaatttgtttaagaggtgcatattctccagagcagtggncctcaacctttttggcataatgggaccagtgtcatgaanaacaatttttccacagactnaggcaggaa

SEQ ID NO: 502614 - DNA, 616 bp, Homo sapiens
ggttggctgggctaatcaagatgtggaggtaacaaaaaacattgtctacgaagtcacctgccaatacacaatatttcccttggtttcagagcagatagggcaactgaaaacatctcctatcttgtgctgccacataggaaatccacacttgggcaaactgatgtacaggggcattttacagcacccattgtgcaatgcagagtctctgggtaaaggacagtggttccttctggaagacacatcatatttttgcgtcagagtgaacattcaatttactgcagatggatcatagtggtgttctgatgccatgcctaagctgggcatactgccataccacaagttcattccagcaatgtactgagataactgctcttcttagtctcaagtctccttggagacagtccaggtaggttttccctactttctaacagctcttggctatctccttctggactctgcagttcatttccagattccccactctcctgacaatgctcctctttgattcaccctgaaccctgtggaaaagaacaaggaatccaggcccttcttcaagcctagtgtctgatgtacagacggtgggcatccaacagcacccacacttgacttaattttt

SEQ ID NO: 502615 - DNA, 812 bp, Homo sapiens
  misc_feature (418)..(418): n is a, c, g, or t
gcggtcagactcccaggtccccgggtgccggccaagagggcctactcaagctcttccagatcggtaaatcaaccgagcgagaccccggtccacccgggacgcgcgcggcctgtcagctggccaagtcaaagagccgcggcaggttgctagcgaccgtcacagcaatagtctcgatgggccggctgattgcagcggttgcaacaagtagccggagcatctcgccgtcgatcacgggtcgacagacaccaggactcgtgtagggacgtgtggtcgcgaaccgaagggcccgctgcctagtggcatgtggagcttgcccaagtgtctagctgatacgctccatctgttgatgacttggcctatgtgtactcgtggacggcccgagagcgaagctggctgtgacagcctcttgggaacgccntctctcacgcgtgacgctctcgttgcgttggcgtccatccatgcgcctatctttccatcatgcaagagggcattatagtagttcattcgaaggcatcggggctctcatcattcattgtggtaggacccacaagagttgtcaattgcacatgtgcagacttcagactagccaagtggcgtgaagagctttgggacttgacacacaacggctacgacctagctacgggcgaacgagaacatgttcttgtggtgccccaaggcttcgctgcttgggttacctttgggggaaccccaatgttgccttccgttgaaggtgctgccatatcctagaacggacaatggaatcttgcaatgcgcccaggatttttggagggggtggaagactataaggataa

SEQ ID NO: 502616 - DNA, 317 bp, Homo sapiens
  misc_feature (1)..(2): n is a, c, g, or t
nnttgactgattgctgttgcagaggtttcgcacacagactctttgaggtcaagatggttgatatccaatatttttaggcgggccaaacatacagagaaggcaagatacactagaaatttaaatggacattacttgctatcaaattctacgtgacacaagacatgtcactcccatggccagaaagcctaaattgggaaacagttgttagcaaaccctttcaaccatctaaacgaaaacacacaatttgaaaatgcacagaatgttttgctgcgttaaagcgcatggagactcttgctccaatttaaggggggggcccc

SEQ ID NO: 502617 - DNA, 646 bp, Homo sapiens
  misc_feature (100)..(100): n is a, c, g, or t
  misc_feature (125)..(127): n is a, c, g, or t
  misc_feature (135)..(135): n is a, c, g, or t
  misc_feature (141)..(141): n is a, c, g, or t
  misc_feature (143)..(143): n is a, c, g, or t
  misc_feature (146)..(146): n is a, c, g, or t
  misc_feature (160)..(160): n is a, c, g, or t
  misc_feature (162)..(162): n is a, c, g, or t
  misc_feature (164)..(164): n is a, c, g, or t
  misc_feature (166)..(166): n is a, c, g, or t
  misc_feature (179)..(179): n is a, c, g, or t
  misc_feature (187)..(188): n is a, c, g, or t
  misc_feature (212)..(214): n is a, c, g, or t
  misc_feature (219)..(219): n is a, c, g, or t
  misc_feature (222)..(222): n is a, c, g, or t
  misc_feature (225)..(225): n is a, c, g, or t
  misc_feature (233)..(233): n is a, c, g, or t
  misc_feature (237)..(237): n is a, c, g, or t
  misc_feature (357)..(357): n is a, c, g, or t
cgccgcgggcatttcttccactgcccgtctgagggaacgctaagtagtgtgtccggcgccgtgttccagctccgcgttgttccgcgagaaagcgagaggncgagcccgggctggtgcgatggccnnngtggtggncaagcngnaanggccgccgttcatnancnangcggccgtgcggncaacgccnncgtcctggattattgccggacctnnntgtcngcnctntcgggggncacngccggcatcctcggcctcaccggcctctacggcttcatcttctacctgctcgcctccgtcctgctctccctgctcctcattctcaaggcgggaaggaggtggaacaaatatttcaaatcncggagagcctgtaatatttgttccaccccctgctcctcattctcaaggcgggaaggaggtggaacaaatatttcaaatcacggagacctctctttacaggaggcctcatcgggggcctcttcacctacgtcctgttctggacgttcctctacggcatggtgcacgtctactgaaatgggggcccgggggacttttttaaaaaaccagatcgggaggactgtggccagcaattaacaccatgtagacttccttcttaagtggttgaattcgctgctgtcctgtacgttaa

SEQ ID NO: 502618 - DNA, 124 bp, Homo sapiens
agtgtcctgggctgtgcatgggtggtgaatcaatgtccatggcgcacatgttctccaggaatgtgtcagccatggttgcgtgcagacacgatgggtctagaatgaaggcagtcccgggttcact

SEQ ID NO: 502619 - DNA, 846 bp, Homo sapiens
  misc_feature (176)..(176): n is a, c, g, or t
  misc_feature (178)..(178): n is a, c, g, or t
actgggctgaagttgaaatacgaatgcattcatcagtcaatcaattaaaaccctagcactcaaatgctcattgcatgtgggcattctcacaggcaccaggcaggccacagttttgtttggtctcacctcagtacctgagccattcagggaagagagaacaagagcaacgtgagcananatatcccgacctcaaactgtgcactggatttgctttctggtttttaagaatgagccttaatgtacctaaaaagggccttgaatggtcagagatttggtcttagtacaatgtctgcactaattcagaactccagaaaaggccctcctctctacatcctttactctgtaactcgaccttcagtcttttcataaatccttattcctaaatgggaggaaccatcttatctctgggagaaactgagcaataagaagcatgaacttgctcacctgtcctcatcttacggcccctttcctggtctactatccatccatgctaacctcatcttttgtcctatgctggcctcataaagatggagcttacactttggagaagagaagagctcggaaacagttagtaagctatttaaaagtgagcagaggagtcagaagtgatgagtaaaaaataatttacacatttctcagtctggatgatttcaagaattgtgggaccatttaaagagacaggggagctggaaggacaggagtccatcagtggtcaaaagaggactcctgtgggtaaatgtggttcacaacaagaaataagatacctggaagggcaaatcagaagccacagaaataatgtgatcaaaataatattaaggaatactgaccttcagggatcaggaagga

SEQ ID NO: 502620 - DNA, 1618 bp, Homo sapiens
  misc_feature (1571)..(1571): n is a, c, g, or t
accccgtctggtatgccgggcgggacccaggcagctgcgtccagccaccggcaacaagaagacccacctgacggagctgcagcgcctcctggacacgggcttcgacctggcacgatcttcaagaacttcgtcgtagatgctgcctagggttgcattgaggccacttgccgctctcgcacaccgcatgacatgccgccttgcttctcgaactaaagaatagtgcctcagcgcgtgcccgacagctcaccgcgcgcatccatcgtcctgtgcaacaacaaccgctcacctcgtgcgtcgttcatatgcgagttaagggctgatcggatccgcgcccatccgatgtgccattggcgtagctgcggataggggccattgcggcgtggccacaaggcttcttgcctggagattctggagacatcattttgtccctaggagggactcggggggcgtagccagcgcagggaagtgcatacgggtacgcaccccacgcaaggcgaatgtcccttgcggcgaagcggtgctcatgcttctgtgctccacacaaacgcattccacacacaagtgcttcaaacccatcggtagggaattgagggcaaacatgggaggcgcatgtgctgatggcgttggctttcgcagtcatgattcaacgacaagtcgaagagtcgacaagggcgtccttggacaattttgacggacttattggaataagcttatcctagacgtttcaagtcctgtacgcgttttcacgaatttcctggtaaagaacgacgcacgcccatagaggactgttccgaggactcactattgtccccacttgcggcccttggtgaacaagaacggggattcccgatacaggagcagataggagagatcccccaatgaggccggtcgcgcatagctcgcaacacatttgaccgtgcatttgaacccccggggtggctgcacgaacatagcgcgaaagataggaaaaagcctttgtgcccatatggacccctatggctcaccaccaaaacgcggggcaccagctcacacaagaactaacataagcacgcgttggcaccaagatgaaaatcaaggggtggagaacacatatcaaagcggagtacacaagaggcgattgctgtaagttgacggacccacaataagacatatgaaccacacacagcacaaagcacacacatatggagcaccacatagcacgaagagcctcgagcagccacaaaagacaaacctatcgacagtgcgaaaccaagcaagaagacccacggaaccaggccaggaacccacgcggaactgggcaagagcgcagactacacggcggtgagctagctaaacagccaacgcacgcgcagcggagcatgaagcacccaccccagcccacgacacaagccgctagtgcaaccaacacaagagagcgaaccatagggaccagatcatagagagccacacagcagcaagaacagacgaggtaccagctagagcgcagacaccacgaccgagccacgtgagagcagacagcaaagacagataagggcagagcacgataggcaaaatgcacaccgaatcgcganacaacaatacatagctgcactcccagcaacagactaggtagctagac

SEQ ID NO: 502621 - DNA, 737 bp, Homo sapiens
  misc_feature (350)..(350): n is a, c, g, or t
  misc_feature (375)..(375): n is a, c, g, or t
  misc_feature (438)..(438): n is a, c, g, or t
  misc_feature (634)..(634): n is a, c, g, or t
  misc_feature (636)..(636): n is a, c, g, or t
gattacaggcgtgagccaccggtgcccggcctcgcagatttctttatcaaatgatgttatcagttctgcagttcatgcaaaagactgaaacatcttataatttatacgtggcctaaaaactattcttcttaaattaggtattgatttcaaaacatgccagcttttttgattgcggattagttaatataagaatttttttaaccattgtaatttactacctaagtgatttcattcagtctgtttgcttcagataaacctgtacgatcaatgactctcaaatctttatttctaggtccagcctctacctttagctccagacttgtatatccaactgccagtaccatatatantttgggtatttactaggtatctcanatttaccacatgctcagtaaatgataactcagtaaatgatttatccagttgttcacaacaaanaccttggggtcattcttcacttctttctcttgtaccctaaattcaatgttttaattagtcctataaactctgtcttcaaagtacattatgaatctgaccacttagcctcaccttccccagactacctgagtcaaagccaacattatttcttacatgagagactggattagacttaccaactctctcttggttctgngnttcttcacaccattatgggggatttactgatctacaccggtttaggtagttgctggctaaatttctatgaatccattcatttcaactcggtttacatgctt

SEQ ID NO: 502622 - DNA, 654 bp, Homo sapiens
  misc_feature (350)..(350): n is a, c, g, or t
  misc_feature (375)..(375): n is a, c, g, or t
  misc_feature (621)..(621): n is a, c, g, or t
gattacaggcgtgagccaccggtgcccggcctcgcagatttctttatcaaatgatgttatcagttctgcagttcatgcaaaagactgaaacatcttataatttatacgtggcctaaaaactattcttcttaaattaggtattgatttcaaaacatgccagcttttttgattgcggattagttaatataagaatttttttaaccattgtaatttactacctaagtgatttcattcagtctgtttgcttcagataaacctgtacgatcaatgactctcaaatctttatttctaggtccagcctctacctttagctccagacttgtatatccaactgccagtaccatatatantttgggtatttactaggtatctcanatttaccacatgttgaacttgtgatttttcttctacaaccatgttcctctggtgtttctcatctcagtaaatgataactcagtaaatgatttatccagttgttcacaacaattaggactattaactgtgagtagtaagagcatatgtgaaagtagccactagaggatgcctagaagaagctcactgggaggggcccatagttgagtatcataggaggctgagtagagctagccagtaggaggagtnagagaggagaggagagagagagtaggagaggga

SEQ ID NO: 502623 - DNA, 217 bp, Homo sapiens
ttcatcgtcaagccaattagacaattctgttactgatagtttaggactttcagtttcattagcaactttcaagatgtcaagcaatgctgtaatatcgttagtgttcttcaattgtgccaatttaatagctgatccaacgccgaacgggataccatcctgctttaccgttaccaccttatccattcccttaacaaaccgaattgaaaactggatttat

SEQ ID NO: 502624 - DNA, 1662 bp, Homo sapiens
  misc_feature (705)..(705): n is a, c, g, or t
gtggtgtgtggactggctggcgtgtgtgtcggtggtgctggcttcgtgttctgtttgttgtgtgtagtcgtcgcttcttgctgtgtgtgcgttgatctcgttgccgtctggattttatctttggtgtgtgctcgtgtcgctagtgtgtggctggtctcgtcgtctcgtcgttcgtaggtgcggtgctctggattcggtgggttcgttgttgtttggctgcttctgatgtgttgtctcttgcgtcgtctggcgtgcgggggtggttaatagagcaggtctcttcttgtgggccgccgcctcgctgttttcctgccgggggaagccccttcttcgccgcgcgggtttgttgcccctccccatgaggagtccccccgcggcgctagtgttccttcccctccttcgcagcgattgtttatcgcctatttgctcgccggggcaccggagtgatccctcctgtttgttcgcacgccgggggtacccgctcgtttgttgcgccactctttgcgcccctctttttttggggggccccgcgcctatttgtgagccaacgcggtgggttcgacacgaaaacgtccgccgccgcggtgtgggtagcactccgggtctctccggggtaatttctccccccccggggctttatttctcgttctggtgcggcccttcgacggcggtggtttcccccgcgtggcagggaggatggttccngctgtttgctcccccatggagggcgccacgtgtgtggcgccgcccgcgccaacacccaccgattggtggggcagtttattttcttgagtgaacacctgttttgactgtcggggcgggcggactcggaacccgccatcgcgggggtggtggttagtagacacacaacgcgagtgtgtccccccttttaagtagtgttccccgccagcgggcacatatggggttcctacaccgacggttgcttccccttggagagagataaaaatattgtggcgcgcccacacatctgtgttttcttaaaaacaaagagcgcgcacacaatggccgggatatcttcacatgctccctatacacacatttgtgtgagacatattattttcgcggcgttcttatgttgttgtttgtttggaagacacccatcttttgcgtggtttattgtcgccccgagctgtggagatgttgggtcgggcgcaccacataccaccagcgctctctattgcgcatctcttcgcagatccacacccaggcgccttatagcccacatctcttctcccaccccttgttaactgtggacatctccacgcgtctaccagcgcacacacccctggcgtataaatattttttatttgcttgaggccgcgcattttcttatagttgcccccgggcgtggtcttctcaggcgtccttgggcgtccacggatggtctcttctcttgcctcacgctttccacaagggcaccacgggcccagattgtgagctcttgtccctctgccacttcatagccccacaccagaggtgttctataacctcttttaatagaattgaatctttcataaaatatggttttagttggtgggccagtttctttaagctgggaattgtacaattcctcctgtaaagttttttcaacccgttaccctgccactctatactaccataaaggatggttttgggtgtcca

SEQ ID NO: 502625 - DNA, 983 bp, Homo sapiens
gcgccttggtggtccatgagaatgtcatcagttgtccccatctgggtgcgagctgcatggaggttcagagacgtgtgtggggaggaaatgctgtgcagtacgtgtacatggtgtaggtgagaaatcctctgcatcgaggtgtttgtagattcgccctacggtccctttgcactggtgtcctatcattttccagacatccagagtccttggatggtggctagtgcgaggagagctctgaggagtggacatgatgcggagcctgggtatgggtcccccagaagggaaccatccaaggtggattcacgacgggggaaggatccccggacctgatgctgatacactgcctaaagcctggagattgttgtcgttctcggacctgaaaggaaggctctccatggcaagtcgggtatggtggactggtgcgtaacagcgtgaagcttgtgtgtggaaggaggttgccttcaagttgtgaccgagacttctcttaagcttgctgcaatgcatgggtgagtccagcggttgccgcgggagtgcgtccatgacggtgggccatgtggggcagcccttttcaccagggctgtgggcttttggaccagaaggcacgtaccccctggttcttgcgggcggtccaatggtgctgtttcaggaccagaggtgcctctcggcagggggcgtgccttggtccttattcgggactatgtccttgagccttgagtttgttgctaacatgattgctccttgggtgaggcgggtggggtgtggctgactcaccaggattcagggtgcagaggggaactggacgctggagttcctgctgtgggcaggtgaaggtgaaagtggcactgacctcaagtcatatattggccacgaccgctgggtttgagaaccccttgacagggaaacccttggtggggccgaatgtacggaaacggagaagttgaggccaaaaaaaaagtgggcgaatatgggaataggtattcaac

SEQ ID NO: 502626 - DNA, 1457 bp, Homo sapiens
  misc_feature (720)..(720): n is a, c, g, or t
  misc_feature (915)..(915): n is a, c, g, or t
ggtcgaagcgaggacgtggtgggtcctctggtgcgagaattccggatttgccttgggtgcttccggtaggagcggtaatcaattgtagctgagcaagcacaggaatgacctaacaatatccatgtttactatcatactccgtggaatgggtgatcacagggacggctcgaacgatggagccgttcccgaatgactgggtgtgtggcgtgaccatggtgcatggcgcatcacggtcataggaaccgtgtcagaagccgagaggctcgaggagaagacataggtgacgatccagacacgtggatcgatgcgacacaagggacaagtgataggcgtacgagaaagatcggacgtcggtttcttgtgattattgaaggattaacttgcatgggagtcgagtagatgtagatgagagtaaaagggcgtagcatccaaaagggttgcttgctcatctagcaggagaccagtagactagattggatggtgtgccacggacttggtgggggcccccgggatgttcgcagtcgcataggggcgtcgagctagcacactcaggctagttgaattctttcccatgataggtaatgtccgcaaagaaaacaattatagagatacaatcagagggtacacagcacccaaaggaaccatacacatttatattacaccaagaggcaatgttacaggaggagaaggtcaatccacaagttacacgcagagttcctncgcgaaaggagaagccagcccgagtatttggagagaaaattccggtggcaagcattggagtgtgataggacaaagggcggtggaatttccaccacgtaagcatagggcgaaaaggaactaacatctggttcgggcggcaagccccacaggcgcgggggataagcacctactctggccgtgggggtttgtataacnccaattggattaccgaagaggcaagttcgtgtccgccactcacattttccttcgcgtattatagggggaggccagtgggtatacaaatcctccatggcaatatgtatggtgcacgccacacagcaggaacatagggacacagacaaattcctatacagaaaggcccctgatacaactttcggcgctttggaactcagttccactccaggcaagcggaaacaatcatccctggccagttagcgtcagctagtatccccatggtgaaacgggggctggattccacgaaaaatgggtttgtgggcccacaggagaggtaacctgagctctggaccaggcaaatagggggcttaacgcccagaaggctggggtatggcacaatccaggggtagacgcccccaaattgtgctaattacatttcaagcagcggggttacacaaaaagcggaagtgtaccgtgtgaacccttggctcactggtagagagagagaacagaggacttctcacacccctttccaccaacgtgtgccttggacaacagtcggg

SEQ ID NO: 502627 - DNA, 257 bp, Homo sapiens
cgaacatgttgaataagtccgggcgacattaggccttgccgcgcttctcgcggaacccttcgcgaccaaagaaggctccacactgtgcacagaagaagtgttcagggcgccacgtcctgtcaagggctggcaccactttatccaggatggggccgcagcagtagtagcagcgctggagagaagaggttgtggtagacctttttacagtagggctggccatcccgctcgaagaagtgccggaatccgatctcctcctg

SEQ ID NO: 502628 - DNA, 166 bp, Homo sapiens
acaggcaagcggcgcccgtaaaaaacagcaatagtaggcacacacaataacaaaataagcatctagtaaaaagtaaaactagactagttccactaagatacagagcctagctatgatacacacgccacatagtaccaaaactagaaggtagccgcacactagataa

SEQ ID NO: 502629 - DNA, 619 bp, Homo sapiens
  misc_feature (29)..(29): n is a, c, g, or t
  misc_feature (71)..(71): n is a, c, g, or t
  misc_feature (99)..(99): n is a, c, g, or t
  misc_feature (101)..(101): n is a, c, g, or t
  misc_feature (117)..(117): n is a, c, g, or t
  misc_feature (144)..(144): n is a, c, g, or t
  misc_feature (178)..(178): n is a, c, g, or t
  misc_feature (187)..(187): n is a, c, g, or t
  misc_feature (204)..(204): n is a, c, g, or t
  misc_feature (207)..(207): n is a, c, g, or t
  misc_feature (226)..(226): n is a, c, g, or t
  misc_feature (230)..(231): n is a, c, g, or t
  misc_feature (240)..(240): n is a, c, g, or t
  misc_feature (263)..(263): n is a, c, g, or t
  misc_feature (272)..(272): n is a, c, g, or t
  misc_feature (281)..(282): n is a, c, g, or t
  misc_feature (286)..(286): n is a, c, g, or t
  misc_feature (301)..(301): n is a, c, g, or t
  misc_feature (331)..(331): n is a, c, g, or t
  misc_feature (426)..(426): n is a, c, g, or t
tcccttgactttgacttctctatctagcncagcttctttctcaccctaaatgtatcccagtacacttagantttcccacatttgttcataatcattctntnacaaacttcatatttntataatcgaggcctgtaatatatcatntaaataattgaaaattgaacattatgttgaaatngcaaccatntcacaccattgaaaagnccnaatatatcagaagcagagnactnnctgaacatnacaccgaatcacatgaatggatnactaggccntgaggggannccgncccttagaaaaatgnagagtatatatatcttcagggctgtgaatnccatactagttatcaatattttaagatcattctgtatatacatattttaaattatgcaagcaaactaggaggagaatgtgcaattttgagggatncctaatttgcattcggttaggggatatttttcaacctcttgctttatactctgatatggggtgtgtttatgaacttgttaatgttatttaatcatgcagatttccaatcagtgtattgctcatttactgacaaaaagggaaaattcgaaacacagaaagggaaaataaactgacttttataatgaaaaaaaaa

SEQ ID NO: 502630 - DNA, 232 bp, Homo sapiens
gacgcaagtgtagaaaactgatcaaaggtacaagctgcttttgttgcacgccaggcagcagaggtaaaatggtgtggctcacaagactagggtcttgaggaaggatctgaggggctcaagaagtagggaaaggatgaatcctggctagtgccagtgcctcgcaggctgaagttgaaatttgaaatctgcagcataaggttccagcacctgaagggaacagctggtgaaaagc

SEQ ID NO: 502631 - DNA, 307 bp, Homo sapiens
tagaagatgtgtaatctaggtaactcggcctttggcgtatcggtgtaaattctcactagtatacagatagtcccatgatctgggtccaataggtcatccaaattccagcggtgatcgccagagatgggtacacagtgaggcaccttatagatgatatccaattcctcaatggagtatttggtcaatctttatttatcccatagatgcaggggatatcagagcgtctgtgagccttccaccacatcactaaggtcatcatctgtcccggcaatacgtagagtcacatcggcataatgaatctagtata

SEQ ID NO: 502632 - DNA, 461 bp, Homo sapiens
gatgatacggccaatgaatacatgaccgtgaaacgcggggcctcacgctccttcatgacctttgagcgtttgaagcaggaggtgtcagagacagtaaccataggcataagtataattgtgtcgtgcaagcgtacatagcgacgctcacctttcgatcgatccatctcggttcgttcctactcaattgtgaatgcagaatacatccaagccgtggagtgtgccccactaattagggaacgtgatgctgtgggtgatagcgcgcgctgagacacagtgtaatttaaccctatgtgttgattgttgttggtggcccatgggttaattcctgctcagtacgagaggaaccgcaggttcagacatttggtgtatgtgcttggctgaggagccaatggggcgaagctaccatctgtgggattatgactgaacgcctctaagtcagaatcccggccaggtgggctacg

SEQ ID NO: 502633 - DNA, 269 bp, Homo sapiens
  misc_feature (204)..(204): n is a, c, g, or t
  misc_feature (242)..(242): n is a, c, g, or t
gtacttcaaagctcatgtttttttttaatgttttatttttattttttacagagatgagttctcactgtgtttttttttttggccgttgaacacccggactcaatcagtcctcccgtctgttcctcccaaagtgctgagattaccggcatgagctgccacgccttgatggaggctgagactttttggaatccctccctctctccntgctcctgccggatccgaagtaccgttttccctcttanaccatgtgcgtgggtccctcgccctgt

SEQ ID NO: 502634 - DNA, 740 bp, Homo sapiens
ggccacacttgaagaggctgagggaggcggtgtcgccgccgcggcgctgtcatggagctagcgcaggaagcgcgggaactgggttgctgggcggtcgaagagatgggggtgcccgtggcggcccgggccccggaatcgacgctgcgcaggctgtgtctgggccagggggctgacatctgggcctacatcttgcagcatgtgcacagtcagaggactgtcaagaagatccggggaaacctactctggtatggccaccaggacagtccacaggtccgtcggaagttagagctgggaaagctggctggtggaacccggcctggggggccaaaaattccagggaatctcggaccaagagccgtgaaacgcgtagagtgagagcagaagacatcgtgagcgctcagagacagcgggccagtggacgcaggcagcgtagcacactacaagacacccaagcgtcgagctctcctcctccgggcccaagctggggccatgcgaagacagcagcatacgctccgagatcccatgcagcggctgcagaatcaactgaggcgcctgcaggacatggagaggaaagccaaagtagatgtgacctttggatccctcacgtcggcagctctgggcctggagcccgtggtcctgcgtgatgtccgaacatgctgcaccctccgggcccagttcctgcagaacctcctgcttccccaggccaagaggggcagactcccaaaccctcatgatgacca

SEQ ID NO: 502635 - DNA, 265 bp, Homo sapiens
aagtagtcgtaatttgtataattaattattttttagtttatatttaataatgtacaaacatatgatgtgacatgaagtaaactttaggggaggaaccaaacaaaatacaccgaaacaacaagtaaacaaacaggtgagcagatctcttctctcctgtcaaagcagcaggctctcatcatgcatgcatccgtgcgtgtacatgcgtatgtatggccgttggccgcccggagcgagctgcggcggcatgcctagtcgcagcacatct

SEQ ID NO: 502636 - DNA, 174 bp, Homo sapiens
gcggcagagacccagtcaccctgaatctcctacctgaagctgcccaagccttatatcaccatcaacaacttcaacgccagggagaatagggatgtcttaaacttcacctgtgaacctcagagtgagacctacacctacatggggtggctacatggtcagagcctcccggtcagt

SEQ ID NO: 502637 - DNA, 548 bp, Homo sapiens
  misc_feature (168)..(168): n is a, c, g, or t
atggagaccaggctgagggaagggtgcgcagaagatgaggggcagcatcagtgcagctggcagcagaaccaaattctgcaggccaggacagtggctcccctttctctggggaaaaagggagggctgtgtctggccaggctgaggttccagatctgttgccatcatggncccttcagggtcctgggaaattcctggcttctcctaaatcagggtgaactgggcctccaggatcaggtctggagcaggcccaaatatagtcctggatctgcctggattaggtgccaatgtctgagtctgggttccagatcaactccagaccccaggctggatctggccccatttgagttctgtttccccttggagctgggctctgggccctgggccagcatctatccttgtgtagcatctgtcctgagctcagactgggtctccctgcatagttagtgttctttgttgggccaccagggtggggctgttcagagctgccaggtcttaaatccccccgttccacgttctcagactggggctccctgggtacagagctcgta

SEQ ID NO: 502638 - DNA, 351 bp, Homo sapiens
agagaatataaagatacaccatcttgcctgatcacagtccaagatgatcagtgatagacaggtcatctgtgtcttcaatgtggcacctccaccatgttacatgaattgtggatatttcatccaacacaggaccatgttacttctggggtaggctcacccgtgaaagcacaggctactgttagaactttgccttcatcaatgctgatatcagatggaagagcttcaattttaggcggaatacctcttatgcctgcttaaagcattttactagttgagctttccagtagtgtcatattagatattcccataaagctgctggaactcattgcaacacggtctctcagggtaccg

SEQ ID NO: 502639 - DNA, 366 bp, Homo sapiens
  misc_feature (173)..(173): n is a, c, g, or t
gtcgacctcggtggcaagccgttaccgtctattcccggcgggctgtccagcgacccgtggctgtaccgcgccagtgaagtgttgctgcaaacactggattgcccgattgatccgttgcaggaacaggacgcaatgtttgacctggcccaggcgctgaacaatgcctcgggatncacggtcaatcgcaagactttcgactaccgcgccgccgaacgcgcgcggaactttatccacagcgccttgggccggccgatcaccctcgatgaaatggcggagtacgcaaaccgcgaccgctgggcgttgtcgcggaattttcggttgttgttcgggaccagcccctatcgctacctgaccatgcgccgcctg

SEQ ID NO: 502640 - DNA, 459 bp, Homo sapiens
  misc_feature (15)..(15): n is a, c, g, or t
  misc_feature (67)..(67): n is a, c, g, or t
  misc_feature (70)..(71): n is a, c, g, or t
aattccccatggatnggaagcaaataagatatgatgactaaatgtgacctaatattccggattgcanccnngaactgaaaaggccattaatgggaaaactggtgagcctacattatacaaaataacctgatccagtgcctccttcaaggtgtccaagattatccaaagacataaaagaatggatgaactgccatagattggaggagacaatgcaatgtgaaatcctgaatttgaccctgaacagaaaatgcaatgtagtggagaaactggtaaaatgcagataaaatctagtttagttaatcatattgtaccaaagttcatttcttagttttgataactctgatggttataaaagatgttgacatgaagaatgctggatgaagtgtgtgcagcaactgtttgctgtttttgcaacttttctgtaattttaaaattatttcaaaataaacttttaaagaa

SEQ ID NO: 502641 - DNA, 160 bp, Homo sapiens
tgtttcatcatatatttcgtcaacagaaaccagtaactgatggtgatagtgattacagccagcctttatcttcattttctccaactgacttctctagacagttattcggtgagggaacagctgccgttgggcttccctgtgcacgagttgcattaataaa

SEQ ID NO: 502642 - DNA, 1463 bp, Homo sapiens
agcggaggatccgggattacttctgtcttcaggggtagagtacaggcttgccggtgggggatggaagaatgggatatgctgaattaagccccttgtgatgaccagttcactgtggtgacgctgtgatgcccgtggttcgtgacctccaagcgtggctcaataagagtccactctacatgccccgcgtacgcgcataggcatagactcattcgtctggtcgcgatccgtgctgggcaggcacaaccgaaactgcttgagagaagctatgaggaaacctacgagagatggcggagctcgagcattgagagcctctgatgtcgggtgatctacagtggcacttataaaatagaataaaatgctaaaagagtatgctggtaccacggtggcaaggttgatttctgatcatatcatgggcatcgtaatgcattccttacccagaactacttgcgtacggggaatgcatgtttggtcaccaaacggacaacaattcaagtgttgtacccacgttaatcttaaatcttgccagatggggacttgggtcccttcttgaagttccctccacaaaggctattgtctgaaaagaagccatggccacacatacatcaccccttcgttctctctgtgactctaatgtatacaacttgttgtgatttgatccactcactggagagacattgttgtcggttctccaagtaaagggtatgtgctcgacttgcattgcaaagaagagggcgacgggaaggcacaagggagagtggaaggaaagggagtagcaaacgtagtagagattgcggtgtacgaatatttagctgtttgactcttgctcgcataatggtatcttctggggaagtaatttccacagacatcggggttccgtgaacacattggcaacatactctcaggtttggtggaactatgaacctcccagggggggagctagcggagaaaaaggctttgcccttttgggaacactctcgagaggtccctgatggcgctctattcagagtgttgtcaaggagttggggcatcaggtggccagtggggcactaaacttccatgccatgtcctctacaggttcaaccacctacttgagcgaatgagggacacgtctgggaccgagtggctcccctcacaggaccaagaaagggcagtgagggcctaccgttgtcttgaccgacctttgagggttggtggggtctcaaagaataggaagtggttcgtctaggtacgacaacaacggagagagcagatgtcatatcctttgtaagaacagtgggcgattttgtgagggagcacatctaacagccagataaggaatgcgtcgcgaggcgttgcaagtagttccatgtagcatcaaactacaacccatgcgttacacacatatgggtggagctacactggccgcatagtattgttatacaccctcgttgtgccatattagaccaactatgatgtgttatccg

SEQ ID NO: 502643 - DNA, 1072 bp, Homo sapiens
  misc_feature (1071)..(1071): n is a, c, g, or t
ggacacctatctgtatacccggtagcatcaagaactgatgtgtggcttcatgtaaagcttacctcgtggcataccgcactcgctgtccttacagctccacattggcgtgcacttgattgatcgtttaatgggtgacaaggcaagaaagcccttgaatcacatcctaccgacaataactacagagtgatcacacagaccgtagccgatctgctgatacttgggcaattctggattgcaccatcctcactctctggagtgagttttgtgagacgtactgaagtgccataatggggtcaatgcattgtactcgattttcgcatgagactttctttacattcaaacatggagatctgcaagccaataggaacagggtgtacggtgggctgattatgatgaacgcatcaatcgagctcactacaagttcccgaaatggaacgcaagaacagaatgaagaaaagtcagggggactgcaaaggccaaatgttggtgctggcaaaaaagccgaaggaagtaaagggtgcttgcaagtgattgttaggctgtgagcacactgatggaatttttccgcaagaacattaattatactaaaaatcttcaataataaaatgaaaaataggagaaaaagaatggagaggcgtccagggaggaatttttcagggagggggggaaaaaaaaaatgtgaataaaagttggggaaagaggtagaataaagaggaattaagagaaccagtgagatttggtgaaaaaggtgggaaagcagcaggggaggacccaactaagacaggtgggacacaaatgtaacctggaaaaggacgcacgataaaacccggataagaaaccatcgtcgaacaaaggcccggaacatgaagaaaggagaacagacgggcaagagtgcacggtggaaccgcaaaccaaaatatgcaatcaacaacgatcggcacaacccaaaagtcagcaccaaccaaagactgagtgaaccattgcagaaacacacgagatagcaagaacaatacaaagaagataacaacacaaaatatcacacaaaaacatgatggtgagtttttctgatant

SEQ ID NO: 502644 - DNA, 241 bp, Homo sapiens
  misc_feature (3)..(3): n is a, c, g, or t
  misc_feature (16)..(16): n is a, c, g, or t
  misc_feature (34)..(34): n is a, c, g, or t
  misc_feature (36)..(36): n is a, c, g, or t
  misc_feature (46)..(46): n is a, c, g, or t
  misc_feature (50)..(51): n is a, c, g, or t
  misc_feature (55)..(55): n is a, c, g, or t
  misc_feature (57)..(57): n is a, c, g, or t
  misc_feature (59)..(59): n is a, c, g, or t
  misc_feature (72)..(72): n is a, c, g, or t
  misc_feature (74)..(74): n is a, c, g, or t
  misc_feature (77)..(77): n is a, c, g, or t
  misc_feature (91)..(91): n is a, c, g, or t
  misc_feature (99)..(99): n is a, c, g, or t
  misc_feature (106)..(106): n is a, c, g, or t
  misc_feature (110)..(110): n is a, c, g, or t
  misc_feature (118)..(118): n is a, c, g, or t
  misc_feature (135)..(135): n is a, c, g, or t
  misc_feature (138)..(138): n is a, c, g, or t
  misc_feature (158)..(158): n is a, c, g, or t
  misc_feature (162)..(163): n is a, c, g, or t
  misc_feature (190)..(190): n is a, c, g, or t
  misc_feature (215)..(215): n is a, c, g, or t
  misc_feature (220)..(220): n is a, c, g, or t
  misc_feature (225)..(225): n is a, c, g, or t
ttnattggtctagtangggcttagcttaattaangnggctgatttngcgnncagntnangcagagtggggtntngcngaccttagctgttncagaaacnaagtatngcancttactgngggctttgaaggctctnggnctggatttaacctaaatttntatnngattattagtataaaaggggagatagntaggagtagcgtggtaagggcgaangagtngtggngaggaatggggtgggt

SEQ ID NO: 502645 - DNA, 150 bp, Homo sapiens
tatggcttgtgaggagtagtgtagttgtgttaatatttcagtgggtgatgaggatagtgtaggagtatggggtaattatggtgggcatgcagtctctccccccccattttgattcagcctaccttatttgcttattgcccccttcctgtt

SEQ ID NO: 502646 - DNA, 126 bp, Homo sapiens
cggataggccccaggcagtatagagtagctgctgggaagtatttctcagattccagtgcaccccatgtatctagtagaaaacacaatgggtaattaaatatgggaagtagtttctaacaattggat

SEQ ID NO: 502647 - DNA, 159 bp, Homo sapiens
gattgagaaggaggagcaggctgcggcggagaaggccgtgggaaaggaggagttccagggggagtggaccgcccccgtggctgactttgcgcacccgaggtggctgactggtccgagggcgtccaggtgccctccgtccccatccagcagttccctgca

SEQ ID NO: 502648 - DNA, 1191 bp, Homo sapiens
gggcgccgcgggcctgcgtgctggtgcagcggagcacttcttcgacctcgtacctcctcgtcctgtgcggccggccggtgtgagtgcctgggcccgcgtagggggcagtcggcggctgcctccggcggacggtgcctcgctggtcgccctggtccggcccgcgcctcgagcaggcagtgcatccagtgcatccggagcccgcaccagacccccgagcacgcaagcagtccccagagacttccgcccgaagcggccggcatgcaagccaccaagcggcaggccagcacagagaggcaccgatcgtaccgacaagccgagagcgaacctgcgaggtagaccccccagagtgtggcccccctgacctaccgagtacgtccgatccaggaacgcatcaacctattaccgccgggaacgctgtggactcggagcacaaagaaggtgtaacttctctgaacgggtgcgaatggaaggccattcacatcagacggccaacagtccccaagattggcaaggggccaaggcatggatcccccattgaggcgcgccaaagggctgtacctagctcatatcgacgcctgtgagtcgcccgcaacaggcctattatacaacagaggccaccttccagaggactacacagggacacgcatcgggacgattaccatgggcatcgcttaccgcgagaataattccggacccaaagtgcgggtcggaccacattggtgattgcgacacgggatggcaccacgccattggtaccacgccgagggaagagcagagggaaacgcatcaccccaaccctccggagcggagccctggcgatcaatattccggcaccttatcacgggaatgcccccatggcacaacccacaaaccagggtagtgccatgggaactaggagcatagtgtgaccacccacattgactatagtgagaagcccaagacaaattcgaaatttaagagatagagccgtgggccaaatccgcattggcaacacaatacaaattcggaatggtgacgggtatgaaggcaaaaacggatggcaaaccgcaatatccatcacaacaacttggggaatcaaacggatatattccccccccgcaatggaacgggggcaatgtgcctaccacgggccgccacaattcgggcagaccttgggacacgatgtgggtgcaggctaccgatccgacggcg

SEQ ID NO: 502649 - DNA, 212 bp, Homo sapiens
actcaatattcatcacacgactatacaccaacagactaatcaactaactcaaacaaatgataacatacacaaactaaaggacgaacctgatctcttatactaagtatccttaatcagtttttatgcaacaaactacaaaattaaataaaaaataaaaaaaacaatgaaataataaaacaacaacaaaaataaacaaaaaaaaccaaaataac

SEQ ID NO: 502650 - DNA, 732 bp, Homo sapiens
  misc_feature (106)..(106): n is a, c, g, or t
  misc_feature (111)..(111): n is a, c, g, or t
  misc_feature (160)..(160): n is a, c, g, or t
  misc_feature (215)..(215): n is a, c, g, or t
  misc_feature (248)..(248): n is a, c, g, or t
  misc_feature (261)..(261): n is a, c, g, or t
  misc_feature (313)..(313): n is a, c, g, or t
  misc_feature (315)..(315): n is a, c, g, or t
  misc_feature (321)..(321): n is a, c, g, or t
  misc_feature (325)..(325): n is a, c, g, or t
  misc_feature (343)..(343): n is a, c, g, or t
  misc_feature (350)..(350): n is a, c, g, or t
  misc_feature (359)..(359): n is a, c, g, or t
  misc_feature (401)..(402): n is a, c, g, or t
  misc_feature (405)..(405): n is a, c, g, or t
  misc_feature (416)..(416): n is a, c, g, or t
  misc_feature (421)..(421): n is a, c, g, or t
  misc_feature (424)..(424): n is a, c, g, or t
  misc_feature (439)..(439): n is a, c, g, or t
  misc_feature (444)..(444): n is a, c, g, or t
  misc_feature (446)..(446): n is a, c, g, or t
  misc_feature (457)..(457): n is a, c, g, or t
  misc_feature (472)..(473): n is a, c, g, or t
  misc_feature (482)..(482): n is a, c, g, or t
tgttgttttctgttgattttaaacagagaaaaaaataaaagggggtaatagctccttttttcttctttcttttttttttccatttcaaaatggctgccagtgtttncaatngatggacaacagagggatatgctggtagagtgttaatggcctagtgganaaagctgctttggaatgcggggggtctatccttggacactacgcacttttataanacatgtaatgctatatgacaaaatgctctgatncctagtggccaanggttcaatcagtgtatataactgaacacactcatccattggtgctttggttntnaatggngctnaaagtaaagagcccatcnttggcangtcatccangtggtacttaggcatttaatctgggctcaaatggttgaagannggnggctggtccanggttnggnatggggtctaatgcngtttnanccatgatagangcaggcatggtggtnngctagtttnctggaaaagggttcaaatccttttcaggacatggtcgttgcaggattcctttcaataaaaatttttttcctttaaaaattttccaaaaagaacaggagtacgatacacacacgaaaaacatttttgtgggcgggccttgcgcctgtcgaaaagagtttttaaaccccatcggtgggggggcgcgggccccatctagtagtgaccactgggcaaaggtggtcccagggaaccggggacgagaaggcggggc

SEQ ID NO: 502651 - DNA, 383 bp, Homo sapiens
  misc_feature (4)..(4): n is a, c, g, or t
  misc_feature (9)..(9): n is a, c, g, or t
cggncttgnttcctgcacttctttaaaaaaatagttctttacatgctgaggttcatctatgcagggcatgagctgaaaacagattcgagaaaggctgttcctacaagggaaggtcctgaggttacaacgccggcatggccgggaaaacatggctgcagcgatcccagcttcttgctgcccacaggggtggcacatctgggcacacactgtgagctgctcagaggcactctggtgggcagctcccatcgcctcagtcagtgtctccgtcctcttcactgccttccaggggacttggcacctttggcgcccgtgccacctgccgtgagagcggtggcactgaaagttgtggatgggcaaggtgctcagccactgggccatggagc

SEQ ID NO: 502652 - DNA, 406 bp, Homo sapiens
aggctcctcagcctccaccatcccccaggtgatgtctggtcaactggcctgccttcagctagaatcctgttaggtcggtttagatgaatgctccctgatatttcctcttggtaatcttccatccactgcccctgaccctgttccctgtctataaatccccagttttccatggtgtattcagagctgagtccagtctctctcccctactacaagtccccattgctgtggtccccgtacctgtcatgatggtcctaaataaagtcttactgtgctttaatagggtaggcattgaaaaatttttttctttggacatcattcatgacaacatggaaacctattgggggacaggcatggactgtggcaggggtctttaggaggctcagctttctggaggggccctgagggc

SEQ ID NO: 502653 - DNA, 946 bp, Homo sapiens
acggcgtttgccccaataaagacggtcccttatatgggagtgtttttttactaggggacccgtgtgacccccacgccctctgtgtgcttcgcccgtttggtctcttcttgcgcccttaaacacgacagtttgctcgttccccctcccggggcgcctcctccattaccgggccgggttcctccccctctaaaataccccggcgccccccgggtcccaaaacgaaaactgtggcgtgcaccccgacaccccttatgcctttgtccgcctcttatgccatccctcgtagttgcggttgcctttcgtcaccgacactcctgctatatgaggcttctatggccataagttttctgggctccccccccagtctagataatcttggcaggccgccccaggtggctcagcgccataacacaatgggggacacccaccgcgacgaagcattcccgggcgaataaatggtaaaactcccccctcagatattatataggggaacaatgtgaaactcatcctggagcaccatattggttatcctctatgttgattatacagcgagacgccacccacgcttaatgcccccgaaagaaggcgctctctcccgtcatattggccctccaacattccaggagggaccacccccttttcaccaaaaaacagtacctggtttcacaagtaattcacttattaaaatatcgttgcgactatttccagcgtcccacggatccttctgaaacaatatttactccttgaataacatgatggtgccccccgcctaatatattaaatacaaatcattcatgacgaatttaacacatttcgcctcgctcatcaaactactcttggaatcacaaacgtagggccccccctcaataagtattctcccccccaaattgacttacgactaaaatagtttcccagagccaaaacctttttttctcccacaaaacac

SEQ ID NO: 502654 - DNA, 377 bp, Homo sapiens
atagaatgcctgcctggagttggtcctgcttttggtccacatcatgggaactgctaagagttcctgctggttctgtgattatacagtcatcctatttgggatgcaggatttgtatcattaatttttttcaaaagccctataacaattcgggagcccagaagggaacaaggcaagtacaagtttgggtgctttctatgcaagattttctagcttggatgaaaccttgacatcagccacacagttagttctttctcacaggctccatactctgtgctatgatgtgtgactctgagatttacggatgtatcttctctccaggcacttcctggcttcctttgataacatatgtaattagctatttcccttccctattaaat

SEQ ID NO: 502655 - DNA, 286 bp, Homo sapiens
  misc_feature (190)..(190): n is a, c, g, or t
  misc_feature (252)..(252): n is a, c, g, or t
cagctgttattgggctctgaggccctctcctgatccaaatctttttttgtttgtttgtttgagatggagtctcactctgtctcccaggctggagtgcagtggcgtgatcttggctcactgcaacctccacctccctgattcaagcgactctcctgcctcagcctcccgagtagctgggattgcaggcatnaccatcacacctggctaattttgtattttcagtagagacagcgttttgccatgctggccagntcgtctcgaactcctgacctcaggtgatccgccc

SEQ ID NO: 502656 - DNA, 1239 bp, Homo sapiens
agacaaccttagccaaaccataatacccaaactaaacgtataggcgatagaaattgaaacctggcgcaactacactatagctaccgcaagggaaagatgaacaaacttactaaccaacgcactaatatagcacaggcactaacccctactaccctctctgcactaactgaatttacacctagcaaactaaccttctgcacacggagacgccaacagctacatgacccccgcaacaccagcacgagctacctaagcaacagctaacaagcagcacacccgtctactgtagcaaaatacgcgggcaacgcattcatagcgctagagcgcgaccacaaccctacccgagcctggctgcatacgctggactagtcccaagcactacgaactctctacgctcccaaactaataacactctctgcccccacaagcaaccccctcctaaactcccaccttgccacacactccacacctgctacaagactccacaagccaggcaaacaagcatcatactatgcgcacaacctacacgaaacaacaaacccctggctcagaagaaagagataaaacacaactaaaaaccacgccaaatagcctaaggcccctcaaaaagacaaggacctatccaaaatcataaggataaaggccgcttaaccaaagtcttaccaaaacacccccgaacataacccttaacaacaacactaccccaacataccattaataaaccatgaaaacctcccttacaatatcccacgacaactaggcgcaaccccagaatcccgatactccaacgcccctacttacgacacagcaccacgcataacgcaacacccacgacaacgcagcagcgaacccaacgcacacacaccacaagtacaaccgcaacacagagaggaggcgacgaaaccgcacaccaagacaagcaagccacccccacagaaaagagacacacatccaaaagacctacacaccacgacacccaccccagaaaacaactcaaacacagcaaacacaaaacacgcgacggacccccacaaaaacaacacaagaacaaaacaatatcataacgacagccggaaacagaaccaaccgagcaacggacccgactgaccacaaccaccgacacaaaaacaacgcgggaaaaccaacaagccacacaacgcatgagcccaaatacatcgcgcaaaaacgcaaacaacaccaactaactcaacagcagaagcaccatccaacaacacaaca

SEQ ID NO: 502657 - DNA, 415 bp, Homo sapiens
  misc_feature (319)..(319): n is a, c, g, or t
tatcttcatagacatccattttttattctcccacgagataacaacatgtgatattttgtcgttactagtgcctggcttatctcacataacataatggcccccagttccatccatgtggctgcaaatgacaggggttttattttgtataagggcctaataatgttacactagtgtatatataccagcattttcttatatccattacatctagttgttggacactataggttagattccagtatttttggctatgtgctatatgtgaatatgtgctgagtataaacatagagagtgtagtaatctatatcaatatattgantttcctgatcttagtagatatatattccagtactaggaattgcagggtcataaagaaagttctattttctattttttaaggaacctccatactctt

SEQ ID NO: 502658 - DNA, 932 bp, Homo sapiens
caaatacggagctgtcatggccatgtatgtgctggccatgtccctggctgaacttcagtcgaggtggcacgcgagcaccccgtgcctccgaagaaccgctcggcgctattccgcctgcgtcccctagagtagctagctgtgagaggatgtggcttctctgtgaatctaggtcccattggtgtcttgagggaggagcttgtaagaaatgacctgagaagctattgtaaagagcgcaagtcccaggttccttgtcacaccatggcatcactcgttccttgacacgcattctcgctggcctcatctcacactccgaggttccctcagcgcttgtgtacccaatgctgacattggtgggggggtgtcacagaccctgctgcgagcccctgcggttggaccttggtatgtgctcgacactaggacttgcctgaatctaccatgggaagagatcctgcaacacgcaaaaactttaaagtaggattgcttctaattagtagatcttgaatacctacccgactctagtgaagacgcagtgctgaggttgtgaaggatcaacgagcctgctctggtttggatggttcccatttttgcttcgcattcaagggacacgctggggcgcgcattcccgtcaatgcccgggaaggtatgctacccagtgtcgtcgacaggggggcctgccggtgaacgagcgggcccgaccgtaccaaagggctccgtttaccagtccagtatgcactgaaacgttgccgaactttttttcttgctccatttgtgtttgctgactacagataagttttccgcaacgtttcaggtctaattttttcaagccgggtactgtccgcacctaagtaatcctaaaactattttgacttggggaaacttggcttttgtgggttcccgcccgctttgaaccaccaccgggttcctgtgtataa

SEQ ID NO: 502659 - DNA, 258 bp, Homo sapiens
  misc_feature (159)..(160): n is a, c, g, or t
tattattgtggggtattcaaatttttttttcccacaaccttttttgtgctatcggaaatgccccgaggttattgggaaaaccccccagtataaccccaccaggacattcctatatttgtaggctcattcatttctctaacagcagtaatattaaaaaanntttagagttaagagctttcgtttcgaatcgaaaggtcataatagtaataataccttcaataagcttggagtgaatatatggatgccccccgcaagaaa

SEQ ID NO: 502660 - DNA, 593 bp, Homo sapiens
  misc_feature (23)..(23): n is a, c, g, or t
  misc_feature (31)..(31): n is a, c, g, or t
gcacgaggtggggcttgccttgnccacgtcnccgggaaataaaacccccccgaaaaagggggccccgaccccggggtacccccccatatctccggggggggggcgaagggcgcaaaaatatttttggtgtgcccaaaaaccccacaaaaggggcaaagggggccgcccaaaaaaatttaccccacaatttgtgggggggtcttggtgtggaaaaaaaaaaaaattcccccccccggggggggatattttgggggggggggggggcggggggttttttttttttataagccccccccgccttttttttttttttgggggggagaaaatatttttttttttttctcccgcggggggggggggaggattattaaccccccccccctcttccccccccccccggggggggggctcttcttttttcttataaaaaaagaggggggggttttttttttttttttttaaaagaaaaaaaaaaattttttttttctttcctcttttcggcgagggggaggggtgtgggagttttttttttttttttttttgggggggggggtttttttttcttccggctgggggggggggggggggggaaa

SEQ ID NO: 502661 - DNA, 132 bp, Homo sapiens
actagaggatcccttaaagggaactcagctgtcattgacatttcaaccccaaactcctgtaagccagccagctacacatttgattgggctgtttttgacaaagtgtggaatactgtatctcaaatatattgg

SEQ ID NO: 502662 - DNA, 113 bp, Homo sapiens
agagctcgccccggactacatttcccagtgtggcctgcgctcccaagcaaccactcttccgcctgctcgcatctgggcttccttcccgggattttagaagacttaggatactg

SEQ ID NO: 502663 - DNA, 802 bp, Homo sapiens
tggatgtataaggcaggttttatagaaccatttagattcaacattaatggtagagtggcattttaccaaaaaaatgggtgtatttgatttgggtgctgtaaggcaatttgctaggacatgggataatcagattacacaaaatctaggcagtgaacaagtcttcatcctggcccaggaaatagcctattaaaaaatgctgtccaggccaggcacagtggctcacacctgtaatcccaggacttcgggaggctgaggctggaggattgcttgagttcaagaccagcctgagcaacacagtgaaaacccatctcaaaaaaaaaaaaaaaaacaaaccaaaaaaactggtccagctggtgggacttccagggatccagggactggctgggggatcaacgcccaagggattgttttccaggaggctctggtggaatttaagaatgctcgaaagagagtgtgttccaagaaggagttaagggtcatgacagaaattttactcccgaaggacaatctaagtttctgccacaagttacccggtggttgtctctgtccccacaacaaagggcccctttcacaagctctgtgcctcaaaaccccgtgcagaaagtccttcaacaaaactattaatgagactagtgaaaaccctatctcctcacatgggtaagagttgcagtggggcaggtgaccctcctccctgcccccatccttggcttcctcaagctccctgccaacctcgtggatacactcagggggaaggaaaccggcgacgcatagacctatagtacaacaggggtgtagtgaccag

SEQ ID NO: 502664 - DNA, 396 bp, Homo sapiens
  misc_feature (344)..(344): n is a, c, g, or t
  misc_feature (361)..(361): n is a, c, g, or t
  misc_feature (392)..(392): n is a, c, g, or t
cctgtagtccagctactccagaggctgaggcaggagaattgcttgaattcaggaggcggaggttgcagtgagctgagatggcaccactgcactccagcctgggtgacagagggagactccttctcaaaaaaaaaaaaaagaaaaaagaaatgacagttatactaagggactggctacacggctggggatagttgaggaggagctggtttcctagggagatggtttctttcatgatatgggagcttctcttaaagtcactacccaaggcagctatttcttttttttttttgagacggattttcacttctttgtttgcccagggttgggagttgcaatggccaaantcttcggctttaccttnaaccttccgcctccccgagtttccaagtggnttct

SEQ ID NO: 502665 - DNA, 441 bp, Homo sapiens
  misc_feature (13)..(13): n is a, c, g, or t
  misc_feature (23)..(23): n is a, c, g, or t
  misc_feature (46)..(46): n is a, c, g, or t
  misc_feature (66)..(66): n is a, c, g, or t
aacaacttatganatattacgantttaatacgactcacttataggnaaattttgccctcgaaggcnaaaaaattcggcacgagggtcgatgctcgccagcccgttgatccgccggatgaactcgatattgctcgggcaccacggcgcatcgggccgcaccgactgcatgtagcgctcgatcgcgacggcgtcgacgggtcgtcccacgacagcggcaggtgcacgatgcggttcggcacgcgcatgtcggccacgtcgggcaattcgcgctcggcggcctgcagatgcgccagcagcgttggcgagcggcacgtccgcgcgtcgaactggatctgcagcgagcggatccccggcgtcaggtccagcatgcgggcagccggtgcgcgtcgagccagcacatcagcacatgaaccgaaagcgcaggttcaggtcgagcataca

SEQ ID NO: 502666 - DNA, 283 bp, Homo sapiens
ttcctcaaaagtcacagcttagctgggcacagtggctcatgccgataatcccagcaattcagaaagctgaggcaggaggattacttgaggccagactgggcaatatagcaagaccccatctctaaaaaattaggcatggtggtgcatgcctgtattcccagctactcaggaggttgaggtgggaggatcacttgagcccagaagttcaaggctgcaatgagccatgattacaccacggcactacaaccttggttggcacagtgaggaaccttgactctttaaa

SEQ ID NO: 502667 - DNA, 109 bp, Homo sapiens
gcatcagccgctcagcaggagcggtctaccattaagtgagatagtgagatcgttcggccagaactctatcatcgcttacgataaaactggtgcggggtgcgtcggtctg

SEQ ID NO: 502668 - DNA, 171 bp, Homo sapiens
  misc_feature (63)..(63): n is a, c, g, or t
  misc_feature (139)..(139): n is a, c, g, or t
  misc_feature (161)..(161): n is a, c, g, or t
gactcgagacttcacctccagcaggatggtggtccacgagagtgaagagtgagccagcccttntggagcaggacagaagatatgcaaaatgtatatttttttgattcctgaccattaatacttaatgtccatgtgactntttttcacatgcaataaacttngctttgtttc

SEQ ID NO: 502669 - DNA, 417 bp, Homo sapiens
tcttgctgtttataaattgtatctgtatatatttaaagttagaaaacagaaaagacccagccgggcgtggtggctcatagcctgtaatcctagcactattgggaggctgagatggatggatcacctgagatcaggagtttgagatcagcctggccaacatggcgaaaccccatctctactaaaaatacaaaaaattagctgggcgtggtggcagacgcctgtagtcccagctactcggaaggctgaggcaggagaatggcatgaacccaggaggcagagcttgcagtgagccgagtttgcgccactgcactccagcctaggtgacagagtgagactccatctcaaaaaactcaaaaaagaaaaaagacaatgaaaggtgaaaaacaatggtaaaatcgtccaatgttattgtaatag

SEQ ID NO: 502670 - DNA, 662 bp, Homo sapiens
  misc_feature (245)..(245): n is a, c, g, or t
  misc_feature (263)..(263): n is a, c, g, or t
  misc_feature (312)..(312): n is a, c, g, or t
  misc_feature (333)..(333): n is a, c, g, or t
  misc_feature (472)..(472): n is a, c, g, or t
atatttctataacatttattttagtgaccttataatgtttctttgtattaaattattagattatatctttaggtaatattgttactaaattagtaggtaatacatatttttattcaaaaataaattgtgcatctaatgtctaccaattaatgtacttgtagatgtatcttatcttaacttgagtctttgctgcccctaatgaggtgtgaaggactcttctcccctggggaagtttttctttttcnggagggaggagggctttnccaggtaatgtgtctagagtgttgggcagaagaatctgggaccacaccncaccagttctctccttaatcnacgtcatttgccttctatcccagctatgtttccagtgtcctctgggtgtttccaagagcaacaagaaacgaataaatctctggtgagtttttatttgttcttcactttgttttacactgtattttctgagtttatgggngtctgtgaattaaaaaggaaaagtggaaataagtaaaactcaggttgaaggaaatatacataaataagataaagctgacctgtagatatagacaggttataaaagcttagagttgtctaagttgagtgcaaagtttcctctgatctttctgatgccgaaacaaaaaaggcagtcatgtttgttacgtgat

SEQ ID NO: 502671 - DNA, 244 bp, Homo sapiens
cctgtctctgagagtccactgcttctgtcctagttctgcttcgctcctcctcgaactcgctctcctcctcggtgtggcatctggtactgtggtactcggacccaggtcttcatgttgctctcggcctcggtgaactccatctcgatcatgccctcggccgtgtaccagtgcaggaagggcttgcgccggaacatgggcggtgaaactgctcgggagatgcgcttgaacagcttctggatggccg

SEQ ID NO: 502672 - DNA, 171 bp, Homo sapiens
gggtgggggcccccccctgggggcccaaaaccccccctggggttggggggtttgtttgaattttaacccccggggtttaaaagttttgtggtttttcccccggggggccccctcccaattttttttttttttcgggggccccccccctttttttccgggggtttttcccca

SEQ ID NO: 502673 - DNA, 603 bp, Homo sapiens
  misc_feature (245)..(245): n is a, c, g, or t
  misc_feature (263)..(263): n is a, c, g, or t
  misc_feature (312)..(312): n is a, c, g, or t
  misc_feature (333)..(333): n is a, c, g, or t
atatttctataacatttattttagtgaccttataatgtttctttgtattaaattattagattatatctttaggtaatattgttactaaattagtaggtaatacatatttttattcaaaaataaattgtgcatctaatgtctaccaattaatgtacttgtagatgtatcttatcttaacttgagtctttgctgcccctaatgaggtgtgaaggactcttctcccctggggaagtttttctttttcnggagggaggagggctttnccaggtaatgtgtctagagtgttgggcagaagaatctgggaccacaccncaccagttctctccttaatcnacgtcatttgccttctatcccagctatgtttccagtgtcctctgggtgtttccaagagcaacaagaaacgaataaatctctggtgaagagataccatttgacattttagagatggctgcatgcaaactcttgaaacatttgagtaagtacagtacaccagggagattcttatgactattgggataacaccaagatgtggtatatgctccttactcagggtccccataaatcaaaccaccaaaaatcaaatagattaaagaatgaattaga

SEQ ID NO: 502674 - DNA, 931 bp, Homo sapiens
  misc_feature (3)..(3): n is a, c, g, or t
atntggcaacccaaggagttaatcctaaggaacatccagtaaaaaaaaaaaaaaaaaaaaaaaaaaaaaaaaaaaaaaaaaaaaaaaaaaaaaagagagaggggggggcgcaccgcaagaatatctctcgcccgggggggcgcccgaagcaatcacggcgtcacaccagtagattagtgtggagaacgagggggccaccaaatggggggagcggaatttatattacggcagaggcgcgcggggcgcgcggcggtatatataaacaacagctgcgggggcgcgcggggaaacagcgcggcgcaacacgcgggggaactactctctggggggagacagaaggacaacctctcttactactgcgcggggggggggagggggacaacatattgtgtgcgggacacaacattataccctataagcgaagagatattatataagaggcgcctaggagggggagaaatatattataaatcttttagaagagggggtatatataggggtggtgtaacacaataaagagcgggatatatgtgtgtgcgaggaagaggtgagtagagaaaatatttgtggggagatataagcgagggagagatgttagatatatatgtgatgagagagactattatattatatataccggaggggggagcttatggtgtttgtgaaataaatcaaaccaacaaaaaaaaaaataaaaagataaaaagaaatagagcagaaaggagaaaaaaaaaataaaaaaaacaaagagcaggaagagagacgcgagggagaaacataggcacagcgagaataaaaaaaaagaagacagagaggaggaagaccaacaacccgagaggaaagagaaagagagaagacccgaatcaaacagcagagagcgacgaaagaagcagccaaagacaaacacaaacaaaacaacaccacaagccac

SEQ ID NO: 502675 - DNA, 181 bp, Homo sapiens
actgccgttcaggatgttataagatggtggtcctggtcaggccggcggcactgcttaacgaaagctgggtttcgccacgactcttgatcaagtacttgatgttgctcttcaagtgctcggttttttcccgtctgtgtatcaagtgctcaccacttccatttagtcatcagtccatgccggc

SEQ ID NO: 502676 - DNA, 886 bp, Homo sapiens
cccaggtcgatgagtccctgtcaaccgacatgccatggcctgggctcccgaggagggggatgcagaggtgatgcatgctgggtgtccagctgccccgtgctgccggggggcagcaagaaaagagcacgagcgctgcaccggaaacatgaaggacgagtacagcaagagaagacatacaaaacacaaccaaacaacaaaaaccaatgacaacacgagagacaacacaagccacgcaacagcaaaacaccaaaagacacaccacaaccacaaaccaacagacgacacaccacaacaaaacacaccagccagacccacagaacacagacaagacaacgcacccaaggagaacagcaacacacaaacaagaacaaacaaacaaagaaccaagagagcaccaacgacgagaaaaagcacaacaccacaacaagaaacaagcagaaccacagcaacacccacgccaacaaacaacagaacggcaacgcaaaaaaaccaacaagagagcacgagcgcaagagaagggagaacaagaacgacgacacaaggaggacgaaagcaagaacagacgaaacacaagcacccgcaacgccagaacaaacacccacacgcacaaaaggagagcgcctagaacgcccaggaaacagcgaaggcaagagaagacgacgacagcacgcacgccaaaacgcaagaacaggaacgaagcaaagccacaacagccaggacaccaaggccaacgggcagacgagaagaagagacggaacccacaccaagcagagaagagagacgacagaagagcacaagaaacacaagagacaacacaggagcacgagcccgagaaacccacaacgaggaaccaaagaagacaggcacgaacaggaaagcgcgcagg

SEQ ID NO: 502677 - DNA, 553 bp, Homo sapiens
  misc_feature (1)..(1): n is a, c, g, or t
nttactggcatttcttacctcgcttgacgtactatttttttttttgagagacgggagttcctctcgtgcccaggctagagcgcaagggcgcaatctggagcatctgagctcaccgcaacctccgccgggttcaagagattttcctgcttcagcatcccaagtagttgggataacagacacgtgccaccacgccaggctaccttggtattttaagtagagacggggtttctccatgttggtcaggctggtcttgaactcccaagctcaggtgatccacccatttcagcctcctgggtagctgggactacaggtgtgcgtcaccatgtactaccaaatttttaatatttttcatagaagcagggtttggtctggtggcccaggctgccctcaaatggcggggctcaagcagtcagctcaccggggcctcccaaatggctgggattacaaatttgagccactgtgcctggcctaaattttatttagtagatagcatggggtcattggggtttcatttcattaagttattggggatataaatacatagggataagta

SEQ ID NO: 502678 - DNA, 430 bp, Homo sapiens
ggcggccaggacagcttaatgaatagtaatatgtatctcttccttatgatttttttatctctttatttattttttgagacggagtcttgctgtcacccaggctccatctcaaaaaaaaaaaaatttgaataaggctgtgtggataaaataatagtgttgtaccattgttacttccctgtaataatcctgtggttacccaaagaaatgtccttgtcctaaggagatacacactgaaattattagggggcaaggggccaatttactcttaattcgtccaaattatatgacacagttgccccttgaacttggtttgggacctgcttgatccattttttttttttgggagtttccggccaatttttttttattcaaattgcagtcgtgtccaccctggtcccacaaacccccaattattatctcatttccatca

SEQ ID NO: 502679 - DNA, 234 bp, Homo sapiens
cccccaaaaaaaaggggggggggccccccaccccccctgggtttttttaaaaattttaaaaaggtccccaaaaaaggggggggggggtaaagggggccccccccggggtttagggttttctttggggtcgggggagggcccccccttttttgccccaatttgggggccgggaaacccccaaaaccggaagggggtttggggcccctttttttttaaaaggggttcccaacccca

SEQ ID NO: 502680 - DNA, 474 bp, Homo sapiens
accgatgagcttcacattttctttcctccttccattcccatgactaccaaaccagtgcaggttctcctcacttcactctaagacaacagcgtggccctcaaatactgtcacactcttcaaggctgtgtgagcacaatctgtctcatattctcttctgctgtcaccagatttattctaagaccgtttcttcactgttactcccctgtttctcaaccagttacacagaaagacgaatatccaggcatggtgtcatgtgcctgtagtcccagctactcaggaggctgaggcggcaggatcgcttgagaatgtgagattcagactgcagtgagccatgatcatgccaccgcactccagcctgggcaacagagtgagattgtctcaataaataaataaataaataaataaataaataaataaatgaatgaataaatgtggtctatccatgcaacggaaccctataaaattatcagcctt

SEQ ID NO: 502681 - DNA, 825 bp, Homo sapiens
agtacgcctctgacgccatacggcttggctccgtcatgagttcggcgccggcctcaggctccgtgcgcgcgcgctatcttgtgtcttccagtacgtgggcccgactttaacgggatcgcgatcgtctgggtgcactcagcgcgcgtcggggtccagaactacctggaggaggccgccgagcggctgaattccgtgagccggtcattgttctacccatctccatgccggtatgtacgccggtgtccagcgcccgtgagtgaacgcggtcgcacgttgacgtccagcgccggtcaggccggctgcccttctctgcccgatgtcctggccgaggtcctctggcattagaccttcgtggaccccggggcaatcaaggcgtgtgcggtcctcctcgtgtgcccggcgaaatctcacgcttcgttgatgcagactggtccgggaacttacgtgtgccgtgcttggccacttggttgtcagcggccgtggatgacgggtgccggggtgctttggaacgcatagcttattgcttgtagactctcgcgggcatactgccttggatatggtcgccaatgcagggaaagaccggcgcaacaccctcggtcggtgaacatcaacgacattcatgtgccttccagtccgtgtggagaggcccggtgtcgagccctgtgcatagcgctgcacccgggttctccggattcccacaggccagtgccaagaccctttgtgtacaccccccgtagatagaagcaggaaagctgtgcgggttctggcacctggactttggagaacccaggtctttcctgtatatgaccaggtcggaaggactac

SEQ ID NO: 502682 - DNA, 438 bp, Homo sapiens
tcctgttccttcatctttagtctgatttttgcctcagtctggtgaggacatcattggatagactggtgcaggcccgaaaaccactgtttggtaccataatattatttctacctggatttaagtttcatgcttaacgaaaataaggatctgcattcatttcttgagtgaaatagtaggtacaaattttatagtgtgttgcaaatcgtaggtgctagataagctatactatgaacagtttactgttaacacttttcttcatttgtattctgtggagtacgctagttaggagtgattttcatttgcttcatacagaatctgatgctttatataccaagccagaaactttaaataattgaaataattttattgtatttataatactatatttaatagttaatattcacaagatctctaagggtttcttagcggggtaccgag

SEQ ID NO: 502683 - DNA, 313 bp, Homo sapiens
actggacgacatcaggttcagtggcggtcactcgtgtgctgccgacagtgaactctgtgagttatcagtcgctgagctgtgagtgtgcctggagcgcacgcgctcgtgtatcactgaggtggagtggcgcgtgtgttgctcctatcccctgaaactccaaggcccacgctcatgtctcaagagcactttgaccccaattccacctaggtgctcttcacttagagtcagatctctaggtcctgtgatgaggacaaacaaagcgtcagtccgcgtccaagcaagggtcgagctcgatcgtaatctgcatagctgt

SEQ ID NO: 502684 - DNA, 103 bp, Homo sapiens
  misc_feature (60)..(60): n is a, c, g, or t
cgcctactactactactgccggattcaagcttttaacgatgtacggggacatggtacgtnttctctagtatgtctgagcaattaaatagattcataagcaaaa

SEQ ID NO: 502685 - DNA, 377 bp, Homo sapiens
tcataaaccctgtctctactgaaaagaaattaaagaaaaaaaaatccaggctcgttggtcaggtgcctgtaatcccagctgctgggtgaagctgaggcaggagaatcatttgaacccaggagatggatgttgcagtgagccaagatcgtgccaatgcactccagcctgtgtgacagagcatgactctgtctctatagggtttcgatgacctcatcgaaaccctgttttcaattctgctgtgtatatacccagaagtatatttatccctctagaagtgggactgctagatcatagagcagctctatttttaatttctaaagaacattcataatgttttccacagtggctaaacgattatttattcccatcagtagcac

SEQ ID NO: 502686 - DNA, 471 bp, Homo sapiens
gcttctcacccgtgtagtcccatctgtcctaccgaaacaggcacatgctgtcattatacacttgggtatcctccagagacccctctctgccccacaaaagttgaaaggtccgtgaacacacacgtactacatacttaaatcttggcttcgctactcagcttagctgctgcagttaccttatctgtaaaaggagactaatagtaacttcctcatatgcttcttcaatccccataatcgtattaattccgtgaatgcttatttagcaaactactatgtgccaggcattgttctaggtacagggcactgtggtagagaacaaaacagtccatatcccaataaagcttctatttcgggagcgagagagacagtatatcactatctttaatacattacaatgagtgatgctatgtgccacagcagaatggggaatgagggtgctaatctctgtagggtgacttaacagatattgac

SEQ ID NO: 502687 - DNA, 427 bp, Homo sapiens
  misc_feature (258)..(258): n is a, c, g, or t
atttacttttctcggagcgcccatgtgtggtacccggaattcgccatatggcccggggaccagtaccctagggtaacaagccaatcttttttaagtctttaaaaataggggttccaacccctatttttgggaaaagaactccccctgggggcgccccccttttataaaggggttttttttttaaaaaaaaataaaaaaccccccccccggtcttcttgttgtgaaaacaacccccgcgagaaaaaccacccgcggggngtttgtttttttatataaaaaaaaacccccccccccagaaaaagaagagaagaaaaaaaaaaaagttttttttatttataaaagaggcccccccccccgggggaaaaaaaaaattctcccccctttttattttccccccccccccccccccccccccgggggggggggt

SEQ ID NO: 502688 - DNA, 202 bp, Homo sapiens
  misc_feature (102)..(102): n is a, c, g, or t
  misc_feature (120)..(120): n is a, c, g, or t
  misc_feature (133)..(133): n is a, c, g, or t
  misc_feature (175)..(175): n is a, c, g, or t
cgagtgtcagggacaaaagcctccgcctgctcccgcagccggggctcatctgccgccgccgccgcgctgaggagagttcgccgccgtcgccgcccgtaaggntctgagagccatgtcggncagcagcctcttngagcagagaccaaaaggtcaaggaaacaaagtacaaaatggntctgtacatcaaaaggatggattaaac

SEQ ID NO: 502689 - DNA, 1030 bp, Homo sapiens
ggactcccatgttcgttcttcactagcctgggcctgagcggagcgagaaggcccgtgagagctcagtaactcgggtctgagacgcgcagtttgcgccgaggccggtactcaggctacgggagagcctgggttaccgaccacttgtagaacatgcgtacgggaggatcctgatcactattggctttgtgcctccctgacgtcgagggtagtatacccgggggatgctcctcgcattaccgttgtcaagctacaatagcgcgatgtaaagaaagatccagcggctggtagctccgcaagttctaatgcgtctgccctttgaggtattgtgctggacgtcaacccacgttggttgccacatcgaatgactggtgcgacttcgtagcggtcaatgtcggcggttgagtgtcatctcgtgacccctggcaagccatacttgcagagaggcttgtgtggctgtgcttgcctaattgaactagggcaccggggtcctaagctccttcgcgttgagacagccgtgtgatgcaattgtttccaaaccaagtggcgtggcttcgtgtgggaatcgcgcgcaggaagagaactctgcgttccttggttgccgtggaaaaggtcggggggacccggactggggggaacatggagtggactccaaaagatattcgaaagcgctgggaaccaatcgttaaggaggttttctaacccaaaacatttcgctcggttcccctcggaaagaacttggagaaggcgttggggatcgcttcgggagggaaaggcagaggtggcgacttgggttgggacccctattttggtggtgcccgtgcggacaggaaacgcccaggcaaggaacaacggggtcttgggcgccaggcaaagtgagttgtcgatcggtccaacacctttgggctacgcaattcgcctgagcccacgaaagtttccgtaaacgtgtcctcgtttacgacgaagttcgttggaggggtgttggcacctggtgaaattggcctagggtctgcccttggagtacagtgccgta

SEQ ID NO: 502690 - DNA, 113 bp, Homo sapiens
gattgatcgccgttctggtaaaaagctggaaggatggccctaaatctttgaaggtctggtgattgcttgccattgttgatatggttcctgcaagcccatgtgtttgagacttc

SEQ ID NO: 502691 - DNA, 233 bp, Homo sapiens
  misc_feature (129)..(129): n is a, c, g, or t
tcgtttgtcgtaagcagatggagcttgttatatttactgcctcatagggatacgtacaaggcaaggggtaggctgatgtgttttgtcacgggcggttgacgaattgagtgtgacgcgcgtcgtataccnatacgccgtcctagcttttaacgagtacctgcggcacagtactacttgacccagccgactgggggtcttcgaacactggtgctttagcggaagtcataagctgg

SEQ ID NO: 502692 - DNA, 960 bp, Homo sapiens
  misc_feature (183)..(183): n is a, c, g, or t
  misc_feature (264)..(264): n is a, c, g, or t
  misc_feature (392)..(392): n is a, c, g, or t
  misc_feature (429)..(429): n is a, c, g, or t
  misc_feature (611)..(611): n is a, c, g, or t
  misc_feature (620)..(620): n is a, c, g, or t
cggggcatctaaaaggggaacctttctaactttgccctttgtggccaagccgcaacctttttcaagcccccccgggccttaagatgcactttctttccaaccctaaagtgggcttcttgaacctttggccttggccctcgcaagttccattattacaattcaagacaggcctcaccgggtgcngtcactttaggattgttgaaacaaagacaatttctcaaagtttcccctgaagacatgccatctctagaaccttttttctcncagactctaccaccacctttgttcctagagccctctgctggcgagtcgagaacattattgcccagaaggattatgtgtttatggattattttgccccgcctcaggagcgcaggaagtcactaccattnatattctaaaacagacctatctatgttcataggactnctgatgtgtcagataggaatcctcatgagagatcatatgctttgtgccctggaccactgctgctctgggttctcaggaggaacaggcaagagcagcttcattctaagcctttccagtgacctcagccttgcttctcttctacaacactaaggctcctctgtcagaggaggtcgtcttgtttntgcttcatngcatgacataacccttcccctcaagctgttcctatatatacatgcacacacaaaataagccagacagatggcaatttgatcttcctttttagaacacaaaaacaacaatcgggggaaaacggggatctcgtgtgaaataccacctgacccaactatattaaatatgcctctcccagcactttaccccgagagtctgatctcaagggttatcccctgtaccctcaggaagcctctaaggtgctaaagttgtagccctcaaatgtgcacatgtatctgctaaggaccgtacgtagtctctaccactgactaacccgaaacagaaagagaccacacaactaca

SEQ ID NO: 502693 - DNA, 1609 bp, Homo sapiens
  misc_feature (1337)..(1337): n is a, c, g, or t
aacagcacagagagagacatcagaagaaattcagcaaggggatgacaagtataaaaacaaagtgaagaaaagggccaaatctaaacagtcaggcagtcaagcagcaacagcagcaacatctaacagcagtcaaagcaacagcagcattccaacaaccatacatcagcaacatgcacagcaaacagcaggcatagcaggtccaaggcagtcaacaggcacagggcggggggtggcacacacatagttcaacagcacacacacagcacacaagcccagtcctagcatttcgtcacaagggcacacacagcatccagcgcaaacagggcagtcagcacagctcacacagcagcacagtctcaacaccagtatcagcacatccacaagcagtcacatgccagccatgcatccaccagctaaacacaggtcacagggcacacacacggcatcagcacgccgccactacatccccagggcagttcagcagccacatcgtgcatcatcaaactacacacagggtcacacaccacccagttcatcacatcagcccagcacaccaagcaggcacatgcaagccagcaacagtcaaggcgaccagcaaagccaggacagcaagtgcgcactccaaagcacaccccaatgcaccagcagcatctgccagccagacaaggccacaggcaagtaaccccatcaggaataaccagcagcacaccagagcacataacaagggcagcacaagaagcgcacgggctccacccgcaaagccccgaggcagcagcacaagaaaccaccaacccaaggccaacgatcccaaacgacagtcaaaaggatcagcgcaggaagcacaaggcagggcaagaagaattccacggggagcttccaggcagcagcaaccaagcacacagtccaaacaagccagcaaacaccaagaggaacccacacttaacaggaacaaccccaaggacagaagctaaccggaaggcctaccaacaccaaggaacacacccgggaacacacacttaccgcgggcagacagttggcacgcaacccacacgccacctgggtccctccctaacaccacggtcccggcggcatccacatcaacatcaggggctcacaacagtacaccaaggcgcggggcaacccaaccacagcggggcggggacagcacgggacctcacaaggatcccgctatcttccacaacaaatcattaaacaccaccaagggccggtgcaggagcacaccctggcacttccacaggtgcccccccatgctgtgacgccccatcagggcgaggctgtaccagccgcacaacaacgaaaccccccacgtggcgtgnacaagcacacacccgccccgaaacacacagcggcctcgcacacaagatccagtgaccagtgacaaaacagcagccacacacggcgcggcgaaaaaccacgagcaccgcaagaacaaacaccgcgccgagcagcgacattagatagcaacacccgcactggaagacgaacagatcagccgacgcaccaaaacgaaccacatacgtagagaccactcaagctcagaaccagacatagcaggccacacaaccagcgaaacaccgacaggatcaca

SEQ ID NO: 502694 - DNA, 269 bp, Homo sapiens
gaggcggatcacctgaggtcgggagttcgagaccagcctgaccaacatggagaaactccatctctactaaaaatacaaaattagccgggcttgggccattcaacgcctccgggccattcaacgcctccgggccattcaacgcctccgggccattcaacgcctccgggccattcaacgcctccgggccatacaacgcctccgggccattcaacgcctccgacggaatggccattcaacgcctccgacggaatggccattcaacgcctccg

SEQ ID NO: 502695 - DNA, 1255 bp, Homo sapiens
gagcagaagacccccatcagggtgcggggtgcgggttgctggctccacgtgtcgctggcgcgtcggatgcagggtccagggaagcgggatcgtcggtatcccaatgccgtcgcgtgctcgttcctcgctacccagtagctctgggtcggtgggcggcgtcgtgtagcggctggtgttgggacgcggggtcttgtgcgctgctggtcgccgcgggttgttagcagtagaatgactactggagacctgcgcatctagtgacccccgggactcactagttgtcgccgttgaggcctgtagagtctatccggtagacgcttgttgacccggggacctggtcttggctcgctgcagggacctgggacttgtggggtcagtgcaccagacgtgactggcccgggtcggtccttgacagcctcgttacgattgctgccatttggattgttcccatgggccagtcttcgtaaccgcgttggcgttgttgttcctttccgactccgtatccgaaggtggaatggttgcctgtaccacgttgggttaggttacgtagaccagaaacacaatgtgattggtacttgacccctttgctttatccctcaaggtaggtttcgcaggctgttggggactttaggtaatcggggctgtgaacatgcagaggaattcccattatttttctaacttcgttcctaggcgtttgccaccgagtaattcatgggcgtttccttctatctcaaaagcaatacagggacattggcctaagtacgttctattttgaagaatatcctgaagtccgttaattgagcagcgggtgggaccctcccctgaagaggtctaggataccgttggcgccacattacgtcacgtcggacgcagttaccacagagctgcgcatcacgatcggaggccaacagctttgggtggccatcggcaacccattggccgtacttcactatataaggggttccacattgcgacaggcaacacccaacgttggttttccacccaagagttacgtcttggcctatatggaggcctgctgccaacacgcggcgcacaaaaccccactttttccataagcggtcttccaccccagatgggaatccattccagacgacaatttagtgcaaacaccccccgtggcaacgttgcgctgcccgtcccgtaaacttccccacaatctcctttctgtaatacacaactgggttcctagccccgagggccccttcttctggagcctcttcataacggttcctgcgct

SEQ ID NO: 502696 - DNA, 390 bp, Homo sapiens
ccgcgcctgataaaaatgtgcaagaaaatcgccgtgcgccacctgcaaaaacaaggggccggcccttccctgcgcaaagaccctgacgccggactacaccataggctgcaagcgcgtgttgatctccaacgactactacccggccctgtcgcgcagtaacgtgcaggtggtgaccgacaacgtgcagcgcattgaggccgacggggttgtcaccgccgacggcatcaagcacccggccgattgcattatcttcggcaccggtttccaggccaccgatcccctgccccgcaactgcatcatcggccgccacggcatcgacctgatggacacctggcaagacggtgcccatgcctacctgggcacgacggtgccgggttatccgaacctgtt

SEQ ID NO: 502697 - DNA, 1815 bp, Homo sapiens
  misc_feature (273)..(273): n is a, c, g, or t
  misc_feature (277)..(277): n is a, c, g, or t
  misc_feature (1815)..(1815): n is a, c, g, or t
ggtgctatgctcctgacccggcaatcaccatgtggtgaatgcttttcctatcatgcggggcatgacagcgtgtgtccctaccttgggcccaggtctgactggcgtagcttcatatcgggtccggagactgtgggcattccaggctgaatgtgtgctagggtgaccgcagtcgaaactacgtaccatcggtgttgtgcggtgcggcagcgcaccacgctcttacgcatcactacatctcttcgtgtcacaatcagtgtgaatgtcactcgcgantcanactacagtctgacgcacgcggcgtgtctgagactaaatcttgcagcagtcagtcttcgcgcacgctcatatcagagtctcgggattggccactcgcaggcatcactgggcagatgggtccccccagtcacactggacacagaaacttctatacgactctcatgcagcctcgttatcacttcacccttgcgtgcataccgtaggcgtactgtgtttcgtgccgacaactacatcgtcattagtcacccctggtggaggtgccaccgtgaatgaccacgagtataggcgacgatgatggggaagaactacggatctgtgaaaccccctaccctccgtcttagggcaatgcggggaaattctccagcctacacgccatcgctccttgggaaacgccacgttcgccgaccaaggagcaccttataccacgaggtccttttcctccccggtgttaggctatcccctaacgaaggaccgtagttgggtgcttgcgccgtgccgtcaatccctggggacgtgcgtgggggccatttccaaactcttttccaacttccacctaggaaaactagaggtatgacctgccgacattctcatttcatagtataatcggcacccttcaatgtgggggccaattaggaggaccccacgttcactaaaaggccaatagagggagaactccccctttccttattccgtttacactcgcaaatggcccggcttcccccctaaaagggtttcgattccatgtgaccaagggtccccgtaggcggttttccgttacgcctcaccttttatcatactcctccaagtatttcccccttatggaacctcgggactcgtgcggacaaatttctcaaagttcaccttatagcgtaaactctaacacgtccaagggaaacgcgtgggtttgagcccctttctccaaattcggagcctggaggacacttatatccttgtacaagagagccccccccccgttactgttggcaccgtggtacggtgggaggcaagggccccgggaaataagtcctatatatagacccagatatctaggaacggttaaggttttcccttagagctttaaattgacccgaaggatccacatcccccattagtacagagcggcttttcaaatatataatggcctcttaaaatattccctgtgacctcccacgggcctctatccgagcaagagtaaaattccttcccgccggggcacttgtggtagcagcggggtagcccctcaccctcaccgtgggatgacgagcacccattggaacgacccaactgtcttcggcgatgaccccataaacgcggtttggtggcggtccctgaaagccctcttggcagatttccacatattggcgcgctctcggacaaagcggtaataatgcagcgccgagagggagagaacacctgggaagaaataaaaggcggataccccacgtacaacacggcgtggtacacgaggggaggacagaatatatcaccagagcgtggtcgtcagagaccagcgcggacaacacacgggaggggatgagn

SEQ ID NO: 502698 - DNA, 310 bp, Homo sapiens
ataatgaatcgtccagccactgtggagatctccatatgagaacatgcgtttatctgataactcacaaccctaccactgctactctcaacacgttcacacgaggcacttaagaagtatggagtgacgcctttggttcgagtttgtgatgctacatattatacagctccagcttgaaaaacgacacggaactcaccgtactagacttgagccatttgactgactggagcatcacaccaataaatcagactacgtcactacttggtataacacctgtataaaacccaactttcgagacgacgagggaccgact

SEQ ID NO: 502699 - DNA, 321 bp, Homo sapiens
tcatgtgcatagtcatgcatgacgatgcaggtgcagtatcatttccccccttttacaagtgagaaaccatagactgagaaagctcatccacaccccacgtatgcctgctacaaagtcacaggttatttacaccagatggttctcaaagagtggtaagcagaccaaaagcatcagctagtacgcaatgcaaatatctcaagcctccctatagacttcctcagaccgctcggaggagggcagcctacccacctgtgattcagcccacacccttcacggtgattttcctgacttctacagtttgcgaaccactgctttacccta

SEQ ID NO: 502700 - DNA, 213 bp, Homo sapiens
acctcactcaagatcgcaataactggtggggcttcgcccacctcttcttccctaggtcaaaagccactatcatctgatgtgttagggatgggactgattggcagaaataaatcagctcccaatgggagcccacgggaactaaagtagggtccaagaaaaacaaagggagctattccacagagctgaccttctgcccaatttcattcctcaaac

SEQ ID NO: 502701 - DNA, 220 bp, Homo sapiens
tccttgtccaatctcagaaggcatgagtggttagctctgagaaacccatgaaatacctaccccagctttcagctgtgaggctcactaagcaagatggtcggtcctgcatccaccttggcacagttttggggcaacctgacccagatctccaagcccagccagccacgggtgccctggggcagagctcaaggctgaccccagcggaccctgttctcccgac

SEQ ID NO: 502702 - DNA, 125 bp, Homo sapiens
ggtcatttgggtcaaaatttttttgttttattttggttttgattttttttttccccccctgagggtatgcttagttgttgagtaaaaaaatttgggcccattaaaactttttttgatgtaatata

SEQ ID NO: 502703 - DNA, 119 bp, Homo sapiens
agaatgattgcgtgatgaatgaagtatgaactgagtcatggtaagcagatattgatggtgatggtcaagttagactatgaagagtttgtacaaatgatgacatgcaaagtgagaggcct

SEQ ID NO: 502704 - DNA, 1143 bp, Homo sapiens
gatggcggcggctgtaggggttcgtggccggtacgagctgctcggcttggctccgggccaggtctggctcctcagctctttccgccttgctgtagtgtggcggcacgaggggccttcgggcgactacgcgactggtgatcgtcacggaggacggagaaaatccgagcagctaggtggattcaccaattgaacttgcaacgcatcctcatgacctagtcatattactgagacaagaagcagcagtgaacctacctcaaagaattagagaagcaattaggttgctcaaaaaattcacatagaagagaatgagggacgaggagagacatggactggagacagagacagtaatcacagaacgacccagactgcagtcaaaggcaaggtgcccgttagcgggacctggatctatactgatggcacatacataactttggagacgcaaagacatcagtccgtgaatgattatatagacacagaatctcctgtccctccagacccagagcaacctgatggtactaagaattctagaacttccagtatagtatacatgcgttgtcagcacttgagaggtgtacaggagagagttaatcttgctgcacctactggtaccttaacagaagatccaatcttcaacatatttcatcgtaaacgggtaggcaaggagtcatagaatgacataggtcgacatcattcatgacgggcctacagaggaacactttcctcgtgcggtactggatacacatgtgttcatgtcacactgggacgaattcagaatgagcatcatcaagggtagctaaaatgttgccactgggagcaacttagattcgtactccagggcagcacatataaaacattgcccgggaacaaacgctggcacaccgttcttcacaggaaacacacgtctatctagataataggcggagcaaaggggccccaggacacacccgcgaagaaacgggacaaactcgacaacgcggccacaaccaggcgcggaaaggacaataggaacgacgacagaagaaaacaacacacacagagccagcagaacccacacatgtgaacacaaaacgcagcgaaacgacaaacaaacgggagcgaaggaacagaccaaaacggagaaaagtgagccaaaagcacagaaac

SEQ ID NO: 502705 - DNA, 114 bp, Homo sapiens
cggcagtgcgtcagtgacgtgctactctgcgttgattctcttcggttgtcagcagttcggcgcgtgtgcgcgggcccacgagccgtgtgcagccagttccactcgtcacgccgg

SEQ ID NO: 502706 - DNA, 304 bp, Homo sapiens
ctgccgccaggaccgcatgaagttcagtgctccatatctcatataaaccttatagttttagtagttttaatttcagccattctaactggttatactaacattatggctccaacctcctaatttctcatgatacaccattaactcagacagtcaaacaggttatccacgtttcattctcattaaactgtaaacggtttaaaactttaaaactagcactggacagcactgttagcacttgttataaaacttattcactgcctgctctacctactccatatcattcactccttctatcccgcatatt

SEQ ID NO: 502707 - DNA, 264 bp, Homo sapiens
agagggaggagaaggagagagaagagaagaaggaaaggggaggaagggggggagaagaaaagagagagaagggaagaagagaaaggggagaggagaggagggggaggagagaagaagagagggaaaggaagaagagaaaaggaggaaagaggagaagaggaaggaggagagaagggaagagagcacaagcacacgctcactctctctctctctctctctctctctctctctctctctctctcctcgtgcagaattcggcacgag

SEQ ID NO: 502708 - DNA, 944 bp, Homo sapiens
  misc_feature (285)..(285): n is a, c, g, or t
ggaagagacattcatgaacaaaggaagaggtaagaggtcaagattgtgtcagctgtctgcagctgagaaggatgccaggtcccagttccagctccatggaagatagatgcattgagctccaccacagaattggatgggcactcaggaagtagagaaagtgcaggctccaggccctgtgaaggaaattggcccatggttcacagtgaggcagaaggctccagtgagtcagtttgtcgtggctgctgctgaagtcccgtagggtaaccgactcgaattcttcccagngattcacggagtcgagttccagaacaaatccctgacagttacaagtggtgctagtcctgagagaactagcgacctggtcacaggactatactgacctggaggtcacgggtgccagtacccaagcacgtggtgaagggaaacgcaggtctcagtggcccttatcagcagctccattcgtgtggccatgctggaggacaagatggggagcgcgtcctcatggcaagggaagctcacccaagaagatcaacactgagagttctcgtctggagtctcgtagcccgggaagtgcgtcttggtgaacctgagcaaggtgggcgagtatcggtcggacacgccatcctggatcgcgagaaaggagcccatcgtagattgagcaaagatcacacaacggagctgctcgaatgtgcacctgtgggatgagtgagggactcagtgcggtgtttggcatcaggtcttaccctttgactaatctagccatgacaggctgcataggcgaagactgagaagccaatgatgctgaaagtccattgtacattcttgaagatcggcgtggcaatgctgaagggttctcaccttccgagggccaagcgaattggaccctgccaggttcaaacattctcccggggggctagtcacggttataatgaccagaaggcaag

SEQ ID NO: 502709 - DNA, 1045 bp, Homo sapiens
agcgggctgcgtccgccgtggagcggcggcgcaggcggcgaccgggagcgcggacaacgcggctgcggctaacccgccgcccggccggctgagaccctcgcgcccctgcttcctggggcccccgccccccgtcgccgtcgtccggcgctccttccatcacagaactccccggggacgaccgggacctgtccctgtggccccaatgccattcccggatgctccatcccatcgtcatccatcagcactcagccttctctggccattgggcgtcccgccgtgcgcggcactcggcaatgggcacattgcgttcccacgttcccggtggaggcaaaacggtatccattaggagattacatgataaaaggcctgcatccagtattccaacaaacgagcacgacatgccggcagccctcacgactaggagagccaacggttccaccgggttacacattcattacaccagtggagcccagttccctgtacccgtaacaccttacacaatggtgttacccgttttggcgtgaacagccggcccttggcgccgctaccgggggcgcgaacgggcgacgacgcgactagcgtacccacgtacacgaaggcgcagtccaattgggcgcaggaccccgggaccgcggccgccgagacggggaaaacaggggcagggaaagacaagagatgaccgcaaccaacgaagaaaaccccagcagacgagcacaaaccagagtgggccaagcggtatagagacagggcacaggaatgtgacgcgcacaaccacctatgttcaaaaggagcgcagacagaaaccaattcccagaggccacagcgaaacatgggtagtggaatatatcgggccctaaggcaatcaggcaattctgattgcgaccaagacacaagatatcaagggctgacgacggcaatcagacacaaggggcccttgagccagtactgggggacaccacagcgatgcaaaaggatgagttggcccacccacgaaacggatttacggcggcccattggccccggcaggcacgtttcgaacgccaca

SEQ ID NO: 502710 - DNA, 202 bp, Homo sapiens
cagcacgaaggcgttggggcgcagttgcggatccagaagggcataaagtgagctgaacctgccaagcagtgtgatatcagcttctcagatccagacgactcctaaattcaagctggtcatctgtcctgatgagggcttctacaagagtgggaagtttgtgtacagttttaaggtgggccaagggttaccctgcaatgatccc

SEQ ID NO: 502711 - DNA, 124 bp, Homo sapiens
cgttcaagctcaacacccactacctaaaaaatcccaaacatatatctgaactccttcacacccaattggaccaatctatcaccctatagaagaactaattgttagtattagatcacatggcggt

SEQ ID NO: 502712 - DNA, 364 bp, Homo sapiens
  misc_feature (24)..(24): n is a, c, g, or t
  misc_feature (52)..(52): n is a, c, g, or t
  misc_feature (56)..(56): n is a, c, g, or t
  misc_feature (187)..(187): n is a, c, g, or t
agaccaaaggccgcccccgcctgntggggttcctcccagcaccccagcttgntggntgccctttttgccttttggcctccagttgggtgtgggggggcggagcaaggcgggggacaaacgcagcccctttttagcgatttaggcctggcaaaaggtttggccccaagggcctccttttcccaggggntgccaagtcctggccctggccctggcatatcaccccgcactgtggggccaggcaccactagcctggttcaaatattccccagggagactgttgtgtgctgcccgcctgcctggtggttttcccccagccccacatcccctttggaaaagaatgtaaaataaacctggacccaaggga

SEQ ID NO: 502713 - DNA, 881 bp, Homo sapiens
cacgcagcagctgatgcgggtctacggtgccctcatgtggtcctagagcaaggtcatcagcacgcccgaggtactgagcgtctacgtggctccttctgggcgcagccgctgagaacacggacaaccgacggctcttcgagggctgaggcccaggtacctcttcagagacatccagagcctcccccagaatggtcagcggtgcgccagctcaagagctcatcaagcgaggcgaggctggccaaggtgtgatgcctagcatcatacagctagctgatgaaggagatgccaagtgtattcggaaagggaaagcaagatgagagagcttatcagcaggatagcgggacactctaacttttcaggcgtactcgcgacgatagtaccgagagtattctgcacggggaacgtgcccgtgaagcgtcgatggctaatgcaaggaacagctctgagaactatgacatgtcaccagaatatccactcgcttgagacggcccaaggcatgatctgagggcatgtgggacaagaatgcttgagcaaacaaggatcattcgcccctttcatagacaacctacagtcaagcaccagagtagtgacgaaccagaagccacggcccaaaggccatggcattgggtgtgccatgggccgggcacgccctgttcggaagtggggacacacaaccacggtagggggggccccccgtattccaaaaacacaaggggaggcataacagggggggaaaggggggttgacccaatagggacagcagcgcctgcccataaccagaaggggcacggcaacgctgcggagattcgatgagatccaacacacgatacaaaatgccccggttatagcagaacagaacgcggcactgcatacagcatctg

SEQ ID NO: 502714 - DNA, 340 bp, Homo sapiens
tagaggatcccccttaaagggcacagaaattataaacttctgaaatttatggagagtagtcagcagctcagtgacctaagcataatatatctcatttgcagagctatgtaagacctattgagtaagcttatttcctagtatgtttaatcccactagaatagaaagcagattaactctaaaacatgtatcctatttatgtatcctaagaatttacatcattcgaagaatatcttcatttacttatatctctatggtcctgtcagggtgagaaatttttgagtgtttgattggttttcaagcacactaactctcgggtgttctaatttctgtgcccttttct

SEQ ID NO: 502715 - DNA, 182 bp, Homo sapiens
tccagctggccccatggctccctgttgtgaagaattccatcacgaagaatcaatggctgttaacacctagcagggaatatgccaccaacaacaatgaatggggatccgggcgtgggacgaacctggccaaggaactcaaagacggcagacatgggacaccatcgactggaaaacaatattta

SEQ ID NO: 502716 - DNA, 357 bp, Homo sapiens
ttccggcgatggcacagagaccctagggcaactccaccccggagtacccccaccaccttcgggcaggcactagtcggggcgactatgctgcgcagatgaggctggtatgttgcaagcatccccgggaataaacttgcgtgaattatttcgttgtctgtatcaggtagcacacgcaacattgttccccaccacggttgcgggggagagatcacccgtttgttcacaccacttcctgcgggcgggtagagcgagggaagtatctcactctatgaacaagggggggggagggtcaccacgagaggcgggacgtcgcccgatcccccccccgggggccaaggatctttcgccccaacaaga

SEQ ID NO: 502717 - DNA, 659 bp, Homo sapiens
tgggcgacgaagctggcccccgaggccccccggtccaacgaaatggtaacaaaccggcccaggccttacggtcagctagccgcaggccgctaacccccgtgaggaggcaattgcaggtaaactgtttgctatatcaggtggtaggcaacagaaagtacacgctgaatactctgctcaaggccctgcggtgtttgtacttacagaagtacgtgttataaaaggcaaagtcttgttttgtaatttgtggatgttacattttgatatcttgttgtacatgattgtatagggtcagccatgtatgttaatgatactcggatcgaccataagccagccttcggagcgttactctgtgcctagctctctgactgttgacttgctggtggtggagccatcgttgcattatgaatctcaaacggatgaaaaaaaagccttgtacacaaaaaagcagtagatactgacaacagagcaaagccgaatcttacttgccgagcattaccagtaactttttgtgtgtaatgtacttagctggactataagtagttgggcttgaatgagatggttaaaaggccaaagataaaaggtttcttatagatgtcctatctttgtctatgaagttgctggttatttttttggcaatgtctgacgactgtgtgaagcaa

SEQ ID NO: 502718 - DNA, 262 bp, Homo sapiens
atgcatatgtatgcttcaccaaactatggattatgacaaagaaaatgtatataatagaatagggggagaatattcgcaactctccacagtacagatttgactggtatcataagatccagaactgcaatggagctccagaggagatgtaataccttaattactttgattgaaagagaaaacatggaactagaagaaaaggagaaggcagagaagggagaaacgaggaccaaagccttcaacacaaatgcatcccactgggtgg

SEQ ID NO: 502719 - DNA, 193 bp, Homo sapiens
gattctgggcttaccatctagaaagaattctgcagacattaccaatgaaaggagcctcaaaatcttcttcatagactgatctaccttcgagacctaaaatcattgaacatctggcaagcatttcttattgcgcctctgtctacgacttctcctttccgctctcgttgcaatcatatccaatagtttatgctgt

SEQ ID NO: 502720 - DNA, 104 bp, Homo sapiens
tttcccggatgaaaaaccccgtttccatggttttgacccttcctttttcccggctgtcaaaactgggttttttgattttgcccctacattatgcctctgtggga

SEQ ID NO: 502721 - DNA, 508 bp, Homo sapiens
  misc_feature (21)..(21): n is a, c, g, or t
  misc_feature (26)..(26): n is a, c, g, or t
  misc_feature (65)..(65): n is a, c, g, or t
aggaacagcgggtaaggcccncaggnaggagcacctcagccggaggggagaaaaacgggaccagncccatccacaacggcaggttcttccagcacgtatggacagagacaatgaacggctggtatgtgtggcactctttgctcctgctttaaaaatcacactaatatcattactcagaatcattaacaatatttttaatagctaccacttccctgggcacttactgtcagccactgtcctaagctctttatgcatcactcgaaagcatttcaactataaggtagacattcttattctcattttacagatgagatttagagagattacgtgatttgtccaatgtcacacaactacccagagataaaactagaatttgagcacagttactttctgaataatgagcatttagataaatacctatatctctatattctaaagtgtgtgtgaaaactttcattttcatttccagggttctctgatactaagggttgtaaaagctattattcca

SEQ ID NO: 502722 - DNA, 953 bp, Homo sapiens
  misc_feature (177)..(177): n is a, c, g, or t
gttctgaagtgaggggctggcttgttgtgtgtccgctcgcccccccggtggctgtaaacggtggggcgccttattattatattttggccccacacacccctcggtttggtgggcctgatttgttcttctgttgttgtaaagacggtttggtagtaacaaggggtgtcgttgtctgtnttccttgtgtgcgggccccacacatttattttgtggtgggggcgtacttttttctggtggccttgctttttcttcccgccgaggaaccgacctgtattggttttctctctctcgcctctctgagtatagggttcgtcgcccccctctacgattagagtgatcgtcctcccccgtccggggtcgccccgtgtgggtgattacctcccccccgaaagagagaagtgtgcgggccttttcttctctcagcgaccgcctctctatgcctccgatgcgtctgtcgttgtgggaaactactatatgttgagagagcctgcttcgatttttgttggtgagaattgattctctcttttgttgttctctcaccacagacagaaagaataccacctctgtgaggagacaccacacttttgtgttgtttcgctctcgtccgagggtggatactcgccccctctgtgtggatgtctttgggggcgctacagagaagacactctgttgaattactcacaatcatggtgggtgaatactatgttctgttcctcgtcgtgcacccttctttttgttgatgaagattatttattggtgtattttgctgtgggggggaaacacgtactcctcctccctctcgaaaatacattggggtgtcacgccgaagcagtaacccccccgccgtatcgtgttttttgattttttttttttctccatttttttaaaaatttttttttttttcaaaggattttttaaaaaaaaaaaattttccggaggtttttaccccgaca

SEQ ID NO: 502723 - DNA, 1037 bp, Homo sapiens
tgccatggctcccagtcattttggaatagtgcccgctgcgggtggatcatctgacgtctcttgagattgctgggattggcatggaaatgagccactgtgaccggtgtgggcaccactttatttgaaggtatgtatcagcccatagctaaggtgttcgcctctaggaggttcccaatcgaagatgtgaaatggatagggatctaggaaacaacacactgaggacttctagtgaagactatcttataacatgaaatctagatgcgtactatctgtccactacttgaagcatagtgctaggatctgcacgtggaagccatatcatttctacaaattactcgcaatatgctctagtccatatagggtaagaaagtaagcttcatgatctctttctggtagtgcctccacgatgctgactttccgactaccggggttgaacattccccgacggagggtcatgagtcacttgatcgagaacacgtcttcacaaacctagggaaggcgtatgcgctataaataggaggcatggatagttctttgctctaaagcatactgaattattacctttatgactggcaacctctatctaggttgaattccactgatcaggcaacatgtatgtatgcctgggggcccactcattcccagaaaagacggacctggactcggaatgtctggcttatttcgcttcaattctatgattggcacattatcgtcgtgagtcttcaggccttctagagtaccggagcccgggagggatcttcgggggctctggttctcctaaaagatcccatgagttcatcgtatttacgacgtggctagggatctcgctgtagtacggcccatggggatgaaggcgctgtaacggagtggaaagtaatccacactatcgtgtgatactttgggagctggaacgccgtttgcccacaataagctgggtaacgctgggtacacaccggtgccatctaagtgccccatacacggtccaattctgcgtgttccgttttccccagggctcccggataactttagaaccgtct

SEQ ID NO: 502724 - DNA, 157 bp, Homo sapiens
gcctctctgttaactacagcagagttgtagtcacagaattctaaagagagaggacctggatggtgcatggtggatggaggtgtatggagtgcatgtctactctagactagtgcttaccttatatgactgtacagagccagcagtgtctaccatactc

SEQ ID NO: 502725 - DNA, 230 bp, Homo sapiens
gtcaaaccaacaacactgacttatgggatcattaaaaagtagattagagttagaatcctagagttgggattttgtcttaaaataataggatgacaaaagtaattaagggtaaggtttagattgctattggaaaccacgggagggcctgggccctgtgaagaagatacgctgggcctcactgaggtccacgaatgaaagattctgtcctaacacataggagttggcctatg

SEQ ID NO: 502726 - DNA, 936 bp, Homo sapiens
ttcttggaagaagtcacgtctgagggtgtacgttcggatatgatcatgcgagattgaaaaagatccaagccaggaagatgggcttgaacccaaactgcattatcagtgagtacctatgcctgcagaggatcagctgtagcatcctaataggtacagaggacttgctggtgttaagtggatttggtcagcgaagatttgatggagaaaactttggttgcatgctggtttccgatttgggagcatccgagtcgcgggttaacatgatcgggagattccttagccgttttagaactcggtggttgtagctctcatttttcttcccgtcatcgtcccgtccgatctccagaacaagccaaagagcgaaccaggagaaggggccccaagctctggatattgaggaaccccccaagagtcacgtaaaaacccatcaacaccagttggctaaggctggcccaaacaagttcaagaatctggctccttgtgaattgtgggattgggccttcggagcctggtcttaaagaaaggagcaggccattcaaatttgggttcaacgggaatgaagccccccaagatattacttgtgacctttcattgaaggaccaactgttccagagattccaagcctaccaaggctcgtaacttccaggacgctgactggactctctcattcaaatactgggtccagctccttcggcgcaggcagggttacgtggtcgtggcgcctggtatccagccagtgcccttcacggttccttcgggcctaggcgagcaggcccgtgctcagcaggcggcgtgattgtggctgcattgatcgttgtgctggacagccgtgtccaagcaggcgggtcggccgaggttcggcggcggtggcccgagtccgaagctcgtcaactctgttcgccaccggcggaggtgccccgggagtgggcgcacctt

SEQ ID NO: 502727 - DNA, 185 bp, Homo sapiens
gcgcgattccctggcctccccctgcggacagtgaacctcgccgagggtcaataaagaagattttgccctctttttctcacctctcagccttatgatccatggtgcccttccatggcctttcatgggtgccgaaaccgggaggggacacctcttaagcccccccagaggctcagggggactcccct

SEQ ID NO: 502728 - DNA, 1137 bp, Homo sapiens
  misc_feature (58)..(59): n is a, c, g, or t
  misc_feature (82)..(82): n is a, c, g, or t
  misc_feature (245)..(245): n is a, c, g, or t
ccctaaggccctttgggctcattcagctcctctgccagggagcccagagatggcagcnngggagcaggggtgagaaggtgangggggggtattggcagaagcgtggagctggagtcagaccttccttcctggctctggcactgagcgtaagagcggctcctgctctctgactttggtttcctgttggtgccacattggcgcggggccagaagctgctgagcagttttcacttctgcgtctcagcnccggtgattagctggttggccaatatccctgggcagcctccccgctgaagcctcttccccctcgcagagtcagggggcgctggccggcaggctgcggagcttctccatgcaggacctgcgctccatctctgacgcacctgcccctgcctaccatgaccccctctacctggaggaccaggtgtcccaccggaggccacccattgggtaccgggccgggggcctgcaggacagcgacaccgaggatgagtgttggtcagatactgaggcagtcccccgggcgccagcccggccccgagagaagcccctaatccgcagccagagcctgcgtgtggtcaagaggaagccaccggtgcgggagggcacctcgcgctccctgaaggttcggacgaggaaaaagactgtgccctcagacgtggacagctagggtctgctgcatctgcccccttcttacctcgtgccctgcagggctccagggctatttggagggaccttgggctgcacatctggcctgcctgcaccagctgcctgggccccaccctcctgactcctgctgatggttaagggccgggagcagatgctgccaaggccacatgcagggatgcacccacaatgtaccaaagcaggctgggcccagggttctatttattgccttgctctgccctctcccttccccggttgtgggacaagagccctccctgaacccctgcaaccctccctgaacccctgcaaatgaaaccaaacgtccacctgggtgtgttcattccttcctgtccttcaaagtacttgatagcctttcataaggcctggcacatgtgtcctggttgtgtgtgtgtgtgttggtgagtgaggtcaggtttgcgagtgttttgataaataaatacataaaggggca

SEQ ID NO: 502729 - DNA, 760 bp, Homo sapiens
cgacctcatcagtgagctgtccctgctggaggagcgcttccggacgtgcctgcttccccttcgccttctgccgtgattgtcagtttcctgaggcctccccagccacgctttctgtacagcctgcagaactgtgagtcaattaaacctcttttcttcataaaaaaaaaaaaaaaaaaaaaaaaaaaaaaaaaaacgaacaaaacagaaaaacacaaaaaaaaaagcacaagaaaagcaacaaaaaaaagtaaaatgaagaaaaccaaagacaaagaaaacgaactagcaagagcggagagggcagtcacaagagatagctagactagaacacaccatacaacaagaggcagcaccggagcgcccgcgccgcccagctatgacatcacgcggagccgggccggaagtaaccactcgtgaaccacgacgcacccacctcagcccgcccataggaaagcggataccgacatgcaagcggggagacatcaatactccgataaatggagcagctctgagcacacgccaccacgcgcagcatgattacttgaccgggtaacgtgactccaacctccctagttgcgccggactgttccgaaacgacaggtaactgcacacctcgcccccaccgtgcagctgacacgaaggcacgcaacaggacgcgaaaccagctgccgacccccccgactactatcctggcagaccgaacacgaagcgcggcaccgatacacacaactacccgacagacggtaagaaacacgcagaa

SEQ ID NO: 502730 - DNA, 136 bp, Homo sapiens
acgtgtactggttagggaaaaaaacaaaacgaaaacattccaaatgcatgatccagctgtgtgtttccactccttgggagggtgccatccacattttaacagtaccggtgcctgagaatataattttaaaaacgac

SEQ ID NO: 502731 - DNA, 1090 bp, Homo sapiens
  misc_feature (49)..(49): n is a, c, g, or t
  misc_feature (67)..(67): n is a, c, g, or t
  misc_feature (72)..(72): n is a, c, g, or t
  misc_feature (79)..(79): n is a, c, g, or t
  misc_feature (96)..(96): n is a, c, g, or t
  misc_feature (98)..(98): n is a, c, g, or t
  misc_feature (117)..(117): n is a, c, g, or t
  misc_feature (123)..(123): n is a, c, g, or t
  misc_feature (146)..(146): n is a, c, g, or t
  misc_feature (159)..(159): n is a, c, g, or t
  misc_feature (169)..(169): n is a, c, g, or t
  misc_feature (172)..(172): n is a, c, g, or t
  misc_feature (178)..(178): n is a, c, g, or t
  misc_feature (181)..(181): n is a, c, g, or t
  misc_feature (184)..(185): n is a, c, g, or t
  misc_feature (187)..(188): n is a, c, g, or t
  misc_feature (201)..(201): n is a, c, g, or t
  misc_feature (203)..(204): n is a, c, g, or t
  misc_feature (220)..(220): n is a, c, g, or t
  misc_feature (225)..(225): n is a, c, g, or t
  misc_feature (248)..(248): n is a, c, g, or t
  misc_feature (255)..(255): n is a, c, g, or t
  misc_feature (261)..(261): n is a, c, g, or t
  misc_feature (267)..(267): n is a, c, g, or t
  misc_feature (273)..(273): n is a, c, g, or t
  misc_feature (279)..(279): n is a, c, g, or t
  misc_feature (296)..(296): n is a, c, g, or t
  misc_feature (298)..(298): n is a, c, g, or t
  misc_feature (311)..(311): n is a, c, g, or t
  misc_feature (313)..(315): n is a, c, g, or t
  misc_feature (336)..(336): n is a, c, g, or t
  misc_feature (338)..(338): n is a, c, g, or t
  misc_feature (352)..(352): n is a, c, g, or t
  misc_feature (377)..(377): n is a, c, g, or t
  misc_feature (394)..(394): n is a, c, g, or t
  misc_feature (408)..(408): n is a, c, g, or t
  misc_feature (416)..(417): n is a, c, g, or t
  misc_feature (421)..(421): n is a, c, g, or t
  misc_feature (424)..(424): n is a, c, g, or t
  misc_feature (462)..(462): n is a, c, g, or t
  misc_feature (489)..(489): n is a, c, g, or t
  misc_feature (510)..(510): n is a, c, g, or t
  misc_feature (513)..(513): n is a, c, g, or t
  misc_feature (515)..(515): n is a, c, g, or t
  misc_feature (547)..(547): n is a, c, g, or t
  misc_feature (559)..(559): n is a, c, g, or t
  misc_feature (582)..(582): n is a, c, g, or t
  misc_feature (598)..(598): n is a, c, g, or t
  misc_feature (601)..(601): n is a, c, g, or t
  misc_feature (623)..(623): n is a, c, g, or t
  misc_feature (632)..(633): n is a, c, g, or t
  misc_feature (639)..(639): n is a, c, g, or t
  misc_feature (642)..(642): n is a, c, g, or t
  misc_feature (652)..(654): n is a, c, g, or t
  misc_feature (658)..(659): n is a, c, g, or t
  misc_feature (664)..(664): n is a, c, g, or t
  misc_feature (672)..(672): n is a, c, g, or t
  misc_feature (675)..(675): n is a, c, g, or t
  misc_feature (679)..(679): n is a, c, g, or t
  misc_feature (688)..(688): n is a, c, g, or t
  misc_feature (729)..(729): n is a, c, g, or t
  misc_feature (731)..(731): n is a, c, g, or t
  misc_feature (734)..(734): n is a, c, g, or t
  misc_feature (757)..(757): n is a, c, g, or t
  misc_feature (760)..(760): n is a, c, g, or t
  misc_feature (783)..(783): n is a, c, g, or t
  misc_feature (800)..(800): n is a, c, g, or t
  misc_feature (804)..(804): n is a, c, g, or t
  misc_feature (852)..(852): n is a, c, g, or t
  misc_feature (867)..(867): n is a, c, g, or t
  misc_feature (889)..(889): n is a, c, g, or t
  misc_feature (899)..(899): n is a, c, g, or t
  misc_feature (912)..(912): n is a, c, g, or t
  misc_feature (934)..(934): n is a, c, g, or t
  misc_feature (944)..(944): n is a, c, g, or t
ttttgccccccccgggccccttaaccccattttatccccccccccttcnaaaccccgggggaagggnatccncaagggnggttccccccaatcccngngagggggccccaacccccnattttngggggtaatccccgggggtcccngggggggggcccnttttcatggnaancaaggncgnatnnannctcggaaggggantnngaatgttttttttttntttcnatgtatttttttttgtatttttntatgtgnacactnacccgngtgtcngacacngggactctcggggtccncnttcgcaggtatgnannncacacacacggatactttctntntcattgacacattnatggacacgggtcgcttgcggtgtnacagattgaagggaaanagacacatacactntttgactnntganggnggtctaactttaccgccgtctttctctactgtatatgngtttacggtgaacgtatggtatataanagtaacttgtggacactctcncangnatcgtttggtaacacgacataagtgtgttctntgacttgacatntcgtctcctcctcttttcttaanctctctcgtatgctcnctnacatggtgacttcacatggggnctaattttnnggaggngtnttctctttgnnnactnntaacntttcttgnacngtgncctttctantctagccggtctcgtggtgtcttcctatctctctttttgtncntcnttgtctgtatgtgtttttgttgnctngtgatcagtttgtggccaaggtncatttgtgtatccattngtcnggccgttggtctcttagggtttcttttttatttgtccttggctttggnccttcttctctttcncctgggtgtggtgattttagcntttttttttnttattattccttnttggtttttatttttttttttntttttttttntttgggtgtgttcattccttcctgtccttcaaagtacttgatagcctttcataaggcctggcacatgtgtcctggttgtgtgtgtgtgtgttggtgagtgaggtcaggtttgcgagtgttttgataaataaatacataaaggggca

SEQ ID NO: 502732 - DNA, 1109 bp, Homo sapiens
atagacctacgggctctggagggtgggggactggttaaaacacatgcaaacaaaaaaaaaaaaaaaaaaaaggcaatttgtgtgttttttattacccattttataatttttattataaaaggttgtggaatgtgttccagggtttgtaaatgtggggccgttgtgtgaaagcatataaatataaatatacatggtgaagagtatagagcccaaatagtgaggatttaaatttatagtgggggagtgttatatttgtccccctataagaactcgtgaaagagtgtgaaacatatagtatatggggtgagaagttaaatttattacaagtgtgtttaaagacgatttttataatgtttcctctataagaacaaatttgtggggaaacacaattatattaatatagtgggggcatagcttgtgtgtgccccgttgagattataaaatatagtgttgtgaacgggcatatagaaagagggcgcctatcacagggggtggtttatatcttgatggacacaaaagggagagtgttgacacaaagagtatattatatatgaggcgtttgtaggaagaaaaaaagggtgtttgttgtgtgggccaaaatttctttatagagaaaaaagtaggaagcggcagaaatctattatatgagaaaaaatttgtgtggtgggggggagaaatttctgactatcaccggggtgtataaagaggtggaagacgtgatgattctgtgtgtgtgttggagacaaatattttttctatcccccaaaatatgtctctgtagcacacaaatgctgtgtgggttattcttctgcccagaaagtataatttgtgcgaaatatacaagagggtgaagtgtgggtgctggaagacataatggaacgttttgaggaaactaccgttgtttatacgcagatttaaaacttaaaagggtggtgtagagagagaaaaaaaaccgcggttgttagtgtggcacaaagggtggagaaatcgtcgtgtcacgcgataagatttcaagaggtttaaagagggagaatgtgtgggacaaaagaggtggtcgcacgacgagaaagtgtagaattggtggccgttttaggaacaagtggaggaca

SEQ ID NO: 502733 - DNA, 726 bp, Homo sapiens
gcaagccggagccctggggttgggcagcactcggttccgtgcaactttcaagtgagttgcgaactccgccctgtaggccggtgctggtggcccggcgcgctggaaccgcggcgacccgctccagcgcgggaccagcagcaagggccgagcgccaggttctccgcggcagaaagggcgggtgggagctgtaactgccccggccgcggggcgcgcccgctcccaagtcggcttcctccccgccggggccgctttgcctcgggtctccccattctccaggtcccctgaactgcacagtcggaggccgtgggcggcgggctctgcctccgccgagggacagccggatcgcccctctgcttcccgcaactgccctgatcaccccccgtcccagcccttgagtgaacgtccttctgagcggcttcctggggtcctccccacgtcccaaaggccggcaagatggtgtcctggatgatctgtcgcctggtggtgtgagtatggccgccctcagacctcctctaccccggggtgccgtcccgcccctgtggtggaagctgtggacgtttagtgggaggaggaactttttgagctccaccctccagcactccatgcaagggttaacggacctgtgggcttgcacgcggtgtttggggcaccgcaggctacccgcccccccaagcctcgttggctgagaacgacccctgccgcacgccacacaccctgcaaacatta

SEQ ID NO: 502734 - DNA, 132 bp, Homo sapiens
tctgtggctctattcaggtgactctgtcctagtggcagatgagatgagtgctacccaatgagttgttgtggagcctcctgcctggtggatggtattggagggcagagccacatggagtgtgagaccatgtga

SEQ ID NO: 502735 - DNA, 614 bp, Homo sapiens
cgaggaaaaccgtgtgctattagccatggtcaaccccaccgagttcttcaacattgccgtcaacggcaagcccttggaccacatctcctttgagctgtttgcatacaaggtcccaaagacagcataaaattttcatgctctgagcactggagagaaaggatttggttataagggttcctgctttcacacaattattccaaggtttatgtgtcagggtggtgacttcacacaccataatggcactggtggcaattccatctatggggagaaatttaaaaattataacttcatcctaaagcatacggatcctgacatcttagtccatggcaaatgctggacccaacacaaatggttcccaatttttcatctacactgccaatacgtgatggttggatggcaagcatgtggtgtttggcaaactgaaataaagcatgaatattgtagaggccatgagacactttggatccaataatggcaccatcaataacatcaccattactaactattgacaactccaataagtttaacttatattttatcttaaccaccacatcattccttctataactcaagcacccctgcaccccattacttccagtatcctatttttatcg

SEQ ID NO: 502736 - DNA, 1015 bp, Homo sapiens
  misc_feature (603)..(603): n is a, c, g, or t
agcgggcagcgcagcccgcagaagcacggtcagcgcacgtgccctgcgagacctgtcaaatcttgtgcctagccggctctgcccgtcccctggggatgcccgaacgccccggcagccctcacctcctcccgccagtctccatgccatagtggctgctttgagtgctgcgagtcagagtgtctggcgagcgagtcccctacgcctccctggctggccacgcatccgttctgcttctccagaggggtggccgttacttcgtgccggcgtgtgggcactgttgtgcttctctggcagggcatcgcagctggcgacttcttgatcgagagcatcgatttctcgcagcgcatacagccaggttgacccattgaccattgcgatgaagcagaagcgtagactacacacatttgacgtgcacgtacttgttcagtcctacttgggacacctttgccgtcgcattttactcgttcttatagatacttgcggacatcgattcctggttgggccgcaacgggccttgttaacatacacatcataggtgccaaggcttgccacacacgaatcttgtcaacgagtgacgcttctcagaacagcaatactccgtcnttctggttgggacccggaatggccattcacgctgggggagatagttgcagctttgttgcacttgcaacacttgatagtggcgtactgcgaagagttggccctgcgcttggggtcgttgtggcagcgtagttcgttcgatgcggtgtagcccccaggttgtactcattcggtttctatcaaaccactatttgggttccagacttttgttagacacgttcgattccaagtttcaacccgccaggaacgcgaatcgcggcaaccacccgggtgtgttcggcatgcaagcatcctggttgttgtgcacttagtcccggacaaataagcgagtgaattccattgtcccttttggaagaatgcctctggcccccgcgaagaacagtaatggtgtggttccttgctccctgggagaaac

SEQ ID NO: 502737 - DNA, 298 bp, Homo sapiens
tatgaatgaagtgacctcacgtcccgggggtggggccgtctgaaccaggcgcggtccctgcagacagcgttctggcttccagcgagggtgtggccctgggccgctgtgggtgggcccatagggcctcatacaaagtcgcgccccaaggggctgcacggataatattcagggggctgcactcgcccagagtcacttgtgtcaaagcaacgatcttctcttacttctcttgaagaaacagcgacatttgttttcatcggccaccttcacctttgcaggcgctgatatcggtgcgttggag

SEQ ID NO: 502738 - DNA, 397 bp, Homo sapiens
  misc_feature (397)..(397): n is a, c, g, or t
gttgagaatgaaaattgtaacccatgctggctctattgttcctgaagccacgtggccaaacgataaaccagtatgtcaactctgactacacactttgtatatcatcagggagggagaaacttgcctgtatctcccaatatctaggaaagtagcactttgataactacattgtctatggtttttaagagactccctgtcaagaagatgtttttaaaaagactggcatagaggaagtgcaggatatactcacagatatgcattctgatttttaaaaacaaagaggctgacaagacatattaatttgattttacatatctacagagggctcttgtagtcctaaaggtgcccaaaccatatgaagcccccctttaaaggagatcaattatctccatatctn

SEQ ID NO: 502739 - DNA, 1787 bp, Homo sapiens
ccagcggtctggtgtgtgtgcgggttgccgtctgtcctggtgtgtgctggtaggtcccttgtcgcttgttgtgtcgtccggttgcgcccttggtgggctgtgttctcgcctagtcgatgttgccttggtcgcgtgtcggtggtgtctgtgtgccctctgcggggtgtgtggatctctcgtcgctggttttttcgtcggtgggtgtgctcgtgcatggtccgctccttgtggggtccctcgtccgttgagcgtggtgttgtccgctggctgtggccacgtgtggctggtggtgtgctcgtgtgtgggggctgcatgtcggtaggacgcgctggcttgtcgatggttgcgtttgcgtgtgttgcactggggtgccattgtgcgagctgtcctggtggtgcgtcgttgtctgctgctcatgcgccgctcttggttggcggtcttcttgcggtgtgccagatgtgatacgggggtgtaccccgggtcgcccgccggcggatgtagacgcctctcgtcgggtgtggggtgaccgagtgccggcttgtgtatgggcgtcctgttgtcggggcacgatgcgtctggtaatgtggactgtctctggggagaactgggcctggtagccgcctgggggatcggcgagcctggtttctgccctgtgcttaggcacggcggtgagagttgcgcccgcctcggcgggggtttggaccccttgcgttgtctcccgggggtgcgctgtatggagacggtgcgtcgggcggtcccatccgagggccgcgttgcggcgctccgtcctatggattcgacgcctaggggccggcctgcgtacgttgttgccgacaaggtggtgccatggtcccgccgagtgttgtaggttcgcgtagggtctggcgagggagccaagtgtcattggcgcctagtcggttggcccgcgttgtaggtgagtgtttggtccagggtggaaggggtccatggcggggacatctgacagggtggaggggttggtgcctctcgctagtgctgggtggccccagtgggattgtaaggggatggcagaagggggccggacgtcctgtcgtggcccgtgtgcgctagcgatgcgctgtgcattcgacgagtaatggcgcccagagggatgtgtcgtcttaaggggaaagacccgcacggatatagcgcccacgcatgttgcgatgagagtgtctggctgttactggtctgtgcgcggttgtccatgggaatacggcgcccttagggcttgcccctgtcgccaccagggcctctatgtgccatggtcttgcatttgtctccggggcgcaatgcgcctcatcggtgcctgcgctcctagcgccccgtagcagcagtgtcagggtcttaggcccttcgccccctggaaaccatcggatgcgcgcctggcaccgagggactgtgggctcctagtcccatgcagcccagcccagaaggtcctgtgcagatctttcttgcagttgtgatgacaacactgatcaaatgggcccacgcagccctgtcgtgcacctcagcacagccttgccgcagccacagccctgcccccagggcactgcacatgccgtgtctgggggccaaactcaccccagttgtccatccttgttgatcctgtgacgtccccttggcctccagcacaagcagcgtcgctggccaattgtgtgcctgccttagtgactccgtggttttgtgaggcgcagagtgtgtatgattttgcctcagaaactaatacatccggtacgaccaagctttcgttctttctggtgttgtga

SEQ ID NO: 502740 - DNA, 199 bp, Homo sapiens
gaatctagagttatcccactgtaccacaaacaggacaaagaacgacttgtataatgattgtttatgcttgccattcattctcgcatatcaagacttcgtatgcatggcttcaatgtgcttatattaacaaagaagcctgtacatatatcattatctgtctactcgctagtacctgtgcctgtcgccatatacctttgat

SEQ ID NO: 502741 - DNA, 392 bp, Homo sapiens
ttttttaacttttattttaggttttggggtacacgtgatggtttgttacataggcaaatctgtgtcatgggggttttctgtacagattatttcatcacgccggtattaagcccagtacccaacagttatcttttctgctcctctgcttcctctcaccctccactctcaggtagaccccagttccctgttttttaagttttcatttcctcatgaaagctcctgtgtgatataaaaactaacattaaagaaatgtgtttgctttacccaagttaatctgtcttttcttttaaggggcctcaggcatgagtataggatgggaagaaaaggtatttcttttctcctacatgtgcaattacttttagacattaaaaagcaaaaacaaaaacaaaaac

SEQ ID NO: 502742 - DNA, 226 bp, Homo sapiens
ccccccgggggtttttaaaaacccgggggccccttttttagttttgcggggaaatttcttttcccctgggggggggggggggcccccctttttttcccgcccgggggggtttttccacccccaaaaatttttggggttggggggggttccccaaatttttggatttaaaattttggggatttttttttaaacccccccccggggggtttgttttttccccccccca

SEQ ID NO: 502743 - DNA, 376 bp, Homo sapiens
  misc_feature (246)..(246): n is a, c, g, or t
gcagttaattacatttatatataatttttatatgtggtgttaagggttcagcttttttcttttgcatgtggatatttagatgtcctggcatcattgttgaaatagtattcttttaccattaattgtcctggtacacttgttgaaaatcagtgacccgtaagtgtccttctagactctgacctctgatccattggtctatatgtctgtcctcatgccaataccatactgtcttggttactatagctntatggtaaggtttgaaatcagaaagtgtcagtctttcctcctctgctctttttaaaagatcatttttggctatttctgagtccccttgcacttcccatatgatttctagaattagtttggcaatttttgc

SEQ ID NO: 502744 - DNA, 204 bp, Homo sapiens
  misc_feature (38)..(38): n is a, c, g, or t
  misc_feature (59)..(59): n is a, c, g, or t
  misc_feature (91)..(91): n is a, c, g, or t
  misc_feature (121)..(121): n is a, c, g, or t
  misc_feature (155)..(155): n is a, c, g, or t
  misc_feature (158)..(158): n is a, c, g, or t
caattgtttcgcaattcggcattttgaaaacaaatttnccgtggaaactttaatttgtncttgaacagtcaagaaaaacattattgagganaattaatatcacagcataaccccacccttntacattttgtgcagtgattattttttaaagtctnctntcatgtaaggagcaaacagggctttactatcttttcatctcattaa

SEQ ID NO: 502745 - DNA, 120 bp, Homo sapiens
gccatccccggaatcacgtacactgccacaatctaacctcctcggactcctgccttcactcatttacaccaatccacccaatctatctataaacctagccttgtttgtacacttgcagga

SEQ ID NO: 502746 - DNA, 226 bp, Homo sapiens
acaataacacacaccaagtcttgttactagctagctacacagacacacacacactataacacacacaccaagtcttgttactagctagctacacagacacacacacacactataacacacacaccaagtcttgttactagctagctacacagacacacacacacactataacacacacaccaagtcttgttactagctagctacagtcgacgcggccgcgaattta

SEQ ID NO: 502747 - DNA, 266 bp, Homo sapiens
ccccaaagttccctttttaacggccctttctttaaaaaatggttggccttttgttccctgcccccctgggtcctttcaggaagcctgccttaatttccgggggggggaaggaggtggggaaaaaaatctgaccttttcatccgcaggggcaagaaaaaaatttgccattgtgacttgcctggggaaaatgaggggggcaggtttttagttgggaaaggttcccctctttgggataaaatgatttaataaatctctttaaaacctta

SEQ ID NO: 502748 - DNA, 114 bp, Homo sapiens
ttgagtcgtcggcgccgtaccggcggccgctcagctccgacgcacgctcgatgaccgggaacatctcgtcggtctcgtaccatttgctcttgatcctggagcaggtaggccacc

SEQ ID NO: 502749 - DNA, 458 bp, Homo sapiens
  misc_feature (9)..(9): n is a, c, g, or t
  misc_feature (47)..(47): n is a, c, g, or t
  misc_feature (133)..(133): n is a, c, g, or t
  misc_feature (228)..(228): n is a, c, g, or t
  misc_feature (231)..(231): n is a, c, g, or t
  misc_feature (444)..(444): n is a, c, g, or t
  misc_feature (448)..(448): n is a, c, g, or t
agggctggnaaaaaaccctgctctgcttttggcccttggaatatggnaaaccttaaaccactttgttctccctaccacctctttgcccttccctaccccttcctccccttcagtcagtgtcccccagggtccnaccctggctagagttagaaggcagaccctagcctttggaagcagggtggcctcccagagccttgcccataaaaaggctgaaggcagccgggcgcnagntgtcacgcctgtaatcccagcactttgggaggctgaggcgggcggatcatgaggtcaggagatcgagaccatcctggctaacgtggtgaaaccccatctctactaaaaatacaaaaaaattagctgggcgtggtggcacgcgcctgtagtcccagctgctcaggaggctgaggcaggagaatggcgtaaacccctccagcctgggcgacaganatanagctccgtct

SEQ ID NO: 502750 - DNA, 161 bp, Homo sapiens
gggggggggggggggcccccccttcttggtttttttttaaaaaggggggttttttttttttccccccttttgggttttttttgggaacctttccccccccctttttttaccccaaaaattccttttttttaagggcccctaacctttggggccctttggga

SEQ ID NO: 502751 - DNA, 862 bp, Homo sapiens
gcggagcagggggatctacgagcggctgtgcgttcacgctcgatgtctgcggtacgctccgcttcctctgcctaggcgacgagacgccagtgggctacaagcttccgatcagttgtgctattctcaaagatcgcgagtggctcgaagggaagaatactatattggactcctcgtcgggatatcccgttggtcgagcgttgatctcttcgcgctcgcaatggtcatcttcagaactgaccttgtgccgcatggaggcttgcgtctcgaatccgtagagtgactctactgaggccactagaaggctcctggtgacagtgagtaagactcgctatagttgcggacaggggtgtcctcatccgagtcgtaggtatgtagaccaaccttccagtaacaagcttgttagcagttccgtggcgcactgagtgaacgaccatgagactgtagtcgtcaaccagaaccacgaggaagatgttgacagagactagatagatcctgagatgggcatcggagacacgtaaaatggggctctgttagtctaggtccgggggagacgtccctatcctctgcgggtttgtgcctcgttggcacatgtgcgttggaagcaacgcgtgatcgcctgctcgacgcaacgaggagggctcgctcctgggtgtgccaagcctcgatgggacattacatctcgagcgagtgaatcttcctcgtcatctttttcgcttggtcccatttcaccgtgcgttatctccatgatccatatattcgttgcgagggggcactgatgccttggtaaaacttagcattgggcggtcgcatcgagatcttgtgattccttcccgtgcacgggtgcaagtgaagtttgcaggaa

SEQ ID NO: 502752 - DNA, 269 bp, Homo sapiens
  misc_feature (18)..(18): n is a, c, g, or t
gtgaagtgtgattgcttntatttgcttagacatccactgccataaatcactattttgatgggcggttaaccaagaggattggtgatcgccgccctctatttcgctgtaacggatatagcgcgtgctgcccccgagtttaattatgctatcaaccatattgcggctgtaattgacatcggtaacttcatcgtcggtgccgtgaaatacccagactggtaatttaattaatttctgcgcgtactccgggctgcctgctccggcgatagggg

SEQ ID NO: 502753 - DNA, 154 bp, Homo sapiens
gagctcggtccccagtcttgctagaacactctgggaaacagtatagctaggaacagatcagctatcctattagagggacaaagggactggtgcatttattcctcatttcttatccgtcattggttgagagcagcttctagggatactaagtgaa

SEQ ID NO: 502754 - DNA, 749 bp, Homo sapiens
  misc_feature (368)..(368): n is a, c, g, or t
gggcgaggggcatgaggggttgactgagcgttgcgagccttagctttctcccgaacgccagcgtgaggacacgatgtcgcggtctcccgctcactgcttgtgggccggccacctgcctggggggtgctctgcgtcgttgtcctgcggacaaagaacacgaaccagcacccgaaggtgacgatttagcgcccaatctccaaatgtaacctcggcgccggtgactgtccctccccgttgtcaccatttccggcaccagaaaccttgtgaagtgtcgaaaacagctgcgttccctgtttaaatgtcaagcgtgtgtaatactacctgtttgtggatagaattgtacacgatgagaagctatctgttcacantaactcaccagttagtgatggtcacgtggggaacacgaccagacttctgtccgtttccacggccacctccagtgccaacagccaattctaccaggtacaaccaaataacagtgttgattccaagctcagaagctgtggggaaaagtctacctttgatggcaggccagttcatttggaggaatggtcctggtctgtgcgtgtgcaggctgaaatttccttgctttataaattcttggaattaaagaacgaattaccacactctggaaaagagacccctttgattataaggctggggaatcatttgtgtaacttcactggaggcaaagtaatatctttaggaggccccatggagaaggatcaggattttaattgccgggtgga

SEQ ID NO: 502755 - DNA, 235 bp, Homo sapiens
tgtacctctgggttgcagttttggtggtagtagaggggcggaaaccagactgcagtgcattgaggatgagtaagtggtgaaaaatgcagaaaatggatacataacaacaacatggattactaacaagataaggtggctgggtgcagtggctcacacctgtaatcctagctctttgggaggtcgaggcgggtggatcatgaggtcaggagatggagaccatcctggctaacacggt

SEQ ID NO: 502756 - DNA, 991 bp, Homo sapiens
agagcactgggttctgctgatggggcagtgcggcatacgccgagaaatccctggcgctcatgtctctcttcattctagaatgatagaaaatcgattctcttacttaccaaatatatcctgtatcgttactagaaatattgtttagaggttcatttattaaccaggtcatattcgttgtcatgattcaagattctcacgagatgtactagtgaggagcttagatgcagatatggatggagggacgtggaagtgatataaggtttggtagaaaatatgactggaggctatgaacatgcaagcttcttgcatgagaaataggttccatggtcgtctcctcgaaaacagaggagaaacggaataggtgagaggctcgtaaataaatcacgcacttggtaatggggcaaatgataaatgtggtttaacatattgcacattgctgtaggagtgtagagataaaagttataagtctatagaaacagttagtctgggtagactgtacacaatcaattttgaatgagctgtagtcttttattactagagacgattgaattctggccgtgatctcctggtagctaaggagggattctcagtgattgcaaggcagaatcgggtcatctaaaaggcctacgtactggcgtgcgttgactaatggcttcaacgaaaactggtaaagattcactttgctgggtggcaggatgtacccactcctggttgctgacctggcgtttgaccgtgggacgactcggagagaatcagtagctccgcaacgcaaaaatgcgatgtaaagctgcctcgggcatccaaggtgtaacccacgctgtcttgtgggaaccgcctctttttcgcgacacctggggtctactaagacgccattgtggcacacagcgtgtggctctaccttcgggaatacggttcaacagcgcgatgtcacaaccccgtgagcacagcattaatcttacgcgcgccacaacaaacgtgtccttcttccacc

SEQ ID NO: 502757 - DNA, 809 bp, Homo sapiens
tgtggagagagtgcgaggtcaggccatgaacttgggagatggtgttaaagcttgaaactgaattactggatggaaaaaccaagctaatatgtctccatatgaacataaatcaaaaatttctgtgaagatgggaaataaggccaagattgaaaattgtcctttaggaacaaaaactggcacattctaaaatcaagacaagatacttgtatgggagtgaaaaacttttgcaaaagaagccagttggttcagaaacatcacaggcaaaaggtgaaaaaaatggaatgacttgtcatccactaaggattatgtaaaccaatgtatagataaagactgtcttcatatccagaaagagatttcactggaaatccttaatatgcagaagactagaaagcaccgtaaatacatctctaggtagggtaaacagaagcctcacaaaaaaaacatcacaggtgaaaagatgaagagcagttgggtgtctaaaaacaagagcaatacaaagattttgatgactgtaaaccacgggaaatagatctctttccctgaggtggaatgaaaggagggcaaaagtcaatatagtctatatttgaaaaggcattctaatcagacaagatgagacattatggattttcagaaaatggatggtttatgtgggcagggaaatcacttgtttaatgacattggagctttaacgatatggtggagcggcgatattcaagttgggggggatgtaaagttgtgagaagagaggagaaataaagttgttggagaaattgaagagggtgtagtgggacaatgaggtggcaacaggc

SEQ ID NO: 502758 - DNA, 157 bp, Homo sapiens
  misc_feature (54)..(54): n is a, c, g, or t
  misc_feature (148)..(148): n is a, c, g, or t
tacaatcgagctcggtaccatacctgccggacatctggctgaatgcagtacggnctggtcgaactgaaccgcgaagccatcgccaaggcgcgcgtgatcggcaacccgggctgctacccgaccaccgtgctgctgggcctggccccgntgctcgacg

SEQ ID NO: 502759 - DNA, 117 bp, Homo sapiens
cctttgtcagtgatctccaactcacacattatattctacgcatacactactcaccagacgctctcccgcttttcatcaatcgcccacatcactcgagacgtaaattatggcgtgaat

SEQ ID NO: 502760 - DNA, 128 bp, Homo sapiens
tctgcgtgggttgggcggtttatttgtaaggaatgtgtaaggcattttggtaagtcgaacgggagcttctttttccaaagaggaaactcagacagaggtgccctcctttgagctgctgccgccccgcg

SEQ ID NO: 502761 - DNA, 100 bp, Homo sapiens
gcttcccaaaatgtccccccccccctttagtagaattgggaagttttagcccatacccatggagggaatcaggaataaaggcaggctggtctcccaaaga

SEQ ID NO: 502762 - DNA, 132 bp, Homo sapiens
gtcacagtaacacgactggagctcgggcgattctgcttatgtgcagccacccaggcctctgcaagcagtagaaggcttcaggaattggactcgaccatcgggcttcagcgctataatcatgatgaaacacag

SEQ ID NO: 502763 - DNA, 1376 bp, Homo sapiens
  misc_feature (241)..(241): n is a, c, g, or t
  misc_feature (501)..(501): n is a, c, g, or t
  misc_feature (510)..(510): n is a, c, g, or t
  misc_feature (917)..(917): n is a, c, g, or t
tcatttaacttttttaatgggtctcaaaattctgtgacaaattttgtggctcaagtttgtttctccatttaaaaagttacgtgatttttaaaaactaattaacttaaaacgtgccacacgcaaaaaagaaaaccaaaggtggttccacaaaacatttcctccttttcctttcttgaaggtttttacgatgtgcattgtgtttatctctattatacaccagtctcttttatacttacttaanacttataagtgtggccaattgtgaaacaccacagttctctgtgaagaaccggtgttcttctccaccactgtgtatttaacagaaggtgtgcggtgtggcagggttaatttaggagagattaattattctcatttatacgccttctcttgagcttctctctgtgggcagagacctttgtgatagaccctgttgtccaggcttcacagcgcacgcccctctcttgtgtgtcccacctgtgtgctttgtgatgtagacccccncacaccgcngacaagctgtgtgtcgtgtgtctctcattattcaccagaaacacacgacacaaagagcagacccacacaaggggtgtgagatataatgtctctgtgagaaaaaagactctctctcaaaacaccacacatgttggcgcttgtgcccagagagaacccatatattcacaccacaatgtgggcaggacatctcacccagagagcttctcagagagagattttttatggggcgcccattctcttctcccagggctttttttttacccagagacagcgggggaggacatccaaactctttttctccctttttcaaggctctactaggcacaaactgttgttgccatgttgccaaatgtgttgtagaacgccccggtgtgttgttgcgacaatctcccaacatcataccagangggggggcacatataaagccccgggccgccctatattttgtaggggccctggagaaagtgcggttcccaaggggaatattaaaattcctaccgctttgtgagaggccttgctttcgcaagagcccccgcaggtcgttcgtcgctttcatcccactttggggggacgggggggtccctactcttctctggcgtctgtgtgttccacccccaaggcacaaaagtgtgtttttgtccccaaacggaacggaaaaacaacatcccgtttgtgtaaacggaaagccccactttcttctgtcacacttttgatagccccccaaattttttgttccccccagggagaaaaagagaggctacactactcctcaaaagggatttcactgagggggcaaccattttccaacacgagcatatttaatactatccccgcgcgcggtattatcgcgctgttaccagagtggc

SEQ ID NO: 502764 - DNA, 926 bp, Homo sapiens
attagaatataaacgaataaaccgtctaaaaattaaacgagtgctcagggagacattctcacagttctgaggttaacgcgtggcagtttcccctgagctctccttcctgctggtatgtaaggcgtgctttgcttcctctacaccttccgccatgattgtacattccctgaggcctccccagccatgcataactgcatacaacttaggattcataactacatatatacggatacaagggcatgaacagaaaagcggccattctggaataccttgtgccagattaaccagaccacgcagcagaactgggagacaaacacaccagacgaccgcaccggccgtataatcaccgccaacaaacaagtgcccgctgtaccccggctaataacaacataacgaagcctcgcattacacaacaacaagaactacctgaatacttaatagactcgtcaggcacgaatatccccaggacgggcgtcgtgtcagatatagtcgttactacgatgccggctaggtgaatttatataaatttaccgtacacattcaacactaagtcggacggaccctttcaataataattaaatgcgccggaaagagcccgaggagcgcctcgccggatgggaaagcggagactaagaaaatatggcacggcgaggatgaagaaaccaggaagagtccgcgcgtacctaaacggagttgtggcgcatgttatataactctagccgagcacgtcgcagggtgcacctgagggggtataaagaaaaactgtggtcttggcgaatgaagacacacagcgacgccggacagctgatccgacaatggaggcccggtcaatacaaaaacagggaatgaacccgaaaagatatgttaagttacatcagttattagaagaagcctccataacatacatccacaacacacccccatac

SEQ ID NO: 502765 - DNA, 200 bp, Homo sapiens
ggatccccagattagagtcatagggaatacacgtgcaatgctgagagcaccagtctgagaagctacgctcttgagcctcctggtcagaaccatcataatatgacaatttgatagcgtcgaaatgcacgttcttcttatcccaataattctcattcttagtcaactcgatagatgatttagctgtcaaagatttaagaagg

SEQ ID NO: 502766 - DNA, 519 bp, Homo sapiens
agtgctctgctctgagtagtgtccacaggacctgtgctcatactcttcgggtcacacaaccctgtgggcgctcaactttttcacccactttggcttgtggggagatggttcgcgctgttttgtgacaagggcttgggagtggacaggattaagtgggaaagtggagtccacccttaaggttctggaagaatcttacacgggggcttgaagacacacttcccacacccagatgtgggtaaattcagtgcgcttacacaattcttagctcagagaaaggtccattttcggttcacaaggaaaggaaccttcctataggctttcctgggttggtataacgcgatctggtggttatgccactctatcttaagaactgtgcaagctcaactgtgaacccgaatatgtgaagggattgcgtgatgtgagggaagctggaatttaaggagctgagccacacatgggtgtggcgcgtgagtcaagagacctctggttagaccctctctactgtgaacggctgtgccg

SEQ ID NO: 502767 - DNA, 134 bp, Homo sapiens
agaagcagaacattcagatgtactatatacacagttcttaaacacgccaatcatttccataaggccactggctcatgtatttctgttgaggcagaagtcactcttaggatgtggtcttacatatctgcagataa

SEQ ID NO: 502768 - DNA, 187 bp, Homo sapiens
  misc_feature (138)..(138): n is a, c, g, or t
gagttcgcgccactgcactccagcctgggcgacagagcaatgactccagtctcaaacaaaaaaaaaaagagtttgacgtggtttcagcttggaccaagattttttcaacccttggccatttgacaccttgtggcccanaataattctctttggctggtgtgggggcgtgggtttggagcattggata

SEQ ID NO: 502769 - DNA, 838 bp, Homo sapiens
cccgaaggtgaaagaattgggcagacataccaaggcccgtgagtgtggaaacccgcataaatccttttgaggaaaagtcgagaaattttaatagaagggggaatttaaaattattggaaagagaatgggtggtttgcggaacccctcttctttgtcccgcgcccccacgaggtgtgtcctgggcccccgcggaaagatgctttgcaacccgataaaataaaagggggggttaaaaaatttttaggaaaaggaaaattctgtgatctgtcccatggtgtaaaatcccgtgaggctggaggccaccaaagtgcacctcttccccctcgagggagacccaatgggaccggaagagctcgaaggcctctgcgggaaaatgtcaaatgtgaggaggctggtccaccccccctgggggaaatcacccccccccgtccgccccgagcagaggctctaatatcagcagatggcccccccctctgaaagatgagaaattctgtgaacgcataaagagttgttaagagaccactcaagggccacagggttaaattataagagttgcgaagaaaattgctctgtgggtgcgtcaccccccaccgcggttctcgcaacaactccacatacagggtaatgagccaagtggttgagagaacctccgcaagagcggctgggagggaaagtgaggtgaaagcacgccgtgagattgctgagagcaccacgacccctccaaacattggggaccacattattgtagaaacattcccccgaaaataaagtcccaccacagaaaaagggaaaaaccccaaaaaaaatgaacccccaaaaaacccccccaaaaaaaaaa

SEQ ID NO: 502770 - DNA, 109 bp, Homo sapiens
tattaagttcttggggccgaaacgatctcaacctattctcaaacttgggcgcctgtactgatccagagctggcatcggagccagcgagaactcagatggcgacatggtg

SEQ ID NO: 502771 - DNA, 211 bp, Homo sapiens
gaaaagtggaccccagaagtcaagcattttctgtcccaacgtgcccatcatcctggttggggaataagaaggatcttcggatgatgagcacacaaggcgggagctagccaagatgaagcaggagccggtgaaactgtaagaaggcagagatatggcaaacaggatttgcgcttttgggtacatgagtgttcagcaaagacaaagatggagt

SEQ ID NO: 502772 - DNA, 390 bp, Homo sapiens
gagatcattgcctaaataagtagtttataaaatagtatatctgggccgggcacagtggctcatacctgcaatcccagcactttggaaggccaaggcaggtggctcacctgaagtcaggagtttgagaccagcttaatcaacatggtgaaaccctgtctctactaaaaacacaacaattagccaggtgtggtagtgcacgcctgtagtcccagctaatcggaagggtgaggcatgagaattgcttgaatccggaaggcagaggttgcagtgagctgagatcgcgccactgcactccagcctgggtgacagagcaagactctctcaaaaaaaacccccaaaaaaaccaactatacatctgggcatggtggctcatgcctgtaatcacagcac

SEQ ID NO: 502773 - DNA, 850 bp, Homo sapiens
  misc_feature (15)..(15): n is a, c, g, or t
  misc_feature (89)..(89): n is a, c, g, or t
  misc_feature (132)..(132): n is a, c, g, or t
  misc_feature (152)..(152): n is a, c, g, or t
  misc_feature (190)..(190): n is a, c, g, or t
  misc_feature (213)..(213): n is a, c, g, or t
  misc_feature (219)..(219): n is a, c, g, or t
  misc_feature (244)..(244): n is a, c, g, or t
  misc_feature (259)..(259): n is a, c, g, or t
  misc_feature (281)..(281): n is a, c, g, or t
  misc_feature (292)..(292): n is a, c, g, or t
  misc_feature (300)..(300): n is a, c, g, or t
  misc_feature (332)..(332): n is a, c, g, or t
  misc_feature (349)..(349): n is a, c, g, or t
  misc_feature (358)..(358): n is a, c, g, or t
  misc_feature (364)..(364): n is a, c, g, or t
  misc_feature (376)..(376): n is a, c, g, or t
  misc_feature (383)..(383): n is a, c, g, or t
  misc_feature (394)..(394): n is a, c, g, or t
  misc_feature (406)..(406): n is a, c, g, or t
  misc_feature (427)..(427): n is a, c, g, or t
  misc_feature (445)..(445): n is a, c, g, or t
  misc_feature (456)..(456): n is a, c, g, or t
  misc_feature (465)..(465): n is a, c, g, or t
  misc_feature (476)..(476): n is a, c, g, or t
  misc_feature (481)..(482): n is a, c, g, or t
  misc_feature (484)..(484): n is a, c, g, or t
  misc_feature (486)..(486): n is a, c, g, or t
  misc_feature (490)..(491): n is a, c, g, or t
  misc_feature (504)..(504): n is a, c, g, or t
  misc_feature (518)..(518): n is a, c, g, or t
  misc_feature (521)..(522): n is a, c, g, or t
  misc_feature (535)..(535): n is a, c, g, or t
  misc_feature (551)..(551): n is a, c, g, or t
  misc_feature (553)..(553): n is a, c, g, or t
  misc_feature (557)..(557): n is a, c, g, or t
  misc_feature (577)..(577): n is a, c, g, or t
  misc_feature (607)..(608): n is a, c, g, or t
  misc_feature (678)..(678): n is a, c, g, or t
  misc_feature (682)..(682): n is a, c, g, or t
  misc_feature (697)..(697): n is a, c, g, or t
  misc_feature (728)..(728): n is a, c, g, or t
  misc_feature (730)..(730): n is a, c, g, or t
  misc_feature (746)..(746): n is a, c, g, or t
  misc_feature (749)..(749): n is a, c, g, or t
  misc_feature (767)..(767): n is a, c, g, or t
  misc_feature (775)..(775): n is a, c, g, or t
  misc_feature (789)..(789): n is a, c, g, or t
  misc_feature (846)..(846): n is a, c, g, or t
ttgaaatacaaatantctttggtttacttatcaaagtaaaaaataacaaaaatcttatcagttaaataaaaaagtgacattctttatcnagccttcttaaacactgaaacgcacgcatttttatgctcatgntctttagcagtatcttctcnccttttgcccctcattcccctaaattgtttcaatgagntcatctgtagaatgaagattgtnaccttncttaatgctacttactttttattancccaatatcaagacnaatctagagttttttgtctctnacatgggaaanggatgtgnaaaatggaaaattcaccagcactttttaaganaacataaaagaagcccnaagcaagcngttcanggccatgacacnccattanatttctgaganatttaagggtcnttggtacgtaaaaggagaacncaattccagaagcatatncggatactggncattattcntaatagcgaanatagnncntntccnnagtactgatttcngataagccattttnttnnctgagggttgacnacctcagacttgaatncngaangtcgatgcctcaatcttaanacagcagtcggctggagacatggaaagtgnnttgtggcgcaaggagcgctggtggcaggagtaggttcttggcattttaagaaaagtacatatacatagcnaganatgatagtaaatcanaatacatagctttgtacatgttagaaatatncnatgtgccaccaacacnacnactgccctattaaaaagncctcaggnctggagacatctgnatttttcctttgtataactacatttgcattacccaccacatatctctcccatggtcngtta

SEQ ID NO: 502774 - DNA, 126 bp, Homo sapiens
tggcgaggtctctacctggcagcctctctacctttaataagtccaaatccggctcagggatgggccacctcatcctccgggctcggcatctgggtcccactcctcagggctggtcaaatggagacc

SEQ ID NO: 502775 - DNA, 535 bp, Homo sapiens
  misc_feature (419)..(419): n is a, c, g, or t
  misc_feature (472)..(473): n is a, c, g, or t
  misc_feature (483)..(483): n is a, c, g, or t
  misc_feature (494)..(494): n is a, c, g, or t
  misc_feature (496)..(496): n is a, c, g, or t
  misc_feature (525)..(525): n is a, c, g, or t
  misc_feature (531)..(531): n is a, c, g, or t
agaagctgacagacggtgatgatgatgatgagactaaagaagcagaggatgaagactcagaaggcgaagaagggagtgaataaaacctgcacacacacaatggactttatctgccatgaacatttgtatgtgttgatccgacatgaacatgtacactttattttaaagagtgttcctttagtgagacttactgtcttctgcacactgttgaggttatattttcactgtctctacattaatacaagattctgtactgcacagagagaacggtctgagggaaacgtgatctgtgctattctaactgttcattataagttattgtaactcatttttggcaacgagtaaacaaacaacagtgatcccagagataccacttattctttattgcattttcatggggaaaaaacgtaaaacatganccatttttataccagtgtttattaggaagctgaatgctgctccaaattaagtnntcatgcaaancaataattagncnctataaaaataaagtgatctctgtgtatnagttcntata

SEQ ID NO: 502776 - DNA, 348 bp, Homo sapiens
gaacagagtctcggtacctgttgggtatcatcgatacaggaaggtcccagcgttggggagagccccaaagttgagaacagtagtgaacaattgttgtactgaagcaacttgttacgatacagctgatcatcaaacgacctgtgtgtaatatgtatttcccgacaaacgtagcacccttcagcaggaccctataaaactttcctccagcccttgcctctttgcaggtagccccttctctgctgagctgcccactgcaacatattttcacaatttctctaataaatctgcccttctttacctacaactatcttggtaaatggctttaccacctgcaaaactgaccctagg

SEQ ID NO: 502777 - DNA, 345 bp, Homo sapiens
acccggacccggcacacaagtggtggtgggcttacagcatactccggtcacagtatttgtcaaaggtatctcccaggcctccatgtacaggtgtgattgttcccctggcggcagagcgctggaactcccgctccagcgtggatacagtgccagcagctcccctttgtaggggggtcagtagcgtggcaaggttgcgtggcacagaggcggaagcgcctcagggtggcagaatgttcttgatatttgtccaatgttgggcaccccaggaagggaaaggcagctcaagaaccgaggaaatatcaggctgatggctggggcaggcccggagctggtagtgtttgcggg

SEQ ID NO: 502778 - DNA, 228 bp, Homo sapiens
ccaacatctcatagctccttccaacatctctccttccaacatctcatccctccttccaacatctcatccctccttccaacatctcatctcgccttccaacatctcatggctcctctcgggtttcagcacgagttggagccatgagatgttggaaggagcgatgagatgttggaaggggcatgagaagttggaaggaggcatgagatgttggaaggagagatgagatgt

SEQ ID NO: 502779 - DNA, 123 bp, Homo sapiens
gagacagattcaaactatatgcacttggtaactacagctgtaaaatgaaatctcgtctagtagcaatggatttattcttctcatgttaaacccaccaaagataaaggtggactaatataggta

SEQ ID NO: 502780 - DNA, 763 bp, Homo sapiens
acctcttaaacaagcatgcttacccaaatctgtcgcatgcttataatggtagcattagctatgcgcacttgacattatcaaatatccctttcctagtgtaccagtcttcacagagataagaggagctgggaatacgagtcagatgtaatgtgaccctataaaatctgtgaagcgaagcttcaggaaataaatcttttgatctttccctatcttgattatatcctaaagtcaaagcaatgcatacttcacctagagaagacagtattggcaatcatgacacctgtaataaaaacttgaatccaaagtcaaaacttaagcaagatacaaatgtgctgcctgcagttagtcctgcatgggaataaggactagttatttttttagtgctgcatttttttaaagttggattgctgctatttaaaacacaaacagggacccagttcaaaaaaaccccaagggcttaacagaacttggaaagttcccactaagtggtgtgtgaggaaatcctcatctggtctctaagcaatctgcacgatggatccatagatacagtacagtatttactggtcactcgcaaagaactcagtgaggtcaacagtcagggaacgttttccctaatgaagcctacagtctgtatggtcaacttaagaaaactctctatcatggcgtcgctaattccagggaggtccaggcccactatgattttgtcccaaatacatttgacccattgttaataccacctgcaattcatgctctacacaagtgc

SEQ ID NO: 502781 - DNA, 1211 bp, Homo sapiens
cggcttcttgtttgtccttgtgctcggcccccccccccctcccgcgcgtctgtttataccgtactacccccccgtggggtttgacgcactctccgtcgaactagtgggcggggctgccccgcgggtaggttgttctgtttcgcccggccgccccctcttgctgtgtgcgtactgtgccgcggtgttgttgcgtgcgccatctcccccgtctgttttcacatcacggggggtgggggtggtccctctcgttcgccgtctcttggttcagtcccggccccttgttttgttgtggcgcggccagcttcgcagcggtggggcgattgttgtgcgccccccccacagcatctttttgtctctcttgtgggtagtgtccgccccccccttccctcggacccacgcttctgtggtatttgatgggccaccccgtctgctgtgtcggaataaagatggtgggcgcccccccctctaaatacacggccgtgcgcgcccgccctctttctttctcgccacccccccgctgtgcctctccctctctttttgtgggtctctcctccccctcttctttggtgcgctccctcctggggccgccctctatatatgtgttttttgtgttctcgcccccccaccctctcgcgcgcgagggggcccccgctcccagtacccgccctctctgtcgcgcccctcctcgcagcgcgaggagaggcgctccgccacctattattctctgcgctggggttctctcctccctctgattaccaccgcccccagggcgctctctctcctccccgcctctctttttatatactaccgcgacaaaacacacccactcctctttatatatatatataacacaccacccctcccccccccctctctcttctttctcgtcgtgagacaccactcacatcatattacacgccacctctcttctccctagattatattcccccccgctctcttttttgctgccccccacacacctctctcttttgtgcacccctctcgtctttttttgtgtgagtagtgcgcgcgcccctgcctctcccccgcgcgctctttccctcgtgcgcgccccccctcctccccaccctctctctttataaatattctctctcccccccccccccccctctcttttattatatagagagaaatatatctctccccccccccccctcccttctccccctctctctcccccccccccccca

SEQ ID NO: 502782 - DNA, 323 bp, Homo sapiens
  misc_feature (32)..(32): n is a, c, g, or t
cccatctctccacactggactccattgatggngaagacgatgtcgggcaggctgctgatgtttgttcagctgaccaccatgtcgccatctgagctcgcgctggctccgatgtcgctctggatgttggcaatggggctggttgggccggacagcagagaggtgccggtgtcaacaatggcctggcagccctcagcacaggcgatggtctctccgttcatggtgatgctgtccacggtgatctgccagtaaccctcgacggtaacaggcacccagttcagacttccagtgtagtaagaagagtcaatgccaccaaagatcaccac

SEQ ID NO: 502783 - DNA, 972 bp, Homo sapiens
gggcttgcccttggcctttgctggctgtgtggcggctccgcggttcggaggtcgtcgctgagcgtcttctgcttagccgcggtcatgagccggcacagccggtgagaggcaggttctgagcctgtaccgagatcttgctgcgcgccgggcgtgggaagccgggcgccgaggcggcgagtgcgggcaagagttccggcagcatgggggcctgcccgggtccgacgtgctgcgcttcgagtacctgtaccggccgcggggcgggggccccggttgggttggtaccgctccggggccacggcccacccggtggtggggcgcctttgttacgcccccggggggccccggaccgggaagctgggcggcgttgtggtttccccaaggcctgacagaggggagcaacggtacaaagggaaccccccaagaaaggcacgggggcctcggggaagaccccgccccagaaggggacgggggacgggcgcgaaagaagccgaaattcgctcacgaggagctgtgggtgggaaccagggagggctccggcttgcttggcattgggggggcattgggaggaaaccccggcctagagggggggagggcgtacagacgacatacgtgtggagggaattgggggatggcaagaagaactcctcctggcgacgcaggggggcagaaagagcccgtgaatggacggaaggaaggccgctctcccgtgctgggaggaggtgcggtgtcctccccatggggttgggggcggctgggaccgtgggggttggacagttgtagcaagagctttggccagtagggacagagacgccgtggagggagacctgaacctttttgcggggagtccatttggtcggaggtcccttggttatctgaagagggtttggacgtgggaggcgtgaggaggcgagctctgagacctggacaggaggggtccttccacccagtggggtgcctcggtgaaaacagtgg

SEQ ID NO: 502784 - DNA, 130 bp, Homo sapiens
atgtacacccaggcagcaggaagggctcaggccagaggtagaagagagcctgggtctgatgatcatgaaattaagcccaaggacctaccgggtactggccacaggtcctgtagaggaacgtggtgccgag

SEQ ID NO: 502785 - DNA, 231 bp, Homo sapiens
ccttcacagaaagcagatcggcgggcgatgcgccgggctcacgcgcaagatgaggtggacgtggactggcatatgtccgcctgcgaccatgttctgatagatgcgctgggcatcccgcctgaaccacagcctggcgatgggcacacctttttcagtgagatcggcctcgatcatgcgtccttttgggcggttgacatactcgtgttgcgggtaattgctttacacctcccg

SEQ ID NO: 502786 - DNA, 174 bp, Homo sapiens
ctccggtttatctagaggatcccgacctgcagtgtcgctggcccctctggctttcatcaatgttgaggaagcccaccacattgagtagaggtcaaaggtgagcaggggctcaggaagctccccgagaagaactaccaggtgctatcgtttcctgactgctttcctggtgcagat

SEQ ID NO: 502787 - DNA, 430 bp, Homo sapiens
atttctcagctttacatatgtctaaaattgattagacatatgtagacatatgcaatcagttaatcacaatattaacatctccttaataaacttgagtgtattctggcaacccattcattatttatttttcctctcgtaactttctccaacttcaaactaccattatgttggaacttctgattttaaggtaatttactcttaacttaggcttgggggtttttttggcctgatttccattgtaattttaagaatatatcatgtggcttgatttgattttttaaaattatctcctcttgaaatctgagcattaatattggtaacttgtgaataataataagacacagatcacataatctttgaaaccagattgttgattactgattaggctggatcattaagggctgattaagctgacacttaacagtattta

SEQ ID NO: 502788 - DNA, 891 bp, Homo sapiens
ggaagtgacatcgtctttaataccctgcggtggcattccctgacgcaccgacgttgatgcccaggaagacagggtcgacctggaagtccaactacttccttaagatcatccaactattggatgattatccgaagatgtttcattgtggcgagcacgagcaatagtggtgctccatgcagatgcaggcagatccgcatgtcccttcggcgggaaggctgtggtgctgatgggcaagaagcaccatgatgtcgcaaggccatccgagggcacctggtgaaacaagcccagcttctggagaatactgctgcctcatatccgggggcaactgtgggctttcgtgttgcatccaaggaggacctcactgaagatacagggtacatgtttgctggccaataaggtgccagctgctgtccgtgctggtgccattgcccctagatgtgaagtcagtgtgacagctccagaacactggtctcgggcccgagaagacctcgcttattccacggctttaggtatcaccacctaaaatctccacgggcaccaattgaaatcctgaggtgatgtgcagctgatcaagactggagacaacatgtgggagccagcgaagcaccgctgttgaacatgctcacacattctccccccttctcctttggtcctggtcatccgggcagagtgtacgacctagtggcaggcattctaccaaccctgaagttgctttgctatcacccgcaggaaactctgccatgctcgcttccctgaagggtgtccggcgctgttggccagtgtctgtctggcgattgctacgcacctggttgcatcggtcccccttctaccagttcacggtccagcgatccgggcctgttggtgacggttcacctccctcttgcggcccgc

SEQ ID NO: 502789 - DNA, 442 bp, Homo sapiens
ggagaacccatttgggggcgggtgccacttttctcgcgcgtgtggagggagttggccttgaacaagttggttcttttgacgtgcttggcacggggtttcagcccaagggaggtgttggttcgttggttccgggggtcacagaatttgccccccaaaaagtactttatttgggctttcgggcaggggcccagccggggcccccccccttttgttttgccaggctttttgggggtggcacccggggattggaaaaagggggccccttttttttgcttggtgggccccggggccctgccgttggcttttacccagaagaccttggcccgtttggggggttaacccccccatgtcattgtgtttgtttttttggggggggtggggggcccttgtttttgagcggccggcttgtccccccccttgatttaattccttgtttccccca

SEQ ID NO: 502790 - DNA, 727 bp, Homo sapiens
ggctcggctcttgtcccggtgcgaggtgttaactgcgaggccccgtgcctcgtgtccccgtgactagtgccgtgaccccgggtgccatgaagcagtgagggctcgtgtgcggtgcctgtggctgctggacaaaggctgaaacctgcctgccctggctggaggagaacaatgaacccccacctgcctgcctggcccccaggatgtggagatgaaagaggaggcagctgacgtgtgtggcgggtcgacgtggggagggcatgacggcaagacggcgtgcgtgcagcggctgagcactcccagcgagagctggacacagtcaccttggaggacatcaagggatgcacgtgaaacagctagagaaagcggtttcaggcaaggagccgagattcgtgctgcgggccctgcgggattgctgccttccacatcacgccgcctcaaccactattgttctgtataaggctgtgcaggggcttcttcacttcaaaataattgcccactcgatgactttttgctccccttccttggaagaagcccatgtacacagagggttgatttaccagttccgtccccgcacgggaaaaagctgcggtacgacacccctccttgcttgatgttggaagctattaccaatcctcgtggtcatcttcattgattaacagcagcgctacaagtatgccagaagattcttatgatctgattgcgcagatcagtactcgaacgcgggcct

SEQ ID NO: 502791 - DNA, 219 bp, Homo sapiens
  misc_feature (14)..(14): n is a, c, g, or t
  misc_feature (18)..(18): n is a, c, g, or t
  misc_feature (33)..(33): n is a, c, g, or t
  misc_feature (35)..(36): n is a, c, g, or t
  misc_feature (41)..(42): n is a, c, g, or t
  misc_feature (44)..(44): n is a, c, g, or t
  misc_feature (73)..(73): n is a, c, g, or t
  misc_feature (92)..(93): n is a, c, g, or t
  misc_feature (95)..(95): n is a, c, g, or t
  misc_feature (104)..(104): n is a, c, g, or t
  misc_feature (110)..(110): n is a, c, g, or t
  misc_feature (116)..(117): n is a, c, g, or t
  misc_feature (130)..(130): n is a, c, g, or t
  misc_feature (144)..(144): n is a, c, g, or t
  misc_feature (167)..(167): n is a, c, g, or t
  misc_feature (177)..(177): n is a, c, g, or t
  misc_feature (179)..(180): n is a, c, g, or t
  misc_feature (199)..(200): n is a, c, g, or t
  misc_feature (204)..(204): n is a, c, g, or t
  misc_feature (218)..(218): n is a, c, g, or t
gtttgttgaaagcntttncgacatttgtataanannctttnntnataaatatatccaggtgctcaccaaaganacatgtattaacaacttanntnagatttttntaactnatagtnntcactcatttatnatcagtaggagagnctgtctagatgttggggcagctntatgatttangnntgtaacatgttataactgnntttngtaccctagttttnt

SEQ ID NO: 502792 - DNA, 239 bp, Homo sapiens
acgccaagggtgcctatgctgtcataaatgatgttgacctgcacgccggcacgctgcttttccatcagcagatcggcgaatttcaggcccacttcgtcctcgtcgaaaatgtaggtctcgaaattgacatggtcttttgcattggcgatggcggccatcatggccttgatggtggccgggccatcgaagagcagcgtggtcttgttgccggcaatgagtggactgccggtggcggcttc

SEQ ID NO: 502793 - DNA, 106 bp, Homo sapiens
gtgtcagcaatacagttggtcacgttcccgtaccagaaggtgtatgaaggacttctaagaactcaaagaatagtagccggtatggaactcttaccattttctccaa

SEQ ID NO: 502794 - DNA, 1493 bp, Homo sapiens
  misc_feature (1093)..(1093): n is a, c, g, or t
  misc_feature (1493)..(1493): n is a, c, g, or t
atgccgacatgaaagaaggccatgggaaagaacgtggtgtccggccccatgctgtcgattgaatggaacgcaggaggctaagaaagtggtgaatcccctgctctgagaacaaggcctaagaattgttggtcatatgagactaggacagttccagcccataatagagagctcgacccggctttgtcgaaatgtgccccgcatatatctaggttgcaacggcgagagagccatccttctataagatggttgaaagtggcgcttctctgcgagttgacatcgcatgttccactcgcatggactccttggaacgcagacatagggcaggtatcttcaagcttgacttagaggcttggcgcctccagagtagcagtgaccatgagtgactagaatggcaatggatgacaagaacgcaagaagacgttggttgtgagccccgtggtgccctgacggaaggccatatggcattgcgtgagtaagatcaccgtgtggaacgttctcgcgaaaccgataggaagactcgatccgtgtcgctgtccgatgggcagggagttaatcgactcagatctatcctatctcatttggggtggtgacggacatcataagataagagcgtcagacctagggtaggctgaattggctgcgacgatccgctaggattccctaatcgagagcttggttggtctttcttttgcgctttgcacccgtgctgttcggtaaaaagtgtgggggatccgttatactggctacttagtcaagagggcacacaggccaagcgacttaggcgacgttctagtctcgcacagcgacagcagctgatacactacttgttcgacctttcacgacgaggtgaaaccctcgggaaggacaaggggctgcttgtggcgtaagcctgggtgggaagcgtatccaggacccagattaccaaatggccagattgcgcatggagaatcccggccggtcaacctggggggtgtgccacacggtcccctgagggttccctaaagcttccagggtggctttcggaacatctggaccaaggtcttgaaaaaggggaactgcgctataatggaacttgtgacacttggatcctggngtttaaattgttccgcctggtggtagcgcttctcagatcgaccaagaagatcccgagatagtatcaacaattgtcctgtcacaaaaaaagacacaggagggcggcactaaaaaaataacccccacagcggggccaggaattaagcgcacacagtctttgtgcaaaagtgcgcagcaagaggggacgcaaaacaacacgcggacgcgaaaatcacgacaggaacacgactcgacgcgaggacggcccatctgttgggtgctacgcgacacacgcaacgaccagacgaatccaagatgaccagccggaagcagccaaaacacaagacatcgagaagcaagcaacgacagcaggatacactacgagcggagaagacgagaaaagagagagaaagggggggacn

SEQ ID NO: 502795 - DNA, 746 bp, Homo sapiens
tcgacgcaacttaggctatgtacgaggctgggtttttggctagggctgcggaaacgcggccggtccgattccgcggccaggcagagggactctgcaagcaatggctgcagcgcgcctggtgcaagagcggcgccgtgctgctgcgggagccgcgctacacgctgctggtggccgcctgcctctgcctggctggagtgtggtgcatcacctttcatagggtcattcacatgggttgtgcatacacatgagattgacttggaatgtgcctacattgagcctgacggtaagaatgtgctgtcagtcaattgagtaccataatgacttattacccatacttgctatgggctgtactacctggaccactttgtgtacccagctttggatttcgtagtatcattcatattactcgcgcgcgctttgtaccttacttgccatacctatgtccctgatcggctatctttgcacactccctgcattgtgccccctatcgacatccactcacttctcgccatatggtaccattctataccccttagtgtctttaacctcttatgccctttgcttcttgctctctttcattttcgattccttattctatctctatggaacccattgccacaaggcgcttaccccctcccaccttctctggttccttatctctctcccttttcgattcgtttgccttttgcctggcccttcctattaccccagcttgttccctacgttcccaaattcctttttggttg

SEQ ID NO: 502796 - DNA, 524 bp, Homo sapiens
ggagcaaatctccagaaaaaaggacaactgtgagttatttatcagccaacacacacagcaactggaagatgagtctacaactggaaaggggaatagaaaactctatgctgcagcagaacaaggtaaagaatgaaggaacactctcaaaacacacccccatccaaaggcaactaccatcacccttaggtgattatccttccagacatgtctgttacctctcaaccaatgcacatatgaatatttctgctaatgtgattttcacatattaattattataaagacactatcatttctgatggtgccataggatttcactatgatttggttaacaaatttatttaatgaatgggcgttctaattactattgctgcataacaagtcaccctaaacttagtggcataaaacaacaaccattttataaatgctcaccaacaccgagggtcacaaattcaggcagggcccatgggatggctcttctgcttagtgatgtcttggccatcggctggtactgggaggtgtaaatg

SEQ ID NO: 502797 - DNA, 368 bp, Homo sapiens
  misc_feature (74)..(74): n is a, c, g, or t
atagcgacaccgtacttgccgctcagttggtcagccagtacagggtttttgcgcttcagtgcctcaatgctcancgcctcccatggctgaacagcccattcgcggccttcgagaataccttcagtactggatgcccagttgcctcgacccaatgagggaaagacgcagttctctaccaccgtcgatttcgggtgatagttgttgttcgcaaactggggttctagcttgtcgccttggacattccacaaagtgaatagactttgattacgcaggtattgctgaaacgcacctagcacaaactcccgtactgcccagtcgtagttccctacttcaccgatggcttttagtagctgtgcgtggacaagcaa

SEQ ID NO: 502798 - DNA, 872 bp, Homo sapiens
atgaacgcctgcagtagcagatcacgtcagtgaaaatctcataaaacacgttcaaggatggtctgcagatcatgcagagaagcgaggtgcatcatgattacgcagaagcaagcgcaattacaatcggtgattgattatactactatgttccggaaatttgtacctgtaattaaacagatgtttaagcatctattcacgtcctgaggttatgtgaaacttcgaagcgcactgtttgcggagagcaaattggatcactattcttagagacaaggaaatttaaggaacttggaaaaatggctttaggaaacatgcatgtaaattccctttcaattgggtgtcggaagggacttgtggatattaactttgtcagcaattgggtttctagagacgtaaacaggggcacacctggtaaagattacttggttatggttcccataagtacttgtcaaaccattttttagatgacttgggcattttggcatatgtcaggcaacctttatggggtatccggttagatggctggggagtcaacacgtgggggatatatcggcggcaaaaggggagaacgagtggatcttcgctgtaagaaggttcacaattgctacgggagggaacaacggataatcagaatgtaatgtgtactttttggtggatataaatctcgcctcttggcatagattggttacgaatttatctgtgggatgagcaattggtgattcgcttttcctagagtttcggtcaaaaactgatcggttcttatggtcactccaggatggacacgctcgaatgggggaaaaggcccaattggtgtgttaaaccagatgcctgtaagaaaatcccaagacattttaatcgaattggcttgaagtgtg

SEQ ID NO: 502799 - DNA, 267 bp, Homo sapiens
gcggccgctggccaggctgtcactcaggttccggttcaaggtcaggacattcagcagaacctcctgccaaaataggtgcctggcatatatatcatgttctcaagacattcatggagccattctgaggtgttctggagaaaagcccgcccttgctttcaaaaaccaccgtaaacagggctgtgtgtgtattcaaatgctcagtctggccgctgagggcccggccagctccattggcccccagagcgaggtaagttccacagagcccct

SEQ ID NO: 502800 - DNA, 434 bp, Homo sapiens
  misc_feature (399)..(399): n is a, c, g, or t
agcaacccagcgctcaatggtgctagtgaacacagttgtgtcagaaacaacctcaaacagacaccatggtgcacctgactcctgaggagaagtctgccgttactgccctgtgggcaagggtgaacgtggatgaagttggtggtgaggccctgggcaggctgctggctggtctacccttggacccagaggttctttgagtcctttggggatctgtccactcctgatgctgttatgggcaaccctaaggtgaaggctcattggcaagaaagttctcggtgcctttaagtgatggcctggctcacctggacaacctcaagggcacctttgccacactgaggtgagctgcactgtgacaagctgcacgtggatcctgagaacttcaggctcctgggcaacgtnctggtctgtgtgcttgggccaatcactttggcaaa

SEQ ID NO: 502801 - DNA, 572 bp, Homo sapiens
tggtcggtacccacaggcaggttgtactgtgtatttgtggaggactgagaaattccacagtcatcatgcacacttaccttccctcctgaaatctccactcaccaggattaagcatgctgcattcacaggcacctgcctctcgagggtgcccaggctccacatgcgcatgcacagaaccctggcgagcccatgagtgcacgccctctggctgcagagcagaggatgaggcacagagagggagacccagagcagaggatgaggcacagagaaggagacccagagcagaggatgaggcacagagagggagacccaggacggggggtggggtgtggctagcatggcctcacccctagtctccacaaaccacagtctgctgtgccacggccagagtgcactcatacgatcacctggcgtctgctcccgccacagcacctcatcagggtccccatgtcatctccccacaaggaggggagcacatcagcacgtggctgggggaagagtggggtcacctgatccagtgtgtctgactgtgcctgtgagggacgctgaggctgaggtggcacggggtaggg

SEQ ID NO: 502802 - DNA, 805 bp, Homo sapiens
  misc_feature (184)..(184): n is a, c, g, or t
  misc_feature (246)..(246): n is a, c, g, or t
  misc_feature (254)..(254): n is a, c, g, or t
  misc_feature (275)..(275): n is a, c, g, or t
  misc_feature (327)..(328): n is a, c, g, or t
caccatctaaagtgaatgttcatgttttaggagtccttctaggtcagaaagaaggaacaagaagtattaaagaaaaatgagctcctccaccttggaggaaggtgtgtatggtcgtgcattaaaactgatgtctacatctaatacatggtgtgacttggaattaattattatcgccaagcacaanatctagcagaaacaggcagaacatgaatgatcttaaggagttgctggagaaatctttacatngtctgaanaaagcagtgagactcgacagnaataatcacttatactggaatgctcttggtgtggttgcatgttacagtggtnntggaaattatgcccttgctcagcactgtttcatcaaatcaatccagtcagaacaaattaatgctgttgcatggaccaacttgggagtgttatacctcaccaaatgaaaacattgagccgaagctcatgaggctttcaaaatggctcaatcccttgatccatcttatttccactgtgctggattggcacaagctcttatttgctgaggcagtcggcaaggttatgacgccctggagtctcttccaggcaacacgtacatggaacttacatatgcattactggagtgggcgttaaggttatgcgtagtagggtcttgcccacatttgcacgattaacaagcagcgagaatcagaaggtggtcccgttcaagtcttcccaatgaaatgcttttcccgccagccccaggttctttggggactcttcggcgccaccattccgatttttccgccgtttccagggggggtctcccacaccttca

SEQ ID NO: 502803 - DNA, 216 bp, Homo sapiens
tccctccttcatcccccctcggacgggcaggtgacgtggagaaggggcaggtgggacaacttaaggagtccaggcaagacgcttaacctcctacacactatggacaggttgacgacacactactgtgtgcaaacgtgcctactcggactgacctttataacaagattctttacgacaccccagacctgtggaggggtcccgaggctcgaccttcgt

SEQ ID NO: 502804 - DNA, 290 bp, Homo sapiens
acaacgtatgcatgtacgttgaagatatcaagtgaggcatagcacatcaggtacataagccaggggggagccatactcaattctcgcctgtagaccagatctttggttacctgctcactcgtcatccaagcccttacccacatcattatcaatgatggtgtcactgcaaatgtttctttgctggttcacttctctcctatcataaaacaaagaactgacgccagccaactaaccaaccaaccaaaccaaccaaccaatcaaccaaccaactcactacccgcctcttctct

SEQ ID NO: 502805 - DNA, 1070 bp, Homo sapiens
tgttggcggtgtctaggtggcacgaggctcaggaaacggcgagatagctcaataccctcgtgtatcttacacaccaatcttgactgggtgggcactaggcttgatgatgactgtgccggcggtcgtggaatgatgacaatggaagtccagtcagtctgagctctagccacagttgtatcccagtgtgcatcagtgaccgttaaaccgcattttctggcacaagtctcataccacacataggccaaccaaaaccatacagcacgctatgcgctcgcgacagccggcacagggcccacgcagcgcacagcatgccggacacactgcaaaggctcaagcaaaaccacgtgatgtcaagcacccacatcaagccaccgtccggcacgacagctccggcacagcaggcaggcacagacaggcaagaaagcccgcaaaccggccaaagagcccaaccgcaagaactagcatctcaccgcaagtccatccagaccctggagggccggaccatatgcaccactacaaagcaactgaacacgaacaaaagccaacagcgcaaggagaaccagcacgacaccgcctgcgcaacgcaccatgggcacacttccaatagccaacaacccctgcccacctgggcgacagcaccgggggaccaaccaatacctacaacctgagggaacacgatctaccccagagacaacggtcaagaccacgacagcccctcaaggcacaaactacctaacggtcagggactcctcaagcaacaaccttggagcgcaggacaggcgccacgccgtaccacacgagcctcatcgggacagacctggctgacacaacgccccatggaggcaaatgcgaagggcttacaagcagaggaacccaagggcccggcaccaaggcttcccagaacgaaggtgacaccacccgtacacaagcacattcccaagagagaatgaagacaacagacaacgacggcaagagaggcacacaaaccccatacacgtacaacaacccagagccaccaaggcaccaaacggcgcgacaacacagacactcatacataagagtgacgatct

SEQ ID NO: 502806 - DNA, 899 bp, Homo sapiens
gcttccttgtgcgggatgaccatggtggttgggacccggtaacacgtatcctgaataactggagggtctctcgaaggctctcgatcgcatgcctcagttcatagcgtgggactgaggctctcgcgtgcttctccagtagctaccacacaacttcccattaaggtgcaacaccatatgcgtgatcccgtgaaattatttcacgacagaatttgtccctggctcggaatagtgttccctcaggcaattggtgaagggtgctcgaatgaatgcgaatttcttgggagatgttaggacgtacgtggaatttggccgagttgttggccctaacttaattggattggatggccaattgggaggggaaaggcattgagcgcggaagttagaaggtaaactttcgcgaaggaaaagggccaagggaagggcgcccaagaggtagagggtctgccaaaggagagggtctggagggccataatgggttgggaatttttcccggaataaattgtggaattccttaaacgaggggtataggggggagggagagctgccgcggtagagaaattgggaaggcgtttgtgtgtcaggcgaaaatggggttatgggggggccgaccagccccttgtggggtacacaatgggcacgagctttacactgggcaagcattacaccaagggcgtgaagagagatccaacgacgccgtggggtgcccatcacaaaaagacgttgtgcgttgtgaaagacgttgtacactgtggggggcgcctcttcaaacgaggggggcggcaggtttgaaacacgcaccaagagagaagaaatcaccgcggggggcccccatggtgtggaacaacaaagaggggggctcggtgaagattaaacgggcccactcacgcggggaagacgca

SEQ ID NO: 502807 - DNA, 825 bp, Homo sapiens
tacccctccttactttatgcccccaaaaaccaatttaaaccccccccccttttaacgtggggggcagtgacaaaacacaaaaacccacaaacccccgcctgtgtgaagcccaccacgttcctgtgccccccgccattttacctccgccctgtgattgggattttggttttccatctcttgctcccgtgtaggcatgtgggctgagacgtctagagtgtgtggacccctcctgtggggggcactgggccattgacccccctttgtgacaaatgtctctaagaggtggagattgtgagaagaagcgcgccccacttgtctcacgcgccgtgggcattctgtgggagccagtgtctgcgtttggtctcccccacaagaatctcctgtgaggagtgctgagacgggtgtggggttggcgagcagggggttctctcctctcagggtggtgctctagggatggtgttgtcctcctggagtttgcgcccacacatagagacgttgggtgcgcctcccagtggcgctgtgcgcacttagaagtcgctttcgcgcgcagagactgttgtggagactagtggtgtgctatcatcgccgtgtgttgttttgtactacccggatatagtggttctccacactccgtgcgtcctgtgagtcccactgtggtctgcgccccgcctctttcctcgcacacacttttgtcatagaaaaccccttcctcccatctttccccctccgggtgacacacttctttgtgccccgtccccttttagaggcaactccgttgctcatttggtccaccaaggggagtgggccccaacagccctcttgacg

SEQ ID NO: 502808 - DNA, 494 bp, Homo sapiens
  misc_feature (7)..(7): n is a, c, g, or t
  misc_feature (76)..(76): n is a, c, g, or t
  misc_feature (104)..(104): n is a, c, g, or t
  misc_feature (109)..(109): n is a, c, g, or t
  misc_feature (130)..(130): n is a, c, g, or t
  misc_feature (134)..(134): n is a, c, g, or t
  misc_feature (148)..(148): n is a, c, g, or t
  misc_feature (170)..(170): n is a, c, g, or t
  misc_feature (185)..(185): n is a, c, g, or t
  misc_feature (212)..(212): n is a, c, g, or t
  misc_feature (263)..(263): n is a, c, g, or t
  misc_feature (334)..(334): n is a, c, g, or t
gcagggnaacgccggcccgggttcgaattacggctggcgagaaagccgacagagggggaacgatcccttcccaccnttcaattcaattggcccaccattggtantgganctacgagtacacgattacggnggantatcttaaactccntacatattcccccattattccntagaaccaggcgacntgcgactccttgacgttgacaatcgantagtactcccgattgaagcccccttcgtataataattactcacaagacgtnttgcactcatgagctgtccccacattaggcttaaaaacagatgcaattcccggacgtctaaaccaaaccanttcaccgctacacgaccgggggtatactacggtcaatgctctgaaatctgtggagcaaaccacagtttcatgcccatcgtcctagaattaattcccctaaaaatctttgaaatagggcccgtatttaccctatagcaccccctctaccccctctagagcc

SEQ ID NO: 502809 - DNA, 969 bp, Homo sapiens
  misc_feature (965)..(965): n is a, c, g, or t
ggataggcgtgggtttatgcatcgcaagagtcctggcaccctgactgcggacttggagaagaaatcgccgaggaggaacgggagtaagggggttagcagcttgtgcgctgctgggtgccggtcaccccctgttctccgcgacttcacttcccatgaggcctcgctcgcgactggaagtgctgcgagcctattagaaggcgaggcgggacccgcctgtctgctctgggcgcggattgccggtcggctgtatggcattcatgggcagtgtcttctgcactctcctaggggaatcctcgggatgctggcaggctccggctgcctggtagtcgagaggcgggttccggagatcccggcctcacttcgtcccactgtggttaggggtgagtcctgctaatgttaagtgctttgctcgaggtgcccattttcgcatggaaattggacgtccgggccagttctctgagccgtatcattacggggctaacgggagtgcgtgatcagcgatggtgtctggacggttcctagctttgttctgtctgctgctggggtccctgggctctttgtgctttctcttcactatctactgggtgccgtaccgtgggcgtggtggctttgcctggaattggttgcatctgcttgttctatggttgccagggcttttggcttgtgggctgggtcagtcccatggactgtgcgttcatggttggaaccgatctgctgccgatctgggtcggggcccgaatgtgcggtaagggctttgatgacatgctgcatgacttcgcacgggggggcgcctgcccagtctcacatctgagaggccgttcccttctgctgctgcgttcctggttctcgcctcgcgtccgcgggccaccccgggacgggcccgcaactccttgccccctttccgctgctaaaataccctcaccgccgttgtttcttctctctcgtctgtcctttcttctcccggnagtc

SEQ ID NO: 502810 - DNA, 1352 bp, Homo sapiens
ggggagtacctccttgctctcgcccctactctttctggtgttagatcgagctaccctctaaaagcagtttagagtggtaaaaaaaaaaacaaaaccaccaccaaaaggctcgaagccacaaaggggatgaaatttctttctgggacatcctccggggttctcccggtaaattagatcggtatggcgtcctctaagaagtcctatcgggagcaagctttatatgtcctaaaggaggcagcaaatatcaaagcaagacggggagaacaatcgtgagcatggatataacaagggaagtatgcggggctatggagaataggagcgagattgtgcagtatgcaacctatatgacaatagggaatacaacctttataataagcagaagacagggagaacatcagtggagatatattacaatataaggcgctgtgagacacgtggaacgggaaaacgacagatagtgagacacaaaatagcaaacgtggatcaatgggcagtatgagccaagcgagtatcacccaaaacccacattgtcagggacagggaacacaccgaccccatgggcacaacgacacaagccaccacagggacaacaacacggaacatactaagcacacaccaccagagcaactcacatgcgaacacacacgaccgacaaccagagcggtccgaaccaacgactgacaacgcgacaaaccacctcactccggggcacacacaccaagaagctcacaaagccaagctcgtagaccagcgagaaagccagccagacactctcggcgccaaagaaaggacggcagaccaagaacgcacacacacgacgagaccacatcccagcgcaccaacaccgaccccaagcgaggcgccacacacaacacgcacacagacgaaagacgccaaccaataccaaacgcgacacaaggcggcacgcaagcgccaaccactaacgtacgcgacaacgcgcaccccaacacccagaaatccaaaacagcgagacccacccacattagcaacaggacgcgggcacaccccaacgacaacaacagacgcgcggcagcccaacaataacacacggcctgcctgtgcagtccggtcagaaccagcaactcgagcaagacagcacaacaacgccaacgcaacaatgaacgacagcgcagaaggagtgcagcacacaccaacacacagataaagggaaacgcagccccactgacaagggacgcagctacactgagacaagcaacaccacagccgaggacaaccgcgcgacgataagatcacaaccaacgtcaccaccgcaccccacaatcacatgcacgaagtcggcctcagacaaaactacacctgaagaacacgaa

SEQ ID NO: 502811 - DNA, 191 bp, Homo sapiens
tgatattccgggatctgatagaaagcactacccacgacccctacccctaccactagcactatcactactcactgagtagaacaactacccacgaccccaacccctaccactagcacgatcactacacaccgatagaacaactcactgatagaaacactacccactacccctacccctaccactagcactat

SEQ ID NO: 502812 - DNA, 551 bp, Homo sapiens
acagctgtacccccaaaaatatttaataagcttacacagaaaatattattgcctgaagtttatgatctttaagttatcaggtcaagaagagtttattgttgttgttgttgttgttgttgttgttttaaagcacacagtgaagaccgtctatgaagcgaggccactgttcctcctggtgggacgatcgatcctgtctcagagacctgtccttcagctcctttaaaaaacagaaccagcacagcgtccacaccgacagcagttactaggggcatagtcctccggtcgcagagggtggagttgaggcagagctcagtggtgtccacagaaagcattagtcttaggtactgtgttaaaacaatcaagaattcattcatgtttaagaggttaataaccataatattaaaggattaattataaacacctggcaaaaaaccacatcatcccttttcaaaaataaaatgttcatattcctctgagcaaacatcacaagagcagtggccatctgcctcaggcctgccttgtctgtaaacagctgtaaaggaaagctagca

SEQ ID NO: 502813 - DNA, 333 bp, Homo sapiens
agacaaatgtgcatgcgccgtcaccaccgcacggatgtgacccacgactgtaccatgagcgccaagtgcagctacctgtgtcactatatggaccacatgtaccgatgccagagcaagcctgtgttcactggcaatggcatcatctgccatgaggacacagacctggatggcttgcccaatgagaacctggtgtgcgtggacaatgagacttacacactgtgcggattattgtgccaacctttccaacttaaggccggaagacactgacaaggatggaattggggatgcctgtgatgatgaccactactgctatgtgtcacagagtgtggtggg

SEQ ID NO: 502814 - DNA, 238 bp, Homo sapiens
gacataacagcatggaaaatgaggcatgcgcaagaaatttacatactagaacacagagcatcaggtgtatgagaaagggtgtgtgagaagtctgaaaactacagaggaaagcagggtcttaagcggctggggactttagactgtaggcagggaagttaaatgggtagttatgagtgttagatctcttttctagtaatgtggaagatactttggggtagtctggagagtgagactagtc

SEQ ID NO: 502815 - DNA, 884 bp, Homo sapiens
aatgtcggtgctggtgcggtgctttagttgaaggttactggcccgtcgtgcgaccagtcacagggaatgctccgggacgccagcgcacgcggagcggggaccccggagagccagcaggcgagaagaccggccgagggagagccgatcgcgcctcgagagatccgaggaagtggtcgcgggccgggaggctacccgtagccgagccagaggccaggggtactaggggtcagcagcccaggtcgtagcctagcagctagccgtcagctacgaggagcagcagctagtgcccgggatacccggaaggcggcaggggagacaggaggagctagcagcttgggactgtaggcagctaggagggagagggccgggctacccctaggcgggagcacgcgcagggacgactaggctgaccggcgggcccatggcgagtactatgacggagttcgctacgggcgcagggggagcagccgaggggcgcgcccctcccgggaagggggccaccggagcgcaggccagcagacacaagattctagcgactactaccagcccagcgagaggcagaaagcgggaataaccatggaaccctgtgaccaaagtgagagccccaaaatcaagtggtggattggactacgagggtagaatgactgcctgcgaacaatattgtcccatcagagtattggaaccgagagaacgcatcagcggcgaagcctgcatcatgccgatttcccatcaggacctgagggagcagggtgatccacggattgggacacaggacgcatgagtggcagctgggcccttctctggcctggctatgggcttaattaatcctagcactggccggagtggggttttcccttccaataactgtcccgggaagccgtaag

SEQ ID NO: 502816 - DNA, 269 bp, Homo sapiens
gtttaaaaagtatactcgtgtattctttaacagctaaacagaaaatccaaatgaggcaaagtcttcagtcccgaccttaacattgtatagagagggataaaggtcgatggcataatcgcatgaagaaatcctcctgtcttctgaaaatgaccagttgagttgactgtgctcgcattgcataatgacgtcttaagacgctttgaacaatacagctatttctcactgcgacttagtattattctccattcccactcatcgcaatgccaaca

SEQ ID NO: 502817 - DNA, 359 bp, Homo sapiens
gtcacagccaagagacaacaggagcagtgtctaggaatacatgttcgtgcatggcatggtggggagcctacagagacaaagaccccaaaatgatttctcccagcagcatcccccaggccaacttgcagtcccagtttagggacctttgaggtccccaggtgggcacgtccagtccgattcaccactgagtccctggttcctagagcctgcctgcacaccagaaggtgttcaatgaggtggttcagctaaagcataagtgagcaaatcccatacagataagcacgtgaggaatggaaagataaccaacataagaatcctcagtaaaatatttagttgacctaaaacagcatgcagacaaa

SEQ ID NO: 502818 - DNA, 661 bp, Homo sapiens
cttatggcgctgtgcttaagagtaaaacttcagcgatgtttaccatttaaacataagttggaaatctacatttctgaaggaacccattcaacagaagaagacatcaataagcagataatatgacaaagagcgagtggcagctgcaaatggaaaacccccaatttacgggaacatttgtggaccaagttgtgtcctttgaaccctgattgatagctgttttaagagccactggcctgtaaatctgtttggactatatttgtcataaactcttgtgtactacatgtcacgacgactcatgtttaactacataggtgattggtacctcagagacattcttttaacaggattcctttccaagcgagatttaactctataacggtagtacctaattgtgtacaccttgtatacaccatttctcaggcattggtaacacctttaacatgatccagaccagcacataaatattccacatagtcacatccatgtcgtcacagcatgaacgtcggcctaattttccctggatggcctcatttctgattaaccaacctcatttcaccggttgttcaacaataatctcactggtggccccaaatttgtccctccaacttcacaccattccattcactcctggtagaacataactttaaggccgccattcatt

SEQ ID NO: 502819 - DNA, 599 bp, Homo sapiens
  misc_feature (24)..(24): n is a, c, g, or t
  misc_feature (62)..(62): n is a, c, g, or t
  misc_feature (111)..(111): n is a, c, g, or t
  misc_feature (132)..(132): n is a, c, g, or t
  misc_feature (138)..(138): n is a, c, g, or t
  misc_feature (140)..(140): n is a, c, g, or t
  misc_feature (152)..(152): n is a, c, g, or t
  misc_feature (175)..(175): n is a, c, g, or t
  misc_feature (213)..(213): n is a, c, g, or t
  misc_feature (257)..(257): n is a, c, g, or t
  misc_feature (270)..(270): n is a, c, g, or t
  misc_feature (280)..(281): n is a, c, g, or t
  misc_feature (319)..(319): n is a, c, g, or t
  misc_feature (360)..(360): n is a, c, g, or t
  misc_feature (373)..(373): n is a, c, g, or t
  misc_feature (422)..(422): n is a, c, g, or t
  misc_feature (432)..(432): n is a, c, g, or t
  misc_feature (447)..(447): n is a, c, g, or t
  misc_feature (457)..(457): n is a, c, g, or t
  misc_feature (509)..(509): n is a, c, g, or t
  misc_feature (574)..(574): n is a, c, g, or t
gtgtctcttgtgtgtgtccttgtncgtcctcctccctgttgctgttgctctttttcgttgtntttcctggttttgtgcttgacaatgtggtcgttgtgggctttgccagcnccagcgtctagggtgggggcntgggtntngctgttgttgtnagtggtgtcctcctggtgctctntgttgcccaggttgcccttgggggggccctccgacgcntgcttcaccaccttcttgttgttttcttttttggctggtttttntagtcggctggtntggtcctccnntgtctcgttggcagtggggacacggaaggccttgccanttagcttcccgttcagctctgggttgaccttgccctctgcnttggcagcgccanttgtggcagggttgttgtcctggtgttctccgcgtccttttcgccacantttcccggangggccatccacagtnttctgggtgncagtaatggcatggactgtggtcatgagtacttccacgataccaaagttgtnatggatgaccttggccaggggtgctaagcagtaggtggtgcaggaggcattgctgatgatcttgnggctgtagtcatacttctcatggtt

SEQ ID NO: 502820 - DNA, 354 bp, Homo sapiens
  misc_feature (52)..(52): n is a, c, g, or t
  misc_feature (59)..(59): n is a, c, g, or t
cggggggccgctggggaagagacgttggttttaaaaaaagaactgcgtgcgnaaaaccnaacttctggtggtagcaatggggacacgggtcaaaggggacttgaggttatcagctttcagaatgaagacacataatccctattagagtggaagacttaaaatcgagtttgagacccaccttctgaaactgcaggctcttgggagcctgatttccggtgaagagtgttgctgctttgcatttttcacacttgaacacagtgaagaagatgaacattaattaggattatagtgccatggaggcttactgtgctgtgagaactcacaagaaataaaatgccatttctttttttggaa

SEQ ID NO: 502821 - DNA, 116 bp, Homo sapiens
tgtaggcaataaaaatagattaaggatactagtataacgagatcaggtacgtacctattactagtaagtgtaatggctcatcatattgtttaagagggtatagtcttgatatagta

SEQ ID NO: 502822 - DNA, 436 bp, Homo sapiens
cggcacgaggccaggaggagggtggatctccccagagcaaagcgtcggagtcctcctcctccttctccggcttctgcgtgccgatcgggacgatcacgggctttatcagagaggcgagagagcggaccatcttgagctgtaagcgtagaggcagcttgctgataaggaccagatgacagctgcgactgaaggaggccagacgttcagtcgggtgaacaatgagatcaggggtaggacccggatccagagagcgtaaccgtatacgacgtagctctttgaagaacatggggtgcgctgaaatcataaggggctataggataatggatgctaccaatctccatggtggctccactggtgtatctgtatcctgacattctcaaggaggaggcattccgaagagtttgtcgggcacgctcggaccatcctgaagctgccg

SEQ ID NO: 502823 - DNA, 895 bp, Homo sapiens
ccggctggaccctggtccggacacttctttggactgacacgcgctactccgacgcacggactgcggatcgtggttgccttgtgtcctcctgacaccgtcgcacgccggcgggacgcacgtgccgctcttgtgccaacccgacacacgcgtcaactgcacactgacaacgacaccgctggacgtaccggtgccttctagcacggacacaccgttctccaccccacaccccacgcttgacggccaactctggccctgcgacgagctctaaccacacgatacggcactcgcggaccgccgcaaggaccctccacaaacacgaccacagccctacgacaacgatcggacgtgcggacggcacgcataaccccccacgacagaccacacccccaagaaacggtcgaggatgccaggacggggcaaacacagacaccccacaatatacactgaactcacggtacttcccacaccacaaacgttccagggcgttagcccgagaacgtgccacaacaacgaccccgcactacaaaacacgtcgacaaggcaaccataacagaacaacacgttcagtagtagtttctcaggaggaccgtggcctggccaagacacaccaccaacacacaacgaaccacacaggacgagagcgaaacgggataacaaatgagtttacagcgacacttacccccaggacgaccggacctttaagcaacgcgaacaccgttcccgcaacctactgaacgtgacccaccttgacagcccttttgcggtcccaacatacttttccagagatctgagtttggcagatgtaaacggagagcaatgacaaagaaacgctacccccacggaaaccacgaaaccatcgagccaccgataagaccagactaggatccagagggag

SEQ ID NO: 502824 - DNA, 260 bp, Homo sapiens
ccagtcctcatccgagtgtgagagtgagctgccgtgtggtgagagtgagctgtggtgtgagagtgagctgccgtgcggtgaatgtgagctgccgtgcggcgtgagctgccgtgcggtgagagtgagctgccgtgcggtgagagtgagctgtggtgtgagagtgagctgccgtgcggtgagatgtgggctgccgtgccgctggatgaggggcgtggggtaccgggctcgggttcgtggtcgtggtcgtaggctgttccggg

SEQ ID NO: 502825 - DNA, 378 bp, Homo sapiens
ctcatgtatgtaggagacagagaaaggacagagagaattcacacctagtataataatatattttgactgggtctcccaaccccagaaagtcctggaacagacagtgtatattctcctcagagaaacacttgcccacagcctgctctgacacagagttggaagaagaacggttctaaaggtggattgcttcattcatttagttttctcctcaacacactgggacaaaaaggcaaaatttcagcaggcctatcaccttgtcccctggctccctatcgaatcagtatatgctttataaaccatccgttgatcgctcagggtcgtgtctgtccacacatgtccgcaccttcacctaataatttccgtctatgcccctcccag

SEQ ID NO: 502826 - DNA, 671 bp, Homo sapiens
tatgtacaaacgaaacatcaggccaggacaccatttatttaaccaagtaatggcgtagagtgaaccattattccaaggtgcttattgtcttttttcagaatgctcttaagctgttgataatatcgtgcgtgggtctctgagagaagtgtaacatttgttacaaagtactgctgctttgagcacatgtggtttctcttcatatgtctagtgcagggaaatcaccagctttggcatcttaatgacaaacagtggatgggtaattttatttctgatacgcatctttagagtcaaatatatcttttccctgtactcctcatgtacaaccaaagaacatacattatgaaaatgtgtattataatatctggaaacacaacattttcctctgcaggtgactttgtacgaacatgaaaaaaaaaaaccctgtatttttggtggtcctttggtgatcaaaggatatccattatagtagtctctggttatatcaacgggaaccggctgatacagtacaagtgtgaccatctcattcaaatggtcggtggtcatgattgcccatgggatatcggttcaaagaagctggatccttaatacttgcatttctggaatctggtctacataatttgtgtacaagtagacattggtgaactcacatggaatcctgcacgttgtgaaca

SEQ ID NO: 502827 - DNA, 103 bp, Homo sapiens
cgtgcgtagtccagctcgccgcttgtacctggccggcggcctttgctgctttgtagttcctgttggacctgttcgcgcgtcatgcccgtctgctggtcgatgg

SEQ ID NO: 502828 - DNA, 260 bp, Homo sapiens
  misc_feature (16)..(16): n is a, c, g, or t
  misc_feature (27)..(27): n is a, c, g, or t
  misc_feature (58)..(61): n is a, c, g, or t
  misc_feature (84)..(85): n is a, c, g, or t
  misc_feature (116)..(117): n is a, c, g, or t
  misc_feature (136)..(136): n is a, c, g, or t
  misc_feature (141)..(141): n is a, c, g, or t
  misc_feature (179)..(179): n is a, c, g, or t
  misc_feature (248)..(248): n is a, c, g, or t
gttaccatttattggnatttagttttnatttaagaattgaacataattatttttattnnnngctatatagcatgtcagattaanncatttacaacaaaaggggtgtgaacctaagnnctatttaaatgtcttatgngaaantttcataaagccattctcttgtccattcaggtccaganacaaattttaaactgagtgagagtctatagattccatactgcagatgggtcatgaaatgtgaccaaatntgtttcaaaaat

SEQ ID NO: 502829 - DNA, 229 bp, Homo sapiens
cagctggcccgggcttagagatatgagaggagcaagccaggagcagttcgaggatgggtactccacgcttctctctcgcatatgggcaagtgaagacaggttacacaggcacaggctctcccgtgcacgttctaggatctgccttggtgtgcattgggccagtaaggggtaggcagcttgcgcgcagttctcctttatctcactttattttcctggggagaggtgccta

SEQ ID NO: 502830 - DNA, 363 bp, Homo sapiens
gaccattgctcttctaaactgtgcttcatttgttgctgctgtggcttttactattttctctccctcctttgtttactctggtttattgtactcttcttttagttacttgttgatgtagactgttgatccaatatcctttgtggagtgaggagagaatgcaagtgtgtatgaagtgttagtgtccagtacatatatgcttggttcatgtttttgtaactatgtatgttttgtgtttgttgatgactcagtctgggacattaattattccattggatttagaatgactttgggaattttgaaactgttttttcacgtggactctgctgctgagtccttctattcacctgcaaaaaatgtcgacgc

SEQ ID NO: 502831 - DNA, 636 bp, Homo sapiens
gtgcttttaacggcaggtctccatctgaaggttcccccagcaaagtatggaggggtactccccgagaggagtctgaggtgtccggagcctgctgctcgctcgatgctgggaggagccccgtgtcccgccgctgcttgccaagggttggctgcgcgtgcggcgggagtagaggcgccttgcgcacccatggaagtgactgtttccccgacgcagtaaaaacaggccatccgatggccttttagattagccgcctcaggtttgtaacgaggatttattggttacgaaggaaggtggatttcagctgtgttctttgcgatggcaggccttaagcagaagagtcccactgcacaggctcagatacttcatctccatggctggctgatgttgtgacaccaatctggacagttgaagctatgaagaacagctcaaggtgaacatttgcagctcagaagaaacattttacaaaggactacgagtcttacatccaaatgctcaaatggagtcagtgtgacaacggctgtacccaaatctgagaggctctcttgtcttcatccatcctattataccctactcctggtcatcaatggttaccgaaaataagttccaccattctcttgtgaaccgaggtacaggatg

SEQ ID NO: 502832 - DNA, 442 bp, Homo sapiens
agttgggggttttagttgtagcaatttctttcatacccctgttcttggatccaagctgagggatgagctggaatggaagtgctagctttaggattgaaaaatctcaaaagaatgtagattggatctggaagctaaggaacgtgcatagaccttgaaagagagggtcaaggctgcaaagctgaccgccttgcctggaattgctcctttcaacagagctggggagggaaggaggaagtgacccaggcttccggccttctccccagtccctgaggatggcctagcccctgtggatctccctatccgttagagacgcatatggagcatgtacaggtgacattgtgtggcttctgcaatttgctggaagcagcagggaaggtcaggccgtacatgaagccaaaaggaccaaacaccagggggccgctatgactgttacaagaagttt

SEQ ID NO: 502833 - DNA, 327 bp, Homo sapiens
ggataaaacccccctacaaggaaaccctaatctctcttactgggcaggttccagaaattactgggcgcggatatcgcctaaaaagagccaggccatatttccatattttaaagaaccgcatcatgatgctgaaaatagcatttatttgggaattggggttgaaaactgaattgttgccagagaattaaaccaggtgaaaggtccttttgaattcagattgtcttctgaacatccaggctgatcatctgagagcagtcaaatctacttccccaaaaagagaccagggtagctttatttgcttttatttttaatgttagcctgtgtttc

SEQ ID NO: 502834 - DNA, 307 bp, Homo sapiens
gatggggtaggggacaagaagcggatccaggaagttggtgaaccatctaaacaagagaaggctgtggtcaagtatcttagattcaactgtacaacaaagtccaccaatatgatgggtcaccgggtatgattattatattgcttcaaaagcagtggactgtttactcggattcacagagagtaaatgccaacataggagaggaagctttattcacaaccagtgagtatgtacttgtctactcgcacattatttctaatgaaataaccctttcactatagctcctaaatgtcaccgatactgaaatctg

SEQ ID NO: 502835 - DNA, 389 bp, Homo sapiens
ggaaccactactcaacaataaagaggtataaactattatttggaagcaatctaagtgtccatcaactgatgaatggataaagaaaatgtggtacatatacacagtagagtactattcagctgtaaaatagaatgagatcctgtcatttgcaacaacatacataatgaataagatctaatattcactagcacaacagctgatgatagtcaataataatttaattgtatattaaaaaataaaagtataatggtattgtttgtaacacaaatgataaatgcttgaagtgatagataccccatttatcccaatgtgattattacacattgcctatatcaaaatatcttatgaactccataaatatatacacctactatgtacccacaaaaatt

SEQ ID NO: 502836 - DNA, 314 bp, Homo sapiens
  misc_feature (108)..(108): n is a, c, g, or t
  misc_feature (136)..(136): n is a, c, g, or t
  misc_feature (141)..(141): n is a, c, g, or t
  misc_feature (212)..(212): n is a, c, g, or t
  misc_feature (227)..(227): n is a, c, g, or t
  misc_feature (237)..(237): n is a, c, g, or t
  misc_feature (249)..(249): n is a, c, g, or t
  misc_feature (254)..(254): n is a, c, g, or t
  misc_feature (258)..(258): n is a, c, g, or t
  misc_feature (277)..(277): n is a, c, g, or t
  misc_feature (279)..(279): n is a, c, g, or t
  misc_feature (281)..(281): n is a, c, g, or t
  misc_feature (286)..(287): n is a, c, g, or t
  misc_feature (307)..(307): n is a, c, g, or t
attatttaatgggctatttaattaaggggtaggaaggtgctgtgggctggtcccccactccaggaaagaggccagtaaagaattttgccccctttttataaaaacttncagcgatggcccccccaaggcctaaacncggcnctggcctcccaggagggcaggggcattgggaatgggtgggtgccctccaaaaaggggctgctacctcccancaggcatgggaaaanccctggtgtnggggttcccccnaaaangggncctcatttaaaaaaaaggntncnaaccnncccttaaactatttttcctnaaacgga

SEQ ID NO: 502837 - DNA, 492 bp, Homo sapiens
gcccccgcgccggacccaacacatgaaaacacaaggaaaagcacaaaatgaatgttgtaagagcaaagagagcttcatcttgcatgccgcgcttttttgacaggaagaagccgcctcccccgctgcgtcgagaaggaatctgagaggaggcgctctggcttggcaagtaagatcgctgcagttcgtcaacggtgctggatccaggagaagaagctggcgctcctgttggcacggatgctattcagaatgtactgatggtatctggcccagaaagcaaaggggatcctggcccaggcatcgccaaaatctccgtcctcatcccaggtcaggagctcgacttgtatgtcatcccagctccaccgtccaatcagcgcttcatcccagatattcatctgggccctcatctgggccctggcatgttcctcggccatatccacatgcattgtcttgaaagcatcatccacagcctccaagaaatgagccttccattcc

SEQ ID NO: 502838 - DNA, 340 bp, Homo sapiens
cctgagacagagtctcgctctgtcgcccagcctggagtgcagtggcatgatctcggctcactgcaacctctgcctcccaggttgaaatgattctcctgcctcagcctcccaagcagctgggattacaggcaagcgccatcacacctggctaatttttgtatttttagtagagacggggtttcaccatgttggtcaggctggtctcaaactcctgacctcgtgatccgcccgcttcggccttccaaagtgctgggattacaggcgtgtgccaccgcgcccggccttaaattgctcttttatatcttttgaatttcaagcatgggcatactctattcaaaaa

SEQ ID NO: 502839 - DNA, 938 bp, Homo sapiens
  misc_feature (28)..(28): n is a, c, g, or t
  misc_feature (65)..(65): n is a, c, g, or t
  misc_feature (100)..(100): n is a, c, g, or t
  misc_feature (129)..(129): n is a, c, g, or t
  misc_feature (157)..(157): n is a, c, g, or t
  misc_feature (172)..(172): n is a, c, g, or t
  misc_feature (178)..(178): n is a, c, g, or t
  misc_feature (198)..(198): n is a, c, g, or t
  misc_feature (208)..(208): n is a, c, g, or t
  misc_feature (215)..(215): n is a, c, g, or t
  misc_feature (218)..(218): n is a, c, g, or t
  misc_feature (232)..(232): n is a, c, g, or t
  misc_feature (234)..(234): n is a, c, g, or t
  misc_feature (240)..(240): n is a, c, g, or t
  misc_feature (244)..(244): n is a, c, g, or t
  misc_feature (252)..(252): n is a, c, g, or t
  misc_feature (258)..(258): n is a, c, g, or t
  misc_feature (260)..(260): n is a, c, g, or t
  misc_feature (272)..(272): n is a, c, g, or t
  misc_feature (280)..(280): n is a, c, g, or t
  misc_feature (282)..(282): n is a, c, g, or t
  misc_feature (309)..(310): n is a, c, g, or t
  misc_feature (322)..(322): n is a, c, g, or t
  misc_feature (351)..(352): n is a, c, g, or t
  misc_feature (358)..(358): n is a, c, g, or t
  misc_feature (398)..(398): n is a, c, g, or t
  misc_feature (406)..(406): n is a, c, g, or t
  misc_feature (413)..(413): n is a, c, g, or t
  misc_feature (417)..(417): n is a, c, g, or t
  misc_feature (435)..(436): n is a, c, g, or t
  misc_feature (933)..(933): n is a, c, g, or t
ccccgcagacaccgtgctgccacccccnggtccctccagcccccctctggccccccacatttccnaggcaggggagtcccacttccaggagttctctggnccactcaccctccctactgtctcccaccncctgacacgggacgctgccccatccctncctttctcccctgtngcctcnggaggaagtaattccttccnctaagttgcnggctggngcngcccagagtggcancngctgcngacncaggctcncggatntnggaccccttacncctgctcncngcccttcagtctgtccttgcagcatgnngagggatggccnggaggggctgctctcaggatagggataanncaatancccagtgtgcagggccagtcaccagtgtgaagcaactaanacgagtcncggggcncccnggggaactgggggcagcnnggccacctgccaggctgtcctgggccataggcacgttcagaagacgaaggaaaaaaaagggcccgcagagctgagtacctgctccgcctgggccaggctgtcgctggcctggcggtccaggtcccagcactcctgcagtgtgtcctggaactgccggcaggctcctccaggatggagctgctccggctgggccaggactcccagtagcctggctccacccagggctgggcctcggtggctctggggcctggactggagctgggacgcaaggagctgtccaggtctcggcacagctggtagaactcactaccacgcccaatcacacgctcaccgtcgatgactttcaggccaggcagcagctcccggactgcagcccagtaggaggggttggcacagagcgggttgctgagccgggccaaagggtctcggagccgcagtaactccaggcacggtagcccagccagacactgcagctggcccggggtggcagtaggttnctgcg

SEQ ID NO: 502840 - DNA, 395 bp, Homo sapiens
ggccaaggcaggtggatcacctgaggtcagaagttcaagaccagcctggccaacatggtgaaaccccctctctactaaaaatacaaaaattagctgggcgtggtggtgcatgcctgaaatcccagctacttgggaggctgaggcaggagaattgcttgaacccgggaggcggaggttgcagtaagccgagaccatgcttattgccctccagtctgggcaacaaaaatgaaactccgtctcaaaaaaaaaaaagtaggtcaattcgtaacagtttattttgggacacaccctgaagcttttgttttgaattaaggaaatgagtttcagggattggacaaacctttgtttaaccagctgttcctggggctatttgaggggggttttcctttttccgg

SEQ ID NO: 502841 - DNA, 343 bp, Homo sapiens
tgagacagagttttgctcttgtcgtccagactacagtgcaatggcgtgatcgtggctcactgcaacctccacctctcaggttcaagcaattctcctgcctcagcctcctgagtagctgggattacaggcgcctgcaccacgcccagctaatttttgtatttttagtagagacagggtttcgccacgttggccaggctagtctcaaactcctaaccttaggtgatctgcccacctcagcctcccaaagtactgggattacaggcgtgacgaccgcgcctggcccaaaatgttaattttataccttgcaaaaaggttaatttatcctcaatggaaacatatgatt

SEQ ID NO: 502842 - DNA, 1017 bp, Homo sapiens
  misc_feature (299)..(299): n is a, c, g, or t
ggtactgtgttactccgccgaccgttgatctctactagcataaggtgcgactctgagagccgtcactgatggcgacgggccgaagaatggcgtgtgaaaaacgagcactaatctcatgcagagcgagagaagaccgtgtgccgaagagttatcagcggatagagtggcagaatcatagtagagtagtatcacctaacgatgctagaatagcagatgatggctgtctcctaagcaacggcctgggcgagaaagcgaggaggagtgccctgcacgtgggtattgcgctctcaggttaaacnttgcatcaaggagcaaagacatttatactatcagcaatctcggttcatccatcgagtgctgcattacaggatcgatggtcttgtagtcgtatgatccacatgccaggcctcggtcgtggtgcgatattgtacgtgtgaacgatagaggagctgggtagctttagggctatcgtgtggtgctggaatagatactgtggactgccactgcaagtagtccttgcgaagaaaccaaaccgtgagggagaaccgatactctctattgttacaatggtagtgagtctgtccacccacaccttcattacatcgacccacaattttttcctactgggtagtccccagaaagggatgtctactattttaggtgcaacgtccagtggggagtgtcatggaagctctgatctgtgctttcgaaccatcctgggtgcctgcaggtctgtctccgtggtctgctccaactttgtactccgtgttctctgtcccctgcctgcaggcaaggcctttagctgtctattgggcgaaccagatctcgtcctggagggcttgtcatggtatcccacttggtgtaatcctttccaggatctcggtggcctagctagttctgcagtgccagatggcacctcttttatggccggtctcccgggtacgtgaagtgtgtgtggggaaaaacccccgggtcgcttgcgaagggtttctgttgtttggcccttatgccctgcaa

SEQ ID NO: 502843 - DNA, 411 bp, Homo sapiens
tactagactattcgatgtctgagagcatttattcagaacagatgggaggggcaggatccaggatggccggtgggcacaggcctacgtgtaccatatgaagccgtggctggcatggagagcctcctactgtgagtgcgcagcccgtacagctccccgatcaaggggggcacccagcgggtagtagtggaacacagactcccccaccttccagtcgggcacgtccttcatgatgatggcctcctcctccaggttctcccgaagacatctgcaatgtcctccggtcggtttctgcctgtcacagtggcaccagcgcgatgcgagcctcgaagtcctcgattagtaggcgcctgcgctcacggaaccacttcattatgctccagtgcccgtagatcagggatccaatcccttgga

SEQ ID NO: 502844 - DNA, 856 bp, Homo sapiens
agcggagaacgccgagggctggagggaaagcagcgggaggggcggagggaggggattcgggagcgtccagttcagctcgcatcggcgcacccacgcctcgctgccccgcgttccgtgagcctctaacctgggcgatgcgcacacggatgaacctaacattattgccgagaggacctgtactgttgccaatggctgttggtataggcattgttccagtagatacccgcagggatcgcaatacgtgggacatgaaacgcacgcattcgcgggcagtgtcccttgtgatccattttgagccagagtgggggcatacacagcgcgagttggttgacagactaggacgttgagactgtaacgtgactggggagtaacggaaacgcagtcacgtggccgacggcgcaggtgatttacccgtttcggcgatccggacagtgggctgcgaccaagatcacgcgcaagggacagttcaactagcgttgagggacagatagagggccaagacaagtgggtttcgcatatcaggttgtggcaggagcaggacgagccataagaagctaaagacggtggataatcgacatagatcccacttgacaatatatccaccgcaaatgtggaagtcattgggactgatccgggctaacacaaacgtgtggggggtaacggcaaccatttggtcaagaaaacgtaatcgtggtacctaccctatgaaccttttcactactaaactgtcaggccttgcggtcgtgttggctccgctggcaagtggacggcacgccaagttgtcatggttttgtatcgggatgggttcacactccattgataccacacaaagggggcaagttcgaaagcagataca

SEQ ID NO: 502845 - DNA, 434 bp, Homo sapiens
tcctgtttgagagagaacagcgcccgaactgctttcaggatgtatcgcttcaactgctggcaccgaagcaggtccaggtccactatgtcctgcaaaggcctgtttagtcgattatctttattttgtgctttatctaacttcgcttccagacgaggttcacccaactgagcccagtccagacagcatggagctctagtgcaagggccaggttgttcacacttaaacggccacggacaggagagctggacgaggacacacgaagctgtcagcagtgtggccacatatgactaaccaaatggaaacgttctgaaacgtcatcaataactatggagcttaatcctagaaatgccacacatacccgtaagcctttttatagctgagaataatcattttttaaaatgacattaaaggcaggatagagatttacacatata

SEQ ID NO: 502846 - DNA, 900 bp, Homo sapiens
gctggaatggaggtcttatgagctgctattgaacacggcagagccgtgtggtgacctgcacacaggatccctccagtcagtactgagtgaataactcaaggctgcctctctgcgaagtagatcactacaggacgtcgggactgggcatttccttgccaacatggaccgcactgcctctccgcagtgcacatcgccatctgaggatgccgattactgagaatagcagtcttctattatctatgatctaccctggaatgaagtggccgttcatgctctgcaggaaggaatgcaaggggatgctactttgggcaaagatcttccatcccagctcttctagtaggccatgacttgttatgtagtcagggccatcagcggagaagccttgccgttcattgctcagtgagtgcttgcttccgctgagcgtgcgctcgcagtgcggactggttgagaatcatatctgctgaaatcatggccactctccaagcattctgtttctcggtgacactgaccctgtctggaggacatctcacgtggtcctggccagttgtggtctatcggtcagatcttctatgtgcaagagtggatgaggcacgtcttatataactgttaacctttaacagctggccatcctttttcacttacgctgcatgacgcctgtgacaatgtacctgggaggatcgtgtcactgcgtcaagcccgtaccaacagggctgatggacccgggacaacgagcctgctccttgctagccatagatatggcgcatggtgtccctgggccgtgctaccatcccctgatcatgggtgctttggtacatgacgacttgcaaaatcccaaggagtgttgtgcgaactggccaggcagaatttcgtgcgtgcatgggaccatatggaaagctcttc

SEQ ID NO: 502847 - DNA, 431 bp, Homo sapiens
  misc_feature (115)..(118): n is a, c, g, or t
  misc_feature (129)..(129): n is a, c, g, or t
ggaagcccgctcagattgtctctcagagcctgttcccaaatgggaagccaccagcaaaaaaatcccagtgggctgtgctcttcatgtcctggttgggaaattcaggaagcacacnnnnacacacacatnccacattagaaatactatggtttggccgggcgtggtcgtcacgcctgtaatcccagcactttggaaggccgaggtgggtggatcacctgaggtcaggagttcgagaccagcctggccaacatggtgaaaccccatctccactaaaaatgcaaaattagccaggtgtggtggtgcatgcctgtaatcccagctactcgggaggctgaagcagtagaatcacttgaacccaggaggcggaggttgcagtgagccgagatcatgccattgcactccagcctgggcaacaagagcaaaactatctc

SEQ ID NO: 502848 - DNA, 258 bp, Homo sapiens
tctcaccacccaaggtctgttctgatgcagaatcaccaaggtagggctcagagctggcatatcccatacccaagtctgacgtgccccccagcgtccagagctgggccatgctgttggttgctcactcctcacatccccaccgttgaagaggagaaataaccacccaggaagggggttaggttgttcccaggggccactggggacctgggttaaagaagagtccaggggaagctggccggggttgggttgagaggcggg

SEQ ID NO: 502849 - DNA, 281 bp, Homo sapiens
gaacaatcagacaaaggtttaacataatacatcctaaagataaccatgccgtattaacacttatataatagctctgcccattgaaaggggctttaacttgaatttctctattacatcctcctaactatcatgtgaggcagacaagagacgggaccatgctcttgggagaaaaaagaaaactgctgttcagattaggccacagctacggcatagcacaataacaagcaaccagagcccagatcgaaacacaattaactcaatagaatacgggtggtacaaat

SEQ ID NO: 502850 - DNA, 220 bp, Homo sapiens
  misc_feature (115)..(118): n is a, c, g, or t
  misc_feature (129)..(129): n is a, c, g, or t
ggaagcccgctcagattgtctctcagagcctgttcccaaatgggaagccaccagcaaaaaaatcccagtgggctgtgctcttcatgtcctggttgggaaattcaggaagcacacnnnnacacacacatnccacagacatgaaaaaggttctgtcttctgaaggctgttgccgatcttaacatgaattgtaaaaatgatttgttggtgagtcattgtctag

SEQ ID NO: 502851 - DNA, 347 bp, Homo sapiens
gcgatgaaacatattaactaaaagtgaaagatacatattctgttatacgtgcctccctgtttaaggagttctgtatcaacaaagacaactgattgtgggaagtatcatgatgataggttctacaggaagataatcgagaatatgagctccgagtatcactagcatcttaccgggctctttaaaacatagcattacccagtataggtcaaatcatacatatgtgaaacttatatgattattttcctaccaatgagtgattcatcataattttcattatgccttcaaaattaaccctgagagaggccagaaacccattctgctgatgaagaaactgaggtaaagatttc

SEQ ID NO: 502852 - DNA, 350 bp, Homo sapiens
ccccaggggccttaagtctttaaagcccgccctttttcctttttggtgctttgggcccccagggggtggcgcccccggcctttttttggcccaaccctaccccaaccttggtttcagccccctttgtaggcggtgggcccccttgggatttttaccccgaccccccttccttggcattttgctgggggggagtttagggctgggggaaccttttggttttgtattggctttggaccggggggggggttaagttggtttggggggggcttttttggcccttttagccccccccttttgcattttgtggggggtcttcccccctccccatgaaggccccctcctttttttta

SEQ ID NO: 502853 - DNA, 165 bp, Homo sapiens
  misc_feature (2)..(2): n is a, c, g, or t
anaacacacaagcttactttttttcaataggcaagaagatgtgtgacaacagccttaaaaaaaaaaagcctaagaattccagtttttcagcctggaatatgaacaaagtttttttaataccaaaggaaaaattgccaccaaatgatcaataacttagggtttaca

SEQ ID NO: 502854 - DNA, 117 bp, Homo sapiens
gtgcatgcttctctaaaagttaagaagatgttttccttgctagaacaaatttctgtgaattaggcaatgaagtcaatttgggagccacgttatttaaggaatgcctggaaggtctat

SEQ ID NO: 502855 - DNA, 1025 bp, Homo sapiens
ggctggcaggcgaaggatgccaagatggcggcagtgcggttcgcatccgggggtagtgttggcctcgcgagatgctggtcctcccgtgagtgctgtgccgggatctgttgtgaaggggcccgggcgggccgagctgtcgtgagggactcctgagtggagtggtcgtgggtcggtcacaggttttcgtcttaccaggaggtccggaggcagaggtcgtctgctgtcagagtctagggccatgctggggggcaggggggttgcgggggttggccgggtggtctggattccgggttggtgagttgccaggtggaaccttggaatggtggggcccccccccgaggttaatcggggggtcctcaacgcgggggacctcacttctttctcgtttggaccccaacaccaaagacattcgcggagaggggggttccccaaggtttattatacgcgcagggtggtggcgccttcctttgccaacaggagtggacacttgcggtggcactatacccgccacactgttggtgggcgcggttgtgcaacaccagcggggagggatgaaaggcaaaaggagacgctggatttgagagaggttgaaggttcacaagacgggcccccaatttagaagattggggagagattgtcacattgggggccaggggaaacgtttgtccagatttatttcccaaaaaaaactattacccccaaagagggtggaggcttggctcggaggttcgcacaaagtggaggatttgcccctgacctaaggattactcggggaacagctaggcattggctgggaagagcaacgttttctccctggtcgggactaagtgagacccaccgacgcgggtgttcactggggggagaggttctaatttagcactatttctggcgagcattgattggcctccaattaaaagttttttagttttggtgtgcccgtatcatgtcaaacacagggaggtgctctcgggggttgagagaagagacaaaagtggcaatagtataggtatcgtcggcccaaaaaa

SEQ ID NO: 502856 - DNA, 246 bp, Homo sapiens
cacgctcagccgggcgacagagagagacccgtcttaaaaaaagaaaaaagaaaaaaagggatccatggtggctggagtatagagaatcggggagcaggcagagatgagaaagtagggctgggctgcatggtctcatgcgccataggtaagcaattgcgggtttatgagcatcacagggaagcagttgtgagggcaactgatgcaaggtaagtgacagggtatttacagtagaacaaagtttttggt

SEQ ID NO: 502857 - DNA, 969 bp, Homo sapiens
  misc_feature (72)..(72): n is a, c, g, or t
ccgggatatttggctggcgcggagccactgcgcgctgtctattcctggcaggggtctggcgcggataacganccaggtcgcgggcggggggcttgagcgcgtgcggtgccgaggagccgagcatggagtaccaggatgccgtgcgcatgctcaataccctgcagaccaatgccggtacctggagcaggtgaagcgccagctggggtgaccctcagacacagttggaagccatggaactgtacctggcacggagtgggctgcagtgtggaggactgggaccggtgaacatcatccacgtcactgggacgaaggggaagggctccacctgtgccttcacggaatgtatcctccgaagctatggctgaagaggggattctttagctctccccacctggtgcaggtacgggaggcgggatccgcatcaatgtggcagccatcagtcctgagctcttcaccaagtacttctggcgcctctagcacctggtgtaggagaccaaggattggcatgctgtgtctccatgcccccctacgttccgttcctgaacagctcatgggcctttccacgtcttcctccaagagactggtggacctggcagtggtggagggtgggcattggcggggcttatgagtgcacccaacatcatcaggaagccctgtggtgtgcggagactcctctccttgggagtcgaccacaccagcctccgtgggggatacgggtggagaaagatcgcattggcacgaagggggcgtcttaggcaaggtgtcccttgcttcaattgtgctccaccttgaagttcctgccagtgctgagggccgagccagagatttaatgtctcatactgtgtcggtgatgggccttcagaagggcgccggcggtaccttgcctgaggtgaggaccagggcagagcggtttgttagtgccatgttgttcgggtgaacctggttgtgcaaggacagcaggtcttgaac

SEQ ID NO: 502858 - DNA, 171 bp, Homo sapiens
  misc_feature (38)..(38): n is a, c, g, or t
ttcggatgggtcgttctgctgcacaaccacaacaacantacaggcataggagccccccttaatgagcagcccctcttccggccaaaccgccgggcaactggaaacacgcggcattgagccggtcccggaaggcgagtgcaacggtcatccgctgcaactgttctgggtgtg

SEQ ID NO: 502859 - DNA, 1182 bp, Homo sapiens
tccgatccagcgaagcgctgcgtcctcgagtccctgcgcccgtgcggtccgtctgcgacccgaggacctccggtgccgcgtgcgattctgcgtgccgaaccggaggactactggccaacagccagtcacaggggctgcgcaacgtacgcggggctccgatccactgacgttcctcaggcgtttgacccgcaagccagggtatgcgcgatggctcgtgctactacatgccaatgcaagggcgtttggctcgatggaccaggaggcactctactggcactgagtaagtcacacttctactggtcagtcatccacgggcagcaggctagggaggatctgcacagcagcttgacaaagtctctccctcgaacgggcacatcggacctctcagtaagtcgaagagtttaaagacgtacttgaatttcgaacggtggcaaaagattcagaacccgggttggactgtggtcgaggcgctagacttgaggtgcacacgcgtgccttagttggctgattgcccagagagcatacacttacagaggactagcgcactgcgtccgtgggcgattgttgtgccagctggatttcgcagaaaggtgggccgttcaactttgaggactcttccgggtcgtgtcgcccgggtaccctcactggaggccaagagttgtcctcccaagtctggggtcggccatggccagtcaccaagaggaattgctcgttaccgaaagccggggaactctgggacagggctagacaattcatgtcgggccgtatcgacctcgttgggccagcgttcgccatgacaggacttgcttttggtcgtggtgcctggggctccccaagtggaacatgcaagggcgcaaggggagggcatttgaggcgtaactagcacgccgcaggggaaccttggtggtcacacaaccaagggattgtgcccccaagtggaccggaaatagcggaaatgccacgagggagaacgcgttgaccactcgggcgcggaaccccggagtggaatggcccccaggttcacacctttacaatcccatttgcggaacccaaccgcgacgaccactcaggcatgctcaacgggctgaggagagccgacaggacatactctagagccacaccaaccgtgtagacccggagatgaagggcaaaccacaccacagtgggcaaaatcatcaagag

SEQ ID NO: 502860 - DNA, 674 bp, Homo sapiens
ggcgacaatgtaccatcgatctatctccatgcgtgagcatcgtaccgcgtggtttaacatttcgtttgatattattcggtcgctacctaccatctccacagcagacctgaaatcacgccaggacatatgtccagcgagtctgctgaaacagaggtttcgtgctgcaaggatacgtgtaggagcaacgtgcagatgtgagcacgtgtgctcgcttccatggcttgaccgcgttcgtggagggcgtgtgtcccttctgtcggctcatgaggaggctcggggtgaccagtgtgacagagtgtggcaagctcatcaatgctgtcgagcttaagaagcctcaggtgtaaagtctgccgatcatgccctgtggtgcagtcgagccagcacctgtttctggacctggctaagctggagaagcgactggaggagtggttggggaggacattgccatggcagtgacgtggacacccaatgcccaggtgtatcacccgtgcttggcttcgggatggctcaagccacgctgcgtaacccagtagactcaaatggggaaccccatgtacccgttagaaggttcggaagacacatgtatgctatgtctggttggatgccgagtatgggctatctgtccatacagaggcaactacacagatcagtgggagagatggtggaaagaacca

SEQ ID NO: 502861 - DNA, 239 bp, Homo sapiens
atcgagccggtacccctacgtgagaagtgtcaatagcaattgggtgtctcttccttggggagatcctagccagattaccagaagtgtcgttagtcatctaaatcagagacatcaattggattatggagaattggtgaagtcttcagactcagatgaaggaaaccgcaataccagaactgcgtgttgaaactgtctataaacgtaggggggatcctcgtagacgtcgaccgggctaggca

SEQ ID NO: 502862 - DNA, 184 bp, Homo sapiens
  misc_feature (77)..(77): n is a, c, g, or t
  misc_feature (89)..(89): n is a, c, g, or t
  misc_feature (109)..(109): n is a, c, g, or t
atgacccgacggaagacagaggagggccttactagtcaagttagacatctgaccttgaggacagttcaacatgtcantcgggctagatnagcaaattctttatctagtnaaaatggctaggcatggataatatgtggttacttattctccttcctcctccccctcctctgtgctgtgctgtcca

SEQ ID NO: 502863 - DNA, 243 bp, Homo sapiens
aattgatcccacacaccccaaaacataaagctgaattaaaccgttcatccgcggaaaggggtggagagggggggttttatatgaggtaaagaggcccggaaggggccaccatcaaaccaatgaatcgaatcctgcaggggcaccatggacacatggggagacgttaagtgtaaactgtaggattctcaaatatttacatggaaaatacacttgcaggtgggaaggactgaaggcggacggggt

SEQ ID NO: 502864 - DNA, 777 bp, Homo sapiens
  misc_feature (272)..(272): n is a, c, g, or t
  misc_feature (476)..(477): n is a, c, g, or t
agcggactaaccccgccaggtcgcgggcactcccaccagctcgcagccctccttcggaccctcgatccgagagcgccccagccagagcttgtgcccatgcccctgtcccgcaggggaaggggatcccgcctggccggctctcgagcggcgactagtaacctcccgcgggcgacagccctctccccaaagagtgccggccgcggggccctgtctataagccacgcgcaactcctcacccggcggcgccattcctccgagcaggtcccgccggngtccgagccgcgggctgacttccgctcgggaaagtggctccaagagcccgccacaggggacgccagggactcgcggcaggctctgcgggccaggatgagttctaagcacaggatctgtagtcaggaagaagtagtgatcccctgtgcctatgacagtgattcagaaagtgtggatttggagctgagcaacttagagattattannaaaggctcaagtagcattgaactgacagacttggacatccctgacatccctggactccattgtgagcccctgtcacatagccccagacacctgaccaacaggacccgctcagtgaggccattgttgagaaactgatccagtccatccagaaggttttcaatggtgagctaaagggtgaacttgaaaagctgaaattcctaggagatctgtcttctctcagccaagctttaccttatgatgaaaccggaaaatcattcattcacaggcacatagcagacattgtgcatcctttaaatgtcc

SEQ ID NO: 502865 - DNA, 293 bp, Homo sapiens
aacgcgtgatgcggttgatcagaattgcaaatcgtatgttgaagccctaaccctaccatacctcggcaggtgaccttgttggaaatagggccgctgcagatgtaatcagttgatgaggttgaatgatgtccttatgaaaaggggagatttggaggtgactcacacacagggagaatgccatgtgaagatgatggcagagatcagggtgacccctctacaagccgaggaacgctaaagaggccagcaaactccagaagctggggcagagccctgaagcagcttctccctcacag

SEQ ID NO: 502866 - DNA, 479 bp, Homo sapiens
  misc_feature (272)..(272): n is a, c, g, or t
agcggactaaccccgccaggtcgcgggcactcccaccagctcgcagccctccttcggaccctcgatccgagagcgccccagccagagcttgtgcccatgcccctgtcccgcaggggaaggggatcccgcctggccggctctcgagcggcgactagtaacctcccgcgggcgacagccctctccccaaagagtgccggccgcggggccctgtctataagccacgcgcaactcctcacccggcggcgccattcctccgagcaggtcccgccggngtccgagccgcgggctgacttccgctcgggaaagtggctccaagagcccgccacaggggacgccagggactcgcggcaggctctgcgggccaggatgagttctaagcacaggtcagtgtccgcggccacgttgaggttcgaagctaccagcatccgcggccgcgatcccagtcctcccggtgacagggccctgcagttcccctcgtg

SEQ ID NO: 502867 - DNA, 1006 bp, Homo sapiens
actggattcgtaccttgtgtggcgtcgctcgttctgctgtgcgcgtggtgccttgactgtgcgaggacagccactttctggctgggaaggctcgctcgattattgtgtcgtcgcgcgcgtgtggggtcgcgtgtgcgctcgtgtggggggcgcgagttcggtctggcgttcgggtcccactatgcgctcggggttgtggtgcgcgccgcgcgccgcgccgagtttgttgtgtgccgcggccaggggttgccgggtttctttgttaagacgtggagtccgccgtccatctcgtgacgcgtggtagggttgtccgctccgccaagggggtagtgcgtccgtcggtgagcgcccgcgggggtttgaagccctgtggcgatggtgagcagcgttgtagagggcgcccgttcgtggggtggactgcccctgatgtgcccttatattagccgcactcttgtgccacggcaccctcctgttaacagccggccctggcaaatttttattgtacagagttttttccggtgaccacctgtgggcatattatgtcatatgacttcatggggccccctcgagaaggtagctagactggtgtcgcgctgcgagatttatatatatgcgatacacagctcgtggttctcacgcccaatcagcagattatacctataggagaggcgcggattgaagtaagtcagaagaccaccatgtctgcgtctgcgacgagagatactgttggcactccctgttctccctgctatcaagggcatatgctgcgctcggctgagtattcaccacagagcggtgcagcagtctcaacgctcttcaggctgcaactgccaattcttcggagccacttgagtcccttatctgcgccccccttgaaagtggaaaaacctctgctcctcacatatccttgcaagggggcataaagggctgagtatagggggggaccacttggccccggaaggccggtctccccaaaaacaggcggaaaattctgcccacataaaca

SEQ ID NO: 502868 - DNA, 1036 bp, Homo sapiens
gtgcattacatcaaacagaagtacccccaccttcaggtgataggggggaagcgtggtgacagcatcccagggcaagaacctgattgatgctgtgtgtggacggctctgcgcgtgatgcatgggtctgcggctccatctgcatcacccaggaagtgatggcctgtggtcggtccccagggcactgatgtgtacaaggtgggtgagtatgcccgggcgcgtttatggctgtgcccagtcatgagtcgcgagtggcaggacaatccatatcggccgtgggcacacaggtggtcaaggacccctggtccctgtgtggagacctcggcacgagtgattgaatggtgctgccgctgctgtgtggcgccaggtacgcggatgggcctcctgtgcgagatactctctatcgtacaggactgggggtgcgcgttcagaggacagtacacgggtgcagtgggccgtcactgtgcatgccatggaggaaggagcaggggcgtgagccagaagcgatacttcagcgaggcgcggataaacgtgagggatcgcgcccgggtgttctcgggctccgagtcctagggtagcatacccggatccggttcacgacatgttcagtgtacctacctcatagctaggtcgatccaacacgtgtggcaggaatatcggggccggagctgtctgtccttcgcgttcctgactgtgcgtccaggagaggtcaagtttgagccgcggacagtgtctgcgccagattgagggtggttgttcaatggctggaatgcttaacgagaagcggctgtcctgatgaacagcggtggaggcgaagtggtggaccgggatgaaccccaatgtcactttggggcaaagctcggctcctaagtgagggggtcacagaatttgggcaacgggctcccacgaccttcagagaagagggggagcacaaagagaagaggggcccctgaaacctcgagagagagaagagccgggcgtggttgagagaccccaaaacaaataaacagacggaaattaagagggcaacggcccacga

SEQ ID NO: 502869 - DNA, 191 bp, Homo sapiens
aaagcggtataaatgagcactggcttgcacatcggaacacaaaaaagacaaaaatatgattcagaagtgaacttagtattacttcactatactaaacacattgaagacactcacttcatgtggacttggagctccagaccttttacatccatcacagataggctggacgggttgcaattgctatgcacagc

SEQ ID NO: 502870 - DNA, 261 bp, Homo sapiens
  misc_feature (83)..(84): n is a, c, g, or t
  misc_feature (106)..(106): n is a, c, g, or t
  misc_feature (209)..(209): n is a, c, g, or t
  misc_feature (233)..(233): n is a, c, g, or t
gagcagatccgcggaagggcagaatgggactccaagcctgcctcctagggctctttgccctcatcctctctggcaaaagcagnnttttctccggagctttaccagnggaggacgctgcccccaggctgtttgtccctgggccgtgcggaccctgaggaagagctgagtctcacctttgccctgcgacagcagaatgtggaaagactctnggagctggtgcaggttgtgtcggntcccagctctcctccttccggtaactcc

SEQ ID NO: 502871 - DNA, 379 bp, Homo sapiens
gttgtgtcatgccaccctccacggtgcagtggcttgtgtgtgatgtgcagtccgaagcacaccgtcctttctcactggatggacagttcattgcactgactctgggatctcagccctgctcctgggagctggaggagcactttgagatcctaagggaccacaccctttctccttccctgcccacagaggcagagggcacaggaaagaagccgggccaagctcggagttattgtgccacaagtgttgtggccttcctgaactgggagtcctggctggccccggggagaggggcaatctcggactacactcaggcagctttccttctttccctgtatttcagattcatacctctacttgcatcaccatatgtgaagtaggg

SEQ ID NO: 502872 - DNA, 747 bp, Homo sapiens
agcggctttcggcggcggcggcggcggcggcggcggcagcagcgcggcccctttaaacgcctgcgggcccgcgtaggcacgacagtgcggcatgcaggtggccggagcgggcgcgaccgcaccgtcagggacactgatgcgcggcgggaccagcgagaccgaactagagcatatacacagtacgcaaggttggtagagtaacagagtagcaacaggtgcaataatacaagaacaagaagtaagaagaattcaagaagcaaaacaaagtgggaccaccgtctcgaaacaagtacatcgacagcgacgaaagccacgtacaaggggacaccagaagactagcagaggacaaacaaaggggcccccacataagacagaacggagggcacacagagggagctgagccaccccagtaacatcatgcagcgaagacaacagagacacaacgaacaggcttacaaagcacacaacgagaagaagcaaacacaaaaaccaagacaaacaaagtactccctgtcgggaaacatattacctggaccgagacaacacaaaccggtaagcagaacgcgaacgccatttaccattcgcccgctcactaccatcaacacagcccgaatgagatgtcttccccgcaaacacgagggcacagagacggccacgactgacaccatgctggaaacagctgatgacatgcgccgcgaagcgagtatcgagagggaaacacaacaccaacaaacaccggaaatgggc

SEQ ID NO: 502873 - DNA, 197 bp, Homo sapiens
cgaaattgccaggggggacttgggttaactcaagaacagttttttttggattccttatttgatttatttaacctaattaaattttaaaattgcaaatattcccataaggggggaaaagtaaaattccttttttgaaaatgggtcctggggttttagatttttaaattccataaaaaacattcttaattttcaactca

SEQ ID NO: 502874 - DNA, 141 bp, Homo sapiens
agagtggtgtatccatcacatcgtttagaacatcatcactccagaagaaacatactacccatcagcagccactgcccatttcccatgatctgccccgcatgaaaaccaccttcgtgatcatggtatctcccccgccgaatg

SEQ ID NO: 502875 - DNA, 326 bp, Homo sapiens
  misc_feature (13)..(13): n is a, c, g, or t
  misc_feature (18)..(18): n is a, c, g, or t
  misc_feature (67)..(67): n is a, c, g, or t
  misc_feature (109)..(109): n is a, c, g, or t
  misc_feature (211)..(211): n is a, c, g, or t
  misc_feature (250)..(250): n is a, c, g, or t
  misc_feature (265)..(265): n is a, c, g, or t
  misc_feature (270)..(270): n is a, c, g, or t
  misc_feature (295)..(296): n is a, c, g, or t
  misc_feature (299)..(299): n is a, c, g, or t
  misc_feature (308)..(308): n is a, c, g, or t
  misc_feature (314)..(314): n is a, c, g, or t
  misc_feature (316)..(316): n is a, c, g, or t
  misc_feature (318)..(318): n is a, c, g, or t
cagtgtccgagtntaccnctatttccagtggggcagggcccagcgccaggccgcaaaaaaacaaaanacctcaggaatcatgtagaactggggggctttttttcctgancaaaaaggcccaaggcatgctgtggaaagacttcccctgcccccattttcaggtcaacaggactaaagcgttgatggttttcaaaccctgttggaaaaaagngcccatggtttttctggttttgccagtttgacagtttanggaggctttttaatngtaanaacaatgtgagggtgagggaccccnncanacattaaanaatttncngngtttgtga

SEQ ID NO: 502876 - DNA, 105 bp, Homo sapiens
atacaaagctaatgtacaactaacagtgagtatatgaaaagtgctcactacgtttttacggcgaaataatcctgacaaagaatgtttaagtgaactgtacgtcta

SEQ ID NO: 502877 - DNA, 160 bp, Homo sapiens
  misc_feature (22)..(22): n is a, c, g, or t
  misc_feature (50)..(50): n is a, c, g, or t
  misc_feature (94)..(94): n is a, c, g, or t
  misc_feature (133)..(133): n is a, c, g, or t
cgacagtcagccgcatcttccnttttgcgttcgccagccgagccacactngcatgagacaccatggggaaggatgaaggtcggagatcaacggntttggacgtattgggcgcctggccaccagggctgctttnaactctggtaaagtggatattgttgcc

SEQ ID NO: 502878 - DNA, 750 bp, Homo sapiens
  misc_feature (404)..(404): n is a, c, g, or t
  misc_feature (493)..(493): n is a, c, g, or t
agcgggggggctctggtcaatcgaccgttgacgcaggtcggtgggtgcgtgcggagtgccgacgcggtctcacccccaaccgtcggtccagtcggacggttccgaggtcgttgccggggagccgggcgcggctcgtgtgtggacctcggagcaaacgcggggttaatttaagcgaggatctcgagtggacaagtgctattatgtgtgaaccaggaaattggaacgccacgaagtacgatgtcagccaaggcgtgctcatggtggtaggataccgcatgtctgccattgtctgtgcgtcagtcgacatgcggtcgagggcgccatctgatctgcgctcactccattgtgcgcctactctacggatacgctacgtgtgagagcgcctccgacctttcttcgtcccntatagtggccgaggcgattgtgggggatgcataggcatccttggtgtccgaactgcccttgactcgggcatcgaaatgttggcgctcgntctagtgccaccttgcgacggtcccagtgggcttacaatggcgtttgattgggacatctagtgctgaactacttcacttctagattcatagttggggccgatagttgctccgtaaccactgaacgtgtctatcaatgttgccaagaacgcacatgccctatcttatcttctgaagctggggtggattctgggtaacactgaccaggggtcgcgttgttgccatgtgcagtgtggcattcgaagtaggcatgggtgtg

SEQ ID NO: 502879 - DNA, 757 bp, Homo sapiens
ggagagaactagtctcgagttattttatttattttttttgcagagctacctgaggtttaattttgggaccaaaaaaaaaaacgcaatgaaattgtttggtacctggaggcttgggcaagggggttccccaggttataaattccccagtgttgggctagagggctagggctagacgccatcagtggggtactctttggtcccagtgctaccctagcataaggggcctactattacccagagctctggggcgacagcagcaacggacgggtgtaaggactggaaaggggctagcccagcacgtttgtacccactgtggccacgagacatgtcaagaagagactcaagaaccaccgaggtattccacatcgaggggtgtcatcgactcgtcacttatacacaacaccgagtggcccgtgggaggaacctaggttgcggcatgaaaggcagtactaggagccacggctgacaaaagcacaagatccttgggcagccccagtatctgatagcttaacagcaggggcatttgtagaacgagcgccccaaaataagagccagaccgtctcacagcaccaacgcagtgaaaaataagcacagacatgaggaggcaaactaacaaaaatgaacaatcacaacaagaggtagcgaggaacaccagcagaagatcagaagcgcgagataaatacaaaaggaccaaccaggaagaaaatacccaggaagaggagagagaagctacgaatgtccaagagcccactcatga

SEQ ID NO: 502880 - DNA, 328 bp, Homo sapiens
  misc_feature (82)..(82): n is a, c, g, or t
  misc_feature (149)..(149): n is a, c, g, or t
  misc_feature (232)..(232): n is a, c, g, or t
  misc_feature (259)..(259): n is a, c, g, or t
cccgggtagtcttacgaccctggtgccctgggctgccgcctgctcctcgctctgggcgtggaaagggctcttgcgctacccnagatattcacccaatgtccagggagcgttcaaaatttttaaaaagtggcctttttttttaaaacggnacgggacttatttttcatatccctttgttcttaacaaaaggaccctctttggtttgactcccgactctctcttggaggccccngcccaattctcaagacaacccctctcntaaccccacgaacccccaaagggctctccacaccacctgtgtttcatccccgctttaacccacaatgac

SEQ ID NO: 502881 - DNA, 405 bp, Homo sapiens
aagggcagtactgttatatgtggttcttccacatcaccctttactcaaaaacaacaacgaaaaagcaaaactcatatatacttctactttatagatacgcctgacagaaacatagtgaagcaatctgggaggcaacctgtggtagattatatgctaaatgttcatgtaacctctatatgattattataaaactgtttttatatatgagatttagacataaaaactattaatacaggctagactaaggaatttctacaaatactctttagagcacccaacattaaagttacacgagttgaattttgctctatttcaactcccttacctctctagtattcagttaatattaagtttaaataactttgcagagccctgcaaattaataatctacatgaagtatatctg

SEQ ID NO: 502882 - DNA, 907 bp, Homo sapiens
aggagccatttattgaaactcgccaggatggtgtctctcgaagattcatccccccagccaggatgatgtctacagaaagtgctaatagcttcactctgatcggggaggcatctgatggtggcaccatggagaacctcagccggagactcaaggtcactggagacctgtttgacatcatgtcgggccagaccgatgtggatcacccgctgtgtgaggaatgcacagacactcttttagaccagctggacactcagctcaatgtcactgagaatgaatgtcagaactacaaacgctgtttggagatcctagagcagatgaatgaggatgacagtgagcagctgcagagggagctgaaggagctggccttggaggaggagaggctgatccaggagctggaagatgtggaaaagaaccgcaaggtggtggcagagaacctggagaaggtccaggctgaggcggagagattggaccaggaggaagctcagtaccagcgggagtatagtgagtttaaaaggcagcagctggagttggatgacgaactcaagagtgtggagaaccaggtgcgctacgcccagatccagctggacaagctcaagaaaaccaatgtcttcaatgccacttccacatctggcacagcggacagttggcacaatcaataatttccgactgggtccgttgccgagggttcctgtggacgtgggatgtaatccatgctgcctggggccagaaggtgctgctgtccatgctttgggcaataatggtcggagtttccaagtccgaatgtccctatggaaaatctattggggtctggccaacaactaggagtgcgacagacggggggcgggccggcacatgccgggatctggagggcagcaaagaggacaaaacagttcccaaggaaccaccg

SEQ ID NO: 502883 - DNA, 484 bp, Homo sapiens
  misc_feature (359)..(359): n is a, c, g, or t
gcgtttcacaaacagctttgaacaagtgaaactatgagttaccaaacagctattatcctacttatatgcatctacagtgtctggaacaggatgtaacaaataacataactgtagacgcatcaccgagacatccatttacttaaccacagaagtggatcttgctacatagttctcctcaatgtcttcagttctttcagatgctccggggcttacgaatgtctcattctttcaaagatcattctgaaccatttgtgttgcgagagatatctgttgctttttgcctatcagggttgttctatgacatgctgttgcttcatatcatttgtccccttgtgcaaacagtcgatgccaagagcagngttcatctccttcacctgtctggctcggacttcggtcatagtctggatgggattcatgccactgttttcagagaggggcatggggatgagctccagtgcgtcggcgaacgcactcatggcatact

SEQ ID NO: 502884 - DNA, 956 bp, Homo sapiens
ggggctagcggcaacagcggggcctgatgtgtagtatggtagactgctctctccagatgctgaggtgcctgtatcatatggcacaggccagtgctgaaccgtaggtaggagtaggctgtgccttactgaagcagtatctattcacaatgcaagttgcagtcgtcccgaattccagtcactatttcacagaaggactgcgagagtctgacagacattattggtcaacagagaatcacgaattaagaatagcaggaggagcagtgcagggatttattacactgggacgtacatgcctcaggcatatacgattattgccagcagctgctaacccctactcagcatgacgcgagatgtgaccacgtcggctggcgacttcgcgctgaataaacaacagacgggcagactacgcacggcacacaagttactagccaggccttccatgcacggaacaatatttcgacgattaactaccactacggattggcatgtcaccactgacttggaagacatagcctgcacggtagaaacttaaccaactggactggcagcaacagcatgcggcacggccagagattctcacctataactttctaatgttgtcaggtcatagatggcacctcagaattgacctactttacatgggctatactgccggaatttcacgacccgctaacgaacagctcacagatcggatgggacccttgctaaaccagcagaatacggcaggaattatcctacacattgaagcaatactttcacggtttacttggcgagaactggtcgaccacaagcttgtggatccattgtatcgtgagtcgcttgtgggagctcatttgtcagcaaaatggctatacgcgcttgtgcgggcatcacatcgagcacgcagggatttgtgtgcactactgcggactagcatcttgttatgggaacctctgagtagattcgtgtggcgccct

SEQ ID NO: 502885 - DNA, 273 bp, Homo sapiens
aaaaaaaaaaaccgaaaaaaattttccttttaacccgggggccacctttttggcctcccccccccgggggggggccccaattttttgggtggggttttttttttaaagggggggcccaccccggggggtggggttttttgtttttttttttccggtttgggtttgggccccttttttttttttggcccggggttggggcggggcccaattttggggggggttttttttttttaggggggtccccttttggcccctttacccatttccccccca

SEQ ID NO: 502886 - DNA, 436 bp, Homo sapiens
tatcaaagaatatcatttacatgggaaggaactgtcactaccagaccagccctacgagaaatgctaaaaggagttctaaatattgaaaccaaagctgatatgcaccaaaacagaacctcttgagagcataaaacagagcctataaaacaataacacaatagaaaaaaaccaagcatctaggtaacaattaacatgataaatggaacagcacctcacatctcagtattaatgttgaacataaatggcctaaatgctccacttaaaagatacagatgggcagaatggcagaatacgaaccaaatatctgctgtctttaagagactcacctaacgtataaggattcatataaactcaaagtaaaggggtggaaaaagatattccacacaaatggaaacaaaagcaaacaagaatagctattcttatatctgataagaca

SEQ ID NO: 502887 - DNA, 229 bp, Homo sapiens
gtctactactcgcacggtactcgactactcgactactcggactactcgactactcgactactcggactactcgactactcggactactcgactactcgactactcgactactcgactaacgtggaaggtaaagaaagagtatgaagtacaacacaggaggagcatgtggttgactaagctaggaggggcagatgtcagatcgatacagttgaaactacgtcatcatata

SEQ ID NO: 502888 - DNA, 342 bp, Homo sapiens
ccctgaccccccctgaaatttttggccagtcctcttttccgcagctgcagagaggagggagactattaaagggccgtccttattacctgttttgtagatggggtttgcaaccgcccctaaactggaaatggggtaggaccccccttgatgcccgtgggccctttttaaaggcccaaggcccagaactcctggccagggctgcaaggctttgcagcccatgcagaaaatggggcaggtcctttgggaacccccccccccccaccccctccttcctctttttttttccccccttgtcttgctaaaaatagacttgggaattaaaatgttgattgaagtttggga

SEQ ID NO: 502889 - DNA, 349 bp, Homo sapiens
gggggggggtttggttggtttgtttccgcggccccaatccccccgcatttcctttggggagggcctcctcccccccctcttttttccttccttccggttttcctcactattaggggttctttccccctcttgggggccgcgcggttgggggccaaggtgaatgggcttgtccctcaccccgccgttagtttcccgggccgattgggcccgcctaattggttttcttttagtttgctacccggggggggccgcccctttttttcccggccggggggggggggggttttggtttgtggcctattggtcctttggaggaataacccaggcaccaaactttttttttggttta

SEQ ID NO: 502890 - DNA, 411 bp, Homo sapiens
  misc_feature (43)..(43): n is a, c, g, or t
tggctattacccaactatttccttgggttgacttttaaacttngtaatacttccatgcataatactgtgataatgtccagctgtagcttaactctagtcagcatttcactgcaacagagaaaacacatctctggtcttaatcagagatgcacaattcttaaacatttatttagattttaattttgacatattttaatttttttaaaaaaaatcacaaaacaaacattaagtaaggatctgtgatattctgacacagtctatgacagggtggataaaacacattttaattattctagttagttaagctactccaggacttactgcaacaagtgctttgcaggtgacttgatactctaccctgcatcatgtgcagcttcagagtaacttgaagttaactggcaacacacacgc

SEQ ID NO: 502891 - DNA, 916 bp, Homo sapiens
tggttttgagaacagaatgcacaaacacctgtttggcttcagtgcctgggacatggtggtgctcttcccaggccagcggccaggccactcagggtggaagacagtaggtcccttaacccctgggctgtggtggtgcttgattggtggtacgggccttttcttacatataggtttagaagatagagtcatcagaagaataaaaccagtgtctaggtaaaagaaatttttaaatatataatatgaatatcttcttatttataccagtacagtttcaaaatgtaattttttttttttgggggaggaagaggtcttagaagggcaaaattgcctagggtaacagagtcaaaatacaaccaggttaagccaggggtgcgggggccaattgcggggggtcccagcacttgggaggccgaggcgctgcaactcgctggacgcctcaggagttcgagaccacgccggggccaaggtgaccgagaccccatctctacggcgacttaccaaaatacgccggatgtcgctggtgcatgcatgaagtacaaagacaacaccaagaaggctagagcgcggccgaaggattggcttagcaacccctgaaaaaggcgcacgtcgcaggaaacctgtgacttcggcgccgtatgactcccgggagtggtcgacagagaaacagaccctgtctcaaaacaacaagatgtcgctgggccaggcggacaacggcctggggcatcaacccatggagggttgagcggggagacatggcaaggccggaaatggcaaccagtggaccacgggacaccgcctacaaaatcacacatcgtggctgggggaccagataccggctcgagggaagcgaatctgaccaagggcgtggcaccatcgggtccaccgcagcaacgaagcgcctaaaaaaacgcgggcc

SEQ ID NO: 502892 - DNA, 592 bp, Homo sapiens
  misc_feature (17)..(17): n is a, c, g, or t
  misc_feature (69)..(69): n is a, c, g, or t
  misc_feature (108)..(110): n is a, c, g, or t
  misc_feature (112)..(112): n is a, c, g, or t
  misc_feature (128)..(128): n is a, c, g, or t
  misc_feature (134)..(134): n is a, c, g, or t
  misc_feature (140)..(140): n is a, c, g, or t
  misc_feature (147)..(147): n is a, c, g, or t
  misc_feature (154)..(154): n is a, c, g, or t
  misc_feature (229)..(229): n is a, c, g, or t
  misc_feature (241)..(241): n is a, c, g, or t
  misc_feature (299)..(299): n is a, c, g, or t
  misc_feature (376)..(376): n is a, c, g, or t
  misc_feature (440)..(440): n is a, c, g, or t
  misc_feature (447)..(447): n is a, c, g, or t
  misc_feature (569)..(569): n is a, c, g, or t
taattgaaaggaaaaantgttggtaagggatcgtttgataaaatcttaatgagcagcattaaggttttntttattaaaaaaaaaggaattaagggaaaaagaatgaannnanaagacataggagaagnaaaggnaaaagngattaanaaaaaanaaattaataatggaattaaggttgatggaagcctcctcataactctggcctccagaaaggaaggtgatccaagtnaaagcggggggnactgtgcggggcaggctgtgacggtcgccatggcaatctcctcatgagaaaacttctnagtgcaagaatggcctggggtgaaatgttgggcttcagcaaggtgccttccaggtagatgtggtggtaactaagagnattgtagacagcagccagcaccttctcggtcacatactggcagcgcttcaagtcatggtccccntcagggnggatctcaggctccacgatgggcacaatgccattctgctggcagatactggcataacgggcgagaacattggcattttccatgatggcgagggctgagggggtgtgttccccaatcttccanacacaacgccacttgggaagtca

SEQ ID NO: 502893 - DNA, 772 bp, Homo sapiens
gctgtactctacagcatcaagatggtggtgtgtcgtggcgaatgagcattctcagacgtctccactagccttcaggtactcctcgcgtgtcccgaggtatatactatagacgcgacaaatatctcactaggggtctatctgctgtagctagaacgaggaacccatattaactatgggaatcacaggggagtgtggtaggagtatgctagagttatagcgtcgcgccgacattaccagaggtactagtacactgacgtcatgagaggctacattcagagttctcagaagttatgaatgatatctgggctagtgatcaagatcagaagtgccgtctcgttatctcatcaaatgccaggctgttttaattgcagggtgcatgatatctaactatgtgtagccgcttgctaagacccttcgaaggaagtaacacgagcgtgatcacagagaagcacagaggaagtagattgaggaaacttgaagaggtccacaaagcctattgtggctgccatcaatggatcctgcctgggaggaggacttgaggtatgccatttcattgccgattatagaatagcaacagaagactagaaaagctagtattaggtcccctgaagtgttagctgggggccttagcaggagcgaggaggcactctaaggttggcccaaaatggtgggtgtgcctgctgcgtttggacatgatgctgactggtacgaagcattcgtgcagacagggcaaagaagaatgggactggttgaccaagtggtggaacccctt

SEQ ID NO: 502894 - DNA, 337 bp, Homo sapiens
tattggcaggtggaaatcaggaagatcacaaatcagagggtacggataaatggaaacgatcactaattggactcgccaaaagacagactgtcgccttcaggaaaataaaaaaactttttttttttttttttaaaaattcacagcaacccaagcaaagtccctcactgattaggtttcaaaacccttcaggcaaaatcccatcattctcgcactaagtgacagggacgcgggtggtgaaggagtattgggagtggtggcaaaaaatggcttcggcattcccagctggagtaggtctaatctcctaagcggatgctcagaacccagggtcgggatgcag

SEQ ID NO: 502895 - DNA, 269 bp, Homo sapiens
  misc_feature (15)..(15): n is a, c, g, or t
acgctctctctgtgnggggaccgctctacgctctctcggtgggggggctgcccatgtcttgatgcctcatgaatcaacggtggagcacacacacgtagatatcaatgagatggagtctcctctttgccacccggaaaccgcacatcaggtggatttcaaacaacactgcactacacagcggcaccagcgtgacacggtcaattacgtgagattacaacctcccaaccttcttcccactgggccccacgagagagagcgtcgggtaccga

SEQ ID NO: 502896 - DNA, 385 bp, Homo sapiens
actttttaaaaaagctgtcaaatatggtgttaccctactaataattattataaatacatttaaaaacatctattacctcaagtcattttgcctttaaaaatatcaaatataactcttatagaaatttacataaaagaatgcttcttaattttggattatgatgttccctcctcaattttgtatttttaaaaattacatgttaaaaaaaaaattcacaacattatataagtctttaaaattataattctgccccctcacctcttaccccattactattctccatatttaatctattaacaatttcttatgtaattttcaataaatttgtattcttatataatcaaatatttaatctttattttttaaataaattttttcatattat

SEQ ID NO: 502897 - DNA, 2140 bp, Homo sapiens
  misc_feature (15)..(15): n is a, c, g, or t
  misc_feature (30)..(30): n is a, c, g, or t
  misc_feature (41)..(41): n is a, c, g, or t
  misc_feature (615)..(615): n is a, c, g, or t
  misc_feature (720)..(720): n is a, c, g, or t
cattcttgggaaaanggaggcaacacattngtcatataccngggatgtggtaaaagtctatgggaagacctcacatctgagagcttatctgcgttggcattccggagaacgcccttttgtttgtaactggatgtactgtggtaaaagatttactcgaagtgatgaattacagaggcacagaagaacacatacaggtgagaagaaatttgtttgtccagaatgttcaaaacgctttatgagaagtgaccaccttgccaaacatattaaaacacaccagaataaaaaaggtattcactctagcagtacagtgctggcatctgtggaagctgcgcgagatgatactttgattactgcaggaggaacaacgcttatccttgcaaatattcaacaaggttctgtttcagggataggaactgttaatacttccgccaccagcaatcaagatatccttaccaacactgaaatacctttacagcttgtcacagtttctggaaatgagacaatggagtaaatattacacaaatacttattcattgtggttatttttatacagtagtgagaagaatattgttcctaagttcttagatatctttttattgatgtgcaaaaattttnggattgacagtaacttggttatacatgacactgaaatgccttacttgtatgatattccatagtatattaaaaatggtaaaattgcatgggtttgtaggtactttnggaatctagaagaaatgaaattttaccaagttatataaagagaaaattgaatttaacaatgcgaatggtagtctaaccaaatgcatcaatcctgtgtggtttagtgtaaaaatgagaacatgttggtatttatctattgtaagataaaaaagctggtgggtgaaagaaatcatgttatgataaaaaattttgtaattttcttgatgactggaatttttattatgcataactgacaaatcaagtttccaagcaaatgttacatagtgtaggctttacttagcttatcaatttgtcattttgaagctaattattttaattaggttaactatgtacaatattttaagcattactcttgtaagattttgaaaactacattttaacatggaactctagggatagtcaccttttaaatcctgttgaaaagccatgtttaagatttaatttgccaaaataatgtcttgttaatattctttcaataacgaagttgggcaatataaccaatgtttaaaaaagtttaaaatgtataagttgaggcatttgggtggtaagagaatgttatagtgaattatcccttttcttgactattggaggaccaaaaaaataaggtgtattgcgtcttagcagtgatttttatccaatcttgtttccaaaaaccatgtctcccagggccttaaaagccatcatgtaaattaccagtaaagtgtaacatatgcaaacataacaaaatcacttccatagtgacgatactccaaccatatggatattagtcatagaagaactagaggttttatgatatttttttaagtcttttttttttttgtctaggtagtcagtctgcacttaaatatcaatcattttccttttttgcttcttcccttaaaatttatatgtatccagtacatttaattgagaagcgtatgttttttattatgctgtattttctttttattttttaattattgtttatattttcaattcaaaaatgtacaaaataaagttacattgctggtcttgtaagagctatacagttttcctaaatgtatacctgtaactgcagcagttcacctatttcaaaaatttggaattctgttcatttgttattcttaagaccacctcaaatttaaaggctaccttattgtacgtttaaagtgtattataacagtgtggtagttaataaaacactatttttttttcttttgagtttgttgtattcctatgcataaaaaatattgcagtggtatggggtaagaattggtggtttatttttcttcaacttggctttttatttttagattcttgattttagacactgaattgtaaacaggcatttatttgaagaagagatatatagagacactggtcatttactaattttttacctagagtaaataagaatgagcttattaaataaaatttttga

SEQ ID NO: 502898 - DNA, 83 bp, Homo sapiens
ccctttcccctcccgggtctctcccctacgacccgggtgggaccccagtaggtccgatcgccctctagacgttgacctttaat

SEQ ID NO: 502899 - DNA, 121 bp, Homo sapiens
gatcggtggctccatcctggtctcactgtccacttcagcagatgtgattagcaagcaggagtacgacgagtcgggccccttcattgttcacgcaaattcttcttaacggacttagcagatt

SEQ ID NO: 502900 - DNA, 2247 bp, Homo sapiens
  misc_feature (15)..(15): n is a, c, g, or t
  misc_feature (30)..(30): n is a, c, g, or t
  misc_feature (41)..(41): n is a, c, g, or t
  misc_feature (615)..(615): n is a, c, g, or t
  misc_feature (720)..(720): n is a, c, g, or t
  misc_feature (2247)..(2247): n is a, c, g, or t
cattcttgggaaaanggaggcaacacattngtcatataccngggatgtggtaaaagtctatgggaagacctcacatctgagagcttatctgcgttggcattccggagaacgcccttttgtttgtaactggatgtactgtggtaaaagatttactcgaagtgatgaattacagaggcacagaagaacacatacaggtgagaagaaatttgtttgtccagaatgttcaaaacgctttatgagaagtgaccaccttgccaaacatattaaaacacaccagaataaaaaaggtattcactctagcagtacagtgctggcatctgtggaagctgcgcgagatgatactttgattactgcaggaggaacaacgcttatccttgcaaatattcaacaaggttctgtttcagggataggaactgttaatacttccgccaccagcaatcaagatatccttaccaacactgaaatacctttacagcttgtcacagtttctggaaatgagacaatggagtaaatattacacaaatacttattcattgtggttatttttatacagtagtgagaagaatattgttcctaagttcttagatatctttttattgatgtgcaaaaattttnggattgacagtaacttggttatacatgacactgaaatgccttacttgtatgatattccatagtatattaaaaatggtaaaattgcatgggtttgtaggtactttnggaatctagaagaaatgaaattttaccaagttatataaagagaaaattgaatttaacaatgcgaatggtagtctaaccaaatgcatcaatcctgtgtggtttagtgtaaaaatgagaacatgttggtatttatctattgtaagataaaaaagctggtgggtgaaagaaatcatgttatgataaaaaattttgtaattttcttgatgactggaatttttattatgcataactgacaaatcaagtttccaagcaaatgttacatagtgtaggctttacttagcttatcaatttgtcattttgaagctaattattttaattaggttaactatgtacaatattttaagcattactcttgtaagattttgaaaactacattttaacatggaactctagggatagtcaccttttaaatcctgttgaaaagccatgtttaagatttaatttgccaaaataatgtcttgttaatattctttcaataacgaagttgggcaatataaccaatgtttaaaaaagtttaaaatgtataagttgaggcatttgggtggtaagagaatgttatagtgaattatcccttttcttgactattggaggaccaaaaaaataaggtgtattgcgtcttagcagtgatttttatccaatcttgtttccaaaaaccatgtctcccagggccttaaaagccatcatgtaaattaccagtaaagtgtaacatatgcaaacataacaaaatcacttccatagtgacgatactccaaccatatggatattagtcatagaagaactagaggttttatgatatttttttaagtcttttttttttttgtctaggtagtcagtctgcacttaaatatcaatcattttccttttttgcttcttcccttaaaatttatatgtatccagtacatttaattgagaagcgtatgttttttattatgctgtattttctttttattttttaattattgtttatattttcaattcaaaaatgtacaaaataaagttacattgctggtcttgtaagagctatacagttttcctaaatgtatacctgtaactgcagcagttcacctatttcaaaaatttggaattctgttcatttgttattcttaagaccacctcaaatttaaaggctaccttattgtacgtttaaagtgtattataacagtgtggtagttaataaaacactattttttttaaaaaaaaaaaaaaaaaaaaaaaaaaaaaaaaaaaaaaaaaaaaggtggggggggcccggggcccaggaaaaggttttaagacacacgggggggagcggcggggcccacaatggaaatgagagacagagggcaaaacaggggtcccacaaggaaaaccgggacaaaaaagaggggcgggagatctccacaaaaataaaaaagcggcgggggggaaaacaccagcggggtttgggacaaaaatccaaaaggaggcatggggacaacaaagagggggcaacaacaacaggggagtccacaaggagggccagaataaaaaaacccgcggggggtgaan

SEQ ID NO: 502901 - DNA, 131 bp, Homo sapiens
gccccagcagaacctcatggtgtcccacccccttcggcagcgcagtgtgtccctggacagccagatgggctacctcccggcaccaggtgccagccggagctgtaaatagagcgctgcgcttttgtgctgga

SEQ ID NO: 502902 - DNA, 694 bp, Homo sapiens
  misc_feature (340)..(340): n is a, c, g, or t
cggggtatttgggaatttcctcttaaggaaggggtaaaactttgttaccggaaaagtgaaaggttggaaataaccccataccacaagggtcaagtgcgtccataacaacaaggtctctagtacatcggatatttaataggtacctttacataacccttcttggcccggggacagttgaaggaaaatctctcaagcaatttgaggcattagaacgtgggccagtcgtcgcggactgttcccccataaggctaggtgacccagcgcttttgtccatatgtcagtggcaaggcccaatatcatgttgtagcatagtgtccaatgcggggcgatagtgtaaacncagcagcatgcgccctgaggcaggttccagtatgagagcattcagagagcctccacatgtacgtggtaggattgagaccgagcgtgaactttcagtcaacaacagggccgtggctatctataggtctaggaaggggtctcacgtcgtcgtcagatcaatcccaaagtagttactgtctgaacatcgcaaatggtattattcgtaggcacaccatattcctgggggactcaggaccctagttttctcgaggtaaaaatcggagataagggccaaatcctcatcggtctgaagggtcactggaacatagtcacaggcttccctctttacggcaaacataagacgcggtgagcccct

SEQ ID NO: 502903 - DNA, 1698 bp, Homo sapiens
  misc_feature (1320)..(1320): n is a, c, g, or t
  misc_feature (1553)..(1553): n is a, c, g, or t
ggtttccgccccgagtgtgtgccacaaggtcccccgtgttcttttgatctcgtcgttgatgtgacccttgtgtgagaggttcccacaagttgttgtgggagccccgaaggagtgctgtttgcttcatcgagtgcggccccccgtcatgtttctttcgtgttggagttgactctcggacaccagattgccacatggtgggggctgtccctccgcccagaaggcgttcaccagttggtgatgtgtggccccgccccgcgattgtgttcgtcaccctcgggggcctgtgccagaacccttgggtgtggcaccccccggaatgtttgttcgtaacgctgcgctttctttcctactaactggtgaatgggatctgcttcgggccgtgccgtgttgcaacgttgggtagtggagaatgggggtcttcccccgccggctgtaagtgtctgggtagtaggtgtttatatataatggggccccgggtatgccaccaaggcgccccccacaggagtgttgtggccccacggccttccttttcggggcgttttgtgacgccccccgttgtggggacaggggttattagaatattggtcgcctctccccccagacaagttgctgttccacaagggggaagccgccgttgcttggccgccactaacaggatggtttccacagttggcgtccacaaggagcagactattctctcccggggggggccaccccacagtgttatattggagccggaggaggccttcgtggtcttctcgccgaagagagatgactcctcgagtagagatgggagtgctcctaattggtagcgcaccacggttattcctccgcggtgttctctcaccgcgcacagcaattttgtgacagcgagagaggggcccccccccacacacgctggggggttcacacccacacacccacgcttttctcgtcctcgtagaggtttttgttgagagtcttcgtccttggagtagagttcgagaccgctcttttcacccacgagagtctgtagagaacacgcttaccaccgggtgcccacgctgctcactctgcgagagattttctgcacacctcgtgagactctcccacttcgagagaaaattttctcgtaagagggccccacacgctttgggagagaaccacgcgcctcgaagggaagtgtttgtgagagggcccgcgctatacgcccctcatcacacgattgggagaccacgcgctctctcaccgcgcgaattccctcggctgcaccctctgagattccacgagagtctggtcaccacgacccccgggcacagagagggaccacagccccacagngcccacgcgaagtatttgagaggcccctctgctttgaaccactctccacaggtcatcacacagctctggagaggctctgaagattccgccacacctataccccccgcctctgtctctgaaagatggccgaggacctttatattcttgtgtgaatgtccttggaccacgcacgcacaactccacatgtccaaccacatcccacaagagccaccccacccgcccgcgaatatagntggaatggcccaaatgtgtgttctgaagacccactgaccacccaagattttgagcgccttaagccccccagaacccgggtaccccttggggacccggagagccctcattaaaagttccgagttccaaacaaaaataaaaaaaaaa

SEQ ID NO: 502904 - DNA, 388 bp, Homo sapiens
aaggttgggaatagaactttccacttctattctagtttctatttaaaatacactaaaatttattcatgggaatggttacttttatttctgtaccaaagacgatacaacacagcccacttagaagtatttctgtgtgcatgtgtatgtaaatacacacaaacatgctctgcagttggctaataaaacacagtaatcaaagcctatagtggatattcagtgtaaaggtaagacttgctgaattttgaggcccattggcgaagggcagggtcagtgtgagacaagcatgtggtcacaactagtgtgcgttttcttttgttgggagtcaactactgttaggtaaaattcctggcagcgtgtagcaaggtttttggatcccacctgtcagaaa

SEQ ID NO: 502905 - DNA, 1033 bp, Homo sapiens
  misc_feature (321)..(321): n is a, c, g, or t
  misc_feature (337)..(337): n is a, c, g, or t
  misc_feature (343)..(343): n is a, c, g, or t
  misc_feature (365)..(365): n is a, c, g, or t
  misc_feature (385)..(386): n is a, c, g, or t
  misc_feature (424)..(425): n is a, c, g, or t
  misc_feature (427)..(427): n is a, c, g, or t
cttccgcaacttacacgtggacgaccagatggctgtcattcagtactcctggatggggctcatggtgtttgccatgggctggcgatccttcaccaatgtcaactccaggatgctctacttcgcccctgatctggttttcaatgagtaccgcatgcacaagtcccggatgtacagccagtgtgtccgaatgaggcacctctctcaagagtttggatggctccaaatcaccccccaggaattcctgtgcatgaaagcactgctactcttcagcattattccagtggatgggctgaaaatcaaaaattctttgatgaacttcgnatgaactacacaaggnactcgntcgtatcattgcatgcaaaagnaaaaatcccacatcctgctnnagacggttctaccagctcaccaagctcctggactccgnncngcctattgcgagagagctgcatcagttcacttttgacctgctaatcaagtcacacatggtgagcgtggactttccggaaatgatggcagagatcatctctgtgcaagtgcccaagatcctttctgggaaagtcaagcccatctatttccacacccagtgaagcattggaaaccctatttccccaccccagctcatgccccctttcagatgtcttctgcctgttataactctgcactactcctctgcagtgccttggggaatttcctctattgatgtacagtctgtcatgaacatgttcctgaattctatttgctgggctttttttttctctttctctcctttctttttcttcttccctccctatctaaccctcccatggcaccttcagactttgcttcccattgtggctcctatctgtgttttgaatggtgttgtatgcctttaaatctgtgatgatcctcatatggcccagtgtcaagttgtgcttgtttacagcactactctgtgccagccacacaaacgtttacttatcttatgccacgggaagtttagagagctaagattatctggggaaatcaaaacaaaaacaagcaaacaaaaaaaaaa

SEQ ID NO: 502906 - DNA, 537 bp, Homo sapiens
aggcaggccaatcacctgaggtcacaagttcaagaccagcctggcaaacatggtgaaacgccgtctctactgaaaatacaaaaattagccaggcttggtggcacatgcctgtagtcccagctactggggaggctgaggcaggagaatcgcttgaaccagagaggtggaggtgtgaacgagattgtgccattgttcactacagcctggtcaacagagcaagactctgtctcaaaacaaacaaaaatggtcaatgaccaaacattctaacaagaaatgccaaaaaaaaacgcttcgtgagctatcaagccttcaaactattataacggaagcaaaatagtttcctaaaatgcaatatggtaggtgacaacttcctcattgaactattacctgaataagtactggaacaccaaggacaagcgcgcaccggacgatcgaccgcgcggcactacccagaggcgggcacactgggcacggagcgagcaccagcggcacgacggcaaaagccaccggccgcacgcggaaacaacgcgaccccac

SEQ ID NO: 502907 - DNA, 909 bp, Homo sapiens
agcattcaagtggtgatttgggtactattaaaggcattcagttttaaaagggaaacagaacataaaagttcagaaaatttgtggcctgactatgcaatagaaaagaaaaacccattctgggggggagaaattcaagccagctgcagaagtttgcacaagtagcaaggagcctaatgttaattccctagaccatggggaaaatgtctccaggccacatcagagacctttacagcagcccctcccatcacgggcttggaggcccaggagaaaaaagtggtttcatgggctgggaccaggtcactgtgctgtgtgcagcttagggacttggtgccctgtgtcccagctgctccaaccatggctcaaagggccaacatccagcttgggctgtggcttcagaaggtggaagccccaagctttgacagcttccacatggtgttgagcctgtgggtacacagaagtcagaattgaggttgggaacctccacctagatttcagaagatgtatggaaatgcctggatggccaaggtgaaagtttgctgcagggacggggcctcatggagaaactctggtagggcagtgtgggaagcacaatgtggggtctgagcctccacacagagtcctagtgggcatgctagtggagcgtgagaaagaggtcaccatcctccagatttccagaatgctagatcacaaaaggtgaacgtgcacctggaaaggttgcagaactcactacagcatgaaagcgggggagagaaactgacctgacagcacagggtgggcggcaaacaggaacaccctaataaaaaccgggaaaatggagaaaagaaactggggaaagcgggaatggtatggcgcactggggagacccgagggggaaaacaggcacgcgagaacaggaaagacagagggcaa

SEQ ID NO: 502908 - DNA, 449 bp, Homo sapiens
  misc_feature (27)..(27): n is a, c, g, or t
ctcgggtgccgtggaaatgatttccangagagtccaaccttgcgttgggcggaacgcccgagatgcccagccccaacgacacaacccacatcgatatcgccggccagcaggtgcccgtcgtcaagggtggcttgtacgaccgctttcgctccaacccgccgttgtcggtggttgcagcagaattacccggggttgatttaagctggttcaaagggttgcaaaagcacaaggtcgacatcggttttgaatcctactcgcccaatttttactaccagaacagtcgggtaacagcagtctatacagccgacatcgataagcttcgggcgttgatgccaccgcaggtactggccgccgtgcagcccttgcaagtctggccgggtcgcgggctgatcgcgtttactgcgtacacctatgagcatgactctctggatcattcacggatcctctat

SEQ ID NO: 502909 - DNA, 1027 bp, Homo sapiens
  misc_feature (12)..(12): n is a, c, g, or t
  misc_feature (38)..(38): n is a, c, g, or t
  misc_feature (56)..(56): n is a, c, g, or t
gatggtggggtnattctctgcctcctcacccacagagnaagagcaggagcaggggnagatcggtgcctgcagcgacgagggcactgctcaggaagggaaggccgcagccacccctgagagccaggaaccccaggccaagggggcagaggctagtgcagcctcagaagaagaggcagggccccaggctacagagccatccactccctcggggccggagagtggccctacaccagccagcgctgagcagaatgagtagctaggtaggggcaggtgggtgatctctaagctgcaaaaactgtgctgtccttgtgaggtcactgcctggacctggtgccctggctgccttcctgtgcccagaaaggaaggggctattgcctcctcccagccacgttccctttcctcctctccctcctggtggattctcccatcagccatctggttctcctcttaaggccagttgaagatggtcccttacagcttcccaagttaggttagtgatgtgaaatgctcctgtccctggccctacctccttccctgtccccacccctgcataaggcagttgttggttttcttccccaattcttttccaagtaggttttgtttaccctactccccaaatccctgagccagaagtggggtgcttatactcccaaaccttgagtgtccagccttcccctgttgtttttagtctcttgtgctgtgcctagtggcacctgggctggggaggacactgccccgtctaggtttttataaatgtcttactcaagttcaaacctccagcctgtgaatcaactgtgtctcttttttgacttggtaagcaagtattaggctttggggtggggggaggtctgtaatgtgaaacaacttcttgtctttttttctcccactgttgtaaataacttttaatggccaaaccccagatttgtactttttttttttttctaactgctaaaaccattctcttccacctggttttactgtaacatttggaaaaggaataaatgtcgtccctttaaaaaaaataaaa

SEQ ID NO: 502910 - DNA, 135 bp, Homo sapiens
acgtccaagagcttggggctgcagggagctgtgatcacattacgtgctctccatccggggcacatgagcaagaccctatccaaaaaaaacaaaacccctatgattgagacaccgtccttacctcgtacggagggt

SEQ ID NO: 502911 - DNA, 859 bp, Homo sapiens
  misc_feature (162)..(162): n is a, c, g, or t
gctactccggcataaatggggttcggtatgcttagatgctgatgcgtgagctcaaccctagtgtcgactataatctcctcactgtgccttgtgcagcacagttcaagacgtgccagtctcggctcgcctgccaagggaacttcaggcgcaagactgttgtgngccttgacgagatcatagtcacaaacagatacgacagctcatttgctttgctctctaggtagctatgtcacagagagagtagggcacgcaaggagttatctgcgataaaagtacttagtagattaagcgaacctcctatggaaatagcataggtcctcgtagaattaagactgtcttaggatcagtgaccaccacatgtggactttaaaaggagatcttatttcggtagaaatttcttgattggaaagcaagtgactggaattaacacttattcaatttgaaatggttccaaaaggtaggaaccagaaatgtattgacgagagttgcgctagtgtattcgattttggaatcttgacacattgagaccataaacattgtgagtcaaatctttttcttctaggggaattcttttttttagtatcggaggggaaacttggttaggcgtgggagttatttttgggcccggacattgggttttaatctatgggtgaatctattttaccacccataaattttacggagttggaaacagttgtttttcaattttcttaattcaaaagcggcaatatttaggggttaaaaacggttaagttgatcattttttaggtaatatactctaattattaaacattgggattaaacccattttttgactggttggggcgttctattcttgaattatggcgccccaaagaag

SEQ ID NO: 502912 - DNA, 409 bp, Homo sapiens
aattcggcacgagggaagggctcaaagtgctagtgggctaccaggattcttgggcatatatctgtgtctctctaccaaattgtcatttattacggggactacagatggagttgaggaggtgtagagagaaaaagaaacatacaaacaaaagatccaaagagagagggagaaagagagagagaacactttgtgtttccaacagaactttgtaagataagctgcattatttccactatatcgtttctgttgagacagctacaaggtttgccaaacttcaaagggaggggatattacttgacaggaaaattgtcaaagtatttatagtcatgtcacaaaaatcacaaccaatataaccttttgaagaagacagtagaagttgttaagttattgtaagattcataaaatttta

SEQ ID NO: 502913 - DNA, 918 bp, Homo sapiens
  misc_feature (51)..(51): n is a, c, g, or t
  misc_feature (66)..(66): n is a, c, g, or t
  misc_feature (78)..(78): n is a, c, g, or t
  misc_feature (128)..(128): n is a, c, g, or t
  misc_feature (136)..(136): n is a, c, g, or t
ccaccccttatatccattaaccccattccaatttttcatattctattgcancctcataataatatncatttccccatnctacatatccatccactccctcttttccttatatttccctacaccatccntctcttancataattattatctatttatttgcatttttttatctctaagctgcaaaaactgtgctgtccttgtgaggtcactgcctggacctggtgccctggctgccttcctgtgcccagaaaggaaggggctattgcctcctcccagccacgttccctttcctcctctccctcctggtggattctcccatcagccatctggttctcctcttaaggccagttgaagatggtcccttacagcttcccaagttaggttagtgatgtgaaatgctcctgtccctggccctacctccttccctgtccccacccctgcataaggcagttgttggttttcttccccaattcttttccaagtaggttttgtttaccctactccccaaatccctgagccagaagtggggtgcttatactcccaaaccttgagtgtccagccttcccctgttgtttttagtctcttgtgctgtgcctagtggcacctgggctggggaggacactgccccgtctaggtttttataaatgtcttactcaagttcaaacctccagcctgtgaatcaactgtgtctcttttttgacttggtaagcaagtattaggctttggggtggggggaggtctgtaatgtgaaacaacttcttgtctttttttctcccactgttgtaaataacttttaatggccaaaccccagatttgtactttttttttttttctaactgctaaaaccattctcttccacctggttttactgtaacatttggaaaaggaataaatgtcgtccctttaaaaaaaataaaa

SEQ ID NO: 502914 - DNA, 86 bp, Homo sapiens
  misc_feature (58)..(58): n is a, c, g, or t
agagaagggatactcccgcccaagggccaccgaggccgagagaagcccgggccagggnttttcttcgcgtatgtggggaatcaagg

SEQ ID NO: 502915 - DNA, 835 bp, Homo sapiens
gggttccggcgggtcccccgcggctgtcaggctcaaagactccctgcggtgccctgaccttgaattccttcgggcgaaggagttgggggcccggccctcccttaaggcggacccgcacaccacgttcctcccgttctggttagaagccgccgttcatcttccacgcagcggggctcttccacagaggccagcatttcctccccgagagggagattagtagttcaagagcaaaggagtttcttgcggtccctgcgggcgcttaccgccattcattgggtataaacatatccgacgtgagattacatagtcccgcacgtgtgcgtgtgtatacacgtatcgtttacgcagcatgctgctgtgcatcagctcgtatacatatacatatcgggtgtctttcgtccacgcgcgcgttccttgccgtggtcgcacgcacacgcgtgcccaccatttccgcgtcccaacgctcgtgcggaagctctcccgtaggctcggtggcgccggtacacccccgcgcgggtcctcgagctctcgtttgtacactgtgcagctccgctcttcgtggcccacacacacgcgtggtggtagaaccctgcgtgtgtcatgtatcccacacacgcccctacctctatgccgcgccccttttgtgcagggcagctctcctactagctcgcacgcctcatctcggcaggcacgcaggggcacagagcggtcccagcgttgcaccccagtaggggctccgtctcctcccagaaccccgggtatacagtcctgcattgacacgttcgactcgggcgtctccaagatgttcccccccctctgtcccatcaatgacaca

SEQ ID NO: 502916 - DNA, 184 bp, Homo sapiens
atgtgaggcaagtgtgcgctactcggagcctcctcacggactgacctgcagcagtgtgacagagagacgacctggatccccacatagaagtataccttacagcgtgagaggcccgcaacttgcgtctcaggcctaggtaaccagcctgcagcttcctgtacgtgccagtgtcagccatcaattt

SEQ ID NO: 502917 - DNA, 622 bp, Homo sapiens
  misc_feature (12)..(12): n is a, c, g, or t
  misc_feature (38)..(38): n is a, c, g, or t
  misc_feature (56)..(56): n is a, c, g, or t
gatggtggggtnattctctgcctcctcacccacagagnaagagcaggagcaggggnagatcggtgcctgcagcgacgagggcactgctcaggaagggaaggccgcagccacccctgagagccaggaaccccaggccaagggggcagaggctagtgcagcctcagaagaagaggcagggccccaggctacagagccatccactccctcggggccggagagtggccctacaccagccagcgctgagcagaatgagtagctaggtaggggcaggtgggtgatctctaagctgcaaaaactgtgctgtccttgtgaggtcactgcctggacctggtgccctggctgccttcctgtgcccagaaaggaaggggctattgcctcctcccagccacgttccctttcctcctctccctcctggtggattctcccatcagccatctggttctcctcttaaggccagttgaagatggtcccttacagcttcccaagttaggttagtgatgtgaaatgctcctgtccctggccctacctccttccctgtccccacccctgcataaggcacgcgttgatgtcttctacactctcatcacgctagtgcttcaacagtatcgctctcacagagcga

SEQ ID NO: 502918 - DNA, 260 bp, Homo sapiens
tttatctcacagagctagtagcatgctgctatgcaaagtctacggcccgagtcaaatccggggcatctccacagatgtgtggtagggcacgggctcgagctcttgtgtacgaaagaacaggaatgagaccagctttatttggtagcgccaaggtctcagtatgctcacacctgtaatcccagctttgagaagcggctctggcaccagaagggtctggtagaagaccgtgggcacaggtgcaggacaggattcttttcctt

SEQ ID NO: 502919 - DNA, 190 bp, Homo sapiens
tgttgtgtcgagcatcttcactggtaggactttagctgctcgttgtatttcttggtcaacctctcagcgacctggagggattcgtcgatgctcccgccgcagcttatcctgggacgggttgttggtggaacagtccacagacaagatctcccggcacttgtcatactggtccttcatccgcatacgcccg

SEQ ID NO: 502920 - DNA, 264 bp, Homo sapiens
gaagagcttatcacctttcatgatcacgccctcataatcattttccctttatctgctttcctagtcctgtatgccctttttctaacacttacaacaaaactaactaatactaccatctcaaacggtcagggaattggaaccgtcttacctatcctgtccgccattatcctaggcctatggcctccaatccctacgagatccttacaatacacaggcgagggaaaccgatctctctctataccataaaatatacttgacaccact

SEQ ID NO: 502921 - DNA, 215 bp, Homo sapiens
cttcacgccagcctgggcagcacagtgagattccgtttcaaacaaatctggaaacaacccaaatgtccattaacgagaatgggtgataggctgtgatatatttttacaatggaggttgcggagggaggagaatcgcttgaaccgggtaggtggaggttgcggtgagctgagatcgccccactccatctagcctgggtgacaacaaggccctgaga

SEQ ID NO: 502922 - DNA, 909 bp, Homo sapiens
agaccccttagtgcactggagctagttaatgcagtaaataacaagagcggaataaatgcgagacattctcagagttccagttgggccgtgcttcttccctgcggcagcaatttgcggtatggagtccccgaaaaaaggtttccccaaaggtactattacacggccaattttacctccgtttgggcccccttctattcgtggggatacttccttgcaagcggcgctctcctggtgcctcccccccgggaatcgtaactcggcagctgcttccaaatttctatgggctgaaggttatcagcccgtccctggccatgccaaagccatttcttcggggagaccaaaatggggcagttgccgcttcaccaaggaaccaatgcaggggcggcgtccaccagccaacaagagaccccagaattcgggttgggcaaagtaaatgcatccccccaccgaatcgtctttctagagcaactccgaagtggcctcgatacttccctccaccgcgtctctattaaatcctccacgccaccctccccccctgtggcgagtaacccaacgggcggtgtagtattctctccaggaaaaccgcgctgtcccctgcggcaatccgcgttgcacacccatcaggagctgttcatcgctcgttcctccccccccgatgtatgcgatccgcagcgtgtgaacaaaacaaattacagggttcttcttgcgagcgtggacaaaccacctttgtgtttgctccaataaacggggtcctttgccagcgttaccgtctgtcaaaaagagacatgtggcggatgaaaaaatcttggcgagccaaggcagaataaaaagaacacaacaccggggccggcagagacccacacccactcgggggaagcccccaaaacgggctaaccccccaacaataca

SEQ ID NO: 502923 - DNA, 167 bp, Homo sapiens
cacagccgcccacttctggaaggtccactcccctgtaggtctggtctccacgacgctccgtgtcctgggctcttggtcctccccatcccgctgccatggtcagtgtgatctccgcagggtagaagctcagggtccagcatcctcagggtggagccttccagaagtgg

SEQ ID NO: 502924 - DNA, 107 bp, Homo sapiens
gtctcactagcttaccaacccacttcagctaagccaaaagccacactttaattacattattgctgggtggctcaaaattcctatgtcaacctgttgcctcattcatt

SEQ ID NO: 502925 - DNA, 816 bp, Homo sapiens
agaaggaagagggtccaaaaactgtcctgtctcgtgtcaggctgttggaatgatctcgctgcttgcccttgcagagaacctacgcctggtgtcaacacataggaaagatggcccgtgtttatgtcacgtaaccgctgttgaacttgcgtgtgccgtgcttacgtcaatttgctgcgccactacaatacctcctgttgtacggttatcggggaatacttctgatggcattcgggtcatataaggtaatctacaacttgatagcggtcgagcaagtgcctgtagaagattgacgaatctctagtagtatacgtaatcgtacgttagttttccataagtgttaatttgtgcaatggaatagttgaggttgagttagttttgtggaatgggataattgagggttcaatagtacagacgtatacaaagcctgtatatgtagtcaatatcgtgtacgctgtccctgtatgacctgttattggaaccgtgtatcctgaaatcgttaagatcgaaggtagggttatttgtatttgtttttgtgtgagttggagtctcactctgtcgcccaggctggagtacagtggcgcattctcggctcactgcaagctccgcctcctgggttcacgccatcctcctgcctcaacctcctgagtagctgggactacaggcgcccggccagcacgcctggctaatttttttgtatttttagtagaggcggggtttcactgtgttagccagggtggtctcgatctcctgacctcgtgatccacccaccccctcaaacgaacacccccggggctacaaaaagcgaaaaaaataaca

SEQ ID NO: 502926 - DNA, 307 bp, Homo sapiens
  misc_feature (72)..(72): n is a, c, g, or t
  misc_feature (95)..(95): n is a, c, g, or t
  misc_feature (204)..(204): n is a, c, g, or t
acatgcatgccaccacttaggaaagtataacttttttcaaaatctttgcttttcagatgaaatacctgtctntactaaaaatacaaaaattaggntgggtgcagtggctcatgccggtaattgcagcactttgggatgccagtgcaggcagatcacgaggtcaggagttcaagcccagcctggccaacatagtgaaaccctgtntttactaaaaatacagaaaattagccggggatggtggcgggtgcctgtagtcccagctacttgggaggctgaggcaagagaattgcttgaacccaggacacgc

SEQ ID NO: 502927 - DNA, 619 bp, Homo sapiens
cccattgtcatatagactgggtccccacatggtcctctcattcctcatacataccatgagtgtccactgattcacaaattagttggatcacccgattgtcccctaagtggaccttagaatgaccagccgccagaatggcttggtgttggtgtgccacatgcgttcagtacgatgccaagtaatcgattttcagcgctatcacatcttcagagttcatgctagttatgggcagacatgtcaatcatttgaatgtaacgtccgtgacagatacagaccatcacctcgtgtggccttacgataactgacaacttggtcataggtttcataccttgcaaaatgcacaccatgacgacaaccgtgaatgttagttatatctgtcatatctctcttcattaaagtccattcagtcaacagtatgagcctgacacacatgttgcatctctcccacacgaccttatttggcactgtactgcattatcaaaagtagctcaagtgacagacgaacatctgtatgctgattccctcgagaactaattgcaaatggtgcatcatcggcatgtactcttggcttcttagaagtatgcgattaaatgtaccgaatggcaaatgagaatcacag

SEQ ID NO: 502928 - DNA, 125 bp, Homo sapiens
aaagccaaaccccgactatgcctctacgacaaccagagtagagaagtaattgagacttacctaagtatcttgggtaaaaataatcctgtggacaaagaaaaagaaatatgtctactagcgacaga

SEQ ID NO: 502929 - DNA, 946 bp, Homo sapiens
  misc_feature (137)..(137): n is a, c, g, or t
  misc_feature (139)..(139): n is a, c, g, or t
  misc_feature (144)..(144): n is a, c, g, or t
  misc_feature (146)..(146): n is a, c, g, or t
  misc_feature (154)..(155): n is a, c, g, or t
  misc_feature (194)..(194): n is a, c, g, or t
  misc_feature (208)..(208): n is a, c, g, or t
  misc_feature (217)..(218): n is a, c, g, or t
  misc_feature (222)..(223): n is a, c, g, or t
  misc_feature (252)..(252): n is a, c, g, or t
  misc_feature (254)..(254): n is a, c, g, or t
  misc_feature (280)..(281): n is a, c, g, or t
  misc_feature (288)..(289): n is a, c, g, or t
  misc_feature (334)..(334): n is a, c, g, or t
  misc_feature (348)..(349): n is a, c, g, or t
  misc_feature (356)..(356): n is a, c, g, or t
  misc_feature (368)..(368): n is a, c, g, or t
  misc_feature (370)..(370): n is a, c, g, or t
  misc_feature (455)..(456): n is a, c, g, or t
  misc_feature (477)..(477): n is a, c, g, or t
  misc_feature (485)..(486): n is a, c, g, or t
  misc_feature (528)..(528): n is a, c, g, or t
  misc_feature (540)..(540): n is a, c, g, or t
  misc_feature (549)..(549): n is a, c, g, or t
  misc_feature (645)..(645): n is a, c, g, or t
  misc_feature (672)..(672): n is a, c, g, or t
  misc_feature (690)..(691): n is a, c, g, or t
  misc_feature (708)..(709): n is a, c, g, or t
  misc_feature (718)..(718): n is a, c, g, or t
  misc_feature (720)..(720): n is a, c, g, or t
  misc_feature (739)..(739): n is a, c, g, or t
  misc_feature (759)..(759): n is a, c, g, or t
  misc_feature (774)..(775): n is a, c, g, or t
  misc_feature (777)..(777): n is a, c, g, or t
  misc_feature (788)..(788): n is a, c, g, or t
  misc_feature (818)..(819): n is a, c, g, or t
  misc_feature (821)..(821): n is a, c, g, or t
gggctgcagcagcggctcaaggggctgccgggactgctgtcgagcagctgggcccgccgcctcctctgcctgcttggcctcctgctgctgcttctgtggttttggggggtcctggctgctgctggctgggctgtgcngngcggncntgcacctnnctgccctgtgtccctgctggtgagcctgggcgcctgccngagcctgtctgccntgcctgganngcgnncaccctgctgcctggctgcgtgcctgcgngnagcgcgtgtgagtgtggtacctgctnnggtcctnngagtgcctggccctgtgtggccaactggcttcctggccctggacngtggctgccaatcnngctgtgngttgactcccgngngagctgggagccctgccgtggcgccggactttgtgcccttcgtgcagctgcgccctgctgagcgctgctggctgaagctggaganngcggtgctgctgctgcggganggggcttnntgcgccgcgtgcgttgcctgcagctggggtccccaggtcctngccccgtggccngccggcccngggcccgcctccgtctctggccttgccgcggggtccggccgcgactgcgtgctgctgcaagaggactttctggcgcacaggggcctgacccacgtntacctgcagcgcatccagctcaacaanccacggagcgcgtggccnngctgcagacttgtgggnnccactgccngnccagccccaaggccttcancagtaccctggagaaggtcngagaccatcagttcnncntctactcaggncggtcccgcctacgccaactgggttggtgnntnttggtgttggtgggcgcaagaaggctggtgaagcgctcaagtgggtccaagacggcactggataagacgggtgcttgtgggttggtgcacagttgtggcccataacccgcaggtgctcaaaagca

SEQ ID NO: 502930 - DNA, 105 bp, Homo sapiens
tgtgggaattacgggcttaagctaccatgccgggccaaaaacaatattttaaaaaagagaaacacttgagggggaaaaataaaaatgacataagtgtagagatag

SEQ ID NO: 502931 - DNA, 756 bp, Homo sapiens
agcgggctgccctgccgtccacccatttctccctacctgactcggccgtcgccaccaacgcgctctcccaaccctcggagtcagttccaaaaccaaaccaaaaaggaggagagcagacaaggcttcagcctgcgactgagaacagggaggcggcacgccttggggaacgagggcccgaggccatacgcgctaatacaggccagtgtcggcgtaaactttctccgttaccggcccggccgcgaccgccatgtttccgccgccgaaatccgcgacggtacggaacgccgccggggtcaaactgcgcggcgcgcctccttcccgaggcccggccccctccccgcccaaacccgcgcgccgccacacactcaggtgagcaaggcgctgcgcgagtgtcaactgccccacctaaggcgcctgccttcctcaagccaaagtcgactcctgggacctggaatcagcagctgagaacagacagcgggaagaccaccaaagatcaggctgacggtgcccatcaagcatctaggccaccgcctcgggctggaccgaacggggacagggtggacaggactgccacgcgtgggctgtaaatactgcgggaggcgtgctgctcattaatatatatggcataatatatggctttgtaaccagctaaggcccaagctccttaggccctccctcagacctttcagttcctcaaatgcagggacatgtcgggttttgctcaacattaaatcaccttagcatagtgcctgacac

SEQ ID NO: 502932 - DNA, 286 bp, Homo sapiens
ggatccccgtcagccatggtgatgccagctctgaagtcgctgtgtactaccagtccggtccatgagtctaatagactatacgcttatgagctgctagtatgcacatgacacgaaccttttttggacttctttcgaaccaggctgagcccttgggtaccaggtctaccctacctttatgacctcttcctggattctaggattttctgtctctgtggggactcaggccagcaggtaggttttgtgtgggttgcccttgtagccctatcctgtatcacctattggctga

SEQ ID NO: 502933 - DNA, 194 bp, Homo sapiens
cgagatgtgatagttatttatgaccggtgctgatttctgggagcacttcttttacgaaaatcaatgagcagtacattatgattggtatacttctgtgcatatataaatgaaatggtattcaacaagtaaaactaaagcaccatccatccatccatcctgtccatcccatccattcatcccatccattcatccca

SEQ ID NO: 502934 - DNA, 356 bp, Homo sapiens
ttaggtcatgcaactccactcctgggcttgagcgatcctactgcctcagccccccaagtagctgggaggacaggcgcaagccacggacactcagtgtaatttgtgtacttatttcgtagacgatagggtttcaccatgctagcccaatttgtgtctcgtaacgtcctgagactcaagatgagtccgcccgcacttgtgcctcccataagtgctgggtattacagcgcatgacgccaccgatgcctggcccagataaattgtacaacacacacaaactctcaagtgtgcctaattccctcgtcaccaaaaccaatcacacatacagcatgaaagagaataacttgctgttcattttt

SEQ ID NO: 502935 - DNA, 506 bp, Homo sapiens
  misc_feature (369)..(369): n is a, c, g, or t
  misc_feature (425)..(425): n is a, c, g, or t
  misc_feature (502)..(502): n is a, c, g, or t
tagtgtttgtggtggtgaatctgtatgggtctaaggcagagtgagagaccgaggcaagtttctcagcaggagtgaaagtttattaaaaagttttaaagcaagaatgaaatgaagtacacttggaagagggccaaacaaggcaacctgagagatccaagtgcctcatccaacccttttgaggttttatgcattggcatgattccagggtttgtgtttcttctcccctgattcttcccttggggtgggctgtctgcatgcacgtggtctgccagcacttaggaggggccgcatgaacagtgtgtttactgaagttgtgtgcatgctcacttgaggctttcctcctttaccagtcgagtgttcctagaaganggggcacggtaccagataaactctgccatcttaccctcttagcatgcatgcttgancccacccacccagctcctgagatcttatggggaagctgctatcactagccttcaggtgttttctatctatcaggagnatgg

SEQ ID NO: 502936 - DNA, 774 bp, Homo sapiens
tacgcctcacactcgattctcgaagcccgccgtggactaataatcaccagtaaggccctagccccgttccttgtgctgatccctatgaggcataattataacaagtgtccatcgtggcgtacgacaaagagaccgaaaatcgctcattgcatactctatacaagcagccacagtagactcctcggtagtgaatcagccccaattgtcctccaatgtccccaagagaaacactcgcgcatgggaaatgcccttgccagcaacggccaggctaagggtgcacttctctatacatcgtcgccacgggtcttagcatgcgcgtcacttagtattctgcctatgcagagacgtcaaatctacgaagcgcagcatcagcagatcggcatcagtaatccgtgctcgtcaaggacttgcaaagctgcctacgtcccactaactagcgtttttgatgacttgcgtagtcaagcgctcgctaacctgcgcgcgttagccccccactgattgaacctactgggagaaggtctgctgtgctagtaaccacgttctgccgtgatcaaaatatcactctcctacttacaggagtcaacatactagtcacagccctatactccctctacatatttaccagcaacacaatggggctcactcagccaccacattaacaacataaaagcctcattcacacgagaaaagaccctcatgttcaaaagagaataacacgaacaggaaaacctgcgcaggaaaaagggggggggggggcaaaaaaaaaacgccggg

SEQ ID NO: 502937 - DNA, 690 bp, Homo sapiens
  misc_feature (4)..(4): n is a, c, g, or t
  misc_feature (121)..(121): n is a, c, g, or t
  misc_feature (126)..(126): n is a, c, g, or t
  misc_feature (146)..(146): n is a, c, g, or t
  misc_feature (164)..(164): n is a, c, g, or t
  misc_feature (173)..(173): n is a, c, g, or t
  misc_feature (191)..(191): n is a, c, g, or t
  misc_feature (197)..(200): n is a, c, g, or t
  misc_feature (209)..(210): n is a, c, g, or t
  misc_feature (231)..(231): n is a, c, g, or t
  misc_feature (233)..(233): n is a, c, g, or t
  misc_feature (243)..(243): n is a, c, g, or t
  misc_feature (258)..(258): n is a, c, g, or t
  misc_feature (278)..(278): n is a, c, g, or t
  misc_feature (294)..(294): n is a, c, g, or t
  misc_feature (442)..(442): n is a, c, g, or t
  misc_feature (455)..(455): n is a, c, g, or t
  misc_feature (591)..(591): n is a, c, g, or t
  misc_feature (600)..(600): n is a, c, g, or t
  misc_feature (648)..(648): n is a, c, g, or t
aganagaggagagcagacgaggatggctgattgtcaaagcagggggcaggacccgggggcaggagaaaccaggctgccttcccttcccggggtccctggggcatctgggtgtgtccgcgangctcnggggagtgtgctggaaagtngtcgtgattggcatcgtngggggtganaagacaggaatggttcanatggtnnnngtggaaggnnttgggagggtaaccgtcagangnagcttaaggntggggctggcttggntttggccggtctcgggagtntggggtcaggggctanagtccaggcttggccgggggcttggggtgggagtcagggcgcaggcagcagcctcactcgggtccggggggccgcagcgagttccactgggcaatgggccgccggcgggttggccagcatggtccggcccaggtgccgcaggcaggcncccgccgggcggncgcccccacgggccaccctcccgatgggcctcggttcttggcccagctttgtcgtagtccagcacgggtcagctccacctggcacctttctgggacttgggtcacaggggcacctcgaaagctggaaagcttcgtntggtaatangggggttcagatgtggttctttcttggatgggtgggtttttctctctntccggcaccgtttttttggccggccctggcaggcaggggggg

SEQ ID NO: 502938 - DNA, 548 bp, Homo sapiens
cgtgcacacacacagacaacgataaaaaaaggagtgtgcgtgtgtgtggaataaccacccagccgcttgtcagaatttcccataatctccaatggacttttaaaaccaacaaaagccgaagacggtggcccagaggctgttcctttgttatcccatgctttctaattcaagtcgaatgactgctttggtcacacttttttagtcacagtaaaaaatcacgggcgccctctggcatgcatgacatgcgataatcagaaaaggtaccactcccgtgttttttgtttctgaatatgtctgttcacggaccacaagggcatgggtcaccaatccgaagtggatgggactaaaccattgcgccttagaggccctcaattcaactacgaaccctttaacagcaacagcattaatatacgcttttggagctggacttaccgcgggtgatggcaccagacttgtcctccaattgttactcgatttggatgggtttaaatatccccattgaaaacgagcatgcaaagcatgtcggtctatttctttcgctgactcat

SEQ ID NO: 502939 - DNA, 277 bp, Homo sapiens
caagcagagtaatttgtatgggacaagaatgagaggagtggctgctcagaggggagtggattctgtcagtggttcagtcagagatctgtatctgttgtgtcattgaggagtggcagtgtctcagtgaatattctgatctggcagtgatcaaaggactttgtctcctcaggtgctcaggatgtttcatgtggctgactgagtcaattccaggtctgatggggccgagtcgaattcgctcttgccggtctcacagtcgtgtgtggcactcgcgtcagct

SEQ ID NO: 502940 - DNA, 1148 bp, Homo sapiens
  misc_feature (499)..(499): n is a, c, g, or t
acttcgtaccatccggagcagacccctacatcttggcgtccaacggttgacattaccccgctggatgtacaggaccgggcgtttccctcgcccacgttgagggaacaggggtaaaaccttcgaaaggcaagccgaccgtgacctaccccataacctcttgggcttatcctaagacactcatctcccgatgctaaagtggaagggggttgctccaaagcacatgcgaatgggtggctatgggacaaatccgctggcgttgtcccctatccagtggttcaacgggtgtacacgccttcgttgtgtttgtttcttcgaatggcaggcggaatagttctcctgtcgcgaagcttgtccctatttttgctttctttatttgcaccaccacatcaatgtgcgctccaacggatccgacatgtccgcccttcgcgctctagatcctccgtagtcaatgcgcggcttcccgtgatgatctagaattgtgcccatcgtgggacgagcncaagcccttcagtaggaatgtcgcgatagcacaaaacgtgatcgtctcaccaggatagatagaacaatctggtaggctatgatggaactgttgtctccgggtttcggtactgaaaggggactgaaggaatgacgtacctattgaatgaatcaagcttctgtctaaggaaatgtctggaggtgtgtaagataggcgacgcgggataggggatatgggagtagcgtgtagggtcagagagttaaatgattcccacatcgtgttcaattgggcggatgtgtccccgagcgccgctctgtacgcttcgccgctcagcctggatagctatgcttcaactcaatcgcgcatgtgacgactcgtccttcccgcgcatcgcccccaagatacacactgggacacctcgtttctggcatgaatgttgggcactttaatgttgtctcgacaagcagctgctgcttctccagccccggcagtgggctgacaagctgtgttcataccgtaaatttatctggaaggggacagtgaaaagaggagtgacaggaaaggaaagggggagacaaaactcgtactctcaacctcacaccgaacacctcgcctattatcactctctctgcccccattccttcaataacagaccgggcgggacaagccc

SEQ ID NO: 502941 - DNA, 442 bp, Homo sapiens
cagctcggtacccttcgcgcttctcgttgccaggctgtagtgcaagggcatactcagctcactgcaacctccgcctcccgggttcaagcaattctcccgcctcagcctcccgagtagctgggaccacaggcgcccaccaccaagctcgactaatttttctatttttggtagagacggggtttcactgtgttggccgggctggtcttgaactcctgacctcaggtgatctgcccccctcgggctcccaaagtgctgggattacaggtgtgagccaccgcgcctggctgccagggatatttttatctgagaacccctgtcctgctggacctcacccctctctttgcttgtgagtttgagcacctgcccccgcgaggcttcgtgctgggcacccagtggaggtgagatgtgtgtctctgagtactggaacgagaagcggcgaagg

SEQ ID NO: 502942 - DNA, 175 bp, Homo sapiens
gagtatggtcaaatcccacatctaggccctgctacatggactcacctagtcgtacccaactctcatatttctcattacagcaagacacaactagtggagattcagagttctcagagataatctacgtgcttcaaacaaattgtggatttgttttgcaacttagtttattaacata

SEQ ID NO: 502943 - DNA, 299 bp, Homo sapiens
  misc_feature (57)..(57): n is a, c, g, or t
agaggaccggattggtgcatgtgagatggtagaagtgtgtgtgaagggatgcgtgcnttgatgttggtgcatatctataggtgtcgtgtcatggtgtgtgttgtcactgtgtctgtgtgtgacatcatcaccgtctgtgtgatgcatcgccgcgtctgtgtgacattaatatgtgtgacgtcgacatggcccgtgacgtcgttgctgcatctcggtgtgacgtcatgccgagttccccatgtctgtgtgcgacgtgctgcatctgcacgacgccatcgctatatctcttcgtgacgtca

SEQ ID NO: 502944 - DNA, 237 bp, Homo sapiens
tgatcaaactcttcagttcaatactgcttgggtttttaagaaaccctaaacttggctcagcaatctcaaatgactatgtgatttctcgcatggccacttgtgatgctgataatctttgtgactatcagtccgtactcacaagcacccacacgaattgcttgattcgatttgttaaagagcgtttggttaagagcttttcgtctcaaccgaggcgcgcattctacgctttcctcagag

SEQ ID NO: 502945 - DNA, 167 bp, Homo sapiens
gcagctgatcaggaaacgatggggattaaagcgatgcaccaggctgaacaacaacgaaccaatgatccccgcaccgccgaacaccagcaggatcagggtcacggtgttgccactcatgccggcaacaccttcaacaaacggctcaacatagctgtaggccgtgaact

SEQ ID NO: 502946 - DNA, 433 bp, Homo sapiens
  misc_feature (240)..(240): n is a, c, g, or t
  misc_feature (303)..(303): n is a, c, g, or t
  misc_feature (325)..(325): n is a, c, g, or t
  misc_feature (332)..(332): n is a, c, g, or t
  misc_feature (334)..(334): n is a, c, g, or t
  misc_feature (340)..(340): n is a, c, g, or t
  misc_feature (353)..(353): n is a, c, g, or t
  misc_feature (358)..(358): n is a, c, g, or t
  misc_feature (360)..(360): n is a, c, g, or t
  misc_feature (373)..(374): n is a, c, g, or t
  misc_feature (381)..(381): n is a, c, g, or t
  misc_feature (405)..(405): n is a, c, g, or t
gggagggcggtgtggccgatgagcggcggtcgagctcacggggtagcccaggcacagcgagccggtcgtgtccaggcggacgcctacgggggcagggcagcaggctacggggtgctctaaaaaggtgggatcctcccttgggtagcttaatttgactgtcctcgcagagaatgtgaacatgtgtgtgtgtggggtcaattctttctcatgtcgggagtgagaatgccgggcccctcaggnctgtcggtgtgctgtcagcctcccacaggtggtacagccgtgcacaccagtgtcgtgtctgcngttgtgggaccgttgttaacangtgacantntgggtntgactttctcttntacangncctttcctgaagnntcgagtncagtcctttgttgctgttgctgtngctgtgctgtgttgctgtgtgggcatct

SEQ ID NO: 502947 - DNA, 176 bp, Homo sapiens
tagtttgggggcggctgggcgcttggcgttcctcccgccgcccgctgcgccccgcaagccgcgcccctggcgggctaagtgagtcccgcccgctcccgcggggacccgcactggaggctgggcggctctcggcgaaagttggccgctcacagactggcaggcgggcgggcggccgc

SEQ ID NO: 502948 - DNA, 380 bp, Homo sapiens
agtctagagtgatccccgagacgttacacccagcccgacccgatggcgacggcgcagcccaggcctcgggtgcgcagaccacgcgctatgtgtacgacgatgccacgggcctgcagctgcgctttgccgtcagcgccgaaggccgcgtcaccgaataccgccgcaatgcctatggcgaagtcatcagcacgctgcagcaccaggtggcgcgctatggcgcagccgctgcctcgaccgaggccgccctgtcggcatggaacgggcagcagaacctgcagcagctgcagcgcaccgactacgtgctggacttccggggccaggcccaggtcaccaccacctattcggccaccgacgccgcaggcaaacgggctggcggcggt

SEQ ID NO: 502949 - DNA, 1615 bp, Homo sapiens
  misc_feature (34)..(34): n is a, c, g, or t
  misc_feature (521)..(521): n is a, c, g, or t
  misc_feature (625)..(625): n is a, c, g, or t
  misc_feature (796)..(796): n is a, c, g, or t
  misc_feature (1112)..(1112): n is a, c, g, or t
tccaccagcacacaccacctagtagcctcgttantcggacgagggctgtttgaaaggactttatcgatctctttattaacatcctagcttcggtttgttgtgtgcttattgtgtgctgggcctgggctgagtggtttacatgtcttctctcctttaacactgcatttccccaaggaggcgggtgcggtcttattatcccatcttaaagacaggccagtggcctgattccagagctcatgctttaaccccacgttgcactttctctcactgctagtgtagacggaagctcctttggtgccagattataaaggtagaaatttgtggaggacatcgaggagacagaagacatgctttatacatgtttctttttattttaaaaagctttgaaatacatttgaatgaaaaactaagcagttgcttatgctgtcagtacctgtctctgctctttaaaaagtaagccactgcctcttacctaaaggtcagcatgggctccatcatacagcggtcaggtccatcatacngcggtcaggtccatcatacagcggtcaggtccatcatacagcggtcaggtccatcatacggcggtcaggtccatcatacggcggtcaggtccatcatacggcgntcaggtctgtaactcttgacaggaaggtgcagtagcagaatggcgagatgcactgagggtaaccagatgatctcatgggacttacccagtgttagcaccaaagtcccatgaactgaggtgttaaaacagaaaggcctgtgtcctcagaacccctccaagtcactggccaantatgactcatgtttggtgatgttggatgccagttaataaagtccagaacttaagcccaagaagagagctcagaagtgtttgtgttactctttatttattgaggaataatttacagatagtaaaatttaccccttatatctgtacagttttgtgaattatgacaaacttactcaggttgtgtaaccaccagtgcagtcaaggcatagattatttccatccttccagagaagtctctgggaccttttgtagtcagtcccctcatggaatgttttgatcaacgtagaaatgcctggaggctgctgggtgggaggctgancactcagccatcagagcgtcctgtgtctctgagccgtgcaccccattgtggcatggcactggttgctggacattcttctgcgggcccactcacacatctgcctgcctgcggcctgtctgtgtttgtcttactcatgctcttggagccgtagcgaatgtgtctaatattccttccacgtggtagattgaaacttcaccaaaatagccctgtgcgcctactttgctcctgaacatctctgatttctccggctgtccctgtgtggagttctggcagatctcaccagtctacatgacctattggaaatgccagtgggtcattgtggcattcagacacataattcaaaactgcaaatggtgggaccgcactaaagaatttttagtaattaaagtacaggaggctgaggtgggaggatcacttcagcccaggaggtcaggtcaaggctgcagtgagccatggttgcaccactacactgtagcctgggtgacaaagtgagaccctgtctc

SEQ ID NO: 502950 - DNA, 302 bp, Homo sapiens
gtgcatttaaaactcaatgtagtacctaattcctaaaaagaatttggccgggcgcggtggctcatgcctgtaatcccaacactttgggaaaccgaggtgggtgcatcacctgagctctgcagttccagaccagcctgggcaacatggtgaaaccccgtctctagtaaaaataacgaaaattagccgggaatccttgggaggctgatgcaggagaaccccttgaaccggggaggcgaaggttgcagtgagtcgaggtcgcgccactgcactccagcctgagcgacagagcaagactccacctc

SEQ ID NO: 502951 - DNA, 1698 bp, Homo sapiens
  misc_feature (34)..(34): n is a, c, g, or t
  misc_feature (521)..(521): n is a, c, g, or t
  misc_feature (708)..(708): n is a, c, g, or t
  misc_feature (879)..(879): n is a, c, g, or t
  misc_feature (1195)..(1195): n is a, c, g, or t
tccaccagcacacaccacctagtagcctcgttantcggacgagggctgtttgaaaggactttatcgatctctttattaacatcctagcttcggtttgttgtgtgcttattgtgtgctgggcctgggctgagtggtttacatgtcttctctcctttaacactgcatttccccaaggaggcgggtgcggtcttattatcccatcttaaagacaggccagtggcctgattccagagctcatgctttaaccccacgttgcactttctctcactgctagtgtagacggaagctcctttggtgccagattataaaggtagaaatttgtggaggacatcgaggagacagaagacatgctttatacatgtttctttttattttaaaaagctttgaaatacatttgaatgaaaaactaagcagttgcttatgctgtcagtacctgtctctgctctttaaaaagtaagccactgcctcttacctaaaggtcagcatgggctccatcatacagcggtcaggtccatcatacngcggtcaggtccatcatacagcggtcaggtccatcatacggcggtcaggtccatcatacagcggtcaggtccatcatacggcgctcaggtccatcatacagcggtcaggtccatcatacggtagcggtcaggtccatcatacggcggtcaggtccatcatacggcggtcaggtccatcatacggcgntcaggtctgtaactcttgacaggaaggtgcagtagcagaatggcgagatgcactgagggtaaccagatgatctcatgggacttacccagtgttagcaccaaagtcccatgaactgaggtgttaaaacagaaaggcctgtgtcctcagaacccctccaagtcactggccaantatgactcatgtttggtgatgttggatgccagttaataaagtccagaacttaagcccaagaagagagctcagaagtgtttgtgttactctttatttattgaggaataatttacagatagtaaaatttaccccttatatctgtacagttttgtgaattatgacaaacttactcaggttgtgtaaccaccagtgcagtcaaggcatagattatttccatccttccagagaagtctctgggaccttttgtagtcagtcccctcatggaatgttttgatcaacgtagaaatgcctggaggctgctgggtgggaggctgancactcagccatcagagcgtcctgtgtctctgagccgtgcaccccattgtggcatggcactggttgctggacattcttctgcgggcccactcacacatctgcctgcctgcggcctgtctgtgtttgtcttactcatgctcttggagccgtagcgaatgtgtctaatattccttccacgtggtagattgaaacttcaccaaaatagccctgtgcgcctactttgctcctgaacatctctgatttctccggctgtccctgtgtggagttctggcagatctcaccagtctacatgacctattggaaatgccagtgggtcattgtggcattcagacacataattcaaaactgcaaatggtgggaccgcactaaagaatttttagtaattaaagtacaggaggctgaggtgggaggatcacttcagcccaggaggtcaggtcaaggctgcagtgagccatggttgcaccactacactgtagcctgggtgacaaagtgagaccctgtctc

SEQ ID NO: 502952 - DNA, 206 bp, Homo sapiens
aggctcagataaacgatatatggaggtcagcacggtgctcacgtagtcgacggaacttgtacagggaggcatagcaccgcagtggtagaatacacgtacgaccaggctccatataaacgatataaggaggtaagcacggtgctcacgtatacgaaggaactagtactagaggaggaatagcaccagcagtggtagaataccacgta

SEQ ID NO: 502953 - DNA, 940 bp, Homo sapiens
cttttttttgtttgtttgtttatgtggtgtggttggggtggacgaccgaaacgaagagtgttaatgtggcaaatctatcgttccgtgtatagtatatttccggtcaaacagggttgcatttcaccgcccttcgttttgacaatatttgtgaagagccccgtgggataaagatcgaagacccacttgaagcccccccggaagaaaggtccccggagaaactagaccccgcttctgaaaggaggagaaaagccggctccccttctccttaggagattggatgaattgaccagcgctgctctgagcccaagccaaggaccccttcgctcacctgccccagagtgacccttgtggttggatagaatttgaagcgccagtactcccatgaggacacacatctctgtggccctgccctaaatttctgggagcactttgataaggacggcttggtcccctggtggtacatcaagagtatctcgccttccctggaggactccactctcagacccttccatgagcctgccaatctcaatccacctggaatagttcccaaccgactggaccagactgaggaagaatgcccttctgcccagtgtctatcccttttgggaccccaccaatagccagcgtcccatttttggagatctgggtcttctcgaggcccgcgagcttgcctttcccgctgagatcccagattgcgccaggtggacatacgagatctataacacactggccggaaacatggatcctggccagcgaggagacacccagaacgctggttcgagagtacattttccctgggagggggccttcccagacaagatgggccaaaaccttccatcagggccagattttcaagtgaacaatcttttgccctcacctagctgcctgcacctgccctttcagggagatgggggtccattaaaggaaactgaacccttga

SEQ ID NO: 502954 - DNA, 444 bp, Homo sapiens
  misc_feature (226)..(226): n is a, c, g, or t
  misc_feature (241)..(241): n is a, c, g, or t
  misc_feature (259)..(259): n is a, c, g, or t
  misc_feature (281)..(281): n is a, c, g, or t
  misc_feature (297)..(297): n is a, c, g, or t
  misc_feature (299)..(299): n is a, c, g, or t
  misc_feature (344)..(344): n is a, c, g, or t
  misc_feature (384)..(384): n is a, c, g, or t
  misc_feature (424)..(424): n is a, c, g, or t
tccccattctcaatttctaaagattaagggaataaatctgtcttttccaaacattagacctagcagcataattttttcatcacaaattattacccatgacatgtattgacaccatctctgtcaaaaaacaagtggagttcaattctcatcttttggaaaggatcaaagaacattctaacaaccagtcctcaattctgtgtcaacactctttcattgggtaactaanaattaaaatgggtgntggctaggatttttttgntcactctatgtcctagtcctanaacagagcaaaagtangnccaatagtaattggggaccaatccaaagacaaatgcagaaatttngcttcagtgcttcccatttggagaaacagtgaccttcttntggatgagacttaggagcgggtttgcggggtcatagtggnacttcagctgttggcatacc

SEQ ID NO: 502955 - DNA, 797 bp, Homo sapiens
tttatgcaaagtgttacccaggcacgatggatgacatggttgtggatagtgatgaggaggtggattatagcaaaatggcaccagggtagacaaggaaggggcccttatggccgttgggacgtttgatacccaggaagaatacagcgatgtatatgaacaacaagagaagctttgccgaaggtttgcattacagtatggtatcaacaatgtctgcagggcggacaaccaggcgcttcaaggcaaacaatgacaaagcagagcttgatcgccagtggacagaagatcagtgcaatcatgagaaggaggaccgcacgatggaagctgatgggcgttgaagtcaaaaagagcaaaatactaatcaatagttacaaacagagatgctccacaaggatatgctccccactgttttctttctacaattcccaacgcgtgcacgcatgtctcctgtgggctgcctatacagcatccactcgtcgtccttacacttgggttcccattaaccaattgggttaacctttggctggacaatatccatctcgtatcatcagcgttacaacaacacttttctgcggaccgcacccccctcacctaaaaatcagcgtctcttaacacacccccctctgcggggcagcaggcccccctctagtctcaattaacgcaccgtcaccataccgcttacctcccgcagagctcctcgcccacctcagcagggtgtgacccaccacatcataaaccgcgccgaaacgagcgatcggaaactccgatcgtccccaggccatcgcttacaagcggccagg

SEQ ID NO: 502956 - DNA, 851 bp, Homo sapiens
  misc_feature (1)..(1): n is a, c, g, or t
  misc_feature (139)..(139): n is a, c, g, or t
  misc_feature (141)..(141): n is a, c, g, or t
  misc_feature (183)..(183): n is a, c, g, or t
  misc_feature (202)..(202): n is a, c, g, or t
  misc_feature (210)..(210): n is a, c, g, or t
  misc_feature (218)..(218): n is a, c, g, or t
  misc_feature (223)..(223): n is a, c, g, or t
  misc_feature (227)..(228): n is a, c, g, or t
  misc_feature (231)..(232): n is a, c, g, or t
  misc_feature (251)..(251): n is a, c, g, or t
  misc_feature (268)..(268): n is a, c, g, or t
  misc_feature (270)..(270): n is a, c, g, or t
  misc_feature (274)..(274): n is a, c, g, or t
  misc_feature (289)..(289): n is a, c, g, or t
  misc_feature (298)..(298): n is a, c, g, or t
  misc_feature (303)..(303): n is a, c, g, or t
  misc_feature (305)..(306): n is a, c, g, or t
  misc_feature (310)..(310): n is a, c, g, or t
  misc_feature (314)..(314): n is a, c, g, or t
  misc_feature (318)..(318): n is a, c, g, or t
  misc_feature (322)..(322): n is a, c, g, or t
  misc_feature (332)..(332): n is a, c, g, or t
  misc_feature (338)..(338): n is a, c, g, or t
  misc_feature (347)..(347): n is a, c, g, or t
  misc_feature (367)..(367): n is a, c, g, or t
  misc_feature (382)..(382): n is a, c, g, or t
  misc_feature (396)..(396): n is a, c, g, or t
  misc_feature (400)..(400): n is a, c, g, or t
  misc_feature (417)..(417): n is a, c, g, or t
  misc_feature (423)..(424): n is a, c, g, or t
  misc_feature (431)..(431): n is a, c, g, or t
  misc_feature (437)..(437): n is a, c, g, or t
  misc_feature (445)..(445): n is a, c, g, or t
  misc_feature (450)..(450): n is a, c, g, or t
  misc_feature (463)..(463): n is a, c, g, or t
  misc_feature (481)..(481): n is a, c, g, or t
  misc_feature (483)..(483): n is a, c, g, or t
  misc_feature (501)..(501): n is a, c, g, or t
  misc_feature (821)..(821): n is a, c, g, or t
nagacaacattgtaaagatgacatggtttaccagattaatctataaattcaatacaaatccaatcaaaatttcaatgctcttgggtttgtttgatttataaattgttggtctaattctagaagtaatatggaggaacantnggctaagaatagccaagacactccaaggaagaacaattttcncgtgatactggagacagangtgaaatncgctacanttatnacannccnnggaggcatcttggttttcntcagaccttttcctaangngggngtgattagggctgtnctgtactgntacangnntagngaanttgntgtnagtgagagtngagacnatcaaaagngccacacacatacacaaaanttttttttttgttanttgcagtgttacanattntttgggaaaggttgttntttttnnttaattntgcagntttaaccnctttnttttttttatttnttaagttgattttttaantnataatttttacaaaaatnagttcaggacagactaaagacaaatgtgaaaggcaaaactataaaatttccacaaggcagtaaagaatatatttatgactttgggtaggaaaggatctcccccaaaccaatttgtattcagctttatatgatactttttaaaaacatttactttcagcaggaaataggcaacaatctataacattttacaatttccaaactcccctcctccaaaagtcaccgtaaaagttaacaagatatgtcgttgctgttttgaacaagaaagattttcagagagggtggacacttcacatgaggcatgtatgagcttttctcaggcncactttgacatggagggaataaagtaaaac

SEQ ID NO: 502957 - DNA, 138 bp, Homo sapiens
ctctgcataccacttacccatgatgggacaccctggaacatggccaccctcctactctccctgagacatcccaacatgggtggactggactgtagtgctcccctaccccccccttaccctctcctatgatatccatgc

SEQ ID NO: 502958 - DNA, 580 bp, Homo sapiens
tggttttccccacacgccagaacacgcccaacgccatgcccgtgagggagttatctccaaagttggggtccagccatttacacacccgcaggtggtatgtccagcccacctgtcccacccaaggcacaggtttgtacaatggtttgatctggttgtcccacaagctgtcaaagggttacccagccaggggcaggcccctaatgcccggaagttcctgggtgcatccccgggatgaccaaactcccggactcctcaggcagggccctttcctcccacttttcctcccccaaagccacaggcctctgctcctgttccggccggcatgttttttctgttgttggagcctgaacccttgctttttgggcccaaaggggtcccctttcctccctgttgggccctatggaaggggtttcctggccaagccccccttttccaaagaaggagcagggatctgggttcccttttttttttctgttttgggggcactctagggcccaggttgggagggggaaggtaagggcttcgggtggtcctataatgtgcccctggttcttgagtaataaatttcctgtggtttgta

SEQ ID NO: 502959 - DNA, 161 bp, Homo sapiens
tgcatcagagtcttctgcaacatgtgagactggtgagacctgcgtgtaccccactcagcccagtgtgagccagaagaacgggtacatcagtcgagaaccccaaggacaacgaggcatgtctaggttcggggatgagcatgaccgagtggattccacgttcg

SEQ ID NO: 502960 - DNA, 249 bp, Homo sapiens
atggagacccaggtctgagacaaaaaaaaaaagaatggcaaaaactaaaataaaatggttataagggttaacacagaaaatggtgttcatactcctaggttaggcatggatttcttaaacaggacacaaaaagcagtaaccataagggaaaagatggataaagtataatttcattaaaattaagaatctcaggcggggtgcaggggctcaggccggtaatcccaacacttggggagggggtaccgagct

SEQ ID NO: 502961 - DNA, 123 bp, Homo sapiens
agtagtcaatgtagtgagggtgagtgatatgcagacaagcgggagagagtaacagacgtacggtggtaggtctcacgtctgcacagatgctgaatgccagagtacagtgattgtctccacaaa

SEQ ID NO: 502962 - DNA, 106 bp, Homo sapiens
  misc_feature (8)..(8): n is a, c, g, or t
tggcaggncttcaggagcagcagctcttcttgcaggaggtgcatttgcatcctcgcacttgcaggagtctgcgcaggtcaggagccaccagaaatacgcctgggtg

SEQ ID NO: 502963 - DNA, 686 bp, Homo sapiens
ttacagggtcccggcggcaggcccaggcgacgccggggtacaggtgagatggagccgggcgaagagtcgtgtagggctgacgggttacagattcggagagagaggtgcgtagtggctggactttgacctggcaaagaatctgtgcctgctgacgtcgtcaaggcttttcctggaagacaaatggatcattcccaccatatggggatgagctatatggactccaacagtaccatgcaaccttctcaccgatcacccaaccacttcagcctcacactccgcatggtggaggagacagcagcatgatgatgatgcctatgaccttctacttggctttacagaatgtggaactactgttttccggttgggtgatcaatacagctggagaaatggctggagctttgtggcagtgtttaactagcaatgttctatgaaggactcaagatagcccgagagagcctgctgcgtaagtcacaagtcagcattcgctagaaattccactgcctgtcccaggaccaaactggaaccatccttatggagacaccaccaacagctgtgggcaacagatgctgagcttgtcctcacctcctgaaaacagtgctgaccatcatccagggtggtcataagctaattcctcatgctcatcttcatgacctacaagggtactctgcatggagtagcaggagggc

SEQ ID NO: 502964 - DNA, 1038 bp, Homo sapiens
tacaacaattttattttacatattatccacatcacacttctttctcatgttatatttaaatatgcaatggccacacattttggcttttataccttttacatctttattatctctaattttatataacatgcataatatctcttctgtgataagttatagccatctccatacacacgtcttgatctctatttgacacgtattctcacagacgtacttgcaccaccattgacattctaagtctgccaggctagctaccgtatgcctacatcaaaacttaccgttagcatcttcaacattcctacttactctccgcgtaactacaaaagtcgcaagtactgtgcagcaattcgaaaaactatgttttctatctacagatgcaaacttattacggcatttcttaccagcgtcacccatggattattccaatgttaaacttacttttccaatagctcactctctactacgctcaagttcattgcgcaacaccagattgaagtttgcataaatatttcctgctaagcgaacctaagttccacaactttcctatcactatcattccaaataataactatcatactaggatttatcccccatttaggtttccccacataataacatttccaacgcttcctcataggaacaaaccccttggttctcaacttcaatcacgcttgcgcgcgaactttacggatcatgacccacaaccattggcgtagcgcgtttgtacttataccacccatttgaaaatggcatagcatctagtacttgctgcctctcacctgggcgaacacattcctcgttccacaccactacacttattcagctgattagccacaaagaaccagcatcttccacccttgaagtatactattgacgcattactatgatggcaaactacccagatttcacaacattctggcaacccttacggttctcaacgcctctgcccaccttggtaactattaacggacaagcacactccccttatacttaaaagactccatgactcacataatccacattttgggcttaaccctt

SEQ ID NO: 502965 - DNA, 208 bp, Homo sapiens
caggaccaagtgaataaaatggggggtgtctaaaaacaaaacttaaagtaagaaggagtacttggccgggcgtggtggcaggcgcctgtaatcccagctactcgggagtctttacccaggagaattgcttgaacctggagatggaggttccagtaagctgagactgccattgcactccagcctggacaacagagcgagactctgtctc

SEQ ID NO: 502966 - DNA, 135 bp, Homo sapiens
tagttgcaaactcacctccctcactcaacactttgaatacttattgtttggcaggtcatccacacacttctgcccccagtgcatccaattttttgcaaatgccccctataataaatcttttcaattatctcatcc

SEQ ID NO: 502967 - DNA, 175 bp, Homo sapiens
catacttaatattttttgaaaacacaataaccacagtacatatactgtattctctatatttttccctactttcataccataactctatactctcctcttttttgttttcactttatcaaaacaaaaattacccgatgatcctctttactgatgaaaaggatggaaaattaaatca

SEQ ID NO: 502968 - DNA, 125 bp, Homo sapiens
tctttattagtaaggcaaaaacagactagcacagtgagtctctgtacttcggcagaggagtgcttcagtttttacttaggaaaaaaacatcacagcagcgcggtagaggggctcccgggcgtcgt

SEQ ID NO: 502969 - DNA, 126 bp, Homo sapiens
cttcgcacagcagtgaacaagaaatgacacaagccaacctcccctcagcagggaacaggcacgggttatcccacaagtgtctgcgcaaatgcacctggggtcagtgtgagcgcaacacctgggcag

SEQ ID NO: 502970 - DNA, 200 bp, Homo sapiens
tcagtggaccgtcgtctgtcgacgtcgcgcaggaggtgtgatcaccgaggtgattgcggtaccaccgaaggtctgatcatgaccccgatcgtggaaggcggcgacgtggtcagccgctgaaggaccgcgtgctgggtcgcgtggttgccgaggacgtgttcctgccgggaacgacgaagatccgatcgttacccgcaaca

SEQ ID NO: 502971 - DNA, 223 bp, Homo sapiens
cgaggcggtggtcagtctctgtccgtagagggcgtagggggagtagtacggtccggtggcggcgggcaccggcacgggggcccaggcgtgggaagcgggctcttggagtaggggtggtagcggctgctgagtcccagcgcgtggtgggggtgcgcagcccagcgtcccaggctgcccggtgcgcccgaggtggggatgtgcatagtgcaagccatggcggccc

SEQ ID NO: 502972 - DNA, 415 bp, Homo sapiens
cgcatgctcaggtagctcaatcgggaaaatatcttacgcagacatattctctgagccttaaaacaggctgctatcgacagtcacgtccgatgcacagccagatgacttgatacttttcatttcagtgtaggcagtcatgttttctaagaaagatttagaaatcagcaaagtgtaacaatagtgtttcatttatggaatggacaaactgacagtgtcccattcagcaacactttggaaaggttgtctgcattaggggcatgtttctggaagcatcccttagcagcaagctgctgcaggcaatctccttgccaggttgtaccagattttttttttcttaaatgtatggtatatattttccttaaaaggtcttcatgggctgactgattcctatccgtagtaatattttaggtcactt

SEQ ID NO: 502973 - DNA, 702 bp, Homo sapiens
gctccagtttcccagcgacacgatgtacccgtttctacagctggctggaggactggactgctactactactcctggctgtggcagtgagcaatgaatccgggcgatgacagagagaaaaaacttgcgacttggtagcgagaagaagggtaaagagtcagagagaagagtttgccctctaggtgaagaggcgtgaaaccacgtgtttaatagaagcttcgagagcactggtgggccaggcttcagacacatacattctatcatctgtcaggggtgtgccgggaatgctggcaaccacacttctggtgcaggcctggtgcaaatcatcaaacagtagatgggaaggagacgagtgtgtagggagcactcaacgaaactcgcatcttcaaccggaagtaacttgggatcatgctggatctatacacacggggttgatgaccatatgacaatccactgtggcataggagctgacgtcgtgcacgtgttgatgatctcctgcaatcgacaggagtcctgaacggacaattttaaccctgatgtctagaggagcgtggcaaagtccaagatcgtgctacctctttgagatggatagtcaggctggctgttcaccagagatctcccacctcagtgtgggttccactcttacttgtcacgttgcatcactggtgctgctgaagccgcggggggtcctataccagcgactg

SEQ ID NO: 502974 - DNA, 450 bp, Homo sapiens
  misc_feature (265)..(265): n is a, c, g, or t
ccagcacgggtgaatcacgaagtcacgagtttgataccagcctggcagcttgaccaacgtggtgagaccctgtctctgctaaaaatacaaaaattagccgggcgtggtagctcacacctgtagtcccagctactcaggaggctgagacaggagaatcacttgaacccgggaggcagaggttgcagtgagccgagattgtgccactgcactccagcctgggctggagtgagactccgtctcaaaaaaaaaaaaaaaaaaaaaaaanggccccggcccgggggccccccctttgaaccccggccttttggaaaggccaggggggcaaaaccaggggggggggtttaaaaacccccccggcccggggggttaacccccctttttttaaaaaaataaaaaattaccccgggcttaggggggcccccttaaaaaccaatttcctggggggggggg

SEQ ID NO: 502975 - DNA, 256 bp, Homo sapiens
acgagatacaggtcacggagctctcagatgcagacacggtgtccgcgagtattctgacgaggaggtggtggaggacgtggatgatgccgcctactccatgtctactggtgctgttgtgacggagacgcagatgtacaaaaaacgagctgattccttgacgtatgctgattatgctgtatacgttggtggtgaacaacactacggggtaccggagctcgaaaatttccgtaaatcatgggtcctaggctgtttccct

SEQ ID NO: 502976 - DNA, 180 bp, Homo sapiens
cccggatctgtgtatcatcacccgatgagcacacagccagaacggctgaacgcaggcacatactttctattctacacctagtagggtcccttccctactcatcggactaatttaaacttcaaaaaacctagggttcataaaaatttctataattaattttaataaccagggaccggggat

SEQ ID NO: 502977 - DNA, 508 bp, Homo sapiens
gaatttggtactgggcagatactggactctcctcggacgtcggtgccctcacatcattggtctcccacccgcccctgggatttctggacgcgagccctggccctccccctaggtgcgccggcgccttgattataggctttccgctcctaatgagttcctaggtgccctatgccccacctttggtcacccacagaggcacacaccactacctccctatcgcccatatctagttattatccgaaaccttcagcgctaatcattctactccaattagccctggccgtacgtcctatactccgcctcacactttcctgccagggccacttattccaatgcaccttacttggaatgccgccaccctcagccatatcaaccataataccttccctttacacccaatcatattcaccgattctaattatctgactatcagtaggattcgcgtcgccttaatccaagcctacgttttcacaattctagtaagcctttacctggacgacaacacata

SEQ ID NO: 502978 - DNA, 310 bp, Homo sapiens
ccatgccaagaggaagcccagccccttcatgtctgaccgaccggatcgaatcgaattgctgtgtttccggaagcacgtccatcttgcaagaagccctgcaatctgctgcccggcacagaatgtcgctccgggtccaacccctctctctccggctctgcttggctttcctttcaccacctgttacctcatttcatctcagaatctcctgttggtttctgcgctggacatccctgcttttcctcaagtgtgcaaaacaccgcactgcatgcgataccagttgctctccagcggtaaactgacagactcgtca

SEQ ID NO: 502979 - DNA, 90 bp, Homo sapiens
tctgaggacacggccgtatattactgtgcgagaggactcccctggaattatgggaattactactacggcatggacgtctggggccaaggg

SEQ ID NO: 502980 - DNA, 433 bp, Homo sapiens
caaaggcttagactacagtagtgagcacgtgcctgcctagattgacaggatattttttaaggaccagaacagtattttgtaactatatgtttatacaagcttgatacttcactactaagttatagtctctagcttccactgagcatttaccaaatagcagatatagttgactgcctttgcaggtgtatcactgtgtgtcagaatcctaatcctttctcctacttcagtgttaaacaagccatttaattctgatgttactttttcggattggttcacactgcagagcacaatgagcagggtttgtgtgcatactaatactaggatggtttattcaggactttacaaagtaagtggaataatttagtgcaatactgaaaatccagtctgtggagcacacagcctttacattacattagttggggacttcagctcc

SEQ ID NO: 502981 - DNA, 271 bp, Homo sapiens
gatttaaatagaactttattggtgaaccgcctggcagagggagaggtttgatcataaaattggcccggtcaaacatttggggtttaacccctgggggccctttccccggagaccctattgtaaataacacaagggggggggcccccctttttggcaaaattccacagggaacccttaattttttgtttcctctttcccggttcaaaattccatttattggatcatttccgggacccccggtttagggccaaaaaaggaggtttttaagcca

SEQ ID NO: 502982 - DNA, 95 bp, Homo sapiens
agaacacgaaaactttctgctctttcctctcagcctgagtttccttctgacaggaggaccagccccagggagcctgcaggaccccagcaccccac

SEQ ID NO: 502983 - DNA, 256 bp, Homo sapiens
  misc_feature (19)..(19): n is a, c, g, or t
  misc_feature (221)..(221): n is a, c, g, or t
gaggatcccgaaaccctanattacgcataacaaaaagataaagcagagccccagtctacatggagagaagaacccagagatgattgtgataccgtctggggtgacttcattctttttaaaaacaaaaagtcgacagcagcaaataattaaaataggagacgagacgataggtacaaatcagttaccctcctgaataaatacagtcatccagaatctcattnggatgaaaaagtgtcttctccgtcggtgtcgaccc

SEQ ID NO: 502984 - DNA, 200 bp, Homo sapiens
ggaggtcagtagagcgcgctgcagtgagccttgggtctcgcagagacccagaccctgacatgcaaggagccaggacacccaggaaacatcagcacacacacacacagggaccctcccttcatgtcactagtatagctgccctaaatggcttcttgcaccctaacccctgatcctggaagaaggcagcagaaactggcccg

SEQ ID NO: 502985 - DNA, 675 bp, Homo sapiens
gacagcattcgggccgagatgtctcgctccgtggacttagctgtgctcgcgccaactctctgtttctggtcgctggaggctatccagcgtactccaaagattcaggtttactcacgtctatccacgcagagaatggaataagtcgaaattccctgaatgctatgtgtctgggtttcatccatgccgacctcgaagttcgacttactgacgaatggagagagaattgcaacagtggagcattcagacttgtcttacagacaaggactggtcttgtctatctcttgtactacactgaattcacccccactgaaaaagatgagtatgcctgaccgtgtgaaccatgtgactttgtcatcacgcccacagatagtaacgtgggatctgaggacatgtaagcagcatcatggaggtttgaagatgccgcaattggggattggatgaattccaaattctgtcttgtttgctggttcaatattgatatgtgtatagagttacactttatgcacaaagatgtagggtatataataatgttaaccatggacatgatcttctttataattctactttgagtggtgtctccatgttgtgatgtatctgagcaggttgtccagaggtagggtctaggagagggtggaaattagaggtggggagcagagaatactacttatgaagata

SEQ ID NO: 502986 - DNA, 133 bp, Homo sapiens
catgtcctgcggcttcctgcttctgccgtcctgcttcctgcttctgccgcttcctgcttctccgcttcctgcttctgccgcttctgcttctgctgcttcctgcttctgccaaatggccgcttcctgcttctgc

SEQ ID NO: 502987 - DNA, 334 bp, Homo sapiens
gtcgacgtggctttagcagcagagacagaggaggaaaatgtagagaggagggagtgaaaggatgctaggtccgcagggaggcgagttttcctccatttccgctcggctgcccggagccccattctgtgagctcgcaatgagtcgtcgagccacggagcgggaggggaggaccgagccggcctggaggataggggacatagggagtcaaaggatgcagtaagggaggagaggagggttgaggaggcagaatcaggagataggttggagaaagtttgagcagagggaagagaagataggatggaagaggagagagtagcgggggagaggtcgacgc

SEQ ID NO: 502988 - DNA, 304 bp, Homo sapiens
aacgggtgatgcggttgcggtgagctgagatcgagccgttgcactccagcctgcgcaacaagagtgaatgaaactccatctcaaaaaaaaaaaaaaaaaatctccattgggaaaacaggagacggccccataggtccatcgggactttttagtatttcctgaaaaatagaggggatcaggtctgaaatgaaccagcaccgggaaatcttgcccccaaacttgtgaaactgctggggagatggaagtgatttgggcggagcccaaaactaaaacccagcctttgaaacatgtgggggagccaggg

SEQ ID NO: 502989 - DNA, 1754 bp, Homo sapiens
tctcggtgcgttgtttgctcagtgtgggcggtgtccgaactctgctgcgtctctgtgtctacgatctgtggtgagtgagcgttctggctcgtttgccgtcctgcgacgtctcgctctcgttcttgtgtgcacgatgtcatcgggagaattcggtcgtgttcccctgtgtcatctctcctctctctcatctcgtcttgcttggcttgctcggcctctgtgtgtgtgtgtggtgtgatgcggcgttcacgctctattggtcgcgtgactgtgctgcggttgatcggtcgtgctggttgatcgtctatgttgttgttgattatcttgtttgtttctcttgtgtgcgttgctgcgtgtcgatctacctggctttcctgttttttgctgttgttggttttgtctggtgctgtgtcttcgccttggcctctgtgttggttggtctttgccgttcgtgttctttcgtgtggtgtcttgcgtgcttgttgttgttgtgtgtgttgttgctgttgtgttgttgtcttgctggtgtgcgtggttggtgtttgttgtggttgttgtttgtggactgctctgccgcctccgcgtgtggtgttgtgattcgcctacagcgtcacaccaagtgttgaagtacgccaggtgccgccgcccttgtagtggggtgagtccgaaagagacagcaacacaatatggacgggattttttttagaggtggcacacacacccttttatggggaaaacttccgctttaagagtgatgccccccacacaagaagttgtgggtgcacccaaaaaaaagagccctcagagcgcttgtggttgtaaaaagagccgcggagcgcgcccccccacgtttgatcttttatgtacgccgcggtttctcctttaaagaggtgttatagccgcaagagggcctctctgggggtgggggcgcgagattattttccggggccactcagcaggagcggccctctttccttgttttcgccactcgtgtgtttggggtctcctgttttgtagggccccccccgggcgtgtgggtggtgtcgccttcctgccggcccacgaatattatggggggccaccaaagtgttgtctactctgggagaccccctctggggcgagaaagtgtgttgggtgtccctttgtgtctctctgggctgtgtggacacgcgtgtttctctcctccggggaccgccatatagacggtgtgtctcatttctcggtgtgagagagacacacactgtgtgagtgtgagtgggcgccacacgctcctcagaggtctgtcgccgcgctcacacagcacccagatgtctctctctgtgtgtgtgcgctgtggagatttgtgccccgcgcttacacccccccgcccccatagatgtcaccacgcgcttgtccacaatgtgcgcccacagagaagagaagatatctctccccacagagagagatctcacaagagattatatatctttttgtgtgtgaaagagtggtgataacatcccactatctcccctataatgcgcccacacaggtatctcttgtggagatatatcccccttggagccaaactgtctgtcacaatataaggagatgtctttctagagatctcctgcgtcttttaaaccacaaggccccgaatgggagggccacaaggtctaaatttgaaagagagaataccagaaccggccagaccccatggtttttcccaggaactgcggttttagaatagctttgttttgatccatttaaaatttttaaga

SEQ ID NO: 502990 - DNA, 125 bp, Homo sapiens
gcttttgacccaaatgcaaacattttattagggggatagagagggtgaggtagagtttatggaactgagtgttagggactttggcatctccatagctgagcacagcaggggaggggttaattgca

SEQ ID NO: 502991 - DNA, 422 bp, Homo sapiens
  misc_feature (382)..(382): n is a, c, g, or t
gaatctgagagtggaagaaaacctttaccttggaagaaaattttaacatatgagcaagctgttgcaagaggattttttcaccacattgaaaaactcaagtatgaacaccacctttaaggaatgcttgaagcaaatgcatgctggggaagatttagaaaaggaagaccttgacagtcggaggcacaaatacatggatgatgatggttcactttctcctattgaagagccattaactgaagatgaagcaacaaatcctcaggctgaatgtgatatcaagttggttgaagacagttgcttcataataagttcagaattctcaaggaagagaaacttgggaacaagagaagattaagaaagaatcctacattttctaaaaaagccnaagatgccacacacagagagaaaggggcacagaagaacct

SEQ ID NO: 502992 - DNA, 984 bp, Homo sapiens
cggaggcgcggggtgtggccgctgccgcggaaggcgggcgtggctgggtgaggctgcttcctgtgggtcctgcgctgtcatggaatgcctgtgcctgtcctgccgtcctgtctgccctgcatgggcatttgcccctgatgccatgcctgatgccgccatgatgcctgcgggccgcagggggtgtcagcggtgcccagaccaccaggaatgctcccactgctgcactacctgccataccacgggtctctagctgactcatgggctgctgcatactgttgcatcttgggatcaagcttctcctcaggacttctgaagagcccgacatgctacacggaatgcacagatggctatgagtgggacccagacagccagcactgcctgggcatgtcaacgagtgtctgaccatccctgaggcctgcacgggggaacatgaagtgcatcaaccactacgggggctacttgtgcctgacccgctccgactgccgtcatacaacgacctacacggcgagggaccccacgacaccagagcctacccgcatcaaaaccccaaggccctgaccaacagggcatatgagcaccgacgatcagggacagactgtgtgaatgtggactgagtgtgcccaaggacctgcaacgaacagaacgacaccaaacaaggacatgccaataaacttgccatggaatacgaaatacaagtgcaaccgtggaccatgaatggtatacagcagagaaatccgagagccccgaaagatagtgaaagcgagcaaaagaccaggaggaggccacgcggaaacgcgaaaacaaggcgcaaagcaccaccagcgcagcgatacaccacactgccatagggcgaccagtcgcgaggaggccaaagaaggacaagccaagggagcaacgcaacagaataagagaggacaaaacaaagaccagagatccataggaatacgacagagacagagagaaggtacaccaaaaagagagaca

SEQ ID NO: 502993 - DNA, 332 bp, Homo sapiens
  misc_feature (78)..(78): n is a, c, g, or t
caagaaccttcgtttttatttttaaacacttttgccccctacaaaacaaaccagcaagtacttgccaagaaccaattnttgggattcaaggagtctcgggacgaactgccttgggcctctggccgccacccaggaagggtggggttggatctgtgtaagttgcccaggcccacaacctgccaccagggggctgaactggatccatgctttactgtgtttaaatgggggtaacaggggtccctacagccctccccagctaaacatttggaacaaaaacaccagcccctttgtagtggatgccagaataaaattggttaatccaatcactccca

SEQ ID NO: 502994 - DNA, 995 bp, Homo sapiens
ccaccagcagcacccgccgcagctcaccatggatgatgatatcgccgcgctcgtcgtcgacaacggctccggcatgtgcaaggccggcttcgcagggcgacgatgccccccgggtccgtcttcctcctccatcgtggtggctgccccatgcaccaggacgtgatggtgggcatgggtcagaaggattcctatgtgggcgacgaggcccagagcaagagaggcatccttcaccctgaagtacccctatctgaagcacggcaatcgtctaccaactggttacagacatggatgaacatctggcaccacaccttctacaatgagctgcgtgtggcctcccgaggagcacccctgtgctgctgacctgagtgcccccctgaaccccaaggcgcaaccgcgagaagatgacccagatcatgtttgagaccttcaacatcccagccatgtacgttgctatccaggctgtgctatccctgttacgcctctgtgccgtaccactggcatcgtgatggactccggtgacggggtcactccacactgtgcccatctacgaggggtatgccctcctcccatgccgatcctgcgtctggtacctggtgtggtcgggacctgtactgatacctcatgaagatcctcaccgagcgcggttacgtttcccaccacggcgagcgggagatcgtgcgtgacatgtggcgagaagctgtgctacgtcgcctggacttctagcatagatgggcgcggctgttcagctcctccctggggaagagctacgagctgctggcggcgccgtctccattggcatgagcggtccgtgctgagggctttccagcttctcctgggattggtctgtggtcccgaactcctcctccctgagtggtgggcccaaccgtcccccgtgtggtggcccttcccctccgtgggggcgccgccccgaaatgccccatctgcggccctcctctgggacccccatggttccaggttctttttctctcgtcccg

SEQ ID NO: 502995 - DNA, 722 bp, Homo sapiens
  misc_feature (7)..(7): n is a, c, g, or t
  misc_feature (34)..(34): n is a, c, g, or t
  misc_feature (36)..(36): n is a, c, g, or t
  misc_feature (186)..(186): n is a, c, g, or t
  misc_feature (188)..(188): n is a, c, g, or t
  misc_feature (205)..(206): n is a, c, g, or t
  misc_feature (297)..(297): n is a, c, g, or t
  misc_feature (341)..(341): n is a, c, g, or t
  misc_feature (358)..(358): n is a, c, g, or t
  misc_feature (418)..(418): n is a, c, g, or t
  misc_feature (474)..(474): n is a, c, g, or t
  misc_feature (480)..(480): n is a, c, g, or t
  misc_feature (500)..(500): n is a, c, g, or t
  misc_feature (516)..(516): n is a, c, g, or t
  misc_feature (527)..(527): n is a, c, g, or t
  misc_feature (531)..(531): n is a, c, g, or t
  misc_feature (611)..(611): n is a, c, g, or t
  misc_feature (620)..(620): n is a, c, g, or t
tcctcanatgatggggaaggggctggcaagtgtnancaaaatataaaaatgggctgctctcaattttgcctcaatggacattttaccactgttcttatacaactaacaaagacgggattttaaaaaaaattgaaagtgactcattatccaaccttattaaaattcctacatggggggggaggggananaaaaacgccaaaccccnnaaaaaaaaaaaacccacaaactaaaccaagattttcaccaatcccaacccttttcacaacaattttatcaatatcacctctcctatatttncacaaatcacaaaattaacttcccacattcttctccctcaaatntccctcttctcaccctnttcttactcacaccctcttttccccccccccaccctataaattatttcttatatttcttntatcttccttctttcctcttttacttctcctctctctttttcctcttctctcttcncttccntctctttttcctttctcccntccttttactttctantttttttttcntccncctcctctctcctctccttccttctcctctcctttcccctttcttctctctcttttccttcttctctcttttctttttcnctttttctnttccctttcttcttcctctctcttctcttctttttctcttctctttccccaccctccttcatctttctctcctttctcttctttttttaaaataaataaaaa

SEQ ID NO: 502996 - DNA, 344 bp, Homo sapiens
tccccctgagccagcccctgttgttggggatcgcccgaaattaaaccagtgctggccgagccagggccgagttttatgtccagtgcagcctgacttttgagcaggtgaggaagccctccctgagtgggggacccgaggcccccgagtttccaggaattttttttgtggagacccaaaacgggcggagattgccccaaatggaaatgtggggtgaactttgcccctcggccaaaggggccatcatcctttacacccgggttcagggaagtccccctgggggggccctagggtccccccccccaccccccccgctttgaaaaaaaaaaacgactttatttttggga

SEQ ID NO: 502997 - DNA, 973 bp, Homo sapiens
  misc_feature (17)..(17): n is a, c, g, or t
  misc_feature (147)..(147): n is a, c, g, or t
  misc_feature (149)..(149): n is a, c, g, or t
  misc_feature (153)..(153): n is a, c, g, or t
  misc_feature (235)..(235): n is a, c, g, or t
  misc_feature (257)..(257): n is a, c, g, or t
  misc_feature (260)..(260): n is a, c, g, or t
  misc_feature (262)..(262): n is a, c, g, or t
  misc_feature (280)..(280): n is a, c, g, or t
  misc_feature (295)..(295): n is a, c, g, or t
  misc_feature (297)..(297): n is a, c, g, or t
  misc_feature (365)..(365): n is a, c, g, or t
  misc_feature (367)..(367): n is a, c, g, or t
  misc_feature (375)..(375): n is a, c, g, or t
  misc_feature (381)..(381): n is a, c, g, or t
  misc_feature (385)..(385): n is a, c, g, or t
  misc_feature (889)..(889): n is a, c, g, or t
  misc_feature (898)..(898): n is a, c, g, or t
  misc_feature (931)..(931): n is a, c, g, or t
caacctcggcacagagncgcaggcggccaaccagggccaaggggcggtagagcggccaaagtccgaccgggtgccaactgttcccaacccccgcctcgggcccgccgccggcgccgccatgggcaaaaagcacaaaaaacacaaagncnaatnacgctcatcctacgaggattataccgacaagcccctggaaaaacctctaaaactaatcctaaaggtcggaagaagtgaagtnactgaactctcaagatccggcnacnantccaattactataataanaagtcaaaccatgancnaaaaaggcacaaaaaaaaaaaaaaaaaaaaaaaaaaaaagtccgaaaaggaaaaacatctggacgatnangaaaaaangaagcnaaangaaaaaaaaaagcggaaacaaaaaaaggagcactgtgacacggagggagaggctgacgactttgatcctgggaagaaggtggaggtggagccgcccccagatcggccagtccgagcgtgccggacacagccagccgaaaatgagagcacacctattcagcaactcctggaacacttcctccgccagcttcagagaaaagatccccatggattttttgcttttcctgtcacggatgcaattgctcctggatattcaatgataataaaacatcccatggattttggcaccatgaaagacaaaattgtagctaatgaatacaagtcagttacggaatttaaggcagatttcaagctgatgtgtgataatgcaatgacatacaataggccagataccgtgtactacaagttggcgaagaagatccttcacgcagctttaagatgatgagcaaacaggcagctcttttgggcaatgaagatacagctgttgaggaacgtgtccctgaanttgtaccangtacaagtagaaactgccaagaaatccaaaaanccgagatagagaagttatcagctgcatgtttgagcctgaagg

SEQ ID NO: 502998 - DNA, 712 bp, Homo sapiens
taaatttcttagtcgttgggaatcctttggcatgcttaaggattccaaacgactaagaaattaaaaaaaaaaagactggtcattcataccattcacacctaaagactggaatttatctggttttaaaaatgaacttctcccgctacacagaagtaacaaatatggtagtcagtttggtatttagaacatgtttgggtacgcagggatgtttccataattttcagagattatgcattcttcatgaatactttggtatggctgcttgcaaatatgcttttccaaacttgaaatcataggctgtgaccagcggtgtcccagtttaaagctttcacttcattggggttttcaattaaggatttagaagttcccccaattacaaccgggttttaacatatgggacatacgggttctaataccggcttggcatattcacacatggtcaacggggacatgttaaacttggattggtcaaatttaatgcgggggggaatactacctatatgtatttcaacttagtttcaatatttgcattttgggggaaaaatctttttacacttcctcatggatagcggtgaatatatactatgctaaatctttatatcccggaaatatcagtacttgaacaaattcaaagcaccatgggtttataaaccctgggtccttgcagtggccataaggtcaaattataactgattacatttcaggtaaatta

SEQ ID NO: 502999 - DNA, 282 bp, Homo sapiens
agctctgcatgttccccctcgtggggggaaacccattgtcagaaggatgtttgatggccccctcccctcccctcctttacctcctaagcagtcctggcttttcctcatcactcccctttacagtgcctggtaacaaaggtacattggaggaccccaaccttttggtaagaattgtcccgtagcttgatattacagatggggtattttgccataaggtgtaaggctttttgcccagagaataagttatttatattagaaattaattttattaattaattgcca

SEQ ID NO: 503000 - DNA, 472 bp, Homo sapiens
gaggaaagtgctgaagcaggggccagtagccaccggtcggacacagaatcctatgagagagcgacgaggcagagacttcacatactaaatacttataagccccaaaaggatagctggaaaagtcggcaggtcatcctcttctggaggccatacttatcgcgcgtcacccatagatcatcacaagaaacctagatcaggacacagaaacatctatatagtaataggtttatatgacaaactagctaacaaaacctctgacatctaaatagaaaatatcatcacttgacgggtacttcacagcgcggacaagttatttcctatctcatcccagcggccacccctcccccaaactctcaaacgtacttctggtgaggatccactcccagctcaggatagaacatgtgacctaggccccaaccaatcagcacgtctcatccccttggccaccatgattagctcaccgatgggcatg

SEQ ID NO: 503001 - DNA, 709 bp, Homo sapiens
ggaggcgaaggtgaccgggaccgagcatttcagatctgctcggtagaccgttggtgcaccaccaccatgtgcgtgcagaggtgatgtgtctccggacattaccttctagggttgccacccagctctcaccaaggctctcccctgttgtgaagaattccatcacgaagaatcaagtggctgttaacacctagcagggaatatgccacaaaacaagatatggggactccgggtgtgggagaacctgggcaagaatcttcacagagcgcagcatttggaaccatcgattggacaaaattattagaaattgatcagatgggaagatggtttgttgctggaggggctgctgttggtctgtggagcaatgtgtgcctactatggctggggacgtgtctaatgagatgtggagctatgtgaaaaaggcttgtaaatttgggcctcagtcttgtcacggatagaattcattccaccctatatgtacttagcagggaagtatcgggttaaaacaagcttgtgtcctggccataagcaatcaagcagaagcgcctgtctccattgaaattccatgatgacggaggctcttggggtgcccaattgggggtgcccctttggcaacgcaatggttggcacgcttggaatgctgggtacgatcaataccattatgacagagcccaggcccaaagcattctgctgggtgccacattctggtgga

SEQ ID NO: 503002 - DNA, 172 bp, Homo sapiens
aaccttttttctaaaaaggggcccccctttttttttacaagaaaaaacaaaaaaattttccccaagcctcccccgggggaaaaaaaaaaaattgttttagttaaatggcccaaagggggggggggaacggggggggacttgggccttaaaaaaaaaggacctttttttttta

SEQ ID NO: 503003 - DNA, 319 bp, Homo sapiens
  misc_feature (78)..(78): n is a, c, g, or t
  misc_feature (297)..(297): n is a, c, g, or t
gatctgaagagcgtctgggtcactgggcatcactaaggtcttcagcaatggggctgacctctccggggtcacagaggnggaccctgaagctctccaaggccgtgcataaggctgtgctgaccatcgacgagaaagggactgaagctgctggggcatgtttttagaggcataccatgtctatcccccgaggtaagtcacaaccctttgtcttcttaatgttgacaaatacagtctcctcttcatgggaaagtggtgaatccaccaaatactgcttcgtctaccctcctcatcctggcntcctggtgcataagaggtggtg

SEQ ID NO: 503004 - DNA, 112 bp, Homo sapiens
cagatcatggacaaggaacggcattcctcctgaccaggcacaggttgatcttatgccggaaagcagctggaacatgggcgcaccctgtctgactacaacacaccgggcgatc

SEQ ID NO: 503005 - DNA, 359 bp, Homo sapiens
gttacattcacatgttgaagccgtaacccctagtacctcagaatgtggtcttacttggaaagaaagcggttgcagatgtcattagttaagatgaggtccttatatgactggggcccttataaaaaagggaaatctagacccagacatgtgcatagagaggacgccatgtgcagatgaaggcagacagggtgatgctactgtaagccatggatgccaaggattgccagccgccaccaggagccagagggaggcgtgggacagattctcactcccagcccccagaggaagcaaccgtgcccaaccttgatctcaggttccagcccccttcactgtgagacaatacacttctctagtttgtg

SEQ ID NO: 503006 - DNA, 1209 bp, Homo sapiens
agcggcttggttcatttcttttcattcttttttctctaaacttcccttctcgcttcatttcattcatttcatcttccatcactgataccctcacttccagttgatcgcactcggctcctgaggcttctgcattcttcacgtagttctcgagccttggctttcagctccactcagctcctttaagcacttctctgtacttggttatcctagtcatacagtccatctaacactgtttcccagaacgctctctgcaacttctttgccttccgtttgaactttcctcctgttagcttcggagctcgctctgactcgctctgacagtcttcttctctcaactcagtcaaagtcattctccgtcccgcttgctcccgctgctgcgtgacgcgaactgcattccttcggcccggaggcacgcacgcgcctcctggctttcttcgcagcttctccagctctccctagctctgcttcttattccgccacctcttaagctggctcttccaactcctacccttctcgggctcattgcatgcactggctgactgcagcagatgaagctcttcacgcgttgtgcgcactgctcccttttcctgcttctgtctacgctttttccgctgtcttaccccagcagccacgggaccccttcgagcctggcagcgctcctgcttcgggcacgcttctctgccctcacgcacgtgttcccaccatctcaggcacgccctgttctgtgccctagcgttagccctctcatgccgcggtggtcctggcccaatccagccaccactttttggctgggaaaccccaaccgaaaattgcactggcttgtgtcttggagctccgctttcccttcctggggacacccttcctcgctcctccagcagccgcagcctcacctccttgctccggtcgctttgcaggcctgtccatggtctcgccccctaatctgcgggcggatcgcctccctcatttacgggctggcctccgctgtcctgtcacatggacgctccacgcgcccccccccacttcgaccagcgaggccctctcttggcccgctcctcccatcattctcccagtcttgcctggctgtcggcgacttacctctgtctctcccttccccgctgctcccgctctgcgtcctttctccttcgccgctcggctttctgcctgtcttcttctgctctcgcctctttcccgtccccctgtgtggcctcc

SEQ ID NO: 503007 - DNA, 123 bp, Homo sapiens
agtgatcccttgatgataccatctccatccttgttcaaatgcatgaaaatgctctgaacatgccctccagcctaactgagtacaacctgcctggtggtggtacctgatgctcgaattctgtaa

SEQ ID NO: 503008 - DNA, 863 bp, Homo sapiens
gtcccggccccgccgttttttacccccctcctatagggctgccacaacccttttttgcaggttgtaagcatatgaacagggtgaacctttataccacggcgtccttacagatgctattcgtttgtaaaagagaccgtttgattcgtgggagttaatacaacacaattctgtgttacccccgcagtctcttttttaaagaaagcggggctgtttccgcccgagagggggtgatttcaacaggccccctgtgtaatcctcccctcccgcccgccgggagcgaaaatttccgctctcacctttttacacccccctctagtttaacagcccctgtttccctctatcccccctcgcgctcattgataggtgcaaggagactttctgatgaggcgacatgtgtcttagggcgaagtggcaaaccccttttgtgacgacagaaattagaaaacctttctattgaaagtggagcacacccgcgtacgacaccactccgattcccgcgtgaagtgcgcgccacacataaagaattattagtgagcaaagacctcttgcgagcgccaatcttgagatagagatatggtacacaccactcatctcttctgaaagaaaatacagaacacggaatttttaaccccccgcccgaatatattagcaaccaccgactagaacaaaatactcccctacttaagcgctaccccaacaaatactagggccacatatgtccccactccttctcatactacaaattctgaagaagatatagaaacacccaatattagagcaaattcatacaattcttcccacaagtcttccagacaatcaagaagttccaaaccccgaacccaaattttggaaaaccccataac

SEQ ID NO: 503009 - DNA, 238 bp, Homo sapiens
tcccgggccagcatgccctatcgtgggaatcgttgctggacctggctgtactggttgtcctagctgtaacataggagctatggtggatgttgtgatgtgtaggaggaagagctcaggtggaaaaggagggagctgatctcaggctgcgtccagcaacagtgcccaggcctcgagagtagggcctggagagaaggctgagaggcaggagctgggtctaaagaggccattgtcaagacgg

SEQ ID NO: 503010 - DNA, 257 bp, Homo sapiens
gaaaaaatttgcccccttaaaaccccttttttttaaaaaaaaaaaaaaagaaaatttccttaggggacttatctttgcaggtggggacttaaattttttttaaaaaaaacccctttggattggtcccattgtttgacccagtatgttttgtaaacccgttagttaaaatccccctgtatctttaaaaatggggggaaatgaacccgccccttccccttggaaaaactgatggttttaaataaactaattccctaata

SEQ ID NO: 503011 - DNA, 246 bp, Homo sapiens
tatgggccttaaacctatttgacttcctactggactgaccctgacaccctccagtcacaacaactcacatggactgtcctccctcagcgacttcaggtatagccctcatttctttggacaagctctagcccgaaacctcacttccttaaacctgtctcccagtcatcttcaatatgtggacgaccttcttctttgcagcccctctctaaaagactctcaaactcacacggccattcaacgcctccg

SEQ ID NO: 503012 - DNA, 145 bp, Homo sapiens
  misc_feature (9)..(9): n is a, c, g, or t
  misc_feature (80)..(80): n is a, c, g, or t
  misc_feature (133)..(133): n is a, c, g, or t
tgaagctcnggcacttcacgccggtcccgcggagatatcgatataagaagaaatgggctaccacagaaccacaattcacnggccagtcggcttgctctgcagaattttgacatgacctacagtgtacagtttngggatctttggc

SEQ ID NO: 503013 - DNA, 165 bp, Homo sapiens
ggtctctgacaggctaccttccccaggattctgatcttaagcacactgccaagttctctattctccagtatctagaagattgctccacaagattcctgcccccatgctcccaataaccccaatgtcatttacttactatccaccaattgtgtagaaacttgaact

SEQ ID NO: 503014 - DNA, 392 bp, Homo sapiens
caaagtttgcatactctcgctattacggtccacgtacagcgctattagtactgtgaccgttttccgcctctgtaaacgtgtaagcgtacagcatggcgcatactaggcagagtagacccacttactatcactaatggagtgaaagtagagcaacttgagcataagcccattggacggtgccttatgatactaacgaatgagtactggaatattgacaggccctattttggagaacgcctaatgagagtgatagacgcagaagtccgttcttatgcaacggatctaggcagaggtagtatatacatacgtgggaatacagccttacaagactgtgcaagttcaactacgggattgacggttgccttcacagggtgctggtacacattcccggg

SEQ ID NO: 503015 - DNA, 179 bp, Homo sapiens
cacgaggcggatgggcatccgcaatcgcgcggattgagggggctcgcggcgcttggttcctggtctccgggtcagggcaatgtgtcgcacggtagtgatgatggcggccagcctgtccctgaccgcggctgtggtggctcacgccgactatctcagacaccagttctaccccactgtgg

SEQ ID NO: 503016 - DNA, 1014 bp, Homo sapiens
  misc_feature (3)..(3): n is a, c, g, or t
  misc_feature (136)..(136): n is a, c, g, or t
  misc_feature (144)..(144): n is a, c, g, or t
  misc_feature (159)..(159): n is a, c, g, or t
  misc_feature (162)..(162): n is a, c, g, or t
  misc_feature (282)..(282): n is a, c, g, or t
  misc_feature (299)..(299): n is a, c, g, or t
  misc_feature (306)..(306): n is a, c, g, or t
  misc_feature (312)..(312): n is a, c, g, or t
  misc_feature (467)..(467): n is a, c, g, or t
  misc_feature (479)..(479): n is a, c, g, or t
  misc_feature (539)..(539): n is a, c, g, or t
  misc_feature (541)..(541): n is a, c, g, or t
  misc_feature (593)..(593): n is a, c, g, or t
  misc_feature (599)..(599): n is a, c, g, or t
  misc_feature (619)..(619): n is a, c, g, or t
  misc_feature (623)..(623): n is a, c, g, or t
  misc_feature (643)..(643): n is a, c, g, or t
  misc_feature (655)..(655): n is a, c, g, or t
  misc_feature (747)..(747): n is a, c, g, or t
  misc_feature (766)..(766): n is a, c, g, or t
  misc_feature (790)..(791): n is a, c, g, or t
  misc_feature (803)..(803): n is a, c, g, or t
  misc_feature (812)..(812): n is a, c, g, or t
  misc_feature (828)..(828): n is a, c, g, or t
  misc_feature (842)..(842): n is a, c, g, or t
  misc_feature (852)..(853): n is a, c, g, or t
  misc_feature (860)..(860): n is a, c, g, or t
  misc_feature (869)..(869): n is a, c, g, or t
  misc_feature (920)..(920): n is a, c, g, or t
  misc_feature (937)..(937): n is a, c, g, or t
  misc_feature (947)..(947): n is a, c, g, or t
  misc_feature (951)..(951): n is a, c, g, or t
  misc_feature (961)..(961): n is a, c, g, or t
tantgcttttttaatactttccagttctgccaacattcctgtcatgcatccttaataacaatgctctcccagaaccgggatgcgcgcgggcggtgaggtggggttggtgggggagtacgtttctgagctagttagngtcacgtnaggagggccgcgtgnctngatgtgtgtggagtgacaattagaaattagtcatgggagggcatgtctaccacagatatctttcctcacatttaaattattccatttcttcctacagtcctccttctatctttagttccnttttaaattacccttcntccttcnttcccntttttcttgcttcctttttctcccttttgtccctctagtttaagagattgtgcttctgtttactgtcctgttgtggtgcgtttaaatcaaaatgtgatcgataattattgtttaacaaagttcaggttgcgtgctctaaaaacataagtggtttnctgttggatgcncttccgctctctttgtttcctttccgagttgatgtctcttcgtatatttcctttttccanangggcaccttggcttttaaagtatcaatggcatagctcaaagcttcaagagangcagcnctgtgggctgaggacaaagnaatnattatgcttgcttctgacantggaaccaagcnaagtctatggaacactgctatgtgtttgactggccatttctgcctaatgtcactacaaatctttctgacttcattttccgccatgggtaganatgcttcatattctaagcnaatgacttttttcccttcaaagtnntttcttgtagtncctacaaanagggatattgcaccanagagcggcgaaatnaccaactgtnngacttcntctactganagtttctcggcagtaaagtttgtaacatctttagatttctcttcaacttcntccatatctttcctggntggctcaaancacnatctccactnatggggggggtacggcaatttcgtctccggctgagcccgggggcgctctccag

SEQ ID NO: 503017 - DNA, 892 bp, Homo sapiens
actcgtcgcggggcccgcatgtccccagcgcttgggcctcattgggggttcttattgggccccgggtcgcgccaaacagtccgtggatagccgtttagaggttttaaagtgtcaggtttctcagggccttcaacggcccgctggattctacaggtcctcccccgagtgccccatgtctatttcaggctgggtgcgtctcagccgcgtctccgcccccagctccaaggggcagggttctccttccggaaccggggagtgtcctgatccccccacgggcacgcttgtcttgctgggagcctttgcgccgttcgtccccccctggttcgagaaaaaaagggggtttgccctcttcccagcacggggcgcccatgtcagtcccaccttggttggaagaattgttctcacggaggcagagggcccaaaggggatcttctccaagtactacttggcccgtaggggggacaagttttcttaaaagaaggaacgggccaaacccaaaaatgtggatgacacatcgtgccctcctaacaaatgctagctacgtcagtccccggctaacatctgcgcgcttcccttgttcagttataattcgcagagtaagctgcctttctcccttcctcggtcatgaaataacaacagtttgtcacccagttagtcttttgcaccaacaatggtagttgtcaccaacacaagacccgcgttgatttcttgtgtaaaaagacagggaagcctcaccctccacttggcgattctgaaatacatatgccattcggaaggtcatatcaacacagaaaatattaggagaggacggtcgcaacaagagagtaaatagtggggagaccccaaaaaaaaacgggcaaaagcccccttttttaaaacagccaacataaca

SEQ ID NO: 503018 - DNA, 970 bp, Homo sapiens
ggcgcgcgggcggcgtggcgggctggggatccgccgcggcagtgccagcgtccagcgccagacccgcgccccgcgctctccggcccgtcgcctgctcttgggactctgcgagcccgcgactcccgccctgtcctgttctgctgcccgagtatggagctgcgtgtgttgcgaatggcaccctgtgcatctgcgccccgggtccggtgccgtgaccctgctggctgctgtggggaccagcgtgtcctgctagagcctgctccgcctggagtgagcagctacgtaccccgtgcctcctacttccagtgcgtgcatctgggcagatcaagccgtacattgcggaagatgctggcttactggatgctggaggtatgtgaggagcagcgctgtgagcgagcgaaggtcttccccctgggcttgagctaccttgggatcggcttacctgctcttggcgtccccactcctgatcacgcgccgctagttcgcgagggtccttgcgttgccgcgtctgtagtgctggctgggccctcccaagcctagtgacgaagaacgagggccccattgacccattcggaataaaccatgttgcatcatagcaagcgaacccacgacgtgtcttctttcccacggcgcagttgccgaggaccatgcggcagacgtgcttgcgtccctaagggcgaccaggcttccaagcagcgagaacccaagggacccgatctggtgcgatcagacacaattgaacaactaccctgcgcccctcccaatactcttgcaagcccaggaccacactacacaataaacaccatgaatgaaatcccgaaccactggcccccatccgaaccaccaacaaaaataaacactatgccctacacgaaaacccaatacagctggacccccgtatcttgttagcactaaccaaaaacattaactcaatccactattagcccaatgataacccccgagtcaacacaac

SEQ ID NO: 503019 - DNA, 705 bp, Homo sapiens
aacgatgaagtaactggcgaacatggtccggcccaagcctcggatgatactcatggacatatgtctaccgcgccgaaggcttctgcggtagctaactgggcataattttcgccagatgatgactagttgcgggaatacagtagcctggcatgtgtgttgacgcaccatgaccgctgcgcttatcgcgccccgtacgttgcggaggcctcgcttttttcgagggccaaacgctgtgcactaagctggcacacgatgatcacatgtgaatccgaggacaggatggatcgtcgcgtggatgcgtcgggcaccgtcgacgtcgctgaagagacgaaaacccagagggcgcaacgtttcgagcgtgacgccctcgaataccttgaccagctctatggcgccgcgctgcgcatgacccgcaacccggctgacgccgaagatgttgtccaagaggcctatgccaaagctttttcctcgttccaccagttccgacctggtacgaacctcaaggcttggctgtatcgcattctgacgaatacctacatcaactcgtaccgcaaggctcagcgtcgcccccagacatcagatgaccaggacgtcgaggattggcagatcgctaaagctgcgtcccatgacagcaacggtttgcggtctgccgagttggaggccctagatgggctgcctgaccagcagattctagacgctctggac

SEQ ID NO: 503020 - DNA, 114 bp, Homo sapiens
actacgtctagctctgtagacgacgatgtagcgctgtaaatcttggcaccgttcaaaccaatcacgttgatccattcgtgctccattagatcggttagaagaacaaccgcatca

SEQ ID NO: 503021 - DNA, 402 bp, Homo sapiens
tgaaaggcaaaaaaaaaaaaaattttaaaaaaaaaaaaaaaaaaaaaaaaaaaaaaaaaaaaaaaaaaaaaaaaaaaaaaaaaaaaaaaaaaaaaaaaaaaaaaaaaaaaaaaaaaaaaaaaaaaaaaaatttaaaaaaaaaaaaaaaaaaaaaaaaaaaaaacttttgggcccctttggcccatttattttttaacttgggcaacttttttctttgggcccaaatttgggtctatttggccaattcccccttatggggggtgttttaaaaattaagggcccggttttaaaaaaggtggttttgggaaaaccctggggttcccccatttaaaccctttggaaaaaaacccctttttcccagttggggtaataccaaaagggcccccccctttggccttttca

SEQ ID NO: 503022 - DNA, 465 bp, Homo sapiens
  misc_feature (72)..(72): n is a, c, g, or t
  misc_feature (181)..(181): n is a, c, g, or t
  misc_feature (189)..(190): n is a, c, g, or t
  misc_feature (341)..(341): n is a, c, g, or t
  misc_feature (360)..(360): n is a, c, g, or t
taggagtgtttgcttgctcttgctgtgtttcgatttttgatgcaattctttaattttggaagcctatgaatnatcagttttcattttggagataaaattaaatggatcactgatattttagtcattctgcttctcatctaaaattccatattctgtattaggggaaaaaggaaaaaaaaanaaattacnnccctcccagcaccagcccccctctcaaacccccaacccaaaaccaagcattttggaatgagtctcctttagtttcagagtgtggattgtataacccatatactcttcgatgtacttgtttggtttggtattaatttgactgtgcatgacancggccatcttttctttggncaaagttttctgtttattttgcctgtcaaattcgatggacctttaaggtgtctttatgaagtttgctattctggcaataaacttttagacttttgaaaaaaaaaa

SEQ ID NO: 503023 - DNA, 267 bp, Homo sapiens
gattaataaatggcttttcataattatcatcctctattacaacttcattggctgtacgataattcacattttcatctcccaaaccaaatgtatgacgagcttccccgtatttcatcataaatactgcaggctcaacatactttttgcagaccaactgaatatccgagcattgctagggaactattgtaatcgttgccctttgatgtaggcttgctctcatcactgacagtcgggctaatcgtcttacctggcttttcactttagcca

SEQ ID NO: 503024 - DNA, 510 bp, Homo sapiens
ggacagcttcaggtatgtctttatcagcagtttgaaaacagactaatacaccatgggagccccaggcaagcatcttttcttccagaattcctgccctgagccctcaggcgccaatagctccctcctctgagttctgattcttcctccctctttccttccttctgcatctgcattttccccgttattgttgtcaaatccatctctcccccaccaacctgcaagcccctcaaggacaggattgtcaccttcctttgtgttcccatgacactaaccacgtttctctacccctccaggttaccttcctccatgtaagagaggctgtgcaaatggtttcagggtgtttttttttttaaagttttatcatggtaaacaatacttaacacaaattttaccattttaaccattattaagtgagcagtttggtggcattaaagtatgttcacattgttgtgctaccatcagcaccatccatctccagagccttcttcatcttcccaacggaagctgtcc

SEQ ID NO: 503025 - DNA, 434 bp, Homo sapiens
  misc_feature (72)..(72): n is a, c, g, or t
  misc_feature (310)..(310): n is a, c, g, or t
  misc_feature (329)..(329): n is a, c, g, or t
taggagtgtttgcttgctcttgctgtgtttcgatttttgatgcaattctttaattttggaagcctatgaatnatcagttttcattttggagataaaattaaatggatcactgatattttagtcattctgcttctcatctaaaattccatattctgtattccctcccagcaccagcccccctctcaaacccccaacccaaaaccaagcattttggaatgagtctcctttagtttcagagtgtggattgtataacccatatactcttcgatgtacttgtttggtttggtattaatttgactgtgcatgacancggccatcttttctttggncaaagttttctgtttattttgcctgtcaaattcgatggacctttaaggtgtctttatgaagtttgctattctggcaataaacttttagacttttgaaaaaaaaaa

SEQ ID NO: 503026 - DNA, 125 bp, Homo sapiens
gatctagaggatcccatggcatgtagtgaggaatgtaggttctggaaaaaaatagaggagggaattgaattggttaaacattttcgtagtggagcggggagtaatggatgagtatttgcaggtta

SEQ ID NO: 503027 - DNA, 336 bp, Homo sapiens
tcagctcggtacctgacgctgaaggtcaaaggatcgcttgagcccaggaggttgaggtccagtgatctgtgtttgcactgctgcactccagcctgagcaagaccctttctaggaaaataaaaaaaaataaaaaaaaataagaaaaaaaaaaaaaaaggaaaatctgggtctgttttgccaatctggtaatttccaggaacaaggcaaacaattggttttggaacccagttctctatgggtctctccagtttcctgcatgtgtcttattgagcagatttgccctgacagcttttattgggctacatatcttccctgtacaggacattctgatagata

SEQ ID NO: 503028 - DNA, 329 bp, Homo sapiens
ccttctccgcctgcaggatggggctgggcatggttggccctgatgtggtcccatctcactctgagaacctcatgtacaaggctgtgactcaacgttttcttcatggctgagaggtgctaattggttcacacgctgttttccaagatgtgagctgggaagggctagctcttctggcgtatcccatacccgagtattctctagggttcttcacaatcctgggacagtaaagaagggaaaagtggtaggaaatgcgagtaaggcatggaaattacaaatcattggctaccaaaattactcaagctgaagaaggcagacaactttaggagatg

SEQ ID NO: 503029 - DNA, 408 bp, Homo sapiens
  misc_feature (329)..(329): n is a, c, g, or t
tatccccggctctgggtatatttaagataaagttttttttaatcgcagccaaaagacacatgaaaaaatgctcatcatcactggccatcagagaaatgcaaatcaaaaccacaatgagataccatctcacaccagttagaatggcgatcattaaaatgtcaggaaacaacaggtgctggagaggatgtggagaaataggaacacttttacactgttgctgggactgtaaactagttcaaccattgtggaagacagtgtggcaattcctcaaagtcctaaagacagaaatgccatttgacccagcaatcccacaactgagtgtatacccnaaggaatataaattattctgttataaagacacataccacacgtttactgcagcactattcacatagaaaagacagaatc

SEQ ID NO: 503030 - DNA, 499 bp, Homo sapiens
  misc_feature (24)..(24): n is a, c, g, or t
ctggccttggttcagagagagaantcagttgcagtgtaaaaggccattgcccactatgaccagcaaatgggtgagaaagtggaggtggccatggaaacccttcgggagctgttggacttgtgcaggaccagtgagagggaggccattgaagtcttcatgaaaaactctttcaaggatgtaggccaaagtttgcagaaaggattggagactctattagatgcaaaacagaatgacatttgtaaagggaacctggaagcatcatcggattattgtttggctttacttaaggatatttttggtcgtgtagaagaagcagtgaagcaggggatttattctaagccaggaggccatgatctcttcattcagaaaacagaagaagtgaaggctaagtacttcgggagcctcggaaaggaaacaggctgaaaaagttctgcagaaatatttagagtccaaggagtctgtagtcatgcaatattacagactgtccaggctctccaga

SEQ ID NO: 503031 - DNA, 221 bp, Homo sapiens
aaaagggataaggagacgaggagaagattttagagtggggagtctcaggagctcatatctcagatataccaagtttgaggtgtattaagacaaccagccaggtgcagtagctcatgcctgtaatcccagcaagttgggaggccaaggcgggcagaacccgaggtcggtagttcgagaccaacctggccaatatggtgaaatcccgtctctaaattttgtat

SEQ ID NO: 503032 - DNA, 1781 bp, Homo sapiens
gtgtcacgcctagagatggagcgtcggagcgaagaagaaggctgtatgagtatgcagaggcaatttgtgtgtgtgtacgtctgaagagactgcagtcttaaaaatcgatgcatgaccgagagtgcgtgtgatgagcgatgggttgatgatactcgaatcgtagatactatcgacgtctcaccaatgactctagtgatatcacatgatacgttgactccataacttggagcctaggcagcccatcatcatcatgtcatccgatgtgacagatatcgtaatgagtcgtccaatccgaaccagtcatgctgtggaccctctgatatacctgtgaggcgaaccagtgccatttataaaccacggtgcatgcatgactccagggagtgcatcactggacgtaatggacaagcatatagatacacaagaaaaaaaagcaactaaggtaacaatacaggggaatatcccgaatgaagtaaaacaaaaggacacacaggaaggggacaactgagcggaaatgaccagggaaagggaagtcccacacacaaagtgccatgggggaggccaaccacccagagaagagcagcactagccaaagaaaacaacgggcaagaccacgccaacaaaaaaacacaagcaaatgtagccgagccacaggagcatgcacaagaacaggcaagaatgccaaaccaatcaatgcaaaaccaagtggcgatccagcacatacaacacaacggtgtacatggcaacttgcccaaacaaggacaagaagcgagacaaggaccccactgaaccaaagacagacccaaaggacaacagatggaacatcaaaaaaagaggggacagaggacacaaagaggaaaccaaaataagaggacaaataaaagcaatcaacaaagaagaaagagaagaacagagaaaaagaaaaacacaaatacacaggtataccccctgttcccacaagaacgcagggcaacagacaaacagaacccagcaagaggaaaaccaaaaacaaaagagaataccctaacccacccagccaagaaacaaagacataaacacacagaaagaaaccacaagacaggacatcgacaatgaaccgcagagtccaaacaccaaacagcgcacaagccaccgcacacggacaacacaaacgccagagcgagacaacaccacaacaagaacacacccactgaaagcccacaaaaaccccacagaacaaacaccaaccaaaacaacagcaacccacacacgacacacacaacaaaaaacaccgcgacagccatacagcaacaccaccacacaaacagcgcaacacaagacacacccacacgcacacagagtaccaaacaaaacgtagcgaccacgcaaacaacaagagaatactcacaaaacacaacccaaacgacacacacacaagaaaccacatcaagacgacagacacaccaaaacagcggacgaacacaacggcacaacaagcagaaccacaccagagctcacaacaaacacacacaagaaatacacgcaaaaaaacaaataagagacaacacaccacaaaaacacacaacactcgcaaaatcacacagcgtagcacacccgacgaaaactacgaaccacttaacactcaacacccaagaccacacactcgaacatatacaatagcaacaaccacaaacataaaaccaaccacagcacaacacaagccaactacaacaccaggcacaagcaagctaacaaacgcaaagcagccagagaacacagccacacgctacatccatactacgccc

SEQ ID NO: 503033 - DNA, 137 bp, Homo sapiens
ctttgcccctttttccccggggggcccccccccattgggggcccccgggttttttttccccccccccccccccccccccttgggtttttttttggtaatgttgggggggaatgaataaaaaaaggggttttttgcca

SEQ ID NO: 503034 - DNA, 233 bp, Homo sapiens
ggcagacagccatggtcacatggtgaaaaccgtctctagtaaaatagaagaatgagctgggcgtggtggcgggcacctatatcccggcggactcaggaggctgaagcacaagaatcgcttgaacccaggaggcagaggttgcattgagccgagattgtgccactgcactccagcttgggtgatatagcgagactcagtctcaaaaacaaaacaaaacaatcttcatatgtacc

SEQ ID NO: 503035 - DNA, 187 bp, Homo sapiens
tacatcccctttacagtgtatggcagctcacgcagaatacttgcctctatgtgggactaagcatacgaggccataagcctacagtcaagatggattctcaccctccatagcccgtcccaacttttgttcatatataccgtatctggggaaatccctgaagccccaagcagacagactgtttccacct

SEQ ID NO: 503036 - DNA, 256 bp, Homo sapiens
taccgtggcctgtatggtgacaccagaagggagagcatggctcaacccctctctggctcacccctccagctctggctccccatgtatcattatatagtgacctcctatgtctgttctgacaaattctgactgttttctcttttgtatgatatatgtatagccgcctgtgctctctttttggtaccatttgcatgagattttctatttcttcacttttatctcatgtgtgaacttaaaacaaaagagtctgttatag

SEQ ID NO: 503037 - DNA, 399 bp, Homo sapiens
ctatccagagcatgggatgtttccatctgctgtgtcctcttggatttctataagcaggggttgtagttctccttgaagaggtctttcacttccttggttagctgtattcctaagtattttattctcttggtggcaatggtgaatgggagttcattcatgattggcatttcttctggtctgttgttggtgtataggagtgctggtgacttctgcacatggacttggtatctggagacttggctgacgtggcttatcagcttaagaagctttggggctgaaatgatggggttttcgagatataggatcatgtcatctgcaaacaaagaaaatttgacttcctctcttcctatttgaatacgctttatttctttctctggcctaatggccccgggccgaatg

SEQ ID NO: 503038 - DNA, 329 bp, Homo sapiens
  misc_feature (104)..(104): n is a, c, g, or t
  misc_feature (189)..(189): n is a, c, g, or t
  misc_feature (198)..(198): n is a, c, g, or t
  misc_feature (227)..(227): n is a, c, g, or t
  misc_feature (229)..(229): n is a, c, g, or t
tttattttcaggcagggtctcgatctgttgctcaaactggagttctgtggcgcgatctcagtttactccagcctccacctccccggctcaagcagtcctcccanttcatcctcccaagtagcttaaactacaggtgcatgccaccacatctggctttttttctgcattttttttttgtagaaatggggntttgtcgtntggcccaggctggtctcaaacttctgggntnaagcgatttctcccacctttgcctccgaaaggcgtgagtcaccagggccagactagattgagtttaaataagatttggttgtggcagccgagccgggtgg

SEQ ID NO: 503039 - DNA, 830 bp, Homo sapiens
gggaggttgtggtgagctaggatcgtgccattgtactccagtgcttgtgtaatacagagcgaaattctcgtctctcacagcgagaaattgcgttgactcctggtgagcgtggagtgttgtggtgagctaatgattgtgccattgcatcctccagaccttgagtaatttgataggaagctgatgatcttccgtctcaatatagcagcaaaaattaaacacgaacagcccactatacaatatcacattacatctcatctcagatcttccaggaactcatatgcctggacattttgctgcggtgacctggtgcacatgaagcgtgttgagcatccgatattacccctagtagttgctgaagagatgtgttcgcgcgcacatctagcactgtcttgctgggtcactagagactgacctttattagtgtatataccacttgttgcatcgcgtgtgatccgcctcgaaaatgtttctgtcaaacgcaaaacctcactacacactgcgcctgctccgtaatgtgaccaactcagatccacgccaagttttgcaacatctatcagcaccacacaataacatataacccgtaagttacactgttcccccaccaccgttgctttcctggaccccccttgggggatcttgtcaccttcaaacgggcgaattactcgtagcggcgcccctggggtgaccagaggtttctttgataccacgtggtcttgccatttcacgctacactttcgggaagcgtgcacacgtgttctccccctggcaacaatctctcacacctattggaggacacacagatctacggcaagagcgtaattcccacacgc

SEQ ID NO: 503040 - DNA, 112 bp, Homo sapiens
ctctgaagcactacagcttcttggtgcaccatcttctgataaattgtctttaatgacgaggtttgtttcctccattcttcctctggctgaagaaggatccaaatatcaatga

SEQ ID NO: 503041 - DNA, 410 bp, Homo sapiens
tgcctctttctcgggattccgtgtgttctcatcattgggtttcagaatagtctctttcgcatacacttaaactgtcagatccgtcacgtttaacatcttgtccaaaggtgtatacaggatatgggagtcatcagcggcttagaacgtgtatcttgttcttaaatgcctcctgtgaagtccatgtctatcagggttctatagcaccagaacttatgtactgggcttatgcgtatatctttaacatagctatcgtatatgtctcatagctattgagcacccgatctacagtcttgctcttcgaccacaggagcacatattcgcctgtgggtccacgatgcactcataagctccacgacacagatccaccgctagactctgactgttcgactgtgctacagagagcccgagcg

SEQ ID NO: 503042 - DNA, 200 bp, Homo sapiens
ccacgtgcgccgagcccccttcatttggcagtggagcccaggcagccgatgtgctggagcttctcctgagggaggcgcgaaccctctgcccgcatgtacggtggccgcaccccactgcgcagtgccatgctccggcccaaccccatcctcgcccgctctcctccgtgcacaacggagcccctgagcccgagggcgaggac

SEQ ID NO: 503043 - DNA, 189 bp, Homo sapiens
aactatagttgataataatgtattgtatattttgaaatagctacaagggaggattttaaatgttctcccccctaaaaatgctgattattatgaatttatccttttaccttggatacatgcataaaatatgttggaccccataaatatatataattattatttgtccattaaaaaccggcttccttctga

SEQ ID NO: 503044 - DNA, 277 bp, Homo sapiens
atgatgcaattgtcactaatttttaaatgcttttgaaatgaaatgcctaataatcacctggaaaacatagatgaaagtattaattaaagaggaaacctgcaaatactgaggttcaataggtagaaaagacattttaaaaacagcttttcatacaaattttgacatacaatataaattcagttaatataaagtgcacccgtaaagaaatcaataaaaatgatagtggcagcaaattaaatgtaattctgtatccaaagatttaaataataattaacaa

SEQ ID NO: 503045 - DNA, 428 bp, Homo sapiens
  misc_feature (42)..(42): n is a, c, g, or t
gacctgggggtcaggtgtccaaccaaaagcaccctccccganattgtttttcccacaaatggagtccagacccccgggccccccagggcctacttccttaaaaaggaggggagtggcatcagtggtttccagggcatgaccccccccccccaatttggaaagctttggattctgggggatgtttttacccccccggattttcccttttttgaaaggggaaaaaaccaggtggggctggcccccgggggttaaacctaaatttttttaccccccccccaggaagatttggcctttgtcctgggccccctttaaaggaatttaattttcccggctgtttttccccggggagggggggggttttggcccctttccccttcccccccaaaaagtaaaaaaaaaacaaaccccccttaaaccggttttttgga

SEQ ID NO: 503046 - DNA, 936 bp, Homo sapiens
gccgccgtgccgcgccgtgcgggcgcgtctcctcctaccgtcgggtggcccgggcgtcctctgccgtgttctcgggcgttcctacccggcgctccccgaggcgcggggtctggggctcgacgataggacggcccgtgcgcccgccggggccgccgctccctgggcggcggggggcaaggcattgaagctcttccaagccaggaccataaattctgcaagcagggagagccgcgcgttgtgtttgcaagccgcacggagggggggcctcaaagttccggacccggattatgattctaactttttgggcgttggaaattccccatttggttggggttgggaagaacgggtgctttggagaacaattcaattttcaatttcagggtgggaagtagtacttccacttggcattggatttggtgctcatatgttttattcaacccagttggtccttggttttctggaccagtaaggcgtggtcccaggggtgtcactggaatttaatacacataagggtgccaggtgagaaatactacctgcggcgttggtggaggttggcacccttccgaggggtaaatttccaaaagtgtttgggattcagtggagctggataaaggcttcctcccagggcgggctatattccaaaattgcggcagaaagctttggggggcaacctccccaggggaccattggtgtctggcaaggtcccaaaagtgggtggcgtcttcatttctgaagtggaccctagggtcttgggtacaagttggagaagtcatgttggttacaagcagggagagtttccttcctggtggcccagtctatgagacttgcttaaacagtgtgggctataaaaagtcgagaaggagaggggggataggggaagagaagattattagagagggaggagagaggcgaaacaagggggggtagtgtgacatg

SEQ ID NO: 503047 - DNA, 175 bp, Homo sapiens
agacgatgatggtttggactgattctggtggtccatcaggttctctgagacgccagtgtggccgaggcctggctgcttggactggagccgtacctgtccctgccgatcatgtataggccacgatcgtgtgactcatgtggcgccagctcatcaattcgcctcgaggtcctttgaa

SEQ ID NO: 503048 - DNA, 136 bp, Homo sapiens
acgattttccctatttactgtaggaattacttccaggtagttggatctatcgatctctttccttcttttgacattctgtgatcttcttcctggaaactcagactctcccttggttaaccgtttttcacacaacccc

SEQ ID NO: 503049 - DNA, 144 bp, Homo sapiens
cattaattttactccaagttttcaaaaactactaaagaaatattatctaccatatcttgtatgcctctatattttctcctgcctacaagagaatacaggcaatgttagtcaggtctgtcctatatttccacttgttgtaactcg

SEQ ID NO: 503050 - DNA, 153 bp, Homo sapiens
tacatttcagctcggtaccccacaccacctgagtctccgcatgatgaaacttcggctcactccttggcgcctgcctgatcctccaaatcaccacaggactcaggtggtgtgactcaggtggtgtgactcaggtggtgtgactcaggtggtgtg

SEQ ID NO: 503051 - DNA, 195 bp, Homo sapiens
atcgagctctgtacccggtcacatgcacagttaatattttgtatttttaatgtaggcatagggtttccaccatgttggccaggctgtgtctgaactcttgacctcaggagatccacctgctttggctcccaaagttctgggattacatggcataacgcaaccacacccagccttcccaagccaatctcaaactct

SEQ ID NO: 503052 - DNA, 230 bp, Homo sapiens
aatactactactactaggtggaagtataataactagatagtgataatactacaagcaatgtacaaggtatagggagaaagatagagcacatatagggacaatgcagggaggtatagtagctagaggtaggcctgagcctagacgtagaaggtagaatatcagaccagtgagaaggcatactaaagccagaagcaaaccgaggtaaagccagcagagcaggtaacggcagg

SEQ ID NO: 503053 - DNA, 162 bp, Homo sapiens
  misc_feature (55)..(55): n is a, c, g, or t
tttctttagagatgtccgagatccttccagatgattcaaaattcatatgtaccgnctctactttgaagctctatgaatcagaacttgaaatggaacctcttctatttgagctcacaatgtctgtctgcagccaagctccatgactcgaggagttagcctaga

SEQ ID NO: 503054 - DNA, 115 bp, Homo sapiens
atttggataaggagcacacgtgcacacattcacaccaaacctccaattcaaattaaacaattaatataaatataatacaatattctttataacaaaatgaatatgaggatttacc

SEQ ID NO: 503055 - DNA, 290 bp, Homo sapiens
cgcaatgctggcatggatatctgctcgaaggtgctgatgacagcgcgtaccttgtcaggcgtatctgcgacaatcaaggttccatgtgtagtaaactgaaggaatgctgtgaaagacctctgttggattccactgcattgtcgaagtcgagtgcggatgcatgcacctatgctgaggcataggatgacttcctgggcatgtatttgtgtgaatatgcaagaaggcatcctgattactctgtcgagctgctgctgacacttgccatgacatatgctgcactctagagggtg

SEQ ID NO: 503056 - DNA, 207 bp, Homo sapiens
taaagtctctgtgcttataatttagtcttcaacatattgtttctattctagttgtcctgtcttcttcatccagaaagtatacaaattctaagagtctatcttcattttgtatatcagtgtctatatattcttacaaactaacaccatacttaccattttttaatagttcttcagtgtctgaagttggttcatgatatcactagtaga

SEQ ID NO: 503057 - DNA, 270 bp, Homo sapiens
aaaaagttggggggtttttttggggaatatgagagggatggccccccccaggggccaaaatgttataccagggggttttttttttaacataaaactttcagagggggctgttttattcaaagcctaggggggtttcccgccccagtccccctgtttgggctttcagctggctaggtccttttggggatcctttgggccttcagccccttttccaaggtttttctatgggggggtgtttaactcccattaaacatcccgccttggttccga

SEQ ID NO: 503058 - DNA, 1730 bp, Homo sapiens
gagatgtttctaacatttaaataagaaaaaaatcaaatcgaagtcagcctgctggaaaagtgatcacatggcagttgcagtaacttgtatggaaagagaaaatgcaatgagcccagttactgcacttgccactaccatgctgtccatggaaggaataatcagcagttcagttgtcacaagccgcccttgaagaaaacgcagcaaaatatcttcattttaaaatattttgctgcgttttcttcaagggcggcttgtgacaacgcagcaaaatattttaaaatgaagatattgcagtccccagagccagtgaaggtttcttttggtaaaatgaaattgtgccattgtcaaagtaccccgtagtgatgagcactgactggttcactggccacattttagttcttcataataataggccacaaaagggctctgtggtttgcctccatgtgcactggcccctccccacccctagggggcactcagtagctgctgagaaggcctgtccacgaggctgttggaacccctccaataaatacttagaggtagtgtatctgatgcttgttttcatggagaaaattgtattggagaacttaaaacatcacgaatatttttaataggatccgcagacacccaaaggagaagcttggtcttttccaggtatttccaacttgagttcaacccaaagcctttgaaaggaatgcattaccacatgaccacatgctgagaccccatggggtctaacacgggacctaagaaagtctctgcagccagatagtacatggtgtctccacaaaactaggcattctggagattgcccagaaagggatgtgaggggaccgttaagatctgtcttgcttatctcatgcactcacattccttcagcctcctggagttcctgataaaaggaagccagggtgttgacattttttagctattgatttcccaatagcttgtggatcagttgtacacccacacttccttctctgcctaattccgtttttctggaaaaagtagtatgcccatgtatgtgtgtttttcttaacacaggtccatgaaagtttggcttcctggtttgatgtctgttgcgtggcctggaaaccagggagcagcaactattgagatggtttctgtgttcagtgaaaaattctatttcattgagacaattttttctttatccacagtaattttttgacactgtcatcatgaaactacccttaggaaaataagattacctgcaaaaaaaaaaagaaatgagttatggaataggaacagttatgtgatgattctgaaactttaacttagagcttcattactttaagaatggaaaacaacctctgagtttgatttcccaaagtttcataaagcccctaagctcatgattttcatcaactctttgcccacatagtcatttacctccacagccgtttgttgtcatagaaggggtggtggtgtttggatttgatttttttcaacttgcagtgagaaataggataggtgacaaaaccttacttgttttcttaagacaattcagtgcttgagcatctctgtcagaaatggaatgaaatactgttagccaattagaattattttatgtattgttattgtgttttgctgatttttatatgaaaatataattattcattcttgatctctggaagcaatcattattatgaggatcattttactttggaaacactttcataataaagataagtattaagaaaaaaaaaaaa

SEQ ID NO: 503059 - DNA, 142 bp, Homo sapiens
gcctgaggaccgcaactgggtcgagtcctgaagactcaagatgtaataactaaaagtgaggtctggtacctttacatgattccccggactcaaatgggctaacacgcttctcttctccagcagtcttcctgtccgtgaagtt

SEQ ID NO: 503060 - DNA, 1821 bp, Homo sapiens
gagatgtttctaacatttaaataagaaaaaaatcaaatcgaagtcagcctgctggaaaagtgatcacatggcagttgcagtaacttgtatggaaagagaaaatgcaatgagcccagttactgcacttgccactaccatgctgtccatggaaggaataatcagcagttcagttgtcacaagccgcccttgaagaaaacgcagcaaaatatcttcattttaaaatattttgctgcgttttcttcaagggcggcttgtgacaacgcagcaaaatattttaaaatgaagatattgcagtccccagagccagtgaaggtttcttttggtaaaatgaaattgtgccattgtcaaagtaccccgtagtgatgagcactgactggttcactggccacattttagttcttcataataataggccacaaaagggctctgtggtttgcctccatgtgcactggcccctccccacccctagggggcactcagtagctgctgagaaggcctgtccacgaggctgttggaacccctccaataaatacttagaggtagtgtatctgatgcttgttttcatggagaaaattgtattggagaacttaaaacatcacgaatatttttaataggatccgcagacacccaaaggagaagcttggtcttttccaggtatttccaacttgagttcaacccaaagcctttgaaaggaatgcattaccacatgaccacatgctgagaccccatggggtctaacacgggacctaagaaagtctctgcagccagatagtacatggtgtctccacaaaactaggcattctggagattgcccagaaagggatgtgaggggaccgttaagatctgtcttgcttatctcatgcactcacattccttcagcctcctggagttcctgataaaaggaagccagggtgttgacattttttagctattgatttcccaatagcttgtggatcagttgtacacccacacttccttctctgcctaattccgtttttctggaaaaagtagtatgcccatgtatgtgtgtttttcttaacacaggtccatgaaagtttggcttcctggtttgatgtctgttgcgtggcctggaaaccagggagcagcaactattgagatggtttctgtgttcagtgaaaaattctatttcattgagacaattttttctttatccacagtaattttttgacactgtcatcatgaaactacccttaggaaaataagattacctgcaaaaaaaaaaagaaatgagttatggaataggaacagttatgtgatgattctgaaactttaacttagagcttcattactttaagaatggaaaacaacctctgagtttgatttcccaaagtttcataaagcccctaagctcatgattttcatcaactctttgcccacatagtcatttacctccacagccgtttgttgtcatagaaggggtggtggtgtttggatttgatttttttcaacttgcagtgagaaataggataggtgacaaaaccttacttgttttgttaccattctgatgttggagcggccgccaacttttttttttttcaacttgcagtgagaaataggataggtgacaaacccttacttgttttcttaagacaattcagtgcttgagcatctctgtcagaaatggaatgaaatactgttagccaattagaattattttatgtattgttattgtgttttgctgatttttatatgaaaatataattattcattcttgatctctggaagcaatcattattatgaggatcattttactttggaaacactttcataataaagataagtattaagaaaaaaaaaaaa

SEQ ID NO: 503061 - DNA, 226 bp, Homo sapiens
tgccaccccggccaccctggccctggcccccatcctcttgaccaccctttggggtctcctctaaagcccccgaggcagacccacgcaagaacaaagctctcgagacacaatgttacaccgtgggactcagctgaccctgcctcaccctccacactccttgcgacctcatgagccatgcgcagggtggttgttctgttcaaataaagggacgtgttttccacactga

SEQ ID NO: 503062 - DNA, 746 bp, Homo sapiens
  misc_feature (35)..(35): n is a, c, g, or t
  misc_feature (95)..(95): n is a, c, g, or t
  misc_feature (183)..(183): n is a, c, g, or t
  misc_feature (200)..(200): n is a, c, g, or t
  misc_feature (325)..(325): n is a, c, g, or t
  misc_feature (365)..(365): n is a, c, g, or t
  misc_feature (381)..(381): n is a, c, g, or t
  misc_feature (429)..(429): n is a, c, g, or t
  misc_feature (437)..(437): n is a, c, g, or t
  misc_feature (483)..(483): n is a, c, g, or t
  misc_feature (658)..(658): n is a, c, g, or t
agtgcatctcatccctccctctcttcctctcttgnaattaggattgaaagttctggtgaagaacctgggcttcacaagaagcagtctgtctgagnagggccaatacacccggttggctttggtgccatgcttagagttagcatccaaggtgttaacagagctcttgtaggccgtggggcccgnaacggggaagggccggnccacccacacccctgggctcgttagacctgtcttcttcatctgacatcagttcctctgtcacatcattccacagacgttggtcctcaggtccaaaatgcctcatgatactggatcggttgcaaanaagcggatatcggcgacttcggagtttcttctcctctttntcctcaggccctttangggggttcaggagctccttatcagtgtaattgtggggactggtcacangctctgcnttgagcttttccagaagaaacttcactactgaaatatcccaagagnacttgatgctttcagacccatgaatctcttgtcattggtgatgtggttatgcacattgtggaccagtttagagagtacaagatcccgcttgcgcctggagttcatctgcccacttcctctggtcctgcatggggaaacggtcagccctagagagtgtctcagctcccagtgctcnccagggcctgactcttccaaggcactgtccagcgcagcagcggcattgagcatgtcctcagggcggggtggtggcagcttggttccat

SEQ ID NO: 503063 - DNA, 707 bp, Homo sapiens
ggctaaaagtaagggtgtcgtgctgatggccctgtgcgcactgaaccgcgctctgcgctctctgaacctggctgcccccgagcgtcggaccgccccatgcacaccgagtcgtgttccccgcacgcccagatgatgaacaatggactccatccaagcagaccatcatgacattgatgttgcatcaccctgacgcacagatatctatacttcatgtggagcacttaatgcacaactattgtgtacctggaagagtacagtaaccaagtacaaacattacaccagattcaagatgagtgaagctctgggagtgccgagcaacacacagtgccgaatcccgggatgccatggtattggccaggggagcacacaaaagaaaaacggatactcagaagtgaactcagaacttatcagtggcgactaacacaagaacatgagaggagaagccaaaagatcagggaaaccacactttgaacggacgcaaagggaataatccaaaggatacagaaatcattggaagtaacccgtcgataacgggctaaacagaccacgaaccattaagacatcatggggttcaggccatgagagaagggcaaagacagggagacaagggactgcggaagataaatcaggcacaacaaaggcacaaaccacatggatcaggggcaggggagaattaccacaaccgtactgaaaccgcataaaacgaa

SEQ ID NO: 503064 - DNA, 388 bp, Homo sapiens
  misc_feature (240)..(240): n is a, c, g, or t
  misc_feature (358)..(358): n is a, c, g, or t
tgagacagggtctcactcctgttgcccagactggagtgtaatgatgtgatctcagctcactacaacctccgcctctgggctcaattgattctcctgcttcagcgttcccagtagctgggactataggcccatgccactatgcccagctaattttcgtatttttagtagagacaggttttgccatgttgcccaggctggtcccgaactcctgagctcaagtgatctgccgtcttcggcctncccaaagtgctttggattacaggcttgagccaccgcacctgggcctatgctgtttattaaattaagctacaagaattcaggcaaggaaatcactctaaaatctgtatataaaattgtncattaggcaatttgggattttcagtcttaa

SEQ ID NO: 503065 - DNA, 273 bp, Homo sapiens
atagtacttgccggagtacgtcttgaaaactacgcgggtgataggtgtaatacgcctcacacgcattctcaaacccccggacaaaacacatgggctagcccgtatcctgtgtacgatccctatgaggcataatgattagacaagctccatctgcctacgacgaacagacctaagaatcgctcatggcatactcttcagatcagccacatagccctcgtagtaacagccatgctcatccaaaccccctgaggcttcatcggtgcagtcatgctc

SEQ ID NO: 503066 - DNA, 600 bp, Homo sapiens
ctgctccagagtcagatctttcctcctgagttgttcctacctcctacctcaaaggcaaagattgaggtgatgtttcataagccaaggaatgccaagggattgccggcaaaccaccggaagctaggcgagaggactagaacagattttcccacagccctcagaataaaccaatcccctgaccaaaaaaaaaaaaaaaataaaaacacaaaaaaaaaaaaaacaacgaaaagaaaacaaccaaaaaaaaggaaaaagcaaaaagaaaagacagaaaaaaacaacaagaaaaacaaaaagagagagagacatacgaaacacgagggggcgcgcacagcctcagataccgcgaaggcccctgaccaaaccgctctggctatcagtatggtggtgaggagactgcgacgcgaagtcgctgcgaaagtggggagatgagtagagaattaaagcaagcagagcagcgagggtggactaggagactatcaactaactcggacatagtgaagagcctggggaaactcgagcctagtgtcgcactcgtgggtagaggagacacacacactagctcgggagggtggcgagtcgtgggagcggccagcgggt

SEQ ID NO: 503067 - DNA, 240 bp, Homo sapiens
actgccaacactcagttttcagccattctgatgggaatctagtggtatctcattgtggttttattttcatttccccgggtgactaatgctggtaagcatcttttaaggtactttttggccagttgtatattttctgtgaagtggctgtcaaatcttttgcccacttttaattggattgtttgtcttattgagttgtaaaagttctttatatatactgtattaaagtcctttgtaagacac

SEQ ID NO: 503068 - DNA, 105 bp, Homo sapiens
ccttttatgttttgccccgtttgggttaaaaaggggttttttttttcccctttggaactcttgggttgttaataaaatgaaatgattcctttttaattaaaatga

SEQ ID NO: 503069 - DNA, 837 bp, Homo sapiens
  misc_feature (21)..(21): n is a, c, g, or t
  misc_feature (116)..(116): n is a, c, g, or t
  misc_feature (125)..(125): n is a, c, g, or t
  misc_feature (176)..(176): n is a, c, g, or t
  misc_feature (182)..(182): n is a, c, g, or t
  misc_feature (187)..(187): n is a, c, g, or t
  misc_feature (190)..(190): n is a, c, g, or t
  misc_feature (193)..(193): n is a, c, g, or t
  misc_feature (208)..(208): n is a, c, g, or t
  misc_feature (211)..(211): n is a, c, g, or t
  misc_feature (217)..(217): n is a, c, g, or t
  misc_feature (222)..(222): n is a, c, g, or t
  misc_feature (230)..(230): n is a, c, g, or t
  misc_feature (232)..(232): n is a, c, g, or t
  misc_feature (238)..(238): n is a, c, g, or t
  misc_feature (242)..(243): n is a, c, g, or t
  misc_feature (261)..(261): n is a, c, g, or t
  misc_feature (268)..(268): n is a, c, g, or t
  misc_feature (289)..(291): n is a, c, g, or t
  misc_feature (316)..(316): n is a, c, g, or t
  misc_feature (325)..(325): n is a, c, g, or t
  misc_feature (335)..(335): n is a, c, g, or t
  misc_feature (341)..(344): n is a, c, g, or t
  misc_feature (374)..(374): n is a, c, g, or t
  misc_feature (381)..(381): n is a, c, g, or t
  misc_feature (390)..(391): n is a, c, g, or t
  misc_feature (435)..(436): n is a, c, g, or t
  misc_feature (446)..(449): n is a, c, g, or t
  misc_feature (806)..(806): n is a, c, g, or t
gccagggtcgcggcagctgcngggagagatgactggggagcgacccagcacggcgctcccggacagacgctgggggccgcggattctgggcttctggggaggctgtagggtttggntgtttgccncgatcttcctgctgctgtctctggcagcctcctggtccaaggctgagaacnacttcngtctngtncanccgctggtgaccatngancaactnctgtnggtgaccngnacacanatcnnctcactcgacaccttccncatcccnctcatcacacccactcccccnnncactcttctcccctttcctcacccnaggaaaatntcctcatccnatgacnnnnccaacttcatccccctcccgacctccatgnaccaccncaccacatnntctcctacacccttcattgtcaatcatggggatgtcccccatcnnctcaaccttnnnncactactcacccatcttcacacaccactactatttcttttctactccctttttgctcacaaggccggctcgccaggtggcctctaccatgttggtatggagcaaggatgatggtgtttcctggagcacaccccggaatctctccctggatattggcactgaagtgtttgcccctggaccgggctctggtattcagaaacagcgggagccacggaagggccgcctcatcgtgtgtggccatgggacgctggagcgggacggagtcttctgtctcctcagcgatgatcatggtgcctcctggcgctacggaagtggggtcagcggcatcccctacggtcagcccaagcaggaaaatganttcaatcctgatgaatgccagccctatgagc

SEQ ID NO: 503070 - DNA, 210 bp, Homo sapiens
ggtgggtttggagtgggcgtcctgcctcagcctcttcagtgagccatggtgctttgagtgctttgaaaagtgggggctgtgatgacttaagagcttcctgtcagtgggctccttgtagtgttgtggtacttgagtgcctagaatatcccaatgggctttgtttttaccttttgttataaattagtaccacttgctcctttagccatgagg

SEQ ID NO: 503071 - DNA, 937 bp, Homo sapiens
atagggcccgtgctctgttgcccaggccgggattgcaaggatgtgttaattctcagcctcactgtgcatttcctgtgacctctccgtgtgtgctcaagcgattccttcccaccttcagcctctcccaagtctcagcgtgggactacaaaagcacgccaccatgtgcccgtgcataatttttctcatattttttgtgtggatagaagaagtggggtttgtggccgagtgttggcccaaaggggtgggctctccaagtgtgaatcctctccgcgccttcaaccctccccaaaaggtgcgtggcgacatccacgagggtgtgtgacacccaacgagcccacctcggctcgtggtcctttctccttttttctaataacaccttccccctgtgggggaacacacctactttattttcccccttataaagagtgggggcccaacaagagttttatatcctcgcgcggagattatagagaaaaacaaatctcccccttccccctatattcgcgtgaacaacccagagagagtgagagcgcacggaaaaaattatccctaaagagacgcccccacaacatctgtgtggccccggggggggccacagttattcgtccgcctaaaaaacacccacaagaagacatctcaaaggaggggttctctccctctcccccttcaaacgctttctctttttgtggcagcacctgttgtgtgggtggtttgtgggggggcactattacccaaaagtgttcaaaaagggcacactatgcggacagctaagtttccacaccattaaccaaaacatcgcgactcttggccagggcgtgaaccacacttccccctcgttcattacaacaacaactctaacacttttatccatcaattcggcctctataacccccacagaggggaaatctcccctttcaatgcgcgaatcagcatttca

SEQ ID NO: 503072 - DNA, 156 bp, Homo sapiens
tttttttgtagacaccttaagaaaatgaaggcaagccatagattgggagtaaatattcacaaagtatctctgttaaggctcagactatttaataatttcattactctatataagacaactcgtctaaagcgaggacatacagagctgtagcagtcc

SEQ ID NO: 503073 - DNA, 264 bp, Homo sapiens
tcctactggtgcagtctaaactaactctatgcctattaacaaagcatcaacatatatatctgctaccaaggagttacaaaatagagctttctgacaaggatggtgctttcgaggttatactattttctttttacacggtacgggtcctgataaaggacctcttccttaaattctaaaattttacccaggcaaagaaagcacagagttaaaccttacaattctcggttctgcctaaacgtttgtcccggggtatttatccgggga

SEQ ID NO: 503074 - DNA, 904 bp, Homo sapiens
tggtgaaaccctgtctctactaaatatacaaaaattagctgggtgtggtggcgggcacctgtaatcccagctactcaggaggctgaggcaggagaatcgcttgaacctgggaggtggaggttgtggtgagccaatatcatgccactgcactccagcctggtgacagagtaagactccgtctcaaaaaaaaaaaaaggcttaataaatttattacttcccaattttttaaaatttggagtgccttggcagtggggatggtccctaaaatggcgtttagaattaagggcccagaattggtgtgtaaggtcctgaatctggctaaaatacagcgggcatgtctgtttggaattatgaggcataagtagccagtatctatagttagaatctacaggcctcctttttgcccctgttagactagattatacctgtatggcggccttggagtgttatctctcagtggctagaggtgctgttcaagcacaatttagcactacgggttgaaccactcttgtgtgcaaactcattggtgggcccatgtacatatccctaccttcagtccacagcaacatttaaggaatcctaacggacaggggattggcttttcagaagtaaaaggagggccaagggcatatgggaaacttttcacaactgctttcgggtcatttgggggtcctgcacccggttggcatcaatagggcctaatctgcacgaatttgcggggctctcacccaaaatttcttgggggaagacggtttccattaacaacagggagggggagtcccacccgacccggcggatatgaggtataagtacccccagagattattgttcggaggtgggccactacatgggagcggcttctcactattttgtggtctctctcgtgatctgctcagccctttgt

SEQ ID NO: 503075 - DNA, 366 bp, Homo sapiens
ccgatatggaacgaacatgggaaggacaaagatggagagaacagatgagcatgtgctagaagatactacgggagaggatctaggatgaaaaatttgatcttaagacaagcgcctaggtaagaaataattgggctaagatttctaaaccccactatgtgcttaagagtcatcctcgccattggggctgactctgtcatcctctccttcctcagcctctttttcatcatccttgatcagtccagctggtcatccccccgatcttcattatcatcatcatccagtaggtccccctcctcagcagagtcatctgcacccccctcagactccatcttcacattagtctcatctttcttcacggagctgctg

SEQ ID NO: 503076 - DNA, 405 bp, Homo sapiens
tcctttgtccgcgtgcttccaagctctcgcaagattacacggatttgcttggaaagacagtcatgcaaatcggaagcatgtgatagacgaaattcatatcgcttctgctccgtccgtctgtggaatggacgctttgagggcaggaacagtaggaacagagcgggctgggatgggatgggatgggacgggatgggatcggaagagaggctggggaatggggccacacgggggtgcagagtgtgctgtgacatagagcaagatcacaagaaggcctatctgtgactcctttaagataaggtgcagaagcggactgcaatgtcgctatctgctgcctatgtacatattcacaagaataagaagaattccaggtagttcccattatctcgtccgtgctgaggcatccac

SEQ ID NO: 503077 - DNA, 434 bp, Homo sapiens
  misc_feature (77)..(78): n is a, c, g, or t
ccagtgatttctgtcatgtataagtaggccttgccattgtcagcagtaaatgatctggaaagaccaacttctgttannatgtaatccacaatctagtgaggggattatagctatcaaacatatttctcagtccactttttaagaagtagtcatttaggctgggtgcagtggctcaggcctgtaattctagctctttgggaggctgaagctgtaggattgcttgaggtggagtgtgagacccacctgggcaacatagggagaccctacctctacaaaaaataaaaaagctggatgtggtagcacatgtctgtagtcccagctcttgggaggctgaggcagaaggattgcttgagcccgggagttcgaagttgcggtgagctattattacgtcattgtactccagcctgggtgacagagcaagaccctgtctcttt

SEQ ID NO: 503078 - DNA, 106 bp, Homo sapiens
cggtcctaaagcaagcccgactactgtgacttaaaaagagggaagaggagccagtgccgagggtggcactggtggctggaggtccccattcagttgcactacaggt

SEQ ID NO: 503079 - DNA, 252 bp, Homo sapiens
gccaggttcaaaggcatacttttgcaaaaagtctccttgaaaataaacatttaggacgggcgcagtcgttcatgcctgtaatcccagcactctgggaggccgacgcaggtggatcacttgaggtcaggagttcaagaacagactgtccaacatgctgaaaccctgtctctactaaaaacacaaaaggtggtgcatgcctgtaatcccagctactcgggaggccaaggcaggagaatcacttgaacccgggag

SEQ ID NO: 503080 - DNA, 607 bp, Homo sapiens
gctgattttattagggttctctagaaggacagaactaataagatatacgtatatataaaggggaatttattaaggagtattgactcacacgatcacaaggtgaagtctcacaataggccatctgtaagatgaggaacaaggaagccagccggagtcccaaaacctcataagtagggaagccaacagtgcagccttcagtctgtggttgaaggtctgagagcccctggcgccctactggtataagtccaagagtccaaaagctgaagaacttggagtctaatgttcaagggcaggaagaatccagcacgagagaaagatgaaggccggaagactcaggccagtctagcccttcatgattcctctgccagcttttattctagccacgctggcagcagattagatgggtccacccggattgtgggtgggtctgcttctcccagtccactgactcaaatgttaatctcctttggcaacatcctcacagacatacccaggaacaatactttgcgtccttcaatccaatcaaattgacacccaatattaaccatcatactgatgatattatatgataatattctgtaaactataagatgctgttgaaaatgca

SEQ ID NO: 503081 - DNA, 221 bp, Homo sapiens
ccccccccccccccttttttgggggaggtggtttttcctggggcccccccccctgtttttggggggggggttttttttttttcaaaaaaaacccaactgtcccccataaggttgtaaagccctccccccaacctttgatgtttcttagaggcattcaggttctttaaaatctgtacagcaaaaacaacttattcaggcaaataaaaatgcaaaaaacaaaa

SEQ ID NO: 503082 - DNA, 101 bp, Homo sapiens
ctgctctagacgatccccctatgcgtgtctcatatttgggcttaaaatatcaagaagggcacttcaaatggctttgcatttgcatgtatcagtgctagagc

SEQ ID NO: 503083 - DNA, 368 bp, Homo sapiens
  misc_feature (37)..(37): n is a, c, g, or t
  misc_feature (40)..(40): n is a, c, g, or t
ttaaatcctttccgtttgtatgacttcccaaacttgnctntgtactcctaatatggaaaaaggtcattgggacctagaaatgcagtttcatgggtgccaaaaaagaagataggatacttgtttgctggaggcttcacagcgccctctgggagttcatcaatccgggccggccagtgcgggtagcccttcatcttggcgaagaccaggtcgcccgctttgtactcgcggggccgcggacgcgccatcccagccgctccccttcctggtagtccttggtcgccgcgaagatgccgggaggccgcccccccgcgggccgacgaattgcgccgcgctccccgcgggcctcaagccgggcggacgagcggccg

SEQ ID NO: 503084 - DNA, 482 bp, Homo sapiens
aacaaatgcctgactccactgcctttcagttacgcccttttataccttatatcctttctctttctctttcctctagtttcactctcttcaaattgtttttaaggtaactagaatatgtggtagcatattcttcagtgacctgtccgttggtgaactgtcagttatcaggctgtttcttcacattttggttgaggaaaaagcagattgagtgttggagggcttactttaatacatggttcatgctctactggagagctgacatctgttcccctttgctctagaaaaagaaattaggtagcaaatgtgtgttttataatttctgctgaagactttagcgtgttttctttaaattttctgtagtaagactcatgtagataaaaatgagtgttgtagaaaaaaaggaaatagttcatgaaggcaaagaatcaaaaattttttcattcttttaaaaatgctgattatattaggtcttgaaaaaaaaa

SEQ ID NO: 503085 - DNA, 495 bp, Homo sapiens
  misc_feature (187)..(187): n is a, c, g, or t
  misc_feature (249)..(249): n is a, c, g, or t
  misc_feature (257)..(257): n is a, c, g, or t
agcgggcccaccgcccgcccgccagccgagaagccgggctggtcgcgctcggtttctccgcgaaagccggccgtgtacctaggaattaaccggcccgcgcgggagggaaggggaggggagcgggaagcgggaagcggggcgggggggggatgctgagcgcgcgcgagaacaataataagatcgtgtngcggtcgctgcccgagaaggaattcggagcagacgcgaggcccggcgctcgcgccgcgcccnggagcccnggagggagaccggcagcggcggcatgaggcaggcgacgcggcgctggtgagcagcgcgcgcggcggcggcggcggcggcggcggcggggaccttggcgcggccggacgcgggcgagcgccgaacggccgggggctcccctcccccgctgccgggccgtgatttgccgggcctgctgcgccccccgcccaccccttgcctcagccgccgcctcgccgcttcccctcgtcggagcggccg

SEQ ID NO: 503086 - DNA, 408 bp, Homo sapiens
  misc_feature (37)..(37): n is a, c, g, or t
  misc_feature (40)..(40): n is a, c, g, or t
ttaaatcctttccgtttgtatgacttcccaaacttgnctntgtactcctaatatggaaaaaggtcattgggacctagaaatgcagtttcatgggtgccaaaaaagaagataggatacttgtttgctggaggcttcacagcgccctctgggagttcatcaatccgggccggccagtgcgggtagcccttcatcttggcgaagaccaggtcgcccgctttgtactcgcggggccgcggacgcgccatcccagccgctccccttcctggtagtccttggtcgccgcgaagatgccgggaggccgcccccccgccccccgctgccgggccgtgatttgccgggcctgctgcgccccccgcccaccccttgcctcagccgccgcctcgccgcttcccctcgtcggagcggccg

SEQ ID NO: 503087 - DNA, 365 bp, Homo sapiens
accccttaggtagatttgtgtatctaaacagatatagtaatagaaaaagtatagtaaaagaaatctaaaagattaaaaatggaagccgggggcagtagctcacacctgtaatcccagcattttgggaggccaaggcgggtggatcacaaggtcaggagatcgagactatcctggccaacacagtgaaaccccatctctactaaagatacaaaaattggccggacgtggtggtgcgcgcctgtgatcccagctgctccagaggctgaggcgggagaattgttggatcccgggaggaagaggtttcattgagctgagatctcattactgtacactccagcctgggtgacagagcgagactccatctc

SEQ ID NO: 503088 - DNA, 1005 bp, Homo sapiens
gataaaaaatttggtcatttggtactgactttctctctctctctctctctctttttttttttggacagagttctcgcacgtgtgtgccgtgggcttggaatgcaggtggtgcgactctcggcttcactgtgcaacctccgcctcccgggttcaagtgattctccgtgccttcagcctcccaagttaggtgggattacaggcgcccgccaccacgcccagctaatttgggtgatttctaagtcagacgatgggggtttcactatgtgggccaggctgggtctcgaactcctgacctcgtgatgggcccacctcaggctcccaaagtggctgggtataacagatgtgagccaccggacccagcctgagttctcgtttctctcttttaaactttatttttggaaaaaccgggtagacttgggggggagcatttcggtggataatttaccggatctaaagctgagtgattttttaaaagaattggaattgggcttcctcaccagtaatatgtctcctggcttcttggaggtgatagtttcggaaatgggtggaaaatctaatagatctggggtgaattggcggtgtcgttatgaagtccaccctggtgggcaccaataacataacctgtgtggtaggacgttgttggagctattcgggagattatggggggagagtatactaaaaggcttaaaaaccatgtttgtggcgctgtttgaaccagtaagccacttttttggactttggaagacttcggaaggaatattagaggcttgataaaatttgtgggtggaagtttcctcccaattctttttactacgattgggccatgttctacatggacccactgggcaaggggtaagcagtgtatgggcttgggtggaaaaatatgcgattgttaaggaaacaattgtgaaaaatttggacgcgtgtggcatgtcaggggagacccagatatttgaggagtatgtgacatttgtacaaggaaggcgtaaaaggagggtcatagga

SEQ ID NO: 503089 - DNA, 105 bp, Homo sapiens
cagagagtcccagtgcgagaggtaagtagtatagtgatgcgagcagctaggactgggagagatagcagaagtaggatcgctgtgattaggacggatcagacgaag

SEQ ID NO: 503090 - DNA, 868 bp, Homo sapiens
tggtctctccgcagctcgctgggtcacatggccctgcctgagacaatggtggatgccctgcgcctgagctgcgaggcgtggaggaggtgaggctccgtgcgcacacccaaacctgctgctgctgccctgcatccttcctgggcccctggagatggctgcctccacctgggatgagctagccagcctgggcaataccagaggctggccctcgtgctgctgcgcagtgtgacctgagctggtctgccccaacctgggttttgatttctgatgactctgtgcctgagttccagtgatggttttttctatgggaccagacatgaacaaaagttggacctcatgagcacttcaacctctccagctgccatgctcctcctggagtgctgctggcgactgtcctgggggcagcactgctagtccagctcttcatcctaacagtgcgtgactgttttggcctgctggcaccccctggactgtcacgcgacttctacactcttacttctatctgcgccattggcatcttgaaccaaatgagccaagagtaccttgcagacaaagcttgacaagaggggtagagagctgacctaccactattttgaggaggccttccctctgccaatgtctccaggtgccgtttgtcttgggacgccaacccactagggccttgggttggtgctcaccagtcagtcacgtggggagcgggcagctgggtatcagtaaagtcttcgagggttgtgcccaggaacagcgggtactacaggaatgtgccccatgttcgatgggagcaatctattagtgggacagatgagcgatatagtacgatctagtgcaagtagccagcgattccatggccgacacagggaggagagac

SEQ ID NO: 503091 - DNA, 788 bp, Homo sapiens
  misc_feature (8)..(8): n is a, c, g, or t
  misc_feature (114)..(116): n is a, c, g, or t
  misc_feature (128)..(130): n is a, c, g, or t
  misc_feature (133)..(136): n is a, c, g, or t
  misc_feature (142)..(145): n is a, c, g, or t
  misc_feature (160)..(160): n is a, c, g, or t
  misc_feature (196)..(196): n is a, c, g, or t
  misc_feature (202)..(202): n is a, c, g, or t
  misc_feature (205)..(205): n is a, c, g, or t
  misc_feature (218)..(218): n is a, c, g, or t
  misc_feature (231)..(231): n is a, c, g, or t
  misc_feature (235)..(235): n is a, c, g, or t
  misc_feature (238)..(238): n is a, c, g, or t
  misc_feature (255)..(255): n is a, c, g, or t
  misc_feature (269)..(269): n is a, c, g, or t
  misc_feature (272)..(272): n is a, c, g, or t
  misc_feature (274)..(274): n is a, c, g, or t
  misc_feature (284)..(284): n is a, c, g, or t
  misc_feature (286)..(287): n is a, c, g, or t
  misc_feature (293)..(293): n is a, c, g, or t
  misc_feature (297)..(297): n is a, c, g, or t
  misc_feature (301)..(301): n is a, c, g, or t
  misc_feature (325)..(326): n is a, c, g, or t
  misc_feature (328)..(329): n is a, c, g, or t
  misc_feature (344)..(344): n is a, c, g, or t
  misc_feature (349)..(349): n is a, c, g, or t
  misc_feature (356)..(356): n is a, c, g, or t
  misc_feature (365)..(365): n is a, c, g, or t
  misc_feature (379)..(379): n is a, c, g, or t
  misc_feature (401)..(401): n is a, c, g, or t
  misc_feature (411)..(411): n is a, c, g, or t
  misc_feature (426)..(426): n is a, c, g, or t
  misc_feature (437)..(437): n is a, c, g, or t
  misc_feature (446)..(448): n is a, c, g, or t
  misc_feature (541)..(542): n is a, c, g, or t
  misc_feature (547)..(547): n is a, c, g, or t
  misc_feature (558)..(558): n is a, c, g, or t
  misc_feature (575)..(575): n is a, c, g, or t
  misc_feature (629)..(629): n is a, c, g, or t
  misc_feature (784)..(784): n is a, c, g, or t
ggattttnttcagtgcatttcacagcaaaaatgaacaagggaatcattaaaattgttgtacacaaaccaactctttttcttataatttacaatttgttgaaaaaattattgttnnnctgttttcatcnnnctnnnntctttnnnngaacacaatttatcngagcacaaagcttaaacttcttatgatgatgcaacncatctncanccacctacaatgnctgacaaacaacncgcntgncacacacactgactggnagaccatatcaganaananagagtaaggnannagtctngggnaatnggggggggttggggtggggggggnngnnggcgcatggtgggtnggtgntcattanatacatgantgattgatgaaagntataatttgttctattcttttntttgccagcnatttttcaacctcancttaatttttntttaggggnnnttttgtacctgaatacaacttcctgatctttttttcctgataccttttcatttcgttgtttctttagcatttaaatttcctcaaaaaaaaagnnttttnttttttccttnccttacatgcgcgttcngttacacatataagttttgggttactgacaaatatgaatagaatcatttatttnaatttttaacagaggtaaaataaagcatacttatccaaagggataacacataatactggatattacctaaaggtgaaaagaaagaaggaaaaaagtaacagttttattttttaatatttgctattttctttaatgccttagttctggagaaaggntaaa

SEQ ID NO: 503092 - DNA, 485 bp, Homo sapiens
gatgagggatgctcaacctggtgaatgggagtgagggagaatctgtttctgtgtgtgctggacctgaagcttcctgtgagtctcacagctgtgggcacccatcttcccttgccctgcgcagcctatttctttcatttctacgagattctaactctcctattttcttttttctgtttactgacactcctccaaagagtaccagtcttctctttgtatctgattcttctcaagaaatatcgcttatctcaggctgccacttccagtctcactcttttcagatcctttcttatagattataaatgaccaaatccaaacatatattctgcattagggcatttagttaaacttttctctagggttattttagctgtgtttctttatgttttccaccctactttacatttttcccctataatttcttaaacatcttcacctctctcctgtgtcttaggtatgtagcagcaggtgtagtattatttccttag

SEQ ID NO: 503093 - DNA, 524 bp, Homo sapiens
acgcccaccacactgaatccccctcctcacagttgccattgcactccagcccaggtgacagagggagactccatctcaaagtgggcgttataataagtgtttacttggtcctaggcattgttctaagtgctaagcttgaatcctctttagtaagtttatgaggtaggtaggcattactgttatcctcattttacagatgagagaactgaagcacagaggaacttgtccaaggtgactcaactagcagtgcttaccaggcagtctagttccactgccaaagaggtagagggagaagactaggaagagtggcagtaaggaagagaaaagggcatttcaagaaggagattagtcattaatgtattgggtgggtgcaaaagtaatggtggttttggccattaaaagtaatgggaattactttggcaccaacctaataaaatgctgctgaaaggtccagtaagataaaggactgaaaagcatccattggttttcacaatatggagatcattgacaactttgaccttcag

SEQ ID NO: 503094 - DNA, 102 bp, Homo sapiens
gtcccaatcatccaacagggcacatgcatcagccattgcacaggcatctgtgggcatttggtcactgcaagctctgcacattctgtcaatccataggtccat

SEQ ID NO: 503095 - DNA, 309 bp, Homo sapiens
tccataatgtgtgccagccgggcatggtggtgggctgctgtaatcccagttactcggaaggctgaggcaggagaatcgcttgaactcggcaggcagagattgcagtgagctgaacaacagagccagactccgcctcaaaaaaaaaaaaaaaaaaagggaaagagtgggggggttttaagggtgtaaccggggaaggaggatctcatttgaacccagagagcgcagaggtgtgcagtggggatagaattcatgccatggcactcacagtgggttgacagagcagaggtcctgtctcaaaaaaaaacaaaa

SEQ ID NO: 503096 - DNA, 114 bp, Homo sapiens
gatgtgagggatgtagtatgtctagttatataccaatttgagcatgcaggactgagatcagagtgagggaggtagggatgggggagtaggggaaggtggagaagggaatgcttg

SEQ ID NO: 503097 - DNA, 679 bp, Homo sapiens
gctcacgcctgtaatcccagcactttgggaggccgagatgggtggatcacctgaggtcaggagtttgtgaccagcctgaccaacatagtgaaaccccatctctactaaaaatacaaaaattagccaggcgtggtggcgcacacctgtaatcccagctactcgggaggcggaggcaggagaatcacttgaacctgggaggcggaggttgcagtgagccgcgattgcaccaccacactccagcctgcgcgacagatcgagactctgtctcaaaaaaaaaaaaaaaattcatacttatgccatggcttttacctttagatacacacgttacaggtaattccacgtgggtgacagtggcttgtcaccggttaactaagggaagggactggcgggtaacttaccctgcaggggctgtaggtggcctggcagggcgctccagggcccccagccggttgatcccgatgtctaggtctcatcgtcctcgggtccctttgggccactcgtttaaagcgctggcccaatggggatcccctccattctagtggggcattggctggaactcatcctgcccctaggctgggcttctaaccaccggggggaaagctacttaagcctacgagggtccctccttgagaggctcagaacccccaaagctgctgctggcagtgattgagacggagca

SEQ ID NO: 503098 - DNA, 1178 bp, Homo sapiens
ggcggctcgggagagagtggacgcgggctgcaggcgcgatgcttgtgctagagtgacgcgtcctgacggcgtgccggacgctgaggtggtcgggggctagtcatgcccgtgcctggtgcatggatgcgcggggtggcatgagcctctggacgtttggggctgcgcccagtcctgagcccccgtgctgctgccgtgaagttgctgagctggctgatgctggctgatgctggctgagctggccctgctgtgatgacccatgtgagctagcctggcactgcctgcgcgatgcgccttctgactgccgtgcgggaatgacgctggctgtgtgtgccaagtggcacagatgcagtgctggacctgctgagtggtgcctgatcctggctgtgaagagcaagatgcccgaagggctgagggcgatggtgcgacgtgcaggcgtgcatgcctgcatgacacacaaactgcacaaacggaggccactgtgtgtgctgccaatgtttgccgaccatgagctgcacaccagttggccctggcattatctgtggtgcttgactctcttgtgaattgcttgggggtgcccaagagcttgcaacactgtgcgttgccgctttctatcaagaccaaagacgatgtttacttctagcattaccaattacacgttgcgtgcactccaatgggaggagaggcaccaacaggccccattgattggggatatcctttcgttggttgaaaccacaaagatctggcttggggacgccaaaattgacgccagttggtgagccagacgtggaagtcgaccaccctttgagcatggtttattggagaccggtttgttccgtgggggcggaacgacgcacggcggcccatcccggtcggccccagcatccggactagtagagcaaatgatgcagaagagcgcgatctaggcaagcacccaaggggcaacagaagcgcgatgacaggaggcaatcccccaggcgacagagccacacgagggacacacgcgcacaggaaggcacgcaccaaacgaaacaaggcgaagcgatgtacagaccgacgcggcacacgacatccataccggaaacacaagaagacgacagcccaaacgagaagatcgacacacaccacacacaggcaaacgaggactgcacacacgatcgccagacgaaaaagcgcgcgag

SEQ ID NO: 503099 - DNA, 108 bp, Homo sapiens
gagcacaatgtatgatatgagttggcaggtgtcatctacagcagcatcctcactcctctgttgccatttttagcaagtactcctgtcgatcttgaacagtctccaact

SEQ ID NO: 503100 - DNA, 230 bp, Homo sapiens
ggaagatttgaatattttctttgtaatactgaagtattggcctttaattctaaataaaaattgtatatgggcactgtcctattgctggggtgaaatgattcacgttatccttggtacttgcagaaacgttcttatgtttgaatcttgtgggacactcttactcttttaactacaaagatgagtatgaatcccctccattgctctcaaaagcaatgaagtgattacacccc

SEQ ID NO: 503101 - DNA, 534 bp, Homo sapiens
  misc_feature (122)..(122): n is a, c, g, or t
  misc_feature (244)..(244): n is a, c, g, or t
  misc_feature (256)..(256): n is a, c, g, or t
  misc_feature (468)..(468): n is a, c, g, or t
gaggatgtggagaaattagaaccctcgtgcattgctggtggaaatgtaacatgggtgtaaccactgtggaaaacaatttggtgattcatcacaaagttaaacagaattatcatgtgattcanttccacttatataccacaaatattcagaagtagggacttaaacagatatatgtataccagtgttcacagcagcatgattcaagatggccaaaaggttgaaataaccagtgtccattcataantgattgcatgancaaaatatggtatatatacacaacggaatattattcagccttaaaaaggaaaggaattctgacatatgctacaacatagattgaaccttgaggacattttgctaagtgaattaaccagacacaaaaggacaaatactgtttgattccactttatatgaggtacctagaacaggcaaatttacagagacagaagagaggttaggaaatataanagatttaacccgggcatgcccacggcctatggtcccagctacttcgggagggctgggggtgggagg

SEQ ID NO: 503102 - DNA, 723 bp, Homo sapiens
catagtccagcggctcggaggactgcacggtcatggtgtggcagatcccagagaagcgggctgacctccccgcctgacagagccggtggtggtactggaggggctcaccaagcgagtgggcatcatcgcctggtacaccctactgagaccccggaaacggtgcttgcatcagatgtcaggcctgtcggaacaaactgttggatactcgatcgtggaatgtggtgcacagacggagtgcagcttgtactcagtcctgtgacatgctctgcatcccatgtacctccatcgtacagattgtcagtcgtgtgatacccacaaattggtccatgctctgtttttgctcatgcagtgcaacggacaagagcgtgctgcatcatccgacgccccgtcggggacaccctggatgggcagacgcgggacgaaggtctcatgagagggtgcccggcccatgcgggccatcttcctggcagatggcaaggtgttcaccatcaggcttcagccgtaaatgagcgagtcggcagcatggcgctctggtgaccctatgaagaacctcgaggaagcccagtggccctgcatggaactggactcgagcaacggggccctgctgccccttctacgaacccgacaccagtgtggtctacgtctgcggcaagggtgactccagcatccggtactttgagatcacagaggagcctccctacatcacttcctgaactacgttcc

SEQ ID NO: 503103 - DNA, 425 bp, Homo sapiens
  misc_feature (49)..(49): n is a, c, g, or t
  misc_feature (94)..(94): n is a, c, g, or t
ggaactccctaatccctcagtctttcccctcaccccctggagcctcganccctcacggtacagggaacagtcaccgaccttctgtccctttgtngggctaactgccctcagcaggcagggtggctttgagcagtggaggttggggttcacgcctataatcccagcactttgcgaggctgagcaaggcaggagaatagcttgagctcaggagttcgagaccagcctggacatcatagtgagacccccccccgaccatctctacaaaaaaatttttttaaattagcagggtgtggtggtgcacgcctgtggtcccagctaatcaggaggctggggtaggagggtcacttgagcttgggaggtcaaagctgcagtgaaccatgattgcaccagtgcactgaagcctggggaacagagtgagaccctgt

SEQ ID NO: 503104 - DNA, 452 bp, Homo sapiens
  misc_feature (59)..(59): n is a, c, g, or t
aaatagagctgttagagctcgagacattggcactgcgagggcccctataaaagcacttnatagactgttatcgtttaatgtagaaagatttaggtatgcatatgtaccatgctgacgtcccccatcttaccttccaccgcgaaaattgaggccctctgatcccaggcaggcagtcggtccccttgaatcaccccaggatcttcccagacattcctaaacaggcagcaaagcagtgaatggcagtggcagcttcaggcaggacaggcagtaacagcgtgtgcttgtcacctgatctcagctgtttgttataaagtccgtcgttcagatttccagttttgccaactggttgactatttctatctctgtattataaatggaaaactgtacaatgagacttaattttccaacccatgtaaaagatcactgctggctcaggacagagcctgagaacc

SEQ ID NO: 503105 - DNA, 737 bp, Homo sapiens
ccagctgctcctcagacagtgcatggtgttcacgtgacgtcggccttctgctacatgctgagacgctagatgctcactgcgcgcgtcatcgatcgttctgtcgtccattctggcacggttgagtacgtcatttgacttgagctgagagactggatttacccatgactcctatacgaccagggtatatacccgtgaatccccattggtacgtcccacaagttacctcgtctcaggcctttcttctggtgatcatgttgcttaggtacagggaagtggctgtacgcttgggtctcaatatgacccatcttggggagtatctatattgggaggtatatgagtagaacaggtgatgattgggccaggattgtatgatcgtacaagtcatcatgaatgcaaggagtattctaggcatatttgtcaggagatcgaaggatggtgcaagactcagcttttgatcgttctatgcattttgtcatactaacgtatatggcactgatctatggtattggtgagctcttgagaagtatagacacacgaatgaatgggttcccagtaagcgtgcgtgcgaacaatgccaccaccatgacgggattcctatgcacctggggatcttgtccaagagtagcctgtgtgcatctgatcaagttacttaaaacaatgactcctaattttacatgtccaccatttacgactgagcgaagacgtctcatatgtgtccagacgcaaagatcaaggta

SEQ ID NO: 503106 - DNA, 280 bp, Homo sapiens
ggtgcaagcatctccttcttcatgtaacacagggtacaagattatttggctcgacttctagttcgtgtcctaactcttgcccctctgtccagtggagtgacccgttgccagagtgcagagaaatttattgtccagcaccaccacaaattgacaatggaataattcaaggggaacgtgaccattatggatatagaccgtctgtaacgtatgcatgttattacaggaattcaccatgaatggagagcactctatttattgtacagtgaataatgatgaacga

SEQ ID NO: 503107 - DNA, 1052 bp, Homo sapiens
ccagattaccaaagggggaattacaagcaaaccaccccaaccattgttgggttttcttttagtttgggagaatgagggagattcctgtgttgtgaaaattcatagtcctcaagccccaaagggcccgccttggttttagacttgggcccaaatcctcgctggcgcacccacatggtgtgttggcccgcgggggtcaccgttttgcccccctggtggcacaacagaggaaagttggtggccctgggtattacccccccgctcctcggcgtgctctgtgtgccaccccacggatgctgtgtggcgcccccccttcaacgaagtggtcaaatgctctctcttctggaggcaccgcactgtcgcccctgtcacgccacggttcgaggaccttgaggccacgatgtgaagtagaatgtcttggggcacacgaggatggccctcggggaggaaaaaggtggtttgcacgccccatgtcgtttgtaaaaggcgtcttcgtcgggcaacctgctggaacgccgccccacacctgaacacgccccacttctcttccagagagcttgttcttatatgtaactccactggcacaggtttctaagaagagcttaaaggggaaaaacctgcttttcacaaggccacccacacactggttctgtggctccccacacaccacgcttctattctgccctcttgtggttcactctttgtataattttggtgacacgctgagagctgcccacaggagccacacgtgaaaaacaacataatttctattatagagacccacaaggccctgggtgtcctaacccgctgttgggggcccactgttgggaaaccctcttgctaagggttgttcttgtgctcgtgtggtttgttttagtgttgcccccttattttgctttgcttacccacgttcttcccttaacttcttggaaggctttcttaaccctccacggcacaaccctgtgttccccctgtattcaggctctgctttaaagcaagccactgaggctgttggagtttctgtttagggcattataaaattccccgccaactta

SEQ ID NO: 503108 - DNA, 622 bp, Homo sapiens
ttcctcagaaatcgcggtcacacagtacaacatggatgagtcttgaggacattacactaagtgaaataagtctgtcacaaaaaacagacatggtatgattccacttacatgatgttatctaaagtagtcaaattggtagaaacagaaataatggtggttaccaggggctagtaggagggggaaaaggggagctgttgtccaacaggcatagagtttcagatacgcaagatgaaaaactcacagatctgttttccaacagtgcgaatgtacttaatgtcacagaacgcttaaaaatggctaagttagtgaatgttgtgggttttttttgtttttttttttctgagacagagtcttgccttgttgcccaggctggagtgcaatggtgcaatcttggctcattacaacctctgcctcccgggttcaagccattctcctgcctcagcctccctagtagctgagattataggcttgtgccaccacgtccggctaatttttggtatttttagtagagacaggttttcgccatgttagccaggatggtcttgatctcctgacctcaggtgatctgcccacctcggcctcccaaagtgctgggattacaggcatgagccactgtgcccgc

SEQ ID NO: 503109 - DNA, 996 bp, Homo sapiens
ccacaaggaccccaccggcctgcctggcgtgagcagagagatgccaggacaggccggtgtgtgtccttgtgtggacacggagtctccccttctcgctgggctcgctgggagactgtgctcgcgaggagggggggagccgttgcacgcgtggttgggagtgcgcgaggggctgctgggccatgatagcagcattgcagcagttgatgcaagccgttcgtgggagtgcgtaacgcgttctggagctgcggtacacgttggtcggtcgtcgaatgaccttcgcgtcaacgacgcttctcccgttgagtgactttgtgcgatgaagcaagcatcagagaggagtaagctcggatcaggcgccgtttggatttgccagcaggtgagtccattggccagccagggcgagatagatacgcggtagcagcaggtggcgattaccgtgggtttccaattggcgggagcacctagtcgtccatgcctcagggacacaatgtgcttcggttcggactaggcatgcaagcgagatcctttaattgtttgagcttgcgcacacacagcacagcgggagttggacttcggtgtccagccttttggcgaaaacgcatgcgaaaagggtttgcgcttccacctcgttccggggggaaagcccccaagtttttccatccgcaggagagaattggttttcggcgcaaaggcgtaaggctaacggggagagccgtttggttaccaaccgctagtatgggaaaatgcacgatcgaggtttgaagctagaacttagaaccgtgtatccggggttcgattccacagtggagtttaggaacgaagaatcgcagggacgctccgagactatcattaaggaaaggtaattcagccgcattccagatagggggagaggacccctagagaaggccattatagctgccggggataccccgcgcaagagcaattattatctcttcttggtaacagagaagagggtgtgggtttccccccctttag

SEQ ID NO: 503110 - DNA, 247 bp, Homo sapiens
ccaaaaaaggccttttgaaagaaaccaatcgattgtaaactgtctagttttattattattattttctgatggctacagaccatgtgggctctcacacctagactatcttttctggtggaagggcttgggcacagacagacagtcagggcttctggttttcctttttttttttcctttttccttttttttttttttgaggaaaaaagcttagagtttgattggtttgacctcaggggttcccgacctc

SEQ ID NO: 503111 - DNA, 653 bp, Homo sapiens
  misc_feature (11)..(11): n is a, c, g, or t
  misc_feature (96)..(96): n is a, c, g, or t
  misc_feature (100)..(100): n is a, c, g, or t
  misc_feature (102)..(102): n is a, c, g, or t
  misc_feature (234)..(234): n is a, c, g, or t
  misc_feature (236)..(236): n is a, c, g, or t
  misc_feature (240)..(240): n is a, c, g, or t
  misc_feature (245)..(245): n is a, c, g, or t
  misc_feature (257)..(257): n is a, c, g, or t
  misc_feature (261)..(261): n is a, c, g, or t
  misc_feature (268)..(268): n is a, c, g, or t
  misc_feature (273)..(273): n is a, c, g, or t
  misc_feature (275)..(275): n is a, c, g, or t
  misc_feature (306)..(307): n is a, c, g, or t
  misc_feature (319)..(319): n is a, c, g, or t
  misc_feature (345)..(345): n is a, c, g, or t
  misc_feature (364)..(364): n is a, c, g, or t
  misc_feature (386)..(386): n is a, c, g, or t
  misc_feature (404)..(406): n is a, c, g, or t
  misc_feature (451)..(451): n is a, c, g, or t
  misc_feature (453)..(453): n is a, c, g, or t
  misc_feature (508)..(508): n is a, c, g, or t
  misc_feature (510)..(510): n is a, c, g, or t
  misc_feature (530)..(530): n is a, c, g, or t
  misc_feature (532)..(532): n is a, c, g, or t
  misc_feature (534)..(534): n is a, c, g, or t
tgggaaaatgncccgctagtatgaaagaaaacattttctatatgaagacatttgttttatgttaggtagcttacattttcccccctgcgtgtgtgngaangngtgaaaaatcagaaatttagcatactatggaaagaaggcatggagcacttgggttaagaggaaccaaaaacaacatagcaacaaagacccagatgtaacaggtttgaaagagctcaacgccaagaacaagancnactngcaanccaggggagttntctnttgagtngtatntnccctgttcgcatgtccctgtcccttgtggannccacgcatggtngcacccccgcctgctgtgtttcccanacttaagaaaaacgaggtnccagttggctgatagaataccntttaggtaggacaaaacnnntctgtgaagagtgttgagggggtgaagataggtaagaggtaagcncnatttttaatttaggctctgaaaaagtgtattgttctaaacgtatttggtatgccnanataggtctttaaaaatgggnangnatgctgtttaatgggcccgtgacctttttccattaatattggactgttttacattaatactgcatgcttttctatgtgaattgaataaagaatgtcataagccctgtgaaaaaaaaaaa

SEQ ID NO: 503112 - DNA, 171 bp, Homo sapiens
  misc_feature (76)..(76): n is a, c, g, or t
gcaagtaggtctacaagacgctacttcccctatcatagaagagcttatcacctttcatgatcacggcctcataatnattttccttatctgcttcctagtcctgtatgcccttttcctaacactcacaacaaagacctacctactacctatcaatctcaagacgcgtcaagg

SEQ ID NO: 503113 - DNA, 879 bp, Homo sapiens
  misc_feature (34)..(34): n is a, c, g, or t
  misc_feature (119)..(119): n is a, c, g, or t
  misc_feature (121)..(121): n is a, c, g, or t
  misc_feature (196)..(196): n is a, c, g, or t
  misc_feature (246)..(246): n is a, c, g, or t
  misc_feature (253)..(255): n is a, c, g, or t
  misc_feature (261)..(263): n is a, c, g, or t
  misc_feature (271)..(271): n is a, c, g, or t
  misc_feature (275)..(275): n is a, c, g, or t
  misc_feature (278)..(278): n is a, c, g, or t
  misc_feature (282)..(283): n is a, c, g, or t
  misc_feature (292)..(292): n is a, c, g, or t
  misc_feature (294)..(294): n is a, c, g, or t
  misc_feature (296)..(296): n is a, c, g, or t
  misc_feature (298)..(298): n is a, c, g, or t
  misc_feature (300)..(300): n is a, c, g, or t
  misc_feature (302)..(303): n is a, c, g, or t
  misc_feature (315)..(315): n is a, c, g, or t
  misc_feature (346)..(347): n is a, c, g, or t
  misc_feature (363)..(363): n is a, c, g, or t
  misc_feature (391)..(391): n is a, c, g, or t
  misc_feature (398)..(398): n is a, c, g, or t
  misc_feature (518)..(518): n is a, c, g, or t
ttttttattcttttggtttcctttccactcattnaataaattattaacataattggttaactaattggttaacacaacccctcctcaattctggggataagattatgcctcatttcgangnaggggaaaggcttgacggtgaaattgaaatgcaaagaacagagttcaaggctcatggttaggttgttattcccanaaaaaaatacaaaccagcaatggtgctattctgagcccttatccacaggnggttagnnnccaaannngactctgncgcnagncaannaaaaaaaanananananannccagaccctganagaacttgtttggccaaatctattctatttnnaaagaagctgtaagancttttcttcttctgttccctcacaaacnaatctgngtatgacaacatctttctgctgccctactcggtaaattcggtcacaagcttgatcttcaagtgatggattccagtgcatgtccaaaagggagaggtgatttcctccagtcaggttttttncaacacctccggccaagagagagattagcattacctgagggcctctggagtggttaaatgcctctaccaagtccattctctgcttgggattgacagagccatcgatggtggcataagtcagtccatgcttcttcaggtgcaatgctacaactttcagcatgttggtccactgagagacaatgacactcttttgggatgctgaatttctttgaattgcctccaattctgccaacagagatgaaatcttggtgctctctcgcatgccttcaaaaagctccatcttgaagaaggtgccgttaagggaaacagtggaagatggctctgagtcacggagttctgacaaggtcaaagcactgagctg

SEQ ID NO: 503114 - DNA, 483 bp, Homo sapiens
  misc_feature (329)..(329): n is a, c, g, or t
ggagaggacaaggtgcccgtcttaggtaagcccagggttgccctctgggtcattttgtttccgccctcctttagagggttcaagccaacaaggcccccttggggtgttttataagtgatttttccccgggagccgggcaagtggctgggaaggaaaaaatcagccccgtcaaggggggggggggggccccccccccctccaaacaaagaaacaaaaggtagggggccagcagctttttgggcctcacgcctgagcagtggaggtcccccaaaagttacagttgccgggttacgcataaggggagccccgtggaaaaaacaggggccccnaaagaaggtttatgggttttaacccctcccccccccccggggagataaaaggggggggatcccagggggggggtttttcctccccccccaggggatcaagcccttttcccggccctcaataaacccccaaaaaaaattttctttgtcaatcaga

SEQ ID NO: 503115 - DNA, 293 bp, Homo sapiens
ttcctttttgaaccccgcttcccccccaggactctctctcccttaggggttatgggttattcaaggggggggctttttaaagacagccacgccatttttggaacttgggtaaatagccccctctttcagggggaacccctttttccctttgataaggccgggattccgggaggagggaaatagtttaggggattttttttttggtggggtttggtttttagaaggcaatatgtcgggttttttttattgcttgaaaaaggtcctttgaaaaaaataaatcccttttcccccca

SEQ ID NO: 503116 - DNA, 218 bp, Homo sapiens
ggcggaagatgttatatgggaggactcagcatccgagaatcaggaggggctcaggaagatcccatcctacttcctcaatgaagggtcccaagcccgtccccgtttttccccccgatatttcctggaacgcggcctggagtcagcaaccagcctttagcagctgcctttacgcgctttacctgcttccccaacccagacattaaaattgtttaaggaga

SEQ ID NO: 503117 - DNA, 413 bp, Homo sapiens
  misc_feature (87)..(87): n is a, c, g, or t
  misc_feature (386)..(386): n is a, c, g, or t
gaaggagggtacggcgcaggacagagaggagagggaaaacagaaaaagaattgtgtgccactatgtctgaatatatcttctacttgnagataattacatccaagttgcccttttgcctttttatttccgtttttggacacctctttttatcatccagccaactggaatagacaaagcaccgctggtgccctgagcgacagaactctggtagggggctggctgtaaattgacgtggcatggaaattctccgctaagttgtagcagcttgcatgtttctctaagatcaagcccagcctcctggagctgtagcttaatcatgggttcaatgactttacagaaaaatggatagaaaaattcttcaactcctttctttggacccagatggntttttttgggttttttttttttttttg

SEQ ID NO: 503118 - DNA, 106 bp, Homo sapiens
gcaggaaaacaattgggaacaataaattaggatttcatgtgggtatcatttggcataacacaatcaggctgttttttttttctttttcattataaatataaggaaa

SEQ ID NO: 503119 - DNA, 200 bp, Homo sapiens
  misc_feature (80)..(80): n is a, c, g, or t
  misc_feature (125)..(125): n is a, c, g, or t
  misc_feature (163)..(163): n is a, c, g, or t
tggcatgcgcctgtaatcccagctactcgggaggctgagacaggagaatcacttgaacccaggaggcggaggttgcagtnagcagatatcgcgccattgcactccagccttaagagatatctgtnctttacacacaagagatatctaggccacaagatatctntggccttaagagatatctgggccacaagagtgaaact

SEQ ID NO: 503120 - DNA, 475 bp, Homo sapiens
cttagaaaattaaacaggggccagaaggaaaagatacaacgtcaccgtccgagccaaagggaaaggctgggttgggggtctatgtgccggggcctcccctcataaaccaatgctttcaggtcgcagggatgggtcgcctgggtggtccgggggctctggcagcaggggaactgggccctgaagcagtccctcagctccctgttgaagaggaagcacacgacggggttgatgccggctgcgcgaaggtcagccacacggaggccgtcaggtaggcctgggggacgcgccgggccgcaccaggaccgcaggtagctgccacgacgtaggccccagaggagcggaagagaggtgcgcgtgaacattgcacagccttttccgttgaattttcagcacgaggacggggcgccgcgccgcggccggatgcccacaagcgggcggcgtggcccgcagaagcccgccgtccagttggcggcgc

SEQ ID NO: 503121 - DNA, 257 bp, Homo sapiens
gatataaggagtatagtagaaccaatggatggttatagttgagaccctctgcattgtatgttacctatttcaagatttaagagtcattgctgggcacggtggctcacacctctaatcccagcactttgggaggccgaggtgggcggatcatttgaggccaggagttcgagaccagcctggccaacatggtgaaaccctgtctctactaaaaatacaaacaattagctgggctgatagcaggtacctgtaatcccagc

SEQ ID NO: 503122 - DNA, 538 bp, Homo sapiens
  misc_feature (1)..(1): n is a, c, g, or t
ngggcccatggttacttccaggcggcaaaggacagtatgttcccccggtttttttgggggttctttcaaccagtcgctttttccaagcctgtaatacctataagggtccaatgcccgccaccctagctccagggctttttagtagaagggctaaaaggaagcactttttcccccattcctggaaattgacacaaattaaatttgaacggctggaaatccaacccatgttaaatcttaagtccaagggggaaaaaataaatccgttattgaaacataaaaatgaatcccaagggcctgttcaattttcacccagcagtttccttgcaacactttcagctccccatgttccagaatccccccccaaaaaaataataggctttaaaacaatatgggcccctcatccaaagaacaactgttgtttgaaaccccccattacctgagggtaaaaaagggccttttatgaaccagttttaccagtggtaggttggaaagaaaaaacctccacccaaaaaaaaaataaattttctataaccctccc

SEQ ID NO: 503123 - DNA, 209 bp, Homo sapiens
gctggaccgggaggtgcagtgcacaatcacacacactgtagccttggctcaggtctccagtggtcctcctactttagcctcccaggtagctgggaccacagacatgtgttaccaccaccagctaaagtttttatttatttatttattttttgagatggcgtctttctctgttgcccaggctggagtgcagtggcgctatctcagttcac

SEQ ID NO: 503124 - DNA, 1354 bp, Homo sapiens
taactcaacataactaaactttcagaaaattaagaacgctgactttactattcggtggttctgaagtatcttgttcgttcgcattctgtaactactgctacacaacaaggcctaataaaatgccccacgaaaatacttcacgtgcactttatagagaccggctattcttcgtagtcagctcactacgtaactgtcgtcatgtacgataccacgctttacaacacgactatcacatggacactcccgctgtaacacttcatcaaaccaactgtcgactactcacaccacggactctcaacgacaccttggaatatcccatgctccactacaactagcacacacttataacctgatctactactgatgctgcgagaggaacactgactgcactgacattcaccaagaattggaagactcgcatgacgagtgactgacgcacctggcgctgacaccagcccaatccactatcaacactggatgaataactccctttcaacacgcaacgataaccagaacatacacaatatactacaacactacatctcaaccacaccttgctacttgcacaatcatgtcaccccaagactccacaccaagatatccacctcccttggacctgcacacacagtacggtccattatcctgcccacaccatctaccaccagtaacactaagtaacagcgaaaggttacaacattatcgggcatacacatggatcccatctgaacccacaatatagatcaccgcaggctaacaaggactgacgatacgcgcggcactaagagacaacaataataaacctaggaccagcaactagggcaaataaccacaacacaactaccaagacaacaaaaaggacagcacagtcaaaacaaataaccagaacaaacacccaccaacgaaccaacccaccatgaaaaaagcaagaacacgaacatacaacacaacactaacacggggacaagtacaaagagaaaaagaccacagaagcgaaagcgagaaacaagcgaaagttacagcaccacgaagacttactcggaacagaatacctcacacacgaaccacgtatctgcatacaaatgtaacacaaactaaaaaaaagttcatactacatcagcacgagaactctgccctcaccgtgcaaattcgcaaatgacactagagcgtaaatctacgacgaggaacagagcgacaagccagaagtgaccatcagctaggaagacaaccatcgactaaaagcactcacacaagaatcaaaaccttagccataaacgatagcaagtaccaacaagaaccacaccataacaaaccacacaagatcatctagaagacagacatagatacgctcacaccg

SEQ ID NO: 503125 - DNA, 385 bp, Homo sapiens
agtatgtcatgcatatgaataaaaatgcacttctaagaaaaggtgttcaggttcgtgggtttcttatggaggggtggatattgctagattcccgtctgtctgtagattattggtgaacttaaaaaaatccaacttgattatttgttctgctgttaaaaataatatacatgtgtagtgggaaatgtcagccaaagtgcggttactgtttcgtgtgggagagaagctccctcttagactttgctgtcgatctcacgagttaacagaagcttattttctctaagttgtgatagactttctcagaagctatacattgtaagttccggttctggccgggcgcggtggctccaacacctgtaatcccagcacaatggcacggggtaccgag

SEQ ID NO: 503126 - DNA, 155 bp, Homo sapiens
tgcacgccgcatcgtgagacgtgcttagaatccactatgatgggaaacatttcattctcaaaaaataaaaaaaatatttcttttcttgcctgataattggttagtttctgaacgtttagattttttttttccatggggttcaaaaggtacctaag

SEQ ID NO: 503127 - DNA, 443 bp, Homo sapiens
agagaatggggcccgggctcagactggtcacgggggtgagagggggcccgtcggggcgggaggaaggggcttggccccgcgcaagcgccggccctgaccgtctgtctctcgctctctcccgggcagggaggctgccggcgtggaccgcgtgaaggctgcgctggctctcgctgggaggccaccctcacagacgtccctggaggagcgtgtccagcacctgctggacgcggtggagcacaggcagcttgaccttctggacatcatcgcatcctgccacgcaattgcactgccctttggccctcctcaccatgagccggttgcttgcgcaacgtctcattcaaactctggacgtcccaccatactgctcgttccgcacgatgctggtttttcaaatgatgctcgccacggactttccacaccctgaccatacccgcatccaatac

SEQ ID NO: 503128 - DNA, 172 bp, Homo sapiens
agacgtcattctgcatccagtcaactagggtgataactattatcacctagtcccagctactcgggagactgaggcaggagaatcccttgaacctgggaggagtaggtggcaggtgagccaacatcgtgccactgtactccagcctggacaagaagagcaaaactctgtctcc

SEQ ID NO: 503129 - DNA, 857 bp, Homo sapiens
  misc_feature (471)..(471): n is a, c, g, or t
ggcaggagcaagtgtctgccgcggtggccgggtgccgatttgacaagattcaaagtctgtaggaaaatggactgtgaggttcatagagatggaaggatctgggatttcgattgatgactgcttggagagaagtacataggctggcttatgattggactgtcgtcaactaccactgaagtgagcttcctgtacacctgaaggacatgacaatggtgtgcatccactagaactctgtcaagacgcaacaagacacatgatacgtggatgagaccttagccttagcgagctagcctccactgagaagtgttccccccatttggagaatctgatctgcttgggtcctttcttgtggatggattttctcaaagttacacaggatcaaagcatggtgtggtgtattcgagtctcgcaaattccaaaccatttgcagttaatcaaatcgagcaacgtgccgaaatacatgtgcacccnattgttagtttgtgggtagcgaaagttgcaatgcgacaattgaattgagcaacacggtagatttctcctagtaatggtgaatatttcgctctttaaaccttaaaaagtcttcgattgacgtaagcatttatagtttgacacactgattggttaggaaagcatttggctcttagctctgattttgctttgctgtcgaaggttttgacaaccttccaactacttatgtgtgtcctgtaacacaggtgattgaacgtatgagagggaaaggccaaggaaaaaggaagtcagacactaagagaattcattattctcatacttccccacattgagaagcaattcggagtgtattaggctgtgatgttgtgatgtggcaacatatcccattc

SEQ ID NO: 503130 - DNA, 680 bp, Homo sapiens
gtggcccacctggtcgcactgtagtccacgatcttttcggcttcgtatcttcggtgcgccctcgctttcgcgttgttccctccgccaaacccactggtcctgagcacaaactcccgaatatggcctgagagattcgacgagaaatttcgagtataagttcgcaatatctggaaagaaagatcacggagatacgcaatgtagaaataaatgccacctgccctttccacaaggaatatcgattgaatcacggatgaatgcacagtcacggcgatattcgttaatgaaggccgtgcgccgccacatatggcacctgtaaccttccaccgagcacttgccttcttaattttaacttgcttttaggctgtttaaactttgtaagaagcacaagagggttggaatcacagtttaaatgactgtgctgcccctttcacatcaaagaactactgacaacgaaaggccgcgcctgcctttcccatctgtctaatctaatctggctggcaagggaaggaaatgaacttgcaatgttggtgaaggaagaatgtggggatggaagaagtaggggtgggactgacagtgaattctagagtaaaaccatagatggcccaatggtgttcctgcaggtttgtattgcatgttttagtcatgtatgttgccaatttttttttacgtctaaggaaatt

SEQ ID NO: 503131 - DNA, 104 bp, Homo sapiens
gacggcaggaactgcgtatattactgtgcgaaagaagggggctatttactatggttcggggagttatgtctaacggtatggacgtctggggccaaggtgaccac

SEQ ID NO: 503132 - DNA, 342 bp, Homo sapiens
tactacacccgcgaagccggcgtgcgtgcgctcgaacgcgaagtgggcaagatctgccgcaaggtgatcaagcagttgctgacccagagcgatcgcgccaaggccgaaggcaagaccttcgaactcaagccggtcaacgtcacgggcgacaacctcagcgattacctcggcgtgcgccgctacaccttcggcatggccgaaaaggaaaaccagatcggtcaggtgaccggcctggcctggacggaagtcggtggcgacctgctcacgatcgaagtggcggacatgcccggcaagggggtgatccaacgcaccggctcgctcggcgacgtgatgaaggggtcg

SEQ ID NO: 503133 - DNA, 1350 bp, Homo sapiens
  misc_feature (1048)..(1048): n is a, c, g, or t
cattccttaagtcctaattgggaaaaaaaaaaaaaacaaaatgaaagtagttggaagaaactctgggggtgtaaccaacattgatttggtaacccttacacactatttcaataacgtacgtaaggaagggagcattcacacagattttcacgtctaattctggccctttcttgtggcgccataattataaccattaaactgtgtgtgtgtgttacgtgattaaaaaaggttcattttctctttcaaaagaagaacttacagcttagctgtgcacattgtggtgttagaagcagctttctaacattgggtaagaactttgggtgttggacaagtggtaattatttcgtattttattgggagaacaaagtgtgatttataaacaatgttatttatttgttataatctcatatagaaaatctcagggggttttgtgggaatggttatttggcacatattggtgtcgactcgagtgaaaaagtgttcccagagaatttatatttctcttaaagtgtgggcccaaaatatattgtgggggaacacatttagagaggaaagagcgcaacaatttacaaaggaaattgcgcgttttctcccactatttgggccacacaatttgtcaaacgaggcttctcctttctactcccacgggcggtgtgcggaacgacattttcacacctgtggggggaacatctacaaaatcaacgaccccgtttggttgtgcggccccccgttggacaaactatcacacagcacggataattctccaccacgtggtatacggcgaaagaaggaaccttctgtagaagctcccaccctatatacggggctataacgcacacacacggtaagtcggcgaactcagttacatcctcgcatgggggagaagacccctcgttccgaaaagctgatgcttctctcagcgagggaaacattgcccatcttcttcctatcaagacggtggcgtacatcttaaccacgcagtggggaaaacgtttagcaggccacagtctaaccacgatagatacgccgtatgtaagtcgaccccacnaacgtggtttgtccgagcaggccgacacattttgcacgcacgctctaacgacaatctgtactacttctcagcggcgactaggcgcacataactgatacaatcttcctgttgaaacccccacgcgtttagacgtcttcaccacaacagggccacttgctggcttccgcgctgtgctgcaaacactgacacaaaagtcgtggcgcacaccatctctgcggcgacgctggctctcacaccgcacagctgcgcctaagcggaccactacgtgacgacccatccgcccagtgacccccccacagcca

SEQ ID NO: 503134 - DNA, 265 bp, Homo sapiens
cctccacaacagctacacttttatgtgttagtatggaactcggtggtatgaaaactatgtataaaaccaagagcccccatgctaattaactgaattggtactttgaatgttaaagctggttcttggttttactttgggactttccaccttgattggtgagatactttatttgataaaccgtccattctttggccattgtgggtgggcattgtgaacttcatggttttttggtgtttcgccagaaaactgtttgtggaggtaagca

SEQ ID NO: 503135 - DNA, 1073 bp, Homo sapiens
gaggtgggacagcagcacctttgagcgatggggcgtctgggaaccccagaggcagtggcaagaggaggtgcggcggtggtagtggtgggctcctgatgaccgacctgtcagtcttacttctcgtttgccaaaaactggagaaaccatccatggacataagttttttattggctttggagggaaaggtgccaaccagtgtgtccaagctgctcggcttggagcaatgacgtccatggtgtgtaaggttggcaaagattcttttggcaatgattatatagaaaacttaaaacagaatgatatttctacagaatttacatatcagactaaagatgctgctacaggaactgcttctataattgtcaataatgaaggccagaatatcattgtcatagtggctggagcaaatttacttttgaatacggaggatctgagggcagcagccaatgtcattagcagagccaaagtcatggtctgccagctcgaaataactccagcaacttctttggaagccctaacaatggcccgcaggagtggagtgaaaaccttgttcaatccagcccctgccattgctgacctggatccccagttctacaccctctcagatgtgttctgctgcaatgaaagtgaggctgagattttaactggcctcacggtgggcagcgctgcagatgctggggaggctgcattagtgctcttgaaaaggggctgccaggtggtaatcattaccttaggggctgaaggatgtgtggtgctgtcacagacagaacctgagccaaagcacattcccacagagaaagtcaaggctgtggataccacgggtgctggtgacagctttgtgggagctctggccttctacctggcttactatccaaatctgtccttggaagacatgctcaacagatccaatttcattgcagcagtcagtgtccaggctgcaggaacacagtcatcttacccttacaaaaaagaccttccgcttactctgttttgattgctattagtcccaaaataaatatacctgggaataaaatgtacttgggggtggctgctcctggctaatgcttattagaaaa

SEQ ID NO: 503136 - DNA, 375 bp, Homo sapiens
cgcgatctctgtgctcaaaatttatacctgtgcagattttcaatcagagactgtgtgctcaatattatgctactcggtcttcaggccacctgaggcacatactctctgaaaccgctattgaaaggtatggccactctggactggacacattctaaagcaccacaagagctctaacattttctgagagccacagagaatttggccataaatgagctctcaatttttcacacttgactggcaatctaactctaaaaattaataaggttacttttcaaccactcctggaaggctgggttttacctgtcccttcattaccatctaaattataggctggccttgctgtgtaacatttacacgagaagctgtttcccgccg

SEQ ID NO: 503137 - DNA, 315 bp, Homo sapiens
  misc_feature (46)..(46): n is a, c, g, or t
attctccgacccccacccgcgctccgcggcacccatccgcaacccncaccaacccttgaggtgctggtgacagctttgtgggagctctggccttctacctggcttactatccaaatctgtccttggaagacatgctcaacagatccaatttcattgcagcagtcagtgtccaggctgcaggaacacagtcatcttacccttacaaaaaagaccttccgcttactctgttttgattgctattagtcccaaaataaatatacctgggaataaaatgtacttgggggtggctgctcctggctaatgcttattagaaaa

SEQ ID NO: 503138 - DNA, 850 bp, Homo sapiens
  misc_feature (46)..(46): n is a, c, g, or t
  misc_feature (649)..(649): n is a, c, g, or t
  misc_feature (693)..(693): n is a, c, g, or t
  misc_feature (717)..(717): n is a, c, g, or t
  misc_feature (724)..(727): n is a, c, g, or t
  misc_feature (732)..(732): n is a, c, g, or t
  misc_feature (746)..(746): n is a, c, g, or t
  misc_feature (751)..(751): n is a, c, g, or t
  misc_feature (760)..(760): n is a, c, g, or t
  misc_feature (780)..(780): n is a, c, g, or t
  misc_feature (785)..(785): n is a, c, g, or t
  misc_feature (787)..(787): n is a, c, g, or t
  misc_feature (801)..(801): n is a, c, g, or t
  misc_feature (810)..(810): n is a, c, g, or t
  misc_feature (820)..(820): n is a, c, g, or t
  misc_feature (823)..(823): n is a, c, g, or t
  misc_feature (831)..(831): n is a, c, g, or t
  misc_feature (833)..(833): n is a, c, g, or t
  misc_feature (835)..(835): n is a, c, g, or t
attctccgacccccacccgcgctccgcggcacccatccgcaacccncaccaacccttgaggtgctggtgacagctttgtgggagctctggccttctacctggcttactatccaaatctgtccttggaagacatgctcaacagatccaatttcattgcagcagtcagtgtccaggctgcaggaacacagtcatcttacccttacaaaaaagaccttccgcttactctgttttgattgctattagtcccaaaataaatatacctgggaataaaatgtacttgggggtggctgctcctggctaatgcttattagaaaatgtcctcgtcccctttctttgcaaatattagttcttttacgaagtcatcctcaagcttcaatttatttataacgatgattcttttgctttccatgcatttgcacaaaacaaccagaattaaagattccacaaccaagatctgtacaaacataaagacaagtaacctcaattgtcaacagattgttaatgccccatgtgcaccatatggcaggggttgtggacaacagtgtctagagtcagagcagactcttcttaaataagggaaagggcactttctaagaggggcagctgatactcaacttcagcttagtgttgtcaacgcctctggttttgnaagggaaggcagaagtttggatatttattgaaacccttcaatgnttatgtatcagcaactaatttttntttaaannnnaacancacaggggcatggnggctnacgcctgtnatcccaccactttgggaagnaaggnanaagaattgcttgancccaacatngcaaaacctnatntctactanananacaaaaattggccgg

SEQ ID NO: 503139 - DNA, 908 bp, Homo sapiens
gaggtgggacagcagcacctttgagcgatggggcgtctgggaaccccagaggcagtggcaagaggaggtgcggcggtggtagtggtgggctcctgatgaccgacctgtcagtcttacttctcgtttgccaaaaactggagaaaccatccatggacataagttttttattggctttggagggaaaggtgccaaccagtgtgtccaagctgctcggcttggagcaatgacgtccatggtgtgtaaggttggcaaagattcttttggcaatgattatatagaaaacttaaaacagaatgatatttctacagaatttacatatcagactaaagatgctgctacaggaactgcttctataattgtcaataatgaagtgaaaaccttgttcaatccagcccctgccattgctgacctggatccccagttctacaccctctcagatgtgttctgctgcaatgaaagtgaggctgagattttaactggcctcacggtgggcagcgctgcagatgctggggaggctgcattagtgctcttgaaaaggggctgccaggtggtaatcattaccttaggggctgaaggatgtgtggtgctgtcacagacagaacctgagccaaagcacattcccacagagaaagtcaaggctgtggataccacgggtgctggtgacagctttgtgggagctctggccttctacctggcttactatccaaatctgtccttggaagacatgctcaacagatccaatttcattgcagcagtcagtgtccaggctgcaggaacacagtcatcttacccttacaaaaaagaccttccgcttactctgttttgattgctattagtcccaaaataaatatacctgggaataaaatgtacttgggggtggctgctcctggctaatgcttattagaaaa

SEQ ID NO: 503140 - DNA, 362 bp, Homo sapiens
tcgcctggtcgcagtcggctgggaagaggcgctcctcacttcctagatgggatggcggccgggcgcagacgctcctcactttccagactgggcagccaggcagaggggctcctcacatcccagacgatgggcggccaggcagagacgctcctcacttcccagacggggtggcggccgggcagaggctgcaatctcggcactttgggaggccaaggcaggcggctgggaggtggcggttgtagtgagccgagatcacgccactgcactccagcctgggcaccattgagcactgagtgaacgagactccgtctgcaatcccggcacctcgggaggccgaggctggcggatcactcgcggttagg

SEQ ID NO: 503141 - DNA, 183 bp, Homo sapiens
ttcaaagcgcacagaaattataaactctctgaaattgtatggagagtagtacagcagctcagttgacctatagcataactcatatctcatttcgcagacagtaatgtaagaccatatagatgaaagctgaattcctagagatgttaaatccctatctagaatagaaaagcagtattaagctct

SEQ ID NO: 503142 - DNA, 1608 bp, Homo sapiens
  misc_feature (1407)..(1407): n is a, c, g, or t
  misc_feature (1451)..(1451): n is a, c, g, or t
  misc_feature (1475)..(1475): n is a, c, g, or t
  misc_feature (1482)..(1485): n is a, c, g, or t
  misc_feature (1490)..(1490): n is a, c, g, or t
  misc_feature (1504)..(1504): n is a, c, g, or t
  misc_feature (1509)..(1509): n is a, c, g, or t
  misc_feature (1518)..(1518): n is a, c, g, or t
  misc_feature (1538)..(1538): n is a, c, g, or t
  misc_feature (1543)..(1543): n is a, c, g, or t
  misc_feature (1545)..(1545): n is a, c, g, or t
  misc_feature (1559)..(1559): n is a, c, g, or t
  misc_feature (1568)..(1568): n is a, c, g, or t
  misc_feature (1578)..(1578): n is a, c, g, or t
  misc_feature (1581)..(1581): n is a, c, g, or t
  misc_feature (1589)..(1589): n is a, c, g, or t
  misc_feature (1591)..(1591): n is a, c, g, or t
  misc_feature (1593)..(1593): n is a, c, g, or t
gaggtgggacagcagcacctttgagcgatggggcgtctgggaaccccagaggcagtggcaagaggaggtgcggcggtggtagtggtgggctcctgatgaccgacctgtcagtcttacttctcgtttgccaaaaactggagaaaccatccatggacataagttttttattggctttggagggaaaggtgccaaccagtgtgtccaagctgctcggcttggagcaatgacgtccatggtgtgtaaggttggcaaagattcttttggcaatgattatatagaaaacttaaaacagaatgatatttctacagaatttacatatcagactaaagatgctgctacaggaactgcttctataattgtcaataatgaaggccagaatatcattgtcatagtggctggagcaaatttacttttgaatacggaggatctgagggcagcagccaatgtcattagcagagccaaagtcatggtctgccagctcgaaataactccagcaacttctttggaagccctaacaatggcccgcaggagtggagtgaaaaccttgttcaatccagcccctgccattgctgacctggatccccagttctacaccctctcagatgtgttctgctgcaatgaaagtgaggctgagattttaactggcctcacggtgggcagcgctgcagatgctggggaggctgcattagtgctcttgaaaaggggctgccaggtggtaatcattaccttaggggctgaaggatgtgtggtgctgtcacagacagaacctgagccaaagcacattcccacagagaaagtcaaggctgtggataccacgggtgctggtgacagctttgtgggagctctggccttctacctggcttactatccaaatctgtccttggaagacatgctcaacagatccaatttcattgcagcagtcagtgtccaggctgcaggaacacagtcatcttacccttacaaaaaagaccttccgcttactctgttttgattgctattagtcccaaaataaatatacctgggaataaaatgtacttgggggtggctgctcctggctaatgcttattagaaaatgtcctcgtcccctttctttgcaaatattagttcttttacgaagtcatcctcaagcttcaatttatttataacgatgattcttttgctttccatgcatttgcacaaaacaaccagaattaaagattccacaaccaagatctgtacaaacataaagacaagtaacctcaattgtcaacagattgttaatgccccatgtgcaccatatggcaggggttgtggacaacagtgtctagagtcagagcagactcttcttaaataagggaaagggcactttctaagaggggcagctgatactcaacttcagcttagtgttgtcaacgcctctggttttgnaagggaaggcagaagtttggatatttattgaaacccttcaatgnttatgtatcagcaactaatttttntttaaannnnaacancacaggggcatggnggctnacgcctgtnatcccaccactttgggaagnaaggnanaagaattgcttgancccaacatngcaaaacctnatntctactanananacaaaaattggccgg

SEQ ID NO: 503143 - DNA, 1300 bp, Homo sapiens
  misc_feature (307)..(307): n is a, c, g, or t
  misc_feature (405)..(405): n is a, c, g, or t
  misc_feature (420)..(420): n is a, c, g, or t
  misc_feature (441)..(441): n is a, c, g, or t
  misc_feature (446)..(446): n is a, c, g, or t
  misc_feature (513)..(513): n is a, c, g, or t
  misc_feature (517)..(517): n is a, c, g, or t
  misc_feature (523)..(524): n is a, c, g, or t
  misc_feature (536)..(536): n is a, c, g, or t
  misc_feature (538)..(538): n is a, c, g, or t
  misc_feature (540)..(541): n is a, c, g, or t
  misc_feature (554)..(554): n is a, c, g, or t
  misc_feature (560)..(560): n is a, c, g, or t
  misc_feature (1009)..(1009): n is a, c, g, or t
aatagcaccccctctgagcccggctctggccgggggcctccccaatgaggaatgaagaagaggaggatgaatgaggaagaggctaccaaggaagatgctgaggcccaggcatcagagatcatgagagcctgtatggcggcaccacatgtttcaagaggagcccccagcactgttcctgctgctgtctgtgtgtgctactgggcgaaactggccagggcctgcaaactgggaacccctttcccaccccaacgtgctctcctcttctactcacttttcccactccaagcccagcccatggagattgacntggatggggcaggccacctgggtctcacctctaggtccccatactcctatgatctgagtcagagccatgtcttctccctggaatgagttgaggccacngtgttccttccgctnggagctattttccaggcttcntgtgnggctgggacaactgtcccacctcctgacacccttctcccactctcctaggcattctgacctctgggnttgngatcanngggtaggaatgnananngatggagcatcanacagcnaggggtgggcttgtggggcctgggaggggcaatcctcaaatgcggggtggtgggcagcatcgaggagggcaggccatccttctgaggctcctggtccccatgtctatcacctattatcccagctgcctagattcaggcaacacgtggagacagcttgtactgggaggggctcctttccagtgaaatgcctctgactgatgatcaacggccatttttcctgtttgccgaacccaacgagtgtggggagtgtagatgtaatcatcaaggagactttggggcttccgagttgttcgggccaaggaccgggagatctgacagggtgtgactgatagccatgggggtgggagtgttgagcaatcgtgtccccccttgtagatctctgaaggcgacaaatacgatgcttgggaaggactcctagctgtctttttgactctccgcacgagtgtgcnaggcagcattatagtgatgtataatcacgccgagctcaagggacgaccatgtgtagaacggtgcgatacaggaaaattagcacacaaacttgaaagacccagcctgggggcacatcggccttcccatggggcccaatgagggccggggccccgaagggggggggaccttgagcggggaggccagggcaccacacggcggcccagggacaaggtgtcacgggaaaaaagggcccctcggaagaacgtagccccgggagaaggagcgacaaacaaaaagacacgcgggaggta

SEQ ID NO: 503144 - DNA, 415 bp, Homo sapiens
gaggacggaagctatactagtcccccgaggattactacaaagcatagggggctctatgctcgcgcgtgttcgtaactcagccgaggggcaaggaaagctccaaatccgtgacagtcagagtctctgactggacattaccctgaattctactagttcctccaattccatcttctcccagggaacctcaaagagcaagacccactctgttccagaagccctataagtcagagtgggacaactcaatgtaaatttcatgggaaaatccttgtacctgatgtctgagccactcagaactcaccaaaatgttcaacaccataacaacagctgctcaaactgtaaacaaggaaaacaagttgatgacttcacactgtggacagcttttcccaagatgtcagaataagactccccatcatga

SEQ ID NO: 503145 - DNA, 832 bp, Homo sapiens
tctaggtgcgaggctgggtttgaatcggccgaggccgtgtttcggcctgcgcatggccgcggtggacctggagaatgctgcgggcgtctgggcgcgggcaaggccatcggcgtcctgaccagcggcggcgacgcgcaatggcatgaactgctgctgtcctgggctgtgacgcgcatgggcatttatgtgggtgccaaatgtcttcctcatctacgaggtgctatgagtggcctcgtggagtggagtgtgagaacatcaatgcagtgccaactggcttgagctgtctccaacatcatccagctggtgcgtgcactatcattgtgcagctgctcgctgcaatggcctttaccaccagggaggggctgcctgggcagcggcctacaacctggtccagcacggatcaccaacctgtgcgtcatctgtgcgtgggatggcagccttacaggtgccaacaatcttccgcagcgagtggggcagcctgctggagtgagctggtggctggaaggtaagatctcagagactacagcccggacctactcgcacctgaacatcgcgggcctagtgtggctccatctgataactgacttctgctggacctgacatgaccatcggcacggactcggcctccacctgcatcatggagtgtcatcgatgccatcaccacaactgcccagagccaccagaggacttcgtgctggaagtgatgggcgggcctgtgggtacctggcgctggattctgctggcccatgggccgttggtgtgcatcccggggtccaccgaggagcttgggacttctgtttgagagtggtggaccgagccgggcccatgcata

SEQ ID NO: 503146 - DNA, 1183 bp, Homo sapiens
gaggtgggacagcagcacctttgagcgatggggcgtctgggaaccccagaggcagtggcaagaggaggtgcggcggtggtagtggtgggctcctgatgaccgacctgtcagtcttacttctcgtttgccaaaaactggagaaaccatccatggacataagttttttattggctttggagggaaaggtgccaaccagtgtgtccaagctgctcggcttggagcaatgacgtccatggtgtgtaaggttggcaaagattcttttggcaatgattatatagaaaacttaaaacagaatgatatttctacagaatttacatatcagactaaagatgctgctacaggaactgcttctataattgtcaataatgaaggccagaatatcattgtcatagtggctggagcaaatttacttttgaatacggaggatctgagggcagcagccaatgtcattagcagagccaaagtcatggtctgccagctcgaaataactccagcaacttctttggaagccctaacaatggcccgcaggagtggagtgaaaaccttgttcaatccagcccctgccattgctgacctggatccccagttctacaccctctcagatgtgttctgctgcaatgaaagtgaggctgagattttaactggcctcacggtgggcagcgctgcagatgctggggaggctgcattagtgctcttgaaaaggggctgccaggtggtaatcattaccttaggggctgaaggatgtgtggtgctgtcacagacagaacctgagccaaagcacattcccacagagaaagtcaaggctgtggataccacgtgtagacctggctcaagacccaagagtgaagcagcaagtgtgaagaagcagaaacattataaataacccagagaatccttttataacagcaactgcctactgattttgtggcctaacagctcgagcaaaaatgaatataaatacaacattgtgcaatgactaattactcaaaattttgtgcatcagcagaagtggaacctgtggttggtgctaatattatgaaatgcctttgctgtttaataatctggtagctctgtattatttagcatgcatttttcttggagaacaatgattttatttcaagtacctctcactgaaataaaaaagcagctgttagaagatgaacaatttggcgggaaaaaaaaa

SEQ ID NO: 503147 - DNA, 131 bp, Homo sapiens
cgatctttcacacagggaaacagtgtatacgtcctgaatggggaaaaccctgtgtggggcttttcacagaacacgctacttggggaaaaaccctgggggcttttaaaaaaaaaaacagctttactccttcg

SEQ ID NO: 503148 - DNA, 194 bp, Homo sapiens
aagatgttcgagcggagctcgcgatgcagccagcgcggatactatagcactggtcaaggacacctgtaccgatgctcagaggatgcacatctaaggtgttgtgcatcaatgcacgtattcgatctcacgatgtcgatgcactctagccgccaagccaattagcatgtcgaattcacgtaaccgtaacgcagtgt

SEQ ID NO: 503149 - DNA, 740 bp, Homo sapiens
caccattcgcctatttaggtttccacccttcgaatacatcatgcgcccatgttaccagaacactaccttgccatcaggcactgaatgtgatcactcctggccggaagcacgtgagtcgggggaccttggagtcctcgtctgccctttgggatcatcctatgattctggattagttcgctggtgctttggtcggaaatgagctatactgcaagccatccctgcgtgcctctccaggcctccaggacctgcagggtctcaactggctctggtgagactgtccataggagctgtgggtgaatctggactctctggcataatgccagcttcctctcacaaatctccgccactcagcaaagggcgcttggggttccatggagagcagagcttccacaagacactttcgaacgtctatcagttccttctcttagggggccacgtgcctgcgtggtcaagaggtgaactgttcagctaggacccacagtcgccacatcctcatgtgtgctctacagcgcatgtaattgtgtatcactcgggggcattattttcaattgtaatgttcatctcccacgcctgctccagcctcgatgttggttatattttgagcccgccattccaccacccccgtttcctggggtcacaagtgtctgtgcatgtcccccaggagccaaccgtggggagctcgatggggaggggatggagaaacaagacagggcatatctcaggggcagtggccgggttcc

SEQ ID NO: 503150 - DNA, 993 bp, Homo sapiens
ggacgcgtgggtttcgtcagttacgagctggtctaggaagggaacccccaaatataaattagggcgttaacggacagattgaccattagtatagtgagtactgtatattgtacaagcagtgaatcacgcaccatagggcatgattaacgaagcaaactgttcccttcccccgagtgattgagcgaaagccccgttttcccttcagctagcttgtaatgttccaagatctaggaaagcttcaggcgggacctactagaaggcaggaaaagaatatggccatcacatcatgttccctctcactttcagtaaaaataaataaaacagcagcaagctaatactaacttaaaaatgaagtagcacagaaacagaatgagataaatatagtgtcgtgcagcattcatacacaaaaaagaaggggggagcgcgcctctaacagttaacccacggagggggcgaggatgaacgtcgtacccaacattgctgggcacgaacgggggcccgcaaagagtggagtcggaatgatgaaccagagcgcatcgggccgctgaatgacaaccgccgggggcatggggaacagcactgggcaaggcgagggcgaccttggggaaggaacccatacctcatgctggagggactatatctgggtccaagagagcatacacgagaagtttcaagggcgctagggtgcacattctcgcatcctgaggcggctatacagcgcgcttacacagacagagcggcatatgtgctcggcgcatggaacagtgttcgccaccccggcgactgaacgtcctggacccagtgcttgccatgacctcgttgagaaaacccacataacggaacagcttaacccaacgccacacaacgccacgcatgtggggacaacttgctacaagtccaaggaagcaatccccaggaggaaacgggcgctccggggcaccggcacgccgacaaaccaccgaccgaagagacgggccacagaactatagggac

SEQ ID NO: 503151 - DNA, 166 bp, Homo sapiens
agtagaaacatacagtgggctctatacacaccatttgaaataagtttccatggccagtgaaaatggcccatgcctgtaataccagcatcctgggaggccggggcgggcggatcacctgaggtcgggagtacaagaccagcctgaccacaggatgtcggagacggga

SEQ ID NO: 503152 - DNA, 603 bp, Homo sapiens
ggtgatctagagatccccgtcttacccacagggcactggcaatgtctgggcacacagtaggtttccaacaagcatcggtggactgactagaatgtatgactgaatgaacaaatcacagtgaggccctacagctgatagtcataataatgtatttggcggacaccacctgggttacaaatctctctcttcctgaataaacatatgcaaccggagacagacttccaagataatttacaggaggggagcccagacacatccaggcagtgagtcagtagaaaaccagacacgcaagatcaacgggatttctagaaggtcctaaaggaccgcagtgtccagtcactcggggaaatcttggagaataaagcgggcattaaggcattagtcagcaactggcctgggtcaaccaaggaaagataaacgagctcggtgctttaagcggggggagcagaaactgggggtaagtggcggaaatcaaggagtctcaggatccactgacattaccctttgtgattcagatggagaaaggtggtgcaggatgaattccggtgctaatgaggaccaggtatctatcctgcgataaggcagagaaggctggtggtaaga

SEQ ID NO: 503153 - DNA, 103 bp, Homo sapiens
ggattactgttcgaggcacaaattcctgatatgatcgcagattcaggcaaatatataaaactgcaaaacgtttaccgtgaaaaagcaaagaaagatgctgccg

SEQ ID NO: 503154 - DNA, 473 bp, Homo sapiens
  misc_feature (32)..(32): n is a, c, g, or t
ctctggatgcaaagtgtcataaataagacatncccctaccccgactcagctccttcaaaacccagatccagacccctgtcctccccagtcccatctgttgtcttggttacctccttgcctttgggctccttatccactcagttcttacaacccactttttcatgcactgcccctttgtggctctgttttcacatgtgtgcatttgatgactgcaggtttcttagagtaaaaatcgtatgctctgtttcattgattcctttcttctttctaccaccctatatcatctggatattccaacccagttggaggtccattgttcccccaacaaaaccttgattctgctgcatctatgcctttgctctcccatccatctctgcttctttctgtgctcagcacgaactctaccttctctgggaaacattgcctttccccctgtaccaggagttatattttctccagacacttgatccaga

SEQ ID NO: 503155 - DNA, 139 bp, Homo sapiens
aacgatcgttcgatgttcctgcacacctccagaacagctgggagagttattatctaggaattatgatggtgactggtctgcttgctatatatcatgaattacatcattagggaagaataaaaacacgtcgcctatgcac

SEQ ID NO: 503156 - DNA, 375 bp, Homo sapiens
ccttttcttgcagggcttttgctttttcatgcaacagcatttttgctgatgaaacaatttgcttggcttggcgtcttgataaatgatcaattgtccttacgagcactttaggatttgcattagcttagtgcattagactttttgtacctgcactgtataactgttttggtcgaccctttaaaactccagtaactttcttgagagggattaattttggcttttcacagtaagtcagcttctttggtagttctacccaaagggttttgtaaacccaaaacttcttaagctttttccagaaatgttccaccccaatatgggaatggggccgttcccgtgagaaaaatttggatttatccctcggggcttttttatttt

SEQ ID NO: 503157 - DNA, 821 bp, Homo sapiens
  misc_feature (1)..(1): n is a, c, g, or t
  misc_feature (6)..(6): n is a, c, g, or t
ncactntcttctttctctcaaatctcccccgggccttttcttttccgcattcgtccctccggtttctcaattttaacgccttccttgcctcccccgcttctttcatggaactatttggcccactttaactgacaaagttttcgttcacagaaaccaaccctttcataccatgcctgctcgaaacattccgaaacccagaagtgtgaattgaaatttccgccagaaccattcctcccgcttcgccctaatgttatccccacacaatgattttaggaaaatattatcgcttagagggcccacagggaattagattacagatggttccgccagttacacaggcccataaatttttcgcccgcttttcaagctattacccactgtgcgaccactgcacccggtaccgcaccatttggaccaagatatgctaacccactagtcctccaagtgcagatctttttgtgaaaatccacccgtgtcttatagggttacaccgccccacaccaagccccttagatggcttatttgtataaatggaggttactcaaatcacatattaaagtttaactacttgtaaaggtggctcgcaccctggtccccacatagtagggtcttcctagtatattagtttgaattaatatctgagaagtgtatataatttgtggtataaaagattatatatccttaagtatgccctcccgttttaaaaaagtatatattctacacatatatatatatgtatatctatatctcttaactctgttaattgattaaatttggccaattaaatttacctttaaataaataatttttttcccaaaaaa

SEQ ID NO: 503158 - DNA, 103 bp, Homo sapiens
ctctattccaacggtacgccgctgttccacctgctgacctggcgccaccatgctcggtgccttcttcatctgtcacctgacccggtttccggcgctaccagta

SEQ ID NO: 503159 - DNA, 287 bp, Homo sapiens
  misc_feature (13)..(13): n is a, c, g, or t
aagtgctgtacanagctcagtggtacttcttttgtttctgctagtaaagtttatgagacgaagtcttgctcctgtcacccaggctgagtgcaatggcacgacctcggctcactgcaacctccacttcctgggttcaagagattctcctgcctcagcctcacaagtagctggggttacaggcacccaccaccatgcctggctaatttttttggtatttttagtagagacagggtttcatcacgttgaccaggctggttttgaacttctgacttcaggtgatccacccg

SEQ ID NO: 503160 - DNA, 977 bp, Homo sapiens
catattacccggtattttgtcccatttcccccgcgggggttccctctaataaatgcgccccctaattgttcccacaacggagtcgcccctacccaaaaatgggccccctcctttttttccaaaaaagagtttttcgcccccctcgtttagtcaatcatcgcgggtcaactttctttgcaacgcaggagcactccagcgaaagcccatactatcacaagatcgtgtgcgatcacgcttgatacatatcactcgtccctatttccacgctgcctttctttacaaaaaaacacattgtttaacccgcgcggcattatttcttccaaaaacaccacgggggccatcattttctattcttcctgttctacacaaaatgcctcccaagcccctcttaatttacaaaaactatttaccaatttataggcaacccccctgcaaaagaggcgaaatacacaccaccctaaaaaaaataattttttctcccaaacaacaacatccttgcaaaacctccagagcggctgttttaatctatcctcgtatacccccactttttgtaccacacacacacccagtccacgcagttctttccaccaccactacataaaacaaaagaaggaagcttattaaccctgcacaccttggttcgaaaaatatctaatgttctcgccccaccagcctttcctttccctacatagtatgtctcctccgagaaatcacccacaaaaataagattgtgcacgcatatctgatgctacaaccaaaaagcaaaaacagggattttcttcaacagcgagcaccacactttcataaccccctctgcctctcttgtaacataaagaattggggaccaaacccaacctgcgtgcccccctctattctcgattaaattcccaccaataataatgaacccgctccccttctctttataaatctctcccggccccggggccccttttaaaaaggggtctccccacaaaaac

SEQ ID NO: 503161 - DNA, 156 bp, Homo sapiens
ggacattggctctcgtcgtgttgggcactagcggtaccgtggtgctccatgctgagcctgggactgctctgccctgtgcacccctccaggcttctgctcctggcatgctctagggggcaggctgtccccacacatagggcactgttccacttggta

SEQ ID NO: 503162 - DNA, 145 bp, Homo sapiens
tccccccccggggggggcccccccttttttgggtttttttccccgggggttttttcctcccccccggggggggggggggaccttttttttacctttttggcccggggggggtttttttttttttttaccttcccccgtttaaata

SEQ ID NO: 503163 - DNA, 153 bp, Homo sapiens
gactcgtgaggatcccctcatcgaaacccttgccccagtcaggctttaggtcgacagtcttgcagcttatctcataagccttctggtagtctcctttgcgtggcataggcagcagaacggttgctgtcacagcacgtggttagggtttgatga

SEQ ID NO: 503164 - DNA, 328 bp, Homo sapiens
  misc_feature (22)..(22): n is a, c, g, or t
  misc_feature (74)..(74): n is a, c, g, or t
  misc_feature (103)..(103): n is a, c, g, or t
  misc_feature (154)..(154): n is a, c, g, or t
  misc_feature (192)..(192): n is a, c, g, or t
  misc_feature (209)..(209): n is a, c, g, or t
tggctcctacaaacatttgagngggccagacactgttctgaaaaatacgcagtcgactttgaacagcacaggcntgaactgcatgcggccactaatactcggncttccttctgcctctgccatccctaagacagcaagacccacccctcctgcncctcagcctactcgatgtgatgatggtgagtatgaagncctttactttatgatgntccacttccatttaatggatagtaaatatattttctcttcctatgattttcttaataccattttcttttctctagcttactttattgaaagaatacagtatctaatacatatgacatgt

SEQ ID NO: 503165 - DNA, 858 bp, Homo sapiens
agcggagtcgagactgcagctgccgcgccggggctgagctgccgctcctccgcgcccgaaaacccgtgagtgccccgcacaggtttagacccagtgtgcctggtgggctgtgcccaggttcagagtcatgccactctgtgggtgaagcttgaggcaaaaatggagccacttcagcagcagcagcagcagcagcagccagcaacaaacagaagcaagcacaaccttggctcctctgcaagatggatgccaagagagaagcaggggccagcagatgagagaagcccaggtctaggtatgcccaaaagctgggtcacacagccgaactctacctttccgccacagctggggaagaccttctggcagcactcacttaggtcccttaagccagagtaccaacccaacgcagcagtgtgccaagtgttgaagcggggcaactatgaactcagatgcttgagtgaagaggacgggaggtaaggcagcatgaggatggggcatgatgaagttgcagaggtgggttgagaaagaaagcccgaggcatggtttcacaactattttcactgttgcagcacgctgtaggcctcgccccaaggaatccccagaagtggcaaccccaattgttacaatatcataactttcacaagcaaacccagggggctaccccaaagcaacagattgggaccaacaaaagccataaacagaacatgactcgaataacgccacaaggacattgcttaccacaacaggggcctttcacacgttgcgttggtcattcccacacaaggacgggagacagggccagagagcattgggaacagcttggacatggcaggacaggctatcagctgcactgacaatcgg

SEQ ID NO: 503166 - DNA, 173 bp, Homo sapiens
tggcgagtattcccgatctgctatgctatccagaaaggtgatgtacaatgaggatgtactcagcgcgctaactccaatgttgaaaagaaggaagaaggagacggttctcgctacgtgttacaaaaccatgttggtggtgacaatgaactggctgccacttgagcgtcctacct

SEQ ID NO: 503167 - DNA, 631 bp, Homo sapiens
cgctgttatacagcctcatataatcgagctagtgacagcggacacctgagtcatctgttttcggccagcgttgatgagacccggttttgctaatagagagattttgtctactactaagaattatcaatctgttgtctctacattcattcgacagtgtgaggttttcttttacacaggagaaattgttcaaactacaaacattgcggctacttcaccacctctaatcccgggacagttgttggaaccaacggtgccacttcagctgtcgtcagcattgtggccttagttgttaccaccacgagtacaaactggattctcttggtctcttatgactcagaagtgaatgcagacacgctgtatttataccgccaatctagacatacctgtgtccgtgttcaggagtatactgtatgtttttttcagatggatcacattggataatccactatgtctttggactatatgcgcttaaataatcacttgcatttcacaagctaagaccattttacaaacatgacatgggagggctcaaactttttccacccgattttgtctttgtgggccaggctctattgcttcgttttcccctttttggcccgtgtcatttccctgggggcccctgtgccccttt

SEQ ID NO: 503168 - DNA, 315 bp, Homo sapiens
gggggggggggaaaaaaaaaaaggggggggagctttttttgggggtttggggggggggcccccccccccccttttggggggtggggggggtttttccctttttttttgaaagggccggggggttttttttcccttttcccggcccccccgtccccccccattttgggtttttgggggggggggccttcccttttttttgggggggggggggggagggggccttttccccccccccccctcccccgggaaagggggggggggcccccccctttttttttacccccggggttttttttaaaacagggggccccccca

SEQ ID NO: 503169 - DNA, 374 bp, Homo sapiens
tgcgtaagctgttcgcggcaggcaatctggaccttcagcagaaaagtatagcgtggccaacccagactgtatcattggaggctgtcactggatggtgcacaggcttctcactattccagcaaggctctggacaagcttggctgcaacagctgctggcgagagtggattttttctccttcagccttgcaaaccatactgggtacatcaaaggttgactggacaacgagctggagaaggacatgaacgaaacgccatcccagcagctgaagatccgctaacgagcaatcagatacctactgaggtcaggagcaacgctgaggaggtgtgtccttctgtgaagaacaaatgtctagtaacgggggatacccgcccgc

SEQ ID NO: 503170 - DNA, 736 bp, Homo sapiens
  misc_feature (736)..(736): n is a, c, g, or t
gcgacaacaaaaaaactaggctatgtacgagccggtgttaatcggccgagggcagctgtccctgttatgccatcccagtggaatgttgacctcccagtgacagcctgctaggtattgagttctcgtggccgagacgccatgctggcaagcgtgtgatgtggactttgtgcctgccaagggcctggccacctctgtcctgctgtcacctgtgacttcctctgtggattgtgccttccaactggacgctggagtgaggctggcctcgtgtgcctgtctgtctacatgcactggcctactactgcgctggtggtgctgtggtgctgggtgctgccccggtggagactgctgctacatccactcgtggctcgtggctggctgtggtgccagtgcctgccatctggcatctgcccctcagtcttgggcttgcctgctgtcttcaccacctgtggggtcgtgctgaggaagcgggctgtaacctccatggccaggttcccccagctcgacatgcaccagcttcgccaactcccgtggacacatccttctgagcagcatgtgctgttggcacacggggcgggaatgggcgttgacctggtcttgaactccttggcggaagagaagctgcaggccagctgtgaggtgcttgggctacgcacggtcgcttcctgggaaattggcaaattctgacctttctcagaaccaccgctcggcattgagtatctttccttgagaacgttan

SEQ ID NO: 503171 - DNA, 185 bp, Homo sapiens
gagggactcagtatattgaggatagtaatacagagcttcttcctgacctcaacagtcagccattgtccaaaagggccatttggtacaaacaccctgccagtattttgaatctcttccacattatctctgccatgtatacatgtacatgtcccatgttgtggaactcactgccactcaagacagtt

SEQ ID NO: 503172 - DNA, 1299 bp, Homo sapiens
acagaaggttgttcttgccccgccccccgctcgaataatcacacgttttgttcgcctggaaggggggaaacacaagagaacccttttaataatagatagatttggcccccccctcggaccccacgggggagggatttgtaaaagtgtttaataaaaggagaaaagaaattttttggcaatcatcggccacgaccggcggtttttgcaacatggtgagaaaagttccggagattggggaacaaaaaggagttccccgccagaccctgggagtgataggtatgacccgctttagccccccctcgtgcttgggggaatattttacaactggggaaaaagtgttttcacattacaaacggcaactgtttggaagcgcacaacagaactcggcggggagagaagagaaaaaattttttccgccgcgtttctcgaagatgtctgagtggaaaacacacccacaaggggggttccgccttttttgtgcgtggagaaacaattcccggggagtgtgaccaccccctcggagagagagagggcccacacagtgaaccacacagtgttgtgggcacaaaaagtgggagggagagaaagatatctcttttgtggggggcgacccacaaaaaagggagatttccccctcgcaattctcggggtggaacttcccatagtgatatggcccccgggcaccccactatccccgcttatacccccccggtatcccccttctcatattacacacaggtgtgaaatagtagatataccccactattctcacagagttttgaagatttttaagagagacactttgggccacacagagtttatctgcgagatttttcactctcacacagttttcgaacacactcgggtaaaacactcgtggtaatttggtggaactctggagaggtgtgcttaacactcttaaggagaagagattatggtgtgtggattcaccccacacacgagagagagaaggcacccctggagatctttttgaacgctgggtttctacacggtgagaaagagatgtccacaatggcaaacacagcttttgccacactctgagacctttccacacacacatttttggtatattggaacaagggcaacacaaaccactggagtttttttttccccgagggagaaagggtaatccgcctcacccacattgctgaaagaagaagaagaacacaaaagaactggcggccacaaacacagaggcacagtgggtgaaatgggtccctgggtgacaagtcagatttttgtaagtaattaaaaatattgtggcaggattaatagcca

SEQ ID NO: 503173 - DNA, 371 bp, Homo sapiens
  misc_feature (49)..(49): n is a, c, g, or t
  misc_feature (54)..(54): n is a, c, g, or t
  misc_feature (245)..(245): n is a, c, g, or t
  misc_feature (285)..(285): n is a, c, g, or t
  misc_feature (323)..(323): n is a, c, g, or t
cattgcatcctcaatcacccaggcctaagcaatcctccccccttgtagntgggnctacagctcccagcccccctggctaaaattttttttttgttgagacggattttttatgttgcccaggctggtctcaggctcctgggctcaaatggtcctcctgcctcagcttccaaaggcccaggccaagttgtagctttgtcccttgccctcatgccccacaaaaggttttataccctttaatgaattgnctttcataaattggttatgttggtgggccagttctttaanctggaaattgtaaattccccctgaaatgttttttcatnccgttcccctgaactaatactcccataaaggatggttttgggtgtcca

SEQ ID NO: 503174 - DNA, 214 bp, Homo sapiens
  misc_feature (189)..(191): n is a, c, g, or t
cacacgagtgagtgaggccctgctgctgtcagctcgccaggaggatgtgtgcaggcggcggagtgcaggtccggtggccttcacggtgctctcctcagccggccaagcagctgcccacggccgccattcctccttacagccccagtggcacgtggaggtggtcagtacaggcctggcgtgcaactgcgnnngctgtctgcgctgcagcccacga

SEQ ID NO: 503175 - DNA, 276 bp, Homo sapiens
cctgtcagtgcagcgagagaagctaccataaacataacaggtgaggcacggtggctcacacctgtaatccccgcacttagggaggctgaggtgggcagatcacctgaggtcaggagttcaagaccagcctggccaacacggtgaaaccccgacactactaaaaatacaaaaattagccggatgcggtggtaggcgcctgtaatcccagctactcgggagattgaggcaggagaattgcttgaacccaggagccgagatcgtgccactgtactccat

SEQ ID NO: 503176 - DNA, 400 bp, Homo sapiens
aatcagtgatacacccgcctctaactcccgatggctgggattacaggtgtgcacaccatgccctgctactttatgtatatatagtagagatgggtttcaccatgttggccaggctggtctcgaactcctgacctcaggtgattcacccgatactcggactcctaaagtgttgggattacaggcgtgagccactgcacctagcctgtgaccaggtcttgcgagtagggcccatatgatgaatgggatcagtgtcctgacaagagaggccagaggaagcttgtatgtctctcccgccatgtgagatgcagtgacaaggcagcagctatgaagcatgggctgacgtgagacgctgactggatctgttggcacctccagcttgaaatacccagactccagaacc

SEQ ID NO: 503177 - DNA, 421 bp, Homo sapiens
tgtacaccctccgaggacgaaagagatccttagtatctgtatttgatagggatgtttacacacgtggaagcttccggtttattcacaatgaggtgagacatctaccagcgctttgagacaaagctttatcttttcctatgatctcttctctaaagcagcgtcacagggaaaaaaagggtttaaagagaaataacttctccgggcaaaaactgaggttagcgggcctatcagctgtttcttctcactccaccactgctgctgactggaggagcagcctggaaagcagccgccctcccgcaaacaggttaaccacattacctattcctgtggcggaggcaaatggatggtcaaacctaacggggtagtgctgaagttcggggacaaaagcccatcggggagtggtataggattatttttggac

SEQ ID NO: 503178 - DNA, 530 bp, Homo sapiens
cgacgcctagaggatcccgtgcatgtgctgttaggcgcagcgatcacctaaagttcgtgcagttcgagaacagtctgagcaacatggaaaaaccccgtctctactaacaaagtacggaaattagtcaggcatggtaacgcatgtgggaggtaatatatccattactctgacctgtcttttaaaaacagagtggttgaccaggtatccttacgttagtgattctgggtcatgacagcgccaaaatccttggtgagagtacaatgaacatgcaaggatgcatacaaggttgcttttgtgtatgtcttttagaaaatgaggtttgcagaccttttgtccttttttactcgatttaaaaaattttcaacaggtatttatctgaagtaccgggtacaggccagttttttagtcgaaagaagtaagttgttttttgaactaccaccacagtcatgcaaatgaatatgagctgttgaattaattaccctatcttctacatctcttctacttcccatcacgctggcctacagcacatg

SEQ ID NO: 503179 - DNA, 1211 bp, Homo sapiens
  misc_feature (1206)..(1206): n is a, c, g, or t
  misc_feature (1208)..(1208): n is a, c, g, or t
  misc_feature (1211)..(1211): n is a, c, g, or t
ctcagcagtctggtacggtgaggatacaagaaagccactaggaaaacgtatcgatactctagtaatagaattactaacagtatcatttaatgttatttgtaaacaatggagaactgaagagcgagtgacagcatagcgttcaaccagctgcacacacttaatgtgcattactcttgcactctgtatgggaaggcaacaatttgacacaggaatggcttagagcgtgccactccagatataaagatggctcagccagtaagaggggctgaatgatagacccagtacagaccagactagtcgcattctttcccatagtcaccccgcttttgtagtggtgaagaagaaaacacgcaggctaccaagaaactgcaccttcctagtttagatgttgctgtgtgagctcttagagatgccaagagtcagatatccaggaagaggtaccctaaaaatctagtggctagcagacactagttatagcagaataaactccatgtatccaaaataaagcagcatcttaagtcagcctaagcaccagtgttgagaaactagggttccagagctgccctttctgggaatcctacaggccctgcgagcatgagacggacgtgagcagttgatacattagagcagtgatttgaagcattactttctgggctttgttatgggctattacggtcaggtgaaaatcatgggcatatagtgtaaaccacggcgaacactcatgaaacgtaaacacacagttgttacgaaaagcacatttaaagtattattagacgttaattttggactggggattctcagcgaaacctgtttccaaaagggggtgacctagcaaggggtgcccacatggggtacccgggtacgataggaaacctcacacgaacactgggaccaccgaaacgcaggcgacaggacggaagaagcgggggtacacgagacaaagaagaaacacccggaagagcgaggctacgacaacaggaagatggccaacggtaagaaacgcaccaagaagtatcacagatagacaaaagaagatgaaagaaagaataagaaaacgcgaaagcacaagtacaacagtggcaggtccaaccaacaggtaacgaaaacaagagtagaaacgaatccagcaaacaacaagcaagaccacgagcgatcatacataagaggtcctcctcgcttgcttcgtttcccgctgtcgtagtgggngnggn

SEQ ID NO: 503180 - DNA, 183 bp, Homo sapiens
actctagccgacccttttaagtaccgcgtataggttgctggagctgaaaactaaaggccgatcaatgtcgaggcctgaataggtgcgcgcgtctttccgcgctgtcttgccaaaggaccattccccagcggtcgacgccctaatgcatcgatctcgctgctcctgtctcgcgccaccctgtaa

SEQ ID NO: 503181 - DNA, 864 bp, Homo sapiens
tggctgcataaggcggctgcgggaagtggacacagggatgcggctggaggtgtgctgtcgcgtgtgatgccagggagtggaaagctcaggcatctaactggactctcgctcctgctggctggacatggaggattcggagcgaagtactgtacaggtttacttggtgtgtatgagaccttgggacattatggggggctgctcaccatctggacaggcggtgcagggaggaacgtacgagtagacagtgcttcgcgtgatctctcagcagaaaccaatgttcgcaacgggggccgctctcccgactcggaatgctgaacccaaaatgcacgtggccacgctgctcccgcgcaggggtgtggacgtgcttcatggcactatgtgtcgcccctcgaagtgcgcacgaagaaggcgtgggtaggacgtactccttcgcatggagcgccaaagctcgtggctggggccgcgtcagactgggcatggcagggttgtggcctctggcatgtgcattccgtggaaggaggcgcatggtctgatgggcgctggtgcgccctcgccgcagtgtagagccctaagtcctcgcgccgtgggagatctttgtgctgcaaggatagtcctagtccgaggatcgtgctgccccactagtgatacctgcttttgagcagcggagacaccgcacctccgcgaatgcaggctgtacggccctcgtaggctccgtgagttactgagtagggaagggggtcaggacagggctcttcgggggctagatcctgggaagtaggcctccgaacattaagagggagtcggccacttggaattgggtcccggtccaagagccaggtctcggccttaccgaggaatcccggc

SEQ ID NO: 503182 - DNA, 463 bp, Homo sapiens
ctattccatggggatcgatggacaatactcgcaccgctactatggtcgagcgtggatccctcgctcatagaagggatctgtctgatgagtacagatctggcagcatgcatgtttgtctgtgaccgtcattctgcaacgttactgattggtaataccctggagtaaaaagccgattcgctccacagtcctcagctatggattggcatgccaacaagctttttgctggcatgcaggatcatgtgacttcaaaatggctgagtgttttctgcctacattaatacgaagtggatgaaaagccagccagtacgccctggggcagcaaagatgccttttgggcatgcctgatgtcagagtttggtggcagtggcactggtggctgggtccatggggtaagtttctctgccaatgggagccgtctgggctgggtcagccacgagagtaccgtgtctgttgctgatgcctc

SEQ ID NO: 503183 - DNA, 665 bp, Homo sapiens
  misc_feature (460)..(460): n is a, c, g, or t
  misc_feature (649)..(649): n is a, c, g, or t
gggcgcgtggcgatagcggcccgggggaaagcggaccaggtaagggccccggggtcccgcgtcgccgtggctaggccagcagaggctacaccgacccctcccgacgagcgcagaacagcgcaggggataccccgccagctatatactaccacaccccaacatatactaagggaacataagtaggtacccctaggggtaggggaagcagtaggcggctaggggctaccaggggcagcagagcaaccaagagcgataggaaaaccatatacccgagtacctatagcaggaaaacggtagaacaccacggggggcgaggcggccgagggtagggagcggggggcgggagacgcggggcgctaggcagtagaggagggccctaaggcggagaaggagctagcgtatccgctagcagaagccccccggtaccccagaagccgagccctaactagcaggtactagnggggccaaggtagtaccgggggggcacctaggtaggcggaggaataggggagaaggaggagactaacaaggatagggcccaggagtaatgaggagtaccaagagagaaccgagcagaaaacaggtactacagcataggaaaatagccaaccaagaaaatagaagaaagaggagccagtagctaaataanggggagccctaggccc

SEQ ID NO: 503184 - DNA, 243 bp, Homo sapiens
  misc_feature (5)..(5): n is a, c, g, or t
ggcangggatgaaggcgcgtaataaagacgccttgccgtgtttctgtgctaaccgctccgcgagcattccgtttaccgcttcaattgttattccttgtggcggggcaaacatcgcctcgtctgacatagccatcaacagtccttattaatgagaaatccttctcacgcaatttttctggccatcagatagatggccggttcctgcacaatttcatccaacagatgaatgaattgaatgctacg

SEQ ID NO: 503185 - DNA, 218 bp, Homo sapiens
  misc_feature (31)..(31): n is a, c, g, or t
ggtgcagtgatctgtgatcaaccactgcacntccgccctggcaacagagcaaaaccccgccctttaaaaaaacaaaaacaaaaaagggcgggcatggtgggccctgcctataataacttgggaggcccgggcaggaggatcaaatcaaggcaggtggtcgagaccaaccaggccaacctggttaaacccgtccccaccaaaaatacaaaaaaaaaaaa

SEQ ID NO: 503186 - DNA, 425 bp, Homo sapiens
  misc_feature (6)..(6): n is a, c, g, or t
gagccnttacccattcaaaccaccacattcatttcatctcctttcaccattttatttaccgcagtattttgagacccatactgatcttagttcttgcccattgtacatggagttcctgcatggttagaaatttttatttaacatatccaactgaatcatttaaaggctttttatctttgaagaatacagagattctggagccgacagatatcaatagcaagtgtctgccactttgaagtgactgggattccgatcataggtggtttggacatttttgaaggtaaaaatgtataaaactgaaactggacttcatgctcatattttattaaggagaaataccttcctaagttcaatatagaatccaactggttccaaagtaatgctgccttctgtttggctattgcttgtaatgcatttgtcgacgc

SEQ ID NO: 503187 - DNA, 239 bp, Homo sapiens
accccaggcatgtacggaggcgttatggcccggaggcgttgaatggcccggaggcgttgaatggctcggagtgcgttgaatggcccggaggcgttgaatggcccggaggcgttgaatggcctcttcaaggagaactacaaaccactgctcaaggaaattaaagaggatacaaacaaatggaagaacattccatgctcatgggtaggaagaatcaatatcgtgacaattgccattcaacg

SEQ ID NO: 503188 - DNA, 338 bp, Homo sapiens
gcctactactactactactactactaaattcgcggccgcgtcgacaaagaatacattgggctgggtgccgatagctcacgcctataagcactttgggatgctgaggcaggaggattgcctgggcccaggagtttgagaccaatctgggcaacatagggacaccctgtctctaccaaaaaaaaaaaaaaaaatttaaattagccaagcatggtggcacacacctgtcctagatactcaggaggctaaggtgggaggatcacttaagcccaggaggttgaggcagctgcgagccatgattgcactgctgcacaccagccttggggacagagcgagctctg

SEQ ID NO: 503189 - DNA, 223 bp, Homo sapiens
gctcgacgttgtgttttttttgttaaaggtgagaggaagtcactcactgaagtagtgacattatgtagtgtgttaggccgttcttgtgtttcgtataaaggactacctgagactgggtaatttataaagaaaacaggtttattcatctcatgtttctgcaggatgtacaggcatggcaccagcatctgctcagcttctgaggagacctcaggaagcgtcgacg

SEQ ID NO: 503190 - DNA, 811 bp, Homo sapiens
catggtggctcacgcctgtaatcccagcacttatgggaggccaaggcaggcggatcacctggggtcaggagtttgagaacagcctggccaacttggtgaaaccctgtctctacttaaaatacaaaaattagccgggcgtggtggcaagcacctgtaatcccagctattcaggaagctgagacaggagaattgcttgaacccgagaggcagaggttgcagtgagccaagatcgtgccattgcactccagcctgggggacaagagtgagactttgagaacgaaaacgaaagaacagaacagaaaaggatgttaatgagcaataagaaatcacctgaaagtacaaaactcaccagtaataagtacacaaaaatcaaagaatattataacactataattgtgtggtgtagactattcttatcttaggcacaaagactaaaagatggaccaataaaaaataataactatggaccaggcgtggtggctcatgcctgtaatcttagcactttgggaagctgaggcaggtggatcactcaaggtcaggagttggagaccaacctggccaacatggtgaaacccatctctactaaaaatacaaaacttagctgggcgtggtggcaggtgcctgttatccccagctactcaggaggctgagggcaggagaaattgcttgaattccaggaggcagaggttgccagtggagccgagatcgcgaccatcgcactccagacctgggatgaacagagtgaaattccctttccagcacacacaacagaactatgataccttttaaagaagacgcaacgaaggattac

SEQ ID NO: 503191 - DNA, 246 bp, Homo sapiens
agtacggatgtggaagaacaagtggaaccagaaaacggatttcaggtcgggcacttgaatgtctgatttgggagaaagagaagacactgatcggccctttcttcaaataagagcagtgggaataacaaagctgttcagtggtaccctgggaatccactgaaatccggggtagggaagctccagtaccaccaacgggaaagactgggaatgcctaatagcgggtacgggcccggggtaccgagctcg

SEQ ID NO: 503192 - DNA, 349 bp, Homo sapiens
agttcgacggagactctcctaacccctatggtgttcttacacatggaggttagggagagccctggagactgacacccatggcaggaggagagggagggagtgtgtggtcctggaaaccacatgatggggtttcaaagaggaagtgaaagatcagttatatcaaatgacacttactgagatttgatcgctagatcggcaatgtagaagccactggtgaccttgtgagagcactgatggggaggagtgggagcaatgcctaattggagtgggtttgtgagagaacaggagagaaggaattggagaccataggaactcttgaggggtatcgctgtagaggggagcagagcca

SEQ ID NO: 503193 - DNA, 206 bp, Homo sapiens
  misc_feature (88)..(88): n is a, c, g, or t
caattgtcttttacgcaagtgatagcgttgctacagagaaggcagtggaactagccgccaataaaagggtatctgcttcatcgcggancaggcgcccatgaaatgccatcatctataacaacaatgaggacttccaggtcggacaagccaaggtggtcctgaagagcatggatgaccaggtgaccgttatcggggctgtggtgacc

SEQ ID NO: 503194 - DNA, 705 bp, Homo sapiens
  misc_feature (569)..(569): n is a, c, g, or t
  misc_feature (612)..(612): n is a, c, g, or t
  misc_feature (641)..(641): n is a, c, g, or t
  misc_feature (652)..(652): n is a, c, g, or t
  misc_feature (679)..(679): n is a, c, g, or t
  misc_feature (694)..(694): n is a, c, g, or t
cttacttatctcaatggctaaagaaaaaatagtgaaaataccaaatactgatgaggatacaaactggatattttatacattgctgacaggaatgtaaaatggtacagccactctgggaaagagtttatgaatttcttatcaagttaaacataattttttaatcaagttaaacataagacccagcagttgtgctcctggacattcattccagagaaatgaaaacctatattgtacttgtactcaaatattcataggagctttatttgtaatagccccaaactggaaacaacccagatgtcctacaacaggtacatggttaaacaaaccatccataacttggaatactgctctggaatgaaaaggaactaactgttgatacaagaacttggttgtacctcaggggtattatggtgaacaaaaaaaaaaccagtctcaaatggtcacatactgtatgatcgcatttatataacattcttgaggtgacaaaattattgaaatgaagaccagattaatggttgccagggatagggctggagggggtgtggggtatgttgctataagggatgacncaagagttccttgtctgatggacagtccatatgatttgtgatncgagttgatatacattgatttgaggttanccatgagcttnctgtctgaattgttggcctcatccccnatgatggtgtaactngggaccgataa

SEQ ID NO: 503195 - DNA, 477 bp, Homo sapiens
cctagaggatcctacgtcggcctagtccagctgcttcctagtagtactttcagaaggtaaatcagtggaggacctttgtgtatctgcacctcctcaactgagagaagaaccacagttgaaacctgcttttatcattttcaagatggttatttgtagaaggcaaggaaccaattatgcttgtattcataagtattactctaaatgttttgtttttgtaattctggctaagaccttttaaacatggttagttgctagtacaaggaatcctttattggtaacatcttggtggctggctagctagtttctacagaacataatttgcctctatagaaggctattcttagatcatgtctcaatggaaacactcttctttcttagccttacttgaatcttgcctataataaagtagagcaacacacattgaaagcttctgatcaacggtcctgaaattttcatcttgaatgtctttgtattaaa

SEQ ID NO: 503196 - DNA, 243 bp, Homo sapiens
acctacatgataacacataatgacccaccaaacccatgcataccatatagtaaacccaagcccatgaccactaacaggagccctatcagctcttctactcacatccggcttagtaatatgattccattacaactccacaattctcctatcattaggcctcctgacaaacatcctaactatatatcaatgatgacgagatatcatccgtgaaggaacataccaaggccaccacacccctattgt

SEQ ID NO: 503197 - DNA, 304 bp, Homo sapiens
ctgtagttgttgcagtgagtactatatgagggtttgaaatctgtaccaacaggtccttggacagatgcctgagcctgcccagcactgaggaaaagaggcttaataactggaggcagtgaagcaagtacagttgctgatggtgcaggtaggtctattaagaataactggcgctgaaacagcctgtgcttgagtcattggaggaataccaggacgtggaacaggtgagagcatacctggtagcattccaggcatcagaggtggtattcctggtccagagggcatcattccacccattggcatcata

SEQ ID NO: 503198 - DNA, 166 bp, Homo sapiens
gagctgatgaccccagcatgccctgtgagctgccccacatgtcagtgtactacacgaatggcttgggatggagtactacaatgaagcaatgcgcaatgtgtgcacctggaggtggggtccatggtagctccctccatgtgctcctcattccttgacgtacatgttg

SEQ ID NO: 503199 - DNA, 352 bp, Homo sapiens
gaccccgggtccatcccctttcgtgggcacacccaggtagagattactaacctccacctgcctgctctgtaggtacacgtggggctactgtccctcaccgtacacaggaaggtagttgcagacaccatcctccaattccaggtcgataacggcataaacatgctggcagtgcagggcctacaaggtgatgttcaccctgcagtcccccagagagcgaagctggccactccaaggcttaatgtcgaagggagactcatcctcaggcctttcctggagggagactgggctctccttaatgctccatgtggctgggacctggctgacgttccggatctaccaagggggatggaca

SEQ ID NO: 503200 - DNA, 985 bp, Homo sapiens
taggggggggttttttttcggccttttgggtttgggccaacccccgggttcccccgccccaggcccggcccccccctttccatgttatccccaaccatcacaacagtgttgattctggtggtggtgcgccaaaaatcgactttttgtggccagggtatgtagtcccctcgctggtatgaaaacgctctctggggaaagaattgttgtgataagtcgccccaaaataaagtggtgccgggggggaattgggtttaacaacagtggagaacaccccggggtgattccacaatatatttctgcgtgtcatcttggtgtttcaccaaaaatcccacctagtaagatggtgggggtccgggggatttcctataataggaccaccttcttgggggaccctcctttggggttccgcagatggagtgttatcacgacaaaaaatgtgggggggaaaatataaataggggggccttcgcgaaaaaaagggtgcgggggggagcaataaacacgccgtgatagtagccccccaaaaaaaacaaacaacatactaactaacacatcctcaacccaacacgctacaagaacagagtcgcaacgagatagaacaaacacaaagcggaggggcggcggccgccaataaaaataaccacacacccgggggggaccgcaatcatacgtacacgaccacacctcttacttctataggaaagcggcgcaccacccaacggatggagcatctaaataaaacaacaacgacgcggcgcgcgcctcttcaaaaaccgggctcgggggataaaaacaatcactgacacgagcagacatctagtaggagaccacacacctctggcgtggggagaaaaatgtagcgaccacaccagctaagcaatgaaagcggccggcgccacaaaacactggggtagtggtggacaacacccacatgctgcggagcgaaatgcacggtaataaagatgagcggcagaaacacacgcga

SEQ ID NO: 503201 - DNA, 286 bp, Homo sapiens
  misc_feature (18)..(18): n is a, c, g, or t
  misc_feature (125)..(125): n is a, c, g, or t
atgacccacactggagtncagtgccacgatcatagctcactgcaggcttgacctcccaggctcaagcagtcctcccacctcggcctcctgagtagctgcatgccaccacgcccagctaatttttnaactttttgtagagacagggtcttgctatgctgcccaggttggtctcaaactcctggcctcaagctgtcctcccacctcggcctcgcaaagtgctgagattacaggtgtgagccaccctggcctgattttaggcttttttttgtactggggagaagagact

SEQ ID NO: 503202 - DNA, 117 bp, Homo sapiens
gcgtagacaatgagtgcagtggtggctgctgtcgaccatgcctcaggtggagatgacaaaccacccccgagcgtcgaacaagagcggtatcatcagtgagcccctcaacaagagcct

SEQ ID NO: 503203 - DNA, 442 bp, Homo sapiens
gcgggaaccctgccatgctctgcctgtgtgccgtgcctctccttcgagcacctcctcatgaccaggcatggcagggcgtcctcttgggcctctgcctacggccattgctctgtgggtcttggctccctttggtggggaacagcgttagagaccgggatctagacacgaggtgtgctcgatgccacggggtgcctgagctttaggccctttctgtggacaggctagggaggacaggcatgctgcgtgcagttgcacacgtacatatgtaatatgtgtgtacagatctgaaacagcacagaaccgtgcctggattccgtcccaccttgcacggttctcccccacgccccatctccaccctgaggaccctggcccccagcaacagcagcatcctcacgcatctgctagggagtccagtgcacgcctgctcgagagctccagtgca

SEQ ID NO: 503204 - DNA, 145 bp, Homo sapiens
aatttgggcccaacccaaagttgagttcattcccctgttggaccagtggaaaaagaaacatgccagtgggcagaacatggtccttttctttcccgggtataaataatttttttaaaccctagtttaataaaaaccttgggcccca

SEQ ID NO: 503205 - DNA, 213 bp, Homo sapiens
acagataacggactactagaatctcagacacatgaacacaggtctagcctctatgtcatgtagccagaatttcacttagaaaataaaatcccttaatgtataaaggggaaataccggtttatctaaaacttggtttctatacaacgttgataacagatattctcattgatgccactgtaactccatatgttgtgatacctggagtctatcagc

SEQ ID NO: 503206 - DNA, 639 bp, Homo sapiens
ggccaactggtgttttacaaaggtgcaaaagcaattcagtggataaagaataattttctcaacaaaaggtgctggagaaattggatatccagaggttaaaaaaaaaagacctcaagctaaatctcacttcttatattaggttggtgcaaaagtaattgtggttttgccattaaaagtaatgtaatggcaaaatcacaattactttagcaccaaactaatacaaaaaataattcaaatgtatcatagatacatagatgtaaatgtaaatataaaactataaaacttttagaagaaaacaggagaaaatctttgagatctaaggtttctcaaagagttcttagacataacacccacacttataaaataaaaatttcaataaattggacttgcataaaattaaaaactctttatcggcaaaagactcttttaagaggatgaaaatacaagctatagactgggagaatatgtttgcaaatacattgaactacggggtcatacctagaatacataaagaattctcaaactcaccactagacaaaaaaattgaagtagaaaataggcaaaagacattaagagacatgtcaccaaataggatacatgggtagcaacttaagcgcatgaaaagttattcaacatcac

SEQ ID NO: 503207 - DNA, 298 bp, Homo sapiens
  misc_feature (37)..(37): n is a, c, g, or t
  misc_feature (280)..(280): n is a, c, g, or t
cgtaaaaggaggccatcaaaaggttttggtccaaaanccccacgggctttaaataataacgagccgtactatacggtctagtacgagctggtgcgatcgccgaggcagtctttggacgacatctctacactacacagcgagagagattacacgtgactccctccgcggcgtctacatacagcgtgctctccagatatctatcagacatgatcacttttgaccaaagaggaaggtggacgcacctgaggaagcctgaaaacagtgaaatgtgatgctacangcaaaaaaaaacaagaat

SEQ ID NO: 503208 - DNA, 172 bp, Homo sapiens
ggagactggggtgaaatccaggaggcagaagtggcagtgcgtcgagcgatctcgcgacggcaggtccagcctgggcaacaagagcgaaactctgtccccccaaaaaacaacagacaaacaaaaaaacaaaactcccgcccaggtgtggtggctcacacctgtaatcccagca

SEQ ID NO: 503209 - DNA, 860 bp, Homo sapiens
  misc_feature (1)..(1): n is a, c, g, or t
  misc_feature (77)..(77): n is a, c, g, or t
  misc_feature (116)..(116): n is a, c, g, or t
  misc_feature (134)..(134): n is a, c, g, or t
  misc_feature (138)..(138): n is a, c, g, or t
  misc_feature (149)..(149): n is a, c, g, or t
  misc_feature (151)..(151): n is a, c, g, or t
  misc_feature (156)..(156): n is a, c, g, or t
  misc_feature (161)..(161): n is a, c, g, or t
  misc_feature (168)..(168): n is a, c, g, or t
  misc_feature (173)..(173): n is a, c, g, or t
  misc_feature (178)..(180): n is a, c, g, or t
  misc_feature (199)..(199): n is a, c, g, or t
  misc_feature (214)..(214): n is a, c, g, or t
  misc_feature (220)..(220): n is a, c, g, or t
  misc_feature (227)..(227): n is a, c, g, or t
  misc_feature (291)..(291): n is a, c, g, or t
  misc_feature (297)..(297): n is a, c, g, or t
  misc_feature (306)..(306): n is a, c, g, or t
  misc_feature (334)..(334): n is a, c, g, or t
  misc_feature (344)..(344): n is a, c, g, or t
  misc_feature (346)..(346): n is a, c, g, or t
  misc_feature (356)..(357): n is a, c, g, or t
  misc_feature (370)..(370): n is a, c, g, or t
  misc_feature (387)..(387): n is a, c, g, or t
  misc_feature (400)..(400): n is a, c, g, or t
  misc_feature (414)..(414): n is a, c, g, or t
  misc_feature (424)..(424): n is a, c, g, or t
  misc_feature (435)..(435): n is a, c, g, or t
  misc_feature (442)..(442): n is a, c, g, or t
  misc_feature (454)..(454): n is a, c, g, or t
  misc_feature (460)..(460): n is a, c, g, or t
  misc_feature (464)..(464): n is a, c, g, or t
  misc_feature (475)..(475): n is a, c, g, or t
  misc_feature (478)..(479): n is a, c, g, or t
  misc_feature (490)..(490): n is a, c, g, or t
  misc_feature (500)..(500): n is a, c, g, or t
  misc_feature (508)..(508): n is a, c, g, or t
  misc_feature (510)..(510): n is a, c, g, or t
  misc_feature (538)..(538): n is a, c, g, or t
  misc_feature (542)..(542): n is a, c, g, or t
  misc_feature (554)..(554): n is a, c, g, or t
  misc_feature (579)..(579): n is a, c, g, or t
  misc_feature (596)..(596): n is a, c, g, or t
  misc_feature (607)..(608): n is a, c, g, or t
  misc_feature (616)..(617): n is a, c, g, or t
  misc_feature (625)..(625): n is a, c, g, or t
  misc_feature (627)..(627): n is a, c, g, or t
  misc_feature (631)..(631): n is a, c, g, or t
  misc_feature (640)..(640): n is a, c, g, or t
  misc_feature (672)..(672): n is a, c, g, or t
  misc_feature (680)..(680): n is a, c, g, or t
  misc_feature (682)..(682): n is a, c, g, or t
  misc_feature (685)..(685): n is a, c, g, or t
  misc_feature (688)..(688): n is a, c, g, or t
  misc_feature (703)..(703): n is a, c, g, or t
  misc_feature (710)..(710): n is a, c, g, or t
  misc_feature (772)..(772): n is a, c, g, or t
  misc_feature (855)..(855): n is a, c, g, or t
nccctcaaaatctactccataaacctcatttcctcccaaacttcaaattacacatttctcccccactcccccccccnaccatcatttctactaaatattcaccttcttaactaacntaactcacactatcatcncacnacctcacaacnancaatnatcanctcatanctaanaaaannnaaaaaaacaataaccaaancaaaaaacaaaatanctacanatattantaaaataataatacaatcccaaacatccacctcttaaattactacaaaaacaataccaataaanttatancaaatacantcttcacacatttcactcactttatttncattttatantnatttcttaanncctatatccaatnaaaccattttaaaaccnctatcaccactcnaattttacatctcnattacacttntcttttaaaanaaaaatncttaaatttcanaatcancaanattcacttttntanntagaggccctncttcttcatnatcttcantnttacatctaacaaccacaacacaccaanctcnatatccctctancctttcttcattcataaactccaantcaccatacatactcancctctcacacnnaacatacnnctccacancnctancaacacttncacaacaaatccaaagcaataccatcacccanaggacaananttntanttaaaatccacccanagttaanagagaggcatcttaaaaagccatcactttctccatcttcaagaaaattcctgtgcgcttgtnaatttctcatttgcagatctgaggacattttgcttagagatgattctctcaaatttgtaggctcctgctccaaatgtggtgcntactg

SEQ ID NO: 503210 - DNA, 857 bp, Homo sapiens
gctggggcctggccaggagagaggctcgggaaagatgagaactctgagtggacaccaaaggaaaaaaaaaaaaaaaaagttcaatgactttttccggagccccgggggtcctaaagccggggggaaatgaaccttgcttctttcgcgggcacttcgaattctattcccctccaggtgggtggtgaagccgggagtgtgagaggcatctccgtgctcatccggtgaccccagctgtactccagggggaaggcatctccagggaagagcacgctgggtcccgcaaaagcggggactgaaagaaggactttgtgactggggatgtgacgggcacggagatggagtggggggtggtggagcgcaggtgtgcatggtgacgcagttgtgtagcctccgacgttggagcggtggcgagacactcggagggctgcagagacgggcgcacgcgacggaaggccgggttccagggactaccttctcgtatgggcacgcgcagaagtaggggcgtgccctcatctcagtgtcctgatctcaggcggggacaactgccgcatgggcgagcggctcctgggctacccatctctggcggaaagggtcccagacgcattctctacctaggggaacccccaaggcacggagccgggccgaccggcagaggactacacgactctatcggaccctctgggaacacagggcggacgtcgggacccaatgcccgaccaactggcacgcctctgtgccagcacaaacacccaagcggccgcagccgcccgagagccggccttaccctccagccgcgggaaccattcactcggacagcgggcatgcgccagcacggagacgggactacggcgtcaggc

SEQ ID NO: 503211 - DNA, 203 bp, Homo sapiens
ttagtcgcgttgtttctgtggggggccagtgccctcctaattgggggggtaggggctaggctggagtggtaaaaggctcagatacacatcctgcgaagaaaaatacttctgaggtcataaataggattatcccgtatcgaatgcctttttggacaggtggtgtgtggtggccttggtatgttcttgtctcgtgttacatcgcg

SEQ ID NO: 503212 - DNA, 136 bp, Homo sapiens
agcttcctcatcaggttacccaaaagtgggtcccatcccccatccaggtgtgcttggatgttctcccccctcgaggtgtacgctgtgaaaagtttgggagccctgctttataataaaatgaaatatactacttcca

SEQ ID NO: 503213 - DNA, 183 bp, Homo sapiens
gaatgggttattaagaaataacccttagcatgtggggagaaatcagagagaggacaaggcagtctaggtccagttgatttctctttttcatattgcatttttgcttttctctcttgcagaactttgaggtgaaggcggatgacctggagcccatagtggaactgggacgaggtgcgtacgggg

SEQ ID NO: 503214 - DNA, 152 bp, Homo sapiens
gaaaaaagggccttggggcccccccttcccccttttttttcccccccctttaaaggtttaaagggttttggtttccctgggggggggggggggccccccggggtttcctttcccctttttttgggcccgtttaataaaaggggcccccttta

SEQ ID NO: 503215 - DNA, 322 bp, Homo sapiens
cacgaggggtgggcacctgtggtcccagctgcttgggaggttgaggcatgagaatggcgtgaccccaggaggcggagcttgcagtgagcccgggtcatgccactgcactccagcctgggtgactgagcaagactccgtctcatcaccctcaaaaaaaaaagaaaagtgtgtgtgtgtgtatatatatatatatatatatatatatatatgtagtgtgtgtgtgtatacatatgtatgtatatgtgtaaatatgtgtgtgtatatatgtatcatgtgtatatatatataaatacgtgtgtgtgtgtgtgttttatacatagaa

SEQ ID NO: 503216 - DNA, 337 bp, Homo sapiens
ctagcactgtctttcgtaaaatctctcatctgttcaacagccgcatttaccatttccggtagtcccaaagtactcatactttaggtcatgtaaacagcatgggattaatcatgtcgtaatccgggtatttatcatgtcggaaacttgtcacccacatgccagaattggggattctggcacacaccacttcgtgtggtcactgtaatcttccccaacagcctagcgattcactatcagcaataaggagcccatcagctttagtggtaagatcgtaatcagtacagtcagcgataacagaaccagggttttctcagaaacacttctgctagcaaaacca

SEQ ID NO: 503217 - DNA, 303 bp, Homo sapiens
atcctacatacctcatacacatcatacacacacaatcaagattaccacaccacatgccacacaacctacacaccacatcatacacagcatacacacgcatgacacatagcacataacacaccacatgccacacaacctacataccacatcctacacaccacacacaccacacacaccccataacataccacatcacataccacacacactgtattatatatcatatacactccaaaccccacacgcattacacatcaaaccacacacacaccacgggtgtgtcagcgcgagggaatccctcgt

SEQ ID NO: 503218 - DNA, 1174 bp, Homo sapiens
  misc_feature (1174)..(1174): n is a, c, g, or t
ccggccccggatcgcgagcctggagccggagccggagccggggccggccgggctgctgaggcccgagcggcaggatgcgcagcgcgggagcgctgagccaggctgcccagtctgcgatgaagcttgcctgcctgcctctgccctgccctggctgcctgcagcccctgggctggtccatgggtgctgggcactggctgtcgctgcatgtgcgcctgtgcatgcccatggatgggcagcctgcttaggctgctgcagctcattgtcccctgcatggtctgcatgccagtggctggctgtgggctgcgcccatgccccgggccccatgggagctgccctgctctgcgggtccccacactccattggaccgccttcaacgggcgggccatgaggccctggagcgggctgccgggaggggcctccgagccggcctgcccgacacgcacaaacaccaattgcacactcggcgggccacggcctttcacaacacatgtgccccagggacccaggcacgaaaccccacagacgaagccagctcagaagaaaacatcacggaactatggcaggaaggattccggtccttaggacaacccgcgacgcttagcaccacgaaccaaacgggacgctgccggagcgggccgtaaaacccacaacagggggggccccagaaggcgaaccaagttggagtggccgaggatcgcgccacccgacggtgccatttgcaggatgtacgacggacgaccaggaaacggagacccgacaagatcacacaaggcacacgcaccatgacataggcacacgctgtgccggggacaaaaacggattaaccaggacgacattttcaaacgaagaggccccaccaccacggtcatgccagagaaaggacttaagaaagtcgccaaacggttttcccaaacgacagggacaacgccgggagtttaacccctcaccaggacagccactttggaaacgccattttcgcacgcgggcgacagccggaccgcgacatgccgggccccggcgtggggtttgggtcaaccccaaaatagaccgtttcacaatcccgagatcgcgactagcagagcgccaggtttagcagggggcagtaccattggcgggtatcccaaggtggaaacaccccccggtggcttgagacttgcctcccaacaagcttcgn

SEQ ID NO: 503219 - DNA, 101 bp, Homo sapiens
tcataaactaggcacaggaagagatttatcagatgaaactctgttttattgccgtagtcacaatacaccgcaataaaagtcatgtgaaagcatgtgatttc

SEQ ID NO: 503220 - DNA, 180 bp, Homo sapiens
  misc_feature (24)..(24): n is a, c, g, or t
atctagaggatcccggggctcaangtgactcctcctgtggctcgcctcccaaaggtacctgggatacagggtgtacttggccacaccttacgcccagttttcttttctcaaagtgtcttcgtcgggcttgggcatcaggactacggtgggcctcatagcatagtccggaagagacccgca

SEQ ID NO: 503221 - DNA, 255 bp, Homo sapiens
  misc_feature (80)..(80): n is a, c, g, or t
  misc_feature (104)..(104): n is a, c, g, or t
  misc_feature (159)..(159): n is a, c, g, or t
  misc_feature (162)..(162): n is a, c, g, or t
  misc_feature (169)..(169): n is a, c, g, or t
catgaggatcccccattggtcgagacaaattagttgtggcaatgaaaatgattagggatactagtataagagatcaggtncgtccatttagatgttgtgtactngctatcatctgtctggaggttagttggattagtcgtggctgggtggtgactggcnggncgttgangagatatttggaggtggggatcaatagagggggaaatagaatgatcagtactgcggcgggtaggcctaatttctctcggaccaatg

SEQ ID NO: 503222 - DNA, 153 bp, Homo sapiens
ttccatctccgtcccaccgtcccacaaaggagagctagcagcagggagggcttctgccatttcctgagatcaaaacggttttactgcagctatgttagttgtcagctgaacctgggtaactagggaagactaatattaacggaacgacaatgt

SEQ ID NO: 503223 - DNA, 225 bp, Homo sapiens
ctctacaggatcctgtgcacgcgcgagtactgtattcgcagatgcacacgcgagcatcaaaccgtgtgtcaccaagaggtccgtatggacgaagttgttgcagatcggtgtggacgaagtcaacaacttcgtccatactgatctgtgtggtcattcggcgtgtgcaacacgccgaagccccatacgtccgagagagtcaacatgtcattgtggacgaagttgttg

SEQ ID NO: 503224 - DNA, 340 bp, Homo sapiens
  misc_feature (220)..(220): n is a, c, g, or t
caaggatcctgtgggcaggattactctgattttgaaagaaggtctagtgtgggaataaatgctatcaaatagtatcacatactacagacgaaatcttttatgaaaggaagagtcaatcaatgtggaaaacttgattttttcttatgtgaagaaattgccacagctgccccagcattcaatgacttcttccctaaacagcaacagtcttcagtgtgaaggncaaaccctccaccagcaaaaagatgactcgctgaaggctcaggggattgttggcattttgtagcaatatagtatttttaagttaagaatatatacgttggttttagatataatgctgttg

SEQ ID NO: 503225 - DNA, 368 bp, Homo sapiens
atccatcaaagtgagcgagtaaaccaaggaggaaaaaaagttagatccagccaggcgcagtggctcacacctgtagtaccaacactttgggaggccgaggagggtggatcacctgaggtcaggagttcgagaccagcgtggccaacatggtgaagccctgtccctactaaaaatacaaaaaaaattagccaggcgtggtagtgtgcgcctataatcccagctacttgagaggctgaggcaggagaatcacttgaacctgggaggcgggggttgcagtgagccaagatcattccactgcactccagcctgggcgacagagcaagactccatctcaaaacaaaacaaaccaaaacaaacaaaaagtctga

SEQ ID NO: 503226 - DNA, 141 bp, Homo sapiens
tgaaccgtatccagactcaggtacctctgatagtggtctgtccttcccttggagaagagttcattggaaggtgttgggaggtagcagttcttgtcggcagatttccttcaagtaattatggagctaagtctagtagagaga

SEQ ID NO: 503227 - DNA, 613 bp, Homo sapiens
tccctggagaggaatacctattatacactccacacagattcgcccagtggatctggtaaacgtaacttccccctgaatatgagaagatatgctttcaagtcccacctggcgaagtctgaaatggagaggaatatcttaattataacacctccaagcaccagaattcccttggatctgggcccttaataatgagcccccctataatggagatttcccttgtccgacacgaggggtggaccacaacattttgcagatgtagctggtggagctcagcaccagaccctggggccacccgagagtaccattacattttctttgaagacactccagagattttgtcaagagcccacatagagccagaccagatgctgaaagacccatagatttccatggccaggctttggccccggatggaaccaaatcctaccatctgaagctagacatagtgctttgtaaatgattatcatccttataatcactggggggaaaaatacccgattttaattatatagttttgggctttcatttattatcatttttttttgtaccaatttattatttttagatttttgtaaaacatgatagacataaaattggtgttatttcctcccca

SEQ ID NO: 503228 - DNA, 451 bp, Homo sapiens
tgacctagagttacccctggtacgggagtggtgttagatagtgggtgcagaggtggatcacagcacgggccttaggactttgcggcgaggccctgccaccatccacagataaccactctcctttggagagacagggcttggctgctgccgtgccttagtagaaactgaatgtttgaccatgggccaccaagttaccctgtgatctgagctgcccaccatgaactggggaattatctgacccacgtagccataaagttgggcatgcacagcagtgctccgtcatccaacagagaggtatatacatgatccggcctgagcacatcctgaagacacaagtaagttacatgaagaagtggcccaaatgcccgtggtccccattcctgctatgaagacacaagtaagttacatgaagaagtggcccaagtgcccgtggtccccactcccgtaccag

SEQ ID NO: 503229 - DNA, 481 bp, Homo sapiens
aaagaaccattatgcagacaccagcagtaaccaccataagaatctaacatttgatctcctgcattttccatagctgcggatgtaaaagatgtcgtaggcggctcaggcatatgacaatctcagcgactctcaacaagagccatctaagaagtgaagtctcggaagggcccgtatagccctctcattgggaccagaatgtgcaaggtatggagattcaaatcgacaaggcccatgctgttggtcagcctgtaccccttgcgaataagcctgtacctgctcaatctacttttccttcaaaaacaggggggatggagggaggaacagcagtagcaacatcctcattaacagcaagataatgattgtaaacctgtggctatcggtctaccccattcaaaaaacaaccaagataaaggcctgcctcggccagataatagagatcatagatcagaaggcaatagaggcaacagctcatcttacagag

SEQ ID NO: 503230 - DNA, 1113 bp, Homo sapiens
tagtggggtgatgaggaatagtgtgaagggagtatggggggtaattcatgggtgggcaccaaaatggaacgaaatatctggttcgcttcattctagggcgccccacaatcctaaggcctaacccgccgcagtactggatcattctatttccccctcttattggatccccacctcccaatatatattctcatcaacaaccggagctaatatcaccacccaaaaatggatctaatcaaatctaaacctcaaaacaatatggataaacctatacacaacatctaagggacgagaacctggattcttcttatataactaagtaaatccccttaatccatttttatatgggccaaaaattaaactctctcttgggatatccctggggctacattctctatttacaaaccaacacacccaattatattttataaaactctaagccatggggcgcataccctcttaatggaggcggggcggcacggaataatataagggctttccggcttctaaagattacaaattgggccctaaagccacatttttcttaaccacaaagggggcacacccttaaaacccctttaatccccctataaataagttttatttattcggaaacccatcaagccttaactctattcaaccgaataagccctgtgggctgtaaagcttaaaccggtgtaaattttcactggggggggccacttataatctaggcgacctaaatggggacagggccaacctcttaggatatatccaacccataaaccttaccctctaaaattttaatctttcccaatcctaattgccacgggtatcctagaaaatcgggggggctaaatccaagcctaagtttcaccttttaggaaaagcctcttaacctggcggaaacctttaaacagataacaaacaacttcgggggctatatgcaggggggaaacaacggtaaaaacgggcacgggcatcattgttctctgccccctttttggaaagggggaatcccgcgccccaagaggggaaatccgacgtacgattattctaacaaacacaacggaggagtgacattggctctcgccacgcaaccccgactaattacaacatcactacataatcgcaccg

SEQ ID NO: 503231 - DNA, 206 bp, Homo sapiens
  misc_feature (1)..(1): n is a, c, g, or t
  misc_feature (3)..(3): n is a, c, g, or t
  misc_feature (19)..(19): n is a, c, g, or t
  misc_feature (35)..(35): n is a, c, g, or t
  misc_feature (92)..(92): n is a, c, g, or t
  misc_feature (111)..(111): n is a, c, g, or t
  misc_feature (120)..(123): n is a, c, g, or t
  misc_feature (162)..(162): n is a, c, g, or t
  misc_feature (166)..(166): n is a, c, g, or t
  misc_feature (185)..(185): n is a, c, g, or t
nangaaatatcaatctagntcaattgagtaccttnaagaattattaacctgagccgggcacagtggctcacacctgtaatcccagcactttnggaggccaaggtgggcggntcacctgcnnnncgggatttcaggaccggcctgggcaacatggtgaaaccntgtntctactaaaaatacaaaantttttttggtgtggtggtgcg

SEQ ID NO: 503232 - DNA, 221 bp, Homo sapiens
acttggacactgaggactatatgtacactatgtctaaaggataaaagaaaatttaaaaataagcatcattcaatcatgataggctacaagaagaaacctcattgagtacacacatagtggacatgtagccaggcatggtggtgcatgcctagtagtcctcagttacttggcgagctcgaagcaagcaggatcacgttcaaccccagctataacctgcacca

SEQ ID NO: 503233 - DNA, 161 bp, Homo sapiens
cgaagaagaaggcaagaagctgcactgtggcaatgtctccatactgcttatgtcatgccttgggatgatgagacggacattgccagctgatggctgtgtgtgctctatccagctgacgggctgtctggggggcttccaagctgttgcccgtgcgctacgcg

SEQ ID NO: 503234 - DNA, 816 bp, Homo sapiens
aattcggccgcgggcgggcccagtatgataatcgagggacgctggcgtacatcttatgaagaaattggcttggagggtggtcacagatggctgataagcattacatgcccacttcttccacttagtagaaccagagcagtgtacagacatgtcgacactcaaagtacattatccaagagagaatgctggaactcaacagagaagtgacagggaacaccaaaagtggggaaggaggaggagaggcagcctctctgagactgggttcgcgctgggcatcaggagtgaattcccaattatagggaagaggtgagtagagatgtagtgggccagccctacagggtctgctgagttattactccccatgtgtggacgcacagcgagattgtagacactaaagacagcaacgacgagaaaatgatctaaagacacgctgggcccgggtgacaagtaccaccaagacgtagagaccagtagcatccctgaatgccagactgtagctgttatctcatcggatacaagacaagggggcagggtaaggagtgtgagccatctccaatgatagcgtaaggtcacatgggtcacattgtccacgtggacggggggccccttcccctgtttggcagccgatctggcgcagagagatgggcgatcacagcttgcgccttttttctgcatttcggagacttgcactcctgccggagctccggactggatctcgaggggcccggtgtccgggtgtgcactgatggcccggcgggccctagggtccgtcctggggcggtcctccgaccgcggggcctcccgaggtccagggtg

SEQ ID NO: 503235 - DNA, 427 bp, Homo sapiens
gggatgaaagattttgaggagatgaggaaggctgatatctttcagagcgtcccgtaatcttggaatctaaggaattgctttaggctggattacctagaactttgccactgacttgagttcctgaactatggcacatgaatatgggggctaagaaattactcctctggattaataatcaattaacaggtctgaaagctcatccttcagaggattatacggcgcctctgctcaatgaaaaaccatgataattactaggctctaaaataaacattctgatatacgccgatgaccccaaccatttttaaactctctcggctgtcgctttcggccagtcttctgctagactttggcacatttacccatgcgggacgctttttcaccttaattggcctctgtttagggagtcttattaccattgggccccctt

SEQ ID NO: 503236 - DNA, 515 bp, Homo sapiens
tgctggggtcacaggtgtaagccactgtgcctgccccctccatctctaaaaaaaagaaattttaacaatcctttaaaaaattgggttagtggtttgagctcatgccccatgagagtctaagaatccccagcctgtctagcatctgcttgttgggccataatgctagggtaagctgagtcccattgctgcacaggttatagcccacctaactctagcccatcactgactcattttggttcttgttctaaggctgttctgtcctgtgtacagatctgcatggagcttgtactacttttctgttgccactgtagcaaactatcacaaggttagtggcttaaaacaatacaaatgtattatcttagcgttctgcaggttgtaagtccaatacagtcctcactttgacaccttaaaatcaaggtgtgagcagggctgggtactttactggagactcttgtaaagaatctgctcctggcttttgcagctctagaggcaactgttgtgtcccttctcacttt

SEQ ID NO: 503237 - DNA, 1447 bp, Homo sapiens
  misc_feature (135)..(136): n is a, c, g, or t
  misc_feature (150)..(151): n is a, c, g, or t
  misc_feature (167)..(168): n is a, c, g, or t
  misc_feature (180)..(181): n is a, c, g, or t
  misc_feature (189)..(189): n is a, c, g, or t
  misc_feature (229)..(229): n is a, c, g, or t
  misc_feature (279)..(279): n is a, c, g, or t
  misc_feature (283)..(284): n is a, c, g, or t
  misc_feature (291)..(291): n is a, c, g, or t
  misc_feature (313)..(313): n is a, c, g, or t
  misc_feature (404)..(405): n is a, c, g, or t
  misc_feature (436)..(436): n is a, c, g, or t
  misc_feature (983)..(983): n is a, c, g, or t
  misc_feature (1099)..(1099): n is a, c, g, or t
  misc_feature (1152)..(1152): n is a, c, g, or t
  misc_feature (1170)..(1170): n is a, c, g, or t
  misc_feature (1178)..(1178): n is a, c, g, or t
  misc_feature (1193)..(1193): n is a, c, g, or t
gccgaccagttccgcccgggcgcgaggaccggccgcaggaagttgctgcaaaacttttttggggggtgcagccctgtgccccccgcgcgccggggcctgaatgcgcgccgcgtagggtccccctgtggccgagannggtgtgccctggannggaagatgcgcggtgnngtggctgccccnngcccctgntgccctgtggtgctatggccatggtgacctgtgctgtgcntgtgtgtgcgtgcccctggctggctgacactgaactggctgtggacaatngcgnngctggcntaccctgcgctgctggccgagngacgactcggcctcgccccccggtgccgccagcgacgccgagcctgggctgacgaggagcggcctggggctgcaggtggacttgcgtggtnntgcggggacaagtcgagcggcaagcattacnggtgtcttcacctgcgatgggctgcaagagctttttcaagcgaagcatccgccgcaacctcagctacacctgccggtccaaccgtgactgccagatcgaccagcaccaccggaaccagtgccagtactgccgtctcaagaagtgcttccgggtgggcatgaggaaggaggcggtgcagcgcgggcgcatcccgcactcgctgcctggtgccgtggccgcctcctcgggcagccccccgggctcggcgctggcggcagtggcgagcggcggagacctcttcccggggcagccggtgtccgaactgatcgcgcagctgctgcgcgctgagccctaccctgcggcggccggacgcttcggcgcagggggcggcgcggcgggcgcggttgctgggcatcgacaacgtgtgcgagctggcggcgcggctgctcttcagcaccgtggagtgggcgcgccacgcccttcttccccgagctgccggtggcgaccaggtggcgctgttgcgctgagctggagcgagctcttcgtgctgaacgcggcgcaggcggcntgacccctgcacacggcgccgctactggccgccgccggcttccacgccgcgcctatggccgccgagcgcgccgtggctttcatggaccaggtgcgcgccttccaggagcacggtgnacaagctgggccgcctgcaggtcgactccggcgagtatgggtgctcaaggcancgcgctcttcacgccgangctgtggnctctcaagaccggcncacgttgagagctgcaggagacggcgcaggtggccatcacgataagggcggggcagaaccgccaagccagcgcacggggcatgcaggtggagccccggcctgacgggccgcgtccaattgccaggtactcagggcgggggagagcctgggaataagacagggataagagaacaggcaggtggaggaccaaggcggtagggagggcaaccagcgagggaggaggaagcacgcaccaaagaagacggtggagaaaa

SEQ ID NO: 503238 - DNA, 500 bp, Homo sapiens
aaggggtaatgttggcagcaatcttttttttttgccaactcgcttgtaaggctcaggcgcgggcctcgtttgctttacgaaagacgaaccccgactcccaaaaaaaaaaaacagagctttgggccccgggccccacctcagctacaaaatttgaatgagagctacaccaagaatttggggcaaacgtacgactgcttcggcaactcgttcttggaacggacccgtgccctagcccacgccgagggcttaataaaacttaagacaacgaaaatcggaccttcccaccccataaaaacccctatattaattcctgaaagcctccctcacccccgatgcacaaattaaaccactccaaaggccgtggcttctttaaatctggacgcctcgttggaagggcaaaatgcccgggtaacaatgctctttaaaaccacacggttggggcgtttaaattctacaattgttacctaacgggacctgggaacccggccaaaattgttaag

SEQ ID NO: 503239 - DNA, 199 bp, Homo sapiens
tgctggggtcacaggtgtaagccactgtgcctgccccctccatctctaaaaaaattagacgtggtggcatacacctgtagtcccagataccagggagactgaggtgggaggatcgcttgagcctgggaggttgaggcttcagtgagcagaggtggcacctctgtactccaaactgggcgacagattgagaccctgtgtc

SEQ ID NO: 503240 - DNA, 526 bp, Homo sapiens
agagtcacactgatgaactcatttagggccaaaggaagaaggggaggcagatttcccctctagatgagtgaagggataggaggctggtgaacccaacggctgaaatgtgaagggtgagagggtagggtgagtccccccagccctgagggatgaagggtctgaagatggcactgcacggtgacagctgcagtgactcaggagctccgtttacaaaggaacatgagtgaggaacataacttaatttttttttatatctgacctgaatttctgttttcctcccccattccccacatggtagaagtgtaatctcacatcaatttggggaccctttctttccccagggatgtgtagaacttttggggatggcacatttgaagaccttagggagctttgcattttaaaggctgaatcccacactctatcatacatattaatatttacctgcattccacattaaagggttcagtttatgacttgtgtcctgtcttgtagatacttaattaaacggtattaattttgaaaaaaa

SEQ ID NO: 503241 - DNA, 896 bp, Homo sapiens
tttaatcggccgaggcacctcccgtgtggctgtgtggggaaatgtctctccgaaatgcgtgaatggggattggattgagtgtttttatttccccttttgttgctgggtgtgcttggtgtgcctgtgatctgatgtgctgtgctgtgtggtgcctgctgtggacttgggtgtgctcaccctgctgatgcctgatgatgtgatgctgctgacaaatgtgattgctgtccctgccggtggtcacatgtctcctgctgtgcccacactttgctgctgctgtgctgccctgctgccacctgtgtgtgatgccctgccctgctgctgcttgagaacccatgtgctgtcctgtgtgcttggtgatgatgtgtgtgcctggtgatgctgtcctgcagtgtgtgctgctgggccctgtgatctccctgaccccaggtgaatggggatccctggatgcttccttgtgatgtgctggctgtgtgctgtgcctgtgtctgctccatgtggaacctgctgcttgccctgctggaaactcctgctgctgcctcctgctgtgagttggcccctctgccgctatgccccccatggctgctgctggggttcttgtgggcccttgcgatgtgtcccccccttccccctgcgggtgcttcccaagctgggctaagtgcgggcttctcttcctccctcctctgtcgcctccttttcctccccctcgttcaccttttccttccctctatccatccagagccccgccaaagggcgcactgatctttctcatccttccctgctcttccttctctcactcctcctcctccttgtggaaatgggcccgagagggcatgtgggggccctctgacgttgcccggattgtgtgctgcgcccaattggcagtggtacggactacg

SEQ ID NO: 503242 - DNA, 202 bp, Homo sapiens
aaccccccccgggggtttagatttttttaaacccccggggggggggtggggggggggacccccttttttgtttccccctccttttttcccccccccgggggcccccgttttggggtttttttttttccccccccttgtttgggtcccccttttttttgggtttttttttgggggggtttttaaaccctggggaatttgggga

SEQ ID NO: 503243 - DNA, 284 bp, Homo sapiens
  misc_feature (17)..(17): n is a, c, g, or t
  misc_feature (41)..(41): n is a, c, g, or t
  misc_feature (44)..(44): n is a, c, g, or t
  misc_feature (89)..(89): n is a, c, g, or t
  misc_feature (112)..(112): n is a, c, g, or t
  misc_feature (121)..(121): n is a, c, g, or t
  misc_feature (142)..(142): n is a, c, g, or t
gagaggggttgaagtanattagtgaaggatgtgtgtttatntantgttaagtaggagaaaagttttattggaaagatttaaataatgantttagaaaaaatttgaaagtaanagtagtgtntatattatttaagtatggaanattttaaaaattggtagaatttgagtgtttttaggttaatttggtggaaatgttgttttttgaagattaagattttaggatggtaattatgttttgatgttttgatttgttttagtattaataaattgtatatttgttttga

SEQ ID NO: 503244 - DNA, 128 bp, Homo sapiens
tctgaaccaaaatacttacattcatttatgttctcattgcagcaacaagataaacaagcataattccatggccaaggagttacaaatagcaccaagcccaggaaccttgagcatatctataaggcaaa

SEQ ID NO: 503245 - DNA, 784 bp, Homo sapiens
  misc_feature (306)..(306): n is a, c, g, or t
taggtttgagggggaatgctggaaattgtaatgggttatggagacttgtcatataagtaatgctagggtgagtggtaggaagtttttccataggagggtgtatgagtttggctcgtagcggaactcgggggatatgcgtgttctcgaatcttcattaagaaacagggaggtttaaaagtttagggctcttgggtgacaaaattatgttgtgtgctagagtcttcaggggaaaaggtgcgtctcactattgttgtgttctcctatgagaaagaaatttgtgtagtgtgagtgtgaaagggtgtgttntatatttatctacatatacatgtgttgtgtgggtgtatatctctcgcgctatattgtaagaaaaatagcgggcagaaaggggtcgccgtggcgggcagataatctcagagtggtttggagagcccgtggagaaacatagtctctcggagactctcccccctttgtgcgggccaagtgtctccgcacaaggggggggttctcggcggtgtgggctcctcgtgacaataagtgtgggtggggagatatataaatctccattatttttattgggcccccacaggggttctccacgtgtaagtgggcccacgggaaaggataaactccagaaaggggtgggtcacctgtgggtgcttcgggcccacctccagggggggtgcggaccagcagcgttctttcagagggggagcccccacctttttattttaggtaagtggctctggactaggttaggaaacatgtactgggcccaaaggggggg

SEQ ID NO: 503246 - DNA, 102 bp, Homo sapiens
ccccagagcacgagaatgtgcagtatgctgccttgattttgaagcaatcctggtgcagcctggcagccctccagataagacccaagtgcccatggtggtcat

SEQ ID NO: 503247 - DNA, 1121 bp, Homo sapiens
  misc_feature (619)..(619): n is a, c, g, or t
agaaactcaagtcatcttaaaaaaaaaaaaatacaaaaaaaatttacaaaaaaacaaacacaaaaaaaatatcttttttaggccagagtttttctacagggtattaagtgaattatttttcttaattccttataagttttatgtgtttaatatttcttaataccggtagcattaatttatactttggtagcaacacaatatttttataaacagccggtgctgggctcaagtcttcacgaggggtttaggcagggccatctgggggaccctgtgtaccatgtactgtattttaaaaaaaaaaaaaagttaccttttgtccccctttgctggtgttaatttaacaaaaagattggttggtggtggcgggctccggtatcgggggtgggttccaacaggctctccaggggaggtcccatttgcgcatggggggttagaagtttgcagcgggtctctgggtgaatttgttaaacccccggagaaccaacattgtgaaggggttaattgagggggtttccgggttggcccttggggattattgggttcccctgtgggtttggggtgccagtttcctccatttatacaggccaaatatcagttctcagtgattgtttcaaaaacntttttcgcggattgctcacacgtgggaggaaaggggaccggaaaaaaaacagattttttacccaaggttaaattaacatttttaaaacctggaagcgtggataacatggtcagacatgtgtaataacccttggttcctggtccctgggtcccacaaagttggaacctattccccagggaaagaaacagggaaaggtgtcccctccggttcctttaaagttcgccaatggcccagagcggggtatattcagaaacctccccgtagaccccccggaaattttttgggacatatttttcccccgagtggtgttgtgagcccccagggccaaaagaattatcttttaccaggtcaagaagaaggcagcatggcttaaagaagcacctactaccgagaggtgaaatcggggtgttcaccacaaaaacaaccctgtttggaaagaaccacacgtaacaagaaatcacaaaaaagtacagcacaaaaaaaggacggcgggcgaacatag

SEQ ID NO: 503248 - DNA, 343 bp, Homo sapiens
cagggtctcactttgtaccccaagctggagtacagtggtgtgattatagctcactgtaccctcaaactcctgggctcaaacaatcctcacacctcagcctactgagtactaggacaccaagtgtgcactaccatacccagttattttcgtgtgtgtgtttgttttggtacagctggggtctcgctatatagtccaggctggcctcaaactgttcgcctcaagcagtcctcccacctcagcttcccaaagccctgggattacaggtgtgagccactgcacctggcctgtcactattagttttatttttaattttccccccccacagattgtaaccaaaaaaaca

SEQ ID NO: 503249 - DNA, 407 bp, Homo sapiens
catagtatgaatggcatatggactcaagtgaatacttggatgacacctatgtccctctgcttctcatcttcagctaatgtactatctcatgcttcctagtgcaccataacgttcaatgtactacctatgcacaaactggacctatgtacattatgtgatagtaatctatgtactcttttcccgtacacatgacacacagcagagacatatgatgtataccattggcatcaatgtcaaaagtgacttcaaactagagtgaacacctcggggtgcaggaggtatgccttgtgagtacaaattgccaagcagtgtatgaaatcctttgtcatggcatgctcgcctaacataaaccctgaataagcacaccaggctggatgtcagaaaaggtagtgaaggtctgtgtactg

SEQ ID NO: 503250 - DNA, 289 bp, Homo sapiens
  misc_feature (199)..(199): n is a, c, g, or t
  misc_feature (215)..(215): n is a, c, g, or t
  misc_feature (231)..(231): n is a, c, g, or t
ggatcctatttatacatgatgctgggtatgcgctagcatatgcagaagattgaaacttgagccctccctttcaccatatacaaaaatcaactcaagatggattaaagacctaaatgtaatacctaaaactataaaaccctagcaagaaaacctagtgaaataccactccatgacataggccctggcgaaagatttcatngagtgaagactccaanaagcaacgtgcaacanaaaacaaaaagttgacaatgtgatgacctaattaaactaaatgagctctgcacagcag

SEQ ID NO: 503251 - DNA, 485 bp, Homo sapiens
cgtacttcagatcggctaacggctgtgggatgcatctcggcatccttctgtttgaagtcctctacagggcaacggctgtggccgcatagccgctgcattcaagtagttatgtacatcgcagagagtcccaggccatgtggccaggtgggggaggggcgtcatctcaccaggcgccgagtggtatcatcgtcaccgcgtcgggtgacgctttgtacttttccacttcggccatgtactaggtccacgcgtcacctttactcgtgaatacctcatcctgcgtcttcagcgtctaggtatactataccggtcttggaggggtagttcgtactccgcctctgcgtcagcccacgaagctaagtgtggaggccggaccgcgcttcctcttcggatccccggggccagcggctgggggcgactgggtcggggtcgctgcggacccgggggcggctcctccgtgccgtttggccgatctgaggggatcctct

SEQ ID NO: 503252 - DNA, 171 bp, Homo sapiens
atatactactgagcttagtttggaatcactcgtgatatttaaccatctatgctcagcaataccttctatctatagaccacagaatgtcatgtgtgctccactatcagcatcatttgcatactactaaaatgcaacatgtttcaccaaggacgatgagtctcaccgcaattt

SEQ ID NO: 503253 - DNA, 119 bp, Homo sapiens
acatgtatgaggtccagttgccacacatttcatggtggcatctgtgtgcgaggcagtgtgtcctgggcctcctgatcgcagagtgggcctggtccagcatggtgccatcgggacggggt

SEQ ID NO: 503254 - DNA, 154 bp, Homo sapiens
ctgacccctagttagaagttcaatagcattatttaactcaaataagcaagatagcatcagcgaagcaatattaacttgcattaatgtatttaaaatttctctgaatatatctacctttgcataaacggctcacactagaaatacaaacatcaat

SEQ ID NO: 503255 - DNA, 192 bp, Homo sapiens
tggaacaggctgaaatgcagggaaacgagagacacagactaggactagaatacacaagctcctctagtggcattcctgttcaaacaacctcataggtcagagatgccactgatcactcctagatcacagtaaatctataataacattaatacataaatgtactgaacttgggtagtaagaaaaataacatca

SEQ ID NO: 503256 - DNA, 145 bp, Homo sapiens
  misc_feature (1)..(1): n is a, c, g, or t
  misc_feature (5)..(5): n is a, c, g, or t
  misc_feature (142)..(142): n is a, c, g, or t
ngaantattgccaggcacctcgccaggtcggggacagcatggaccgtagcatcctccggcctggtgaacggcctggcctgcagctcaggaacaccagccggtcggaggaggacggaacagggacctggccactgcctggaanagc

SEQ ID NO: 503257 - DNA, 338 bp, Homo sapiens
  misc_feature (28)..(28): n is a, c, g, or t
gtctttcctaagatggagtcttgctctntcgcccaggctggagtgcagtggcgcgatcttggctcactacaacctccacctcctgggttcaagcgattctcctgcctcagcctcccgagtagctgggactacaggtgcccacgagcacacccagctaatttttaaaagggttctaacttatttgctgctgtgactgagtctcatggaatgtcttcattggataaacttcaattggcatttggttttttaaatcatccatcctactgagtttcacaggtaactcaagactccatgttcatataaaaatggagagtttctacccaaataagcccatcttt

SEQ ID NO: 503258 - DNA, 933 bp, Homo sapiens
ggccaacatggtgaaaccccatctctactaaaaatacaaagagaaatacaaaaattagctgggtgtagtggcgggcgccctgtaatcctagctactcgcggaggctgaggcagagaactgcttgaacccgggaggcggagggtgcagtgagctgagctgacattgcaccactgcattccagcctgggcaacagagcgagactccgtctcaataaacaataaaaaaaaaagatttcccactcacagccctctgatatagggggagtctctcattttacagattgtacaaaactgttcatttcacaaagattatttctcatgccttccaaggtggctggtcacttggttaccaactaggactcagtccctatttgcctatatttattttcccacctcctgaaaagcacttcaggccaccaccatcttgcccacacagcaaccaaggggagacttacaaggggcaattgacgccatacagggccaccaacacagggaggcgcctagcacaagactttgcttatctctcaacacgtcactctcatggtcctccacgcctggctttgggggccaacagaatcctggattggtcaacgcgaaacacagccttgcgggtttatgactccccaatttgcgcaacggcagcgattgcccaacactcacggcctgcaacccaaggttggctatcctatcaccctgtcttgaaccttcgtatctcgacaaacccttacttcccttgcgcactgtacaccccaaaaatatctgacctctcagctgtttcaccagttgccctttacaaccgcgatttaaaaccggttgtaagcatttttcccaaatctacctccattcttctgaatccatcacgcctcacaatttccaactcttttccccacccaattactcgcattaaccttgggaacaattcactttaccttcc

SEQ ID NO: 503259 - DNA, 269 bp, Homo sapiens
acattcgtgtcggacagtatatagtcagaggatagctattcaaaagattatggatgcggttgcttgcgtacgaacttcttatggcggcttctgtggaaacgacggttcatctctctggttttgaactggaataagagctaacatgtttatttctacgcctactccggttcaaaatcagtgcgagcttcccgctgtgatgagatgtgcctgccaagattgtacactacatgacgggttggtccatgtcattacgtgtacacgaattttca

SEQ ID NO: 503260 - DNA, 607 bp, Homo sapiens
  misc_feature (1)..(1): n is a, c, g, or t
  misc_feature (88)..(88): n is a, c, g, or t
  misc_feature (182)..(182): n is a, c, g, or t
  misc_feature (196)..(196): n is a, c, g, or t
  misc_feature (199)..(199): n is a, c, g, or t
  misc_feature (216)..(216): n is a, c, g, or t
  misc_feature (220)..(220): n is a, c, g, or t
  misc_feature (231)..(231): n is a, c, g, or t
  misc_feature (234)..(234): n is a, c, g, or t
  misc_feature (242)..(242): n is a, c, g, or t
  misc_feature (257)..(257): n is a, c, g, or t
  misc_feature (293)..(293): n is a, c, g, or t
  misc_feature (305)..(305): n is a, c, g, or t
  misc_feature (321)..(321): n is a, c, g, or t
  misc_feature (335)..(335): n is a, c, g, or t
  misc_feature (380)..(380): n is a, c, g, or t
  misc_feature (496)..(496): n is a, c, g, or t
  misc_feature (520)..(520): n is a, c, g, or t
  misc_feature (593)..(593): n is a, c, g, or t
ngcctgagaaacttaacaaatctgcaagctggaaaccgcgtcttttccccactctctgccagacagaatcacccagtccactttcagnggcccagcagggaagctgatttaagagaagtcaacagcttttctgactaccctgtggattccatcagtgcaccggcacctgcagggctgcagtnagcatctctgatgnggnggtcccgggccctcacncgcngtctccctccnggnttccttgngggggggggcttcgnggtttcgggctcagttcccctcccactcccgggggnggggcgcgtggncatagggggggcgggnggccagggggctgngggctgggtctgcttcttctgggttcgcgccacagtcacgtgtgntggctgctgtggcctgcggccaggtgccattcttcctcatgccctctgtgggtggcttccttccactctggggtctggcatggccctccccatcgttatcctctctgcattcatgncagggtgttggccactcgcttgcncccttcaggtctgccgtcttggttcctaggttgctaggaaaggaccacgtgggggcccgctgccgagaacggnaagtgcagccagga

SEQ ID NO: 503261 - DNA, 900 bp, Homo sapiens
gacagcccgcgcgctcgctctccgcccgggtccagtcgccagtcgccaagcgtccgcggcgcctcgcaagggtttcaagggaccacaccaaaaatgccatctcaaatgaacaggccatggaaaccatgatgtttacaatttcacaaattcgtgggggataaaggctatttaaccaagagggaggacctgagagtactctattgaaaaggagtcctgtgaattttggggaaaaatcaaaaaagacccctctgcttgtggacccaaaatacttgaagggaccttggaccaatgtgtagaggattgggccacacaggtggggcctttccaaggaaagcttttcttttttccccctaaattgtggcgggccctccaccaatgtgcattgcattgggctttaattgtgtacgttaccaccatttgaaggcagccacgggggcacacgacacgtaacggggcaagaacattgacgccgggttacgttccctcccctggaataaggcaagttgggtccccaaaaggggtccgcttaacggaacattcgggccccaaaaaaggtttttcccccccaataaggaaggggattttcagtgaggccaggatcaggggacacatttacggccaatttgttaacaatttaaaaatttctaaggttctaaattttgggacaacgtgcaggaagaacgggaacaacggttaacgttcccaggataaaggcttagggacttggtggattggtatgggatttctccgtgtgcctttaaattaaaataaagggtccttagtgaaggtttcccagacagaagaacagacatgatataagaagaaaaaactttttggcgcagatcgtgtgccctggagaaaaagtttttataaccaagtgtgtgggggcgggccgcatga

SEQ ID NO: 503262 - DNA, 128 bp, Homo sapiens
gtcgtgctgattcaaacatgcagatctttgtgaacgaccctcactggtcaaaaccatcacccttgaggtcgagcccagatgagaccatcgaggcttccaagcgcggtaccgaagctcgcaattcagta

SEQ ID NO: 503263 - DNA, 241 bp, Homo sapiens
ctgcagacaagctgccatccgaaaggagctcaatgaattcaaaagcactgagatggaagttcatgaactagagtagacacttaagcaaggttagtattaagggtttaatttttcctgtgtttttccctcaagtggcaatatttatctccaaataaagctctcccactggtgggacatgcagggggtgggagggtgccatgagcagggcaagcatcagtaggaaggcaggcatgcggttcca

SEQ ID NO: 503264 - DNA, 308 bp, Homo sapiens
gtaatacgtatgtagaagcatgagtatgtagtatagaaaggcagagattgaggtttgcattaatggtcataagtgagtggctaagaatcaggaaggacattgataaattactggtgagagttctgtaatccagagaacaggcagtgcattagtggaaaaatagaattcattatttggggttaaaatgaagtgaaatatggcgggtctgaatacagtggtgcttacaactaattgatcacaaccagttacggatttctttgttccttttccactcctattgcttcacttgactagtcataaaaaaatga

SEQ ID NO: 503265 - DNA, 378 bp, Homo sapiens
caccggcgtgtaaacatgacgagctgatcgagatcgtatgcttgggaaataagttgggccaagagtagcaccttggagacctaagatctttggatcactttgagaagagccactgagcctgaagttgaaatatttttagcttagtcatctgtgttagctataggagaaatagtaacacaagaaataactcctttttcacatgatcatttatatctatatacatatatatacttgcatacactatcactgcattaaaaaatgagtatgggctgggcatggtggctcacacctataatcccaacactatcggcaggcaaggaggaacaaacgaacccttgaggccaggagttccagactaacttgggccacacagggcga

SEQ ID NO: 503266 - DNA, 427 bp, Homo sapiens
aatgaccaagaccatcagtttgctgtattctactgatcacacagaccaaccatggtataatgcgtgattacacaagggtgtaccagggagacagggatcctccttaggcccatctaagaggcgggctatcacatctgatatctctgagtatctttggcaggaataaaacagaagtgatgctgtgtacttctcattgtatcctatcaggttaacataagatttcaatttgttttattactgatgatgttcactttaatcccttgattaaggagtgcctaccagacttcgccactgtgaggttttttttttttttttttttttgggggaaaaaagttgtgggctgggcccccagcgggggggggggagggggaggcccaccaggcacgggggccctcgcgcccgggggcaaaagagatccccggggcaa

SEQ ID NO: 503267 - DNA, 402 bp, Homo sapiens
tgaccatgagtgcgagatcattgttcatgatggagcagaccgtgccgtgcatgtacaacgaatctagaggcatgtatagcaggtcaggtggatgacagacagaagatacatgcagaagaactgggagaataacagcctatcgaagttatgaatgcttttcgtggggggtgtccagctgaatttcaagccttccccagtcagaaatattcctcctttggaaggctgcatatggaatcttgttattaactctgtccccatggactttgcaaggcctgtgtccttcaaagatgctgacattggtcgctgtgcccatcagaacctcggtgaagatgacgatggagcatgctccagctgaaatagttatccagcctgagcccagttcgcccccagcgaggggtaccg

SEQ ID NO: 503268 - DNA, 131 bp, Homo sapiens
ttagttttgcactgaatcacagcctggggactcagctaatcccattgttgtcaggaccttctgcgattcttgtgggtctactgttccactcctgtcagtgtcaaaactggtaaagtgttgtctccggccta

SEQ ID NO: 503269 - DNA, 283 bp, Homo sapiens
  misc_feature (12)..(12): n is a, c, g, or t
  misc_feature (40)..(40): n is a, c, g, or t
  misc_feature (42)..(42): n is a, c, g, or t
  misc_feature (236)..(236): n is a, c, g, or t
cccgggtaagantgaggctgggcacgtttgctcacatctntnatcccagcactttgggagggcaaggtaggtggatgctggagcccaggagttcaagactagtctggtggcgaaacctcgtctctacaaaaaatacaagttcagctgggtgtggtggcacacacctgacagtcaacggctggttgggtggctgaggtgggaggatcacatgagcctgggaggtggaggttgcagtnagccaatattgcgccactgcgtttcagcctgggtgacaggagttaga

SEQ ID NO: 503270 - DNA, 344 bp, Homo sapiens
  misc_feature (344)..(344): n is a, c, g, or t
cgcacactatatatgctcttacatgagggaatatggggttatataaaactcgcgtacatactattatatatacaggtaaattacatgcatataatagcattttatgtgcattagcttgacacaagtttaaaggatttccttatttctttcaaacattttctgggttactctcttttaattcagaaggttctatcctagctcttaaccacaggatccctgtgctttttatggcacttcattatctaaatctaggatgagcttcctagggttctgtccagattctttctgtgtattctgtgtaccacatcatcttctttcgttcttgtgactctcttcttgctttn

SEQ ID NO: 503271 - DNA, 989 bp, Homo sapiens
atgggctctcctcggcggaaggtgtttttgtcccgagttgtaatccacaggtttcaggtgtgcccgcccgccactctcgtggggagccctgtgctccgcgcccctcccattggtagggcgcttggcgcgacacaaggcggtttgttggcaccttccctggagggggctattgttcccccctacagccccgaggtggtgtataggtgtttcttcccagacgcgacttctcgtgtgggcctggcaatagtctcgccgcggctgggtgtgctgggatcttctccccagggcgcgctttaattattagtgctgagccttgggggccaacaccctctgtggcgcgcacacacacccctcccttggggctcccccaaggagcttcatggttgcggtgccgcggctaaggtagtctcctccctcagagggcgtcccttgttgtgcggccacacgccgaacacaccttgtcgaaccatgtggttctcccgcctttggggccgcccccctctcaccacagtgttgttcgcagaacatttttctactccccccttcttgtgagtcatcctcagtgcccgccgctggaggcaactttattgcggcacccaggtgccactgggccccgcgcgctgggcgccgcggcctgtttttctcccagcgggtgtgttgtcctcatagtgtgttttttataccaccggagcgccctctcgaggacgccctccttttcctccatagaagtggagcccctagaaggctccctccccccacggtcctttttttctccgcggggccccccgcttcttcgccccccgcggtgttcccgttctcccgcccccactggaggccccctgctgcttgtacaaccaaaagagggaaaagaggtgttgggggccccagacgagggtggtgcccaaggggccccaaattttcaactgcaagttttttttttttttttttccctttttaaattaaacccggaagttttgtcccccccccca

SEQ ID NO: 503272 - DNA, 639 bp, Homo sapiens
ctcatccctccccccccccccccccccccggggggggggggggggggggggggggggcggggggcgcgccccccccctcctccctccccccccccccccacgaaggggggggggggcgccccacaacaaaaaaatatttaaagggccgccccccccccccccccccccccccccccggggggtggcggcgccccgcggggggggggttcccttttttttttttttttttttttttttttttttttggggggggggagattttttttttaaacccccccctccccccccccccaaaaaaaaaaatgggccccgccaccccaaaaaaaaaaaaaaaccccccccccaaaaaaaaaattttttttttttggggggaaaaaaaagttttgtttacaaaattttttttttaaaaaaaaaaggggggaagttttttttaccccggggagaaaaaaaatttttttttttcgcaaattaaaaagctttttttttaaaaaaaaaaccccccggtatttttaaaaaaacccccgaaaaaaaattcttgttttttccaaaaattgggcccccccttaaattaacccaaagtttgggggactttccacctaaaaaattggccaaacattccaaacatgccatctggtgccg

SEQ ID NO: 503273 - DNA, 775 bp, Homo sapiens
  misc_feature (9)..(9): n is a, c, g, or t
  misc_feature (22)..(22): n is a, c, g, or t
  misc_feature (25)..(25): n is a, c, g, or t
  misc_feature (219)..(221): n is a, c, g, or t
ccttaggtnaccaccaacacanaanactgacacccgccactcaagtggggccagggctggtgtctgcccatgtttcatcctgacgggctgcttgccacaatgagggatcttcttcaatacatagctagcttctttgactttttctctgctgggtttttgattgtggtcacctgaactgactgtaaaatggtgaatgatgatgtactatatggaggatgnnntattaaatcattctttaaatgaaaatcctacaactacacccaaaaaacaaagaaatcaattagagtcaccaacactctcacctccctccaattttccgtgctctctcttctttgttactatcgtctctctctactttataccaatttatattttctatttattcccatacctttctcatatcacactctacttatcctattctctaacatcttagttacttttgtccgtcgtacttcgtgaatcctatagtaaacctccttctaccccctccctggtaatttacattggttattacgaacaccagagtaacttctaaatacacctctcccgccccaccttaactagccacctcaccccttttttcccaccccatccttccccccacccccccgcccaccctcctcccccacccccgcatatccatccaccgcacctcccccccttcttctaactaccgtacttctccttccttgtcttcatcactgatttcccccccctccctactccaccctactatcccacccacctcccatcccgccccctcccgtctccg

SEQ ID NO: 503274 - DNA, 152 bp, Homo sapiens
gtattagatgggaccagagcacgagagggtctgtaggccatggcctgagtgagaatttactcaatacacagtggaagtctggggatgagtgagaagcacaagagtggcacacgtgatttctacacacagtcagtctagcttgctgggagcag

SEQ ID NO: 503275 - DNA, 690 bp, Homo sapiens
ttctgtagcaactgggacccttaaattgggtttaggcttaagtccgtttccataccgtcgtaaggctacatccgggcgtatgccttccgtcattgaccgccggtgaccaagtcctttagtgtataggccaccgtcaagctatatttatgtcgtcaagggcatccagttactatcaagggtcggcacgtcttactgcatgtggaagctagcactgtctcaacatgaccagcatcgttctgcgatatgctgctcctagcgctttatccggcgaacagtatcctcatcagcggcaagctagtacttaacaggaactaaggtgatttcgagcacgtgcagagcacttactaagcaagtctcgatagtctatcacggcacgctacgagtcgcagtagccttgtctgcgcaatagctgtgactggcattcctgcctgctccagcgatgcccagtgcacatctgtacgtggtaacagtgagtcgtctgaatttcatgtctatggtacttgactacatcatatataagagtcacgctgaaagtcgctccaataagtaccaagcatcaaagcatgaagtagaaatgtttttataacctaatcttctgatcggtactgattagaaactgcatatcagagtatgtccccagagacagtgccggtacttatagttaagactgattaattcgtcccagccttg

SEQ ID NO: 503276 - DNA, 181 bp, Homo sapiens
  misc_feature (42)..(42): n is a, c, g, or t
  misc_feature (80)..(80): n is a, c, g, or t
  misc_feature (94)..(94): n is a, c, g, or t
  misc_feature (164)..(164): n is a, c, g, or t
  misc_feature (172)..(172): n is a, c, g, or t
gcagggcctgatgttgatcagccagttacccatgatggtcgntgtggagttcgagctgcgcttgaagatccccgggcctnagggtgaggtgcangcggtagacctcacggccacctgcctgtggtgtcatgaggatataaacccccagcattacgattccgggncctccatnccatgtggg

SEQ ID NO: 503277 - DNA, 1008 bp, Homo sapiens
  misc_feature (829)..(829): n is a, c, g, or t
gcagcgcatgcactgtcctcctctcgctgtccggctgggttcccaggccacctctccaaggtgaagacatggaacgggcacagaagtggtgacacccacccaggaggatgatggcgagaagtcggattagcaggggggccgggacggggaggttgggaggggggacagaggggaagaacagaggcacggagagagaaaggaatgtgtagcacaatgacacacgtggacgctcgggattggctagtagctcgccatacgtatttatggtgagctcgacggtgggggccccagccgagattgcatgccaactctagctattcttccattaacccattcccggttccctcctgctcccctgtcagacgtggttacagtgtgatacctgccctgacatgtgatggcaacgctaaggcctgggagggtcaggatggggaagaccagggtccctacaggggaggcgaagtaaccctcgacgtaaggcgccacgctggacctcacggttcgcatttctccctcgttctatgagaaacattgtgttagaccagagcatgcttctgagctggaggccacattgaccgtcctcacccctgggtacgtgccatgcaacgtggagatgcttaggcctgctcccttatccgcgtgccctgggacacacccgacgtctccccccgagccccggtgtcccgaggctatgctgcccagctcgacctgccccattcatcaccgtctggctggtttccagaacatcttccacgtcacaaggtggtccgtctcccatcgaccaacgagtaggggtgggacgaggggacgaggctaggtgagctgtganggacccggttgaggtggggtgacccagggtttcccctgcctttccccggctaaggacgggcgtcctcaagtggcttgggggaattaatatccctttgcttttccagactactacctgtgcttaacaacgggttttaaaactaaaaccggcgttaccggcgggaaaggataatggcgttg

SEQ ID NO: 503278 - DNA, 135 bp, Homo sapiens
tacatctcatggtcaaatcctgtaagtgacttgcagaataccggtgcaatgtggaaaaccttccgacgatcgcagtgaagccaggctctcctacttgtaaatgtgcctggagtcagctgtacacagagggcgaca

SEQ ID NO: 503279 - DNA, 414 bp, Homo sapiens
ttcactgattggacatgtaacagacagtaaaccctcgtgtggacattcatacgagtccttattctggagaacaaggtgatgatgctgccttcgcacggtcagaataccgcggccgttaatctggtgtcactgggcaggcattgcctctaatactagtaatgctagaggtgactgtttatggtataacaggcggggtaagggtgagccgagttcactttacttcttttaattctttccttggtgcactcctgtgttgggttaacaatgtaattaataaacgtgttagtgttgttttggtttattggttgttaattatcagtatattattagttactgatgtaagcgtgtgcgaggagaaaggcttcttgttactcatattaacattattgcttctatgtttcaatagattagtcc

SEQ ID NO: 503280 - DNA, 795 bp, Homo sapiens
  misc_feature (4)..(4): n is a, c, g, or t
ctangtcctacacagtgttcaggtctccctttttaaccatgaggatcagcaatcatttgcttggtttcccttatgggttatgaagcctcttggatctggaaattggtgagtttcatcaaatttggtaaattttcagcctttttttttttcaaaatttttattgttctattttttctttgttttcttctgaaacttcggttacacatatgctagactacttattattatcctataggtgggggcaagtctgatatttatcttcagtcttttctctctttctttttcaaattaagtaaattcattaatctaatttcaagtacatttattccttatttgtcatttccaatctacttttaatgtcatacaattaatttgatattttagctatgatattttccactgtggaatttctatttgattctttttttggaggttcaaccaatttctatggttgggatttttcattttttctctcatcatttacacataattcttaaagcttttagcctttttataacagatgatttaatggcatcctctgctaatttaacctctgggggatcttgggagcaatttatttggagacttttttttcctaaaataaggcacattttttattttccttactgcctagggttttttgggaagttatggggggtggtggggtttggttaatttttcttttgggaatctggccataatccaaagcttgaatttctaattttccttgaaaaagattttggggtgaaaaaaaataaactttgggttaaaccccaaaaaaaaagggctcgtggg

SEQ ID NO: 503281 - DNA, 857 bp, Homo sapiens
tatcctggctcagcttgaaacagaccctcgtaccaggggaggctcaggcctgtggattttaatgtcagggatggaaaaatctcaaaatgcttcctggatctaccagagaaactacaagatccattccaaaaacacctgaacagcaccgaggagtatctggcctttcctctgcggacctcggcgcagccacttcttcctccccgtgtctgtggtgtatgtgccaattatggtggggggggtcatgggcaatgtcctggtgtgcctggtgatcctgcagcaccaggctatgaagacgcccaccaatactacctcttcagcctggccggtctctgacctcctgggttcttgctcctttggaaggccccgtggaggtctaatgacatgtggcgcaactacccctttttgggtcgggcccgttggggctgtacattcaagagggccctttttgagaccgtgtgcttcgcctccatcctcagaatcacaccgtcaggtgagcgcctacgtggcaatcctacacccgttcgcgccaaattgaggagcacccgggtgccgggcctcaggaatctcggaattctctggggctactccgagcacttctccctgcaaaaccagcatcatgggcttcagttcactaattccaatggtccgtgtccgaggtgggcactttaggtaacagccatgtgttcaattcacatcggtccctctctaattacctctccagagtaaggcctatcctggccgatagaaaaatcttgcgaagtatatcagctgaaaatacagtgttgttatgaatggcgcaagactcttggaggacggaccgggttatagcatcttgcttctttctttttttttcctgc

SEQ ID NO: 503282 - DNA, 281 bp, Homo sapiens
aagcctgaccaatattgacaaaccctgtctctactaagaatacaaaattagctgggcatggtggtgcatgcctgtaatcccagctacttgggaggccgaggcaggagaattgcttgaaccctggaggcaaaggttgcagggaggtgagatagcgccattgcactccagcctgggcaacaagagcaaaactttggctcaaaaaagaaaaaaaaatgatggagctccgattgcgctaatttggaaagatttcctatgaaataagggggctttttaaaacacca

SEQ ID NO: 503283 - DNA, 1023 bp, Homo sapiens
attctagagggccgaggcgggccgacatgtttactttgtcttttaggttattatgtttttacccagacaactctagaacagtgcggaccaaactacttcattttctcaacagggcataccttgtgcatggctggcattatgatgagccatcattaattcgcctgttacaatatccactagctgtgcaacttagatgttcacatgtcattattaccagcattggtcctttaggtgaaatcagtcatcagaatacttgccctctttaaccacattctttcataacactgtataacattatgcagaactatttaacacatcaagaggagtgtactggcacgtgcctgataacccatttgcgagtatgcgacctcaggagatacataaagcaaactggtgtcagatctagcctaaactgcccttggcacgtcaccaacacacaacaaacagcgacacggagaaaacgcagaaggaacggacccgcgcagaatcgagcacacgcaacgactaactcagagaccgatccaacaccgcgcccactgcacagggggaacctccggacccacccgcggcacacccaaacagccacacacaccaccgaccgacacaataaaaccagtgaacaaagcgcgacacaccacaacacgactccgcaacacaccccaccgcagccacgcggacacgagccccgaacccgggcgcggcaaacccgaaaacgaccagccggctccagacggccccgacaccccaacaccgaagccccacacgcggcgacagctaccaccaccccaacagggcgacacgcaacacctcagccacgaccaatgggccagacgggacgaacaggacacgggaaccaagggtgaaaacccgcgacacgcgccggagcagcccccgacaagcgagcagagggagcacccaccgaagcgccagagaccaagacgcgccacaacacaacacacccgcacgcagtagcccgcaccacgagtagcaggaaacagacgcacaacgagccacgccgtcaca

SEQ ID NO: 503284 - DNA, 333 bp, Homo sapiens
ggctctgtcgttcctgatgaacacacttctcagcatgtgtctgggaacactagttttgtattttggggtttcttggtggttggtttgtttgtttttgttttgagatggagcctctctctgtcgcccagactggagagcagaggcgcgatatcggctcactgcaaccccgctcctgggttcaagcgattctcctgcctcagcctcccaagtagctgggattacaggcgtatgctaccacgcctggctaatttttgtatttttagtagagacagagtttcaccatgttggccaggatggtctcgatctcctgaacttgcaactccaacagcctct

SEQ ID NO: 503285 - DNA, 238 bp, Homo sapiens
  misc_feature (179)..(179): n is a, c, g, or t
  misc_feature (219)..(219): n is a, c, g, or t
  misc_feature (221)..(221): n is a, c, g, or t
tgcgtttcacgggtaaattccacgccggtactgacatcatgaccgatagaaccggtatagaacgtcgaggtcaggttggtctggttggtgagaattttattactcacatctttggtattcgccgtgcgtgaccaggtccagctattcacatcgctggtgggctgagtaatattcgacgncccgcccataatcgccgtcatcaggtaatcctgctttaangngcgaccaacgggtagta

SEQ ID NO: 503286 - DNA, 440 bp, Homo sapiens
tggctactagtcagttggctactagtccacggtggctactagtccacggtggctactagtccacggttggctaggcggtggtctcaaactcctgacctcagtgatctgcctgccttggcttcccaaaatgttgggatacaggcatgagccaccgtgcccagccttattttttttttcttttttcttgagacagggtctcactttgtcacccaggctgcagtgcagtggagtggtcgtggctgactgcagcctccacctccccggctcaagcgatcttcctgcctcagcctcccaagtagctgggactgcaggcacatgcaaccacacctggctaactttggtatttttttgtggagacagggtttcaccatgtggcccatgctggtcttgaactcctgaactcacgtgatccacatgcctaagcttcccaaaatgctggg

SEQ ID NO: 503287 - DNA, 90 bp, Homo sapiens
cataatttgttgacggaatatatattcttgggcatgcaaattacatgaactgctgataagattcgagaaactcccttctgtcgtcttctc

SEQ ID NO: 503288 - DNA, 140 bp, Homo sapiens
cttggttgccagaatcagctggccattcggtggactggagacaaggaccaacttatgtccttgatggccaaaaatgcacctactcttttcctctaactctggggagggcatcctggagtgcaagatggactccgcacaga

SEQ ID NO: 503289 - DNA, 257 bp, Homo sapiens
agaggatccccatgtgaatgatacattcagattgatttaggaacggcagattactgatttcatcaagttcgacactggtaacctgtgtatggtgactggaggtgctacctaggaagaattggtgtgatcaccaacatgagagaggcacccttggatcttttgacgtggttcaggtaaacagatgccaatgtgaacatgctttgccactctgactttccacacattttgtgttatttggcaatgggcaacacaaccag

SEQ ID NO: 503290 - DNA, 110 bp, Homo sapiens
tctcgctgctccctcttcatacaaaccatcttctcttgcaacacacaggcatatctctgtgttcatttctattgggagcctgtatggcagggtggagagagccacaattt

SEQ ID NO: 503291 - DNA, 158 bp, Homo sapiens
ggcagaagtgcagcacaaaagaaaaaaaaaaacacacaagcaaacccgtacagaaggggggcggggtggattcatttaaggggaacgaaacacccttacagtatcaacatgaaggtgcaaagaatctaatgaacatatggggggtactacaaaaatag

SEQ ID NO: 503292 - DNA, 199 bp, Homo sapiens
  misc_feature (21)..(21): n is a, c, g, or t
  misc_feature (59)..(59): n is a, c, g, or t
  misc_feature (118)..(118): n is a, c, g, or t
  misc_feature (125)..(125): n is a, c, g, or t
  misc_feature (182)..(182): n is a, c, g, or t
ccgggggacggcgacacggtntcggcgggccgcagagggggtcatgggtaaagattacnaccagacgttgggcctggcccgcggcgcgtcggacgaggagatcaagcgggcctaccgncgccagnctagcgctaccacccggacaagaacaaggagcccgtgcgccgaggagaagttcaagnagatcgctgaggcctac

SEQ ID NO: 503293 - DNA, 153 bp, Homo sapiens
cccccccccccccccccccccctttggcccgggttggggaaaaaaaaacccccccttgtttttaaaaaagtttttttaaaaaggggttggggttggggggggttgtttttttttttaaaaccaattaaaaaaaaaaaaaaatggtttttttta

SEQ ID NO: 503294 - DNA, 870 bp, Homo sapiens
  misc_feature (464)..(465): n is a, c, g, or t
  misc_feature (476)..(476): n is a, c, g, or t
  misc_feature (479)..(479): n is a, c, g, or t
  misc_feature (505)..(505): n is a, c, g, or t
  misc_feature (561)..(561): n is a, c, g, or t
  misc_feature (579)..(579): n is a, c, g, or t
  misc_feature (585)..(585): n is a, c, g, or t
  misc_feature (772)..(772): n is a, c, g, or t
  misc_feature (817)..(817): n is a, c, g, or t
  misc_feature (848)..(848): n is a, c, g, or t
  misc_feature (861)..(861): n is a, c, g, or t
  misc_feature (865)..(865): n is a, c, g, or t
ggagaggagagatggtataggtatgtaagtattgtttgtgtttttttgttgcatgtcttttcttattgttggttgttttgatgttttgttgtgtgtgatgggcgagacagagagcccatacgacgagacacacaacgatgggcccatgactcgaggccacagtgtccaaaccgctgtaacgtcgcccgtacattacgtcctaggtacagcccttggtgggaatttcgcccaggtcacttcacatttcaggactctcctctttggtctggctgaaattgaggatctcttgactctttagtcccccggaattacccgagccggcatggaggcctctgctctcacctcatcagccgtgacccctggtggcccaaatggtccgggtggcctctggctctcgcccgtagttttgcccctggcccaggattgctaccaattgtgaatggaggaattgtggctgtgccccnnggtgctccagngcncatgggcttcacttcggcgggaatcngcctctgtcctcccatagccagcccagatgatgtccccggcggcccattgcccaangggggtggaattgcctcngggcanaccttgtggctactctgcagtcactgggagccactggactctcccggattgacccagttctatcctgggctcccatgggtctgcccttgcggctgtccattgcgaggttttactagctccctgcccctctgccctgcagagaagagaaccctgcccggggagaaggcacccagccctcctgaccccncgaggagcccactatccccaatatacctggggtgaaatatacccnattttgcatctcccgaggaaaataagaaatnaagatgaattgtngccnactct

SEQ ID NO: 503295 - DNA, 483 bp, Homo sapiens
  misc_feature (127)..(127): n is a, c, g, or t
  misc_feature (186)..(186): n is a, c, g, or t
  misc_feature (193)..(193): n is a, c, g, or t
  misc_feature (234)..(234): n is a, c, g, or t
  misc_feature (304)..(304): n is a, c, g, or t
  misc_feature (355)..(355): n is a, c, g, or t
  misc_feature (384)..(384): n is a, c, g, or t
  misc_feature (388)..(388): n is a, c, g, or t
  misc_feature (411)..(411): n is a, c, g, or t
  misc_feature (436)..(436): n is a, c, g, or t
  misc_feature (467)..(467): n is a, c, g, or t
cattcacctgtgatgcataagactagattattttcggcatatctactgtttgcaaagtgttactactgaaaaatatccctgaaactgagctctttgggtggataagcaaaggaaaaatagaaaatanttaaggtaagggaaaggctaaaggataagcctgtgtataaatgggaaatggataagctnaaatgcnttatctggtttcaatggaacacccaagaattaacaaacttngtgctagaagacttgaaaataagtgtaatttaccccatctattgagcagctattatgagccaggcactgngctagggctggggatcataagtgaataatgccaggtccagaacttagaatnattgggtttggtttacccaatccaatgcngtanctgcattctctttttccaactgngaaggctatcaaacatgtctttcanaaagtgtttgcagttaataagaatcccccanggtgaaaggaaagttt

SEQ ID NO: 503296 - DNA, 496 bp, Homo sapiens
  misc_feature (90)..(91): n is a, c, g, or t
  misc_feature (102)..(102): n is a, c, g, or t
  misc_feature (105)..(105): n is a, c, g, or t
  misc_feature (131)..(131): n is a, c, g, or t
  misc_feature (187)..(187): n is a, c, g, or t
  misc_feature (205)..(205): n is a, c, g, or t
  misc_feature (211)..(211): n is a, c, g, or t
  misc_feature (398)..(398): n is a, c, g, or t
  misc_feature (443)..(443): n is a, c, g, or t
  misc_feature (474)..(474): n is a, c, g, or t
  misc_feature (487)..(487): n is a, c, g, or t
  misc_feature (491)..(491): n is a, c, g, or t
caccatttccggaactctccttctttgggcccaggattgctcaccacgttgtgattggaggagattgtggccctggccggctgtgccccnnggtgctccagngcncatgggcttcacttcggcgggaatcngcctctgtcctcccatagccagcccagatgatgtccccggcggcccattgcccaangggggtggaattgcctcngggcanaccttgtggctactctgcagtcactgggagccactggactctcccggattgacccagttctatcctgggctcccatgggtctgcccttgcggctgtccattgcgaggttttactagctccctgcccctctgccctgcagagaagagaaccctgcccggggagaaggcacccagccctcctgaccccncgaggagcccactatccccaatatacctggggtgaaatatacccnattttgcatctcccgaggaaaataagaaatnaagatgaattgtngccnactct

SEQ ID NO: 503297 - DNA, 700 bp, Homo sapiens
gagggggcctcagggtccgcccccagttatggactaaacggctactggggacggcctctccaagcggtgggccgggggggggctgggattggtgattggggagcctgtggggcctgtgcgaggcctcccggtgggggatagctgcggtgtggggctaccggggtgggtcctcgtggaggcctgtgggaagcaagactatcggggactttcatgccgttagattaatgaccatcacacgatgcgagtagcctggtgaagaggcccagtgccgaagaaacaccgccactaaaagggtgccaaccgagattgtaggccgtgacatcctcgtttactggtcctgctgtgatcaatcacacggacgaaacaaatggcacttcagctacttcaggagcctccacagagtacagcagggatgtccggtgggacccaatctatgcttgtatgacgcttggactaatcatgcttcatggtgagcagagggtgatggcttggtgaccgagcaaaggggggccggtgtcagtgctcgtcgtccgctgtgcaggcgcatgcagcccatatggtgcctggatgagctacctgtgtcagaaatccggtcttaacatgttgtgcatattctcaggattgacacaattgtcaccgaatgccttatggatattaccggatcgtggactgggcgattgtatgagtcacagccctgtag

SEQ ID NO: 503298 - DNA, 879 bp, Homo sapiens
gagggcggaagcgctatccgagcaggatgcggttcggggttgccttggtcctcctgaatcgatcgcagcggggggatgccgtgaccgcatcttaggccaccgaataggcgtcagagcaagaagaatgcatggagtacggccttctggcatggaaatcgtctccacccaacccagcttgatgccagaggtgtggaggactctatcaagtcgcatccggagccgtagactcctagatagatatgcctctagctaagtcggagtgcggatggaagcagacaccacagatatggacagccccagcatgttgggtgcggagggtagacgacccatatatagagatcaagctcctaatgagttccggtgcggtgggtaacgaaccccatagataggcaagcaactaagactaagtactggagttcaggaggcgctgaaccagataggagacagcatctacgtacatgtgctgccatcctggagtctgcaggagctccaaaattgacagcgcatggacgaaaatcagggtggggaaggatgtcatgtaccccaagtagagaaatagatgcataaacagaggtctgagtgatgctgcgaatggagataatgatggcacgggataaaggacatgctcctagcatatcccggtatcggaagcatcacgaccaactaataaggattgtctcttaaataaagttcgagtgtcgcggaccgagatgaacccagaatatgaacggttcccaaagcaatgttcgaggtccgcggaagggattcatgcactcccctagtatgaccgtccataaacgacagtcaggagtcgcgggaaaacagcaagatctccaacaaaatgagcgggctcttaattgaggtccggtgcagatggag

SEQ ID NO: 503299 - DNA, 1379 bp, Homo sapiens
attaaatgtgacaaacacggtcaagaagcttaggggacaggttttagtggttgctagtgtaataaagcatgtccttcgtatgtcacacgtttgagggctacagagtaatctctttgcagatgactaggctagtaggcgctctgggccagcagtcccttcatgatatattctagtacaatcctaactatccagttgcagtattgatctagtgatatacgtaggaaacacttgggacatgctggtcatggcttaaaagagactcattatgtaatacccacgtgcatcccgcgcttctcttgtatgcctacccttgtcactatgcatgtgagatctagtttctccggaaggaaggcaaagacacaccctgacaagggtcaaaactactcgtctgtaccctttggactcccatctctaaaacatggagttatttcttagtagcagaatacagcattgtaggccttggcatatcctcaagtcgctatagattcctcgaggcatcatgtaatatcttttgatcattccattgatgcctactattaattttaggtgtttgactgtcaaaatttatggtgtgtttcaaggattgacatatggtatttcatattatacaagaatgcgctaaagatgattattacatgatatgtttgagattttcgatgttatatctaataagtccatctggtgagaagtatttgtcgctctttataaacgaaatgtattttggtaatctgcgtgaacatctctaaaatactcataatagcagatatattcacttgacctggactaccgtgggatccccttgagttgtattaacaggcccttgcattcttttcgagacagtgcttgcgagggaagccaatttcttgccagatccagagagatcctagggaggatggatacaggttgctaattccaaggcaaccttttattggttgaaccttttcaataaccttccgcggggcggggagacactgcagcgcgcgattgggcggctcatgaagagacatccaaaacataggcctcagcatagaaacaaagactctgagaaaggaatcctcatccgacaggttgaatcccctccctgagggcgcgcttaaacttaccaacctgctctcacaaaaccccctttatgtcatcagtgtgtgtcaacttatcaaaaggacacgggggacccatcggtggttgacccccatgtttgggtcgcctttaaccccatggtcaccactactagtgggtgtccccaagacatgtatgcagaaaccaaaactccggcggagtataacaaacaccaccaacgaatgaatcacgcgcagagaaaggtccatacacaaatataagaacttttggatgataaaagacccaccatatcaaacacctta

SEQ ID NO: 503300 - DNA, 151 bp, Homo sapiens
gatcccccttcatgtagcggagcagcacccgccggcgaagttaatattcttcagccaatatgaacaggtatcaataattgccgagtcgtaccgcatcggagtaaaggggtacgttacaaaagaccagtcaatgaatatgctcgcttactga

SEQ ID NO: 503301 - DNA, 912 bp, Homo sapiens
  misc_feature (488)..(488): n is a, c, g, or t
  misc_feature (613)..(613): n is a, c, g, or t
  misc_feature (615)..(615): n is a, c, g, or t
  misc_feature (621)..(621): n is a, c, g, or t
  misc_feature (804)..(804): n is a, c, g, or t
  misc_feature (806)..(806): n is a, c, g, or t
  misc_feature (813)..(813): n is a, c, g, or t
  misc_feature (824)..(824): n is a, c, g, or t
  misc_feature (858)..(858): n is a, c, g, or t
  misc_feature (893)..(893): n is a, c, g, or t
agtgcgctgcctcagtcctactgagctccccagatggctcagtctgtcatcaatgcccgacaatcagaacaactaccactgaccattgccgatattgtcctccgcattctatgatgcctgtgatacattaagtgccccgtgatgtgaccttcgaccctgagctcgtggtccctgtggtagctgcaggagctgtagtctaccgagttcctggcattgtcttcattctccaatcccagcacatccagagattctcgagatgaaccctgaccctgcgatggagcttcagaaaatgttacctcatggcggaatagtagtactagtccagactagtggccaggaccccagtggtctattcatccctggtaaccctggagggcagtcatggatggagaggagcaggcccctccagtctctactgtcctgtatgagaaaggccggaatcactacacatgaagagcatctccgtggcctacatcagtgtctatggnacactctgagctgtgccactgccacaggggtattctgccttcaggactctgccttcaggaacacgggtctgtagagggtctgctggagacgcctgaaagacagttccatcttcctttagactccngncttggnaaaatcaccttccctttaccaggaaatcacttcctttaggactgaaagctaggcgtcctctcccacaaaaaagtctgccctcatctgagaatactgtctttccatatggctaagtgtggccccaccaccctctctgcctccgggacattgattgggtccctgttcttggggcaagtctaattnanctgtttnaaaattgaatnccatgttaaactccagggaaactgggaaaggctnacctcctcctttggtgtttgcggttaaaataaccnacaggctggtgaaatcccc

SEQ ID NO: 503302 - DNA, 1657 bp, Homo sapiens
tggggctgaccgggaagtcggggtctccattcgccttctgtcttatctgcgtcctactaggcaggttcgtgcaggggaaactcagatggagaggaagatatatatccccttaaataaaacagctaccctgctgttctgacctgatcaacgccactccatccagcatcggctagcccagtctatccaattcagtggcagcacaccaggggtttcatcccacagtcagtcagcagcacacagcaggaggcaccatcaccagtgcggtcatcgactagcatgagcaccaaaccccacttcacatcggttctagctggcagcagcaagcattttcaacagggattttaataggcagaagctagaaagggcagacaactagccgaatcagctaggtcttgcagtagtcctatgaccgaagccccagtcctcgcctcaggcttactctacctaagtagtcacagtgcccaaatgatgggtaaaggtagtatgacatccaaatacctatgggaccagcagatagctcaccgcagagaaatacagcggaatccgcagggcaacggataaggctcatgacagactcacagtaaccccatcataactacatgaagatgcaaccgcaaccaaccgtcacccagcagggcaaacaagatcacaaccctggcgaccagcacgggcatcaaaaacaacatcgccataagtgccacggccgaacactggcccacaagcctgccggcacagcacgtggcagccggcaggggcgcacaaccaccacagcaccacagccacaccgcacccggtggaccccgccagtccaagaggcagacccaccaacacacgggcacacacccgacagcggagccgccaccagcaaaatcaccaacgaaaagacaggcaaacagagcaatccagacaaaagaacaatacaccccaaatccaaaacaaatacccaaaccaggaatcgaccactgtgccttatcagaaaacaaccgaaaacgaaagagtaacacacagcacacagaaaacagcgaacgaagcaaaaaacgaacaaaggaagacaaaacaaagaacgcaacagaagaggcagacgcgccggggaaacgacagaaagacgcagacaggagagaaacagacggcaaaaacacaaagagcaaaacgacaacaggaacacagagagagaagacaagaccagcaacaagcacaaacgagaaacagaagaagagaaagacaaacaaacgaacaccgaaaaggagaccacaagacaaatgcgaagagcacgaagaggacgacacgagcagacgagagaccagcacagaaaagaacgacaaagacaaaaagagaacgacaaccaagccaagaacgagcgaacaaaacacagacagacacagaagaccgaagcaggagaacgaagaaagagggcaaggagaacccagcagagaaggccaggacaggaacaacgcagcgacgagcacgcaacgacaggaaggacgaaacgagcagaaagcagcagaaacgagaggccacgagaacggacgagcggagcaacaagaaggcgaacaggagagaaggccgcaaaacagagcagagaaggcaaaagaaagagaaggcgcaaggacaacggcagcagagaggagagagagcaactcacggcgaagcagcagaa

SEQ ID NO: 503303 - DNA, 135 bp, Homo sapiens
gtgatctactgccatcatacggtgttacataagctagtgcctggcacaatcttagtggtttcgccatatagagcgtggatccttgtctatgtagtctctaagtagtactctaatgagctgctagtctgatattac

SEQ ID NO: 503304 - DNA, 527 bp, Homo sapiens
  misc_feature (9)..(9): n is a, c, g, or t
  misc_feature (21)..(21): n is a, c, g, or t
  misc_feature (47)..(47): n is a, c, g, or t
  misc_feature (52)..(52): n is a, c, g, or t
  misc_feature (87)..(87): n is a, c, g, or t
  misc_feature (102)..(102): n is a, c, g, or t
  misc_feature (105)..(105): n is a, c, g, or t
ccccacgcnccccagatcacncccacataaaaagtgagggccacctnccccnaactgaatgacccccctaagggccccatccaaaantgtgtactgtgatanggncctttgctagttgtctttttttctcaaatcaatttcgaagaaagcgtttttgccctgaaagcggctgcagctcagtggaagctggaactgaaataaagttaggaacttgcattccttgctcagagttctctctttactttctctagatagaatacaaagtgggtggtaaatttgaatattttatatgcactggggtctgtgctaaggtataattttagttacttctcatagcctttttattgaactttatcatttcataatatagatgatgaaattaagtaatttaggccaggtgcattggttcatgcctgtcatcccagcacttttgagaggccgaggcaggaggattacttgaggccatgagtttgtggctagcctaggcaacaaagcaagacctggtctcaatacttaaaaaacaaaaa

SEQ ID NO: 503305 - DNA, 157 bp, Homo sapiens
  misc_feature (149)..(149): n is a, c, g, or t
actaagggatgaaagcggcacagtgactcatgcctgtaatcccagctggaggcaagatctatagttatgttttgctgttttagttggaagtacttccaggccaggcttagtggttcacatctgtaatcccagcactttggaggccaacngtgggcgg

SEQ ID NO: 503306 - DNA, 940 bp, Homo sapiens
taatttattaatttatttattttggaaatggagtctgtgctctgtggcccaggctggattgcgtggcgcgatcttggctctcgtgctccccgcaaaaaaaaaaaaatatctccaacaaagcaaagcaattatagcctttgtgttggagttgaattagtatagcaaaggggtggtggattggacgtggcccacattttccctgggcctcttaaaagaatgaatttccctaaataatttaagggactagagtaatttgggggtgctgtgataaggaaaggtcaagtttaaggtgttcctaaataaggtgttttccccttcttgttcccctcaactttggggtctcctatacggcaaatatgtcctcagggaagtttatagcgcgggaatccatcctttgtgaacccaccttcggtgaggaaagacttgaaattgttcacactcctggggtttccccttatcctgtaaaaattttcctccctcctacattgggggtccctccaacattttgcaaaaattgatggttttgaaagcccctccgtttggcagggtccaggggggccccgtgagcccgagataattgcccccattttgcccccccagccgtgggttgacaaagaagcccctttctcaaaatttcacacatttaacattttggccggggtatttgtgggctcaaccgccttgttatccccaggccctttggagaagctcgaagcggaacggctaaaaggctcgggtttcgaaccggctgtcccatgtgttaacccccggtctttactatagaatctacaattgcggctgtgtggggctgcgccgtaaacccccatatttgtggctggcacgaagatgtctctaacccgcgggacagtgtttatacccgatcctcgtcccccgttgccaagtactctcaatctatacgttacaaacctgcgtctactag

SEQ ID NO: 503307 - DNA, 257 bp, Homo sapiens
caggtctgacactgggctcatcagggattggcggagagggagtataatgccccagcgttggtaagggagggcccagaccgaagaagggtttggtggatagcagaacctttccgtctccctctgattgctccttagcctcacgctcccttgccccgcgtgttctgttgcttccctgatcttctccgtgacctgtacctcaatcttccaccagcgcttgagaacttcctttgaaccggatccctccccaggcttcagag

SEQ ID NO: 503308 - DNA, 354 bp, Homo sapiens
agaaggctagataacataaatgttcttattaatccaaagatagatcatatatgaaacccttacctcaatactcctttcaaatcagatgcatataaactatgatcccacttccccgtgtaagacgtatttctgtgggatatttcctccgtagtaaccacagaggaagggaaaaagcagaaaagctgcccacctaaacaaaggctaacataagggctaggcaaatatatggacatgctatcatcttaatgatgtatagaatctaactaagcagacatacagtcaacttcctgttgaccatgtgcatctaaatcggcatttcttaattatacaaatcatttttaggcaatcaagctg

SEQ ID NO: 503309 - DNA, 416 bp, Homo sapiens
tagcgcttcaaaaagttcagaagagactagatcccttcggccaaatcacatattatctctctactcacaaggatacaatagtacaaagggtgtaaaacggctaattgggtattaaagggtgaccccaagataatctccaaagcataacactcctcataagggatagctcgctcaccagacaacctagggtggagaaagagtgaccgcgtaaaacatggcagataaaaaggggcaccttcaaaggtctccttcaaaaagtcaggtgccacgctagagcgtcttttttttttttttttttttttttttttttttgtggctccccaagggagagccccccccctaacaccaccgcggaaataccgcgcgcgacgaggggagtagataacaccccacacgcccccaaagtcataacaaac

SEQ ID NO: 503310 - DNA, 276 bp, Homo sapiens
gggggggtttttttttttgccccgggggggttccgggccctggggccaaaagggcccccccccccccctttccaaggggccgggccaggtgggggtttttcccccccccccctgcccccccaaggggtttttccccttttaagaaatggcctttttaaattgggtttgttgggggggcggtttttttaaccgggaaatgggaattcccccccaaaggtttttttttcccggtccccccaccttttttcccccaaaagggggggtttggggggccca

SEQ ID NO: 503311 - DNA, 975 bp, Homo sapiens
  misc_feature (520)..(520): n is a, c, g, or t
  misc_feature (545)..(545): n is a, c, g, or t
  misc_feature (585)..(585): n is a, c, g, or t
  misc_feature (637)..(637): n is a, c, g, or t
ttttagcaaagaccttataaagaagtgtactatatttaagtagctaaaaaggcaagaagaaaatgccaaggtgtcttggaggtagcaactgctaagcagctgccaccccaggactgggggagctagaatagagtctccccatgtttgacgtttgtctgctaatagcattcaagctctccccctcagtttgcctggatctggacaagctgataagaaagcccagccacttcctctttgcgtcagaggggaagttcaaactgtgcaaaccctgactgtcaaatgcactgagctctcataaccacaacaaaaaccagagccacttgttcgtcctttcactgaagcccaacagactggcgtgggtgcccgctttgctttccctagaaggcctcatgtgagtagtaaactttttcataacctctggtgtctgcagtgtcatcagtttcaacatccgaaccagttttgagtgatggtagtttattgatcccacctcatgtggagcaaagtgcaaagcaggaacaangagacgtggctagaattgttgaaangtgggagattggaagagggaccttgtggagctgaactcanacctatggtggaggagtggactgctgggctgacatagtgtctgtgctcaggnaggggccctgtggcctttggatctgtgcttctgtggagaggtcccagctactaatgctggggcagggagcagaagggagggtcacaatgagactttgagtgttagttaaccaccttttgcctgaagaacatgtaatggccttccctgaggtatatgtcttccaaaagtccgctgacgttgctcatgacctatggtcaccactgctttttgcgtatggcttattatattttttttggaaacgggttctcaccttgtaacccaggttgacttgcatgggcgcaatctcggctcagtgcaacctccatttcccaaggctcaagcaattctccagcctcggc

SEQ ID NO: 503312 - DNA, 338 bp, Homo sapiens
gaataattgcaaaaactggccagttttttggttaactaagaagaggggcattttaaaacgcccatggcttggtagaaaccctagggaactaggcttaacgtagaaaggagatttgggaagctccaggtcccttggacacctggcagtgagcatcagaaagaaaagtaagagttcttaagaaaaacccaatctactttgcatttgccctgtggctgcctgccagtgctgctatcagaattcagattctggccctgccttgctctagggcctgcagtttggctcttgcctcttcatttcagtccctttacctgccatccattctagatccccggagtgct

SEQ ID NO: 503313 - DNA, 106 bp, Homo sapiens
gcggccgcctactactactactactgctcgaattcaagcttctaacgatgtacggggacatgttaaatcccattcataactttcattaaagcatttacttcaaaaa

SEQ ID NO: 503314 - DNA, 273 bp, Homo sapiens
tgaggatcgctgacgtaatatgtaacgataagactcccaaactatatcatggagactctcccacagtaatacacgctcgttgtggtcagatatcaggctcctcagactccatgtaggctgtgcccgtggatgtgtctgtggtcaaggtgactctgtccttggaatttctgtgcatactctgtgtgaccattgtaagggctgatccatcccatccactcaagcccttgtccaggggactgtcgcacccaactgataccatacgtggtaaaggtg

SEQ ID NO: 503315 - DNA, 164 bp, Homo sapiens
actcgctccagatattataacacatatccaactgctgcaaaatgcatctacaatatgctattacagatccacttttaaaaagttacctgtgacattaacagcaagcctcttttattacaaacagaggaataatcccaaaattacttacctcaaataaactccat

SEQ ID NO: 503316 - DNA, 845 bp, Homo sapiens
  misc_feature (324)..(324): n is a, c, g, or t
atcgtggccacacttgaacaggttgtatatgcattctacagtgcgatgcgtggaagagccgagaattccaaccgcaggcaattgccatagaactatatagatcagaaatttgtattacaggcttctggagctatttgacagcgaagaccctcgcggaacgggacttacttgaaatagacagtctttacacagaatgtggtggcaagtctgtctctggtccttaggagctagtttgactccgagaatacagatgtaacatgtgattgtttctaagggtttgtgtattgcaaacagagacactctccaatggtgtagctgaactgnctgggaaatattagtggaagtattcatcaagtggcctctcgcgtgtataccctctgtaaggcaagaacaaccaagatcgagtcttctgggtgaaacgtagttggatccctgttacagcactgtactaggaggcgttaatcgactcttgccatgcgaccagctggcgatattgtactacgtacagctttctggcacgaaagatccgttcactcacagaaccagtctatgagggggttcatgcaacttttggcggttaaacatgtagtctaacaagaggtccatgtcccttggggaacgtggaatgaaatacttggagtgtgattgaaccttcaccgatttgttaagaatccaagaacctttgtttaaacaaaatcggcaagtgtgtatctaggccccatttcaggtggcagcaaaggcctctattattgggatcactgaatcctcatggggttgataccaagaaaaccttacgggtgtcccttccctcattgttccagcgctttagggttccacggacttgg

SEQ ID NO: 503317 - DNA, 387 bp, Homo sapiens
ccgtagtgtcataccaaatccacagaatctgactcagtgagttcatgaaaggttattgaatcaataagcagtaacatgatagtggactgcttcagacctggtgatattgttcatgacttcccaaattagaggtacctaagaaccaactgagaggcatttggcacatatacaggcacgttgttaaaacgtgtatgtctgttgcaaaccagaggggttttcaattaataaattaaaacagcacaattgtttcatcaatgagagaagctattgtttgagatctttccccaggtgtctttatctaccttgatgatggatagcttgtgctgtaggtgagattcttctagaacaaggcaaattttcttgcctgagactagaaaacattctctt

SEQ ID NO: 503318 - DNA, 856 bp, Homo sapiens
  misc_feature (22)..(22): n is a, c, g, or t
  misc_feature (62)..(62): n is a, c, g, or t
  misc_feature (71)..(72): n is a, c, g, or t
  misc_feature (115)..(115): n is a, c, g, or t
  misc_feature (153)..(153): n is a, c, g, or t
  misc_feature (167)..(167): n is a, c, g, or t
  misc_feature (182)..(182): n is a, c, g, or t
  misc_feature (232)..(232): n is a, c, g, or t
  misc_feature (245)..(246): n is a, c, g, or t
  misc_feature (253)..(253): n is a, c, g, or t
  misc_feature (257)..(257): n is a, c, g, or t
  misc_feature (265)..(265): n is a, c, g, or t
  misc_feature (292)..(292): n is a, c, g, or t
  misc_feature (343)..(343): n is a, c, g, or t
  misc_feature (364)..(364): n is a, c, g, or t
  misc_feature (366)..(366): n is a, c, g, or t
  misc_feature (372)..(372): n is a, c, g, or t
  misc_feature (417)..(418): n is a, c, g, or t
  misc_feature (421)..(421): n is a, c, g, or t
  misc_feature (430)..(430): n is a, c, g, or t
  misc_feature (439)..(439): n is a, c, g, or t
  misc_feature (474)..(474): n is a, c, g, or t
  misc_feature (494)..(494): n is a, c, g, or t
  misc_feature (540)..(541): n is a, c, g, or t
  misc_feature (577)..(577): n is a, c, g, or t
  misc_feature (668)..(668): n is a, c, g, or t
  misc_feature (821)..(821): n is a, c, g, or t
ggcgtggggggggcgcatgggntggccacccccagcagggtagttgagggagggcctggggnggcagcggnnacaggttaggcgtcgagaataggtcaagtgcgtaccgtggagngatcagtctgagggggaggctcccggctgggtacagtnaccaagaactgtgncacagtagatggggnagggggagggctttcgctgtcacgaaagattaaataacccccaaaatgcntttgaacaacatnntacacantaangaatttanaccttgctcctctgtcccactgggtanaccctggcccatcccccatccctggtcccatcccaggggcccagcctccgntgacgtcctcagagacacggngntagtgntggggggctgctgtgtgcctgccacccccaggagagggtgctggnnagnataccatantgaggttgnatctggtgccaccaggttgaactgaggcccagggncccagagagatgacagatanctggtgacagacagcccagggcggctggctgacagagtgagggggnncatgggcaggacctgcccggccccccaatgccacantgcgcatagctgcagaagtccttaacatttccctacgtgaatcggattgttctgagggctgaggccacacccggagaacaaactggatganatatattaaaacccgcagtatagttttcttccctaccccgctgcgggggagggtgctgcccacagcacaaaaacgtctttccatctgggctcgagaggacagcgtggcttctctcaaatgcacccgagaaataaaaaccattaaatacagatnatggcacgaggccgcctctccatccctccaagcta

SEQ ID NO: 503319 - DNA, 250 bp, Homo sapiens
ggtcgacccaagggcgatgagctggccagagatcagggttacgtactggaagctggagtagaagccacgacgttccttggtcgccatctcgctgaggtaagtggcggaggtgccgtattcgcccccgaccgacagcccctgcagtaggcgggcgaataccagcaggatcggcgcaccgataccaatggcttcataacccgggctcagggcaatcagcagcgagccgaagcagtcgacgcggcgtcgacgc

SEQ ID NO: 503320 - DNA, 1149 bp, Homo sapiens
  misc_feature (11)..(11): n is a, c, g, or t
  misc_feature (14)..(14): n is a, c, g, or t
ccgtaggctangtncgaggcctggcttctgataatcatggcgcccctcggaacaactgtattgctgtggagcctcttgaggagttctccgggcgtggaacgggtctgtttccgggctcgaatccagccctggcacggtggcctgctccaaccgctaccttgctctttcgagatggggctgccacgccgccggttcagctccgaggccgcagaatctggtagcccagagaccaagaaacctacatttatggatgaggaagttcaaagcatactcacgaaaatgacaggcttgaacttgcagaagacttttaagccagctatacaagaactgaagccaccaacctataagctaatgactcaggcacagttggaagaggctacaagacaggcagttgaggcagctaaagtacgattaaaaatgccaccagttctggaagagcgagtaccaataaatgatgtgttagctgaagataagattttggaaggaacagaaacaaccaaatatgtgtttactgatatatcatatagcataccacaccgggagcgttttattgtcgtcagagaaccaagtggcacactacgcaaagcctcttgggaagaacgggaccgaatgatacaagtttatttcccaaaagaaggtcgtaaaattttgacaccaataattttcaaggaagaaaatcttaggactatgtatagccaggacaggcatgttgatgtcctcaatctctgctttgcccagtttgagccagattccacagagtatatcaaggttcatcacaagacctatgaagatatagataaacgtggaaaatatgaccttttacgttcaacaagatactttggtggaatggtgtggtattttgtaaataataaaaagattgatggtttgctgattgaccagattcagagagatttaatcgatgatgcaaccaacttggtccagctgtatcacgtgctccatccagatggccagtcggctcaaggggccaaggatcaggctgctgagggaataaatttaatcaaggtctttgcaaaaacagaagcacagaagggagcctatatagaactaacactgcagacttatcaagaagcactcagtcgccattctgcagcttcctaaaaatattttaaaaatacatttattttacta

SEQ ID NO: 503321 - DNA, 1435 bp, Homo sapiens
tggaaaaagtcagggaggccagggggtgggcttgaaaccagcttgggggggttcgatcccttcctttttggtctaaattttaagtgttatatacgggtttcctctcgaatgtggtggtggtaggggtggggggcatctccattattagtctcccctccgaggtgtttagtgggagggttctctctactattataggacttttctcgcttctcgaaagcgaaaggctctcctcaaatctcagtaaaaattatatttaatatattatagcgtggcgtgtgtatagaagaaagagtagaagtgagccccataacgagaagtgaaatagggagtggttcacagtggtggggtggcttgtggcattgcgggggatagctccccggaagataccacgtgctcggagcgcgcattctcccggagaaatagagccgcgacgaaagaacagtgtgtgtgtgtgtgcgcggaacagaaactgtgtttaagattttatacccgccccagaaatgagaaattatttagatatacaggtgagacacacttgggggactctcgcgggggggggtgtaagagtggtgtggagtgctctatagagggggtgtgtgacgcccttgagaagaaaaacatagggggggggacaaaactccagtgagagacacttatgaccacgcccccttcccatattggggagtggggcgcacaacattaacaaggggcctcccattatgttgtggatgtgacggggcacccataatacgtcgtgcggaacagtgtgcacgcccttacacacgacgccgtatagcaatacgcgtggtgttcttgcggggggaaataagaaataacgccgagaagttggtttacaataagagtgaaacagtgcaacgatatgtgggggccttacaatttcccacaatggggccccaagggctccacgggggccccacccccataagcggggggtggaaaacacgagagaacacacgggatgtggaaaatctccaataaggggggccctccaaagaaggccacctgggcgcacgcccgaggaaacttcccactatctcccaatatatgtgggggcatcacccggggggcgccagacggctgtggcacggcgagcccaattccataaagatgctcgcggagggagctaggccggggagcacaaaacacgccacaggggctacattgtgcaccaattgtggggccccaagtgggggctccaaaataacgcctgggggtatcctcctttggataccccccaagcgactttcctcttgtgtgattcaccacaaacggcggggggggaaagacattcagcgggcgccgagagaccacaccccccaaataatagggggaggcaggcacccgaaatcaatcaacacatctcctgcggaaataaaagcgccccaggggatttaaccccgttgctatgaaagac

SEQ ID NO: 503322 - DNA, 1789 bp, Homo sapiens
  misc_feature (11)..(11): n is a, c, g, or t
  misc_feature (14)..(14): n is a, c, g, or t
  misc_feature (1739)..(1740): n is a, c, g, or t
  misc_feature (1754)..(1754): n is a, c, g, or t
  misc_feature (1756)..(1756): n is a, c, g, or t
  misc_feature (1760)..(1760): n is a, c, g, or t
  misc_feature (1763)..(1763): n is a, c, g, or t
  misc_feature (1772)..(1772): n is a, c, g, or t
  misc_feature (1779)..(1779): n is a, c, g, or t
  misc_feature (1785)..(1785): n is a, c, g, or t
ccgtaggctangtncgaggcctggcttctgataatcatggcgcccctcggaacaactgtattgctgtggagcctcttgaggagttctccgggcgtggaacgggtctgtttccgggctcgaatccagccctggcacggtggcctgctccaaccgctaccttgctctttcgagatggggctgccacgccgccggttcagctccgaggccgcagaatctggtagcccagagaccaagaaacctacatttatggatgaggaagttcaaagcatactcacgaaaatgacaggcttgaacttgcagaagacttttaagccagctatacaagaactgaagccaccaacctataagctaatgactcaggcacagttggaagaggctacaagacaggcagttgaggcagctaaagtacgattaaaaatgccaccagttctggaagagcgagtaccaataaatgatgtgttagctgaagataagattttggaaggaacagaaacaaccaaatatgtgtttactgatatatcatatagcataccacaccggtgttgatggaagtttcatctatgttatcttcagaacacatttagagactcctacacctctgaaaacttgagagtcagtactgtttggttaatttatacattaatcaggagcgttttattgtcgtcagagaaccaagtggcacactacgcaaagcctcttgggaagaacgggaccgaatgatacaagtttatttcccaaaagaaggtcgtaaaattttgacaccaataattttcaaggaagaaaatcttaggactatgtatagccaggacaggcatgttgatgtcctcaatctctgctttgcccagtttgagccagattccacagagtatatcaaggttcatcacaagacctatgaagatatagataaacgtggaaaatatgaccttttacgttcaacaagatactttggtggaatggtgtggtattttgtaaataataaaaagattgatggtttgctgattgaccagattcagagagatttaatcgatgatgcaaccaacttggtccagctgtatcacgtgctccatccagatggccagtcggctcaaggggccaaggatcaggctgctgagggaataaatttaatcaaggtctttgcaaaaacagaagcacagaagggagcctatatagaactaacactgcagacttatcaagaagcactcagtcgccattctgcagcttcctaaaaatattttaaaaatacatttattttactaaatactgactacatttctctgttaatattgagctaaatgttaaaaaatggctagattaaaagatatcaatttgtagttctccctacaaagcaaaaattattaccctactcacttttcgtaggctacaaggatatttgagtgcctggttatgaatttctcaaatcatgttagatgagcgtacggttaaaaagtctggtgtgtttttgtgttaccaaatagggcaaacgttaacttagacagacccccagcttaatgaggtcagaggaacagaggtttcacatcctgactccagaaatgggtagctgctagacaaaatcggggcaagacctgtggaatgatgcaatgaggtcaagaaaaagggtttagagaattacagcctggatattcagctctaagaaaaatgtgattgacaacattgaaaatgcagactgtagttatacacaacgaaaagacagtggggctgatccctaggcaggtgtagtnncggctcagcttctnanactngangcctatttncatattnagaaanggaa

SEQ ID NO: 503323 - DNA, 717 bp, Homo sapiens
  misc_feature (345)..(345): n is a, c, g, or t
gagaaagctggcttcctaagagttcacttatcgaacacaaactagcgagtccggcgttgagaagttacaagattggggctggaggctcgggcccggcaggctccggtggggcacacggtctggaggtctggcgggcctctggcttcccggccgggccgcgtccgcaggggatccgagcgctagagcccgcgcgccggcgccatccctcgacgctcgtcgtccaaggaagtccgaggtaatctcgtctgaggcctcccgcagctccacatcgtccagcaaccacggtaccccgccatgcccctgcttgccaaaagaactagcctccaccaaagtcgcgtggaggtnccccaggatgatcgaccccgggcgaaaacttccgaactcttcccagcctaccaaaggttacctcgaggaaagaggccgggggaacctttggggatgcatataagcattatgaactgtggctgagttctctgaggtcggactagcgactggtccaagtcaaaaagcttctcctttcttcgggttaccggtgcgcgccccgccgtggcgggaacacgtaccatccgtggattctctgtacttccccgttccctccggcgtcactcattgacgagcaaattgaccaatagggcctgagaggaggcttcacaggaaggctggtcattgagcagctggagggaacaaggctgcgagagggacaagccatggcgttcg

SEQ ID NO: 503324 - DNA, 135 bp, Homo sapiens
gcacgtgatcaccacacccattttaagccatttatatacccatatggtttggttaacatagtaactatatgccttccattaaagttatttaacatttcaaaaaattattttatgtcaaccaggtttccaagcaag

SEQ ID NO: 503325 - DNA, 2157 bp, Homo sapiens
gggagcacagagtggccagtatgtgggtgggcaggcctgtcatgacatcaggacaggtgctgaacttcagtgttctcatgtgatgctaactctgctgtgtggttttagactatgtatagccaggacaggcatgttgatgtcctcaatctctgctttgcccagtttgagccagattccacagagtatatcagggtgagtagattttagtttctaaaatataggcttaagtatggttatgagtaagatttttaatctagctcaatgaatttcgttgtaagttttgatacaggggaaagggaagagaaatacctgaaaatctattgagtacagttgtgtgccagatatatattttataatcacaacaacccttgattaaagatgagggaatttaagcttgtagagttaagtagcttgctgaaagttgcatagctactaagtggtagggttaggacccaagtttgatgacaaagcctattctcttttcagtttaccgtataggaatcaaattatttactaaaattttgctgaagtacagtgtgtttgtcttacagctcagtaagtattcattagtaccttctatgtgtaaggtattatcttgggtagtataggtgatgccacgaactaggatagagtatgctgtgccaaagccagcagtccggatatggctgtggggaaaggtgctagtaagtatacaaataattatctcctcaggcctaaaatgctagacactaagagaagattacaaattctttgaagaaagccttcataggggtgtaaaggagggttctagaagtgcaggaaatgttgtggcaggtggagctgggtgaggtgtttcaggtagagagaacagtataagcaacaggcaggaaaaaaggaggcttgagaaacggccagtgatctggtttgcttatatatgccatgcatatgtaggggagtgattaaagattaagttaggaaggtggatgtagccacatcataggtgacctcagatgctaggctgaggaatctggaattcagtcagcagacctttgaaagccttttgaacagaggaatgcccccatcagaaccttcatttaggaagatcaatctggaaggaggactgaaggacctttagttaataagatggaatgggctagctggtagaatagggtagttgatggggggagggataggggaaagggagagtagtgaaaaaatacttgatttcttttctgccatagtgaccaagaagtgggtgctacattatttccagtggtctctatatgcataatcggtgcttaataaattgtagttggcctgccaaaaagtacttaatatggctataaatgtttggtattttgcttcaggctgccacatacttctacagtggagaaggcacagacttgctgtcatttagacaaattcttctcttttaatttttttaaagacagggtcttattctgtggcctgccatgcccagctaattttttaaaaaattttcctagagatgaggactgctcaagcagtcctcccacctcagcttcccaaagtgttgggattataggcatgagccactgtgcctggccaaaattctttcttaatagaatcctccttcccacctaaggtgggttgtactaggaatggtttaaatcataccaattggttaatgatatggaggcaactgtaagtagacctggttttacttgcttgggcagcactcatgctaatcagtgtacgttgaataatgctgcatacttcttattttcatgtttctgaagagttgcattttatatcaaggttcatcacaagacctatgaagatatagataaacgtggaaaatatgaccttttacgttcaacaagatactttggtggaatggtgtggtattttgtaaataataaaaagattgatggtttgctgattgaccagattcagagagatttaatcgatgatgcaaccaacttggtccagctgtatcacgtgctccatccagatggccagtcggctcaaggggccaaggatcaggctgctgagggaataaatttaatcaaggtctttgcaaaaacagaagcacagaagggagcctatatagaactaacactgcagacttatcaagaagcactcagtcgccattctgcagcttcctaaaaatattttaaaaatacatttattttacta

SEQ ID NO: 503326 - DNA, 724 bp, Homo sapiens
  misc_feature (337)..(337): n is a, c, g, or t
  misc_feature (343)..(343): n is a, c, g, or t
  misc_feature (354)..(354): n is a, c, g, or t
  misc_feature (370)..(370): n is a, c, g, or t
  misc_feature (386)..(386): n is a, c, g, or t
  misc_feature (395)..(395): n is a, c, g, or t
  misc_feature (399)..(399): n is a, c, g, or t
  misc_feature (404)..(404): n is a, c, g, or t
  misc_feature (412)..(412): n is a, c, g, or t
  misc_feature (422)..(422): n is a, c, g, or t
  misc_feature (427)..(427): n is a, c, g, or t
  misc_feature (432)..(432): n is a, c, g, or t
  misc_feature (439)..(439): n is a, c, g, or t
  misc_feature (485)..(485): n is a, c, g, or t
  misc_feature (652)..(652): n is a, c, g, or t
  misc_feature (657)..(657): n is a, c, g, or t
  misc_feature (659)..(659): n is a, c, g, or t
atcccagcacttgggaggccgaggcgggtggatcacgaggtcaggagatcgagaccatcccggctaaaacggtgaaaccccgtctctactaaaaatacaaaaaattagccgggcgtagtggcgggcgcctgtagtcccagtcacttgggaggctgaggcaggagaatcgctagaacccaggaggtggaggttgctgtgagccgagatcgcaccattgcactccaggctgggcaacaagagcaaaactgcaaaaaaaataaaataaaataaaaaaagaaagtacatctcaaaaaaaagaaagaaagacaagaaaaagaaaaaaaaaagaaacaccttngtcttngtacagtcagngggctcccaggaaaangttccttctcttttgntggcatggncacngtggnatctggtncattccggtngacantctcntttattnggactgtaagtctgacctctatgaataattacttcagcccctgatngctcccgtgccaagctccttggccaaactttcaccttagcttctggtaagtcttgggccaagctaagcagcatctatcaatcatcccttcagctcctgattggtcctgggccaaaggcctgggccaagctgagccacacgtttttcaagacagcctgtgaactaggnacatntncttccttcccagtccttaaaaaccctggacccagcctccgtagagggcaccacttttcagacacc

SEQ ID NO: 503327 - DNA, 111 bp, Homo sapiens
ctgtgaaaagttccgacattgtggtcttgccaaccaaattaatcaatgtcgcgccaggtgcagtctctataattttttcggcaagagcggcctccccttgcgagccgatca

SEQ ID NO: 503328 - DNA, 814 bp, Homo sapiens
  misc_feature (11)..(11): n is a, c, g, or t
  misc_feature (14)..(14): n is a, c, g, or t
ccgtaggctangtncgaggcctggcttctgataatcatggcgcccctcggaacaactgtattgctgtggagcctcttgaggagttctccgggcgtggaacgggtctgtttccgggctcgaatccagccctggcacggtggcctgctccaaccgctaccttgctctttcgagatggggctgccacgccgccggttcagctccgaggccgcagaatctggtagcccagagaccaagaaacctacatttatggatgaggaagttcaaagcatactcacgaaaatgacaggcttgaacttgcagaagacttttaagccagctatacaagaactgaagccaccaacctataagctaatgactcaggcacagttggaagaggctacaagacaggcagttgaggcagctaaagtacgattaaaaatgccaccagttctggaagagcgagtaccaataaatgatgtgttagctgaagataagattttggaaggaacagaaacaaccaaatatgtgtttactgatatatcatatagcataccacaccgggagcgttttattgtcgtcagagaaccaagtggcacactacgcaaagcctcttgggaagaacgggaccgaatgatacaagtttatttcccaaaagaaggtcgtaaaattttgacaccaataattttcaaggaagaaaatcttaggtttgggccaatttcaccagggatatcaaggttcatcacaagacctatgaagatatagataacctgggtttgcccttatccgtaacacgatccttgtgggaatgtgtggactctggaatttactggggtcg

SEQ ID NO: 503329 - DNA, 512 bp, Homo sapiens
agcatcagaggcatgcgggcaggcgccaggcaccaggggagaggcagcatcgagtataaggaaaaagcgggtgaactcaggaagaacaagagatacgggactgagcaaagaacaagaaagagaaatatatggaacacagacagagctatgggaacacacgggaacctcttttagaaaacctgacaaggcgagtatgactaggatcttttccgaagagcacaagcccgggcttcagaggatttggagaagttaaggctgcaaggccaaatcacagagggaagcaacatgattaaaacaattgctttgggccgctatgagcttgatacctggtatcattctccatatcctgaagaatatgcacggctgggacgtctctatatgtgtgaattctgtttaaaatatatgaagagccaaacgatactccgccggcacatggccaaatgtgtgtggaaacacccacctggtgatgagatatatcgcaaaggttcaatctctgtgtttgaagtggatgg

SEQ ID NO: 503330 - DNA, 196 bp, Homo sapiens
ggattcagcagcaccgttaatggagtgactggcatccaaaatgggatgggattttgcataactctgccatagcagtttacagctgcatccatgggctacacaacaggaaccagcattacacttgggaattccggccttttgcctggcgtttccagggcccggatttaggataaggggaaaattaccatatttggaa

SEQ ID NO: 503331 - DNA, 890 bp, Homo sapiens
  misc_feature (22)..(23): n is a, c, g, or t
  misc_feature (28)..(29): n is a, c, g, or t
  misc_feature (32)..(32): n is a, c, g, or t
  misc_feature (742)..(742): n is a, c, g, or t
  misc_feature (746)..(746): n is a, c, g, or t
  misc_feature (757)..(757): n is a, c, g, or t
  misc_feature (769)..(770): n is a, c, g, or t
  misc_feature (780)..(781): n is a, c, g, or t
  misc_feature (784)..(784): n is a, c, g, or t
  misc_feature (787)..(787): n is a, c, g, or t
aaacttcggctaggtcgaggcnnggtgnncgnaacactgtattgctgtggagcctcttgaggagttctccgggcgtggaacgggtctgtttccgggctcgaatccagccctggcacggtggcctgctccaaccgctaccttgctctttcgagatggggctgccacgccgccggttcagctccgaggccgcagaatctggtagcccagagaccaagaaacctacatttatggatgaggaagttcaaagcatactcacgaaaatgacaggcttgaacttgcagaagacttttaagccagctatacaagaactgaagccaccaacctataagctaatgactcaggcacagttggaagaggctacaagacaggcagttgaggcagctaaagtacgattaaaaatgccaccagttctggaagagcgagtaccaataaatgatgtgttagctgaagataagattttggaaggaacagaaacaaccaaatatgtgtttactgatatatcatatagcataccacaccgggagcgttttattgtcgtcagagaaccaagtggcacactacgcaaagcctcttgggaagaacgggaccgaatgatacaagtttatttcccaaaagaaggtcgtaaaattttgacaccaataattttcaaggaagaaaatcttaggactatgtatagccaggacaggcatgttgatgtcctcaatctctgctttgcccagtttgagccagattccacagagtnttcncggtcctcccngacttgagattnntaacgggganntgnccnttcgtccccgtcttggggccggggggtttgccctcccccagtggtggcgtgcccccgagttctgtgccctggcgggttgccccggggtcgggcgcggggggta

SEQ ID NO: 503332 - DNA, 312 bp, Homo sapiens
ctctggggacagcttcccttggcaataatgtgcagcaggatcatggtgccaggactgttcttacacacattcattcatgggatcctcacaacccagtgctatgaatggatacagctgttaccccatttttactgatgggcaacatcacaaggcagggagcagcagtagaatggctccagagcctgtgttcttgccaccaccatgactgcatctcaaaagagaagtccaggtcaggcacagtggctcatgcctgccttctcagcctcccgagtagctgggactacaggcgtgaaccactatgcctgggaccca

SEQ ID NO: 503333 - DNA, 1560 bp, Homo sapiens
  misc_feature (1510)..(1511): n is a, c, g, or t
  misc_feature (1525)..(1525): n is a, c, g, or t
  misc_feature (1527)..(1527): n is a, c, g, or t
  misc_feature (1531)..(1531): n is a, c, g, or t
  misc_feature (1534)..(1534): n is a, c, g, or t
  misc_feature (1543)..(1543): n is a, c, g, or t
  misc_feature (1550)..(1550): n is a, c, g, or t
  misc_feature (1556)..(1556): n is a, c, g, or t
cagctggagtccagagaagttctgacagtgcagggagcagcccctttgttctgtggagcactggaagggctgagctgcatctgaggtgttcaagccaccaacaggacagggtagaggactaagtagcacatgtcccccagagcagcttcctgtctttgtgtggtcacatcacatcgggggaaatgggcatgtgtcaagaagtggagagtgtgatgcttgcatatcatcaagccttagctgtattgtcattttggagctgcatacctctcaaaaccatgggcttatgtacatttatctgtaagtgctgagagttgagatgatattttcaggaagggaaggggaggagattgtataattaatttcatctcttctaatgctcagaatatacatggttttgtggaactggcttctatcctagtaatactgtttcatgctgcaaagctaaggaaacaatgacctgtgatgacatcctaggaagagtagagagaaactacagtactgattttctttatgaacctgataaagcgcaatgtttttggagaaaatattctttaaagtcaaaagttagtttggtaactcttagcctccagatttctctctaacctaatggtttttgttttgatctcgaaggaagtattaatattaatacaatgtcagggtcttaattggatacttctggtgtttagaattagtattgcttgaaatgtgttgggtattgtttttctgtccatgtgtgtttattaattattgtataatcgcggagaaaaattgtgaaatctgaaagacctttttaagtaggactctttgctactacagaaatgctaatgatgtcttaaaactgaaaaactttataaatagcatatgtcctattgttttaaaattttctttttaatttaaacaggtctttgcaaaaacagaagcacagaagggagcctatatagaactaacactgcagacttatcaagaagcactcagtcgccattctgcagcttcctaaaaatattttaaaaatacatttattttactaaatactgactacatttctctgttaatattgagctaaatgttaaaaaatggctagattaaaagatatcaatttgtagttctccctacaaagcaaaaattattaccctactcacttttcgtaggctacaaggatatttgagtgcctggttatgaatttctcaaatcatgttagatgagcgtacggttaaaaagtctggtgtgtttttgtgttaccaaatagggcaaacgttaacttagacagacccccagcttaatgaggtcagaggaacagaggtttcacatcctgactccagaaatgggtagctgctagacaaaatcggggcaagacctgtggaatgatgcaatgaggtcaagaaaaagggtttagagaattacagcctggatattcagctctaagaaaaatgtgattgacaacattgaaaatgcagactgtagttatacacaacgaaaagacagtggggctgatccctaggcaggtgtagtnncggctcagcttctnanactngangcctatttncatattnagaaanggaa

SEQ ID NO: 503334 - DNA, 206 bp, Homo sapiens
  misc_feature (64)..(64): n is a, c, g, or t
  misc_feature (82)..(82): n is a, c, g, or t
caaaaattcatttatcataatattatcccattctataattacattctctcatattttaaccatntaaatagtatttatttcntatctaaaactcaactatataatacattaaaataaatcttattctttccaattaaccaccacttcttccttatataatattactataattaaatcaaataaattttttcttaacttcaaaaaaa

SEQ ID NO: 503335 - DNA, 1027 bp, Homo sapiens
cagctggagtccagagaagttctgacagtgcagggagcagcccctttgttctgtggagcactggaagggctgagctgcatctgaggtgttcaagccaccaacaggacagggtagaggactaagtagcacatgtcccccagagcagcttcctgtctttgtgtggtcacatcacatcgggggaaatgggcatgtgtcaagaagtggagagtgtgatgcttgcatatcatcaagccttagctgtattgtcattttggagctgcatacctctcaaaaccatgggcttatgtacatttatctgtaagtgctgagagttgagatgatattttcaggaagggaaggggaggagattgtataattaatttcatctcttctaatgctcagaatatacatggttttgtggaactggcttctatcctagtaatactgtttcatgctgcaaagctaaggaaacaatgacctgtgatgacatcctaggaagagtagagagaaactacagtactgattttctttatgaacctgataaagcgcaatgtttttggagaaaatattctttaaagtcaaaagttagtttggtaactcttagcctccagatttctctctaacctaatggtttttgttttgatctcgaaggaagtattaatattaatacaatgtcagggtcttaattggatacttctggtgtttagaattagtattgcttgaaatgtgttgggtattgtttttctgtccatgtgtgtttattaattattgtataatcgcggagaaaaattgtgaaatctgaaagacctttttaagtaggactctttgctactacagaaatgctaatgatgtcttaaaactgaaaaactttataaatagcatatgtcctattgttttaaaattttctttttaatttaaacaggtctttgcaaaaacagaagcacagaagggagcctatatagaactaacactgcagacttatcaagaagcactcagtcgccattctgcagcttcctaaaaatattttaaaaatacatttattttacta

SEQ ID NO: 503336 - DNA, 267 bp, Homo sapiens
  misc_feature (27)..(27): n is a, c, g, or t
  misc_feature (29)..(29): n is a, c, g, or t
  misc_feature (34)..(34): n is a, c, g, or t
cggtacccgcggtatgtcttacgacantncaccncattaattcctttccgtcttccccaacattccaccacattaattcctttcctgtcttccccaacattccaccacattaattcctttcctgtcttccccaacattccaccacattaattcctttcctgtcttccccgacattccaccacattaattccttgacagcatccccctctcattttcccccttgttatgcatttaacacttccaattgtccgtaagacataaccgcgg

SEQ ID NO: 503337 - DNA, 1682 bp, Homo sapiens
  misc_feature (11)..(11): n is a, c, g, or t
  misc_feature (14)..(14): n is a, c, g, or t
  misc_feature (1632)..(1633): n is a, c, g, or t
  misc_feature (1647)..(1647): n is a, c, g, or t
  misc_feature (1649)..(1649): n is a, c, g, or t
  misc_feature (1653)..(1653): n is a, c, g, or t
  misc_feature (1656)..(1656): n is a, c, g, or t
  misc_feature (1665)..(1665): n is a, c, g, or t
  misc_feature (1672)..(1672): n is a, c, g, or t
  misc_feature (1678)..(1678): n is a, c, g, or t
ccgtaggctangtncgaggcctggcttctgataatcatggcgcccctcggaacaactgtattgctgtggagcctcttgaggagttctccgggcgtggaacgggtctgtttccgggctcgaatccagccctggcacggtggcctgctccaaccgctaccttgctctttcgagatggggctgccacgccgccggttcagctccgaggccgcagaatctggtagcccagagaccaagaaacctacatttatggatgaggaagttcaaagcatactcacgaaaatgacaggcttgaacttgcagaagacttttaagccagctatacaagaactgaagccaccaacctataagctaatgactcaggcacagttggaagaggctacaagacaggcagttgaggcagctaaagtacgattaaaaatgccaccagttctggaagagcgagtaccaataaatgatgtgttagctgaagataagattttggaaggaacagaaacaaccaaatatgtgtttactgatatatcatatagcataccacaccgggagcgttttattgtcgtcagagaaccaagtggcacactacgcaaagcctcttgggaagaacgggaccgaatgatacaagtttatttcccaaaagaaggtcgtaaaattttgacaccaataattttcaaggaagaaaatcttaggactatgtatagccaggacaggcatgttgatgtcctcaatctctgctttgcccagtttgagccagattccacagagtatatcaaggttcatcacaagacctatgaagatatagataaacgtggaaaatatgaccttttacgttcaacaagatactttggtggaatggtgtggtattttgtaaataataaaaagattgatggtttgctgattgaccagattcagagagatttaatcgatgatgcaaccaacttggtccagctgtatcacgtgctccatccagatggccagtcggctcaaggggccaaggatcaggctgctgagggaataaatttaatcaaggtctttgcaaaaacagaagcacagaagggagcctatatagaactaacactgcagacttatcaagaagcactcagtcgccattctgcagcttcctaaaaatattttaaaaatacatttattttactaaatactgactacatttctctgttaatattgagctaaatgttaaaaaatggctagattaaaagatatcaatttgtagttctccctacaaagcaaaaattattaccctactcacttttcgtaggctacaaggatatttgagtgcctggttatgaatttctcaaatcatgttagatgagcgtacggttaaaaagtctggtgtgtttttgtgttaccaaatagggcaaacgttaacttagacagacccccagcttaatgaggtcagaggaacagaggtttcacatcctgactccagaaatgggtagctgctagacaaaatcggggcaagacctgtggaatgatgcaatgaggtcaagaaaaagggtttagagaattacagcctggatattcagctctaagaaaaatgtgattgacaacattgaaaatgcagactgtagttatacacaacgaaaagacagtggggctgatccctaggcaggtgtagtnncggctcagcttctnanactngangcctatttncatattnagaaanggaa

SEQ ID NO: 503338 - DNA, 1209 bp, Homo sapiens
  misc_feature (11)..(11): n is a, c, g, or t
  misc_feature (14)..(14): n is a, c, g, or t
ccgtaggctangtncgaggcctggcttctgataatcatggcgcccctcggaacaactgtattgctgtggagcctcttgaggagttctccgggcgtggaacgggtctgtttccgggctcgaatccagccctggcacggtggcctgctccaaccgctaccttgctctttcgagatggggctgccacgccgccggttcagctccgaggccgcagaatctggtagcccagagaccaagaaacctacatttatggatgaggaagttcaaagcatactcacgaaaatgacaggcttgaacttgcagaagacttttaagccagctatacaagaactgaagccaccaacctataagctaatgactcaggcacagttggaagaggctacaagacaggcagttgaggcagctaaagtacgattaaaaatgccaccagttctggaagagcgagtaccaataaatgatgtgttagctgaagataagattttggaaggaacagaaacaaccaaatatgtgtttactgatatatcatatagcataccacaccgggagcgttttattgtcgtcagagaaccaagtggcacactacgcaaagcctcttgggaagaacgggaccgaatgatacaagtttatttcccaaaagaaggtcgtaaaattttgacaccaataattttcaaggaagaaaatcttaggactatgtatagccaggacaggcatgttgatgtcctcaatctctgctttgcccagtttgagccagattccacagagtatatcaaggttcatcacaagacctatgaagatatagataaacgtggaaaatatgaccttttacgttcaacaagatactttggtggaatggtgtggtattttgtaaataataaaaagattgatggtttgctgattgaccagattcagagagatttaatcgatgatgcaaccaacttggtccagctgtatcacgtgctccatccagatggccagtcggctcaaggggccaaggatcaggctgctgagggaataaatttaatcaaggtctttgcaaaaacagaagcacagaagggagcctatatagaactaacactgcagacttatcaagaagcactcagtcgccattctgcagcttcctaaaaatattttaaaaatacatttattttactacagtctactcgctaatgtattataatcattgtctagcactcatttaattttataatatct

SEQ ID NO: 503339 - DNA, 111 bp, Homo sapiens
aagcacaagaaaatcccaactatgtgaaaaaatcaccaagaaaaacacatggacacaaggaacttcacgtaaacagctcaaagcataacaggtaacgaccaaacaaccacg

SEQ ID NO: 503340 - DNA, 1663 bp, Homo sapiens
  misc_feature (22)..(23): n is a, c, g, or t
  misc_feature (28)..(29): n is a, c, g, or t
  misc_feature (32)..(32): n is a, c, g, or t
  misc_feature (1613)..(1614): n is a, c, g, or t
  misc_feature (1628)..(1628): n is a, c, g, or t
  misc_feature (1630)..(1630): n is a, c, g, or t
  misc_feature (1634)..(1634): n is a, c, g, or t
  misc_feature (1637)..(1637): n is a, c, g, or t
  misc_feature (1646)..(1646): n is a, c, g, or t
  misc_feature (1653)..(1653): n is a, c, g, or t
  misc_feature (1659)..(1659): n is a, c, g, or t
aaacttcggctaggtcgaggcnnggtgnncgnaacactgtattgctgtggagcctcttgaggagttctccgggcgtggaacgggtctgtttccgggctcgaatccagccctggcacggtggcctgctccaaccgctaccttgctctttcgagatggggctgccacgccgccggttcagctccgaggccgcagaatctggtagcccagagaccaagaaacctacatttatggatgaggaagttcaaagcatactcacgaaaatgacaggcttgaacttgcagaagacttttaagccagctatacaagaactgaagccaccaacctataagctaatgactcaggcacagttggaagaggctacaagacaggcagttgaggcagctaaagtacgattaaaaatgccaccagttctggaagagcgagtaccaataaatgatgtgttagctgaagataagattttggaaggaacagaaacaaccaaatatgtgtttactgatatatcatatagcataccacaccgggagcgttttattgtcgtcagagaaccaagtggcacactacgcaaagcctcttgggaagaacgggaccgaatgatacaagtttatttcccaaaagaaggtcgtaaaattttgacaccaataattttcaaggaagaaaatcttaggactatgtatagccaggacaggcatgttgatgtcctcaatctctgctttgcccagtttgagccagattccacagagtatatcaaggttcatcacaagacctatgaagatatagataaacgtggaaaatatgaccttttacgttcaacaagatactttggtggaatggtgtggtattttgtaaataataaaaagattgatggtttgctgattgaccagattcagagagatttaatcgatgatgcaaccaacttggtccagctgtatcacgtgctccatccagatggccagtcggctcaaggggccaaggatcaggctgctgagggaataaatttaatcaaggtctttgcaaaaacagaagcacagaagggagcctatatagaactaacactgcagacttatcaagaagcactcagtcgccattctgcagcttcctaaaaatattttaaaaatacatttattttactaaatactgactacatttctctgttaatattgagctaaatgttaaaaaatggctagattaaaagatatcaatttgtagttctccctacaaagcaaaaattattaccctactcacttttcgtaggctacaaggatatttgagtgcctggttatgaatttctcaaatcatgttagatgagcgtacggttaaaaagtctggtgtgtttttgtgttaccaaatagggcaaacgttaacttagacagacccccagcttaatgaggtcagaggaacagaggtttcacatcctgactccagaaatgggtagctgctagacaaaatcggggcaagacctgtggaatgatgcaatgaggtcaagaaaaagggtttagagaattacagcctggatattcagctctaagaaaaatgtgattgacaacattgaaaatgcagactgtagttatacacaacgaaaagacagtggggctgatccctaggcaggtgtagtnncggctcagcttctnanactngangcctatttncatattnagaaanggaa

SEQ ID NO: 503341 - DNA, 263 bp, Homo sapiens
agacagaggcacggagagaaaggaatgtttagcacaagacacagcggcgtccgggatttgctaacctccatagtatttatggtggcccccccggggccccacccaagtttgaggcacttaggtttttctacccattcccggttcctctctccctagagcttgtaggggtactccctaatataggaagtaagctcgaggtaaattggacacgtcccaagagaagctttgagagagcccctcttttcctttaaatttaaccaatt

SEQ ID NO: 503342 - DNA, 288 bp, Homo sapiens
tatgcacgagaaagataacatgcccgcagactgtctccttcgtatgagcgcagcttccactttcctgtaggctatactgtacttcacggcatatatctcaatctcacatttattagcaagatgacactggctttgagcactctaagaacaggcatattatagaccctcttcagacacatcacatggcctggcttacctgatacaatttggtaatttctctgaagtatactcaaatttcaaacatctatctacaggattatctaaatgaaacacagcagcttactccag

SEQ ID NO: 503343 - DNA, 809 bp, Homo sapiens
gaaaagaagaaagagaaaaccacaaaacaatcagaaaacaaaataacaaaatggtaggagtatgcccttacttatcaataataaattgcatgtaagtggactaaattgccaatcaaaaggtgtaaagtggctgaatgaataaacaaacaaggtccattgatctgttttctgcaagaaacacacctcacctatagagacaaacagactgaaaataaaggaatggaaaaaattactccatgtcaatggaaaccaaaagcgagctggagtcgctattcttagacaaaatagattttaagacaaaaactttaagaaaagacaaagaaggtcactatagaaagataaaggggtcaattcagcgagaggatataacaattgtaaatatatttgcacccaacagtggaacaccaagatatataaagcaaatattatcacagttaaagagggagacagaccccaattcagtactagctggagacttcaacaccccagtttcagcattggaaagatatttcagacagaaaagcaatagagaaaaaacagacttaacctgcaacagaccaagtggatataatagatatttacagaacatttcctcaaatggctgcaggatacacactcttttcctcagcatatagatcattctcaaggaaagatcatatgtcagttatgtattacgataagtattagaacattccaaaaaatcgaaataatgcgtcttctctgatcacaatgaaataaaactagcaatcaaaaccagaggaatttcggaactgtacaaacactggacaattaaccatatgctctgaatg

SEQ ID NO: 503344 - DNA, 587 bp, Homo sapiens
gacgtcaccatacgacggaacggaatgaaataccaatagtatagagaactggtgctactgtgagttcgtactgacgtctttctcattctgagcttgtcatgtgttaacccatgaagtgtgacatcaggggagctttcgtgaggcagtcattcttagcttttcccggaattaaaatgttacaggacacacatacacacacagagagcatttcaaggccacacctccacacctgccatgggatgttaatgtggcagggggtggggctcattctgttgggaggtcaaattaccaatgccaaggactgttgattttgtttttatttttattttttcttctagcttttcagaagatggaaatgagacagttgagtccaaaccccaatgctgacagccatatgcatttgaaaatctatctagattacagatgggcatttattactggcagtggaaacaccagatagaagatcttaggagaggcccagaaatgcatcaccttgtcatgacaaaagagagggcagtagagtagggatagttacaaatgcatccatcttaattattctcaataggcttgtaaatcttatcgatgga

SEQ ID NO: 503345 - DNA, 168 bp, Homo sapiens
aaattcaatcacgcatcattacattaaactcgggtctctatgttagcctcctactagcctcagagtacatcgagtctcccttcatcatttccgacggcatctacgcgctcaacattttttgtagccacaggcttccacggacttcacgttcattattgggttatcgag

SEQ ID NO: 503346 - DNA, 153 bp, Homo sapiens
gtatgtatgaccacgaatgacgacgacggacggtgactggactactgactggtggttactggacggtttatgactgacactactaggtggactactaataacttaccggatactgggacatgactggactttgactagaccagacactgacga

SEQ ID NO: 503347 - DNA, 302 bp, Homo sapiens
aacatgtcgtaggttgaaaaaggtaataaacatcagtacaatcactatctttccttggtacatattatggtggcagtatacatgaatatcactaatcagtatgattattctcagagggtgctgctctataatgaaaatgaacattatagctaatgtttatacctcaaactctgctttcggtaaccaatcagtgtataaatgttggtgtgttctatcataaaatttaaatacaattcgttattctgtttccaacgtgttagtatgtatgtacaacatgatagtacaggcacgatatgtacggt

SEQ ID NO: 503348 - DNA, 108 bp, Homo sapiens
gaccaccctctctttcacctcgttctaaaattcacaccagtggacagcaggcctgcagcatgtctgtggaaatttatttaaacttatgtatgattcatagaagactga

SEQ ID NO: 503349 - DNA, 485 bp, Homo sapiens
  misc_feature (7)..(8): n is a, c, g, or t
  misc_feature (10)..(10): n is a, c, g, or t
  misc_feature (12)..(12): n is a, c, g, or t
  misc_feature (18)..(18): n is a, c, g, or t
  misc_feature (227)..(227): n is a, c, g, or t
  misc_feature (266)..(266): n is a, c, g, or t
  misc_feature (270)..(270): n is a, c, g, or t
  misc_feature (324)..(324): n is a, c, g, or t
  misc_feature (344)..(344): n is a, c, g, or t
  misc_feature (368)..(368): n is a, c, g, or t
  misc_feature (402)..(402): n is a, c, g, or t
  misc_feature (438)..(438): n is a, c, g, or t
  misc_feature (469)..(469): n is a, c, g, or t
gacgganngntntctgtngcccaggctggagtgcagtggcgccatctcggctcaccgcaagctccgcctcccaggttcatgccattctcctgcctcagcctccccagtagctaggactacagatgcccgccaccacgcccagctaattttttgtatttttagtagagacagggtttcaccgtgttagccaggatggtctcgatctcctgacctcgtgatccacccgnttcagcctcccaaagtgctgggattacaggcgtgacacncgtngcccagtcttttccttatttctttaaagattcctcatttctggccctttccttnaaattttttgatgtaaactnaaggaaataaggattattcacttnaaaacatttaaggaatttatcacaattatggttngatggggatagaatattttacgttgaccacacaggntattcttttgttacgggcaaaatctacacantcaaggcaaactggtt

SEQ ID NO: 503350 - DNA, 324 bp, Homo sapiens
tgggaggatccctaatcacagtgtcgtctacggaatgagagcgttgtctgatgcatgatgcattacaaggttccttgatactcactctcactctgatttcccaagctggcagtgacagtcatgcaatcatagctcaccgtgaccttgaactcctgagctcaagggatcctcctgcctctagcctcctgtagtacctgggaccacaggcagatgtcaccacacctggctaatttttaaatttttttgtagagttagagtcttgctatgttgaccagactggtcttgaactcctggcctcaagcaatcctcccactttaacctccc

SEQ ID NO: 503351 - DNA, 2780 bp, Homo sapiens
gaggggccggaggcgtccccgctcccgctcgctactagcccgcgggccagcgccgcgtcccgagccccggcgggagccatggctctaaaaggacaagaagattatatttatcttttcaaggattcaacacatccagtggattttctggatgcattcagaacattttacttggatggattatttactgatattactcttcagtgtccttcaggcataattttccattgtcaccgagccgttttagctgcttgcagcaattattttaaggcaatgttcacagctgacatgaaagaaaaatttaaaaataaaataaaactctctggcatccaccatgatattctggaaggccttgtaaattatgcatacacttcccaaattgaaataactaaaagaaatgttcaaagcctgcttgaggcagcggatctgctacagttcctttcagtaaagaaggcttgtgagcggtttttggtaaggcacttggatattgataattgtattggaatgcactcctttgcagaatttcatgtgtgtccagaactagagaaggaatctcgaagaattctatgttcaaagtttaaggaagtgtggcaacaagaagaatttctggaaatcagccttgaaaagtttctctttatcttgtccagaaagaatctcagtgtttggaaagaagaagctatcatagagccagttattaagtggactgctcatgatgtagaaaatcgaattgaatgcctctataatctactgagctatatcaacattgatatagatccagtgtacttaaaaacagccttaggccttcaaagaagctgcctgctcaccgaaaataagatccgctccctaatatacaatgccttgaatcccatgcataaagagatttcccagaggtccacagccacaatgtatataattggaggctattactggcatcctttatcagaggttcacatatgggatcctttgacaaatgtttggattcagggagcagaaataccagattataccagggagagctatggtgttacatgtttaggacccaacatttatgtaactgggggctacaggacggataacatagaagctcttgacacagtgtggatctataacagtgaaagtgatgaatggacagaaggtttgccaatgctcaatgccaggtattaccactgtgcagtcaccttgggtggctgtgtctatgctttaggtggttacagaaaaggggctccagcagaagaggctgagttctatgatcctttaaaagagaaatggattcctattgcaaacatgattaaaggtgtgggaaatgctactgcctgtgtcttacatgatgttatctacgtcattggtggccactgtggctacagaggaagctgcacctatgacaaagttcagagctacaattccgatatcaacgaatggagcctcatcacctccagtccacatccagaatatggattgtgctcagttccgtttgaaaataagctctatctagtcggtggacaaactacaatcacagaatgctatgaccctgaacaaaatgaatggagagagatagctcccatgatggaaaggaggatggagtgcggtgccgtcatcatgaatggatgtatttatgtcactggaggatactcctactcaaagggaacgtatcttcagagcattgagaaatatgatccagatcttaataagtgggaaatagtgggtaatcttcccagtgccatgcggtctcatgggtgtgtttgtgtgtataatgtctaattgaatctgcagaaatgaccaagcaatcacttttttggagtatagttttataaaaaaagaatgcagggtttgaagttccttacctgataattgtgtctggcacatgataggggatcagtaaattgtaattcctaaccctactgtactcccaaacatggtgattcatggtcaagaaaaatcttatatatatatatacacacacatatatatgtgttcatatatatgtatacatatatgtgtatatatacgcatgtatgtatacatatatgtgtatatatacgcatgtatgtatgcatatgtgtgtatatatacgtatgtatgtatacatatgtgtatatatacgtatgtatgtatacatatatgtgtatatatgcgtatgtatgtatacatatatgtgtatatatacgtatgtatgtatacatatatgtgtatatatacgtatgtatgtatacatatatgtgtatatatacgtatgtatgtatacatatatgtgtgtatatacgtgtgtatgtatacatatatgtgtatatatacgtgtgtatgtatacatatatgtgtatatatgcgtgtgtatgtatacatatatgtgtatatatacgtgtgtatgtatacatatatgtgtatatatacgtgtgtatgtatacatatatgtgtatatatgcgtgtgtatatatatacacatatatacgtatatatgtatatatatatacacagttgaatcagtgggattaatacctataatctctggttttcaaaggtaatatggaatatttgacacttggtaaaaggtgaactacctttgtagtgaatcttttcctcttggtagcatcaacactggggataaatcagaaccattctgtggaatgaaatgtttctcaagagcctataatatagtagatagtgcatattaagatgtctggctgggcatggtggctcatgcctgtaatcccagcactttgggaggctgaggcgggaggatcacttgagcctagaagttggagactaacctggcgagaccctgtctc

SEQ ID NO: 503352 - DNA, 407 bp, Homo sapiens
agagttctggaagtgcggaatcagggagacatgccactagctgagcttcccagaagtccaccaagagctgagggatggtatcttcatccttaccacaaagcaccttaaagaaagaatctgcttcttcaatcccaattttgctgttcttctgcaatcccaggactgaagccaccagcaatcctggctgagtctccttcaagtgagtcgcaagctcagttggaacaatctgtcccttcctgtgttgaatcaacaggcgtggttccaaaatgaagccacacaccaacttcatctctggatggcttttcatttcatttctgtacacgtcaagatctcccattttcagtgccactgctgccttgctcagtgtcactaagatggatgaaaacccagaagtatccatcttcttt

SEQ ID NO: 503353 - DNA, 887 bp, Homo sapiens
ggagttataaatctttgcctcttttttaaaaaagttaaatgttgaagacccccagattaagcaagtgcacagatagttttgcttggggcagattcacctaatcctagtagttctgaatcttgtttcctaagagtggaggtttggtgaagttactgatgctttaataatgctggcttcaaaggagttgaatgtggctgtactgtgagtttgtggctcataaaatatgtctttacttaatatcccaaataatagcagaagaacgaaggtcaaaacgacattttaaaaagtgctgtaacagagaaaatgtagagaaatgtgcaattgtataattagaattataagagataattcattcataatcgggtggcattttctagagagattttcctgcctgtgtaccggagctccatctttgtgtcagagtaacaaaccatctgaaaagtccagatgaaagaaagacaaggccgagtgcatagcagttcccatctcacatgtttaaggcttgtttgcccttccaggttcagggttcttctggggtatatgacagtcagatggtcaaggtcattgtagggcacactgcctcctcctaacagaaatattgcttacccttgtgtgattaatgggtaccactcataatagatttgatgaatccaacgtgggagggggggacttatatctagacaaaactttcaggtgattctggagctatgatctgatgtggtttgtcaatgcggaacaacaattggtgggtttcacagagtggtgattaatggtctacacaattgcgtatcagtgggacggcgcttaaaatattacatttcttctttaaagtgagaacgtaattttgaaaaaaaaagggggggcgaacatgggggaaatacggttta

SEQ ID NO: 503354 - DNA, 118 bp, Homo sapiens
ccacacgccacgggagaggtatattactgaatcacatgcaatcttatatacttacataataggttgaaccatatgagactgccttctccggggcgtggtccttctccggtggcgtggt

SEQ ID NO: 503355 - DNA, 292 bp, Homo sapiens
tccgatgtagtggctttaaacccacagaagtaacctgcaggaacacacttatatacctgagggccttgctcttcatctataccaatgaaaatcatacctaaaaggagaaaagaccctaattaaaggttttagcttaatacagtgacatatcctgtttcttgggggtgccacatagctgctgctaagcatgactttggccatcaattttaggatatgtatttccctttaggaaaactgataaaatacaggttatcaccacaggcaaattaggtaacaggtaaattcccatttc

SEQ ID NO: 503356 - DNA, 184 bp, Homo sapiens
caacggccactgtttattttgccaatatatgacactgctcagtgtcgcgttagcgcataacatcagactggttccgcctgggtgttatgcgtgcgtctcagttctccagcctgtgaatgtgcccggttgaatggaatagcggaataccgcgtggtattgcactggatcctgcccgaagcattag

SEQ ID NO: 503357 - DNA, 2082 bp, Homo sapiens
attattgttttctctgtattattgttgtgttgttttgagttatcgttattattttatgtttattgattttattgttttaggttattgtgtgtgtagttgtgttttatttagtagttatttgtgtttgtttgttgttgtttactagtgtgttgtttttaggttatgtttgtgtttagttatatagtattgttgtttattgttttttttaagttgtgttgttatagtatggtgtcttctattctgtttgtttgttgtttctctagagtgttctttagttatttggtcagtattgttttatctatttatattttatatctagtgtagtgtattgttttagtatagttgtctatgatttagtaagtatgttgatggttgttatgtgttatgatgtgtagttgcagacgcatgagattgggcgttaagagtcgaatgtatggtttagcgcggtagtttgttctcatagtgatatttctcgtgttaggattgagttagttttagtgtcgatctatcatagatatactttctttttctagtcttattgtgatcttgatttatgcataacgatgaggctatggttgatattgatgatcatgcgtggtgatagtttgttgatgagtattatttgattatttttattgttttttatttatttttttatgtttgttcttatatttttcgtttttgtgttgctttatgtatagggctgtttttgtcttgtcttgatggttgtattgctatgtgtttttgatagtcttaatcagtgattggtatatttattgtcttatttatatcggtgatttctatgcttgttgagtgttgttcatgatagttcaggtatgatttttgttgtttagtgtttattttattttcatagttcgttgtgtgtgtgtgtgtgatgagtgttgttagaggttgctatgttgttagtatagttctagttttgtgatcttttttttgtatattttagtatctgttgtgcttttgtttgtgtcgaattgtttagtaagtttatcatgttgagtggatgatgtgttgttgttattgagtatatggatgttgtttgttatagtggttgtttagtgtttgtagtagtatgtgtatattttttatcgtgtgtagagttaatttttttctgttttgtatgtgtgtttgtttttgtgtgttgttgttctctcccacttgtttgtttattgttctacacttcctggtgcgcgtgttgaacaacaacagtagtggagtgaggacgacctagatagtagtggaccgctatggtgtgtgatgggtgtgtgtgagttgcttcaatagaacgacaacgtcagtgtgaccagggatgactggtttgtatgaggttggttctaacgcaccctgtgattataggtgtgaatcgttgctgctagtaagaggtaattccacccacacataaatgtgtgtgtgcaccctaaatatataaacgcccacgagccgtttgtgtgtaggagacaccgcaccgggcccctacgtgtgtacgtgtgatggatacagggtgctgctctagaagaggtgtagtctcgaaggcgctcttcgggtgttgtgtgtcgctggatattttgcttcgcgcttcactacgaaggttcatttagaggtggtgtgtataatctacgttgtggcttgattgatatagaggttctcattgtggtctctgtctcctcaatagaggctctccatggctggctcgctctttcttgtctcgcgcaaatgcacttctgggagataatgtttgtatgtgaattattgcacaaggacgttgtctcagtgctgtccaccagcacaccgagctgataatggatgtgctccaagtcttgtctatgaagtctaagaataaaagtataggacaaacaggtgaaggtgttataaggttctgatgcgagccagagtaccgtttacaccactggtctagtcatctgtacctaagaagaaggaagaagaaacttgtaacccagtccctgtgcacccccggtttggccagtgaaggtaactgtataatgatacccagacaccctgattggaacgtgtattatattataaatacgtgaaaatccttaa

SEQ ID NO: 503358 - DNA, 454 bp, Homo sapiens
cacactgaaacaaaaacggcggcattgttgtacgcagtgtgtacgaatggaggctgagccacatatagttctagcagctgccgaggaaactggctgagtctaatgttacagtatttctgctcagtaagggtatccagtggtgataactctcatgatgacggtagtcatcctggtaaccatcctggtatcctgggtggtaactatgggtcactcatagcctgcagactcatcttcggggcagcgcatccccagtgactgctgaatcgccatttcctgtctccgaagttgcatcgaatcaattaaatcgtacacaatcaccatggaacacattggggaaggataccaggatttgacatatccgtcttttccaactagaagcatggagaagtactccgggctcacttgaaaatagttacgaatgtctttcaccaaatgggctggtacgtctacctcg

SEQ ID NO: 503359 - DNA, 131 bp, Homo sapiens
tcagactgggccgtaagtgccgcatagcacatcaatatgatttcgctaacttagttttctagccatactatctgtacatttattttccttgaaatgcaccgcaaggcttacaagaagctcaagggcatcga

SEQ ID NO: 503360 - DNA, 701 bp, Homo sapiens
tgggttgttggtttggaaaaagagtcttgctctgtctccctggctagggtgtggtggtgtgatcttggctcaggagccttgccctccctggtcaagcagcttcatctcacctccaaagtactgggactacggcatgtgatatgatgccggtgattttggtttactttttagagagatggggtcttgccatatttggccaggcgtgtttgaactcctacaactcaagcattcctcccacctgggtctcccaaattgtggggaccacggttgtgagccaccgcgcccagttaactcctgtgtttggtttggtttggtaacttgggttgatgtaaggccctccatttgggaaagcaggaaaacaggattttttttttaatcttgtcccctggaggatccaggatgaggattaaagtggctgagagcagtgctgggatccagcctccggggggctccttcggctggatacgggccccaaaaggggggggttgtgcgcaggagctgcgccttccgggggtgcccgggtggttgtttcagcagaaaacgctggtggttacccctaaaggtcaaggtttgggtgcctgttgtttcggttcgacacaattcccggaatcaagggcgggggagaacctcccctcatgttgttgccaccgtgtgcatgtatgctagaggcgtgcctgaaacataagggtcatgttctccgc

SEQ ID NO: 503361 - DNA, 319 bp, Homo sapiens
gtggctgttctagaggatcccatttcagcactttgggagtctgaggcaggtggattacttgaggtcaggagttcgagattagcctggccggaatggtgaaaccccgtctctactaaaaatacaaaaaaaaaaaaattagccaggtgtagtgccacgcacctgtagtcccagctacttgggaggctgaggcaggagaatcacttgaccccaagtgagccaagatcgtgccatcgcactccagccggggttgacaagagtgaaactccattctcaaaaaaaaaaacgagaaaaagaaaaccattccacgggccggacacag

SEQ ID NO: 503362 - DNA, 1575 bp, Homo sapiens
  misc_feature (805)..(805): n is a, c, g, or t
  misc_feature (1072)..(1072): n is a, c, g, or t
  misc_feature (1094)..(1094): n is a, c, g, or t
gggccagtgaggtgccggcggcacgccggggaaggcgcgggccgagcagattcggggcgttggagccctgcgcgcgcattgaggcgttgccggggatgtccccttgaatgggcagagtgggagatcaatgagaccggcggagctcgcgcatccctcagttgccatccactgctgctctctgcgtagcaggagcgtgggactgcggcctgcaggtagtcagcgcgtggcattgcgtgacaggcgctggccaagctagacacggagaactagtgctgcattacaagtctcattgcggtccggcaggtttgtgtggagagcactaggtttggccgcttaattttgtgcatctcttggtctcaccataccaacatgttcacttatacgatacaccgggttcgacagatactattcgatggatttcatgcttgcttccggggactaggaccataacttacttccctccaggggtttctatccgtaggggtgacccaatttgaggctagagacgccttgggagaatggggcttgatggaacccaaaacgagatttcccggttgaaattgacgcccttgggaacctttcttcaatatcaggtggatatctctcggaacgggttcccgaaatcctttgcagacagaaaccacacgcagggagggcaccctcgataggaggtttcagaaccgttgtattctctataggacaagcgcgattgtgaggcgatacgcgataacaaatatgttgcggatactcgtgaagggctttggcaccaacgacaaattacaataggcgaggcattggctttacnttaacctctttaagggcatgattgggtcaatcttcccccgaagaaaaggctctccacaaacgtgaagcccgagaattgttaaagacttttgtggcagcaactgactcaaccggggtggtggccccagttaaaggaccgaggcacgacagttgactattggcattgtcaccacttaagtttatttgtgcctgtccgaagtggcgcttggcgggtcatatacttgggatcaacgagcttttctttctacaattctaaccggatagtagnttttcccgccttatgttgaagntttgcaagcaatttcctccgttgatgttacggtgggcgccacgttttgggctgattaatacaaatgcccacgcgggagacacttgtgcccagggactttcaggtgacacctcttgagccaacacacagcttggtaacgtgtgggagggactattcatttacagagagccagagatatttgaaagatttaatcagtcttttcccagagttgtgtttggacatacggggtataacaggattattaaacgcacaaggaaacgcgggaaagagggtgcatatctaccggattgggggctattctgtaattagggaaggggaatttaatagcgttggacatgtttcgagataatttgtcgttaaggaaaagatttatccagaaaagaaggttaattatattcagtgcgcttattggattagttattatagttgaacaggggttttataaaaagagaaaggggtagtcagtggagaaacggaaatag

SEQ ID NO: 503363 - DNA, 546 bp, Homo sapiens
gcagcgcactccagcctggcgacagagactccatctcaaaaaaaaaaaaaaaaaatcacaaaataacaatggaagaggaaaacaaaactgggccgggggaaggcgcgtctgaagctgccacatctgggtgggtgtgggcggcagctacctaggtgctgaggcaagagactgagggcacgagcggtcccagtataataaaatacattaaaaatagttatactatattatagatcatagatatgattatatatgaatatcattaatcattagtgggtagcaactactctttttcccaatattataataatcctcgctctacaatcatagcctaggaaaaaccaggccgtacagagatttgaggggacttagtgaggagtacccagaagacaagagtgcgagccttctgttatgcccagacagggccaccagagggctcctgggtctagcggtaatgccagcatctgggaagatgcctatggccaggccaaccatggtctagcggtagcatcagtgtcaaggaaaaacacctgccacttagcagacggg

SEQ ID NO: 503364 - DNA, 188 bp, Homo sapiens
cgtcatttagacccttatcagtagaacagataggatcctgagctacttcatactgtatctttgtgcgctacatctttgtaattagcctggggccatcgtccattatcctgttcatcttctgcattctcctacatggctttcacaatatctcccagcataatttagtcttccactattccacaccccat

SEQ ID NO: 503365 - DNA, 104 bp, Homo sapiens
tgcctcctatctgaatcagatctatctgaatccagtcctcctatctgaatccagataaaagtacaaggccatccgcctcatttttgtcatcatggcgatctgga

SEQ ID NO: 503366 - DNA, 107 bp, Homo sapiens
tagtataaccacactgcttttggctacatttgtatctgctgctcctctgctggaaaaccctttccactgtttttttttatttaacaggatctcgcatctgtacaccc

SEQ ID NO: 503367 - DNA, 291 bp, Homo sapiens
ggcgtgcgtggtgcgtgtgtgttgtggaggaggcgcggacccttagatcacattcttgagctcgtcgtacaggcacagcacgaaggcgccccccatgccccgcaggacgtaggaccacgcacccttgaagaaggccttgcccccctcatctctgaaaatcttcctccaacagtcgacggtgcccgtgtacatgatgtcagctcctttgcgcccggagtgcatcatcatgcgccgacgcaccgtgtcgaagtgggtaggacaccacgccgatcacggacaaccccctgggga

SEQ ID NO: 503368 - DNA, 199 bp, Homo sapiens
gctctccgtgaactggtgctatgtgtgtgtctctcctgccaggtgctgtgtgtgtgtcctctcctgcctgggtgccgtgtgtgtgccctctcatcctgcgtgggtctgtgtgtgtcctctcctgcctgggtgctgtgtgtgtagtcctctcctgcccgggtgctgtgtgtgtgtcctctcatcctgcctgggtgctatg

SEQ ID NO: 503369 - DNA, 405 bp, Homo sapiens
  misc_feature (404)..(404): n is a, c, g, or t
tgcttcttcttcttgttcttgttcttcttcctcttccctcccctctttttcttcttttccttctcttttttctttctctcctcttcctccttttccttctttttcttcccagtgagtaagtgctaagtgtttttatgtgcattatctcacctaatcttcctcataaatctgagaagaatttttatccctgaaggagaaaaatgaagctcaagaaggttaattttcccagggctccatggctagtaattagtaaaaggatttttttttttaattagctgggagtgttgctcatgcctgtaatctcagcactttgggatgctgaggtggaaggattgcttgagcccaggagttcaagaccagcttgggcaacatagggagaactccctgctccagcgcccctctana

SEQ ID NO: 503370 - DNA, 330 bp, Homo sapiens
ctggccacccgcagcctggagcgcggcagcaggtccccgcccccgagcgatctatgcacttattggtcgggggcacgtctctcacgctcgctccaccccgcccaccttcatttgcaaagcagcagtgcgcagactccgcctcacgctcggccccgcccgtctgttgagcgccagttcggccgccacggcgcaggcgcggccttcaggctcgcgacagctacgccagccccggggtgctgcagtccccgtgtccccgtcggacgcatacagccctgacgacctccgctcccagacgccggggacgcgggctcggcgcggcgttgcggccgc

SEQ ID NO: 503371 - DNA, 708 bp, Homo sapiens
tacgggcggcgcgaccgcgcgtcggtctggcggcgcgtgtggaccccttcggtgtgctggcctcctccatcgtcctgcccgtggccttgggccgcagccacggtgtggcttctggccttggcgctggcggctgcggccgcgcccgctgccgggggcccgcggcccgagccagcccagagctgccggaagggccgcccttcccggccctggcggggtgctggacactggccattttcactagagtttgcctggcagggaccgatctctgccccctcctctccccaggcctctggctgcaagtgatgccgcagaatcctgagaccaggtgcctcctgagcagcccgtgcgcctctccacagcggcgtttgccacccaatgcggctcgcttcagatgctctgatgcagagggcatgcccatagtccctctgacagagcctcgcactggggccagggcaggcaccaagcccaggcggaccagtcggacacggacctgtcctcttcctcgatagcgtctgctcctcacatttgtgtcgatggtgacttaggagaattgttccgattttccctgatctaagcaggccacgtttaaaataacatcaaggcgagcgtacgtgtcacccatctgtactgacattctcctcccctgaaatgctttcaagtttgaccagcccgtgatcctagacaagtgcacctggggtttccagggac

SEQ ID NO: 503372 - DNA, 807 bp, Homo sapiens
ggagagaactagtcttgagttttctttgtgtgttttaagtcttagcatttactttccccaccccaaattctgggaacagcctttagtttctacgggaaagggccctgatggacagaagactagcatttaccttcattgaaaggggctgttaagagctgccgtgggaaagagggcgtgcctgggggaacgtgggaagatgccgtcagtgtgggtgggcaggaggacagccagtcgtccgtgctgccagcccaatagcttccaggggcagggtgcccagggtgctacgggagccccttcataggggttaggggcagggacgtggaccttccttccgagggcactcatgcgaaagccctccgtggtacctcctcagtggggctttgagcctttactcaccacaggtggggccgcttgtggacgccgtggggcttgcgaccacaggctccggtctataagaggggaatattagaccataggggcacaatttcgggtccttcacacagtgactgtgggaaagtggcgagatataacctcaagtgggcagagtggtgtcctccgtggccaaaaccagtgatccccttatgtgctcccttgggtgcgcacaaattctcgtgaacctcttttacaccccgggccgcgaaatcgtgctaccggggattcaaccggatattcttgggagcgcatctgggaagaggctccccggggtagaggccggcagaaaagccaaggggcttgcgcagaggggggatcacggggtggaccagcaaggctccgcgggataggggggccccccgggaacagcgcctc

SEQ ID NO: 503373 - DNA, 181 bp, Homo sapiens
aatcctctgggtgcatgctggttagctcttgtgtatactgatatcgttggcactcagcgactcatcaatctcataaaattatgagtaattatatggactaatcatcgagtaattagagtgacatgtctctaagaaaaaaaattcactttggagggatttctcatctaaatgtaaatgttta

SEQ ID NO: 503374 - DNA, 860 bp, Homo sapiens
cccaagcgtcggtttcgaggaaggagtacttacgcgcccaatgatgatgaatggaaaaatacttttcaggtagaatcgaaggggttaaagtgttaccatatgtgcctagacaagggttctttactagaaagacagcgcaacttgaagtgcttttctgtactgtttgtgacctaatttatgtggaagatggttatagcattaggatgttagtaaagatttgtgttcctgattctaaacttatggtgaagaatagagctgtacagatgaatttctttgatgtcgaatagggaacataaggaagagcaagcagtcttacttgccttgtacaatatagagacatatgaatagtcgataacagttttcaacgtgtgtactagttctctgttaaactagtattcctagaaacatagctttgaacaacctggtctttgtcaggcttgtccagagtgccgttcatggaaagacataagtctacaagaagtattggtgtaatccgacttgtcttacatgagtaagttttccctggtaacaattttagctacagggatataatcttatcttatcctaggagttgcgttaccatactgtggaaaatctgctgctggacgacaataatgggaacgttgtcacccattgggcaataatattgtgctttcctctgtcttcaattgcatagtactgcgtcaagaattacaacaggccattggttgtcctaggcgtaaagaatgactcgttactattattccaccttttacacctcattaaaatttgtacattggctttgcaatggacaggttggtcaatattcacttgaaagaattatatggaaatcattacaacgccccttctcagtcccatta

SEQ ID NO: 503375 - DNA, 888 bp, Homo sapiens
actgctcggcactggtgatgcttgctgccacgatcgacgcacatgtctgcaagtgatccatctgagcgtagactcgtcgacaccgtcagaccatcagctcatattccttgccaggtgcaccagcagcatgtatgtgatcataggacgccggagtgggtccctaggggaggagggaggttgctcatggagtgtaggatcctattgccaggtgctgatgatgtggaagcactaatcgcatctctgaggatgcagactactctggcgcgactacgtcgaatcgttcgtacatcagaagacctgggtaacactcgaacgtgcgcgtaggttgggagagacaactcttctactcgatcaaactcgcgaagcacatttgcgccctcgaatcgcgaaaaccctctattgcgtcgtcgcgactaaatcagccgttgtagcaaggcgccccgggcaagtgcattcccattctgctcccatgggtctgggagctgatccctccaatgcggggaacgttctagccgcaactgtcccacgctagagcgctagttggtggaccttggggtatgttgagccatgtggctgaggggctgatgctactgtagggaccaggcctttctggggacatgcctacagtctgatggacgtccacgggtcatccgacgaactgcggcggagaggttctctccggtgaaaccagggcgctagtaggtgtactcatgtaactcaggtcgtgctggcctgctcgcagttggcctagtaatgaaggttgatgcttacgcgtggcttgaacccctggagtctgaagcaggaatcagcccttttaccagctggatttggtttcctgggaaaaaggatggattcaaacggtgtgaatcacaaattcagtgccctcct

SEQ ID NO: 503376 - DNA, 983 bp, Homo sapiens
ggctcagcatgtggagacgctctcagactctcggtgcacggccagtttccttcacgaatgtctactggttcatgaaatcctgtgtgagttgcagattggatggtgatcactctagacaccccaagtgcttttgggtctgtctgaggctgtaataattttgatgctggagcgggatgcttggaatgatgtgaataccagcataaagtaccaaaggtgtggatgaggtcaggcattgttcaactatttgtgaacctagctcggctaggctaatggcgacagaagacgggtatatctgcttcgctctaccaggaaagaggaccaaaaaggaactaggcctcagccgactgaagtcagacttatctggcctaccctgggatgatcgggagaattgtggtggcctatgtgatagactccgtggcttcgagtattgatcgccttcatgaggcttgaacagcttccagtgaaaagggggctgggaagcctgacgaggatcttctctcatttgatgatcatctggctccataagccagagtcagtgaggctgctggaccttttgaccgacgttcgtcccggcggatgtaccgcgactggtctggcgagggccttatttctggaacttctctgggtgacttccgcaagctgggtgggtgcccctggcagggggtaaacaggcagaggatggctccgtccgggatatgaacctggtgaccaagaagcgcgggaatccctactgacgcggtggtgagcaggaatggactggggttccccaagggctaattagaaccgggcggggaggcgccgccggaggatggaggtaaagaccgcataaggtgaagactggacaagtggaccggaggttacagggtgtacaaccctgttgtggggtttcccaggggggcaagataaaatccggggagagaaaaggactaatcaggacaggtgggccacagctaggcgcttactttcttacgtgtggggggatg

SEQ ID NO: 503377 - DNA, 468 bp, Homo sapiens
aagaagtacatagcacgattaaaaagatcatcatactcaagtgggattcatcccagggatgcaagggatggttcaacatatgtaaatcaatcagtgtgatacatggtatcaacagaatgaaggacgacaagagggtattgtcatttcaatagatgccaaaaaaatctttttggataaaattcaatatcccttcataaaaactctcagcaaactggggacagaaggatcatccctcaacatgataaagccatacacaacaaacccacagttagtatcagactgaatgggggaaaaactgaaagcctttattctaggatctagaagaaggatgggcactttcaccactattactcaagttagtaacagaagtcctagccagagtaaacagacaagagaatgaaaaagggcatttaaatgggaaaggagtaagtaaaattatcattggctattgaaacttctaaaactagg

SEQ ID NO: 503378 - DNA, 678 bp, Homo sapiens
agcggagttctcccgggcgcctagcgggatcgacagcgcggcagtgggggcttccgcggctgcaagccagcgggtcctgtgagggcgagcggaggcggagaaagggcgcgggagtgagacgagggtgagtcagcgcgactgtctatgcgaataacacggggaggcctctgcgcgggatagggctgaattcagaaggtgcggtccgtgccggagtcctgttccaggacgcggcttgtcttagcgtcagcgagggaaggttgaggaggagccagagcctggtcctgctagcctttctctgccgtgcagagcaccgtcgcctatctcacagcagtgcagtcccgggaagacgtccgggctctcgccgactcgccagtccccgtggtgggaggcggtccaagaggatgtcgagagccctcggtttctgggcttattcacgggtccaggaggagttaaaggagcacggtccattctgtagccctgctggacacagctcaagtccttctacgacgcgcgggtgctgtgtgatgtgaccatcgaggtggtgagcgcctgggagcgggcctggcacgggtcgcctcttttcctgcaatcgcgacggtgctaggcagctgcgtgtccctacttcaagagcatgttcagcaggtggcatgtacgagagccagcaggccagcgtgagca

SEQ ID NO: 503379 - DNA, 123 bp, Homo sapiens
gggcctcgacttttgagcgatgagatccccgaccattgagcagccttttgctccttccccagaggaggcgtgagggtgggctatatagaaacattccaaataaaattgtctttctcaaagcca

SEQ ID NO: 503380 - DNA, 162 bp, Homo sapiens
ccttttttaagggggaaaattttggggccccccctggtggctttatgctggctttattttttggtttggtaattttttcccaccaggtggttcccattttggtttttgccccttaaccaatttggggaattaatgccttccgaaaccaacttaaaccatgga

SEQ ID NO: 503381 - DNA, 990 bp, Homo sapiens
  misc_feature (763)..(763): n is a, c, g, or t
gccggcgggcgatttttgtcgtttacaggtgagagggagcggttgagtcgcaaactactctgattattttttttatttggctctaaatgaacattctacaaaaattgaaatagaaacactaaatacagggattggacatagcccatctttgttaaatgccctattcttttcattggataaaggggatctacacacctggagggacttgagggggtctagaataattactaaacaatatataaaaacaatcacttctgtttctttggcagattatagctacacccagctggtttagcagcccattcccgtgctaggagtacttagcaatgcaaatatcggcaacctattgtgtgtatttgaccgcctgttcgtattacgcattgatcgcacagatgtcgaaatgtgtctttttctcggtggcagacccttcaactccggccgtgatcgatccttgtgaagcccgtttgcaacagaaccacccctcccattacaactatttacagtaagcacgttctcccgcctgtcccgcgtcgtatattactatgtgggtggcaggtaagaatacctatcgttcttgatgtattcaaaacagataaatctgatataagctcacttatgaagtgcatggaaagaaacaggggtggacacaggggtctctggagacatgaaaactcaaagtggcgtccagtacaaactgcggagcaggcttattggccggttgataatatgagtctcttcgtccgcggtcagttattatattggngtggatgcgcgaactgggcacaggagaaaaatgagggggcaatactgataattgattgatggtagaaatcggcaggatgttatacgtggggagataaaggcatacgcttgtcgcaatctatcctgggtgtatgagtgggttcggaagtgttactgcgaatgtggttaagatgcctttctacttccataccatatacgtgagaccaatttcgtgctgcgcagagaaga

SEQ ID NO: 503382 - DNA, 737 bp, Homo sapiens
ggggctcctgtggggcaggccagtgtcttacacagcttcgtcaccacatccccacatgtcccatcctgagcagtgcagtatggcattacctcggggtgccactcttagctgtcatatcacgaatcaccagtagctacttagctaatttcagtgcttttcgttttggcttaagttttcagaacttgcagtaaaatcagcatagtacaacaaggtgacagtgcggtttttcttccagacttcacgttctcatttccttatgtctcatgagcataaattccctgccatatctgcaatgcatatatattttccttccaacttcgtcatcgtttggtcttaatacatatggccaaacatgcatattacaccagtcgggtaatactcacttaccaatatgatctgccagatcattccgtattcagcacatacgtctgtttctcgtccagtgtcatctacacctcacaacaactctgtactcccctgttactcccccatttacagaggagactggaggtctggagatattcactgcactggctggagggtcaccaccaatgactaagagcgacagtccacctttgcctcagcagtcctgcaaagctcctggacaatagactcttcacatggtccatgtggcctcactcttccaaccgtggtgtcatgagtaccctgtacgatctctaggaggactccctcaatctgcacactggtagtacaaggtgtatgcattacacaattgt

SEQ ID NO: 503383 - DNA, 239 bp, Homo sapiens
tcacactactccccatatctccacaaaaaaataaacaaggttggccaggtgtggtggcgtgcgcctgtggtcccggctactcgggaggctgaggtgggaagagcacttgagctctggaggtcgaggcttcagtgagccatgatctcgcccctgtactctagcctgggcaacagagtaagaccctgtctcaaacaaaaatgggtgaatagagaatgttctaagtcattactttccttgtg

SEQ ID NO: 503384 - DNA, 146 bp, Homo sapiens
tgctgtgtgcagcagtggtggagtggtggggggcttgtggctacatgctgggaagtgccatgagcaggcccatcatacatttcggcagtactataggaccgttactatcgtgaaaacatgcaccgttaccccaagcaagagtgtcg

SEQ ID NO: 503385 - DNA, 776 bp, Homo sapiens
gctgcagaccagcctgggcaacatggtgaaattccatctctacaaaaaaatttaaaaattagccaggcatggtggcctgtgtctgtgattccagctactcaagcaatcctcctgagtgatcccatttcttaatcagtgtagccccaagaaggctggggctatttaccagggtagaaaaaggagcttacctcccacctttggtcctaagtccctgccccctccccttcacaccataactaggtaacagtttgataactagggaagaaagcagaacagttaagcagccgccacatccccgctggctgggggcctcactccaggaaggggctggactggctgtcctttccagtggcctggctccgctgtgtggatggggagatcggggccagaggcagaaccctggtgaggaagctccagtcctgctctctacccagcccatcttgcctccatggtgcctctggaggcctctgggcctcctctaacaggggctggtgggcaccaagagccaatggagtagacccctggctggtaagggccaagtcccaccggttgcttctgggaaggggtttctaacactagtctgtgtgctgtggttcctggggtgccctccactgccctctgttcagtaacagggccttgctaatcgggttgtcactcaacaaaagtgctttggatttaagttactatcctggctttgcccaacctcagcaacctgtaagactgataatgaaataaatcatgttaatcctaaaaaaaaaaaaaaaaaaaaaaaaaaa

SEQ ID NO: 503386 - DNA, 2658 bp, Homo sapiens
aagcggcacgaggctcgggttgtgccaccgctggactcccgtgtccctccgcgcaggcgggcggccccggagcgctggtgccggcagaggcggcgacggtggcgcccctcctcatcatgaacagaggcttctcccgaaaaagccacacattcctgcccaagatcttcttccgcaagatgtcatcctcaggggccaaggacaagcctgagctgcagtttcccttccttcaggatgaggacacagtggccacgctgctagagtgcaagacgctcttcatcttgcgcggcctgccaggaagcggcaagtccacgctggcacgggtcatcgtggacaagtaccgtgatggcaccaagatggtgtcggctgacgcttacaagatcacccccggcgctcgaggagccttctccgaggagtacaagcggctcgatgaggacctggctgcctactgccgccgccgggacatcagaattcttgtgcttgatgacaccaaccacgaacgggaacggctggagcagctctttgaaatggccgaccagtaccagtaccaggtggtgctggtggagcccaagacggcgtggcggctggactgtgcccagctcaaggagaagaaccagtggcagctgtcggctgatgacctgaagaagctgaagcctgggctggagaaggacttcctgccgctctacttcggctggttcctgaccaagaagagctctgagaccctccgcaaagccggccaggtcttcctggaagagctggggaaccacaaggccttcaagaaggagctgcgacaattcgtccctggggatgagcccagggagaagatggacttggtcacctactttggaaagagacccccaggcgtgctgcattgcacaaccaagttttgtgactacgggaaggctcccggggcagaggagtacgctcaacaagatgtgttaaagaaatcttactccaaggccttcacgctgaccatctctgccctctttgtgacacccaagacgactggggcccgggtggagttaagcgagcagcaactgcagttgtggccgagtgatgtggacaagctgtcacccactgacaacctgccgcgggggagccgcgcccacatcaccctcggctgtgcagctgacgtagaggccgtgcagacgggccttgacctcttagagattctgcggcaggagaaggggggcagccgaggcgaggaggtgggcgagctaagccggggcaagctctattccttgggcaatgggcgctggatgctgaccctggccaagaacatggaggtcagggccatcttcacggggtactacgggaaaggcaaacctgtgcccacgcaaggtagccggaaggggggcgccttgcagtcctgcaccatcatatgagtgttctcaccaccacttatgcccctagaagggaaggggagagggaaacgtgccctctgtttgatccttgttttgtgacattttttttttttttttttttactcaaagttaacctacctgtaactttttaaaaacttgtaaaataactgaccctcccttcctgtccgccctcttcccctctaatgctcacgctcccaacacaaggtgggcagggaggcaccattcaggaacctggaccaaagctgacgaggctgggccaagccagggatggggccacagccagaaccccgagccctacttccaggttctggttagctcagccccagcccagcccagctgctctgcccagagctgggtgagtggggagacacctcagagccccgcaaaacccactgaccggaggcaaaaggcagtggggctgggggtagttttccatggtcacagagaactagtggtggctctgagaaggggaggacctctgggctttgattccatctccttgtcttttttctttgtttttagagacagggtcctgctatttcccaagctggagtgcagtggtgcgatcatggctcactgcagcctcgaactcctgggctcaagcaatcctcctgagtgatcccatttcttaatcagtgtagccccaagaaggctggggctatttaccagggtagaaaaaggagcttacctcccacctttggtcctaagtccctgccccctccccttcacaccataactaggtaacagtttgataactagggaagaaagcagaacagttaagcagccgccacatccccgctggctgggggcctcactccaggaaggggctggactggctgtcctttccagtggcctggctccgctgtgtggatggggagatcggggccagaggcagaaccctggtgaggaagctccagtcctgctctctacccagcccatcttgcctccatggtgcctctggaggcctctgggcctcctctaacaggggctggtgggcaccaagagccaatggagtagacccctggctggtaagggccaagtcccaccggttgcttctgggaaggggtttctaacactagtctgtgtgctgtggttcctggggtgccctccactgccctctgttcagtaacagggccttgctaatcgggttgtcactcaacaaaagtgctttggatttaagttactatcctggctttgcccaacctcagcaacctgtaagactgataatgaaataaatcatgttaatcctaaaaaaaaaaaaaaaaaaaaaaaaaaa

SEQ ID NO: 503387 - DNA, 635 bp, Homo sapiens
acaccataactaggtaacagtttgaaggggagggggcagggacttaggaccaaaggtgggaggtaagctcctgccccctccccttcacaccataactaggtaacagtttgataactagggaagaaagcagaacagttaagcagccgccacatccccgctggctgggggcctcactccaggaaggggctggactggctgtcctttccagtggcctggctccgctgtgtggatggggagatcggggccagaggcagaaccctggtgaggaagctccagtcctgctctctacccagcccatcttgcctccatggtgcctctggaggcctctgggcctcctctaacaggggctggtgggcaccaagagccaatggagtagacccctggctggtaagggccaagtcccaccggttgcttctgggaaggggtttctaacactagtctgtgtgctgtggttcctggggtgccctccactgccctctgttcagtaacagggccttgctaatcgggttgtcactcaacaaaagtgctttggatttaagttactatcctggctttgcccaacctcagcaacctgtaagactgataatgaaataaatcatgttaatcctaaaaaaaaaaaaaaaaaaaaaaaaaaa

SEQ ID NO: 503388 - DNA, 322 bp, Homo sapiens
ccacctcagcctcccgagtagctgggactacaggcacgcgccaccgcgcccggagggttaagggctcccggagggttaagggctcccggagggttaagggctcccggagggttaagggctcccggagggttaagggctcccggagggttaagggctcccggagggttaagggctcccggagggttaagggctcccggagggttaagggctcccgggggttaagggctcccggagggttaagggctcccggagggttaagggctcccggcgggttaagggctcccggagggttaagggctcccggagggttaagggctcccgg

SEQ ID NO: 503389 - DNA, 665 bp, Homo sapiens
actagttctagatcgcgagcgccgccttttttttttttggttaggattaacatgatttatttcattatcagtcccaccggttgcttctgggaaggggtttctaacactagtctgtgtgctgtggttcctggggtgccctccactgccctctgttcagtaacagggccttgctaatcgggttgtcactcaacaaaagtgctttggatttaagttactatcctggctttgcccaacctcagcaacctgtaagactgataatgaaataaatcatgttaatcctaaaaaaaaaaaaaaaaaaaaaaaaaaaaaaaaaaaaaaaaaaaaaaaaaaaaaaaaaaaaaaaaaaaaaaaaaaaaaaaaaaaaagaaaaaaaaaaaaaaaaaaaaagaaggggggggggggcgaccaaaaagaatacccacccaggggagggcgcacaactcgacgccggccgccgccgcggttgtgtgcttgacaagaagagggaggcgccccacaggaggggggagacccatatattaaacagcgaggaggatcgcggggtgcgcaacacacaagcgaacgtggaagggagaaaacaacactggggaggagaggaccaccaaggggagaaacaacacacctccgggagggggagcacaatacgcggccgacacaacacggag

SEQ ID NO: 503390 - DNA, 328 bp, Homo sapiens
ccgtgtggctccaggtgcacatcccttctatcagcgtggatgcttatcaaaaacagtcgagaattcagtcagcagttagtagagcctaacagctggatgtgataccggaagaggtagaaagcttaacagagagatcatggaaagagctagtcaaagacagcctggctcaatgtcatcccaggtagactccggacttgccccaggggggcgtgtgtgccgacgtctggcatcacgggggtctgctgtctgtggatacttgaggatgttactacgtgtagcgcgagggaggcgcctgtgggctgcttggggtctgtgttctccatctacc

SEQ ID NO: 503391 - DNA, 322 bp, Homo sapiens
agccttaccctagtggtagtagcaaatattcaaacgagaactttgaaggccgaagggttaagggctcccggagggttaagggctcccggagggttaagggctcccggagggttaagggctcccggagggttaagggctcccggagggttaagggctcccggagggttaagggctcccggagggttaagggctcccggagggttaagggctcccgggggttaagggctcccggagggttaagggctcccggagggttaagggctcccggcgggttaagggctcccggagggttaagggctcccggagggttaagggctcccgg

SEQ ID NO: 503392 - DNA, 154 bp, Homo sapiens
ctgactgatcccttaaccttatgcctgtgggatgggacagacctgtatacgtcccccagccctgacacccgtaaatgggtctgtgctgaggaggattagtataatgaggaaggaatgcctctatgcagttgagacaatgaggaatggcatcttg

SEQ ID NO: 503393 - DNA, 148 bp, Homo sapiens
  misc_feature (133)..(133): n is a, c, g, or t
aatgtctttgccccccccccgccagcccgcgatacgggcgcagttccctatattcatgttatttatttgtgtcctgactccctctgccccgtccaaataaaaaaccccaaggttcgagcccccgggccccgcnaactccgggtcggga

SEQ ID NO: 503394 - DNA, 2794 bp, Homo sapiens
aagcggcacgaggctcgggttgtgccaccgctggactcccgtgtccctccgcgcaggcgggcggccccggagcgctggtgccggcagaggcggcgacggtggcgcccctcctcatcatgaacagaggcttctcccgaaaaagccacacattcctgcccaagatcttcttccgcaagatgtcatcctcaggggccaaggacaagcctgagctgcagtttcccttccttcaggatgaggacacagtggccacgctgctagagtgcaagacgctcttcatcttgcgcggcctgccaggaagcggcaagtccacgctggcacgggtcatcgtggacaagtaccgtgatggcaccaagatggtgtcggctgacgcttacaagatcacccccggcgctcgaggagccttctccgaggagtacaagcggctcgatgaggacctggctgcctactgccgccgccgggacatcagaattcttgtgcttgatgacaccaaccacgaacgggaacggctggagcagctctttgaaatggccgaccagtaccagtaccaggtggtgctggtggagcccaagacggcgtggcggctggactgtgcccagctcaaggagaagaaccagtggcagctgtcggctgatgacctgaagaagctgaagcctgggctggagaaggacttcctgccgctctacttcggctggttcctgaccaagaagagctctgagaccctccgcaaagccggccaggtcttcctggaagagctggggaaccacaaggccttcaagaaggagctgcgacaattcgtccctggggatgagcccagggagaagatggacttggtcacctactttggaaagagacccccaggcgtgctgcattgcacaaccaagttttgtgactacgggaaggctcccggggcagaggagtacgctcaacaagatgtgttaaagaaatcttactccaaggccttcacgctgaccatctctgccctctttgtgacacccaagacgactggggcccgggtggagttaagcgagcagcaactgcagttgtggccgagtgatgtggacaagctgtcacccactgacaacctgccgcgggggagccgcgcccacatcaccctcggctgtgcagctgacgtagaggccgtgcagacgggccttgacctcttagagattctgcggcaggagaaggggggcagccgaggcgaggaggtgggcgagctaagccggggcaagctctattccttgggcaatgggcgctggatgctgaccctggccaagaacatggaggtcagggccatcttcacggggtactacgggaaaggcaaacctgtgcccacgcaaggtagccggaaggggggcgccttgcagtcctgcaccatcatatgagtgttctcaccaccacttatgcccctagaagggaaggggagagggaaacgtgccctctgtttgatccttgttttgtgacattttttttttttttttttttactcaaagttaacctacctgtaactttttaaaaacttgtaaaataactgaccctcccttcctgtccgccctcttcccctctaatgctcacgctcccaacacaaggtgggcagggaggcaccattcaggaacctggaccaaagctgacgaggctgggccaagccagggatggggccacagccagaaccccgagccctacttccaggttctggttagctcagccccagcccagcccagctgctctgcccagagctgggtgagtggggagacacctcagagccccgcaaaacccactgaccggaggcaaaaggcagtggggctgggggtagttttccatggtcacagagaactagtggtggctctgagaaggggaggacctctgggctttgattccatctccttgtcttttttctttgtttttagagacagggtcctgctatttcccaagctggagtgcagtggtgcgatcatggctcactgcagcctcgaactcctgggctcaagcaatcctcctgagtgatcccatttcttaatcagtgtagccccaagaaggctggggctatttaccagggtagaaaaaggagcttacctcccacctttggtcctaagtccctgccccctccccttcacaccataactaggtaacagtttgataactagggaagaaagcagaacagttaagcagccgccacatccccgctggctgggggcctcactccaggaaggggctggactggctgtcctttccagtggcctggctccgctgtgtggatggggagatcggggccagaggcagaaccctggtgaggaagctccagtcctgctctctacccagcccatcttgcctccatggtgcctctggaggcctctgggcctcctctaacaggggctggtgggcaccaagagccaatggagtagacccctggctggtaagggccaagtcccaccggttgcttctgggaaggggtttctaacactagtctgtgtgctgtggttcctggggtgccctccactgccctctgttcagtaacagggccttgctaatcgggttgtcactcaacaaaagtgctttggatttaagttactatcctggctttgcccaacctcagcaacctgtaagactgataatgaaataaatcatgttaatcctaaaaaaaaaaaaaaaaaaaaaaaaaaattcgggggttttatgtgggggggggaaaaaagggttttgaaaagggctgggcataggtggttttcgggcccagtttttttggtcaaaggtggaattgggggcccaaagaggggcggataaatcgaaaagcagtacg

SEQ ID NO: 503395 - DNA, 142 bp, Homo sapiens
tgtcacaccagctcacaccattccagtgctcagcctagcacatgtgctttaatgcacacttctcagacctgtgatccgtgtatctactccccagtgacagaagtcgagaagagaatggaacgcagcatactccccccgcatg

SEQ ID NO: 503396 - DNA, 3016 bp, Homo sapiens
aagcggcacgaggctcgggttgtgccaccgctggactcccgtgtccctccgcgcaggcgggcggccccggagcgctggtgccggcagaggcggcgacggtggcgcccctcctcatcatgaacagaggcttctcccgaaaaagccacacattcctgcccaagatcttcttccgcaagatgtcatcctcaggggccaaggacaagcctgagctgcagtttcccttccttcaggatgaggacacagtggccacgctgctagagtgcaagacgctcttcatcttgcgcggcctgccaggaagcggcaagtccacgctggcacgggtcatcgtggacaagtaccgtgatggcaccaagatggtgtcggctgacgcttacaagatcacccccggcgctcgaggagccttctccgaggagtacaagcggctcgatgaggacctggctgcctactgccgccgccgggacatcagaattcttgtgcttgatgacaccaaccacgaacgggaacggctggagcagctctttgaaatggccgaccagtaccagtaccaggtggtgctggtggagcccaagacggcgtggcggctggactgtgcccagctcaaggagaagaaccagtggcagctgtcggctgatgacctgaagaagctgaagcctgggctggagaaggacttcctgccgctctacttcggctggttcctgaccaagaagagctctgagaccctccgcaaagccggccaggtcttcctggaagagctggggaaccacaaggccttcaagaaggagctgcgacaattcgtccctggggatgagcccagggagaagatggacttggtcacctactttggaaagagacccccaggcgtgctgcattgcacaaccaagttttgtgactacgggaaggctcccggggcagaggagtacgctcaacaagatgtgttaaagaaatcttactccaaggccttcacgctgaccatctctgccctctttgtgacacccaagacgactggggcccgggtggagttaagcgagcagcaactgcagttgtggccgagtgatgtggacaagctgtcacccactgacaacctgccgcgggggagccgcgcccacatcaccctcggctgtgcagctgacgtagaggccgtgcagacgggccttgacctcttagagattctgcggcaggagaaggggggcagccgaggcgaggaggtgggcgagctaagccggggcaagctctattccttgggcaatgggcgctggatgctgaccctggccaagaacatggaggtcagggccatcttcacggggtactacgggaaaggcaaacctgtgcccacgcaaggtagccggaaggggggcgccttgcagtcctgcaccatcatatgagtgttctcaccaccacttatgcccctagaagggaaggggagagggaaacgtgccctctgtttgatccttgttttgtgacattttttttttttttttttttactcaaagttaacctacctgtaactttttaaaaacttgtaaaataactgaccctcccttcctgtccgccctcttcccctctaatgctcacgctcccaacacaaggtgggcagggaggcaccattcaggaacctggaccaaagctgacgaggctgggccaagccagggatggggccacagccagaaccccgagccctacttccaggttctggttagctcagccccagcccagcccagctgctctgcccagagctgggtgagtggggagacacctcagagccccgcaaaacccactgaccggaggcaaaaggcagtggggctgggggtagttttccatggtcacagagaactagtggtggctctgagaaggggaggacctctgggctttgattccatctccttgtcttttttctttgtttttagagacagggtcctgctatttcccaagctggagtgcagtggtgcgatcatggctcactgcagcctcgaactcctgggctcaagcaatcctcctgagtgatcccatttcttaatcagtgtagccccaagaaggctggggctatttaccagggtagaaaaaggagcttacctcccacctttggtcctaagtccctgccccctccccttcacaccataactaggtaacagtttgataactagggaagaaagcagaacagttaagcagccgccacatccccgctggctgggggcctcactccaggaaggggctggactggctgtcctttccagtggcctggctccgctgtgtggatggggagatcggggccagaggcagaaccctggtgaggaagctccagtcctgctctctacccagcccatcttgcctccatggtgcctctggaggcctctgggcctcctctaacaggggctggtgggcaccaagagccaatggagtagacccctggctggtaagggccaagtcccaccggttgcttctgggaaggggtttctaacactagtctgtgtgctgtggttcctggggtgccctccactgccctctgttcagtaacagggccttgctaatcgggttgtcactcaacaaaagtgctttggatttaagttactatcctggctttgcccaacctcagcaacctgtaagactgataatgaaataaatcatgttaatcctaaaaaaaaaaaaaaaaaaaaaaaaaaaaaaaaaaaaaaaaaaaaaaaaaaaaaaaaaaaaaaaaaaaaaaaaaaaaaaaaaaaaagaaaaaaaaaaaaaaaaaaaaagaaggggggggggggcgaccaaaaagaatacccacccaggggagggcgcacaactcgacgccggccgccgccgcggttgtgtgcttgacaagaagagggaggcgccccacaggaggggggagacccatatattaaacagcgaggaggatcgcggggtgcgcaacacacaagcgaacgtggaagggagaaaacaacactggggaggagaggaccaccaaggggagaaacaacacacctccgggagggggagcacaatacgcggccgacacaacacggag

SEQ ID NO: 503397 - DNA, 226 bp, Homo sapiens
tccttgcatattgcaacactgtactcaggctatcctggatgtcgagctgatgcccctcctacttgctgcaaggtcacttgagagtccaatacactctgttggggctaaagcaggtcttcatgatcaggccaagtccgatgcgttcagtgtcgtagtacgcgtatttcactgtcagaggcgtgaacatcactcccattgtcctcccagggactcccacggacatcgt

SEQ ID NO: 503398 - DNA, 2458 bp, Homo sapiens
aagcggcacgaggctcgggttgtgccaccgctggactcccgtgtccctccgcgcaggcgggcggccccggagcgctggtgccggcagaggcggcgacggtggcgcccctcctcatcatgaacagaggcttctcccgaaaaagccacacattcctgcccaagatcttcttccgcaagatgtcatcctcaggggccaaggacaagcctgagctgcagtttcccttccttcaggatgaggacacagtggccacgctgctagagtgcaagacgctcttcatcttgcgcggcctgccaggaagcggcaagtccacgctggcacgggtcatcgtggacaagtaccgtgatggcaccaagatggtgtcggctgacgcttacaagatcacccccggcgctcgaggagccttctccgaggagtacaagcggctcgatgaggacctggctgcctactgccgccgccgggacatcagaattcttgtgcttgatgacaccaaccacgaacgggaacggctggagcagctctttgaaatggccgaccagtaccagtaccaggtggtgctggtggagcccaagacggcgtggcggctggactgtgcccagctcaaggagaagaaccagtggcagctgtcggctgatgacctgaagaagctgaagcctgggctggagaaggacttcctgccgctctacttcggctggttcctgaccaagaagagctctgagaccctccgcaaagccggccaggtcttcctggaagagctggggaaccacaaggccttcaagaaggagctgcgacaattcgtccctggggatgagcccagggagaagatggacttggtcacctactttggaaagagacccccaggcgtgctgcattgcacaaccaagttttgtgactacgggaaggctcccggggcagaggagtacgctcaacaagatgtgttaaagaaatcttactccaaggccttcacgctgaccatctctgccctctttgtgacacccaagacgactggggcccgggtggagttaagcgagcagcaactgcagttgtggccgagtgatgtggacaagctgtcacccactgacaacctgccgcgggggagccgcgcccacatcaccctcggctgtgcagctgacgtagaggccgtgcagacgggccttgacctcttagagattctgcggcaggagaaggggggcagccgaggcgaggaggtgggcgagctaagccggggcaagctctattccttgggcaatgggcgctggatgctgaccctggccaagaacatggaggtcagggccatcttcacggggtactacgggaaaggcaaacctgtgcccacgcaaggtagccggaaggggggcgccttgcagtcctgcacgctcccaacacaaggtgggcagggaggcaccattcaggaacctggaccaaagctgacgaggctgggccaagccagggatggggccacagccagaaccccgagccctacttccaggttctggttagctcagccccagcccagcccagctgctctgcccagagctgggtgagtggggagacacctcagagccccgcaaaacccactgaccggaggcaaaaggcagtggggctgggggtagttttccatggtcacagagaactagtggtggctctgagaaggggaggacctctgggctttgattccatctccttgtcttttttctttgtttttagagacagggtcctgctatttcccaagctggagtgcagtggtgcgatcatggctcactgcagcctcgaactcctgggctcaagcaatcctcctgagtgatcccatttcttaatcagtgtagccccaagaaggctggggctatttaccagggtagaaaaaggagcttacctcccacctttggtcctaagtccctgccccctccccttcacaccataactaggtaacagtttgataactagggaagaaagcagaacagttaagcagccgccacatccccgctggctgggggcctcactccaggaaggggctggactggctgtcctttccagtggcctggctccgctgtgtggatggggagatcggggccagaggcagaaccctggtgaggaagctccagtcctgctctctacccagcccatcttgcctccatggtgcctctggaggcctctgggcctcctctaacaggggctggtgggcaccaagagccaatggagtagacccctggctggtaagggccaagtcccaccggttgcttctgggaaggggtttctaacactagtctgtgtgctgtggttcctggggtgccctccactgccctctgttcagtaacagggccttgctaatcgggttgtcactcaacaaaagtgctttggatttaagttactatcctggctttgcccaacctcagcaacctgtaagactgataatgaaataaatcatgttaatcctaaaaaaaaaaaaaaaaaaaaaaaaaaa

SEQ ID NO: 503399 - DNA, 660 bp, Homo sapiens
caccagggtttcttgtcgcgacggttggggataatcctgtggccaacaggtaaaggcggttttctaaataaaaggtgcaaccgacgtttgacagctcgaatgcaaccctcgttgaacaattgtttccccagccgggccacctttcgcggtagggcccaatagctatgggagaacaccccgcttgttgaacacgcccgcattaaaaggtgtcgccgaagtgaatggggcatacctgataaaacattgagatactcataggaaaaccactaatcccagaagtggttacgaaggctgtttgcgccgcatttataagcacccattcctggtgcagcaaacaagtgattgacacaacccctggtggtaatccgtcaacccgcatatggccacgcgtcacaagtgttgttgtcttctacactccaccacatgtcgcgcttacacagtgggggacgcgcactcaatgtgtgcgggcgcttcattcatgaggggtctcgccccaagccccgggagcaagccacgtttgtaggtagactccacaaatggtcactccacacaggtaattttcgtggtttcctattattggtgtgacacacgcgggggccgcgcgtgtggttcaacaaaaatggttttatataatgtccgctctaaatcacggtcgagaag

SEQ ID NO: 503400 - DNA, 331 bp, Homo sapiens
tataaaacacagtctcactttgtggcccaggctggagtgcaaaggcacaatcttagctcactgcaattcccgcctcccaggctcaagcaattctcctgcctcaccctcccaaacagctgagaccacaggcgcccgccaccacacctggctgattttaatattttaagtaaagacggggttcaccatgttggcgaggctggtctcgaatttcctgacctcaggtgatccgcctgccttggcctcccagggtgctgggattgcaggtgtgagccaccacgcccagccagtccctcttggtagtacttatatcagcctggtgtttatttgtgga

SEQ ID NO: 503401 - DNA, 2488 bp, Homo sapiens
aagcggcacgaggctcgggttgtgccaccgctggactcccgtgtccctccgcgcaggcgggcggccccggagcgctggtgccggcagaggcggcgacggtggcgcccctcctcatcatgaacagaggcttctcccgaaaaagccacacattcctgcccaagatcttcttccgcaagatgtcatcctcaggggccaaggacaagcctgagctgcagtttcccttccttcaggatgaggacacagtggccacgctgctagagtgcaagacgctcttcatcttgcgcggcctgccaggaagcggcaagtccacgctggcacgggtcatcgtggacaagtaccgtgatggcaccaagatggtgtcggctgacgcttacaagatcacccccggcgctcgaggagccttctccgaggagtacaagcggctcgatgaggacctggctgcctactgccgccgccgggacatcagaattcttgtgcttgatgacaccaaccacgaacgggaacggctggagcagctctttgaaatggccgaccagtaccagtaccaggtggtgctggtggagcccaagacggcgtggcggctggactgtgcccagctcaaggagaagaaccagtggcagctgtcggctgatgacctgaagaagctgaagcctgggctggagaaggacttcctgccgctctacttcggctggttcctgaccaagaagagctctgagaccctccgcaaagccggccaggtcttcctggaagagctggggaaccacaaggccttcaagaaggagctgcgacaattcgtccctggggatgagcccagggagaagatggacttggtcacctactttggaaagagacccccaggcgtgctgcattgcacaaccaagttttgtgactacgggaaggctcccggggcagaggagtacgctcaacaagatgtgttaaagaaatcttactccaaggccttcacgctgaccatctctgccctctttgtgacacccaagacgactggggcccgggtggagttaagcgagcagcaactgcagttgtggccgagtgatgtggacaagctgtcacccactgacaacctgccgcgggggagccgcgcccacatcaccctcggctgtgcagctgacgtagaggccgtgcagacgggccttgacctcttagagattctgcggcaggagaaggggggcagccgaggcgaggaggtgggcgagctaagccggggcaagctctattccttgggcaatgggcgctggatgctgaccctggccaagaacatggaggtcagggccatcttcacggggtactacgggaaaggcaaacctgtgcccacgcaaggtagccggaaggggggcgccttgcagtcctgcaccatcatatgagtgttctcaccaccacttacgctcccaacacaaggtgggcagggaggcaccattcaggaacctggaccaaagctgacgaggctgggccaagccagggatggggccacagccagaaccccgagccctacttccaggttctggttagctcagccccagcccagcccagctgctctgcccagagctgggtgagtggggagacacctcagagccccgcaaaacccactgaccggaggcaaaaggcagtggggctgggggtagttttccatggtcacagagaactagtggtggctctgagaaggggaggacctctgggctttgattccatctccttgtcttttttctttgtttttagagacagggtcctgctatttcccaagctggagtgcagtggtgcgatcatggctcactgcagcctcgaactcctgggctcaagcaatcctcctgagtgatcccatttcttaatcagtgtagccccaagaaggctggggctatttaccagggtagaaaaaggagcttacctcccacctttggtcctaagtccctgccccctccccttcacaccataactaggtaacagtttgataactagggaagaaagcagaacagttaagcagccgccacatccccgctggctgggggcctcactccaggaaggggctggactggctgtcctttccagtggcctggctccgctgtgtggatggggagatcggggccagaggcagaaccctggtgaggaagctccagtcctgctctctacccagcccatcttgcctccatggtgcctctggaggcctctgggcctcctctaacaggggctggtgggcaccaagagccaatggagtagacccctggctggtaagggccaagtcccaccggttgcttctgggaaggggtttctaacactagtctgtgtgctgtggttcctggggtgccctccactgccctctgttcagtaacagggccttgctaatcgggttgtcactcaacaaaagtgctttggatttaagttactatcctggctttgcccaacctcagcaacctgtaagactgataatgaaataaatcatgttaatcctaaaaaaaaaaaaaaaaaaaaaaaaaaa

SEQ ID NO: 503402 - DNA, 301 bp, Homo sapiens
atagccaggcgtgatggtgtgcacctgtagtcccagctactggagaggttgaggcaggaggatggcttgagcccaggagtttctggctgcagtgagctggacacagtgagaccctgtctcaaaaaaactaaaagatagccctgcacagtggttcacatctgcaatcccagcagtttgggaagctgagatgggaggattgtttgagaccaggagttcaagaccagcctgggcaacatattgagaccccatctctacaaaacagcagcagaaacaaaagcaaacaacagcaacgtacacaaac

SEQ ID NO: 503403 - DNA, 116 bp, Homo sapiens
tatattctagagcatccctttgctctctacagtagttattgctttgtgctgtacatttgggttacaggagttgtatatgtgtatgtgacagcataatgccctcaccagcgattgct

SEQ ID NO: 503404 - DNA, 124 bp, Homo sapiens
gagagtctgagtgcagaccctgatcagtgcttcctcgccaatctgtgagtctgtcccaggaagtagaggagagagagccttagccttgcgtgcaaccatgatgaatggttagctttacgtggtg

SEQ ID NO: 503405 - DNA, 1216 bp, Homo sapiens
cattttttcgtgcgtgtcgcctggtgtagccttctctggactcccctttcgggttctccacttggggcgttggcggatcttgtggacccgtttttctctcccgatgtactcggcgccttttcagggggcccaacgctctactttagccccctttgtgtcccccccttttcatctggggggaccccggtggagtgtttacccccctcctctccggttcttctcccactctccctccttgccaccccccgtttgggttagcaccccctggcccaggttcgtacccctgaccaactgtggggatcctgtgggagggcattccagggccccccatttccaaggccccgtcactggcccccgcccagtaaggtcctgttgggattggcccccccccccgggggaaactcgtgggccgtcgtattggcccccgcgggggcttctccccgggtcatctaatccccgtgcccttttttcttgggcgctttccccaatggcctttttgggcccacgggtcactcccctggatggctgtatcccgggaagcgtccaccttggcccatgcgccctttcccggtggttcgcccccccgggccccaccggtggtccacactgggttgggaacctggaacctcgccgctttctatgtgtaaccctcgtccccaatattgagtgaaccactcccagagaaggtttggttaaaccacgggcctttccgaaggggccccccctccacaggggcaattcctggggctaccccctggggccccccccgcttggtttccctcctgaactttctaccacgcgagcaccccacctcctccccccctcttgagagcctgggggctggccacttggcccctccacaccgagccacctcttgtcccaagctcaatttccctggtattgacccaccgaatatttggctaccacgccaccacggggtggtggagcctcacatggcccaccactgggccttccacaagggaggtatagaaccccctgggccacccacgccccccgcacagagccaccagaggaagagagagaccctccactgctggggagatccctgcccaccactccagtccccccacccaccactgaatctcccctcctccaccagattgcccatgtagaccccctgaagaggggaggggcctagggaacccccccttggtccatgtacccatccatataagtaccctgtgctcccacccca

SEQ ID NO: 503406 - DNA, 192 bp, Homo sapiens
taatctattctatctccatatgctttaggtgtctggtaacagatacctgcacgaagcgttgctgtatcaaacaaaaccacagacaagatccaagaactgttatatcatcttcatcttccttacttcgtcgaagcatgtctctgatcagcgggtgtctgggattaatttcaaatgttttcttctgactcgcat

SEQ ID NO: 503407 - DNA, 327 bp, Homo sapiens
atacgaattgagctggtacccgttagcagcgccagccgcataattcctctgctgtcaggaaggctggggagagggtgcggtgggacccaggccactcaggagcgggatgccaccgagttctcaaagatcttgtccgccctggcccttccgtgtccggcctccagtgggcaccagatctccacccagtgcgtgaccaccccctccccaccaatccctcagcgagattctagcagaggggacgagagccaggggccgtggggacccagtgttgagaaaggggctggcagagacgcatgggagtccacccagggtcaggttcaggcctgc

SEQ ID NO: 503408 - DNA, 125 bp, Homo sapiens
tctgaccctgttctcatatctgtagagggcaagaagtctcacgacctcctgggatttttttggtgaaaattaaatgagaacggtaagatcttccaggccttcctcctggtccatctgacccatct

SEQ ID NO: 503409 - DNA, 855 bp, Homo sapiens
  misc_feature (54)..(54): n is a, c, g, or t
  misc_feature (64)..(64): n is a, c, g, or t
  misc_feature (66)..(66): n is a, c, g, or t
  misc_feature (74)..(74): n is a, c, g, or t
  misc_feature (100)..(100): n is a, c, g, or t
  misc_feature (119)..(119): n is a, c, g, or t
  misc_feature (122)..(122): n is a, c, g, or t
  misc_feature (126)..(126): n is a, c, g, or t
  misc_feature (129)..(129): n is a, c, g, or t
  misc_feature (132)..(132): n is a, c, g, or t
  misc_feature (139)..(139): n is a, c, g, or t
  misc_feature (148)..(148): n is a, c, g, or t
  misc_feature (150)..(150): n is a, c, g, or t
  misc_feature (153)..(154): n is a, c, g, or t
  misc_feature (156)..(157): n is a, c, g, or t
  misc_feature (159)..(159): n is a, c, g, or t
  misc_feature (161)..(161): n is a, c, g, or t
  misc_feature (163)..(163): n is a, c, g, or t
  misc_feature (167)..(167): n is a, c, g, or t
  misc_feature (169)..(169): n is a, c, g, or t
  misc_feature (176)..(176): n is a, c, g, or t
  misc_feature (183)..(183): n is a, c, g, or t
  misc_feature (187)..(187): n is a, c, g, or t
  misc_feature (197)..(197): n is a, c, g, or t
  misc_feature (206)..(206): n is a, c, g, or t
  misc_feature (218)..(218): n is a, c, g, or t
  misc_feature (225)..(225): n is a, c, g, or t
  misc_feature (230)..(230): n is a, c, g, or t
  misc_feature (236)..(236): n is a, c, g, or t
  misc_feature (254)..(254): n is a, c, g, or t
  misc_feature (263)..(263): n is a, c, g, or t
  misc_feature (336)..(336): n is a, c, g, or t
  misc_feature (350)..(350): n is a, c, g, or t
  misc_feature (370)..(370): n is a, c, g, or t
  misc_feature (408)..(408): n is a, c, g, or t
  misc_feature (602)..(602): n is a, c, g, or t
  misc_feature (618)..(618): n is a, c, g, or t
  misc_feature (776)..(776): n is a, c, g, or t
  misc_feature (845)..(845): n is a, c, g, or t
tcccctctgaagaggacttccagggtataacccctggggcccagggcccttccncccggggccnanaacctgangccaggcccaacccggacgcctcggnaaccggaaggtcccacccnagnaccnccnccnctacccnccccccccncnacnncnnancngnagangnccaaggnggaaganaccnagcggaaggnatcacaacnccccaagggtcncccaccngaccncaacancgcccaggagacccaganggagatganactcctgctggatatctacaactcaccccccaacgaccaccgggataacgtccacctcatggcagcggaaccnaggctaaggccgancgttgatgacctgcggaccncatcccggaattggaggagagggatccaagggagagcnagaagatcccggatgacgatcccctcccgcccattcggcaggcagaggagcagatagaacacctccacgcgcaacctccgctgccaccaaccaccgaggaggaggctctgctctcagagatggatgtgacaggtcaggcttttgaggacatgcaggaacagaacgggcggctgctacagcagttgcgggaaaangatgatgccaactttnagctaatgtcagagcggatcaaggccaaccagattcacaagctgctgcgggaggagaaggatgagttgggcgagcaggtccttggcctcaagtcccaggtggatgcccagctgctgactgtgcagaagctggaggagaaggagcgagccttgcagggnagcctcggggggtgtggagaaggagctgacgctgcgcacaaagccctgggagctcaacaagcggaaggntgtagaagcc

SEQ ID NO: 503410 - DNA, 367 bp, Homo sapiens
gcagatttcagcttaaatctgctgagcgagggagcaaagctactccagctcagcaggaaaaagcagttggggcagtggaaagcccagagtggctccgagatgtatccatgtctgctccttaagccttcctagctgtgggaccccagggataactgtccctcacatcaccttccacgaatgtgagcccaattcctgacttagggggtcccaactcaagacacgaagcctgtaaaatccaggctcagagaacctggagacagccttcagatgatactagaaattaaactgaatttacattgtctacagagacagggtctctgtcgccaaggctgggtacagtggcacaatcacagctcactgcagcctt

SEQ ID NO: 503411 - DNA, 343 bp, Homo sapiens
ccccctccccgggtaccaatttactgtattagtctgtttttatgctactaataaagacatacccaagactgggcaatttacaaaagaaagaggcatattggatttacagttccacctggctggggaggcctcacaatcatggcggagggtgaaaggcacatctcacatggcagcagacaagagaagagagcttgtgcagggaaactccctatttatatattaatttattttggggagggagtttctctcttgttgcccaggctggagtgcaatggtgcaatcttggctcaccgcaacctctgcctcccgggttcaagtaattctcctacccggggaggggggg

SEQ ID NO: 503412 - DNA, 169 bp, Homo sapiens
  misc_feature (80)..(80): n is a, c, g, or t
  misc_feature (112)..(112): n is a, c, g, or t
  misc_feature (150)..(150): n is a, c, g, or t
ggttctccttcaggctaacagagaccctgatgctggaattgatgaagctcaagttgaacaagatgctcaggctttatttnaggctggagaacttaaatgggggacagatgangaaaagtttatcaccatctttggaacacgaagtgtgcntcatttgagaaaggtgttt

SEQ ID NO: 503413 - DNA, 315 bp, Homo sapiens
cactcaatctaaccctcccctggaatggggcaatacgcagcagtgacctcttccacacggagtcttgtgcaaaaactccagttttaccccattgtacacaagcttgtaagtatagacagaagccccctgccacagatcgggggtttagtatcaggtccttggacacaccctccagcatataccagtcttcaccagtgttggaaaacctgcacacagccacactaaaagctgcctttttctgtaccatgctggacaaggtccagtgttgttcccttgaaatgggattcatcactcggctcacagaggcccactgcc

SEQ ID NO: 503414 - DNA, 422 bp, Homo sapiens
  misc_feature (284)..(284): n is a, c, g, or t
  misc_feature (301)..(302): n is a, c, g, or t
  misc_feature (343)..(344): n is a, c, g, or t
  misc_feature (346)..(346): n is a, c, g, or t
  misc_feature (360)..(360): n is a, c, g, or t
  misc_feature (376)..(376): n is a, c, g, or t
  misc_feature (412)..(412): n is a, c, g, or t
acgttttacagatcaggaagaagaacactcaaattgagtctcactcgtctcctgatgtgcaaaacagtttattagaagataagacttaccctgattctgaagagagaacttctattgatatagcatgctctgagggagagaacagcaattcaactgatcaagatttatttggtgggtgtcagcttaatcagcgccactcaaatatgagccatcgaaaatagtcattttaggtgcccgactcatacgatatcgtcaaagccacctattccctctccaaaaaaggnagggtcaggtaatcaanncttactccgggaccccacttactagaaagcttcttctagtnnanaattctgcagattntttaaccccgggccgnccctcggacccccactccacctcgtcctcaagccanaccctttggt

SEQ ID NO: 503415 - DNA, 498 bp, Homo sapiens
gacatactcaccattaatataacagtcatcaccatcacaatcattaccactaacaccaccaccataatcatcatcatcaccacaaccatcatcatcattatcctaacaataaagatggcagaacaaatgaatctcatttgttaatgccccacatggtagcactgtgctgagggcccttatctgctacatctcatcactcagccttatgttgcttccctcagacctttaaggatttctaagcaaaatgggataaccttattcctggaagaattaattgcttcttgagtcaataaactatattgagggactcagtatgtgggtgggcatccatcagagagcaaaaccaggtgtggttcctgccctcgtggagcttacagtccagtggggagacagatattactcattacataccgaatggacacttacagatagaggtaagtagcttgatagaaagttccatggggttggccaggtgtggtggctcatgcctgtaatccc

SEQ ID NO: 503416 - DNA, 237 bp, Homo sapiens
  misc_feature (23)..(23): n is a, c, g, or t
  misc_feature (37)..(37): n is a, c, g, or t
  misc_feature (51)..(51): n is a, c, g, or t
  misc_feature (203)..(203): n is a, c, g, or t
  misc_feature (206)..(207): n is a, c, g, or t
aattcgcggccgcgtcgacgtcnacgcggcgggttgncagatgccgcgcgncaggttgtagcggttgaaatcgatccgccattggcgcagcagctaccgcatactatcgccaaattccgccccgataaggcacaaaacgttaatgtggtgcttatggacgctctcaaggtgactgagcttccccacacgccggatgcgctgtnganncggccgcgaatttagtagtagtagtcgacc

SEQ ID NO: 503417 - DNA, 381 bp, Homo sapiens
tacttttgcgcacaggacagatagaaataaacgctgtcagcagtcactgtaaagaactttccaatcatcagtttagagcaggagtgcaagtgatgttgcatacgattcctcacattatttccacacccatgagaggcattgctaatcagtcgtgccagcgatacccgcctcggcctatatacagcctcaaaattattttccacacagtactctggtcagccattaccaatgaaccaggagctggcccttcagataaaatctctctgctcttcctgatttgtggctttgctgaatgttgtccttagcatcatggtcacacacttctacagtctgcatctcaggggagaagcctggaactgcatttcccagaatccctttccc

SEQ ID NO: 503418 - DNA, 205 bp, Homo sapiens
gtgggcagggggtgggggtggttggccaacaactactttgttgagtgtgttgagctgactgcattggcaagaaagagcccagtaaggggttgatagtaaggccctcacttgcttgcttaccccactacactgtactacttggaaatgaggaggctttaggaggtcctagaggcaggcagcagactaggtcttcctgccttaccag

SEQ ID NO: 503419 - DNA, 546 bp, Homo sapiens
aattattccacgttgtattcatagatcataatgtcactttttaccctataaatatgtaaaagagtccgggtgcagtggctcacagctgtaatccttggcctcccaaactgctggaatgacaggcgtgagccactgtgcctggccttcattaaataaatttaaagaaatagatgagtgttaccaattcaagcaatgaagtatttggagggcaatttggtgtttctgtcaaaattgttttggtatgtgtccagcatttacacagcaaatgatttatctttccctgtggatatactcaccccactgttcaaggatacatgtccaaagatgcattgcttatgaagcaaagacacaaacctagaaagagctgagatgtccctcaatggacagctgcttcacttaagtgtaatccatctacgcggcggaatgcaaggtaccatggttgagaaaaagaaagctggctggatttgctgacctagaaagagatctgcaatataccgttaagtaaaaacaacagtagaataatatgatcccattgtgaaaaaaaaa

SEQ ID NO: 503420 - DNA, 411 bp, Homo sapiens
  misc_feature (17)..(17): n is a, c, g, or t
  misc_feature (379)..(379): n is a, c, g, or t
gatctcaagtgaaccancagcctcagcctcccaaagtgctgggattacaggcgtgagccacgcgcgcacggctatcccttccaatatttccgaggccagctgcccagagaaggagggctgggtggagaggaccgtgccagcagcagtaggcctgggccaggagacaggcacgcacctccgcggtctctggcgagtctatgtccacacagcggcaggacctccacccccagccacctgcagcagccccacatctccaccgggtcaccctgctgacatcaagagtgcctcccgcaatgtcccaacccatgagggcttcttgggagctgaaccaggggcaccggccacttctggaggggggctgctcgtgacttccgacctnttgtcttcgtagttggcatgagaagatggatt

SEQ ID NO: 503421 - DNA, 166 bp, Homo sapiens
tctagaggatccctaaagacatgactttaaagaataatttctaattagtacatagccaaagtgtaagggttactaagtctacccccaaaaagaatccgttgatctaccaggtaaaaatcttatctgtattgtacaaaaactcaatgcattttaatacagttttgat

SEQ ID NO: 503422 - DNA, 333 bp, Homo sapiens
  misc_feature (1)..(1): n is a, c, g, or t
naataccgcatctcaatttggaatccattaattcatcaggttgtgcccctttccacacagcttccatatctagagtgtttggtgaaccaaaaattgtctgtcccataaccttgtgttcactctttccattcggttcatagtcaaaggcctgtaccatttctgaaccagtcacagttgaccttgggccaataattccactgttgctatccgatggatttcgcaatttaagatttgtagtgtctacatctgtaaaggggcctttgaatttgaggtctgtgcgcggatcgaggcacagtatgtgctcgtgcttcgacatggcccctgaggcgcacg

SEQ ID NO: 503423 - DNA, 824 bp, Homo sapiens
cagatcatgaggtcaagagatcaagaccattcctggccaacatggtgaaaccctgtctctactaaaaatacaaaaattagctgggtgtggaggcacgcgcctgtagtcccagctacttgggaggctgaggcaggagaattgctggaacccaagaggcagaggttgcagtgagccaagattgtgccactgcactccagcatgggtgacaaagcgagactccctctcaaaaaaaaaaaaaaagatttaggctttaggggccaaatatgctcttagggcttatgccttcatctttttcaccaatccttaacatggtaaaaaccattcttagctcaatgagttcttcaaaaccgggtttgggccaatccctgggtttattattaaacgggggtccaccctaaaaggttaaccaagcagataacatgaaataataggccaggtgcgggctcatgcttgtaatcccagtacttgtgacaggctgagatgggtggactcatgaggccggagtcgagatcagactggcaaaatagcgaaactcccgtcttccattaaaattcaaaaaattaccggtgggggggcggccctgtattcccaagtatccggcgggccgaggcaggaaatcgctgacccggagtggagggtgcatgaccgagattgagcatggactcagctggtgacagagggaaaccggtccaaaaaaaaaaaaaaattgggcgcgccgggccaaaattttaaatcgtgccgcggccaagtgagagtgacatgtccagacggtcagagggttcccaaaacgcggcggtggaccaggggggtggtcaggcagagga

SEQ ID NO: 503424 - DNA, 808 bp, Homo sapiens
  misc_feature (31)..(31): n is a, c, g, or t
  misc_feature (271)..(271): n is a, c, g, or t
  misc_feature (301)..(301): n is a, c, g, or t
  misc_feature (316)..(316): n is a, c, g, or t
  misc_feature (345)..(345): n is a, c, g, or t
  misc_feature (359)..(359): n is a, c, g, or t
  misc_feature (387)..(387): n is a, c, g, or t
  misc_feature (414)..(414): n is a, c, g, or t
  misc_feature (419)..(419): n is a, c, g, or t
  misc_feature (421)..(421): n is a, c, g, or t
  misc_feature (430)..(430): n is a, c, g, or t
  misc_feature (432)..(432): n is a, c, g, or t
  misc_feature (440)..(440): n is a, c, g, or t
  misc_feature (444)..(444): n is a, c, g, or t
  misc_feature (455)..(455): n is a, c, g, or t
  misc_feature (457)..(457): n is a, c, g, or t
  misc_feature (462)..(462): n is a, c, g, or t
  misc_feature (467)..(467): n is a, c, g, or t
  misc_feature (473)..(473): n is a, c, g, or t
  misc_feature (481)..(481): n is a, c, g, or t
  misc_feature (485)..(485): n is a, c, g, or t
  misc_feature (491)..(492): n is a, c, g, or t
  misc_feature (501)..(501): n is a, c, g, or t
  misc_feature (503)..(503): n is a, c, g, or t
  misc_feature (517)..(517): n is a, c, g, or t
  misc_feature (546)..(546): n is a, c, g, or t
  misc_feature (797)..(797): n is a, c, g, or t
aaacaatcccgacccggagtggacaggtgangaggggaggacttgcctcgccgaggccgctgcgaggagcgtgcccaagggcgaaggtccagggaacccggctcccgcgcaccgaagacggccgccatgccggcccgttgtgtggccgcccactgcggcaacaccaccaagtctgggaagtcgctgttccgctttcccaaggaccgggccgtgcggctgctctgggaccgcttcgtgcggggttgccgcgccgactggtacggaggcaatnaccgctcggtcatctgctctgaccactttnccccaccctgttttnacgtctcttcggttatccagaagaacctncgcttctcccagcncctgaggctggtggcaggcgccgtgccnaccctccaccgggtgcccgccccggcncctancncgggacagnanggagaccnaccnggccgcctggncncgccncgcgncctccncgcaaccnggcnttctgnngctgccccngntccagtctcctctncacgccccccaactgggaagcacgctgcngcttcacaggtaaagagagaccaccgaagttggtgtaaggacccctggactctggctgggctcctccacttagtgtcaccttgggaaaggcacctcatctcgaaagttcctgttttctaatctgcaaagttaggggtgtgctttagaggtgatctccaaggtcccacttatcattaacactttggaattaagtgacccagttaattccttctaactgctcctcccccaaaactcacacacacacacacacnaacacacccac

SEQ ID NO: 503425 - DNA, 115 bp, Homo sapiens
tcctctacgcagtgtgctgactgccagcacgctcatggagccatctacttgtggagatcagtgtccagagcaggtgtcggtggcatctacggggtttgaacaggaagcggggccg

SEQ ID NO: 503426 - DNA, 326 bp, Homo sapiens
gcgtcgacctttaaagaccctgtctccaaggctgtgtgcagtggcttatgcttgtagttccagcgctttgggttgccaagttgggaggattgcctgaggtaggagtttgagaccagcctggccaacatggcgaaaccctttctctacaaaactctacaaaaaaaaagtacaaaaattggcagagcatggtggcttgcctgtagtcccagctactcgggaggctgaagtgagaggattgcttgagcctgggaggttgaggatgcagtgagctgagatctcaccactgcactccgtccagcctgggtgacagagtgagaccctggtct

SEQ ID NO: 503427 - DNA, 164 bp, Homo sapiens
cgtggggactccaggccgtatcctagaccctggctcgcaataagagcctcaacctcaaacacattaaacactttatttatggctgcatgtgatacgatgctatgaacagctcgacatgcgtcgggatgtccaggaactaaatcgcatgaacccccacgagcagg

SEQ ID NO: 503428 - DNA, 951 bp, Homo sapiens
tcttgtatattgctctggggactctcgccggggaagatggggctgatttcccacctagagaggttgatggcagaaggaaaatggggaggcactggggttgtggagggcatgggtatggctgaggagggtgctgggaacggcaaggcggtctgggggatggggaggggcaaaggtgagagatcaccttccctatcctccaccttcccgcaggaagacgaagccaggtgccaggctggggtcgggacacccatgttctgggcggcttgaccccaaatcccagaccccggaagctccaggctcgggatgtgtcctgagcacctgtcccggccgctcctctccaggctgtcaggcagctcgccggagcggcttcctcaatctaggggcagatagccccagggcaggcctaggcgcagcccgctgcattgccgtttgccccagaggtggccccgtccacctcttgtctgatgctctacccggatctctctgcccctccttattcctcacaggtgccatgagtctgcagacgatcttcggggtctcagcctgatgctgccatgaacattcgtgggttaacgggggaggggctctaggaaggaacgggggggaaggggaccaggctaggtgcgctgggagaggaaccccttttctcggtgctaggacacaagcccttcccttcgtcccggggagctgggagcctggttgttcccgaatccagttacgggacaaagcggcgagcaacgatgggtgggtggccggtcgtcagcggaccacggtgggggagacggcgagttgggtgccaaacagcctgctgggtcaaaggggctcaccgccatcaacacaaacacacggatgaacgcaccgggaggacaccctagcctggccactgcaggaggtcctcgggaccgccaccagacctgcgaccgagaggggaacgtgacgcgccgtacccag

SEQ ID NO: 503429 - DNA, 104 bp, Homo sapiens
acacaggcacaccagatgtaccatgcttctgaggtcttagatgtatcactacacaagtgctatacagttagatcctgactctgcaggaacgtgactgaatggat

SEQ ID NO: 503430 - DNA, 363 bp, Homo sapiens
ctactactactaaattcgcgacacactcgacagcagaatggcatgaacccaggaggtgcacctcgcagcgagccgagatcttgccactgcactccagcctcagcctcccgagtacctgcgattacaggcacccgccaccacgcccagccaatcttttgtatttttagtagagacggggtttcacagtgttggccaggatggtcttgaactcctgacctcatgatccacctgcctcagcctccaaaagggctaggactacaggcgtgagacaccgcgcccggccccaagctttctttaaacagggagaatatgcacataaaaattcaaaaggcctaggctgggcaagttggctcatgcgtcgac

SEQ ID NO: 503431 - DNA, 398 bp, Homo sapiens
ttacaggttcccgacgctctctctgtggggcgttctttcccatggaatagtgtggttattggaagtttcctctttttatgaacgaacagcgatggatgtgctctctggggtatcctcctacccagctgactgttgtaagtccttgtggtgctcagggaggatgggtgacactcgctgttgcttcagcttcatcttgagcccacacagcatctccactagccaggtctcctcaggctcaggggcgagctccttctccggctcctcctcagattcatctgaccactccctcttccttttccagcccagggacctacatcgggggctgggatctaccccaggggctgagtaaagaaaccaggccaccgtgtaatgcttctgcatctgatcaccttagaccc

SEQ ID NO: 503432 - DNA, 152 bp, Homo sapiens
aatcatgcaactggactgatcagacaaagaggggcgtttggtattgggttatggcaggcggttttatattgaatattgtcgtgattaaattaatgcgtccctaagatagaggtgtcctttaaaaggtgttgggatcagtccgttcgcatgtt

SEQ ID NO: 503433 - DNA, 181 bp, Homo sapiens
  misc_feature (17)..(17): n is a, c, g, or t
  misc_feature (89)..(89): n is a, c, g, or t
tctagaggatcccgatnatcgcccaacacacttctcaacacaacttcctaaggaatatatgatcatctcttagtcacttaggaacaacncatggagtcatttggattcctccttcttgccaatccaagtagttgttaaaacctattgggattcttccactgcaatgtgttggggataacat

SEQ ID NO: 503434 - DNA, 268 bp, Homo sapiens
gcggatcagtccattcctgctgacgatctgctgccaccatgtttgcctcgcgcctggttcatgcgctggggtcccgctgaacacggtgcgtgatgtgctgggtcccggctcagtcgcaatgtccctgcgctacgcgcatttggtgcccgaccaacggggagaagccgttggccaaactcaacgagaagccggtccctgcgcttacgatgcgcttacagtggagcggccttcacgctgccagatattatccccataacaccacacaatt

SEQ ID NO: 503435 - DNA, 266 bp, Homo sapiens
actctcgtgatctcagcgtctggcatcatccgggacatctcagagatctcatgcttggtgtagcggaggtcatcgccatgccggcagctgtctgctgcagttcctcatacttggtctgataccaggactcggcttctgtccggctgcggatggcaatctcctcatactggggcttgacctcagcgatgatgctatccaggtccaggttgcggatgttgtccatggcgaggaccactgaggtgtcagagacatgcgtctgcatctgg

SEQ ID NO: 503436 - DNA, 363 bp, Homo sapiens
gtcgacgaatggaatggaatggaatggaacggaatgtaatgtaatgtaatggaatggaaaaaacccgagtgcaggggaatggaatggaatggaatgcaatggaatggaatcatccggaatggaatggaatggaatgcaatggaatggaatggaatggaatcaacccgagtgcaatggaatggagtgaaatggaatggaatggaatggagacaaccagaatggattggaatataatggagtgtaagggaattgaatagaatcaatctgaatgtaatgaaatggaatggaacggaatggaatggaatggaatggaatggaatggaatgcaatggaatggaatcaacccgagtgcaatcgtcgacg

SEQ ID NO: 503437 - DNA, 1013 bp, Homo sapiens
  misc_feature (400)..(400): n is a, c, g, or t
gctggcgccataatcttcaccgtggtgcaacgacttaaacgcccaccaaggggcacaccaaggtggcgtacacctttgactctggtcccaatgccgtatcttcaccctggacgacactgtggcattgagttatgtgggcctgcatgtgatgtcaaggattgtcccgcccgatggttcgaactgcgtagacagcagttgactgtggaaggcggctcgcagggtagacggccaggcccccctctcttcacgctcgacgcttcactagcttgcagcttaggccactaggacggccagacctcccacggctggggggtacaagatactatcattcgtacactcaaggttggggggcatcgacctcatacagtccctcgggattgagccccttgtttgtcgccanccggtcgctgcggttctcgtgagctggcgctgttgccgaaagccaagcgttgcctttgacgtggtgctcgagtcagtggaaccggcatttgcgctgcgtctgtgacgtacaccgggggcttgagcacatccgccctggtgagcctccgagggaatgccgggagattgctgcggctgggggcccttgggcccggagaaacatctcgttggaggaccatgtgttgggaggtcgttgttagagtttatgcaaggcccctgtggggcccacaattgcgagtccaggacctataggcgtttgctgggcgtgtccagttgggcaagcgaggacgattcacattgcaggaatcccgtcgcaaggtcgtcaagcgtccgaaaggtccccccagcaccgagcctagcgttcaagggtgcgccgctcaatgcgtggaaccatcctaccgtattgcacagacgaattggggataagcgtaacggcgggggtaatgaatagaactgagcggtaacccatacggagcaaaggcaccgggcgttcaagggtgtgactgacagacaaaacttgttccgatatatcctcagttctccttacgaaagaaacttccttgacgaagattggt

SEQ ID NO: 503438 - DNA, 179 bp, Homo sapiens
ttagacaatgctccaactgtagtttcgcaacatattgccgaagctattcaatatagaagtttagatcgtgatggttggttggggtagaacctaaatactgtaaacgcatagtaaacccgacaggtttttaaaacctgtcgggtttgttggttggtgaaatttgtggttaaatatttact

SEQ ID NO: 503439 - DNA, 214 bp, Homo sapiens
aaactctgcgcggacacgcaagagagactgtccacagttccattattgagccctccacacccctgcagagccacgtgagagagactgtccacagattcctctattattcagccctccacacccctgcagagccacgcaagagagactgtccacagttcctctattattgagccctccacacccctgcagagccacgcgagagagactgtgcaca

SEQ ID NO: 503440 - DNA, 291 bp, Homo sapiens
aacggaagccgccacgcgcttgagcttctgagagcgggctcgtcaggaagcctcccgaggagagctcctgtttcgagaggccctgcttcaagtggtacaccagcctctggtcagagtgcaccaagacctgcggtgtgggcgcgaggatgcgagacgtcaagtgctaccaggggaccgacatcgtccgtggttgcgatccgttggtgaagcccgttggcagacaggcctgtgatctgcagccctgccccacggagcccccagatgtaagctgccaggaccagccaggcacca

SEQ ID NO: 503441 - DNA, 678 bp, Homo sapiens
tgctccttcgttgggtctcagccggaagtattttgtggggcgccgggtggtggggtccttgttgttgcgagtttgttgttggttgcccctgtgttgttcgcgcctcgttttttttactgcctgcgcgtcgattgggggtgggcgggtgtgtttctgtttgtgggtcgaccactgcggtggtcttatatagtatgtggtggcgtgcgcttctgtgcggcgtgttggatactccgctcctcgctcgttctgggattagatgctagattctaataataggatgactagatgctcggttgttaccccagagcacatggtgagggtgaatgctgctctcataggccccacacttcggtgagtataagggaacgtccgcccccctctacacgcttggtttttggcggactgttttgtgtgctgctctgcaatgcgtgcgattaaggtggcgctcattagatgagttgctgagcaataatccgcttgtctgtttgtttatcagaatatttgttaccgtggttgtttcccgcgtcagttacgcccataatattgattccaccaatagtggtctttaaaaagctaaaaaacaaaaaactaatttttttataaaaaaaatgtattgattttacatttcgttttcatccccctagtggtgtatccctggtgccaacaaatcatatacag

SEQ ID NO: 503442 - DNA, 1381 bp, Homo sapiens
  misc_feature (428)..(428): n is a, c, g, or t
cagagagacgcaacccatctccataacagcattcaataaatacctccccggttgtgtctatgtaaaatgctctggacgacaggaagaaacgtggtaaatccctgacatctttcccctgtgcctttccttcttccctacctcccctttttacatttacgactttacacgaagaacttaagatcaattcttcttatcctctgtgatatcttatagcaagacactcagctctgttggatgattgattctaagttgtgtagagacacaatgccagagatatacacattgctgctaccagaaggacgggtccctcctaagatgttgtagacttaagcttgtgttgaacaacgcgacagattgcccccggatctttgctctttgcgtccagggtgtactgtgcggaattcaagatcgcacgttggctccccacnggagtgagtcctactgcttacccagggtagctagctaacaattcgatgtacattggattgcaggcccttaaaatcgctgcaattgatggaccttactaatttttgagtgcatttccatgctcgtacattaacaaacactcggtccaagcacatctggttcgtacatagcgacataccatacagaaagacataaaacaacccattcaaagacctatgagaattaaccacattgagagattgattgattggccaacactaccaacttgagtcacagggattgccagaaggccccacccttcccaccaagctagcagcgttgctcctcagctggttccccgccttttcttccggacccaacttgcgccggcctgctcaaaaccccgcttaagtccgagtccgttctcttcccttggctggtgcctcgcgggaagcgacacggccgtggctccacaccgggctacttgggaaacccccttgcgaccttcaatctttgtccacacgccttcggaaagaggagaagccccatcaccccaggcagctactgcgagccccaaccaaccaatagcgcccatacatctcctggacagaccaccccgcgctcgaacaccatagataccatactacccatgggaatacggcgagtcccccaggttcatgtgttgacatttctctggggaagccgccacagcgtaacttgaggccccacgtgaccacatgtatcatattagcgggaatatccttccaaaaccgcaacgtgacccacaagccaaccccttgttaacacgccggccctatcatacattagagtttggcgtcgcgaacacattccaaatgtaagaagtggagacatcgttggtatgtgacgataacaatacccacattatatacacaggcattaaccatggacgctcgatgtatagtattagcacatggaccacaaacaaagatcaccc

SEQ ID NO: 503443 - DNA, 148 bp, Homo sapiens
  misc_feature (130)..(130): n is a, c, g, or t
gctgcgcggtgactctagtaggatcccggcaggtaggtaccgtcaaagtacaaagttgtcgcatctacgttcagcgccagccgcggtcgcctagtgggtacactggctcatcctaggactactcgtcggncttcttctccgccactaa

SEQ ID NO: 503444 - DNA, 1184 bp, Homo sapiens
  misc_feature (5)..(5): n is a, c, g, or t
  misc_feature (12)..(13): n is a, c, g, or t
  misc_feature (433)..(433): n is a, c, g, or t
  misc_feature (546)..(546): n is a, c, g, or t
  misc_feature (908)..(908): n is a, c, g, or t
  misc_feature (910)..(910): n is a, c, g, or t
  misc_feature (920)..(921): n is a, c, g, or t
  misc_feature (938)..(938): n is a, c, g, or t
tatgntggcggnnatggcgacggctcgagtgcggatggggccgcggtgcgcccaggcgctctggcgcatgccgtggctgccggtgtttttgtcgttggcggcggcggcggcggcggcagcggcggagcagcaggtcccgctggtgctgtggtcgagtgaccgggacttgtgggctcctgcggccgacactcatgaaggccacatcaccagcgacttgcagctctctacctacttagatcccgccctggagctgggtcccaggaatgtgctgctgttcctgcaggacaagctgagcattgaggatttcacagcatatggcggtgtgtttggaaacaagcaggacagcgccttttctaacctagagaatgccctggacctggccccctcctcactggtgcttcctgccgtcgactggtatgcagtcagcactctnaccaattacctgcaggagaagctcggggccagccccttgcatgtggacctggccaccctgcgggagctgaagctcaatgccagcctccctgctctgctgctcattcgcctgtncctacacagccagctctggtctgatggcacccagggaagtcctcacaggcaacgatgaggtcatcgggcaggtcctgagcacactcaagtccgaagatgtcccatacacagcggccctcacagcggtccgcccttccagggtggcccgtgatgtagccgtggtggccggagggctaggtcgccagctgctacaaaaacagccagtatcacctgtgatccatcctcctgtgagttacaatgacaccgctccccggatcctgttctgggcccaaaacttctctgtggcgtacaaggaccagtgggaggacctgactcccctcacctttggggtgcaggaactcaccctgactggctccttctgnantgactccttnnccaggcctcactgaccnatgacgacccggggtcccaggagcttcagttccgcctgacaaacgcacaacaatggctgcccggcgaataacaggacgcccagacacagaggggcggacaatacagtacagaaacggcacaacaaccgaccagcaggccaacaagaacaagcacaagccgacacacccggaaacaaacaacacacaacgagaaacaaagaaaccaaggcaccaaccactcaccacacacacgtggcacagccagcg

SEQ ID NO: 503445 - DNA, 159 bp, Homo sapiens
atgttatgtgaatatttattggtggatgaagctgatagtgattaatgttgagccagtaatgacgtgaagtctgtggatgcctgtggctacaatatatgttgagctgtagatgctgttggaaatggtgaatggagactcgaagcactctgaggcttgtag

SEQ ID NO: 503446 - DNA, 136 bp, Homo sapiens
  misc_feature (28)..(28): n is a, c, g, or t
  misc_feature (84)..(84): n is a, c, g, or t
ggtctcatatcattcccaggctgcagtnagtggcacaatcatgctcactgcagcctcaacctcccagctcaaggctgcagcgancagtgattgtgtcactgcattctaccctgggcaccaatgtagaccccgtctc

SEQ ID NO: 503447 - DNA, 1331 bp, Homo sapiens
gcttcagtccagtgcccggcttcctccaggtctcccgtgcaactggctgcgtgcctcgcccacgttatgtgcgccctgaggagaactgctgtgggacctgaactcttgctgcagtggtttttgatgctgcctgcttcctggctgtgtgctgcacactgctgctccttcccctgtgcagtgtgtggctgtgctgtggtgcgatgctgagagagggccctgcagtgtggtgtctgctggtgatgtcccagtggtgcatgactggggattggtgtctcccgtagcttgaaacccaccagtgcagcatcctgtgccacatgcttatgatgggcaaatgttaaagaagactcatcatggattactgatgcttgctagctggggatactttttgcaagacagtcctcagtgcaggctacagtcacactacttccaagaagacaacagccactcatcttcccactggtaccacagtgccttggtcacattgggatgccgacctctaccttgcatcaatgggccatctgagaaccctgtgcagccttacattaaacagactgtgctgtatttgcccaggaagccatcgtgtcgcttggtcggggtcctgcagaggctggcttgctgcctgggagcaacaaagctgggctcctgagtgtctaccgtggctttacctgtcctggcaaccaggagactgtgccagctgttcaccaccgagctaggccggattgggatcagatgcgacagcggaaacgctcaatcaatggaccagaaaatgtttccctatggagatgcacttggaaactggcaatgcctgaacctcacactgcaaggactcacaccatgactccaaagggatttgtgcgaatccagtccatctcccgggcacactttcaacatgcgcacaagcgtgggcatacacactttacacttcggacagtgaaagttattgctcaactattatacctcacaaatcgtgtgaaatcaagctgcacctataactacactcatcagttgcacaacagccgattacgagtgcccccaatcttgccaaccacgaaggggctctcacggacagatcgattaaacagggagcgtaaagttcgtacgcccagaactaacacacttgcttcgcgcaccaagtcagtgtacctaggcaactcgtcccacgtgtgtgatccgctgttcatagctagcctcgagcgactagtcagagcacgagtccaaaacgacaggtgtaagtcaaagcgctaacactcgagtaaccgagcctgcaaccagaacacgtagttccgaggtagtgggactcacttcatcgaagctagacaagctccgcggct

SEQ ID NO: 503448 - DNA, 380 bp, Homo sapiens
aagaatgccactatagtagttatctattgtgtgccaatctcattgctaggcattggggatgcaaagataaccatctttattgtgtcttgggtagcagaagaaaatatgtgtaaaatcaatttataatttgtaactgccacccatatataggctatatctgctgagtgatcattgattactctatcctaagagatacactgggggcccaacatttattatcattattgacctccacagagatctatgtgtagattacaagcctacagttctatacagataggaatgactatgggctactgaatggtgattacttctgtggggccggactacaacccaaggaaataaaatgatgttatcattatggggccccaagaggaatg

SEQ ID NO: 503449 - DNA, 218 bp, Homo sapiens
  misc_feature (43)..(43): n is a, c, g, or t
  misc_feature (64)..(65): n is a, c, g, or t
  misc_feature (69)..(69): n is a, c, g, or t
  misc_feature (77)..(77): n is a, c, g, or t
gttataagaataaatattgttcttctaagatttttaataactntcttcagttattacatttttnnctantttttttntaaatagagatgaggttttgctatgttgcccaggctggtctcctggactcaagcaatctcccacttcaggctaccaaagtgctgggatttacaggcatgagcacctctcccagtctcagttattattttaataaatgagac

SEQ ID NO: 503450 - DNA, 197 bp, Homo sapiens
tcgttagaggatccctgttgctaggtggagtgcagtatttgccaatcacgcatcttaaactcctgggctcaaacaatcctcgtgctcagcctcctgagcagctgagactacaggcgcgtgcaaccaagcccagctaacctttaaatcttttgcagagacagagtcttactgtgtcgcccaggctggtctcgaactcc

SEQ ID NO: 503451 - DNA, 916 bp, Homo sapiens
  misc_feature (155)..(155): n is a, c, g, or t
  misc_feature (175)..(175): n is a, c, g, or t
  misc_feature (181)..(181): n is a, c, g, or t
  misc_feature (194)..(194): n is a, c, g, or t
  misc_feature (205)..(205): n is a, c, g, or t
  misc_feature (217)..(217): n is a, c, g, or t
  misc_feature (231)..(231): n is a, c, g, or t
  misc_feature (233)..(233): n is a, c, g, or t
  misc_feature (247)..(248): n is a, c, g, or t
  misc_feature (251)..(251): n is a, c, g, or t
  misc_feature (254)..(255): n is a, c, g, or t
  misc_feature (257)..(258): n is a, c, g, or t
  misc_feature (266)..(266): n is a, c, g, or t
  misc_feature (280)..(280): n is a, c, g, or t
  misc_feature (282)..(282): n is a, c, g, or t
  misc_feature (291)..(291): n is a, c, g, or t
  misc_feature (295)..(295): n is a, c, g, or t
  misc_feature (331)..(331): n is a, c, g, or t
  misc_feature (361)..(361): n is a, c, g, or t
  misc_feature (378)..(378): n is a, c, g, or t
  misc_feature (387)..(387): n is a, c, g, or t
  misc_feature (390)..(390): n is a, c, g, or t
  misc_feature (399)..(399): n is a, c, g, or t
  misc_feature (405)..(405): n is a, c, g, or t
  misc_feature (410)..(410): n is a, c, g, or t
  misc_feature (415)..(415): n is a, c, g, or t
  misc_feature (417)..(417): n is a, c, g, or t
  misc_feature (476)..(476): n is a, c, g, or t
  misc_feature (597)..(597): n is a, c, g, or t
  misc_feature (627)..(627): n is a, c, g, or t
  misc_feature (632)..(632): n is a, c, g, or t
  misc_feature (671)..(671): n is a, c, g, or t
  misc_feature (696)..(696): n is a, c, g, or t
  misc_feature (714)..(714): n is a, c, g, or t
  misc_feature (734)..(735): n is a, c, g, or t
  misc_feature (743)..(743): n is a, c, g, or t
  misc_feature (762)..(762): n is a, c, g, or t
  misc_feature (819)..(819): n is a, c, g, or t
  misc_feature (824)..(824): n is a, c, g, or t
  misc_feature (836)..(836): n is a, c, g, or t
  misc_feature (843)..(843): n is a, c, g, or t
  misc_feature (903)..(903): n is a, c, g, or t
gaattgatccgtttagaagtttacaatgaagtttcttctaatactgctcctgcaggccactgcttctggagctcttcccctgaacagctctacaagcctggaaaaaaataatgtgctatttggtgaaagatacttagaaaaattttatggccttnagataaacaaacttccagtnacaaanatgaaatatagtngaaacttaatnaaggaaaaaatncaagaaatgcagcncntcattgggtctganngtnccnnanngccacttnacccctcacccctnanagatgatgnaagncccatacgcatgatgagagtccccgctgatccatcntttcagggaaatgccaggggggcccgtatngaggaaacattatatcncctaccgantcnataattacncacctnacatnaaccntnaggatgttgactacgcaatccggaaagctttccaagtatggagtaatgttacccccttnaaattcagcaagattaacacaggcatggctgacattttggtggtttttgcccgtggagctcatggagacttccatgcttttgatggcaaaggtggaatcctagcccatgcttttggacctngatctggcattggaggggatgcacatttcnatgangacgaattctggactacacattcaggaggcacaaacttnttcctcactgctgttcacgagattngccattccttaggtcttngccattctagtgatccaaannccgtaatnttccccacctacaaatatnttgacatcaacacattttcgcctctctgctgatgacatacgtggcattcagtccctntattnagaccaaaaganaacaacncttgccaaatcctgacaattcagaacagctctctgtgacccaatttgagttttgatgctntactacgtgggaa

SEQ ID NO: 503452 - DNA, 398 bp, Homo sapiens
ggatcgagctcggtaccgggaagaggagagtagtagtagctgtagagatgtaaatcaaggagattttcaaagcacaggacaaaccaagcaacccctaggggttgcttggttacaaaatcaacatacaaaaatcagtagcatttatatgtgccaacagtgaacaatctgaaaaatcaagaaagtaatcccatttacaatagctgcaaaaaatataaaatacctaggaatcaatctaaccaaagaaataaaagttctgtacaaggaaataaaattctgatgaaagaaacagaagaggacaccaaaaagtggaaatatattccatgctcatggattggaagaataatattgttaaaatgacaatactactacaaactacttacagattcaatgcaacccct

SEQ ID NO: 503453 - DNA, 1093 bp, Homo sapiens
cttgggcctgggctcacgaggataggggctgcagttctccaaggattccgtctgctcccagtacccccggaatgtcgtattgaagccctgttcctggtacgctgacgtcggctttcatgggatccctcgccggacgccgcggaggtgacagatgcctgggaagccgtcgccccgccccgtcccgcgcgcgctttgcgggccctggggcgctgatgacccgcgtagagcaaagcgcaaggctcccagtcgtccccgttgtgctccctcgtgtggcatgtggtcctgggcaaagttgtcattgcgaggggttcatggaagccccggcctgtgatcgtgagctggaaacccctccatggagttttccccctaaagcccatggacagtccctagatcttcggtgacgcttcaacaatgcctctgctggagtggcaccatgaaatgtgagacccctgccacagaatgccttggcaaggcattgagcatggagagtcccacactttaaacgagacgataagcccatttgcccgagatcccgtgagggcggtatagacagttccctgtacacctgtgcatcattcccttccgatgatgcgctggcccatggggggacacaatggaccccttgatgttgcagtgacccatgtacatccaagtgacagtagactcgggactgggattggagagccagccaggtcatatcacccaatattatctaacccccaatgaaccaccctcggcttgggctggtcttctccattgactgtgataggctactacatgtgacccccgttggtccattcgtagtgaaccttacatggtcataggccccacgaaaagacacgaaccaatgggctttggggccccaaaggcgggaaccattccatcggcggtcgtcaacggggtgccacggccatccacgtgccaggtgcccttatccatgccttggaacgcgtccctcagccccggtccgtgaggctaggacccggttgtagcaactgatatttgcggaacttggcctccgtgcgtagaccacctttagcccggcctaacactttacccatcccagataaacacagcccctatagttgcccct

SEQ ID NO: 503454 - DNA, 753 bp, Homo sapiens
ttgtagttcgaagtgccctcgagagcggctagatgtcttggctgtgcctgagagtgactagttgtcccagcgtgccctgcgcctcagccctgctgcgctctgctgcttctcgctctcgcctgcctgccctgctccgcttgacttgcgtcgctgcctttctgcttctgccctctacctctgatgtgatctgatgtgtgtgactcttgaccacatgcctgtgtgcttggtgaatgtgtgatgacatgatgtgctgtgctgtgctgtgctcatgggtgaaactgatgtgcttgcatgatgtgttgtgtatgtatgtgaatgattgtctgtgtgctgagtgacgatgcaacatgtgagcaaactatctgctgatgtgaccttgtgtctgtgaccaatgtataatgattgtgtgtgtgtgctgacatctgccaacatgtggtactatctggttccttgtgttgtgaatggcatctagctcagtgtgtgtctgtgtacttgatgcctttgtgttgacgaagatggttgattgccagtgattattgtgaattgaaagcatgtggaaaatcttcagatgaaatgaaacatgtgacaagttgaagaaatggtattgctttacccaccagcatttctgagtaaaatacacagtagtatagtcacttctcccctttgaagagcgaccaggattatattctcaagggaagggtgacttggtaaaagatttgaccttggggtccatgtggatggcttcatcgctaa

SEQ ID NO: 503455 - DNA, 348 bp, Homo sapiens
  misc_feature (16)..(16): n is a, c, g, or t
  misc_feature (43)..(43): n is a, c, g, or t
acaaatagtgagcatnaggtatagattattcctgaatgacaanaaagtcacctaattctctcttcaagaaaaatatgatttaaatccaaaaagctaatcaagataatagcctgaaataaaactctctatctctgatttcacttattaatataaatgcatattgtttcagtaacatcccagcaaatataatttagtgacatgaaaaatggaggctttatctaggaggtcactctaaagatgagtcaacaaaaagaaagcactgtaattttgcagtagattaaaagataaacggaaaccatttacatagataacattttaaattcatctctaatttttaaaaatcatttt

SEQ ID NO: 503456 - DNA, 338 bp, Homo sapiens
cggatatgtatcattgtcagatttagtgcttattttaagaatggaatcgtgggtatatctccctttatcagaatgtatcttaactgtgacctgtcactgtttacgaactagtgcgttgacagcaccgtgtcccattttttagaacccttgttagccagaccgaggtgtcctggtcaccgtttcaccatcatgctttgatgttcccctgtctttccctcttctgctctctagagcaaaggttaatttaaggacaaagatgaagtcactgtatactaatctgtcatagtttttacctgccttttctttttcagtgcagaatttaaaagtattgtataaag

SEQ ID NO: 503457 - DNA, 212 bp, Homo sapiens
cggacttgcatggctcgagtatcacagtgacatgaacaatatctccgatacgagtataagacatcaggtctccccttaaagtgctgccgtgtaggtcatcatgcgtggtgctgttcgtctgattactccttgttgagtggtgattagtcggttgttgatccgatatttggaggtggggattaatagagggggaaatagaatgatcaacaacc

SEQ ID NO: 503458 - DNA, 344 bp, Homo sapiens
tgagacagagtctcactctgtcacccaggctggagttcagtggcccaatctgagctcactgcaacctccgcctcctgggttcaggcaattctcctgcctcatccttccaagtagcagggattagaggcacctgccatcatgcctggctaattgttgtatttttagttaagacagggtttcaccgtgttgcccaggctgggctcaaactcctgacctcgagtgacctgcctgcctttgcctcccaaagggctgggattgcagccatgagccactgtgcccagcctacattcattcttgaatgatggttttcctcgtttcccttattttaaattgatgacttttgc

SEQ ID NO: 503459 - DNA, 728 bp, Homo sapiens
caagatagagaacccttagagatatcttggggttttttaccattccagagcttgtgagcataatcatattgctttatatctgatagtcctgaactcctaagttggcagctaccacccaggacccataaatggtgcgttctgcttcttgtaattcatctctgctaagtaaattataaggaagcaacggaaattagggaaaatattttatcttggatggtcttctataaaccagggactataattcttgtaccattattgtttcatctttgctgtcttctttgagccgtctaatgctgccacaccattatctccaggtatttgttttctataagaattgttttaaaagtattcttgttacccgagtagcttgtattatattctccaaacgtaagatgatttttaaaagcctgagtactgacctaagatggcattgtatgcactctgctctggagggaggggaggatagtccgtggaagtctgtaagactcttatttttttgtgcccatccaatatcaggtaaaaataattcgtgccattctgctgtttaaacaggaactattggcctccttggccctaaatggaagggccgatattttaagcttgattatttgtattgtaaattaatcccacctagttccttttaatttggttgaatgtctttttcttgttacaatgatgttttaaaaataaaaactggaagtttcttggccttaaaaaaaaacaaaaaa

SEQ ID NO: 503460 - DNA, 297 bp, Homo sapiens
accgctctcagctccaaagctttctgaggaaaatctgaccccaaggactgaggctctggcgaagctgggtataaactggtgcccactcgtgggcgctgatgctgtcccccagcccaaggaaagggccccctgccagctgtggctcctcgacccaaggccccgatacagtttgggccctctagctccatcaaggaaaacgcaggggccccttctggacctgtatggccagaagctgcctattggccacacacccccaactccaccagcgccaccactgcctctgccctgagaacccag

SEQ ID NO: 503461 - DNA, 335 bp, Homo sapiens
cattttttggttggagtgaagagtaattatatcttactttggacagggtttttgtacaggtggtaaagattttgtttttgacttcgttgatctgcccgccttggcctcccaaagtgctgggattaaaggcatgagctactgtgcctggcctggccaacatggtgaaacctcatttctactttaatacattaattaggtgggcatggtgatgtgtgccttgtagtcccagctacttgggaggctgaggcagaagaatcacttgaacccgggaagcagaggttgcagtgagccgagattgcaccattgcactccagcctggtgacagagcaagactc

SEQ ID NO: 503462 - DNA, 2237 bp, Homo sapiens
atcattcggccctcagactgggctgggcaggtctgagagttagggaaagtccgttcccactgccctcggggagagaagaaaggagggggcaagggagaagctgctggtcggactcacaatgaaaacgctccttcttttgctgctggtgctcctggagctgggagaggcccaaggatcccttcacagggtgcccctcaggaggcatccgtccctcaagaagaagctgcgggcacggagccagctctctgagttctggaaatcccataatttggacatgatccagttcaccgagtcctgctcaatggaccagagtgccaaggaacccctcatcaactacttggatatggaatacttcggcactatctccattggctccccaccacagaacttcactgtcatcttcgacactggctcctccaacctctgggtcccctctgtgtactgcactagcccagcctgcaagacgcacagcaggttccagccttcccagtccagcacatacagccagccaggtcaatctttctccattcagtatggaaccgggagcttgtccgggatcattggagccgaccaagtctctgtggaaggactaaccgtggttggccagcagtttggagaaagtgtcacagagccaggccagacctttgtggatgcagagtttgatggaattctgggcctgggatacccctccttggctgtgggaggagtgactccagtatttgacaacatgatggctcagaacctggtggacttgccgatgttttctgtctacatgagcagtaacccagaaggtggtgcggggagcgagctgatttttggaggctacgaccactcccatttctctgggagcctgaattgggtcccagtcaccaagcaagcttactggcagattgcactggataacatccaggtgggaggcactgttatgttctgctccgagggctgccaggccattgtggacacagggacttccctcatcactggcccttccgacaagattaagcagctgcaaaacgccattggggcagcccccgtggatggagaatatgctgtggagtgtgccaaccttaacgtcatgccggatgtcaccttcaccattaacggagtcccctataccctcagcccaactgcctacaccctactggacttcgtggatggaatgcagttctgcagcagtggctttcaaggacttgacatccaccctccagctgggcccctctggatcctgggggatgtcttcattcgacagttttactcagtctttgaccgtgggaataaccgtgtgggactggccccagcagtcccctaaggaggggccttgtgtctgtgcctgcctgtctgacagaccttgaatatgttaggctggggcattctttacacctacaaaaagttattttccagagaatgtagctgtttccagggttgcaacttgaattaagaccaaacagaacatgagaatacacacacacacacacatatacacacacacacacttcacacatacacaccactcccaccaccgtcatgatggaggaattacgttatacattcatattttgtattgatttttgattatgaaaatcaaaaattttcacatttgattatgaaaatctccaaacatatgcacaagcagagatcatggtataataaatccctttgcaactccactcagccctgacaacccatccacacacggccaggcctgtttatctacactgctgcccactcctctctccagctccacatgctgtacctggatcattctgaagcaaattccgagcattacatcattttgtccataaatatttctaacatccttaaatatacaatcggaattcaagcatctcccattgtcccacaaatgtttggctgtttttgtagttggattgtttgtattaggattcaagcaaggcccatatattgcatttatttgaaatgtctgtaagtctctttccatctacagagtttagcacatttgaacgttgctggttgaaatcccgaggtgtcatttgacatggttctctgaacttatctttcctataaaatggtagttagatctggaggtctgattttgtggcaaaaatacttcctaggtggtgctgggtacttcttgttgcatcctgtcaggaggcagataatgctggtgcctctctattggtaatgttaagactgctgggtgggtttggagttcttggctttaatcattcattacaaagttcagcattttaaaaaaaaaa

SEQ ID NO: 503463 - DNA, 325 bp, Homo sapiens
cttcagaaacctttctgtattctctttgaaaagagatttacttaggcacctgtagtcccagctgcttggaaggctgaggttggaagattgcttgagcccaggagtttgaggccagcctgggcaacatagtgaggccccatctctaaaaaagaaaaagaaaaaaaaaaaaaaaggatttactcccccattcttggggaactcccctttctgtcccagcactccttgtcttggctccaactgtcccagattggacacttatgcaaatgattgttgtcctccaacccagggtctgggtaaagggggggcaaaagcaggggtaccgagc

SEQ ID NO: 503464 - DNA, 2095 bp, Homo sapiens
atcattcggccctcagactgggctgggcaggtctgagagttagggaaagtccgttcccactgccctcggggagagaagaaaggagggggcaagggagaagctgctggtcggactcacaatgaaaacgctccttcttttgctgctggtgctcctggagctgggagaggcccaaggatcccttcacagggtgcccctcaggaggcatccgtccctcaagaagaagctgcgggcacggagccagctctctgagttctggaaatcccataatttggacatgatccagttcaccgagtcctgctcaatggaccagagtgccaaggaacccctcatcaactacttggatatggaatacttcggcactatctccattggctccccaccacagaacttcactgtcatcttcgacactggctcctccaacctctgggtcccctctgtgtactgcactagcccagcctgcaagacgcacagcaggttccagccttcccagtccagcacatacagccagccaggtcaatctttctccattcagtatggaaccgggagcttgtccgggatcattggagccgaccaagtctctgtggaaggactaaccgtggttggccagcagtttggagaaagtgtcacagagccaggccagacctttgtggatgcagagtttgatggaattctgggcctgggatacccctccttggctgtgggaggagtgactccagtatttgacaacatgatggctcagaacctggtggacttgccgatgttttctgtctacatgagcagtaacccagaaggtggtgcggggagcgagctgatttttggaggctacgaccactcccatttctctgggagcctgaattgggtcccagtcaccaagcaagcttactggcagattgcactggataatatgctgtggagtgtgccaaccttaacgtcatgccggatgtcaccttcaccattaacggagtcccctataccctcagcccaactgcctacaccctactggacttcgtggatggaatgcagttctgcagcagtggctttcaaggacttgacatccaccctccagctgggcccctctggatcctgggggatgtcttcattcgacagttttactcagtctttgaccgtgggaataaccgtgtgggactggccccagcagtcccctaaggaggggccttgtgtctgtgcctgcctgtctgacagaccttgaatatgttaggctggggcattctttacacctacaaaaagttattttccagagaatgtagctgtttccagggttgcaacttgaattaagaccaaacagaacatgagaatacacacacacacacacatatacacacacacacacttcacacatacacaccactcccaccaccgtcatgatggaggaattacgttatacattcatattttgtattgatttttgattatgaaaatcaaaaattttcacatttgattatgaaaatctccaaacatatgcacaagcagagatcatggtataataaatccctttgcaactccactcagccctgacaacccatccacacacggccaggcctgtttatctacactgctgcccactcctctctccagctccacatgctgtacctggatcattctgaagcaaattccgagcattacatcattttgtccataaatatttctaacatccttaaatatacaatcggaattcaagcatctcccattgtcccacaaatgtttggctgtttttgtagttggattgtttgtattaggattcaagcaaggcccatatattgcatttatttgaaatgtctgtaagtctctttccatctacagagtttagcacatttgaacgttgctggttgaaatcccgaggtgtcatttgacatggttctctgaacttatctttcctataaaatggtagttagatctggaggtctgattttgtggcaaaaatacttcctaggtggtgctgggtacttcttgttgcatcctgtcaggaggcagataatgctggtgcctctctattggtaatgttaagactgctgggtgggtttggagttcttggctttaatcattcattacaaagttcagcattttaaaaaaaaaa

SEQ ID NO: 503465 - DNA, 2062 bp, Homo sapiens
atcattcggccctcagactgggctgggcaggtctgagagttagggaaagtccgttcccactgccctcggggagagaagaaaggagggggcaagggagaagctgctggtcggactcacaatgaaaacgctccttcttttgctgctggtgctcctggagctgggagaggcccaaggatcccttcacagggtgcccctcaggaggcatccgtccctcaagaagaagctgcgggcacggagccagctctctgagttctggaaatcccataatttggacatgatccagttcaccgagtcctgctcaatggaccagagtgccaaggaacccctcatcaactacttggatatggaatacttcggcactatctccattggctccccaccacagaacttcactgtcatcttcgacactggctcctccaacctctgggtcccctctgtgtactgcactagcccagcctgcaagacgcacagcaggttccagccttcccagtccagcacatacagccagccaggtcaatctttctccattcagtatggaaccgggagcttgtccgggatcattggagccgaccaagtctctgtggaaggactaaccgtggttggccagcagtttggagaaagtgtcacagagccaggccagacctttgtggatgcagagtttgatggaattctgggcctgggatacccctccttggctgtgggaggagtgactccagtatttgacaacatgatggctcagaacctggtggacttgccgatgttttctgtctacatgagcagtaacccagaaggtggtgcggggagcgagctgatttttggaggctacgaccactcccatttctctgggagcctgaattgggtcccagtcaccaagcaagcttactggcagattgcactggataacatccaggtgggaggcactgttatgttctgctccgagggctgccaggccattgtggacacagggacttccctcatcactggcccttccgacaagattaagcagctgcaaaacgccattggggcagcccccgtggatggagaatatgctgtggagtgtgccaaccttaacgtcatgccggatgtcaccttcaccattaacggagtcccctataccctcagcccaactgcctacaccctactggacttcgtggatggaatgcagttctgcagcagtggctttcaaggacttgacatccaccctccagctgggcccctctggatcctgggggatgtcttcattcgacagttttactcagtctttgaccgtgggaataaccgtgtgggactggccccagcagtcccctaaggaggggccttgtgtctgtgcctgcctgtctgacagaccttgaatatgttaggctggggcattctttacacctacaaaaagttattttccagagaatgtagctgtttccagggttgcaacttgaattaagaccaaacagaacatgagaatacacacacacacacacatatacacacacacacacttcacacatacacaccactcccaccaccgtcatgatggaggaattacgttatacattcatattttgtattgatttttgattatgaaaatcaaaaattttcacatttgattatgaaaatctccaaacatatgcacaagcagagatcatggtataataaatccctttgcaactccactcagccctgacaacccatccacacacggccaggcctgtttatctacactgctgcccactcctctctccagctccacatgctgtacctggatcattctgaagcaaattccgagcattacatcattttgtccataaatatttctaacatccttaaatatacaatcggaattcaagcatctcccattgtcccacaaatgtttggctgtttttgtagttggattgtttgtattaggattcaagcaaggcccatatattgcatttatttgaaatgtctgtaagtctctttccatctacagagtttagcacatttgaacgttgctggttgaaatcccgaggtgtcatttgacatggttctctgaacttatctttcctataaaatggtagttagatctgga

SEQ ID NO: 503466 - DNA, 629 bp, Homo sapiens
tttctaaggatcccggctcgcgaccagatactgtgagaaaaacctttgattttcaaaggatcctgagagagccaggtgtccagaggctgtcggggtcctgtgactggctgagggtcctgtggagggtcctgtgcctgcctcatgccacatgcggaagcaggaaaggctgagcaccgtgtgagaacagggctggaagggggcattccttcccacggatggattccagggtcttctgtctgcccgggacacctgccctctccatgaagggagacagggaagaagaggtgtccccaacaatgccaggatcactttccttctagagaactccccagagccggtctggatcatgagtcaccatccatggaggtgtaggtgggggctggagggcaagtacgagggcagagacaccccaagggagggagaaggagaagctgtcacctcactctccaccaggccctcccagccccaggcatctgcgcagaggatgctttctccactgtccacaggtctccttgtggccactgaagaaatgtgtgggcaggatcttagggtcattcactcacccattcaaatgtaccaagcaattccaacacagggacaacaggctcggatctgctcgcgacgatgac

SEQ ID NO: 503467 - DNA, 333 bp, Homo sapiens
aaacccaaatttacttagtgagtatttggacaacaaagaactaggggcttgtttacagaaaggtggcccacctttactctaaaataataaaagtaattttcacaatatgcaaacttacaaaaatcacaaggcttgttattataaggcaaaggtgactagataaatctaatcaactggggaatttgtttcataaaacttttttaacacacacacccattaggcaaatagaatcaacttctttgttgtgcagaaaaaagtagatccatcttggccaggcgcggaggctcacagcctgaaatcccagtacccggggaggggggggaacagagctca

SEQ ID NO: 503468 - DNA, 560 bp, Homo sapiens
gatatacttaattacatcttcccacaggagcaattttattaggagaaaatgtgacttttatatgtatgcattataaactaggttttacaagcataggtacaaagcaacaacaaccccccccccaaaaaatacccaaactatcaaattaaatatatcttattttttcaagtttttctgttaatagttactcactattatatttgctttatcatcttttagaacttgctagcctgggtagcaggcaccatagatttgagaaaaattgtggaaagcaagcctaaagttgtgaaaacctgcccctttaacttaattttccccccagctgatggggaaaacacagccattctgatttgattttctctgtacaatatcccattcctcttcagtggtacataggttaagaaccactcttctagagtaagtctgttaaatcagatatgaattaaataaaagtcttgtagactcttttcagctttctccttagttcctctggaatctcaggtaagggtttgcagccatttacctatttttttttggcctatttttttgccattcacatg

SEQ ID NO: 503469 - DNA, 148 bp, Homo sapiens
aagctttttttttttatatctaaactatatacatcttggcgagtaccttctgcgaactaatatatatatatctaacgaattataatttaatataaatattatatttataaaaattattaaattaatatttttggtcgttgagaagctt

SEQ ID NO: 503470 - DNA, 1845 bp, Homo sapiens
ctatttggtccccaggttaggccacatctgtagctagagggaaatgtagtggttcattagaggaggggcatcaccaggcttctaggggcccccactcagtgtatgagagctgagggaagagaccctgccagctgtggggctgggtggcattagggcagggatgcagccagtgagccgatggcataagcaagagcagtgcacttctttccagagacgcacagcaggttccagccttcccagtccagcacatacagccagccaggtcaatctttctccattcagtatggaaccgggagcttgtccgggatcattggagccgaccaagtctctgtggaaggactaaccgtggttggccagcagtttggagaaagtgtcacagagccaggccagacctttgtggatgcagagtttgatggaattctgggcctgggatacccctccttggctgtgggaggagtgactccagtatttgacaacatgatggctcagaacctggtggacttgccgatgttttctgtctacatgagcagtaacccagaaggtggtgcggggagcgagctgatttttggaggctacgaccactcccatttctctgggagcctgaattgggtcccagtcaccaagcaagcttactggcagattgcactggataatatgctgtggagtgtgccaaccttaacgtcatgccggatgtcaccttcaccattaacggagtcccctataccctcagcccaactgcctacaccctactggacttcgtggatggaatgcagttctgcagcagtggctttcaaggacttgacatccaccctccagctgggcccctctggatcctgggggatgtcttcattcgacagttttactcagtctttgaccgtgggaataaccgtgtgggactggccccagcagtcccctaaggaggggccttgtgtctgtgcctgcctgtctgacagaccttgaatatgttaggctggggcattctttacacctacaaaaagttattttccagagaatgtagctgtttccagggttgcaacttgaattaagaccaaacagaacatgagaatacacacacacacacacatatacacacacacacacttcacacatacacaccactcccaccaccgtcatgatggaggaattacgttatacattcatattttgtattgatttttgattatgaaaatcaaaaattttcacatttgattatgaaaatctccaaacatatgcacaagcagagatcatggtataataaatccctttgcaactccactcagccctgacaacccatccacacacggccaggcctgtttatctacactgctgcccactcctctctccagctccacatgctgtacctggatcattctgaagcaaattccgagcattacatcattttgtccataaatatttctaacatccttaaatatacaatcggaattcaagcatctcccattgtcccacaaatgtttggctgtttttgtagttggattgtttgtattaggattcaagcaaggcccatatattgcatttatttgaaatgtctgtaagtctctttccatctacagagtttagcacatttgaacgttgctggttgaaatcccgaggtgtcatttgacatggttctctgaacttatctttcctataaaatggtagttagatctggaggtctgattttgtggcaaaaatacttcctaggtggtgctgggtacttcttgttgcatcctgtcaggaggcagataatgctggtgcctctctattggtaatgttaagactgctgggtgggtttggagttcttggctttaatcattcattacaaagttcagcattttaaaaaaaaaa

SEQ ID NO: 503471 - DNA, 1186 bp, Homo sapiens
atcattcggccctcagactgggctgggcaggtctgagagttagggaaagtccgttcccactgccctcggggagagaagaaaggagggggcaagggagaagctgctggtcggactcacaatgaaaacgctccttcttttgctgctggtgctcctggagctgggagaggcccaaggatcccttcacagggtgcccctcaggaggcatccgtccctcaagaagaagctgcgggcacggagccagctctctgagttctggaaatcccataatttggacatgatccagttcaccgagtcctgctcaatggaccagagtgccaaggaacccctcatcaactacttggatatggaatacttcggcactatctccattggctccccaccacagaacttcactgtcatcttcgacactggctcctccaacctctgggtcccctctgtgtactgcactagcccagcctgcaagacgcacagcaggttccagccttcccagtccagcacatacagccagccaggtcaatctttctccattcagtatggaaccgggagcttgtccgggatcattggagccgaccaagtctctgtggaaggactaaccgtggttggccagcagtttggagaaagtgtcacagagccaggccagacctttgtggatgcagagtttgatggaattctgggcctgggatacccctccttggctgtgggaggagtgactccagtatttgacaacatgatggctcagaacctggtggacttgccgatgttttctgtctacatgagcagtaacccagaaggtggtgcggggagcgagctgatttttggaggctacgaccactcccatttctctgggagcctgaattgggtcccagtcaccaagcaagcttactggcagattgcactggataatatgctgtggagtgtgccaaccttaacgtcatgccggatgtcaccttcaccattaacggagtcccctataccctcagcccaactgcctacaccctactggacttcgtggatggaatgcagttctgcagcagtggctttcaaggacttgacatccaccctccagctgggcccctctggatcctgggggatgtcttcattcgacagttttactcagtctttgaccgtggggccccgtcttgcgggggctgcccgtcttgcgagggcgcccgtcttgcgggggctg

SEQ ID NO: 503472 - DNA, 540 bp, Homo sapiens
  misc_feature (68)..(68): n is a, c, g, or t
  misc_feature (75)..(75): n is a, c, g, or t
  misc_feature (77)..(77): n is a, c, g, or t
  misc_feature (93)..(93): n is a, c, g, or t
atgtcttttcccctcaaagccttcacattagcagttatccctctggttaggacctccctctgcctctnccccacntncctctgactaattctnacctctccttcagtccaagtataactggtacttcctcagggatacccttcctgacttctgaactagcccatattcctctgctttatgaacccacagcattctgaggggatgtcagaattcaagcctgacacacagtcacactcaatgcatatctgctgaacgaatcaaagaaatgcagagaaaagacatccaaaaataccaagtgaggccaggtgcagtggcttatgcctgtaatcccaacactttgggaggccaaggtgcaaggattgcttgagcttaggagttcaagaccagcctgggcaacatagcaagaccttgtctcttttacaaaaattaaagaaaagcaagtggacagtttttaagaattaacatttcacttttatacctcttagtaggagcattgtttaagcctattagagatggttagttgatagccaggtggcttat

SEQ ID NO: 503473 - DNA, 155 bp, Homo sapiens
tggcacacctggatccttaccttctgagtgaggcagggattcaacctgctcacaaagactacctagggtccttaacccactgagccacaacaggaactctgtgaggatgggtatcattaactctcccaccttgcaggcgaggcattctaaacact

SEQ ID NO: 503474 - DNA, 214 bp, Homo sapiens
ggatcacattggctccgtcattacttatgcgaatttctacaacccagtctcctgagaaaatagatttttcttttctgttgcatcatcaggctacaaattttctgaacttttatgctctgcttcttctcgaatgctttgctgcttagaaatttcttctgtcagataccttaaatcatctctctcaagttcaaagttccacagacaaagggaaaca

SEQ ID NO: 503475 - DNA, 901 bp, Homo sapiens
cggcgacatgtttttattttattattatttttttctttttccagtatactagcttgtcttttaagaaaggggatattaaaaaaaaaaacggacaaagtgttttaaaaaaaagcaacacccacacctgtgtctggtatttagtcagcttatctcgtgtccaatcggtctggatctctacagagagaaggtggaaaatggctggtatcaagggtgggcttagctgtggccttccaataaaggatgtgagaacgttggcaaaaaaaaaaaaaaaaaaaaaaaaaaaattttggggggggtgggcccgagaaaagtttttaaacccttctgttggggcgggcgggcccaaggatttgtaaagtctgaaccactgtgcccaaaaagcggtggtccagagggagcacccggggcatcaacaacatgtgtgctctggttttctctacccaaattaaaaaaagcggcgcgggggggaacacagcggtctttttgagacaaccccaagaaagggtgttcggagggacatagggggatctcacacagggggtccaggcgagcgccgatattaaatctgcccccggacatggacgcaaatactcaaccaacaacaaaacacacggaaaggagggagacaacggacaacaagggcaagaacgcaaagagaacggttcgcagcgggagagaagcgaagcggaggtagagacgagaaaaaagaaagcagcaaagaacgaagaaagagcagggaagaggaagagacaagagaagcgaaaggagaaagaacagcgaaacgaaagagacaagaagaaaacacaagcagagaagaagaggaaaaaaaaaaagcagaaaacagggagacgaacggaaacacaaagagaaagagagaagaagagccgaggaatagaggaag

SEQ ID NO: 503476 - DNA, 381 bp, Homo sapiens
atggacaggatatgcacaagatccagagtgaatggacagaggatcagaacaagctgtggtgaggcgtgtgtgttttgtgaaccacgggagaccttatgggtttccttttttgtttttgcctccagcttgggtatcccaagtccctagaacagtgtttggcaccatcttggcctaaatggcaggtgccccaatcactatttgtttgcacaagcaatgattatagcatttgtcacagcgtgtgttgtgctgtgtgtgtgtgtgtgtgtgtatggtgtctgtgtgagtgtgtggcatagcactggtcaatgctttcacaaacagaactgtgacccacagtcccgagggtcgcgacactccgtcagcagcaccatcccaaaccaa

SEQ ID NO: 503477 - DNA, 492 bp, Homo sapiens
  misc_feature (21)..(21): n is a, c, g, or t
  misc_feature (46)..(46): n is a, c, g, or t
  misc_feature (53)..(53): n is a, c, g, or t
  misc_feature (69)..(69): n is a, c, g, or t
  misc_feature (72)..(72): n is a, c, g, or t
  misc_feature (76)..(76): n is a, c, g, or t
  misc_feature (82)..(82): n is a, c, g, or t
  misc_feature (89)..(89): n is a, c, g, or t
  misc_feature (102)..(102): n is a, c, g, or t
  misc_feature (115)..(115): n is a, c, g, or t
  misc_feature (123)..(123): n is a, c, g, or t
  misc_feature (134)..(134): n is a, c, g, or t
  misc_feature (142)..(142): n is a, c, g, or t
  misc_feature (164)..(164): n is a, c, g, or t
  misc_feature (167)..(167): n is a, c, g, or t
  misc_feature (211)..(211): n is a, c, g, or t
  misc_feature (217)..(217): n is a, c, g, or t
  misc_feature (242)..(242): n is a, c, g, or t
  misc_feature (245)..(245): n is a, c, g, or t
  misc_feature (262)..(262): n is a, c, g, or t
  misc_feature (265)..(265): n is a, c, g, or t
  misc_feature (271)..(271): n is a, c, g, or t
  misc_feature (284)..(284): n is a, c, g, or t
  misc_feature (293)..(293): n is a, c, g, or t
  misc_feature (300)..(300): n is a, c, g, or t
  misc_feature (304)..(304): n is a, c, g, or t
  misc_feature (319)..(319): n is a, c, g, or t
  misc_feature (335)..(335): n is a, c, g, or t
  misc_feature (337)..(337): n is a, c, g, or t
  misc_feature (347)..(347): n is a, c, g, or t
  misc_feature (358)..(358): n is a, c, g, or t
  misc_feature (370)..(370): n is a, c, g, or t
  misc_feature (396)..(396): n is a, c, g, or t
  misc_feature (407)..(407): n is a, c, g, or t
  misc_feature (413)..(413): n is a, c, g, or t
  misc_feature (491)..(491): n is a, c, g, or t
tgccagttttttttttatttntaaagctctgccaaaaacttctagngggtgcnaatgggcacctgccanacncgcnccaggntgtccgngtggccagcaaanagagtttggccancagcagancaggccagggnggggcacngggggggttctgccttgctgcnggnactgaaaacttcttgcttcagttcatctacaatgatctttcccnctaaancccaaaacttgatgcgggggcctgnggnagcccaaagccagtggnggntagggntgaagcacagggngttgatgangtccccnccanctagcgtgtaaaggngtttgccttcgttganancccaaaaaanggcctggccanccttgcctccanaagcacaaagggatccatctggaganaaagtaaccgngttcanaaagcctgtgtggccaatgtggttggtcttcagcttgcagttagccaggttccaaaccttgaccagcttgtcccagcna

SEQ ID NO: 503478 - DNA, 1174 bp, Homo sapiens
  misc_feature (553)..(553): n is a, c, g, or t
  misc_feature (699)..(699): n is a, c, g, or t
  misc_feature (741)..(741): n is a, c, g, or t
  misc_feature (761)..(761): n is a, c, g, or t
  misc_feature (956)..(956): n is a, c, g, or t
  misc_feature (965)..(965): n is a, c, g, or t
  misc_feature (1174)..(1174): n is a, c, g, or t
cgcactgtgtgtggggccccggggagtattctccctcattaggggcgcgggagggctgggtacgagggtgaggattgattgctattggaggcatctattgtctgcacgtgtgtctgcaaatgtgtctccctgcagagtgttccaatctatgtcgtgtaacgcaatcgaatagtctctatgacgacctggtagctatgctgtgtcttaatctgcactcattcacctgcctggacccgccatctgcgagaatggagtcttgctcttctgcctaaacgcatcatcctcttatcaattcctctcgctgcctgcatgagattacctactcccactatgtatagggggtgacacaagggacgtgttttctcctaattggacactacgttatgcacttgacgtccctttccccccctcccatgccaccgcacggcgtagctcgccacgacactcagcacacgacacgaccagcccgcccctgccacacagcaccccacggcagcgacgagcccaatgtcgtaagccgagagcgtctacatagcacctaccgagacggagnaatgtgtctttatcgtttttagcataattgtaatttttatcttgcacactgctcgcccgtcgccgatccactctcgtctctcgcatcttcgatgcggtgagcgacttctctgtatgactcataactaactttccgaagcaatatcncacgttacaacagctatatttatgttagtctgactcttatangtatgtgacccgatggcccnatcgcgtgcgctgcaggcgccgtctccagagcgcataagtgtgtggctccccgtcgtcatgtatcggtgtcgtcagctattcctcatactgccgtcgcgcacctcgacctacagagtatccaccagatcatatacactctctagagcactctccatattcgtgttcttcagcgctcgaggccgtgaacttggtcnaacctagantcttataattatgactcattcgtgacgtgtcgtgatacgctatctgttcctatatatctaacatactcctgtaacctccagccaatgaccgctcgacgagctactcacgacggtagcaccgcactgacaccacggcactttacgtaccttttctctgctctatcatatcgtcttctctcttacccttcacttttcttcctcgtacattn

SEQ ID NO: 503479 - DNA, 881 bp, Homo sapiens
  misc_feature (85)..(85): n is a, c, g, or t
  misc_feature (471)..(471): n is a, c, g, or t
  misc_feature (561)..(561): n is a, c, g, or t
  misc_feature (578)..(578): n is a, c, g, or t
  misc_feature (700)..(700): n is a, c, g, or t
  misc_feature (745)..(745): n is a, c, g, or t
  misc_feature (748)..(749): n is a, c, g, or t
  misc_feature (761)..(761): n is a, c, g, or t
  misc_feature (769)..(769): n is a, c, g, or t
ggtgctccagaaactctacagtgttttatttcaatttcgtttttaagtccattttaactattttaaaacttaataaaaagcaccntgctcactcacatatgatatttaccaaattgtcatagcaatgaatggcatcccgatatgtgctgtgaggatatttgaacttcttataaacatcttagacagttttgcttttcgctgatctttttcagtcctaccatgtctgcttaaccagaattgcccaggcaggaagaccctgtagtgtacatggagcacactcagctcagtgccgtgcacattgtgcccttcgtgggtaacggcccactcattgtacaaaataagtaaaggcctaatagtatcatgataaataatacagttaaatctagcccttattttgagttttggatgctttgtgtctgacccctgtcttagtagtaaagagcaaaagtagttgtatgaaatttttcacangtcatccaattttgaaacaaaactttgctgtttctccctttggatcttccagattacttaattgaaactcattccatggctgggcatggnggctcacacctgtaatnccagcactttgggaggctgaggtaggaggattgcttgagcccaggaattcaagaccagtctgggcaacacagcaagaccccatctcaatttttaaaaaaaattatttggggccaggtacagnggctcatgcctgtaatcccagcatttggggaggctgaagcagganaannacttgaacacanaagtttgngaccaacctaggcaacatttgtagaccccccttctctattaaaatttaaaaaattaacccaggccttatggtgtgcaccctgcagtgcccagctcttcccgagacttaggtg

SEQ ID NO: 503480 - DNA, 879 bp, Homo sapiens
ggcgttcggcgggctcccgggtacaaaaatggtgtggtagcgatatctacctgcgctactacgtagggcacatggcaagtctgggcacgagtttctgaagatcgaattcggccggagggtgtgacgtgtaattgtcaccataggagcggcatgaggagtaccaagcaagaggggagaggtaaagtcccacaggagggagtcaggaagatcttcttagaggaggcactctgtgagatgagtctcgaaatgagagactgtggcttgtgagagaaaaaaacagatttccagagcagtatgagcagaggatgaggtgaaacttgctacccaagtaggtgtgcacacaggtgtgttttctgacagcgctatccttagagaatgttacattgtgatctgtgctacctgcaacaagaaagttcatggggatatatatcgggggttggggaatgcaggttggtgttggacaacaggcaaatacaaaatttagggaaaagcttagatatgccaaaaagcaattacaaaaatgatgtgatgatcagaaaagaggtatgtgcacaagagtgtatggaagactgaagagaatcattgtggaccgtgaattccaaaagaagatgatgttgtgtgggctccccctgataggtgtggccgacagaataagtgatggtccagggttctgaagaatctgaaggctaattcctctgaaaaagaagggggtctgaagggctttcacctgggaatcttcaaaacctggaggagagattacatcctctgtatccgagagggcttgcaccttgggagaacaagtggaccactgcgggtcgcggacgactttggtcagagcacaaagcggacgtggggcgttcaccaaattgttgaacgcgg

SEQ ID NO: 503481 - DNA, 109 bp, Homo sapiens
acacttgctgcattcgtctctactacaatatactggagaacacccaagctaggaacctgggagtcatccttgatactttctcttcctccttaatcctgtgtattcagta

SEQ ID NO: 503482 - DNA, 205 bp, Homo sapiens
  misc_feature (1)..(1): n is a, c, g, or t
natgtatgaaatgtgaacctcactgaatatttttttttttcagttcttcttggtaaatatcctattgtggggaagatttaactatatcttagagtttaaattctgctgtgtagactctggcagctgcctctatggtgacgaaacaagctttttttattcatcttttatttttctccatacaacggggaaattgggggttccccag

SEQ ID NO: 503483 - DNA, 633 bp, Homo sapiens
  misc_feature (293)..(293): n is a, c, g, or t
  misc_feature (350)..(350): n is a, c, g, or t
  misc_feature (367)..(367): n is a, c, g, or t
  misc_feature (373)..(373): n is a, c, g, or t
  misc_feature (383)..(383): n is a, c, g, or t
  misc_feature (416)..(416): n is a, c, g, or t
  misc_feature (434)..(435): n is a, c, g, or t
  misc_feature (522)..(523): n is a, c, g, or t
  misc_feature (528)..(528): n is a, c, g, or t
  misc_feature (534)..(534): n is a, c, g, or t
  misc_feature (541)..(541): n is a, c, g, or t
  misc_feature (543)..(543): n is a, c, g, or t
  misc_feature (551)..(551): n is a, c, g, or t
  misc_feature (565)..(565): n is a, c, g, or t
  misc_feature (602)..(602): n is a, c, g, or t
  misc_feature (625)..(625): n is a, c, g, or t
ccccgccttttttaaattataatttttatttcccaacccaagacgatacaagatgtcccacgggcacaaaagaagggtcaagtcacaggacctccagacacaggacaaggtgcattacccaatcaaagcccattcacggggcgtcccaaccccacacacctacccctatgatggaatctcgagtctcgactcccgactcctcctccgatctatgcacacctgaggaaatcttcggtgggcagcgaccataccacaggtctgtccctaaggaggtggtccgctgacctctcaangggtgggggtggggtcagagcttacaggtttctgtcttcttgtgcttttagatgcanttgctctgtcctgaccnggtgancgggcctcanctgggggtggaggggcaattggaaggctgtttncctctggcaaagtctggnntctgtgcttgtgtgaggttaacccacccccacttccactctaggccccaggtgagactccaccaccagtcctggtagtgagggttcnncggtnagggtnaggtttntnggggttcngcgctttacaatgntaaagccttagccctcctccaagagctgagacctctnagggcctgaatcttcttttccanaagataaa

SEQ ID NO: 503484 - DNA, 875 bp, Homo sapiens
ggcaggaagatcccttgaggccaggagttccagaacaccctggacaacacggcaagccccatctctacaaaaacttagccatgtgtgctgcagcatgcctgtaatcccagctacttgggaggctgaggtgggagaatcatctcagcctgggaggtcaaggctgcagtgaaccatgattacaccactgcactccagcctgggtgacagagaccctgtctccaaaaaaaaaagtgaaaaaaaaatatgggcctgggcacaggggttcacaccttataaccccaagcacttggggaggccaaggtggggaggatcacttgaagccaggagttcaacgaccagcctggggcagtatactggagggccccatggctataatttttacctttctctttgcttttttttattggggctacttggactccaatatttttttcaaatttcaaaactggtcaaacttttgggctgggcgcgtggtgggataacccgggtaaatcccagcaccttgggtacgcgccagggcggggcatattcacagaggtcgggaaatcgagaccatccgggctaattgtgggtgaaaccccggttctcggcatcaagggtccaaacaacttaccgggggcgcaacgggtggggcgccctggtgggtcccaggtaatccggaacaggtagagccaggaaaagggcctggacccggcgaggcggaacatctgaaggtggggcccgaaattcggcgcacatggggacccccagccggggtgtggacagagcgaaaactccgttctcaagagcaccaaacgccgacagaacaacgaaaaccttgtgcgggacgctggcgccctctagagaaacgtttaaaaccacactctttggcagga

SEQ ID NO: 503485 - DNA, 333 bp, Homo sapiens
  misc_feature (117)..(117): n is a, c, g, or t
gtgggcaaaggtgtcccgagctgccatgtttaggaaaatactgcccatctgtatgatactattatggtagatgtatgtcattatacatttgtccaaagccataggatgtacaacacntagtgctgtgatgtaaaccatggacttcaggtgataatgatgtgtcatgtaggctcatcaatcatagcaaatgcaccactctggtggcgggatgttgataacgggggcagctgtacatgtgtgggcacaggacataaatgagaaatctctgtaccatccactcagttttgctgtgaacctaaaagtgctccagaaaaaaaataaagttttttttag

SEQ ID NO: 503486 - DNA, 197 bp, Homo sapiens
tgattcctctcatttccagcttttcagtttctgcctgggcaatggccaggggccaggagtggggaaagttgttatggaggggaaaggggtcacaccccaccccctgcctggttttaggctgctgcacaccaaggccctgcatctgtttgctctgcaaatatgtctctttggagttggaatttcattatatgttaaga

SEQ ID NO: 503487 - DNA, 1094 bp, Homo sapiens
aaaaggggatcctaggcaagcagcaggtacgaagtacagcctgtaagcgtacttcagaaagagcgaatagtatggagtatagttgccggaatggaggaaaggactacatgctgcctggcctgtcacgacaataaggagcacttacacagaacgaatcaatgtagaggaagagttgtgttctgcagagaacaactcgtgtgttgcagcgagagtgacaatgttaaaagtggcacaaaagcgtcaccatcagtagaaaagcatacagacttctcaagcagaacaagcaaaacccttacgggaggatattttaatgcaaaatattgaaactgtgcacccagtttcgaagaggatcagcagtagcgacatctcatttggaagttggaaacacgatgtccatcagaatttccttctaaaagcatcacctttacttccagaagcagcagccccgagaacaagtacaaacttttgcacccatgaggccacagaggcccagaccttcagcatctcaagtctagcccagctggatttccatttccagggcctcctaattttccgccacaaagcatgttgggatttccaccacattgggccactccattacttccccctccaggcttgggcttgctcaagaatcccatggttccctggccacctgttgttccatctcccaggtccaggcacagcgtatgatggggtcctctctcacaaggctcaaggtgtataggcccgagaatttttaccaggtaagacattcggagggccaaggggcccttttggcccttggtgtaggggacaccacgcaccggggtggccccaagaagggggaacggggacgcagcagaatttttcaggggttcaaccacattgtcggacagcggactccaaaggagggaggcaacaaattgtagggatacgacggacaaacgcccgtcaggacgacaacagacacggggtgcaggcaacaacaaagacgacgacaccagtgtgtgtagtacaaacacacatcgatgtgggatcacacacacgtgtatcagctaccaatacgtataagatgcagcaacacggccaaacagaggacgtcgtcacgacgtttg

SEQ ID NO: 503488 - DNA, 382 bp, Homo sapiens
  misc_feature (29)..(29): n is a, c, g, or t
cacaacttaaaaactttttcaaaaacccnctttcccccacagttacaccctgtaattgtatcctagaccctaaatcctagtatttcccctgtgtgtatattaatttcagtagatctgggccgggctcggtggctcacacctgtaatcccagcactttgggaggccaaggcgggcggatcacgaggtcaggagttcgagaccagtctggccaacatagtgaaaccctgtctctactaaaaatacaaaaaatactagccgggcatggtggtgtgtgcctgtaatcccagctactggggaggctgaggcaggagaattgcttgaacccaggaggcagaggttgcagtgagccgagattcggccactgcactccagtctgggtgac

SEQ ID NO: 503489 - DNA, 150 bp, Homo sapiens
ttcgataagtcgaaactgaagaagacagagacgcaagagaaagatccactgccttcaaagaaacgattgaacaggagaagcaagcaggcgaatcgtaatgaggctccccaatatcctgtacttcacagcttgccttcttattactctttt

SEQ ID NO: 503490 - DNA, 562 bp, Homo sapiens
gggggtcccccccggggggggccgcttttaaaatagtgggttccccggggtgcaggaatttgggccgaaccccagggcccgtttttttcagggccccacccccagggggttttttcccagagcctttttgggggtgccctaacttgcccggggcctttggttaaagcctcctccttttacattttaacaaaaaaaaggggtgggccttcttcctttccgcctggaaaaaaaaaaaaatgccttttttttttttacctttaaaagtagcccgatagttaccaaactgggtgggttattaacaaaacctttttttttccccaaaggaagggttggatgttcaaataaactgcctgggatttaaaaccgttaagcaaggggggccattccccttaaaggggtttttttcccggaacggggttcccccggggggttgtttttaaaaaccctattctgtgggcatgaaggtgggggtttgcccctaaaagaaagttttctcctttaaaaggggtgggctttcccattctgggcgggtggttccaggtaaccaaatccccctttttta

SEQ ID NO: 503491 - DNA, 1131 bp, Homo sapiens
  misc_feature (324)..(324): n is a, c, g, or t
  misc_feature (460)..(460): n is a, c, g, or t
  misc_feature (1049)..(1049): n is a, c, g, or t
  misc_feature (1052)..(1052): n is a, c, g, or t
  misc_feature (1054)..(1054): n is a, c, g, or t
  misc_feature (1058)..(1058): n is a, c, g, or t
agcttggcacgaggcggagatgcagctcaaggggaagaaagtcacggacaagttcactgagagcgtctacgtcctggccaacgagccatccgtggccctgtaccggctgcaggagcatgtgcgtcgctccctccccgagctggcccagcacaaggcagacatgcagcgttgggaggagcagagccagggagccatctacactgtggagtacgcctgcagcgccgtgaagaacctggtggacagcagcgtctacttccgcagcgtggagggtctgctcaaacaggccatcagcatccgggaccatatgaatgccagtgcccaggnccacaggtagctcctgggaccgcccgcccccactgccactcccagctgcaaggaccgtctctcagctgcgctgggaaccgctgcttctcgcttattagaaaactgtctctttccttttgtcctggtgtctggtganctcctcttgtcctgtggcatctataacctgagttcagtcacttaataccgaggtcctgcgctctgctgtgtgcctggccctgggctgggcactggggacatagcagtgaccgagacagacaggctcacaaggagacatacgacaaccaggtaaacatggcagacaagagcatgtcagatgcctgtgaagaacactgcggggcccctcctaggaggtggcatgagttacatgcagacagagacgatccgggggcagacggagttccatgtggggcagtggtgagggcagacgctctggggctgggatccctgggagtgttcgagaagcaccgagaaggcttctgtggctggagccggccagctgggggagatggggccagggagatggtctggggctgggatccctgggagtgttcgagaagcaccgagaaggcttaccatggctggagccggccagctgggggagatggggccagggagatggcaggggcctctccctgtcccaggacccagagccaagggaggctttaagcccaggaccaggggtctgaaaacgaaaagcactcacagtccttgaacattggaaaganaantnttgnagagtagcccttctttttgtttttgttggcattctaagttaataaacacgcttatgaacacacaaaaaaaaaa

SEQ ID NO: 503492 - DNA, 1103 bp, Homo sapiens
  misc_feature (324)..(324): n is a, c, g, or t
agcttggcacgaggcggagatgcagctcaaggggaagaaagtcacggacaagttcactgagagcgtctacgtcctggccaacgagccatccgtggccctgtaccggctgcaggagcatgtgcgtcgctccctccccgagctggcccagcacaaggcagacatgcagcgttgggaggagcagagccagggagccatctacactgtggagtacgcctgcagcgccgtgaagaacctggtggacagcagcgtctacttccgcagcgtggagggtctgctcaaacaggccatcagcatccgggaccatatgaatgccagtgcccaggnccacgagccctggaggaagcacccccgccctcctcagcctgatcctggaagagactcggggccccccagcctcctgcaacccagtgtcagtgcctgaggtgtagccacgagcctctctctctgctctgaactaaccaaccctgcccgcttggcagccagtgcatggcacctgcttgtctaaccacttggggtatcatcactgggcttgtgggatgatttcggaggtggcatggtggagtgggtgtctgcaggtccagaatgtaccagcactgctgctcagtggaccatgtcagcccatctcatcccactctctctccaccactcttcctctctcttttccatggccataggccccatgctagtcccagagatttccacccacccaagacagagaatggtgagcccacattatcctctatcctaccaagtgccaagaagcctcgctttaacccagagccacacagtctctcagtggcacgagccctggcaatgggcaaatatacccacctatctactgggacctaccccaaaccatctaacttgccctaaccgtgcatgtgttgaccccgaaggccaaaatttccaccgtacacccattccttcagggttcatcctagcacatatacacaatatatctcgttacacagggttgggcgatctccagggttgaccccagcggacacggcgtgcccaggtcgccacacgctgcacggcgaatgatagcatagggcacgccacatcgcgccaacctgcctagcatacgacacacgaatatcccc

SEQ ID NO: 503493 - DNA, 1316 bp, Homo sapiens
gggcacatgcttctggggctgggtgccccggcagccgggcaggcctggcctgacctcgacctccgccgtgcgggcccgaccggtgagtccatgccctggcatgtctgcagggaccctgttgcctgtcagcctctcccgtccacactcttcccttgcccccaggctgccatgttgctgcgggcttgcgctcgtgttgtgcggctgtgctgtgtgtgccctcatgtgctgtgtccattggctggcagtgctgcctaggtggccaggggtcctgtgccgctgctttggcttgatggggctgcttgattctgatgccagctagaagctgcgtgagctgcaaagcgtaagcgaggcggacttagggcagcgaaaggcatccgggtttgagcacagcggcttcgcgtgggggcaggtcctacgacttggcctccagaaaggcccggcccgtgctttggcgaaagttacattaactttgtggacccttgggtttgctcccaagggttgggaattccccctggcttctttgcgattgtgcctccccgaaagaggagtccgagttacaacccacttggcattgagagagcgatccgcgcgtgtacaaaaactagataggggtccaacgcaagcgagcctatccgaatagccgatcaaattctattccgttaactttggttccgcccaaactggtggccaagcccgtgaaagagaacggagccaagcccaatgttaacgctatggcgcaaccaatatttagcgcctttacacaacacttcggttgcgcaaccttggggaggcaacccttagtacgtgcagagttttatgataccgccagagtggtacccacccgcttggggctcaagttgggccgttacattcgcgactatcgcgcggacaacaccagaactgcgcgcgtatggacaagggaaagctgcgtacgacactctttccttttggtattatcccgccagcatataatagacgcggagcgagaaaagccaccttaccattatgctggagagcccaaatttgggggacatataggtttggacaccattacagtttcgtatagtatcaccagcagagcaacaggttaacgttttatcaagttcagagcagcaactggattggggcagaacaggcccatatttctccacaagagtatgtggcacaccgggccattcccgggcacgagttaacacggctcgcgaacacgcgtatacaggtccccccgcttgggcaccacttggggggctgcttcagagatatacgccgtatgggccttcccagttagtagctacaagcatctacgaaggcggaac

SEQ ID NO: 503494 - DNA, 115 bp, Homo sapiens
  misc_feature (1)..(1): n is a, c, g, or t
nagccttatcgtctttgagaggtaagctttgcttaaaggctactaggaaaagagtacgtattgccttacagctgaaaatccaagagcgactgagaggcgagagcgacttagacgg

SEQ ID NO: 503495 - DNA, 1075 bp, Homo sapiens
  misc_feature (324)..(324): n is a, c, g, or t
  misc_feature (460)..(460): n is a, c, g, or t
  misc_feature (556)..(556): n is a, c, g, or t
  misc_feature (993)..(993): n is a, c, g, or t
  misc_feature (996)..(996): n is a, c, g, or t
  misc_feature (998)..(998): n is a, c, g, or t
  misc_feature (1002)..(1002): n is a, c, g, or t
agcttggcacgaggcggagatgcagctcaaggggaagaaagtcacggacaagttcactgagagcgtctacgtcctggccaacgagccatccgtggccctgtaccggctgcaggagcatgtgcgtcgctccctccccgagctggcccagcacaaggcagacatgcagcgttgggaggagcagagccagggagccatctacactgtggagtacgcctgcagcgccgtgaagaacctggtggacagcagcgtctacttccgcagcgtggagggtctgctcaaacaggccatcagcatccgggaccatatgaatgccagtgcccaggnccacaggtagctcctgggaccgcccgcccccactgccactcccagctgcaaggaccgtctctcagctgcgctgggaaccgctgcttctcgcttattagaaaactgtctctttccttttgtcctggtgtctggtganctcctcttgtcctgtggcatctataacctgagttcagtcacttaataccgaggtcctgcgctctgctgtgtgcctggccctgggctgggcccaaanccctttgggtggtagtggaaatccaaaatttaatggccaatgtggatcctgaggacagaccagggggctcacaaggagacatacgacaaccaggtaaacatggcagacaagagcatgtcagatgcctgtgaagaacactgcggggcccctcctaggaggtggcatgagttacatgcagacagagacgatccgggggcagacggagttccatgtggggcagtggtgagggcagacgctctggggctgggatccctgggagtgttcgagaagcaccgagaaggcttctgtggctggagccggccagctgggggagatggggccagggagatggcaggggcctctccctgtcccaggacccagagccaagggaggctttaagcccaggaccaggggtctgaaaacgaaaagcactcacagtccttgaacattggaaaganaantnttgnagagtagcccttctttttgtttttgttggcattctaagttaataaacacgcttatgaacacacaaaaaaaaaa

SEQ ID NO: 503496 - DNA, 350 bp, Homo sapiens
tttgttcatgagcccactgggtgattgacagtagataggatgacaggtgggaaagagactggctggtatccacagaacaggtcatcctatctacttgattattaatatccttctctgctgaggtcatcctttggtgggcattgacataggagaatacaaataccttcagttttttttttttttttgcctgtttagagagctctagccaaataactcttccttacactttcttgtcatcgattttccaatcatgttccttctaagtccctgaccatccaaccaaactattgggtgatagtccataagttgatatgtaatccgatgtctgggtcgtttttccttcaagcaaa

SEQ ID NO: 503497 - DNA, 1158 bp, Homo sapiens
tggctttgaatgaacttagccaaatactttcttcaccaactctcatgaggagagggaacactgctgcagaaactgcatgaatggcttgcagataccacacgcacggtggaccgaaatctatcacttcaaggatatcaaagaaaccagactgtgatgactggcgaggagcgggcatgaactgcgatggagtgtgcattacagtttggactgaaacgtgtgaatcatgtcatctatctggaactgcaccttaaatctggctcacctgaccacacataaatgactccgcccactatgtgtgacttcacttgagaccatcagttatctgtaatgagtcacggtgaaatgcccattcctacaacgaaacttcccgggtagactcatcggtgactccacatcgtatgccgcaaagaatggagatgactggccgctggaatctagcgctatgtgacgcgtaattatcatctattagaactaagctactatcccctggggatgcacacgttgatggaattgacacatgctaaggccttcgtggcataagtttcccccacgtaaggcgcgtgcggggatgaactttcgcctggggtccaaccatacggtacagatggcaattgcagtggtatggggattatcccattgtaccctattatctactatagcttggtaccaacatgacagtaccagcattaatagttctatcgacctttgtacgcaatttccacttccaatactaaaacgaaatattttggttaacaccgacaggcttcacaatacttaggccttaacggagggggggggaggcagcggttacaaaaaatgacggacttccactcttgcgagtgaggcgtcctcacaaagttctaggacccgacgattacgccccgcgttcgttacggtgtgaccacgacactagtggtgcgtcccctctcaatagaaagccgcacgctgggaaagtctaacaaccggggagggcaagatcgggtgccgtccagttaaatccgacacgcgcggggcacctattggggtcaccaccagttgacctaattgcgtgaccattagcggagcgtacaggacctacgtaaaaggcagtggtcgggggggtgcgacattcattggggtcccctcttctccacggggggtacaattaatactagttcc

SEQ ID NO: 503498 - DNA, 215 bp, Homo sapiens
  misc_feature (31)..(31): n is a, c, g, or t
caagcttgaaggcagcctatatgaaaatacncagaggagccaagaataaagaatgaagcatgcttacaagatctagaaaacagcctcaaaagagcaaatttaagagttactggccttaaagaggaggtagaggcggagggtgcagtgagcagaggttgcaccattgcactgcagcctgggcgacaagagtgaacctccatctcaaaaaaaaaaaa

SEQ ID NO: 503499 - DNA, 321 bp, Homo sapiens
gcgagtagtacatgtccgcggagtgtaggtatagggggacgtgccagcggaagtggtgacgttcacttggcatgttgatacttcattgggttctgaattcccaggcttggcaaaatcaaatagatgcaccatatcaacatcatttggctttaccgagttttcctccgatgtgcagcctaagtctactttcaggacatgcagcaggtggcgcattttttcctcctccaaatgtttatttggttttatatgtcgctcgaacagtcgttctaaaaacctgtttgaaaataaaccaagtttcaaaatttcatctgttacatcttc

SEQ ID NO: 503500 - DNA, 134 bp, Homo sapiens
aggaccctttgcggtgctttccaccaaaaaagggagaactctttaatcagatgtgggtatgtagacttaataagtgaaacatcacagaagaagctgtattatacaatgacaacccaaacaaagtactccgcgat

SEQ ID NO: 503501 - DNA, 626 bp, Homo sapiens
  misc_feature (158)..(158): n is a, c, g, or t
  misc_feature (326)..(326): n is a, c, g, or t
aaagggaaggccaagaagcccttggctcccggacccaaggttgttgccagagcccccgggttttcagaaaattttctcccttcagagaaggttttagaaaagagtgatagggcaagaccccgccttttcagaatccattgaggagggggggcccgccnaaacctccaacggggccctgaaaaacaagcatggggagaaggctccttttcctttttaaaggtcctctccttggggaataccccgccgggaggggctttaaaaaaaaaaaaaaaaacaatgttttcccccgcccccgccccaaaaaggggtcctggagcaatttttcnccacagggttcacccgtaggggcttttcagccctgagtaatggaaaattaggatgcccaaccttggcccgccaaaagtcaggaatgtgaatttaaaaggcttgtttccccccgcttttttttttgggccccctcccccccctggatcccgtttttttggggacccccttttgcctttttaaaaaaggaaaaaggccgggaatttttattaactcctgttttcccaaaaaagtttccccgcctaaaaggatggaattttattttggtgttgtaaaaaaaaaaaaaagccaatttgtgggta

SEQ ID NO: 503502 - DNA, 401 bp, Homo sapiens
atcagttgaacctgggaggtggaggttgcagtgagctgagattgcgccattgcactctagcctgggcaacaagagcgaaactccgtctcaataaataaataaataaataaataaaataaactgaatagccgtcctttgtgtgtatccaccacctgttgttcatccactcatctgttgatggacacttgggttgcttccagctcttggctgttgggaatagtgctgcaataaatatgggtgggccggctgcggtggctcacatctgtaaccttggtgctttgggaggctgcagcaggaggatcacttgagcccaggaggtcaagaccagcctgggcaacatagtgagaccctatctctattaaaaaatgttttaaaattaaaaataaaatgggtgtactaat

SEQ ID NO: 503503 - DNA, 292 bp, Homo sapiens
cccggttgatattgtcctcattgttgggcctcctaagtcggctcaggcattaccgttcatgcattaacgatttcccagaactttcatgacgctcgttgaggtcctcaggccattaatgcagcagttgcgatacataaaaacatctcaactacgtctccttttcttcgtcacatagatactgacatgataggaagctctcagcttagggaaagagaatcaatttaagattatagaacatggatacaaaagtgactggaacacattggctgacgccttactggaaaccagtgaa

SEQ ID NO: 503504 - DNA, 128 bp, Homo sapiens
gagcagcctacttcgtccgtttggtaggtaaaccccatcgaaactctcatccgcgatatgttactgttcgggacattccaaacggcttaacatgcccaccgagtctccgagaccggcgctgtccctac

SEQ ID NO: 503505 - DNA, 294 bp, Homo sapiens
taggttaaggtcgttgtcagtgaggcgttgtctatgaacacacgtggtattgaggctgccgcgtttctccctgtagtggactgctgggacgggcccgatgggaagccggtcatctaccatggctggacgcggactaccaagatcaagtttgatgacgtcgtgcaggccatcaaagaccacgcctttgttacctcgaggtcagttggctgatttctggtggtgtgacttaaaggggaaggcagctagggttggatatgatagatggacagacaggcaaacacacactgacaacgg

SEQ ID NO: 503506 - DNA, 110 bp, Homo sapiens
ccggtaacactacgcataaaaaacatagaacatgaaaacgaaaaaggaaaaaatgaaaaaaaattagccttgacttgcattaacttccagatcttaaactgatttcttaa

SEQ ID NO: 503507 - DNA, 124 bp, Homo sapiens
aacgggtgatgagtacaagggcaagctgaggtgtccctgcgaactacactgctgccagtctggcacctcgtgcaccagctccaatgctctctgggaggtggaggtggtccaccactgacccctg

SEQ ID NO: 503508 - DNA, 338 bp, Homo sapiens
attcgcggccgcgtcgacttttttttttagagatggggtttcaccatgttgcccaggctagtctcaaattccaggcctcaagtgatcctcccaccttggcctcccgagtagctgggaccacaggcgcatgccaacactcctgggtaatttttgtattttttgtggagaccaggtctctctgttgcccaggctggtctccaactgctggccttgggagatcctcctgtattgggctcccaacgtgctgcgattacaggcttcttgctcacctcttaagtatgccaggtatgttgcccgactcagctgtagagcaggcttcatgtctcacccctttgcat

SEQ ID NO: 503509 - DNA, 1493 bp, Homo sapiens
cggttgggtgggtgagctgtgcttgtgtgggcgacaaagtagtgtgggtgggggttgatgccggcgttgcctacgctgtgggaggttgtgctggctgttgtccgtgttgtgctctcagaaggccgcgcgtctccggagtgtctgtgcttgtttgttgttgggcgaacttccccccaaagggggtggtccgaagggagtccacatcttctgggaggtttcgtgaggagatgtgtctttgtgttgggggacagattggcttctttggggtgtccttatagagtcgtgggggggagtttggcgatctgagcgaggtgcgctccgaatgtggcccgccgtggtggtgccaacagctgtttcctgtgctgtttagggtcggccgccttcgccgagtgttggaccccggggtggtgagacgctgggccgcaaagtgtgggggggcccccacagtgcccatgggggccccgcatcattattagggattctgttgtggggctttgtggggggggttttgtcgtctccgcgctgtggttggtgttctccacaagagtttctcagagtgtgttgtttgggcgccccgtgtcctttattgagaggcattttttatgtgataggcgacgccacgggtctcgcgccccagtgggtctctcccccggggcgcaccagaagggggtgtacaagtgtcttgtctgtgcgcgagtgtaagtgattgtgctgtgggtattggacactcgcgccctttggtcgctgtggctcctgtgtgtggcccacggtgggtgatccctctgagaggagaaaaaatgacacactgtgaaccacaccgggaacactctgcgcacacacagtgtgggggagacacacaggcacaacgctggatacaccctctatgtgggagagtgggagactctgtgatacttccgctctgtgtctatgaggggaggaattgtgctctgaggatgtctcatcagagagtgcgcacacccctctcttttggaggcactataggttgctcccacgaggagatctcgccgcgcttgtgtgtccccccctgtgagagatatagggacgcctacatacgtatatatgcgacgcacacataggtattatatatgggcgccacacatgcgactatattttgttgagaaaatgatatatgggtctctttctgtataaccgagactataaaggagatcttgttttggggtgtttttgcgcttataagtttttgagaccccaagatctcgctatgagcagcccccgcgctcgagtataatatatgttatagtataatctctggagagagagagaagaaatataatggatagtgaacccataaagatggagaattcctccctctatgatagttataggcttaggtttatgggaagaatagttaacataattccactttttcctccctcttttttggaactcttgttatttttctgccctagtttttttcatttttaatccataaaggagtataattgttccca

SEQ ID NO: 503510 - DNA, 204 bp, Homo sapiens
ctcaactgcgcccggacaattttgtagtatttatagtagagacggggttctccgtgttatccaggatggtctcgatctcctgacctcgtgatccagctgcctcagcatctcaaagtgctgggactacaggcgttagccaccgtgcccggaccacacctaggtgatttttaaagttcttctagtagagacagggtctcattatgt

SEQ ID NO: 503511 - DNA, 713 bp, Homo sapiens
gtgcaggcccccatggtaatcctgatgaggtccctcttgcctgtcgaggaacaaaccttgctgaatattactgcggggtacggtaaggcgtcctatatcgatacgttgtcgtcaccacattaagtgctctcacaacgatgctatcgaagacaggccctctccttctagccacgtaaagaggctgggtacgactgcatggtaaacatgcacctgctccttatcatcatcgttctcgccattagcagtgactagctctcatttagtgtagccataagcctaacaacagctgactccaggattgcataagcccccatgtgaaatcaggtgctgtactgcaataccctgccagctgtgacttgttatcctactatatgttctaaggagtgaataatattgtccgagtaactaacttatttaaaagacatttccttctgtgggcattgactgtatcccacctgttttccaatggtaaatggtaactctgtttctggagaacacctgaaatcaatggctatacattccaaagcaatctaaaggctatttcctttggtgtgggtttggttttgttcattttgaaatacacttttgaacactgagatccgtaaaatactagatctctggaagtgtaattgtgaaagaaattgcttgcagctttaacagaagtgagaaactttccaaataaaaactagttggaagtttaaaaatataaaagg

SEQ ID NO: 503512 - DNA, 793 bp, Homo sapiens
ctcgtaaaaacttcccttttaaaacacttccccaacgagttctttttccctccacaataatttattccgcgccttcgtggaatcaaaaccagtaatttttagagcatatacccctccttaagaaaccctgtataatggtcgcagagataccccccattattatgttgattccaccggagcactggggcccccacattcgtatagattctctatctacgcaaagggaccccacattgatcgcctctgaagtcacacaaaatattattggcgtaataaatagatcctccctccaaaggccatactatcaaagaatgctgttggcagtgacccccctcacagccgctctctgtatcccctctccgagggcatctcacccacaaatatatagcgagatagagagaggctgtggggaggtgattttttaagagagagatattctttttatgcgagccatgatgtctctcttctctctctcttctctctgtcagtaacgctcactctctctgtctgagagagagagtgtctccttaaagttattaactcgcaccgtctacgcacacgtgtctactattggggccactaacaagagtgcatttttaggatgcggataatcccccacgacgctcgctttaagaagacagaacaataatattcttcgtcgtggtgatctctctcatatgcctcattgttttctctctattgtagctaccacaataatcgtgcacccccagatcgtttccccctaaaaaattttgacatcaagaaacatttatactatataaacatataacac

SEQ ID NO: 503513 - DNA, 548 bp, Homo sapiens
  misc_feature (4)..(4): n is a, c, g, or t
  misc_feature (35)..(35): n is a, c, g, or t
  misc_feature (102)..(102): n is a, c, g, or t
  misc_feature (121)..(121): n is a, c, g, or t
  misc_feature (257)..(257): n is a, c, g, or t
tccnactgctacaatctagctccaagagacagatnggaaaataagtgcacgaaccttactatgttatatgaagaaattacatgggtaaatagtgtcagcggntgggggaggaaagggaggntgggaattcacagttggttggggtgggtccctgcagaggagccgagaacgcacatatgagaacaagcagcctttctgagggaggcagagagcagcaagtgaaaaggccttgggctgtgatccacaggcagctgaanctgtggccgtcagcccacgaggagcaagtgcaggagcacagtggaagtgggcagcgtgcagccacagtctggagtcagcgctgtttccttgtgtgcaatgtctgggttctgcagtggaagcttcatgaggtcacacacctactacacccactactgtgcaccagctcctagcaagtgcctccccggaggtgctgagtagatgttcatgaacactgaatggatattatttttatgaatgagattagtttgatctccatcccctttctgtctttacgttaaccatgatctgac

SEQ ID NO: 503514 - DNA, 275 bp, Homo sapiens
caagggacagcatcaagcactgcaacaatgcagctcaaaacgcttagcctagacacacccccacgggaaacagcagtgataaacctttagcaactcaacgacaagtttaactaacgctatactacaccccacgggtttggtcaatattcgttgccagaccaccgcgtgtcacactgattaaccccaaacggttgaccctggcgaccttctgtggtgatccctctaggatgtctgacgctgcatggcgatagcaatgctatgtgcaccttgtgcct

SEQ ID NO: 503515 - DNA, 1418 bp, Homo sapiens
  misc_feature (201)..(201): n is a, c, g, or t
gtgctattctacattccagtcctcgctgatcaatgccatgaaccgatacttcgaaggccaggcggcggccccattgagtccgacactgggcgttgggctgtgtcagctaggatttgcctcatggtctctccttgttgtgcctctgtaagctccagcgggggtgccagactgctgcatgatcgggtacgggttggcagcggnggcttcgctcgatccatgggcggcatgctgatcgaatggtgcagttggtgtggccagacaactcattgctgtgcactccatggatcggctacgatcgagactcctagtcccggcggtcttctggtgtgctcctgatccgggcactcctttcgcctggcccgaccttggttagcatctcgtggagtccgttcttgtgcgcgaggaggcgggtggacttcttttgtagttctttcaatctgcccggatgggggctggtcgctacgcgttggatggagttgcctaggcgtgactcttttcctgtacactctgccacaggttgttttccagtcgcgttagacgacttacagttcacactggtaccctggggggacaggtggcccgcagaatagcccaagggccccgtccctttgctcatggtctcatccagtgcctgggggactttccatttagtttcattcctttctggcagtcggaggactgcgccccgtgggtgggagcctattccggatagggcggtgcgtggctccttgagagccaagaagagtggacgagacgcacattacctcctcaagaaacataatctccattccgtcaacttagcttttccttccctaagtggttgtactttttgcaaaccgtggttctttgcaggccggaatccgcataggctgagtggactttcggtaaccgcgtaaggtgtcatgtaacatcaaacagtgattgaggtcccgtaccaggttgggtatacatgttctcggtcaattctttacatttcagcgcgattcaatcgcttaacgggtccatttggttgtggggggtgccccccgtgcgaggtgttcagaacgcgatggtttctatgggcccattccggttgggggcctcgccctacttaaagtttccttccgatgtggccaagttgtgggaagccgttgaggtgtcatagccttgcagttgtggagttaggccgtaggttgtgcgccggcagagcatcggttcggggagtcccccaccccttttccaggaggaagggggcaaacacttcccgtgggtaaatgggatagcccaaagcgttttaaccataggttaccggttgtttcaactcccaatggcggtgcgagcccataagaggttgggtcaaaccctcacattcccgtggaattataggcttgggaagagacaaagattcctttctggatttagggagagaaggcccaaaa

SEQ ID NO: 503516 - DNA, 755 bp, Homo sapiens
gcaagaatgtgcccaaccttcatgtcgattgaaggccatgcagctctctctaagtcccgaggctgacgctgaaggaacagtttgcctgggagacgattgtctactggtaccttacgcaactggaggcgtatccgagtcatctccggtggattaccctgtcgatctgacccccggcgagattcgttgctctggccatccacgtaacagaccgataagccagtcctaggagaactagtgtcgagtgcgctcgagacgcgtaaagggtcttgggagggttgagacgatctcgtgacgaagcactgcacataggagggcgacagcgtgaccagaggagtaccgtaccagagcggagtctgcatgtgctcaccttggatgccgtaccaacgaagagccgaaggtcgtggggcttggggctcagcgaagcgcgaattttcccaggtctttacgagcgccggacattgttggtacggttgggaccgcttggcgtcaccgtcgcgagccatgcaagatcaacatcacagtctgcgtacagatggcgagtttcctcttttggggccattcaggagattataaagcttatgaactatggccccaaaacatgagaaccttttggcaaactagaagagaacgaacagcggccttactaaccactctgcacggccgggcacatcttaccacacttgcggggctcgcggggcacacaccgaaggcgcgtcacatgcacaccacttgtgcgccatcatggcgcgcacaaa

SEQ ID NO: 503517 - DNA, 286 bp, Homo sapiens
taatagcgacgcaattaacctatcaagtcggcaaactgattcaccttcagccaactccacccaagaagatgggattgcccagaacctcctcacgtccccgcttcctaaagctattgcaacctgagaaaatggcaccgcccaccctcacaccctctgattggatccccaagggccaggcaaagtataaattcgccaggtaaggaccccttaaacatttcctcctctctctgcgcaaagccagggagcagacggttccccgctgcgtgcgcaagcggtcgctaaattt

SEQ ID NO: 503518 - DNA, 483 bp, Homo sapiens
tcctccctttgggccaagcacaccagagaaaactgtgaaacctggggggtaaatggttaaccgggtcctttggtggacataaaggaactgggcatatgggagcccttggctgtgaagctgcagacttataaaacaccagtggagacggcagttttgtttctgcgaatttatgacatcgtttcgggccccaaaaaaaaaggcgattcccaaaaccggcaaggcggggctccttattctggccaggagtgagtgctaggcaagggttttttcaatgcccaaaaccaacaaagtttccccttttcttgagccaaagggccaggaaccctggggaggtttttgttcaaaagggatcaggttggggggcagccccccgtccctttttgtcccagcccagttttccaaaaaaccctgacagggaatttttttttattgtaagggttccctttagtttgcttccgatgattaaatttaagtcctttgaga

SEQ ID NO: 503519 - DNA, 324 bp, Homo sapiens
  misc_feature (93)..(93): n is a, c, g, or t
  misc_feature (270)..(270): n is a, c, g, or t
agctgagcatccaagccacttagtagcagccgtggctcgatcagtcagcaagacttgcatttattcagtaaagattaattgacaaaggttgtnagtcaacaccactagagggaaattgacattgcggacttccctaagtagaaagcaatgaagcacctgcgattacataaaaggttagtcttaggaccacatgagtaaacaagttagttaggagacattccccacattcctttgcttctactctaatttatttaactaaaggtaggggantgggtgcctttcagccgggtttttttactggaagtttttacaaacggttcaggg

SEQ ID NO: 503520 - DNA, 919 bp, Homo sapiens
ttaagcttagaaggtgacagcgcaggatctaatgttgaaggagcaggcggtagcttgtggagtctgatgattagtaataacatctttggcatagatagtagaataaaataagctgattactttatgaaatatatagctcaataggtttacgtaaaaattgttgctgtagcgctacattgtatcttaatagttaacttgtaataggtaaagcattttacaccagaggaattatgaggtacattagatagagttgaggatgagggataggaaaagtatcagaggtttctagtacatgacctgcaggtgaaaatgacaagtcttcatttatgggagcttcataatggtttctagatatgaacaaaattgtacgaatgaaagcgtatctatctagtacgacccaagaatatattaaatagccagattaggagagagggcaaaaggcatttatggaattggaaaatgaagggtgactttggacattgtttaagctgaagatctatgaaagttagtagaggtgacttggaataattctgaattgggcgaactctcatatgaaatgagattaaagaacgaagtgtgattgataacgacgcttgagaagtccagtagaccgcagaggtgaaatggcgtcttatgaaaaagcctacttaagagttgcgttatatttaacacggcaaggaactgggcgtgtgaccgattcttgtgtgagttggttaggattgtaatccagatttgtcctgaacgatcagtaaagtctggaccgtcgtactatcttggaaggatgacacagtactgccagaagggtagttaaaccctgaattgttagcaacattggtccaaatttgaaagatattctcattctttcccaaagagcctccgactgcagtttccactggggaaatcgtgcaaagggaaacca

SEQ ID NO: 503521 - DNA, 529 bp, Homo sapiens
cagatgtgaaggagtttcttgtgtcctgcgttgaatgtaagataacttaaacttgggcaccacaaatggtacttctttgccatcagatggtaatctggaaagcaaaataatcctcaggctacagccaaagctgaggcctgtacagaaaccagaagtcaaatgggagctacagagactagtagcacttttgactatctgggaactgcctctttaaaatctcctccccacagaaaagtggtgtttttctgttcacccatagaaacatcctccacagcaactctttataaattctgttgccattacattcaatttccaatatccagcaaaagacacaaacttccaatcttaatattaatctcccacgccgcaacggcgggcgccctcacaggcgccccccacagccctgagcgagctgccaggtgggagaagcgcacctgagccaagccacgccgcgcctttccccgcccgggtcccgccgccctctccgggtctccacgtcccaacgcccgctggccgcccgcgcggccgc

SEQ ID NO: 503522 - DNA, 212 bp, Homo sapiens
cgaccaccaagaagcggcacggcgcgcacatccaatgtacttcgcaactgtctgaccagtcccagatccaggagtataaggatggctttcaacatagattgaccatgaaccgtgatggctatcattgacaatggaggacctgcactgacatgctgggcctctgctgggagaagaaccccactagactgaatacctggcagggcatagataga

SEQ ID NO: 503523 - DNA, 414 bp, Homo sapiens
  misc_feature (200)..(200): n is a, c, g, or t
  misc_feature (353)..(353): n is a, c, g, or t
  misc_feature (358)..(358): n is a, c, g, or t
ttcctacattatgaagacagagtccatgtggtcagtgtcttacccggtgtagggtaaatgcacctgatagcaataacttaagcacacctttataatgaccctatatggaagatgctcctgaatgtgtgtttcgagctagaaaatccgggagtggccaatcggagattcgtttcttatctataatagacatctgagccccnggcccatcccatgaaacccaggctgtagagaggattgaggccttaagtttggggttaaatgacagttgccaggtgtcgctcattagggaaaggggttaagtgaaaatgctgtataaactgcatgatgtttgcaggcagttgtggttttcctgnccagnctgccaccaccgggccatgggggtatgttggtccagcccaacaccacaggaccatc

SEQ ID NO: 503524 - DNA, 571 bp, Homo sapiens
  misc_feature (478)..(478): n is a, c, g, or t
  misc_feature (512)..(512): n is a, c, g, or t
tggcaggctctctacctccaaagcagagggtagcatctggctggcagtagtcacatggcctccttctccggtgtccaatctctctctcgggcccccactcataaggacactggggatggcatttaggggtccacccagataatctaggataatcccctcatctcaagatccttaatttaatgacaggtgcaaagtccattaggtcatataatatgcacaggtgacaggggttataaaggggtatatggggggggccactatttagcttaccaccagggaagcaagctccaaaggtggggaagaaacacagttcagatcccgggtccacatgaaagaagtgtccgataaggagcctgggcagcgtccccaggccagggtctttcttaaacggtaagggctggctatttaaataggcagcaggccaggcaggggggctcaggacggtaatactagcacttggggaggccgaggcaagggnatcactagaggtcaggagttggagaccagccggnccaagatagtgaaatcccgtctctactaaaaatacagaaactagctgggcttgaatgag

SEQ ID NO: 503525 - DNA, 310 bp, Homo sapiens
ttcgagcttggacccgtgtgcgtgggtgtgtgtgagtacgactccactagtggacgagctggtgctgctgctccagcaggtccaggttgggggggtagttcacgaggctgcaggcatactgatacaaggaacggaagtgagaccccagcctaccagacagctgaatgggtatgcgcccgatctcctccatcttggactggatccagggccccacaacattgggcgggctgacgaactgccggcgcaggagctgcgcgctgtagcgtctgcttcgcattctccaaggatctgcggagcagctcgagacaca

SEQ ID NO: 503526 - DNA, 802 bp, Homo sapiens
  misc_feature (4)..(4): n is a, c, g, or t
  misc_feature (69)..(69): n is a, c, g, or t
  misc_feature (84)..(84): n is a, c, g, or t
  misc_feature (91)..(91): n is a, c, g, or t
  misc_feature (104)..(104): n is a, c, g, or t
  misc_feature (106)..(106): n is a, c, g, or t
  misc_feature (124)..(124): n is a, c, g, or t
  misc_feature (171)..(171): n is a, c, g, or t
  misc_feature (182)..(182): n is a, c, g, or t
  misc_feature (184)..(184): n is a, c, g, or t
  misc_feature (189)..(190): n is a, c, g, or t
  misc_feature (193)..(195): n is a, c, g, or t
  misc_feature (277)..(277): n is a, c, g, or t
  misc_feature (299)..(299): n is a, c, g, or t
  misc_feature (354)..(354): n is a, c, g, or t
  misc_feature (395)..(395): n is a, c, g, or t
  misc_feature (400)..(403): n is a, c, g, or t
  misc_feature (412)..(412): n is a, c, g, or t
  misc_feature (424)..(424): n is a, c, g, or t
  misc_feature (483)..(483): n is a, c, g, or t
  misc_feature (530)..(530): n is a, c, g, or t
  misc_feature (657)..(657): n is a, c, g, or t
  misc_feature (666)..(666): n is a, c, g, or t
  misc_feature (679)..(679): n is a, c, g, or t
  misc_feature (705)..(705): n is a, c, g, or t
  misc_feature (708)..(708): n is a, c, g, or t
  misc_feature (714)..(714): n is a, c, g, or t
  misc_feature (726)..(726): n is a, c, g, or t
  misc_feature (728)..(728): n is a, c, g, or t
  misc_feature (736)..(736): n is a, c, g, or t
  misc_feature (756)..(756): n is a, c, g, or t
tctngggacatagcacctgagcaggacacctcagtccgatgtagagtgtgaccggcaccaaggcatgtntgccctacccaagangggaganaggccctggggtnanttgtatccagcccttcangaccccaagacctgtcccccacaggggccagggctgaagcaccaatnggaggcacctnanggtannaannngaggagggaggatggggtaacagaacctaggcagcagaagcagcagacgggggtccggccccctctccaagttcagccagtncctgactgaggtcatgccccancgtcctttcccctcgaaccccacctgcactcagctgaggatcttccggggcagtncaacagcagcccggatgaagactgcatcatcccgaacatantatcnnnnaaaaatgtnctggtgggagangaacttgggataaccaaagcccagagaactctcatccagggagccccgccacgtgcctngcttctagaaaatcttccagtatgggtcggggtggaaggtctcagtnacgtgctgtggtttagccagcccagggtcgctctgatccagcagggagaaggtgacacggcgggcaaagggccactcaaggagattgtcaaaggcaccaggcagcacacgaatgtccagtgagaagngtgtgcccncaccactgccatngccattgaggaatgcagaaacctgcngcntgtgancatacttatgtntnttgaaggntgggctgaagcactcaaggntgggcttggccttaggctcctgtagccgccgtccatagctgccaat

SEQ ID NO: 503527 - DNA, 342 bp, Homo sapiens
ttttttttttgagatggagtcttgctctgtcacccaggctggagtgcagtggtgcaatctcggctcactgcagcctccgccccgctgggttccagtgactctcctgcctcagcctcctgggtagctgggattacaggtgcacaccaccacgcctggctaatttttgtatttttagtagagaaggggtttcaccatgttggccaggctggcgtcgatctcctggccttgtgagcctcccgcctcggcctcccaaagtgcagggattacaggtgtgagccaccacgcccggcctagtacatccacttcttaaaagccctcctcctggatgtgggcacagcattc

SEQ ID NO: 503528 - DNA, 588 bp, Homo sapiens
ccctagggctgtacgctctggggtttatggagtgaggcggcggcgctgttgtcctgtgggtctgccggtccgtgggtctgccctggccgcccggcccgccctgtcccccggggcggctctggctccatggccctgtggcggcggctggcggcggcggcgggtgtgagtgcgaccgtgggcctgcggtgtgcctgctgaccgtggctggcgtggaggcggctgggtgccgtggccatggggtgactgtgaacctgtccgcatgccgcctggatcctgggagccctgcccaagtcggatgcggtgtcccctgctgagccccgagcgccggcagccggatgccctgggcccactgggcgggccagtggccgcctgcgggatgagcagactgctgggggggacgctggagcgcgtctgcaaggcttgtgctccttctctgcctgctgcacttcctcgtggccgtcatcctctactttgacgtctacgcccagcacctggccttcttcagccgcttcagtgcccgaggccctgcccatgccctccacccagctgctagcagcagcagcagcagcagcaactgctcccggacca

SEQ ID NO: 503529 - DNA, 546 bp, Homo sapiens
tttagataaagtacacgaatcttaaatggggaatttgataacgagaacgtcgatccaaccgcctatagacatgtttgtttgtagcaacatttatatttatatttcttaagatcaaaatactcttgcatacttatccacactcaatcaagacagatgaccacttttgtttttactatactctaagttttagggcacatgagataccatctcacaccagttagaatggcgatcattaaaaagtcaggaaacaacaggtgctggagaggatgtggagaaataggaacacttttacactgttggtgggaccgtaaactaggtcaaccattgtggaagtcagtgtggcgattcctcagggatctaggactagaaataccatgtgacccaggtaatctcttttaatactctgctggatgcattactgaaggatttttacattgcatttcaggaacgagattgcgctgccattatcctatttcacatgatattgtctgcgttagatgcagaagcatatacgccatgaaatatctttggaaatcatatctcatt

SEQ ID NO: 503530 - DNA, 302 bp, Homo sapiens
aaagctgaggtcgcttcatcagaggtgaccacaaccagaagaaccaacaagtactaatgacgtcaataataagtctgatgttttcatcgtcaataacttcataagtaacattcttaatcaccatagaaaaataatgaacaagtaaaactcttataaaaccaatatgggaacaatcatgatcacttatagcattatcaccaccattctttaatcactacttgtcgtaattttaatcacaatcaatagttatcataatcaccaccaatagtaatcttattcactacttaccacaaccggaagaa

SEQ ID NO: 503531 - DNA, 219 bp, Homo sapiens
gttaccttgggggaatgctaacatcgctactccctcaacagggaatcaagggctgagtagtggcttgtgcgggccgtttgagggcaattacgaagtctcaaggcggattttagcccacagtgtctaagcatagatgccctttgtccttttgccatgcccaaggtggcaaaggcctttaatccacaaaatgggaacttcgttggcgtgtgcccccttgcc

SEQ ID NO: 503532 - DNA, 522 bp, Homo sapiens
  misc_feature (45)..(45): n is a, c, g, or t
ttaaaccctctgccctttgaaagtagatcatgttcactgcaatgntggacactacaggtatctggtccctgggccagcagggacctctgaaaccttctttgtggccttttttttttttcatcctgtggtttttctaatggactttcaggaattttgtaatctcataactttccaagctcccccccttcctaaatcttaagaactttaattgacagtttcaattgaaggggctgtttgtagacttaacccccagtgaaagcccagccctcatgacaaatccttgaatgtttttttaaaaaaatgatgctggtcatcgcagcttcagcatctcctgttttttaaagcttggctccctctgctgatttcagttttctgggttttcctccctcagccccttttcacccctttgctgtcctgggtagtgatttggtgaaaaatcgttgctgcccccttcccccagccccatttatgagtttcaagttttattattgcaataaaagggctttatgccggcttttttca

SEQ ID NO: 503533 - DNA, 1186 bp, Homo sapiens
ggataaaaccatagccccgaaacccacatccaccttactaccatgacaaccttagccaaaccatttacccgaaataaagtataggcgatcagcacactttgaaacctggcgcaatagatatagtaccgcgaaggggacaagcatgaacacaattataaccaagcaatactatagcaaaggcactaaccccttataccattctgctatacatgcacatcacactagaaacatacactttgcacaggcagaagccacaagcttaagaaccgccctgaaacccagacgagcttacctaatgaacagcttaaagaggagccacacccgtactcatgtagcaacactagtggggacagcacttcatacggtagaggcgcacaaaccttaccgagaccttgtgttgaatagctgagttgtccaagatagaatctaacagttcaacctttaaaatttgcccacagaagcctctaaatcccctttgtacacattcaccttgtaaggctccacatggtcaggcaaccaggctcattgtgggacaactaagggaccataaccctttgtcagacgcacgagtacaaacaatttaaacaaccccatacgctacggccttacaacggcgagaccacccaatttcagcgacaatgcgtccaatgctccaaaaccccaataccctaaaaaattccaaaagcattataacttgaaacgtcctcacaaccacaaatagggacaaatctatcaacccgtatacgaacgacactacatgtcagtataaaagtaccctgcaacaccattcctcctaccggcaaaacgccagaggatagcactgacacgacccactggcagctgtgaacaattaacggggcacagataattcaacgatatatagccaacagggacattatatacgcctacacgtggttaacccaaagtgcgaacactgtgtcctaaggaacaggtttatacacacatgtaacaagggtgcctggcgaacttatcacccgcagctgttaccaaaaagagacttgcgtcttggccacaccggttaaggacaccacgcatcacgtgccacttataaaggcgacgcgaaccaaaccggcactggctcatcactcacgtgtcgcaacgagcgcagtagatggccacgcggcacagtcttacctcaacacagatactgcgcgaagggtggcaa

SEQ ID NO: 503534 - DNA, 729 bp, Homo sapiens
agagaaaaacaggatcatcatcagaaggatctgcatggaagacacccagcaagcccatgaggatgggcatgagagcaagcatgcatgccatcatcctcaaccatcatactgttcccgactcaaaggctgacatacaccagaccacactgacgagagccatggtctcgggccatgatccgacctcttcaatgactccagacccatgatggttcatggaggagagcatgggatgccctaaatgccatcacataagaagctggatgcatggacaacacagattggcactcattgaagagactgcacaaggaaatccggctcatagaggaacgagagcaaaggcgagcatgtgccagagattactagactacccgaagaagggagtgacctccataccttccagagttgcagggaaggagtcctgactggacagaccctgagcagaaggaggaggcagaccaaagacctataggcttggtaatccgcctgacctcgagctgacgccactgaggaccctccgatggctcagccatcacatggcccatctgatcctgatcctgtggggaaccaggttcagctggactgtgaccggcggctctgctcggagacactcagactcttgtaggctaaggtgggattgccctgaaagcccttcctgcccaagcttgcagacactttcacccaagcctgaggaatacaccgggtggtgcgctgaaggcgcactgctctggg

SEQ ID NO: 503535 - DNA, 605 bp, Homo sapiens
ccgagagctgactgagatcctgtatcggtgtatctgagtcacgatcgtgatagctgggattacaggacgtcgaaacatgcccagctagtatgctgtataaaagtagagataggggtattgtaccatgtgaggcaggctggtctcaaacatctgaccttgtgatccacccgccttggcctccgaaagtgctgagattataggtgtgagccctgtgcctggcctgaattcttataagttctaagtctatgttctttattgggttggtgcactatggttctttctaaaagatcctcttctattccaaggttatgaggatgtccttttatgatttctcttagaagacttcacttgaaatatagtgtttcatctgacataaatttttgcgtataacttcaggtaggtgttgatgtatagttttctttcctatgtggatatccagcagttctaagaccattgtttgaaaaatattctttctctattgaatcgccttagtgttaggtcagaaagcagctgagcttatatgtgtacctccttctcttctatcgatgtctttccctggatatactcaagaaaacactatcgtaatcactgtaacttcatagtaa

SEQ ID NO: 503536 - DNA, 264 bp, Homo sapiens
  misc_feature (52)..(52): n is a, c, g, or t
  misc_feature (117)..(117): n is a, c, g, or t
  misc_feature (191)..(191): n is a, c, g, or t
  misc_feature (202)..(202): n is a, c, g, or t
gagaaggagccttgccagtttgatgaaaagtgtcctcagcatcatgcctggnctgagtgggagggaaaccccactcatctgtcctgtatgtacaaagtacaacctgagaatcacaancggtgtggtggtgtgtcagtgtggcctgtccatcccatctcatgcctgtgatacttgggctgtgagcctctagngccagcttggnctcacatcattctatggggttgaaggcaactcattccctctgaggagccttgtacatacaag

SEQ ID NO: 503537 - DNA, 152 bp, Homo sapiens
ggtgtggtgatctagaggatccctaaatctccatgatagctgagctccacggagtaggacatgttgtcgttggtctgtgtgtctccgagagaagaggtcctcgcagagctgtgggatgatgccctgctggtccttctcctgcttgcccatca

SEQ ID NO: 503538 - DNA, 420 bp, Homo sapiens
atcccgggactcagtgattgtcctacctcagcctcttgattgagttgagaccacacggctgcgccagctaattattttgtattttctgtagagatagggttttgccatgttggacaggctggtcttgaattcctaggttcaagggatccacctgcctccacctcccaaagttctgggattacaggtgtgagccacggtgccttacagggtctcgctctgtcacccaggctggagtgctgagtgaagtggtgcgatcttggttcactgcaacctccgcccctctaggctgacgccatcctcccacctcagcctcccaagtagctgggaccacgcctgcctttataataataataaaaggaataaaaaaaaaaagataggaatctaacaatgtagaccaaaggatgatctaaaaatcctgga

SEQ ID NO: 503539 - DNA, 157 bp, Homo sapiens
gcgacctttggccctggccatctttgcactaactcatttgaattatgaaggtggcagtcttggtcagtagtttaaaaagtttccctactttttaaccctttttgaaataaaccttttacaggtagaagatttctattaataaaattatttaagttca

SEQ ID NO: 503540 - DNA, 328 bp, Homo sapiens
tctaacacaggtcaggtctcttacatgcatcgagtacgtgtatccagacacggacaaatcacgaggcttatcaggcggcaagtaccaagaacatgaactcatcatatcttctctcctaaacctgggatgataggcagaaagggcatccatacaactttttcttctgcattcggcatagaaaacatggacttccctgtagtctgtagtcacaaatcattggtaaagtagccaataaatccgtagccacttagtggcaggccacaggcaggtcagcatcgccatgagcccaaggacttcaagcactatcctgggcaacacattatggcag

SEQ ID NO: 503541 - DNA, 198 bp, Homo sapiens
ttgtttgtaactcttggcttttttatcacattacaaagtttttcgtcacactgcagggttgaaaccagaagttagttgcttagagaacataaggtcttgcgcaagaggaggcctcgctcttctgttccttctcggcaccaccctggatcttttggggctctccatgttcgcgcacgcctcacctggctatcagcttac

SEQ ID NO: 503542 - DNA, 651 bp, Homo sapiens
cctccacctcctgggttcaagtgatcctctcacctcagcctcccaagtagctgggactacaggtgtgcaccaccacaccccgttaatttttgaattttttgtggtttcaccacgttggccaggatagtctccatctcttgaccttgtgatctgctcgcctcggcctcccagagtgttgggattacaggtgtgagccaccatgcccggccccaacatgtgcttcttgctatgtctatgtttattttttcacctttgcttacttcttactactttcttcctcctacctctccctttacttcttcccccctatatctttcctccctctcttctctttaatccctttcccttcttcaccccaccgcttcttttcacttaattctgctttacctcctcacttcttcttccctcctctatttcttcattcttatcccctcttatctccaccttctctcctcctctctattcctctcctcctctgttcttctcctcatcctcttccttctctctcccccatcatctttctcaatctctttccttcctttctttccattctctacttgctcctctactactcttctactctcttctatcttctcccttttccctacccttatccacttctcccctttccgcttctccttctctttgtcg

SEQ ID NO: 503543 - DNA, 1293 bp, Homo sapiens
  misc_feature (176)..(176): n is a, c, g, or t
  misc_feature (179)..(179): n is a, c, g, or t
  misc_feature (200)..(202): n is a, c, g, or t
  misc_feature (227)..(227): n is a, c, g, or t
  misc_feature (238)..(238): n is a, c, g, or t
  misc_feature (259)..(259): n is a, c, g, or t
  misc_feature (262)..(262): n is a, c, g, or t
  misc_feature (343)..(343): n is a, c, g, or t
  misc_feature (539)..(539): n is a, c, g, or t
  misc_feature (634)..(634): n is a, c, g, or t
  misc_feature (701)..(701): n is a, c, g, or t
  misc_feature (721)..(721): n is a, c, g, or t
  misc_feature (726)..(727): n is a, c, g, or t
  misc_feature (808)..(808): n is a, c, g, or t
  misc_feature (832)..(832): n is a, c, g, or t
  misc_feature (889)..(889): n is a, c, g, or t
taaagaattacagagaacctagcacctctgttacagtgaaatgccccaactaaatactaccgtatggcccaccataattacccccatactccttacactattcctcatcacccaactaaaaatattaaacacaaactaccacctacctccctcaccaaagcccataaaaataaaanatnataacaaaccctgagaaccannntgaacgaaaatctgttcgcttcatncattgcccccncaatcctaggcctacccgccncantactgatcattctatttccccctctattgatccccacctccaaatatctcatcaacaaccgactaatcaccacccaacaangactaatcaaactaatctcaaaacaaatgatagccatacacaacactaaaggacgaacctgatctcttatactagtatccttaatcatttttattgccacaactaacctcctcggactcctgcctcactcatttacaccaaccacccaactatctataaacctagccatggccatccccttatgagcgggcgcagngatataggctttcgctctaagataaaaaatgccctagcccacttcttaccacagggcacacctacaccccttaatcccatactacgttatatcgnaaccatcagcctactcatcaaccaatagccctggccgacgcctaaccgctaacatactggaggccanctactcatgcacctaatggnaagcnngcacctagccatatcgaccattaccttccttctacactaatcatctcacacatctaaatctaactgctatcctagaaatcngctgcgctttaatccaagcctacngttttacaccttctaggtaagccttaacttgaccgacaccacgtaaaaaaacaaaanacacaaacccgaattgggtaactgggcaattgcctaaaggggcgatacaataatggccgggtttaaacggggatgggaaacactgggtaccaattatagcttgagaaaaccctttgccctggggaaacgcaagagcccccgagcgcttccaagtggccccgatggcaaggaattgcgcgaatttggaaaccggcaaattgtgaaagcctttatcaagggcgatggaaaactttatataaaaacccccaggggggggtccttgaaaagccttttaaagggccctcaggggaaacttttgggggcccctggacactccaaaatttgggggcgcacaatatagccagggcctcttattgtgggcgcccctccggaaggcttctttgggggagggtccccccctttcg

SEQ ID NO: 503544 - DNA, 199 bp, Homo sapiens
gagagagagagagatagagagatacattctttttttttccccgttctggttatttatatgctacttaatcccacatctccacttcttctatattttcaatctccatccttctcttctattctctttcctttatctctctactctctctcttctctatttcacctcctattcctctatttcttcctgacttttctctttt

SEQ ID NO: 503545 - DNA, 810 bp, Homo sapiens
  misc_feature (176)..(176): n is a, c, g, or t
  misc_feature (179)..(179): n is a, c, g, or t
  misc_feature (200)..(202): n is a, c, g, or t
  misc_feature (227)..(227): n is a, c, g, or t
  misc_feature (238)..(238): n is a, c, g, or t
  misc_feature (259)..(259): n is a, c, g, or t
  misc_feature (262)..(262): n is a, c, g, or t
  misc_feature (343)..(343): n is a, c, g, or t
  misc_feature (539)..(539): n is a, c, g, or t
  misc_feature (810)..(810): n is a, c, g, or t
taaagaattacagagaacctagcacctctgttacagtgaaatgccccaactaaatactaccgtatggcccaccataattacccccatactccttacactattcctcatcacccaactaaaaatattaaacacaaactaccacctacctccctcaccaaagcccataaaaataaaanatnataacaaaccctgagaaccannntgaacgaaaatctgttcgcttcatncattgcccccncaatcctaggcctacccgccncantactgatcattctatttccccctctattgatccccacctccaaatatctcatcaacaaccgactaatcaccacccaacaangactaatcaaactaatctcaaaacaaatgatagccatacacaacactaaaggacgaacctgatctcttatactagtatccttaatcatttttattgccacaactaacctcctcggactcctgcctcactcatttacaccaaccacccaactatctataaacctagccatggccatccccttatgagcgggcgcagngatataggctttcgctctaacgattgacaaatggcccccagactaacatactaacgtatggggccacgcataattacccccatactccttacactattgcctgcatcgacccaaactgaaagctattagagcacgaactgacacctatctccctcagcaaagccgttaggaatccagggaaaaggccgaggcacaaatatccgcggcgaaaaaaaccctttatgggcttggtttggatcctgcgccgtttgttcaagggtaaatgccggcn

SEQ ID NO: 503546 - DNA, 1089 bp, Homo sapiens
cccaaatggtgcgagatgatggtcgcgtggtgcttgttcgtgtctgacgtgtgcatcttctgggccgtctgctgggtcagcgtggctaacacacgtgacctgctggagcctacaagcgtggtgcggcatactctgggaacaggctctgtatttgtgtcaatattctatggaaataagtagagaatacctgtttatcttcctgcaattggaatccaacaaccaaggccttatacccgaaaagccccttaccagatgtcccgtaccacattccggatcctccatggcggatcctgtcgtgaagggatggtgcgccgagtataatcggaacgcagaagagacacgagacgggatcgtgggagcggtggttcaatggaagctgtgatcagagggtgctcagcgggctacgaaacgaccactagcaggaatgagtaggtgccgtgtggtcgctccacctgtcgtgctctatggatcggtttagaataaagtctgcctaaactgtgggcgcttatgcggtgcaggacgcgtggcgtcagcggaggtaccgacgggaaagatccccggacgacccgtgcaggacgacgcatggaaggagaagacgcgaaagaatgaaataccaggatccaaagaaccggaatcgatgaggctgcgcgatgacgggtacgagaaaaacggtcggagaaagaacgttgacaaatacaactgaggtccttcaaagacgtcggcatcatgcccggagcctggtacagagtcgatacgacagggatgcctgctgtgtcgcccagtgctgcctgaaagtgtgcgcgtgaccaggagggaccaggtcagtgcacagcaagcgcggaaaatacgaggtagtaccgaggcagggctaggagggctccggagtgctcaaaatcgggaaacggcgggactggacgtgaccatgagacaccgaacacaacggaggaacgcaaaggcacaaacccttgggcaggagagggggcacggcaacgggacaagggaaaggcagagcgcaaggtaacacaagagaaacgagacaccgagccgcgcttgtagaaaaaaagcgcgcccagtctaacggacgcaaaa

SEQ ID NO: 503547 - DNA, 237 bp, Homo sapiens
tgctgagacaacgaaagcctaggggaactttaggctagatatcatatattcacacgagtgaaggctacgtactctggtggtacactgggaatgtcctcagccattcagcaccatgcggacgagctccgccccatgggcccgtcacccccacaggatatgcctcacaatcgcttcctcgttgatactaccgttgctgtcctcatgccctgcccaccagcagctcgtctcttctcttgt

SEQ ID NO: 503548 - DNA, 182 bp, Homo sapiens
accgaggtgctcaagagtgtggtggccaagttcaatgcctcacagctgatcacccagcgggcccaggtatccctgttgatccgccgggagctgacagagagggccagggacttcagcctcatcctgggatgatgtggcctcacagagctgagctttagccgagagtcccggctgctgtagac

SEQ ID NO: 503549 - DNA, 154 bp, Homo sapiens
tcgtaggagggtgtcctgacggagggttggggtgaggaggactgtcagcttcgtgggatcttgctggagatcatcctcttcccgtttggattcattggctgtatggccttgaggaagcgacgatgccccaatttgtggagccagcttctgttaa

SEQ ID NO: 503550 - DNA, 392 bp, Homo sapiens
agcgagagagagagagagagagagagagatatggaaagaaactgatacgtagatttagggaattgtactcacatctgcttatctatagatcatcgtattgtcttgaatatggtcttgcattgcctcagacataaatgagcatattctgatgtactctttggatctgaactcatctccacaggttggactcactgcggggtctctatcttatttgggagcgttgattgctttggactgaccttcctcaggttcgcatgtagttgattgaggcagctaactgggcagatggagtccagcgttcaacgacagacgaatggcaggcaggcaacatcctctgtacgtcatattagattataccagccgtgaggtcagtccggcatgccttcggagct

SEQ ID NO: 503551 - DNA, 121 bp, Homo sapiens
gtttaccggtgggcttgcctggtgtgcacactggcgcccaataagagatagagaaagacaaacctgtccgttttgtagatagacaggaaggagccatggacgcagctcaccttgtctcacg

SEQ ID NO: 503552 - DNA, 176 bp, Homo sapiens
tggatcggggccctgttgaattaagatttaatgggattgctctttttgcaccagtaggttgtcattattggaaacaccaaaaactgtattatttgcaactaaagttttgctgccatacactaactcaaaaattttggtgttttcgttgacgtgatgattaaactttatgtgggtta

SEQ ID NO: 503553 - DNA, 399 bp, Homo sapiens
gaggtcgactctacggatcctaattctgcaccacagcaattctgcaccacagctcctacgtagctgacgcagcatgtgcactatgtctggctatttttttattttacagagacaggtcttgccatgttgccaggctggtcttgaaatcctaaacttaagtaatcctcctggcttcacctccccaagtactggggattacaggtgtgagccaccgtgccagcccttaaacatttttttaacagaaacagagactcactatgttgcccaggctggtgttgaactcctggcctcaagagatcctcctgcctaagcctcccaacatactgggattacagatgtgagccaccgtgccccgccatggatctgcttttaatgcctggttttagagcctcttagctg

SEQ ID NO: 503554 - DNA, 184 bp, Homo sapiens
tcagcagacgcagctgagttaaagacagaagatctaaagtggccaggtgtggtgtcctgcgcctataatcccagctactcaggaggctgaagccaggagttcaagaccagtgtaggcaacatagtgaggaacaccccccaatctctaaaaaataataaaatgatgagctgcgtctgctgaggag

SEQ ID NO: 503555 - DNA, 141 bp, Homo sapiens
  misc_feature (114)..(114): n is a, c, g, or t
cctccaaaaccgtgaaccacccactgcctgtcgggctggttggcatccagtcccacctcgaggggcaaggaccatatacctttgtagtcttagacacaggccaagaggcaccancccaattgataccagggtaaacagttg

SEQ ID NO: 503556 - DNA, 261 bp, Homo sapiens
ctccccgcttacctgaaaggaaagattctattctttggttgaggacacagacacttacaacatctggggaactcaaaaccttgaatgtctgtcatacgactctcgacaatctcacaccttacctattcccaaggaaccccagcgggcaacttacattgctccaaaataccctcctgatgtatcttgagatataaaagaaaggccctccacctctggctgtttcttgcctctaatcagaagaacactcctgttcataaacgt

SEQ ID NO: 503557 - DNA, 334 bp, Homo sapiens
  misc_feature (2)..(2): n is a, c, g, or t
  misc_feature (63)..(63): n is a, c, g, or t
  misc_feature (245)..(245): n is a, c, g, or t
cncctttctcacactggccggcacgggtgactggactccattgatggtgaagactatgtcggncaggctgctgatggcggagctgctgaccaccatgtcgccatctgagttctcgctggctccgatgtcgctctggatgttggcaatggggctggttggtccggtcagcagagaggcgcctgtgtcaacaatggcctggcagccctcagcgcagccgatggcctctccgttcatggtgatgctgnccacggtgatctgccagtaaccctcgacggtaacaggcacccagttcagacttccagtgtggagagaggcagtgtaccagtgtggagag

SEQ ID NO: 503558 - DNA, 282 bp, Homo sapiens
tcatgggccctgggggacccccagggcaaggcccatgggaaggaaaggaccaagggcatccttgggccaactgtcccccttttttgtcccctattctctcctttccccttttgttttcaaaaggctccctcctaggatggatcggggggtaggacaactgcagtcccatcccccagctctccccgcccctgtgttttttttcaaacatgagaaaaactggccagggtaaacttataaagcgtttttaatggttgtagattggaaaaaaagtatgtcctatta

SEQ ID NO: 503559 - DNA, 242 bp, Homo sapiens
ccactgcactccagcctgggggacagagggagactccatctcaaaaaaaaaaaaaaaggacacaataatattactgttataaagattaaattaatgtttttagaatacgtagtacagtgcctggaaattagtgctatataatattttttatttcaataaaattagcagaaattatgtggaatgagagaaaagtcttgaatgacatcaaggtttctgggttttttgatagatgatgctgccat

SEQ ID NO: 503560 - DNA, 205 bp, Homo sapiens
agccggaccattcaggcaggacgaggtactgggggcggggcgcattcgagagcccaggggagctctgaggctgaggccagctggtgctcccgagctgggagagggcagcctgggcattcagagcgggattatctttatccacgtctgagtcgagttcctgacaaggccacgcagtagattttccgctgttggtctgggaggaaga

SEQ ID NO: 503561 - DNA, 580 bp, Homo sapiens
attacagacaccaaaaaggtacagaggctaagtaacctgccagtgaagtggtagggacaggattcgtcgtgcgtgtctagtgttcttgatgagcacatgctgctactcttcaaatggaaaaaaaaaattcactatcacccagaaggcgatcatacgatgatgaattttgactttgctttttatttctaatccttcatcataaaagacacacttcctttgcagtttcatattctggggctaaaccatagctcaggaactttttcatttagaaaaaagaaaaaaaataggtcccagttatcatctagtagttataagagatagggaaggcattaaactacattattcctataatccttacaagagaatttcaggttcagagaagagactatcaaaatgataaacaatagtgaagtggtaattcagaaaagttcaggtttaagtttcatcttaatcttaatctcatggagggacatatattaaaagtaagaacactgacaaagtgagagataacgtaaactggtactcatcgtagggcttgtagataaaaaccaggtttcttaaaaccttgtgagtatctttt

SEQ ID NO: 503562 - DNA, 264 bp, Homo sapiens
ctgtgggacttgggattacaggagcccgccatcacacccggctaatttttgtatttttagtagagacggggtttcatcactgtggccaggctgatcttgaactcctgacctcaggtgatcggcctgcctcggcctcccaaagtgttggagttacaggcgtgcgctacggcccctgcccctcccccccgccttttttttttcacgattcttattttggtgtgcaaattctaccattttcttagaatggcttgaagatttggaggc

SEQ ID NO: 503563 - DNA, 144 bp, Homo sapiens
gtaatagacgaaaatgtggactaagccattgcgagggatatcggaataagctgacaacactatactaaaaatatagtagagagcatatagagagagcaccgttgacatcatatacgttcctcgccgtggctagtaacataagat

SEQ ID NO: 503564 - DNA, 444 bp, Homo sapiens
  misc_feature (161)..(161): n is a, c, g, or t
  misc_feature (193)..(193): n is a, c, g, or t
  misc_feature (269)..(269): n is a, c, g, or t
  misc_feature (443)..(443): n is a, c, g, or t
tcaaaaataaatcccccccaaattccacaaaaccccaaaacccaatgtgaaattggtacctcagggatggcaaatgtagcccccagtgaagcatttgcccccacttgtttgggtattattgaagcacaattagaaaaatgtgcaatgtatgccccaaaaantctataataagggcccaggcgcggtggctcanacctgtaatctcagcattttgggaggccaaggtgggcaaatcatgaggtcaggagatcgagaccatcctagctaanaccatgaaacccagtctttactaaaaatacaaaaaattggcccagacgtggtggcgggatcctgtagtcccagctactcgggaggctgaggcaggagaatggcatgaacccaggaggcagagtttgcactgagcctactctccagcctgaacgacagagcgagaccccctcccna

SEQ ID NO: 503565 - DNA, 123 bp, Homo sapiens
gccccaggatgcttctcagcatactcaaaatttttacctggaattaggagggatgggaggagggggtggggcttacttgttgtagcgcattttatttttttaccagagcttcacagaaaatgc

SEQ ID NO: 503566 - DNA, 129 bp, Homo sapiens
ttagaaagaaaaatttttttttatttttaaaaattggaccatttagggggggggggctttcttcctaaaccccaaataaatttaaccatttcaaaggccttctattgggtttagaagttgattccccgg

SEQ ID NO: 503567 - DNA, 473 bp, Homo sapiens
  misc_feature (73)..(74): n is a, c, g, or t
gcagtcacagtcttggctgaactgagccctttcctcccagtgtttggcttggatgctagaccaggtcctgggnnaaacctcactcctggggaagctcctgcgtgctacccctgtcagctgggagacagctctgccgcatttttttcagctcctccattgctctgctgattcacagcctccagcttccagaacctttcccctgtcgggacagtagtccaactccgttttcacatgcttgtcctatttgctcgttgggttccaggaggctctctccgtcccctggctctgtgtatggcccatcgtccttaccacactgtcctgcaagtgctcgttaactcacctggcttctccactgccctctctgttccctcaatgaaggaaccctgggatcttgctcgcccctagtatctggcacatagtatacccccaggaagtatttattgtgaaaatcaataaattacttgaattgaaaa

SEQ ID NO: 503568 - DNA, 556 bp, Homo sapiens
  misc_feature (73)..(73): n is a, c, g, or t
gagaacccatgcggggaacttgcatccgccaacctgtctccaactctgtgttggggagagtggagacagactncgcgagcagccaaggtgttggagcagctcacagggcagacccctgtgttttcccaagctagataccctgtcagatcccttggcatccggagaaattaaaaaatttctgtcccctgcccagttcgaggggcccaggccaaaaaaatcttggagaagggtcttaaggtgcgggagtattagttaagaaaaaccaacttttcagatactggaaactttggttttgggatccaggaacccaccgttttggggtttcaaaatttgacccaagccttgggattttcggcctgggcttttatgtggggctgggtaggcccggtttcagcctcgcagacaaaaagggcagggcagggtgccttgggggccaacccagaatcagcaaaaaggaggccctgcgctgggttcagcaaaagtatgatggggtcatccttcctggcaaataaatttccgtttttatcccaaaaagccataaaaagttttcagtgga

SEQ ID NO: 503569 - DNA, 143 bp, Homo sapiens
tggtacctgaattcggctctctgggtgccactgctgtctagtgatgcagaatgcaaagccctcccgccacattgctccctgctgctcctccgaaggccaggctggcccccgtgctgggctctttgctctggtcacaccccgtg

SEQ ID NO: 503570 - DNA, 410 bp, Homo sapiens
  misc_feature (13)..(13): n is a, c, g, or t
  misc_feature (33)..(33): n is a, c, g, or t
  misc_feature (40)..(40): n is a, c, g, or t
tttgccctggccncttccggcttatgtttggtncagatcnacagacccaattttccggtcgatgatcatagacaggctgcagttcggttatgccgaagagtatttggtctagtgccctagttttcctattgtcaggtggaaatttctgggtaaggaaaatgactctagtcacaagtgcaagttgtgtggtacataggagcatctctttaagttctcttttaaaaaaacgagacatctgattacatcgaatgttatttccttctctttacactattatttttaaagttaaagcactggtctgaaaggaagctgggaatatttccctatattcatagaataaagccaattttgaattactttaatttagaaagtaacaacgtatgtgccacagacatttttggagggtgggc

SEQ ID NO: 503571 - DNA, 234 bp, Homo sapiens
tctgggagagacggaattatgtcccaaggaacaagatgctgcttgaccttccacacagacttctccaacgaggagaaggggaccatcatggtctacaatgggcttcctggcctactaccaaggctgtggacctgtgatgattgtgcttcccgggagcaaagtaaggggagtgaggatcccacagccccatgtgccaggcaccttggtgtcacaatttacggttgggatggctac

SEQ ID NO: 503572 - DNA, 103 bp, Homo sapiens
agcttgtacctcgatagggcacacacagtagtaggtgtatcgggaatgggtggaaagatggaattaggcctgggacacaccccgtcccacccgtacgggtgta

SEQ ID NO: 503573 - DNA, 359 bp, Homo sapiens
  misc_feature (35)..(35): n is a, c, g, or t
  misc_feature (52)..(52): n is a, c, g, or t
  misc_feature (55)..(55): n is a, c, g, or t
  misc_feature (247)..(247): n is a, c, g, or t
  misc_feature (249)..(250): n is a, c, g, or t
  misc_feature (349)..(349): n is a, c, g, or t
agcatcgaagttttaatgggccgtgccattccgcnggagcgacacagccccnacnacctcaaagagcagcaccacatccgcgggtccatcacacaagggatccctcggtcctacgtggaggcacaggaggactacctgcgtcgggaggccaagctcctaaagcgggagggcacgcctccgcccccaccgcctcacgggacctgaccgaggcctacaagacgcagccctgggccccctgaagctgaangnncgccatgaggcctggtggccacggtgaaggaggcgggccgctccatccatgagatcccgcgcgaggagctgcgcacacgcccgagctgcccactggccncgcggccgca

SEQ ID NO: 503574 - DNA, 149 bp, Homo sapiens
  misc_feature (128)..(128): n is a, c, g, or t
ggagaaccctgttgacattacactcccatcagaggagtgcacaaccatgtatatgacaggtggcctgcagttgcgaggaagaggaacttccttcatgaatggcagttcccagaaagacttttcatagntcaactacgtcagaccgggta

SEQ ID NO: 503575 - DNA, 284 bp, Homo sapiens
tgttgctgtcagtgagtcctcagctcaccccatttgaccctcacaacccttccttcttggcccatatagcaactgctcccacaaaaaagttcagaacattgagcctcagtaccagtgactcaacgtttgtgggatcaggaactagttcctggtcccccgatgtggagaaaggacatggtatttcccctcccaagaataacaccatgatccctccagcctcagtctgcagctcttcctgtgtccaagtctacctcctctgcccggacaaaatgttatgggaatcc

SEQ ID NO: 503576 - DNA, 1060 bp, Homo sapiens
agcgtggcgccgcccgcgccccactcgactccggaggctcccgcagccccggcgtccgcccgatgcccctccccgggggccatgggggcgcccgggactaccggacctcagcttgaggtgcaatctacatccaccagctgccaccgcgacgacagttccagaatccgcccggtgcaccagcgataaacgcgccccaagagcaggaagtaccagcaggccatagatagatggatggaggactgagcgaggacctggagcatgagaggcctgacgaccatcagttatacagtcggcatgtactaaccatcaatccgcatatacatgacatgactgacgagaccacccacagacgaccaccaccagggatacacaagaatcacacactaccgacccccgagggagcaaggcctgcagtacacgcctgagcatgcctaagcactatgctacggaagcacatatactcagtcacagagacatgaaacagataggacaatatgagcagtacagagatatgacatattgagccaaacaaggtagaggaagcacgatgaatgtgaggatgatcaccaacgcgtcgaggacagtcatggacgcatagaatggcaacagcacaaaagacaaaaaaaacatcaaagaaaccaagtgtgaagcaacccatgagctggatctgcgcaccgaccagggcagcgaagaagcgacatgaggccgcagcgcagagaagacacgaccagcaagcacgtgcaaacaacccccatgcgcagcgcaacggtcgcctccgaagacccagacaccacagagaacgcaaagggagggcaattcgcacatgccagcagaaagagagcagcatatgaacgaaacaacaagcacagaaccagatagaagaggaccacaataagaaaacccacgcaaagacgacaatcggagcacatcaccatcacgaacaaagcagaaccgtccacaccacgtcgacaccccaccaataaaaaaaagactaggcgacacaacaaaaaaggagacaccaaatagaaaaacaagaaataacaacaagttgggcatagag

SEQ ID NO: 503577 - DNA, 953 bp, Homo sapiens
  misc_feature (768)..(768): n is a, c, g, or t
  misc_feature (903)..(903): n is a, c, g, or t
ggcagacgttcttcgcctgagagtcgtctggggtttcctgcttcaacagatgctatggacgtgaacccaggcgctcgttcccccacccctggaccgggcctgcccatagccagcacctcctgtcacctcttacaccgcacccatcggaactagccccaaatggcccccgactgaccgttccaagcgccctgcgcaagacacaaccgcacggccgaccgccggccatactcactataagtcggccgcctattgaacagaccggaggtccaaccttcagctaggatgccgcaaaggaaattacacaccgagagacctcagaagggccagggcattcaacaccggccagaattcacaccctgggagcttcataagggcacatccataacggtttaaccgtggtccaacggttctataacttaaaattttggacccggccgaattgcagggcatcggctttgagaaaggaaaatttttggcccaaaaattaaccttttctcttcacccaaaattacttcattgaagggcagacagggtgcaacatttgccttgaagcacacacgtggattgcaagggtggcacagaacccaaaccgcagggttggcctggattcctttacctttccaggcattattccaagacaaacccagaacttgtggatgaccctggcgagaagccgggcttggaaattgccaacggggcagttgtggcccttaaccctttggggacaacacagatggttgcactcaggtcactaagtgggactttgcncaaacgtggccagtggaaaataattgacccccatttgtgttgactccatggcgaacattcactgaatgagccggtaacagcactccaacacatgggttgactctgaccacatggcgcaactagggagccgacatntgtggggcatatcattaaaccaccctgtgaaggaaacagcacacggtaaa

SEQ ID NO: 503578 - DNA, 566 bp, Homo sapiens
agtgagaaagatcttgccatcgattttaatgaaccgctgcatgcaaatcttctttacttcagtctcctgtcaggacatacttaagtatgccccgtcacgggaacagtgcttaggtgtggcactgtcgcacagactgaggtgtgccggctgtcatggaccgagccatggctcgccggtccacgtaatcgatcgcagtcctgacgagcggctggcggacgtcctcgcacaggccgtctgtttcttgcatgcgattctattgtggaccgcgtggtgtctactgcgtctgtcgggtccatcacaacggcggcaacccgccgtcacaggtttgatcaacgcatgcagtgctcactcacctatcaactgctagttgtaccctagttacgaggaggcaagtaacctattaaaaggtagttaggccccctgtgacacaggggaggaattgaacgagttacaaagcacagaataagagaaattacagacggggacgacatacaaaagtcgagatagaaagatcccgaaagtaagttaataggccaaccacaggactcggatacaaggaagttgca

SEQ ID NO: 503579 - DNA, 1234 bp, Homo sapiens
  misc_feature (362)..(363): n is a, c, g, or t
  misc_feature (492)..(492): n is a, c, g, or t
cgcggtggctcacgcctgtaatcccagcactttgagaggccgggtggatcacgaggtcaggagatcgagaccacggcgaaaccccgtctctactaaaaaaaaatacaaaaaattagcccggcgcggtggcgggcgcctatagtcctagctactcgggaggctgaggcagaagaatggcgtgaacccgggaggcggagcttgcagtgagccgagatcgcgccactgcactccagcctgggcgacaagagcgagactccgtctcaaaaaaaaaaaaaaaaacaaaaacctagctgggcgtggtggcacgtgcctgtggtcccagctactctggaggcagaggcatgagaatcgcttgaacccgnnaggtggagtttgcagtaagccgagatggcaccactgcattccagcctgggtgacagagccagactgtctccaaaagaaaaaaaaaaaggccggacgcggcggctcacgcctgtaatcccaacactttgngaggctgaggcagccggatcacgaggtcaggagatcgagaccaacctggctaacacggtgaagccccggctctactaaaaaatcaaaaaattagcccggcgtggtggcggccgcctgaagcttagctactcggaggctgaagcaggagaatcgtttgaacccgcaggttgaggtgcaagtagccgagatcgttcactggactcaacctggcgaagaacgggattagcttggatttatctggggccgaattcggctaattggcaattgcccttatgggggggatttcaataatgggcgcggttacaacggcggaatggaaacccctgggtcccacttaaagggctgggaaaatacccttttgccagtgggccaaaagaaagagccccaccgtaggctttccacaggtggcccctctagcgaaggtaattcgagcctaattttgttcgtctatatttgtcctcctttttacaagaggccaactcataatctcttacaacagataacccctaatagctcgtggtctctcttaacagggcctctcgactagggtcctcctcatgcgtcaacaccttttggggggcgcctctgtgacactccatcatatcttttcaggtgctctcactctttgctctcgcacgtccctattcttgttgcactctatgcgtcgatgttcgtactactcgtgactctctccgatctctctatttctgatacgctctatatctcctgtgctggctctgcc

SEQ ID NO: 503580 - DNA, 601 bp, Homo sapiens
caccacccccccccccccccccaaccatcgccagcatcgaggcctcgcttaactccctcacggaaacactaccgggtaacctcgctgtacgcctgagcacccagagcgactgcctcatcttcaatgccaccagcccctcgggttccaatgactgcagctactgcgagacagagttctcacacacctgtggcgcgagctcatcgaggtgcacctgctggcgccatgtgacatgcatccctgccttcctcagctctgctcaccctcgagctcttcagcctgccagacctgtggctgtatgccttgcatgtgctcgtgtggtgcatatgcctggatgccactctgcttggcctgacctgcagtgtcccctgcccctgccatgccacagtgctggtgtgcactgtcctgcctctccatgccccacagtggcatgcagcatgacttgacagacactgctgggacctactgtctggtggcttccgtgcttggtgtgctggccagcaccctctccactgtgcagaccccatgcgtccctggagcctggtgtgtgggcgtcggccaccagcctgggttcctcacacttgtgaaatagaatcttctcccc

SEQ ID NO: 503581 - DNA, 163 bp, Homo sapiens
tagcaggactcataggctgtggggagctattggtttaagaactgggaatacagttgattcccattattcacagtagttattttgtataactgttgccacaaacactgaattagtgtgatactcaaccactcgttcctaggagagggggtccggactgtcttga

SEQ ID NO: 503582 - DNA, 205 bp, Homo sapiens
aaacttcagtggtcgtggtggctttggtggcagccgtggtggtggtggatatggtgcagtggggtatggctataatggatttggtaatgatgggaagcaattttgggaggtggtggagctacaatgtatttggggtatcacaacaatcagtctacaaattgtgcgccccatggagggaggatattttgggaggcagaagctctcc

SEQ ID NO: 503583 - DNA, 557 bp, Homo sapiens
tgagtgtcacgtcacgtaggaaaagaacttacggatgtaactttaaaacgctatcacacctctatccctgtaccaaagaataaattagagtcaatgccggagggaaatggagacactgatttttaatttttatcaggaatctatttactcctttattggttctaacatatattttattgaaagctactaatgtgccaaacactgtggtaggagtagagatacaagggtacatgagacaaagagactctgctctcacatgtcttttgagttacacagatattggacaaatacttaaaagtatgttaaatttgctctttcactcaattcataattaagtttaagtttttttgtcaggttaaattgttggtaaatatagcaaatccagatcattcacagttcttgcttcttctcttacctatcatgtcctagatacaatggaaatgtaagggtgagcaaaaacaaacatggtttctaccttcaaggagcttagattctggaggaaagtcaaagattactgaaacaattatataaacacatataaaatccaaattgaggtc

SEQ ID NO: 503584 - DNA, 1275 bp, Homo sapiens
gatcaccatggtggctgggacccgtgtacacgtatcctgaagaacgggagggtgcttcaaggctctcatcgcgtggtcagtacagcggggctcaggtccgagtgtcgtcgtccggacgcaactccgatttcgcattgtcgggtcgaaatcaatcgcgaccgcctgcaatgtctccggcacaatttcctgccggctcagggccccagccatttgcagtggtgccatggatggcatcgtgtgctgctttgcagcagccaacgccgattgcccctcattcatgctgcagccagattgccaggcagcgtgctgcggggcacagttacatccaagccatgggcgagcagagcacactagagatgggctgcgagatagagcggtagaggcatctatcgcatggcattatcctggagtaactcagctagccgccgcacaaggccaacgttacccgtcgtgagctgagtctgacccacgacgcctctgtgggcctagtcaacttgcacccgactagagccacaccaccgaggaggcacaacgcatgaacgacagcagctcgccacacaacgcgcacgcgcccatgcctcgcaccacgcccggcaacacattaccctagaccgcgcccagtagacgctcggcacacttgaggcggtactcaacccttctcggcacacggcacaccgcgaccgggacaccgtcctcctcatccattggcgcctcgtcgccgcccgcaacaaccggggaaggcgttggcaaccgacatttactggcgcaccttgggacccatagatccaaacccaaaggcctatctggcttcccctgggcctacaccacacagctgcatcatggactggcagacgattctcattacgttacacgcccccacggcggccttcaccattcagcgaacgagcccccatattccatgtctgctccccaggcacccacaagcgacaccgttctacccacacgcacgaatattcacccacgacaaacacgggacgatcgaggagttcaccacatccaaacccccacttggccgacacttcattaaacacaccacaagcacacccggcacgcgaacacccccgggagaccacgtgcgcaccctttgcgagccagcccggcacacggagatggacacacaccagttcggcagggccgcaaacgaacaacgcacatggtggccccggacggcacaagcggacagttggccatacacaaaccacaagcagcatgggccacgcacagaacagccggaaacagccataaccaccacca

SEQ ID NO: 503585 - DNA, 381 bp, Homo sapiens
gtgaggcacagtacgttaacctaagccgatgacaatgagaagcaatcgcactcagcacgctgtgtgttctcagtgaagattgcttcctacgcgcacgtcaggtggtaccacaggcaaataggcgcagaatagagaagataaacgcgtaaaagaacgataggttcccgtctccccacaacaggttggcccatcccagggggcagtgattggtcaaatcattccacacagttgtcgcagacactgcagtgtgaggttcggggtggccggaacatcttgcaggtgaagcagtacttcagcttcaccatctggccgttgatcagcaccccccgggtccgaaggggtgccggttgtagaactgccctttgttgtcgccatctgttt

SEQ ID NO: 503586 - DNA, 401 bp, Homo sapiens
  misc_feature (155)..(155): n is a, c, g, or t
actatggagtattcactaagcatacacttacgacatgatatctttctgtatgtactacgtcataaagggcagggacatattatttagaaggactggtctttccatttgcacacttcaaaaagtctaatttattcaagctcttcatgtgctacatntacatcatcaatagagcccatttagataacctagcaattttctaagccacatcattttaaaatgtcacagaagttgtttaagataaactactttttgaatctgtggataatgtccttatgggaagtttatcttaaagccacaagtaccctttggcataaaaattacgacaaacgattctttcattggtcctgtaagtgaatttgactacttgttttcattaaaatatcacacccggttggagcagt

SEQ ID NO: 503587 - DNA, 216 bp, Homo sapiens
cattttgggggggaattctttttttggggcctccccccctccccattttccatttgaatggccccctagaaatgaagaaaaagaaaatgcggcagctacatttttgcctttattttttgagccttcccccccgtaaactagggactttagttcggttttatatgcaagggatccctattttatttaattttttttaaataaaaaatccaatagcca

SEQ ID NO: 503588 - DNA, 1662 bp, Homo sapiens
  misc_feature (279)..(279): n is a, c, g, or t
  misc_feature (340)..(340): n is a, c, g, or t
  misc_feature (371)..(371): n is a, c, g, or t
  misc_feature (399)..(399): n is a, c, g, or t
  misc_feature (419)..(419): n is a, c, g, or t
  misc_feature (445)..(445): n is a, c, g, or t
  misc_feature (452)..(452): n is a, c, g, or t
  misc_feature (486)..(486): n is a, c, g, or t
  misc_feature (494)..(495): n is a, c, g, or t
  misc_feature (607)..(607): n is a, c, g, or t
  misc_feature (647)..(647): n is a, c, g, or t
ggacatatgagaatcgaagcccatccctcgaaaatacaggtaagttctgcggtgccagctatcagaccccatgccacatcttaaattttccaatctagagacaagatgacgttagttacagaccctgggaggagtacagtcgcgctgccgagaagcttgacctcgctgaccctatgaaggcacagtgtggttctcaaatatacggcattctgactgggaacttgtgtgttgacagtaacacgatgatttagatataccaacgctcgagaggatgtacangaagattgagaaattccacagtcaactaatgcgacttatggtagccaatggaagcccgcantgttaccatggaaactgagtgaatggtttgnaatgaagactttgtcgtgtacttaggangtaaatatcttttgaattanagaaagtgtgggacagaaagtacttnatgtaantaagtgggctgttcagaagcttagaggtcatttntgtaattnnctttttaattactttagagagctagggatgcaaatgtttcagttagaaagcctttatttacttttggaaattgaacaagaaatgcatctgtcttagaaactggagattattngatgttaggtaaaacatgtaattgtttctctggcaaattngtatcagtaatttgaaaatgagatattaggaaaaacaattcttcttaaatttagttcatctttctttcaacacagcaacatatcaaatgtaacccatattagtccagatccatgtattatggagcatacaaatgtatgctgtagtgaccaataaatcataacatatggtaattggcacttaactccacaccactagtatgcacttgttcatacactactgtgtacctaattatagtatacgcagtgtagtctcaattaataatctgaaacgtaacttagtggcctaaacaagtatgcaatagaacttattctaccacatatcaaacactacccatgcaaaactactacacgggggatacacgcaacacaactacaagacaatagaccagaacgcaacgaggcactataggacaaaacataagtcacacacaccaacgacacacgaaaccccccacacacgcaataactagaccactgatacggacactggcggaacctgactggaaatccacaagatcgaccaaatacatcgggaacccgccacaccgaaacccaaaattagacaaggcaaaaatcacagcaacgacaccaataaataagaagcccaacactagacacacaagaaaccccccaccaaaccggcgaccaatgccaatacaccagcaaacgcacaccaaggacaaaaaaagacacgaatgacacaaaaccgtcccgagggaaaaaaacacaaacagaacacaaaaaaaacacaagaaacacacaacactaaaagcccacaaaaacgcaacaaaacaaagaaaacaaagcaaaaacaaaaacggcaaccccactggcaacacaaacagaacaaaaatgagacaaagttcacgaagagctaagagagagaaaagcaaagcacagggaaccatggaacagacccacatacagtgcaaacagggacggcaacaaacacaaaaagaacaagaacgagcaccgagaagcacaccctaaagaaaagcaaaaagaaaacagaaca

SEQ ID NO: 503589 - DNA, 1699 bp, Homo sapiens
  misc_feature (316)..(316): n is a, c, g, or t
  misc_feature (377)..(377): n is a, c, g, or t
  misc_feature (408)..(408): n is a, c, g, or t
  misc_feature (436)..(436): n is a, c, g, or t
  misc_feature (456)..(456): n is a, c, g, or t
  misc_feature (482)..(482): n is a, c, g, or t
  misc_feature (489)..(489): n is a, c, g, or t
  misc_feature (523)..(523): n is a, c, g, or t
  misc_feature (531)..(532): n is a, c, g, or t
  misc_feature (644)..(644): n is a, c, g, or t
  misc_feature (684)..(684): n is a, c, g, or t
ggtttcgacttaggtcgcgcgactcccggacgtagtgtcgttcgtgtggccgaggttctgaagccttgggtactctttaattgttccactctaggccatcgtatggctggagtaccagagcctgggtatggatgttcatacgtcgttgtccgaacagatgtctttacctcggctgacccgtatgagagggcctcgtgtggtcctcatgatatgggcattctgaatggtgaactgtgtagtgctaaagacgtaccgagatgatgatagttgggtcgggtgtataaaaaacaggaccagagctcacatgtatgtacangaagattgagaaattccacagtcaactaatgcgacttatggtagccaatggaagcccgcantgttaccatggaaactgagtgaatggtttgnaatgaagactttgtcgtgtacttaggangtaaatatcttttgaattanagaaagtgtgggacagaaagtacttnatgtaantaagtgggctgttcagaagcttagaggtcatttntgtaattnnctttttaattactttagagagctagggatgcaaatgtttcagttagaaagcctttatttacttttggaaattgaacaagaaatgcatctgtcttagaaactggagattattngatgttaggtaaaacatgtaattgtttctctggcaaattngtatcagtaatttgaaaatgagatattaggaaaaacaattcttcttaaatttagttcatctttctttcaacacagcaacatatcaaatgtaacccatattagtccagatccatgtattatggagcatacaaatgtatgctgtagtgaccaataaatcataacatatggtaattggcacttaactccacaccactagtatgcacttgttcatacactactgtgtacctaattatagtatacgcagtgtagtctcaattaataatctgaaacgtaacttagtggcctaaacaagtatgcaatagaacttattctaccacatatcaaacactacccatgcaaaactactacacgggggatacacgcaacacaactacaagacaatagaccagaacgcaacgaggcactataggacaaaacataagtcacacacaccaacgacacacgaaaccccccacacacgcaataactagaccactgatacggacactggcggaacctgactggaaatccacaagatcgaccaaatacatcgggaacccgccacaccgaaacccaaaattagacaaggcaaaaatcacagcaacgacaccaataaataagaagcccaacactagacacacaagaaaccccccaccaaaccggcgaccaatgccaatacaccagcaaacgcacaccaaggacaaaaaaagacacgaatgacacaaaaccgtcccgagggaaaaaaacacaaacagaacacaaaaaaaacacaagaaacacacaacactaaaagcccacaaaaacgcaacaaaacaaagaaaacaaagcaaaaacaaaaacggcaaccccactggcaacacaaacagaacaaaaatgagacaaagttcacgaagagctaagagagagaaaagcaaagcacagggaaccatggaacagacccacatacagtgcaaacagggacggcaacaaacacaaaaagaacaagaacgagcaccgagaagcacaccctaaagaaaagcaaaaagaaaacagaaca

SEQ ID NO: 503590 - DNA, 252 bp, Homo sapiens
ggaggccccaaaaggagtggaaatcaatgcttaagctggcaatatggaagccacctgcaggacagagctgagactggaatccaaagatggagaggtgagggatgacaaggacataatttcatagagcttctactttaacaggccaacccttcccataactgagtgacctcggagttggattctacagtgtttcacaagaggagccatacatgttatatttctgaaacaattaatatgagcactatgattatt

SEQ ID NO: 503591 - DNA, 270 bp, Homo sapiens
tgggtagccatcacccttcatgtcttgccatatccggcttgcattcgggcttgatgtggggaggggtattcacggggttggctagggtataacttgtctgggtcgcctaggagggtctggtgagaatagtgttaactgtcattaacggcgagaaggacagagaagtaagccgagggcgtcttagctggtgtagtaggggtggcaggtgcattttcatcggcagtgggcaggtgatacctcagggggtagatttgatccccggtcatcatg

SEQ ID NO: 503592 - DNA, 173 bp, Homo sapiens
tgaagcactggggaggtagggtggggagcgggagcaagagctgaaaaacttacctactggggactgtgctcactacctgggtgacaggatcatacgtaccccaaacctcaacatcacacagtataccctggtctcaagtccccccagttgcttcagacccaggtgcttcagaa

SEQ ID NO: 503593 - DNA, 277 bp, Homo sapiens
cgtgagcagtccaccgaaaggtcaagtctcataaaggtcgtcgatcaagtctcaagagtggcgaaagctgagcgtgatgtcaaaatccccagtcttgctagactgccttgatagcatataagagaagtagcccgcctcctgtcttctggcagctcctcccatctcttgacttccatggacatcatgtcatcctatgttgtctggggatcctcccccacagatctcatttgatgggcttctccgttccctaagctctactcgtggaaatgtgggtacc

SEQ ID NO: 503594 - DNA, 270 bp, Homo sapiens
aacggatcaggtttttgacccttgatgaagatttaagatttttaaccggaatcttttttttttcttttcccctcttcctctctaattctgaaggatcttttgtcttctaagcaaaagaactgagagattgagagggagggctgccttcttttttttccttgtaagtaattaggaaagaggtttaaaaaaaacagaaaaatagaaaaaaaaagaaactattttctttctcagaaatttattttttattatttttgtttttttttgagacag

SEQ ID NO: 503595 - DNA, 262 bp, Homo sapiens
gttggtacctctaagataagatctacgataacactgttggaaaggccctcttgccagagtcctgagagtgccatatggaatgcggcctccagggttacatcgggccctcagtggtacatggagagtgcgtctggttagtaggcccagagtgagtatgcgctatgaagtgtaagttacatcacatgtgtagtcccatgttcactaagcagactatgagagccactattaatggtcatagaatgggaataactctataatagag

SEQ ID NO: 503596 - DNA, 141 bp, Homo sapiens
cctcggtccatttcattaagcatctactaagcccggtaagagaaaaggtttgttgtctgcttggtagatgcttattgaaaatattgaactttcgttgaccagatatgctacagaaggttgtggcgtctttcttccctttct

SEQ ID NO: 503597 - DNA, 456 bp, Homo sapiens
catttcaagaataacaaaataaaattttctctttgtctgaacctgcaaaaaaaaaaaaaaaaaaaaaagggaaaaaaaaaaaaaaaaaaaaaaaaaaaaaaaaaaaaaaaaaaaaaaaaaggaaaaaaaacaaaaaaaaaaaaaaaaaacccttttgggccccttggccccatcctattttaaacttaacaaatctttttattccgccccaaattcaacctcatttgcccaatcccccttttagggattcttttaaaaataaactgccccttttttaacaccctcctacctggaaaaaccttgcctttcccaaattaaatcgctttgaacaacatccccttttcgccatttgggttaataccaaaaaggcccccaccaatcccctttccaaacatttccccaccctaaatgccaaatgaaaatttaaaccttattttttttctccgcctttttttt

SEQ ID NO: 503598 - DNA, 435 bp, Homo sapiens
  misc_feature (31)..(31): n is a, c, g, or t
  misc_feature (95)..(95): n is a, c, g, or t
  misc_feature (287)..(287): n is a, c, g, or t
  misc_feature (289)..(289): n is a, c, g, or t
ctggagacagagcgagactcatctcaaatanataaacaaaaataaaaataaaggctggacgtggtggctcatgcctgtaatctcagcaatttggnagcccaaggcaggcagatcagcaggttgggagttcaaaaccagcctggcctacatggtgaaaccctgtctctactaaaaacacaaaaattagctggccgtggtgccgggtgcctgtcatcccagctactctggaggctgaggcaggagaatcgtttgaacccgggagacagagattgcagtgagtcacgatngnccattgcactccagcctgggtgacagcacgagactccatctcaaataaataaataaatataaaaaaagtaaaacaggcatcaacagcctcttgggagaccccgagcagtgccgcgtgcacggtcaacatcacaagattcagctatg

SEQ ID NO: 503599 - DNA, 459 bp, Homo sapiens
ggtgacttatttcttccttccatcaagttatacttcaaatggaagaactgattctcctttttttctctaaggtggagtcccgctctgtcgcccaggctggagtgcagtggtgcgatctcggcccactgcaacctccgcctcccaggctcaagtgaatctcctgcctcagcctcccaagttgccaagaccacagacacacaccaccacacccagctaattttttttatttaaaaaatcttttttgacagagtctccctctgtcgcccaggctggagtgcagtggctcagtctcggctcactgcaacctccgtctcccgggttcaagcaattcttctgctccagcctcccaagtagctgggactacagcacacaccaccacacccagctaatttttgtatttttagtagagctggggtttcaccatatcggccaggctggtctcgaactcctgacctcatg

SEQ ID NO: 503600 - DNA, 399 bp, Homo sapiens
  misc_feature (395)..(395): n is a, c, g, or t
ggcaagattaacaaaattaggccgggcatggtggctcacgcctgtaatcccagcactttgggaggcccaggtggcggaatcacctgaggttagaagtttgagaccagcctggccaacatggtgaaacctggcctctactaaaaatacaaaaattagccgggtgtggtggtgggtacctataatcccagctacttgggaggctgaggcaggagaatcgcttgaacctggggaggtggaggttgcagtgagcttgagatccgtgctatttgcacttccagcctggggcgacagagcaagacgccatcttcaaaaacaaaaaaacaaatttcatgtttacttaaaagacaggtagcctttttacagacattttttgcccctttttttttttaactgantttt

SEQ ID NO: 503601 - DNA, 410 bp, Homo sapiens
ggcaaaactgttatttttatggattttactaaaaggcggtaccctttcaagatttatatgtttgtataatcataagaaaattgagccattaaagccctgttattcaatcctaatagtcagttttttagaacctacttttaggggaaatgggacattatttaatattatattaaacctcctatagggtggattgtagaccaaaggaaatgggaccatttttgagaatatatgttgattttttgtggctaattccaaagttggatttgaaaggatggcctcccagttttcatttgtccataacaaacatatgggtgtgtggggggatatatatatgtggggtgccaatgtttggtttataattttaatgttaataaaaattttgagttttattggaaatgatttccttttta

SEQ ID NO: 503602 - DNA, 139 bp, Homo sapiens
ctaccagcacccccgatccctgagaatgaggggtttacgggctgtgaatggaccttcagccctgccccccctccctcccccctgctggtgagtttgtttgatgttttggttgtgtgaataaatataattcccctttgga

SEQ ID NO: 503603 - DNA, 291 bp, Homo sapiens
agccaaatgcacgagatatctatacaaaaatttaaaaattagccggacatggtggtgtgcacctgtggtcctagctacttgagaggctgaggtgggaggatcgcttgacctggggagtttgaggttgcagtaggctatgattgcaccactgcactccagcctgggcaacagagtgaaaccccatctctaccaaaaagaccaaaaattagccagttgtggtggcgaccacgtctgtggtcctctgcttctcgggaggctaggatgggagaagatcgcttgggcgtacgggga

SEQ ID NO: 503604 - DNA, 279 bp, Homo sapiens
  misc_feature (4)..(4): n is a, c, g, or t
gggnggggggggcccccccccctttttttttttcctttaaagggcgggggggggtcccctccccccgctttttttttggggggggggggggggggatttttttttccgggggggaatttttccttccggccggccttggggggtttttttttgggcccctttagggggggcccgcggggggggtttggttttttctgggggggcccccccggggggggttttttttttttttttccccccccctttttttttttttttgggggtgggggggccccccca

SEQ ID NO: 503605 - DNA, 1062 bp, Homo sapiens
cgtgtatccggtagctagtcctgtcgcctcgtccctctacccgtatcatctgtgacccttgtgttgactcgctctggtctccggaggcttccttcgtcctgtctacagtccacgagctcctgtgtgtgtgctcaggttgggggtctgagcactctacagccccctcctgcatttcggtctgtcaggtctatttatctttgatgctcatgcggacatgctttgaaacctagaaatcagtccatcaagcaccaacaggctgtgaatagacgcgtcatcatcagttaatcacttctcgaccaatgggtgctaggtgctcggagatccgagattgtcatcggctaccagaaaaggatgagaatcggaccttgcatcactgacgtgtatcctcagacgttatctggcccactctgtcatgactggtgattcccgggccgtattagaggcacacacatgggtccaggtgaatgagcgctctcctggagccttaaaaattctctcgcgatgaaaggggtcatggcaaagcactgatggatagcacatcttcctttattcgcatgactcattctgactacccagcaactcgagatctactggatggcatgggggtacaatataacatgagtggtatactgcgaaaatgtgactagatgagttcgatctttggcagaacgcgatcattcagtgttgctggtacaacatactggttgactttccgccagtttgatggtcgacctgggaaagggtataagagactgaggatggctgctgttcatatgagttagtgagagctgattggactcggatcgcaccgggatactcctagtgacagtcgcaagtggaagaaagacagggaactgtatgttcgcaagatgaatccccataattgagcccaccggtgaagtggaccatcttccagaaagcatccggatagggccacgacttaagtggccttttgacattgttggggacgcatcaagaagaaggttttgggcaccttggcaaattgggttcctgaaccggtgctgggctcaaaagaaggccgaatttgaacattttatccga

SEQ ID NO: 503606 - DNA, 180 bp, Homo sapiens
actagtcacgggttggcttcctgtcccagatcaaaaccacaatgcgataccaccttactcctacaagaatggccataatcgaaaaatcaaaaaacagaagatgttggcatggatgcggtgatcaggggagcacttctaactggctgatagtgaatgttaactagatacagccaagccgtg

SEQ ID NO: 503607 - DNA, 96 bp, Homo sapiens
  misc_feature (71)..(71): n is a, c, g, or t
  misc_feature (77)..(77): n is a, c, g, or t
aatgactgcaccaacatcatcaggaagcctgtggtgtgcggagtctcctctcttggcatcgaccacaccancctccngggggatacgttggagaag

SEQ ID NO: 503608 - DNA, 1727 bp, Homo sapiens
  misc_feature (633)..(633): n is a, c, g, or t
gaaaccattattcaagactctgcatctttgatatccgatgtctctagccgtagtagagccatattttgaaaagagctttactcaaatacaggatcataacattcagctggtgtgtaagtgtgattaacgcatttagggtgaatttacaggacgtgttcatacacaagcacagtgctgatctttagcaacatttccatcaacttccaaagatcccctggtggccagtttgtagtcctccaagccatcttcgatctatcttgtttctatgacttgccttttctggctatttcatattaaatgggatcatcatgacatgtggtgtcctatatctgagcttttttcatttaggataacgtcgttgagggtcatccaggttggtagtactccatgggcatgataaggggggctacataaatatgtccattgtatggagtattacacatatttgagttatacagtttaatgggacatttaggttatgtgtacctttttgggattaataagatgggtggtgtgaacaatcatgtataagtcctctgtgtcagagccgcactttgagtaaatcagattctaaagaatttcatcttggaagttccaactcacgcggggcacggcattgtgacctctaaccgnggggtaacaacacacacttgcgctgcatcaaggagacggaacactcgggggagagaaaacacacccggagagaacggaacagtagtgaaagacccacagagaagtgccccagacaacgggacgggggtctcaacaacacccgctagttaatgtcgaccacgccacgaacacgctccacctgttaaaccacacggcggcgctaagcatggctcatcattgagcagcaccaccgtcgtcgcgacgacgggaagacataacaaccctgtagctaacacactcaacgacgaaccacctcctaatgtcttcgttattatattttgtttatttgatatgtaatacgccacgcagccgcagacagacaaagagacgagagaaggaagaagaagagaacggaaggaagagacaaacaaacaaaccaaatcaaagaggaaagacgcacgagaagcgaccacgacaacgcgcacataacaaccgaagagactggcgaccaccacaccgacaccgacgccgccaacccgaaccagaacacccaagccgagcagggacgaggcaagcaggagaggcaccacgcgacaaccgccgacagcgcagtacagataaagcaaagcagagacacgactaagacgaagaagaagagagcagagaggcggcgcggacggatccagcaggaggacgcaaaggagagagaatgaccacaagagacagagtgacgcgacgacgaagagagcaagagggaaaataggcacacgcggaagccaggcacaaccggacgcgaaggagaaaagcagggaagggaacagaacacgaccgaaaccacacgacgaggagggcgagtagggaggcagagacaggagagagacgaagagaaggcaagcgtagagcagaaggagagcgaggacacaggaaaagtccacagagcagacaggagcggaaagcaaaaggagcccgacgggcagacaaggcggagagagggcagcaccagacgagagcaaagagagagaagagggaggatgccagaaagacacaataccacgacgcagcggagcagagaaacaacacggaaccacaacaacagacacaccaaacaacagcaa

SEQ ID NO: 503609 - DNA, 940 bp, Homo sapiens
tcgagggaccgcttggttataagtgcgggtgcctggttggccatactcccgttgccttttgtcttactcgcagcgatttcttttatcgcggtcccagtgtaatttccgaaaaatagtggcacttgcgccccttacaggtgtctgtcctctgccgaaggtttgtgggatacccagccgtgtgcgtgggccttccccaataaaggtgctttccccccgcgttggtagatctgtccatcctgggcgcaccgtgtattccctgtcgcacatcctaaacttctaactccccgtgcctactcgggggagatgttcctccttagtgccctagttgctcccacaacacggcgcttttttggagcgaacaaccaccaccagtgcgggcgctcgaaagcaacgaacccagctgatcaagagtagggccgctaaaaaacaaagagtctcccgggcagggggtgcccacaccaccgggcaagacgccaccccacttgtgggcgagcgcgaggccgggcgagactccttgacctcctacagcaagtatgacgcacaccaccctttgggccaacaaaaaagggcaacccccctctctcttcctcggggtgcacacaaaaaagtcccggcacgcctgtggggcgcgacgcgccaggaaacccacatcttcggggggggcgtagaagcagcgagcacgtcgtggccctgggggaacacagtcgccccgtgcgcgtatcggtcgtgagggcaccacaccccccaccggggccccgagaggcagcctcccttcccacaaacaaagtaaataccaggtcagaacaaaacgacaccagtacgttgctgcaaaccggtgggcaaccccggagacagccccgcagaacacaccaggacgcgtcagtctgacagcggcagcaaaaacaacatggcccgagcgggcacccccaacaaggacagc

SEQ ID NO: 503610 - DNA, 364 bp, Homo sapiens
  misc_feature (155)..(155): n is a, c, g, or t
cgggttttttaaccccccccccacacgcccctttttagggggggcccccctgtgaaggggtggggggccccccccggggggccggggttttttaaaagggaaaacccccccggggcagggggtcccccccccccggggttgggcccggggccccnaatttttggcgggccccccccccggtttcccacttttgggatttgggcccccccccccctggggggcaaaagggggccccccccctgggggggggggggggggggggggcccgggctttttgaccgccggggggggtttttggggggggggttttttaattttttttttttttcccccccccccccaaaaaaaaaagtcccgggttcca

SEQ ID NO: 503611 - DNA, 238 bp, Homo sapiens
  misc_feature (62)..(62): n is a, c, g, or t
  misc_feature (82)..(82): n is a, c, g, or t
  misc_feature (86)..(86): n is a, c, g, or t
  misc_feature (122)..(122): n is a, c, g, or t
  misc_feature (210)..(210): n is a, c, g, or t
cggacacagggttatgatgctataattaggctggggtggtggtgatcaaattatgtgttttnggagagtcatgtcagtggtngtantataattgtgggacgattagttttagcatggagtangtttaggttatgtacgtagtctaggccatatgtgtgggagattgagactagtagggctaggcctaccgctgcttcgcaggcggcaaanactagtatggcatcctcggcacgctgcg

SEQ ID NO: 503612 - DNA, 414 bp, Homo sapiens
attaattccccccaccgagatgtatttagggcctatattcaacctttgcctagtacaaataatatgaatgtaaacattatagttaaatatttgtaccatatcccttatttcccttaaatccttaaaagtgaaattattggatcaaaaaggcatttgtgttttacaggtgattgcctagatatttcccacattctgcaattcacagtgtccttcagaaagactatacccaatttatgcttcaaataacagtctttcagcctaggtgattgggtatgtggtaatactattaactgagtaaaacttcctaggagaacctggcttaggggaagatgcttggttcagactggaatattataactgaattattttcattagcccccttgatattcaaaacccttgtgtgataataacaac

SEQ ID NO: 503613 - DNA, 137 bp, Homo sapiens
tagcaggatcttaccaagcacaccagagcacctcaaagttcttacaaaagaaggagctcggcaggcacggtggctcacacctgtaatcccaacactttgggagggcgagataggagaattggttggacccgggaggt

SEQ ID NO: 503614 - DNA, 272 bp, Homo sapiens
ccatgttcttaacaagggtctgcacctgctgtggtttgaatgtgttcccgtatttcatgtgttggaaactgaatgcccaacttagcagtattgaaagatggggcctttaagaggtgattggatcctaaggcctctgccctcatgaaattgataaatccacgtgtggactaatagattaatgggttattatgagagcaggactggtggctttataagaggaagagagacctgagctagcacacccagcccccttgtcacatggccactcaata

SEQ ID NO: 503615 - DNA, 553 bp, Homo sapiens
cgtgcaagagaaaacttccgttctgtgccttgggttaagatcccctttgtactcctcgtctgtaagacctctcttatcacaacggtacccccaaaattagagactgtgcagtatccactctgtaaccctcagaagcctactgctgtacttgggcttcctacgtacgacggtggtactgactatacgtgagtgacattgttttacaagacttggcccctagagagacgactgcttacgggttcaacatcgtgatcctatcaggtacctagctggtagccttaagtaagtcacttagacattctgtgactcagtagtctcatctgttacatgggtacaatcaatacatatctctgaaggctgctgtgatgattacctgcaatcactacatggcacagtacctggtatgtaataagtacccaattaaatataacttttttcaggaagtgacagtcataggaagaactcagtatgtttgtagaatgattcttacatgatacctcttaacacaggtgattacatggctccaacacctgatccccaagattgaagatgg

SEQ ID NO: 503616 - DNA, 182 bp, Homo sapiens
gatggcggcctcagcagcgcgaggtgctgcggcgctgcgtagaaggtattcaatcagccgggttgctttttttgagaagaatttccttggacttcggcgctcgagttcaactgaaagaacactttttcacagattcggccatgttcagaaggggcatttttaccctttttacaagggagact

SEQ ID NO: 503617 - DNA, 276 bp, Homo sapiens
  misc_feature (222)..(222): n is a, c, g, or t
  misc_feature (256)..(256): n is a, c, g, or t
gctcactgcaacctccacctcccgggtttgagcgattctcttgcctcagcctcccaagtagcttggatacaggtgcccaccaccacacccagctagtttttgtatttttagtggagacggggtttcaccatgttggccaggctgatattgaactcctgacctcaggtgatccgccctcctcagcctcccaaattgttgggattacaggcgtgagcaccacgnctggtcaggaacattcttatgagaccttgaatgnctaaaagaaaccatgcccct

SEQ ID NO: 503618 - DNA, 856 bp, Homo sapiens
tgccagagaacatgtcgattgatgaaggaagattctgcagaatggacttcaaagtgagtggactgccagctcctgatgtgtcatggtatctaaatggaagaacagttcgattcaagatgattcgcacaagatgatagtgtctgagaagggtcttcattcacctcatcttgtgaacgtaggtcagagcttcagatgcaggggcgttatgcatgtgttgccaagaatagagcaggagaagccaccttcactgtgtcagctggatgtccgtgtgcggaaatgaacataaaagagcgaccaatgttgatctacaaaccacgagagcaaaaaagttttagagggagattcagtgaaagtagaaggtgccgagatctcggtataggctccaccaaagcttttctggaatacagaacataatgaaatggtacaattcaagactgatcgaataagcttatatcaagatgacactggaagagttactttactgataaacagatgtaaacaagaaagatgctgggtggtatacgtgtgtcagcagattaatgaagctggaggtgactacatgtaaccacatgattagacgtacggacgtccaaacctaaactcttccaggtcctaagcgagtagggttcgaccaacattcagcaatattagcacttatgggaaaggtttggcttgtgacacaaggtttaaagcagaaagagaattcagggttgggggtcaactggactcatgaagggacgaactctatactttaccacttggaaaaggcactcaccagttcgaaatatttgagtccttggcatacccccacggtacagacaaggcaccgggcaggaccattaaacataccgggcgc

SEQ ID NO: 503619 - DNA, 379 bp, Homo sapiens
tcactgtcttctcggagttcatgatccagagtcatgaggctgctggcaggagctgtgctgctgggcctgcgcctggtggttggcctcctcaacctggggtcccctacctgtgccgtgtcgtggcctgcctggagccgcatgactccccggtactggaggtgtacgtggccatctgcaggaagctcatcctcaagctgtgcatcctggggacactgtgctaccactggcttggggccgcatggtgagccgtacctgcagggccagtgctgggcggatattgtgggccaggagctggaccggtacctggtgaatggactatcgtcccccatgttggctggaccggccatcgttgcggggttccgaagcctcgaaatcggaa

SEQ ID NO: 503620 - DNA, 1309 bp, Homo sapiens
gcattctgctttccaactgcctgactgcttgtaagtctcactggtgtgagcttccagcaatcccctttgctcgaaatggaccccaactgctcttgagccattggtgggctccttgcacgtgagaccggctcctgcaagttgcaaagagtgcaaatgcacctctcttgcaagaagagctgctgtacctgctgccccgtggcattgtgccaagttgtgcccaggcatgcgtctgcaaaggggtgcattcgcgagaatgtgcaagctgatgtcgcttgcatgtgcggcaccaggctctctctccccagattgtaccactacgaaccaatccgtgccacaaacctgggcattcttttcacaacatattacacacatttgaccaccaatttgtggcttgcaattatcctttccgacactcccataaacatatatgctgcacttgacccaattaaaacaaaccaactttttagacgcaaaaaatacacacacactccaaccacaacacacaacaacacactaacaatacattctcaccgacacacctatagatgcccctcttaaagaacacgctatatctatacaagaacacccaattttagtaatagtgatgcgcagcacgtgaagcacccacctgtctcggcacatcacagtgaagacacaagcaatggggccacaaaaggagtgttcccccaatacagcgagagacccctcgcggtggctcacaactgcaagcgtagcgcgagaatatattccacgaccgcaacaacaaaaaagcgcgcccagagggcgagccaacgaggaccggtagtcggcaccaacaacccacgaagaacgaggaggaaaatagaagaccaacaaacgaggcgcaaccacaacacgaaggagcgcacagaaggggagggcggagcaatataaagtagcgcacggacgatgcagaggacgtacgagaaacagaagcagcgaacaaaaacagacggcgcgaagacagacagaaaggggctggcggcggtggtagcgaaagtgggggcggacggcggggaaggggggtcagaaggggagaggagcggagccatagaacagacgtccgagacaaagcaggagcaagtcaggagggaagggtgggagaaggacacgagaccggcgtggtcctcgaccgtagtgagagacggcactcgccggggacgcgtcgggagtgtggcgcatcgacacagagaaccagaatgagagtcagacctgactcgtaagggaccaggactcgcggcacggctcgaaccgacaggggaggaacgtcgaagacggagcagatcggaca

SEQ ID NO: 503621 - DNA, 377 bp, Homo sapiens
acttaaggatcccgcacgaggggtgtccagattattgacagtgcacacattcaccggctccgggaggcgggtggctgacacgaggtcataggtggtcgtgccccacaggacgagtggtgcgtgcatcgtggtcccccagtgtgacaagaatcctgtcatctggtgagaagtgccagggccagcacggtgatgctatggtggaaaatgaaatgctggcagagggcgtcagacacgttccagacgcggatctgacaaggggcggtcgtgcttgcttcgggccgaggcataggccatgacctgggccactgtggctgagggtcagcgtgtcgatctccgcagagttgccggaccagtgctgctgtgacacccctcgtgcg

SEQ ID NO: 503622 - DNA, 272 bp, Homo sapiens
ttcagaggacaagaggctaggacccagagcacagaggcagaggacaaggaggcagaggcacaagaggcagaggttgcagtggaccgagatcatgccatgcatccagctaggcaacagaagcagattccatctcaaaagaaacgacaacacaaaaccagacctggtgtggtggctcactccttgcaatgccaggacttgggaaggccacaggtgggacgatcatttgaggccagcctgggcaacatggccagatcccatctctaacaaaaaac

SEQ ID NO: 503623 - DNA, 534 bp, Homo sapiens
agcggactgcgagtatggcggcgtcaaaggtgaagcaggacatgcctccaccggggggctatgggcccatcgactacaaacggaacttgccgcgtcgaggactgtcgggctacagcatgctggccatagggattggaaccctgatctacgggcactggagcataatgaagtggaaccgtgagcgcaggcgcctacaaatcgaggacttcgaggctcgcatcgcgctgttgccactgttacaggcagaaaccgaccggaggaccttgcagatgcttcgggagaacctgggaagaagaaggccttattcttaaaggagtgtgcccagatgtgagaagtgtgggagatctcgtgtgttaccacaaaacccggtgtgtgccccccgtttgatcggaggatgctgtacgggcgtggcaccacagaggaggctctccatgccagcaacggcttcatgtggtacacgtaggccctgtgccctccggccacctggatccctgaccctccccactgggacggaataaatgctctgcagacctg

SEQ ID NO: 503624 - DNA, 558 bp, Homo sapiens
ggtaaatagatatggacacctccaagacctacacatggctgattaaatgtggaagtcagcatacagaaacttttgaggttagttgaaacgatgagctgaaatgacacaaaagatggagaatttcaacagggaattgggatctacaaaaaaatcacatggatattttacactggaaaaaaatatataatatctgaatactttttttttttttttgttttttttggagatggagtcttgctctgtcacccaagctagagtgcagtggtaccatcacagctcaccgcaacctccaagttccagggtcaagcaatcctcctgctttggcctcctgagcagctgggactacaggcacacgccaccaggcccagccatatatatatatttttgtttgtttgattgtttttgccttagtagagtcaatgtctgactatgttgcccaggctgatcttaaacttctgggtttgagcagtcttcctgccccagcctcccaaagtgttgggataacaggtattgagccaccccgcccagccttacgtttttctcccatacccacacacc

SEQ ID NO: 503625 - DNA, 121 bp, Homo sapiens
ctctattggtatattcaggatgcttagagtgacatacatatctagaggcaagtatgttctccaagtgaagaatcattttcaaggcatgcaggccttttaaaactacctacccacagagttc

SEQ ID NO: 503626 - DNA, 222 bp, Homo sapiens
cgagtatatgtgcaggttcgactctaaagagatgccccatcatgggcgttcctgggatagagagaatcatagtgaaatcgataggcgcagacgtgaacaaaatgactcagtacatcacggagctctccgagatggtcgcacacattcagcgcactgtgtcggaagctcatacgagctcaccatcctctgcatggtcgtctcgcacattaagtccattacggg

SEQ ID NO: 503627 - DNA, 496 bp, Homo sapiens
  misc_feature (22)..(22): n is a, c, g, or t
  misc_feature (108)..(108): n is a, c, g, or t
  misc_feature (207)..(207): n is a, c, g, or t
  misc_feature (260)..(260): n is a, c, g, or t
  misc_feature (303)..(303): n is a, c, g, or t
  misc_feature (377)..(377): n is a, c, g, or t
  misc_feature (406)..(406): n is a, c, g, or t
  misc_feature (432)..(432): n is a, c, g, or t
  misc_feature (441)..(441): n is a, c, g, or t
  misc_feature (447)..(447): n is a, c, g, or t
  misc_feature (474)..(475): n is a, c, g, or t
gaattcggcacgaggttttttnaactttactataaagccatgcaaatgacaaaaatctatattactttctcaaaatggaccccaaagaaactttgatttactgttctnaactgcctaatcttaattacaggaactgtgcatcagctatttatgattctataagctatttcagcagaatgagatattaaatccaatgctttgattgtnctagaaagtatagtaatttgttttctaaggtggttcaagcatctactcttttnatcatttacttcaaaatgacattgctaaagactgcattatttnactactgtaatttctccacggccatagcattatgtacataggtgagtgtaccatttattatcctcaccattggnggccatgctttattatgggttttaatttnaaaattggaatgccccggtcccattnccacctggnattaantagggcctccaaccttattgccttttnnagggggaaatcatggggtagg

SEQ ID NO: 503628 - DNA, 284 bp, Homo sapiens
tattgtcacattttaagtgtgctttggaaaatgttttaaagcatcttctttgtacttgtattctacaagtagagaggctttgtagtctctctattgaagtgcatataacagctgctcaggtgaactccatctattcatcaggtgtctatgatagaattgcgttcctaagactgtttcgttcttaactcatggattatatattcacagcctgattgttggtgtgattgctccttatatcaaattcatagctcactggtggccttaataaaaggagtgtataagtt

SEQ ID NO: 503629 - DNA, 301 bp, Homo sapiens
  misc_feature (42)..(42): n is a, c, g, or t
gactcagccccatttctacagagcctgtagaatttttgcggncaaataggaaaggggcttataaaataaggtgctaaaaaatgtgagttgccaggtttccagggaagagcagataagatgaactagaacaacttgaagtatctttcattaactctaatcaagttgttaaggctcttttctgatgcagctttactatctgtaacgtgggtcaatgtccgttgccttagttattgctgaggcaggagaatggcatgaacccgggaggcggaacttgcagtgagcagagatcacgccactgcac

SEQ ID NO: 503630 - DNA, 1541 bp, Homo sapiens
  misc_feature (141)..(141): n is a, c, g, or t
  misc_feature (346)..(346): n is a, c, g, or t
  misc_feature (355)..(355): n is a, c, g, or t
  misc_feature (513)..(513): n is a, c, g, or t
ggacacttgtgtgcaattggtaatgatctggccaatatgaggaaactgggcggtggcctcgcactctgtgggattccatgtagagcgcagctgctttcgtggacatgatgttatgactccactttcagtgtaacatctagnccattggagtacattgcagtagcatgtcgagaaataaccaggtactctaaaaggaagaggcctggcaattgcatagcgaggatagcctgacagaggtcatagagtttgttagtggtagacctccatggctatgtctctacatgcaacatgcaatggcgtgagaaacaggggtaccagaatgtccctgtacaattggaatagcagntactgttgngcagacatgtcatgaatacacttagcgatgccagtgacaccagaagaatcgcaggtcactaagccaaaacttccacaccgtgaagaatcctaggaagttcctttgccttgggggcgagcatgaagcctcgtttatttgcatagaagcactctcagagntatcgcatccataacctcgcatccaaagcttgtgctcctgctgaagtgttggacgggcatgaaatggtatactgcctatgggaaattagttggataagtttggatggtaaacgccgtacgaagggccagttattggtgtagaggacagagacgtcaatataagtgccgtagctaggcctagcaagagacgtagactctctggatttgccccatgggaacggtgaaggacccgtatgaaatctatacgtctcgggagatttcgagaacttttagcgtgacctccagcgacgtacagggatcaaatttagttggggccgagggggtctcctaggtcaacatttggggggacatgttacagaccatggggcataatacagagcaaccacccgtaggtttgaccctacttaagccccaccacgggaaatccccaaggcccattagaatggccatggaggccgcattattaaagcccattgttgggcctaaaagaatgtattgtccgcgacaaggtcagttgctttacttccttgagataggtaacccgctccttctttagtttccctctaaacaagggcttgggaggccccttaaatgctcctaggaaagtcgtcttttaaaacccaagggcggcgatggagacctctttctcgcgtggacatcaggggtagttcaaaggccctccagattcgggactattacttctactaaataagagggcgaccaacaattgttgggctgtgtccccactttgagtttttgttgacacaccctttggggtgcacgctacatccccagtttgtcccccactattttttggttctagcccccagaagggggtaaataggggcatatcttaaaacgacacgaaaaatatttaattgaggggagcccgtggctagcaatataagacagagaagagcctcctatatattcggcagacaaaatagtgggccgccagaaaagtggtgttcgctcacacaacagcaaacactaatgaatgcaacacagaaagtgtgcggcgccatggt

SEQ ID NO: 503631 - DNA, 615 bp, Homo sapiens
  misc_feature (10)..(10): n is a, c, g, or t
  misc_feature (100)..(100): n is a, c, g, or t
  misc_feature (144)..(144): n is a, c, g, or t
  misc_feature (148)..(148): n is a, c, g, or t
  misc_feature (153)..(155): n is a, c, g, or t
  misc_feature (157)..(157): n is a, c, g, or t
  misc_feature (331)..(331): n is a, c, g, or t
  misc_feature (436)..(436): n is a, c, g, or t
  misc_feature (461)..(461): n is a, c, g, or t
  misc_feature (613)..(613): n is a, c, g, or t
agccaacgcngcgccgcggcggcaaaagcggggggcaaggaggggccaacgccgggcaagggcaagggaggggggagcagagaggggagaggggcggggnggggccccagccggcagggggggggggcgcccacagcgggcccnaaanagaannnangcaggaccgggacaaggcacagggggcgggggccgggaggggggaggccgggaagggaccgcagagcaaaggaagagaccgggggggggggaggcagcccagggcagggaagggaccgggggggcggggggaagccacgggccccgccggggggaaaaaagcacaacacatcanacagagggaccagaccagaagcgcgggccccaaggcgccccaaccggggcgggggaaccgccgggccaacccacaaagagagagaggagagagccggccccaccnccgcccggcccacccacccaccccngaggacggcagagagggcggggcagagagacagaggggaggaaggggacgggggggcggcccaggccccgccgggaggccggcgggggggggggggcagggcgcgggggccgcacagggcgcgcgcgccagacaaggccggggagaaggacntg

SEQ ID NO: 503632 - DNA, 465 bp, Homo sapiens
tatacagagaacaggtgtccaaagagaaatccattctcgcaaagccattctttctttcacacacagtgcctaaagcctccatagatggtgaaggctatagtgccaaaagtcagcccaaagagactacctcctgataaatcttggtttggtggagatgtgtggtcccagattttttcagggaaagtagcagtttggtggattctacatccagtacccaggctgtagatagcatctgcaaatgtaccaagaaacagtcttaaattggaaatggcaacagccaaccctcagggatgggaactgcagtgaatcactattgtgtgtgctgtctgagatggtgatatgcatgggatgtggtctaatcttgtgatccatcagaatcacttccaagccattaagaataatgtgtagcagctcaaattataataaacagtatcaggcaataaacacacaaatgacaaagaaaaa

SEQ ID NO: 503633 - DNA, 259 bp, Homo sapiens
ccagctggactacagtggagtggtccggagacgaaccagacatgggacggtcacccagcagtgccgggctgggctctgaggtgcaggtccacgggagagcaggcctccagctggaaaggccaggcctggagcttgcctcttcagtatttgtggcagttttagttttttgtttttttattattaaatcaaaaaacatttttttaacaacaaaaggcatttgaaaaatggagtggttgtgggtaataaaacagaaaaaata

SEQ ID NO: 503634 - DNA, 907 bp, Homo sapiens
cggagtgcgtgcaccaagaggcaaggaagcatgaccggcgaagccgaacagaagaaacggacagaagaaggcgaagacgaacgacgaaggacgaggcggccgacagaactaagaaaggaccgagaacgaacggacgacggacgaccgatccttgcgagaccctacagcaccggacccgaccgaccggaccacgaacggacgaccgaacgacaccgacacctcacaacgaccgaccggacgacggaagaacgacaagaaaaggacaccgacacccacccaccgcccttaactcacacggaaccacatgacaccgcaacccaccggacaccgaccacgacacaccggaccgacacaccccgaacacaccgggaaatcgaaccgccaccacacgaccggtgaccgccgaacgaccaccgaccagtcacgccaccgcccgcgcacaccgcccgacccccgacccgtggagacacccccgccccgacccgaccggcacgaccagcacaccaggcaacccaacgctacacgcacacgctaggcaaacccgcaacggcgaccccgcacccctacagtggccccagcagccgggacacgcccggattcgcccccagccaggcccacacgactcgccaacgaaccagcacgcgaccacccacattcgaacacacagtccggccacaccccccgcacaccccgcaccccagatcagaaagcccacgcatggacacgccaactacccgggccccgaacccgtcaccccccgcacgggcaagacccgccagccatgacccccccgggacggcacccgcacacccgcaggaccgtcatgcaccgcccagcagggacacgcatcggacaccggaacttaccgcgcgccgcccgcacaccccccccccgcgacgcaccgccc

SEQ ID NO: 503635 - DNA, 360 bp, Homo sapiens
gctcgaccaagagcctgtgaattcttaatattgtgaagtttgttctcaaaaaagcggagggagaggccaggctctgtggctcatgcctgtaatcccagcactttgggaggccgaggcaggtggatcacctgagatcaggagtttgagaccagcctagccaacatggcgaaaccctgtctccactttttatactaaaagtataaaaaaattagcctgacgtggtggcgggtgcctgtaatcccagctacttgggaggctgaggcaggagaatcacttgaacctggaaggcggaggttgcagtgagccaagatcacgccactgcactccatcctgggtaacaagaacaaaaaactctgtctc

SEQ ID NO: 503636 - DNA, 406 bp, Homo sapiens
  misc_feature (49)..(49): n is a, c, g, or t
  misc_feature (96)..(96): n is a, c, g, or t
  misc_feature (105)..(105): n is a, c, g, or t
  misc_feature (273)..(273): n is a, c, g, or t
  misc_feature (374)..(374): n is a, c, g, or t
  misc_feature (389)..(389): n is a, c, g, or t
  misc_feature (399)..(399): n is a, c, g, or t
gcagcaccagagggcccttccagtggatgcacaccaggcccacggcccngaagttccagacagacagcaagagggtggggtagtccaaggccacantgtaggtcntgagcacttccccaaggtagaaataggtgaagaggaacagcagcatcagtgaagacatgatcaaccagccatggatgaacttgtagcagcggaacttgtagagcacatccaagaagatggtcataaccacgatgacgctgatcatgatgagggtattcagcacggagnagaggaggcgctggcccacagagggtgtgtcctcagtgaaaaaagtgtagatgagctggccattattctctgtggagaagcgcacagacttgatggtggcnacataatacgatcangcacagaggnacaggca

SEQ ID NO: 503637 - DNA, 282 bp, Homo sapiens
ggaggcagatcgtcacaagggccggttgaagactagcctgagaaacatagggagacgtatctataaacaatttgtagaattagccaggtgtggtggcacatgcctatagtcccagctactcgggaggctgaagcagaaggattgcttgagcctagaagttcaaagctgcagtgagctatgatcgctgcattccagactaggtgacagagtgagactgtctctcaaaagaggggaaaaagaagacaaaaggcagcacatctgtgtgttctgatacggttttga

SEQ ID NO: 503638 - DNA, 1019 bp, Homo sapiens
  misc_feature (290)..(290): n is a, c, g, or t
tgacaattgacgtggacaaatcagtgtggttcacagccacagcaaagcttgggtcgtcaaatgccccatacgctgtcctccctagtgagtagttgattgtccatggaactagttggctgcgtagttacgttcagatagttgcatcatactgcccgcgagcgtcatgccgtggcgtgtacgtacagcaagattagatactagtgtatcagtatagtcattgccccggattgtttcaattagtatgtctcacacgaaatcgtgctcatggggctcaagtgatcggctccatnggccttggagccttttctatttctatattttcttcttggagagagtcctctatgttggtcacaagtgcgttgaaatgttgcatgtgtgccaccccaatcacaaacttcaacttgagaaacgcctctcaaaatgtatctcctttccgggggcctaaacaggtagaatacctaaacgccgggcgctccacggaccactcacctagagagctactcgcctgggagaatcattacaaaagacccctctgtgggacccaccacaaagggcctctgggggcatcacatcttttttacagacacgacaaatcattttgtgccacaaagacattttacgcggcgaggggtgctccagcgagggcgcgcatccatgtgttgcgcaccccagaggggttgcgggacctacagagaaggacacttccatgtgggccccactacaaacgaggtgttggaatctccaaccacccgctggtgaccccgatatgatggcgcacaatagcgggcatattcaagcgaacagggtatgggtggtatgaacagcccaccatatagcagcaaaacacagacacggacgtttatcctcctttagcgaacgccagtcgtatctaatactaaccaggaaagcatcattgcgcgtcctctagtacaggaaacagtactaacgagatatacaactgggaagggtaaaagtgtgtgcacacctcgtcgcttagaggggcgagcatatatcaactt

SEQ ID NO: 503639 - DNA, 581 bp, Homo sapiens
gcgcagagaaagacagatactctatcgccgacctcaggtgtcatgattggtcctgtgtggcaagtggtctgggctcaccccatgtacggaacatcctggcatcgtgctcctatgaccggagatgtcattatctggagagaggaaaacggcacctgtggagaagagccatggagacagtgcaggagacacgagctcctcagttgaactcaggtgtgctaggagccctcccatgactacaggacatgatcctgtgccgtgtggtgagctcggatggggccatctccctgtctgacttacaccggggaaggccaatgggaagtaaagaagatcaacaacgctcatcaccattggcgtgcaatgccgttcagctgtgagcccctgcatgttgtacctggaaagcctcagtagaccacccatcgggtgcagaaacccaacttacatcacagcaggtttgcgatcacggtggctgtgacaacctcatcaatgctgtgcgaaggaggaggaggcacggcagtggaaggaggagccgaagctagaagcgcacagtgactggtgttcgagatgtggtctggggcccccct

SEQ ID NO: 503640 - DNA, 652 bp, Homo sapiens
caggctgccggcactgccccattccctggcctggtttcctaacctcttcttcctcccctgccctgcttcccttcctccaccaccctgctctcaaaggcctcctctccagacccctggaagggaggcttccccatctttagttttccactctgcccctgggggagcacccttctactcctagccacgtcccttgtggaccggtgggactggaggaggaactggtcaccctcctcccccatggaggtttccagggtgtcccccatgtccatgaaagagggtgagccgaggatctgggtcctggggtcggaggtgatgagggcatgcaggccctcagccgggctgtgcaccctcccagccccaggcccatctgagggaccaagagctgtacgcaggccttctttccagctatagcacttcagcatcggtcttcagcagatcaaacccctcagaattgcagaggaccgtcccctccaaaagtccctggcaggttgggaccccaaactaaggaaagcaaacagtagcagctgtccatttgctgggagaatcactgtaccctgccccactccctccatgtcatcaaaactaaatctggtcatcagctcagagcagcttatgagtttgctacatccgcctctgctgctggacgagcggt

SEQ ID NO: 503641 - DNA, 447 bp, Homo sapiens
tacaaaaccggtctgcgggcaaataacaggacctgcgatgtcataacttgatgtctagtctcatagttgtcacaaaccataaattagagtcagttcatagttgctgtaattggctatcgaatccaagaatagggagacaatctaaaaaatatcttaggttggagataacagaaatatgatatgattagaagtggaaaaagaaattctgtgaatgttaattaaagtaaaatgattccctgaatggttagatattgtcacctagcaggatatgtattactttactgcaatgttatgatgggcttgcacttagtgagtattctatgtaaaaatatatatgtatataaaatatatattgcataggacagccttcggagtttaggcttagagcagtttacatctgaagtgtctaatgcattccctttggtaaggtactgacactgtcaacgt

SEQ ID NO: 503642 - DNA, 124 bp, Homo sapiens
actaggtttactcagcaaagctctactgagtaactactacgtgctggcacaggacagcacccggggtcagagaaaagttcaccctgtgttcatgaacactagttccatgctagattcagtggca

SEQ ID NO: 503643 - DNA, 1087 bp, Homo sapiens
cctgactcgccctggtgcggtccgctttttggattgtcgtttgtgtctcttccttcttcttgtctttgtactttgcctgtctttgtattgctggtctctgtccgtatctttcgtgttcttttgttcctattgtatcgcgcgtctgcgtgtctgtgttttactttatcggcttcccagtatctgccgggtcagtgtgagatttttgttgcgccgtgagtctgcccgcatctccatttgtcgtgccctagtatctctgtcttgctatcagactcagctctgcttttgttacccctccttacgtgcattgcctgtcttttcctccaagtctaagcctagagtactgtaacttcggtgctccttgctggcactaatgtgagcacttaatggcaggttagtgcctgttagatggtcgccgttattctcccgaattcctctctttacccagctcacagccccgttgtcacgctgtcccagacaattcccatctcaatgctctcggaggcatttagacattattgacacaatattcttatgttatgtagccagttgtgcactttctatctcgtgttcccgaaccccaggaaaagtttttccttatccattagtgtgttttcccagtccgcattcctcagcttcttcacaggcactcctggagatatgaaggattactctccgatatccctttcctcatcaggctcttgactacgttggaactgggcatctttatgtgtgccgcttgtttcccaatcagactgtcaagaagaggaaagcggacggaaacctagcagaggaaagtgtaattttggtctatgacctcttaaccccctagtcagacagaagcctaaaatctgtgaagacagaggttaggagtagatattgattactatcataattcagcacttaagctatgaggccaggcatcatagctaaactctcacctacattatctcacttagtcctttagtcatccttaaaacaactctgtgacatacatattatctcattttacacaaagggaagtcgggcatggtggctcatgagctgtaatctcagcactttgggaggctgaagtccgaccggatacctg

SEQ ID NO: 503644 - DNA, 150 bp, Homo sapiens
ttagaggatcctatccccggctctgggtagcgaagctcaactttagtcagcccatgggaagcaccacatttggaagggcagggctgatgggtgctctcaccatcgctcttctactatgaacccccctccccatacccaggacccgggtat

SEQ ID NO: 503645 - DNA, 768 bp, Homo sapiens
  misc_feature (368)..(368): n is a, c, g, or t
  misc_feature (424)..(424): n is a, c, g, or t
  misc_feature (768)..(768): n is a, c, g, or t
accgcgcgcgctgtgcaggtgccggccaggtcgtctggcgggacgaccttccccctgtgcggtctgcagacagtgcgactgcgctggatactgcgggtcatatggcctatggggactgtaagtaagattgcagagtagacctgaagcatggatggacgtgtatcaatcagtaggttctcgacgaatgcctcggagagtccacaagcatgttgtcgacgagtccctgccaaacacaccgtctcatgggtgtctagagcaaaccgcctatgggtcatctaagccatctacgttgcttggtgctcctggtcaacaaatggatgagtacttgtgagcgagatctatccgcagaacgcccagcgcacgaacantagattcataggcacaacggcacgtatcagcaacagagcagtcacacggcgctccnttcacaaaaactttggggtccgattttttggcgtaccgccgaaaacttggcttggtccccaaaggcggaattcggaagagcccaattggggtcccatataggcccaaaggtagtttccaaattccccctccttggggaactttggtggttttggaacctttttggcaaaaaaccttgtggaaattcttgtgggcaaggaaaatgcccccatcgcggggttaacgctgtaccgggcaaaacacgtaggcaaatcgttgtgaacgtcacatatgtgcatccaattggcgtccaattgtcgtgcggtcgcacctaacaagtggggctagatgtccttcccctgtcan

SEQ ID NO: 503646 - DNA, 974 bp, Homo sapiens
ttcttctgttcgctgtgtcttgttgtgtgtgtgtgttttttctctcttgctgttgctgctgtctcgtgtgtttgggttctttggtgtgcgttgtggttcttctgtttttgtgtggttttcgtgaggcgcccgatcggctcctcgatcttcgcagggcggggggggggggaggacacaatgtccttgcgattaggcgggtgtatttacgcgaggtgttttttacagagctgtctttgtttttccaccgacccacactgtttttgtgtcccccccaagattaaggtgctgcgcagccgttttgtttggcccctgccccccctgtgggggtataaccgcgggcacaaagtgatttcatgccgctatttccagagaactggggcatgttttccctcccccggtgtggtttttctccgggtctgtcgtggtaaccattgtttcccgagtgggccgcctcccgctgtgtgcttatggtgagcttctgtgtgtcggggccgcccctggggtctcctaaccttggccccctaccgtttcggggttttgtcccccccacgggtggtcctaacaaggggttttcccctccaagggtattccccgacgctctcactcggggcgcttttcctcccccgcgggcggtcctcttctgggtttgccccggactcctcctcaacaaaggaatagggggctagggacccccttcgttgggaaatgcgagctctcaaacattgttttggtaaacaccctgctttttctgctcccatggctttagatgaattgtctcctcgatttaccccttagtagacacccgtttctccccttttaaccccccttcctgataattcctttgtataagaggcaggcaccccttctacgaggtttagaacaaagtgtaaaaggaataatatatcattagggcggtcctcctcgctctccatagaaaaaacaactataacggccccaacaaataatcaaacaaa

SEQ ID NO: 503647 - DNA, 494 bp, Homo sapiens
cccccttaacttcaaggtcctttcctctcaccatggtctcgtattcaaacggttggggcacgtattttccttctctgggaggggccaccacaccttcagggctcctcctcctttgtttgttggagaaccagggctcttcccaggggtgtaggggactgccaggctgttccagccaggaaggccaaaatcaaggggtgagatgttgaaagttgtaaaaaagaaaaagtggggttggtgaatcggtttttccttccccaaattgggatgattgtcataaggtttttagcatgttatcttctttccccccccccccctttttttttttataaaaaaaaagaaacttcaaagttaatggggtggtcggatcccacagggggagaactccttcccccccaagcatttaatgaaaaaggtgcttttttttaaacaaacaaaccccccccagggtggggggagtttcacaaatctttcaaaataaaaagtaatgccttggg

SEQ ID NO: 503648 - DNA, 487 bp, Homo sapiens
tgaaatggggagtgtatccatcagagtaaaagaactacgaggagaaagcacatgattatcggcaatagatgcagaagaggcctttgacaaaattcaacagcattcatgctaaaaactcttaataaactaggtattgatggaacgtatctcaaaacaataagagctatttatgacaaacccacagccaatatcatactgaatgggcaaaaactggaagcattcccttcgaaaactggcacaagacatggatgccctctctcaccactcctattcaacatagtattggaagttctggctatggcaatcaggcaagagaaagaaataaagagtattcagttaggagaagaggaagtcaaatcgtccctgttcgcagatgacatgatcgcatatttagaaaaccccatcatctcagcccaaaatctccttaagtcgataagcaacttcagcaaagtctcaggatacaaaatcaatatacaaaaatcacaag

SEQ ID NO: 503649 - DNA, 1110 bp, Homo sapiens
  misc_feature (628)..(628): n is a, c, g, or t
gaccagcctggtcaacatggcgagatcctggctctactaaaaatacaaaaaaattagctgagcttggtggcgggcctctaattccagctactcgggaggctgaggcatgacaatcacttgaactcaggaggcggaggttgcaatgagccaagatcatgccactgcactccagcctgggtaatggagtgagactctgtctcaaaaaaaaaaataaaaaaatctcagggtaatggggatttcttatcccctgaaattttttgtcttctttttactacttacccaaactctttagccctcaaagctgaacaacaattttctttttcaaatttaaaaaccattcattattaaaagggcccttcttttataggctctggaacctgaaaatttcttgtgaattatttacccattacaagggaatgtgttagtctcaaattttctttcatttgtgcatttaaaaattaaaaggcgtattattcagcccgggaatgcgggtggcttcacgccctgtgttaattcccaggtgccttgtggagaaggccaggggcccgggtggcattccctttgaaggctcaagcaagttctggaagacccaggccttgtgcccaaatatatgtgcgcgtgcaaaacnccgcaattctctctatagcttaaaacaattaccaaagacaattttaggctgtggggtgtgtggagtggcgagggccattcttgtatagtctccccaaggtatactctgtggcgagaggcgctctggatacaccacgcgaaagaatctcagccttgtgtaaaccctttgtgagaagcgccgcgaaagtgttttcgccacgtttgaacccacaagcagattcggataccgcaattgtgttacttcccaggcctgtgtggacaaaccaatgaaggcagaaaggaacttgtgaggttcctcccaaaaaataatgaacgtcgttcacagcaagctctcttgtgcaaaaacccccatttttttaaaacgctggggtaattaatacgtgggcgataaatgacatgagctcaagggtagctacacagtgttatagtgatacccgaataatttctcagattactcccagtgtttagatttgtagaacatac

SEQ ID NO: 503650 - DNA, 905 bp, Homo sapiens
atgaaatggtccataacttagtggcaatctgacactggtcttatatcaatcgacaataacatccagacttcgctgatgcttgtggtgctactgaacagtaatatagaggaacataggagaaacgaggctagccagagaattaccttcagctgtatcacgatgacaagtcgttctaaagttccaaggtgctttggcacctgcctcccaggagccctcacccggttgcttcgtgttgaggctgatggcaagttaattacagggacaggaggaagagaaactaacgaatgttagcatctcggagtgtggtggggttggagcatggtgtacaagaatcaacgcgataggcgaattggtatgaggaatgctggagaaacttcaaaagctgaagagttattagcagaagaaaaagtcatgagagccaattccaattagtgccaggccagtccacaataaaggtcatgccgtgaacctgctagatgtgctcagtaccatgtaagcacggacaaagctattctgcgtcgggaaacagcgagatggtgaggttcatggagacgcacgtcagttagcatcatattttctcattgtcatgacacagaatattcaagaacaggtggtgccaaaggcagtaatgcattatgcggccaatcatgtgaccgacactcttcagagtgagctagtagtgcccggctgtataacatcatccttattgggatgatcttctgaccagaattttgaggacatggcacagcgcacggaaagcaagccggtggatatgcctacgggcgtttacaagggagccagtcgaaattaatggtcgagactcggggagaactcatctatgggtgaaagaaaatatgtaatactgagaacttcgtagaatcagaagttcggaggtactggctaac

SEQ ID NO: 503651 - DNA, 115 bp, Homo sapiens
gatcccctcccaaggaataagaaattgtagatactgacctgtaaatcatacctttatgagtaacaatacaaatgactatatgggagtagactcatgaagtgaagaatgcacaaga

SEQ ID NO: 503652 - DNA, 599 bp, Homo sapiens
taccattttccttaacatttgggggattttgattcccccaaatgttagggtttttggtaaaaaaaaaaaaaatcggggatccccatgttttaaaaaacggtgatcccaaaagaaggtatacaacaaagtatcgaagcaaaacaggatacacaatagagagaccaccgatcgaaataaaccaagaagcagacgcgacaacggaacacacacaccgaacaggaccacggcaaaaacacggaacaaacgcaggagacatccatagacaaagaggaaacacaaaaaacaggcggaagacgacaacaaaacccaggaggagaacacagaacaggcaaaacagaccacaaacggcgacacaaggaaaaaatcatatataaaacaaaagagcagccacaaaaaaagcgggagagaaaaaaatagatataaaaacgtatcattgataaacacaatgagtatattacatagtatggtgataataaaaatacaattgtgagataattaagaaatgagagaggagaaacaaaaaaagagtaatggtagaaaaataaagaaagatagaaatgaatagtagagaagaactaaattattataaatgttagtca

SEQ ID NO: 503653 - DNA, 203 bp, Homo sapiens
attaaaagtcacccgcaaggacacctacaacaagctgaaaaccaaggatgagcccagcggaaacgctaaaagacatccacttatgcgttgaactgctgtggttatggctggggcgcgtagaaacaagtttatctccagacatctgccccagagaaggacgtactctaaaaccttcaccgtgaagtcctgtccatgatgccatc

SEQ ID NO: 503654 - DNA, 1085 bp, Homo sapiens
caagaaaaaatctccttttggagcccagcttggaagccaaaagacaaactgttttagataagtatgaattacttacacagatgaagtccactttcgaaaagaagatgcaaaggcagcatgaacttagtgagagctgtagtgcaagtgcccttcaggcaagattgaaagtagctgcaccatgaagctgcaggcaagcacatctgcatacatattgccagacagcacttcttggagggcaaagcatggaacatcagcatgcattttcgtccagtcagcattcaatggcaaacagcagcacaccaatttgcccactggtcagcaagcagccaaggcaagcagaacacttcagacaggcgcatcagacaatgcaacagcacaatttacagtgctcccactaatcagcattttccctggcaaaccatgacactgcacaagagcaggcaatggagacacacaaaccaacacactgttcttatcttctatggcattgcaaacatggcatttcatcagtggctaaattcacagatatcctatatagattgtatacagaactgagactgatttggtaccgattagaatgattgctatgatctttgagaaattttactgcaatatttgcactgaaatgtttatatatggttgataaattgtatcatatagagattcactgctagattactcttagcctggattaaaatgcctatgcatgtactttttagactagatttataatattctacaacttcatctcacatttgtatgtggaacttgaagttccatccgcatcagggatggattacaatatagactctaaccccggccccagaactaatgcgcgacatggaaggaaaccctaacagcacagcaaagaggaaacacgcgtagagagcgaaaacgacaaatcacacgtaagaacaccacacggaatggtaacaccaaagacacataagccacacaccaagaacaaacaacagggcgccaacaccccagggcacaagcgacccaccccaagcccaagacacaaaaagacgcgaaaaacgccggacaaaaagaaacacaggaagaacccagacccggtgacgaac

SEQ ID NO: 503655 - DNA, 179 bp, Homo sapiens
ctaaggatcccgggatcggcaaaggcaatgtttctctccttttctctcttattacttctttcctatggcattttcacattgaaatgctttcctatggtgtaggttttattctccccctacccctccccttttctctcttattacttctttcctttggcattttcaatttgaaatgcttt

SEQ ID NO: 503656 - DNA, 413 bp, Homo sapiens
ttatattttagcaacgaggaatgccttatttcttagtggaggtttttttattgtgttgtttgttcttctgttgtgtgtttttttgtttgtgtgtttttgagacggactcttcctctgtcgcccaggctggagtgcagtggcgtgatctcggctcgctgcaatccctgcctcccaggttcaagcatgtcttctgcctcagcctcccaagtagctgggatagcaagtgtgcaccaccacgcctgattttttgtatttttagtagagacggggtttcacctcgttagccaggatggtctcgatctcctgacctcgtgatctgcccatctcggcctcccaaagtgctgggattacaggcgtgagccaccgcgcccggcccccagaatttcttaagaaggtaaaaactctgggctaaa

SEQ ID NO: 503657 - DNA, 632 bp, Homo sapiens
  misc_feature (215)..(215): n is a, c, g, or t
  misc_feature (469)..(469): n is a, c, g, or t
atgccaataacctccaccctgggcgtagttgggttccaaggccttcccaggccacccaaccaaacgaacacaagggttaccgccatgaatttcaatctcttctcgatcatcgctgcttctgctgtttccgccaccgtggacttgcctgccgccgccagcgtggaagtcaccggcaaaaaatccaatgtcacggcttatactcagaagtacctgcnacagagtgccaacttttatgcggcgctggatcacaagattcaaaactgattgtcgagggattcaaaccccaagccactcgcgagagtgccttggggtttgacgtatctagctgatggtcaatatccgacgcaaggattcattcaggtctattgcgcgcgcgcgggtgaagctgcttgagatcacgtaatagaactcgaagctgtagcctttgaactggcgcaattgttcccagtaaaacagctgcttgaccggngcaccgacgggccaggattggccaacgacttgtgtctcggtatggaggatcacctcgttcaacccttttacaagtcgaaagatccacagaatctcgtcggtggttgccgccaggcatagtaggggaggttattgcatggatcctctaggtacctcagacacgc

SEQ ID NO: 503658 - DNA, 163 bp, Homo sapiens
cacgaggatcaacaccattaatacatcatcaaggtaactcaaacgggctgtcacaaggatcctgccagatcctgatgatccaaatatcatcccctgttgggtcacctctaaggagcgccattgcagatgcccccatcgagatgccaggggatgaggtgcctgt

SEQ ID NO: 503659 - DNA, 962 bp, Homo sapiens
gataatcttctgcatagtaatacccatcataatcggaggcttaggcaactgagctagttcaccgtaataatcggtgcccccggatatggcgtttccccgcataaacaacataagcttctgactcttacctccctctctcctactcctgctcgcatctgctataggtggaggccggagcaggaacaggttgaacagtgctgacccgtcccttagcagggtaactgactccacaccctggagcgcctccgtagactcgtaaggccatctgtgcctccttacacctagacaggtgtctcctctatcttaggggccatcaatggtgcatcacagacaattgatgccaatataagaacccgcatgccataacccaataacaagcgcccctcttcgtctgatccgtcctaatcacagcagtcctacttctcctatctctcgccaggcctagctgctggcatcactatactactagagcagaccgcaatgctcaatcaccaccttcttgcgaccccgcggaggaggagacccatatctataaacaactacctattctgatggttcggtgcaccctgaagttgatatgcttatacctacaggctgtcggaataagtctcccatatggtaacttagtactccggagaacaagaaccattggatacataggtatggtctgagcatatgatattcagggcttcatagggtaaatcggtgagcacaccatgattttcacccgtaggatcgacgtagacccaggagcatatttcgctcggtaccagaaatcatcgctatcacaccgggtcaggatgagctgacgcgcaagggcaggaaacaatacaacgaaccggttgagcgccgggcccaagaacttttataacgaggggcgcgggaggataggaccaacagacggccagacgcagggagccaccagcaaaagggggagaaagaaaagtgctcggcagacaaaa

SEQ ID NO: 503660 - DNA, 458 bp, Homo sapiens
  misc_feature (12)..(12): n is a, c, g, or t
  misc_feature (84)..(84): n is a, c, g, or t
  misc_feature (193)..(193): n is a, c, g, or t
aataaagcaaanccccacccccaggttagcccccccgaagtagctgggacctataggtgcaagcccacccatgccctgcctaanttttcctaattttttttttgtaagaagacaaggttttgcccatgttgcctcagttggtctgaaaaatcccagggccaagcaatctgcacgctactcccggccttaaaancttttgtgccctggcgtggtggctcatgcctgtaacaataaggtcaggatatcgagaccagcctgaccaacatggtgaaaccccatctctactaataaagtacaaaaattagccggatgtagtggcgcgtgcgtgtaatcccagttactcgggaagagaggcaggagaattgcttgaacccgtgagatggaggttgtgatgagccaagatcacaccactgcactccagcctgggtgacagctaaactgcgtttccaaaaaaaaaa

SEQ ID NO: 503661 - DNA, 505 bp, Homo sapiens
  misc_feature (501)..(502): n is a, c, g, or t
aaactttcttttatttacaaggttcgttgcaaaaagggacttccttgtctcagacaaaataatgaattttgacctttgaatgaatgctaaaatgagttaagactttgggaactgttggaaaggcataattgtgttttaaaatgtaagaaacagaagatttgggagggaccaggggtagaatgatatagtctggctctgtgtcctcacccaaatctcatcttgaattgtaaaacaaattataatccctacatgttggggaaagacctcatgggaggtgattagatcatgggggtagttcccccaacctgttctcatgatagtaagggagtagtcatgagatctgatggttttataggggatttttcccccttcactttgcacttcttgctgttgccttgtaaaaaagaacatgtttgcttccccccccgtcaaaattgtaaatttcctgaggccttcccagccctgcaaaattgtgagccaattaaatctctttcctttttnnttt

SEQ ID NO: 503662 - DNA, 828 bp, Homo sapiens
  misc_feature (24)..(24): n is a, c, g, or t
  misc_feature (445)..(445): n is a, c, g, or t
  misc_feature (685)..(685): n is a, c, g, or t
  misc_feature (798)..(798): n is a, c, g, or t
gggtcacctgaggtcaggagtttnagaccagcatcgtcaatacggtgaaactctgtctctactaaaaatacaaaaattagccaggcatggtggtacacacttgcaatcccagctactcaggaggatgaggcaggagaatcgcttgaacctaggaggtggaggttacagtatgccgagatcgcaccactgcattccagccagagtgacagagtgagattctgtctcaaaaaacaatttaaaaaaaataaaaataaaaatcaccgtagcacacctgtaatcttagcactttgggtggccaaggcagacagatggcttgagctcaacagttcgcgaccagcctgggcaacatggcaaaatcccatctttacaaaaaaatataaaaattagccgggtgtggtggtgcacacccgtagtcccaattacttggggggctgaagcatgaggnttgctcgagcccaggaggtcaaagctgcagtgagctgtgtattgcaccactgcactccagcctgggtgacagagtaagcccctctctcaaaaaaaaaaaaaaaatagtaatatataataaagatttactaagttcagggcggggcatggtggctcatgcctgtaatcccagcacattggccaaggcaggcagatcatttgaggttaggagtttgagaacagcttgaccaacgtggtgaancctgtctctactaaaaacacaaaaattaaccgggcatggtggcatgtgcctgtaatcccagctaatagggaagctgagacaggagaatcgcttgaaaccaggaggcagaggtncagtgagctagattgtgagattgcgcacaa

SEQ ID NO: 503663 - DNA, 358 bp, Homo sapiens
tggtccctagacccctttgtatgaccgtttgcagtctgagcaggccaggggatgacagctaatgtcaggaccctcatcggtgtagcctgctggggggacccaagtgctcttggacaagtggttgagctcctatctggcctcctctatttgttatttgtcaaggaatttgtgtgcatttcttcctgcttgtattgaaaaaattcctagtatttcagtaagaatgcctgttgttagatgagcctcctgtatcttcaatgtgttcttttttgagcgctcagggagaatttagcatttttttttttcctcccacctttttgtctctgtgacagttgttaattgagtttgcaaatgctttcca

SEQ ID NO: 503664 - DNA, 258 bp, Homo sapiens
gcctgacctcaaatgatccgcccacctcagcctcccaaagtgctgggaatacaggcgtgagacccgtgcccgaccagtgtattttatatgtggctcaagacaattcttccagtgttgctcagggagccaaaatattggacatccctggaaacactgcataccttgaaattgagttttaccgcttggccatgttagagtttggaaattaaggtctacgcacgtttttctaatctctgtaatgggtaatggtgccagagg

SEQ ID NO: 503665 - DNA, 317 bp, Homo sapiens
gtatagctgaggagggaacagggaagaaaaactctaaagatgtcacctttcaacaagtttttaaggtgatacattgatgtgatagtggctaaaactaagaatggatcaattatttttacttgttttttttgtttttatttttttgagaccgagtctcactctgtccaggctggagtgcaatggcttgatctcggctcactgcaacctccgcctcccaggctcaagggattctcctgcctcagcctcccgagcagctgggattacaggcaccaccactgcgaccggctaatttttgtatttttggtagagacgggggt

SEQ ID NO: 503666 - DNA, 694 bp, Homo sapiens
  misc_feature (65)..(65): n is a, c, g, or t
  misc_feature (73)..(74): n is a, c, g, or t
  misc_feature (78)..(78): n is a, c, g, or t
  misc_feature (85)..(85): n is a, c, g, or t
  misc_feature (147)..(147): n is a, c, g, or t
  misc_feature (151)..(151): n is a, c, g, or t
  misc_feature (155)..(155): n is a, c, g, or t
  misc_feature (165)..(165): n is a, c, g, or t
  misc_feature (168)..(168): n is a, c, g, or t
  misc_feature (200)..(200): n is a, c, g, or t
  misc_feature (207)..(207): n is a, c, g, or t
  misc_feature (212)..(212): n is a, c, g, or t
  misc_feature (235)..(235): n is a, c, g, or t
  misc_feature (259)..(259): n is a, c, g, or t
  misc_feature (274)..(274): n is a, c, g, or t
  misc_feature (279)..(279): n is a, c, g, or t
  misc_feature (316)..(316): n is a, c, g, or t
  misc_feature (331)..(331): n is a, c, g, or t
  misc_feature (343)..(343): n is a, c, g, or t
  misc_feature (348)..(348): n is a, c, g, or t
  misc_feature (363)..(363): n is a, c, g, or t
  misc_feature (456)..(456): n is a, c, g, or t
  misc_feature (530)..(530): n is a, c, g, or t
  misc_feature (598)..(598): n is a, c, g, or t
ttacaatagtaattcagaatatctcaaatgttacattgatgtcatcaatattacaaaaaaggaanaaaaagtnnctangcaacantgaagagcaccagagacccagcgcacacctaaagtagaccatgcttctttccttccactgcnaggntatngtcccgggangtnccccaccccctcgctttcgtcctccgctttcnctaatcngtctngtgggggcatctacgctttgttntcgctctccttctcctcgaactcnccttgttcgttggcngtggngtcctggtactgctggtactcggacaccaggtcgttnatgttgctcttggcntcggtgaactcnatctngtccatgctctcgcncgtgtaccagtgcaggaaggccttgggcgggaacatggcggtgaactgctcggagatgcgcttgaacagctcctggatgggcgtgctgttgcngatgaaggtggccgacatcttgaggggggggggggggatgttggacaggggggtttttacgttgttggggattnactccacgaagtagctggtgttcttgttctgcacgttgagcatctgctcgttcaccttttttatgganatgcggcgccggaagatgggagccaccgttagtagcgggcgtggcgcgggttggaggcgggcatcatgttcttggagtcgaacatctgctgggtga

SEQ ID NO: 503667 - DNA, 144 bp, Homo sapiens
  misc_feature (33)..(33): n is a, c, g, or t
  misc_feature (41)..(41): n is a, c, g, or t
  misc_feature (64)..(64): n is a, c, g, or t
tgtcggtttaaggtacatggtagagcgaacttngagttacngtgcaagatttttttttcatgcngtcattggtaatatgtttggtgagaatcctggggattaaagtttgggttacaaatggttttttaaccgacaggaccatgg

SEQ ID NO: 503668 - DNA, 1248 bp, Homo sapiens
gcctcattgtacccattctaatcgcaagggcattcctaatgcttaccgaacgaagaaattctaggctatatacaactacgcaaaggccccaacgttgtacggcccctacgggctactacgaacccttcgcgtgacgccataagaacgtcttcaccgaaaggagcgcccgtaagagagcctgccacgatctaccatacaccactcttacgatcgacctgagcccgtacgcattaagcgtcgtgcagcgcactcgcgtcattgctcactatgaagccccacgctccgccaataccacaagccgccactgggtgcaagcgctcaagcgcatatgcgacctctcctattcgagtgtctacgacgcagcgctcttagacctacgccaggaatacgtcaagtaccgtcatgactcagtgggtgagcagtcagaacatcagagactacgccactgaatcggtcgcgactgcagagcagaaaggccagaagaagtctcatatgacagtcagcctagacatcatacgtaactatacaagcattactaataagtggatccattgaacctctcgacgccttatcgacaacgagcaaagagcaagctctgattacctccttgccatccatgactccattgggccataatatgatggatcgtccagcagtaagcaagaagacccgaacacgaaacacccactttcgaccgttgacccgacgggggagatccgacaataagttctcaaggacattcaagcaatcggaaatacgccgacaggacccctttcggccctatactttccattagaccgaaataacagcagacacattaattacttcaagtgacatacaggccaatcgaccgaggttagcgaaatcaataccatcagggaaccacagcatatgaccgacaagtgcttcccacgtggaaagagtcttagcaagcaacgaataagttagtggtggagcgaaggaacccgtaaccatttgcgtaagaccagtccccttggtagcagttgaatgggcaagtttcgtgaaaacaaggcagtaaaccccgcggaaggtccgaggtaacgagaccaagagtaggataacgaccatgccgtactggaaaacaacaagttatcgctaaccaagttgaaacataggcaataagagtgatagtaagaaggggtatccaagtaccctataaacaaagtctccagagaatataccacgatcgcagcgtagaaaaagagaaaaacagaggaagaaacacga

SEQ ID NO: 503669 - DNA, 345 bp, Homo sapiens
tggaaatagaaggtttcatctgcattgtttaaacttctatagtagatactttggcattgtggataacacttgtagactattatagctatgtgaataagcgtgttgcataatgccctttttcatctgtttgctcccaagccccaggatgacacacttcatgtcatagctgaaccctactctaatggattcgaggccagtgtatgcaatttaaagaagcagtattatgtttgcagatattctgagtctcttcaggatgtgtttcgtgcctaccatatatgcaggataaattctttaacagcaaactccaaaggaatgttgaagctgtttcagcgatgaggatttttt

SEQ ID NO: 503670 - DNA, 479 bp, Homo sapiens
  misc_feature (450)..(450): n is a, c, g, or t
  misc_feature (463)..(463): n is a, c, g, or t
ctctgtgtatctgggtccactggtcaccacacccagttatttacttttattttttttgtcgagatgggatctccctgtgttgcctatagtctcattcttgatgtcctgggctgcaatgcgagctctcccacctcatgctcctcctcaaagtgctttgatataaaggcatctggtcgatggtggacttgatgaatgaatcttctggcacactctggagcaactccagaacacagtcgctgagtgataactgggaatttactgataacccgtggaatggtagcctttaaggaatggaaagagtggataatatatgcctgactgttctccaaaaataaggaccttcatataggagctgattgaaatcaatgactacttgcatgttaccacttcatttgggtggaatacttcatcagaataaactattgatcttgtgctgtgtcaaagtaacantaacgcgaggggntgcagaggtagcactt

SEQ ID NO: 503671 - DNA, 1179 bp, Homo sapiens
  misc_feature (1164)..(1164): n is a, c, g, or t
  misc_feature (1179)..(1179): n is a, c, g, or t
agcggacatgacaatatcaacggactcgtcttccgggccgatggtgctagcgtgcatgcgcgccgactctagtggcggaagtaccagtgacggccatcccgcatccctggaggggcacggccctgtaagctggaaccttccaaccatacgatgatccacagccatagctctccggaaagctggtgaacgaagcatgcggcgcagcggagcacggagcagcgccttgtaccggataaatgttgggcaacgccagccaggatgcgctgctaagtgccctggtccagcggtagccttggtccatcccatgcgacagtgggctgtttagggcgcgactagctagttcgcctatggtgcgtggttgttgtgccatatcgtcttgtgcgttcttctcagtcgtgcctcaaggaatctttgagccaccgcctaagtgttgtgctttggcctattcccacctcatgtctatcgaacaccaatagtgaaacttctcttgtgctcccatggaaggccttctccatactagaacgtgcaccgcacgcgagagactacttgcgttggtacgcaacatcgtgcactttcaccccttgtggttcatgagaaccccacactgcacgtgtctcgggcgcttgtaaagtggcgtgtacgctatacgaggagtattgatgccgagttcagatagcccaagaacctaagttgcaatgaacttggaggggaggacgtcagagggggctcgcattacttgacggaaatggggaacagatatgctcgccaagtaagagcgattgtgggggcgccacccactcaaatttgctcgtatactcgaaatccacgttatctttgcgcaacacgctagacaaccttacccatttttagggccccagacttggagcgacgtaaagatgtttgcatcccctccccaatttggggcttggtggacctctccgaatttgcattcaccttccaaataaagggcctcgtgagttgaaggcaaggcggctccgtaataacgccctagtcccataaggacacaattacgggcttgaacgaatgggcgttagagacccaaaattttggtcggccaaacgaagttggcggaaatagccggccccggaaacctctttgaggttttggtggagcggagaatttaattctccttttggaaccaangccacgacccctggn

SEQ ID NO: 503672 - DNA, 90 bp, Homo sapiens
aaatgtagctttggtataacttcatgtgtatctcaaaatatcctgaacgtcaacatgatttgaatacagaaaatgtattttctacttgca

SEQ ID NO: 503673 - DNA, 102 bp, Homo sapiens
cccgctacggacgcacgaacgggcttactggttccagattccccacttgtgtcacatggcatagtgaggcttgttttccaagattgctggttttaatttgca

SEQ ID NO: 503674 - DNA, 1056 bp, Homo sapiens
  misc_feature (442)..(442): n is a, c, g, or t
  misc_feature (737)..(737): n is a, c, g, or t
gggtggcaataatgccacgcgccaaaaaataccacagagggagaaatttttcccctgatgggatctttctcaaaactgacctggaagggatttcttactcggggactttgctttaaaatggcctaactcctggaaatgaaggttccggagttatcccccccacccacggcccacgaattccattagtcttagccccccacggaacaccacgaaatgttccgtggtgaaaaagggtcccctcccgatttttcgggaactgactgcttggtagttcacgaaagaggttttggctctttccacgagggcacaatgtagagactttatgctcgaaaaaggtggcccactagaggttctgtgtggcccattggccacacggcacgagtctctctgcgcgcttaacacaaacctcccttataggagagggccttgtctctgtttgtcnggaagggcccctgtcatatatggtggttgcttctccgggttctaatcacatggagagaacatggggccaccacaaaaggccctcgtccgagagagttcttggtgttcttgggagaaacctctcgagggaccacgagggggctataaattccactgtaaagggttttgttgtgaatgtgccctcgagatgagattcccccacgccgcgaggaaccctcggttataactatactatacgcttgaacacactgctcgttgcgcccacacgctgttgtgctcaagaacacgggttttcntgggcacttccaaggtgaagattcactgctgccctcgggagaccccacactggtatagagttggcgcctatagagagcccctcgcctcgagaccacacgtgaggcacattgtggagaaccccaaagaatgaggatatctgcccacccaccccccactttcagagacacgaaagggtgggaaagccacgaggccgcctgccactgccccacgccacgtccccaccagcataaacacagggtttccttggcacgctgtattttctggaggtttggagatgttgctcttctaaagaccctttaataaaattttggaccaaga

SEQ ID NO: 503675 - DNA, 155 bp, Homo sapiens
gtgctaatcctacatctacacttggcatctattttgaagttgtcaatcatgcacaactaccccgatcccccaaggaggcagaggagccatccatgtttgtcacgcattatcagcactccagctacccagagactgcatccgcgtgaccaccatcg

SEQ ID NO: 503676 - DNA, 368 bp, Homo sapiens
caggataggcctgaaggagaagaagagattgaagcaaagacttgaaggtggccaggcgggtggctcacgctgtaatcccagcacttcgggagaccaaggtgggcagatcacctgaggttgggagttcaagaccagcctggccaagatggtgaaaccctgtctctactaaaaatacaaaaattagctgggtgtggtggcatgcacctgtaatcccagctactcgagaggctgaggcaggagaattgcttgaaccattcgggcttgaaccctggcagaggttgcagtgagccaagattgccgccactgcacgatcttgggcgacagagcaagactctgtctggaaattaaaaagaaaaaaaagtcgacgc

SEQ ID NO: 503677 - DNA, 207 bp, Homo sapiens
ctcgggcctcacgctttatcttcttcatttcatttcccggtataaggataagcgttgagagaagtataagcgttgagagaatgttaagcgttgagagaagtatgagcgttgagagaagtataagcgttagagaagtataagcgttgagagaagttaaagcgttgagagaagtataaagcgttgagagaagtataaagcgttgaggga

SEQ ID NO: 503678 - DNA, 3542 bp, Homo sapiens
cacgtggctgcagcggggccagagcagcaatggcggcgggcggcggcggtagctgcgaccccctggcccctgctggggtcccttgcgccttctccccgcacagccaggcctacttcgctttggcctctaccgacggtcacttacgagtatgggagacggccaacaaccggctgcaccaggagtacgtgccttccgcgcacctcagtggtacctgcacctgtctggcctgggcgccagcgcggctgcaggccaaggaaagtccccagaggaaaaaaaggaaatcagaagctgtaggaatgagtaaccagactgacttattggctcttggcacagcagttggtagcattttattatacagcacagtaaaaggagagttacacagtaaattaataagtggtggacatgacaacagagtcaactgcatacagtggcatcaagacagtggctgtttatatagttgttcagatgataaacatattgtggaatggaacgtacagacatgcaaagtaaagtgcaaatggaaaggggacaatagcagtgtcagttccctatgtatcagcccagatggaaagatgttgctttcagctggtcgaacaatcaaactatgggttttggagaccaaagaagtctacaggcatttcacaggacatgcaacgccagtttcgtcactgatgttcactaccatcagacctcctaatgagagccagccctttgatggaattacaggtctttatttcttatctggagcagtacatgaccggttacttaatgtctggcaggtccgatcagaaaacaaagaaaagagtgcagtgatgtcatttacagttaccgatgaacctgtctatattgacttaactttgtcagaaaacaaagaagagcctgtcaagttggctgttgtttgcagagatggtcaagtccatctttttgaacacatattaaatgggtactgcaaaaagcctttgacttcaaactgcacaattcagatagcaacacctgggaaaggcaagaagtcaacaccaaaacccatccctattctagctgctggtttttgctcagacaaaatgtcattgttgcttgtatatggcagttggtttcagcctactattgagcgagtggctttaaactccagagaacctcatatgtgtttagtaagagatatttcaaactgctgggcccccaaagtagaaacagctataacaaaggtgaggacaccagtgatgaattctgaagcaaaagttctggtgcctgggattcctggtcatcatgcagctatcaagcccgctcctccacaaaccgagcaagtagagagcaagaggaagtcagggggaaatgaggttagcattgaggaacgtctgggagcaatggatatagacacacacaaaaaaggaaaggaagacctccagacgaatagctttccagttcttcttacccagggcttagaaagtaacgattttgaaatgctaaataaagtacttcaaactaggaatgtaaaccttataaagaagactgtattaaggatgcccctgcatactattattccgttgttacaagagcttacaaagaggttacaaggacatcctaatagtgctgtgctaatggttcagtggctaaaatgtgtgttaacagttcatgcatcatacctgtccacgttgcctgacctggtaccccagctggggacactctaccagttaatggaaagcagagtcaaaacttttcagaaactttcacaccttcatggaaagcttattcttctaattacacaagtaacagcatcagagaagacaaagggagcaacttcccctggacagaaggcaaagttggtgtatgaagaagagtcttctgaagaggagtctgatgatgaaatagcagataaggattctgaagataattgggatgaagatgaggaggagagtgaaagtgaaaaagatgaggacgttgaagaggaagatgaggatgccgaaggaaaagatgaagaaaatggcgaggacagagatacagcaagtgaaaaagaattaaatggagattctgacttagatcctgaaaatgaaagtgaagaagaatgaagacagcaaagcaagccggtcaaactatataaactctggctcaccttgcccagtggtgagggctgcctctgtgccaggatgccaaggaccgctgcacatttccaaattcacagcagtggatcccatgccactttgctgtcctgagcaccccagacttgactgtgtaaataagagtgtttcattcaaatgttaataaactttacacagtatatagacacattttctgcaatgtactgacatcagtgtccaatatatggtatatttttataatataatatcctagtatgattggttatatcaagaattgacaagtgcagataaagacctttcccataggagttcaagaactggactgttgtgaagaagtcagctcttatctcaggttggtatctttcatcaaatccagatgcaaagcagcactagtgaaaatttttttaatttagtacatttaatttggtacattttcataaaatatgaagggataactacaaactggagtaaaaatgatggtaattaaaaaaaatcctcagtatccctagcttgtctattaactgtgataatctgacttgagtcagattgaatatttggagtgcttccccagaataaccacttatttttgaagctatcatgtgaagtatttttttaaaacaaaacaaaaattatggtcattaaaaaactagagaattagccatattaaggatttttcttgactgcaaattacttctaaagaatcatcagtgtatagattagaagtgctcattacctgcaacttttaaaaaaaattcagttatagctgcttttgaagaggtttccatttttatttaaattactaatggatcaaagaacaattgtttattttttctctttggttttagatattaatgataaccttgttggaattttttttccaaagaaaatatttttataattaaataatttaatgtttttcttccttttcattacctactcttggcagtgttagggtatctgtttacctttaaaatgataagtctcactcaagattttttatgtatgtataaatattttggtgtgctacaaaagcctttgcaaattatcagtagtagtttttttttttttttttttttttaaagaatgagccgatattggcttagtgctcactaggggacatgcacatggaagctcacctctaagaaagggctgggcagatggatttattttttcccacctgtgaatatgtaaaacaaaaccattatctttgagggagtttttaataccaatgacagaacagagatttgtgtgctcatcttaagagccagagccatataagcatcttgggaaagcaagtttgaaccagctgctggtgtaatgtacagttatatttgtctataaatggagctgtttatggcaatttaataccattctctttgtaaagtgaataaatattcatctttacccagtgaaaaaaaaagtcgacgggccgcgaatttagtagtagta

SEQ ID NO: 503679 - DNA, 347 bp, Homo sapiens
ggtcgacagcttcctgaccctaactacaagaaaaaaaaaaaagcctacaatttcattgcttggcttaaaataggatgtagattttaaattctttttacaggaaaagcattttttgtcccctttttaacaggtgacaattttatacactgccttatttgggcccctgtgtttttctcagcttgattttcatttttactgaagatttttcttaaagcaggtaaaaccggtttctttaaaaaaaattcattaagaaaaacactccagattgaggagcaggaaattattgcttgatagtaaggggatctcttcaaattagatgatttactcggtcctcaaagagtttctaa

SEQ ID NO: 503680 - DNA, 689 bp, Homo sapiens
  misc_feature (186)..(186): n is a, c, g, or t
  misc_feature (198)..(198): n is a, c, g, or t
  misc_feature (203)..(203): n is a, c, g, or t
  misc_feature (210)..(210): n is a, c, g, or t
tctcattatgtcatcttttgatgggcataaaattttaccaaatttttgacacctactttaaaaggatttcttgctttctaagtaattttactgttttgctcactctagggtggatacagcccaaatttcataaaatggaggtttgggaacatctttaaagtggcatatgttgtattcaacgtctanagatgttttatnaaacncaaagangtaaaattacttcagtaatgaagtaaatttactgatacccaaagactgtgcttgtctgttaagcacaagacgtaatataacatactccattcagtccctccaacccttatttttgctaaattcagtttgtagtttattgccttggtcttaaatgatttaaaggattcatttttacagacttttttttttctgtgatgtccttggtttgtcagtatgctcatcttaataatccttttattttctcacagaaagtacttcaaactaggaatgtaaaccttataaagaagactgtattaaggatgcccctgcatactattattccgttgttacaagaggtaactgactgcttttttcatttcagcatcctaatgccatgagttaaatggaaaattcagtagttagagaaatggatttgtaatacgtaaggacacatggcatttagagtgagtaatggatggaggaaagtactttagacaaaa

SEQ ID NO: 503681 - DNA, 3496 bp, Homo sapiens
cacgtggctgcagcggggccagagcagcaatggcggcgggcggcggcggtagctgcgaccccctggcccctgctggggtcccttgcgccttctccccgcacagccaggcctacttcgctttggcctctaccgacggtcacttacgagtatgggagacggccaacaaccggctgcaccaggagtacgtgccttccgcgcacctcagtggtacctgcacctgtctggcctgggcgccagcgcggctgcaggccaaggaaagtccccagaggaaaaaaaggaaatcagaagctgtaggaatgagtaaccagactgacttattggctcttggcacagcagttggtagcattttattatacagcacagtaaaaggagagttacacagtaaattaataagtggtggacatgacaacagagtcaactgcatacagtggcatcaagacagtggctgtttatatagttgttcagatgataaacatattgtggaatggaacgtacagacatgcaaagtaaagtgcaaatggaaaggggacaatagcagtgtcagttccctatgtatcagcccagatggaaagatgttgctttcagctggtcgaacaatcaaactatgggttttggagaccaaagaagtctacaggcatttcacaggacatgcaacgccagtttcgtcactgatgttcactaccatcagacctcctaatgagagccagccctttgatggaattacaggtctttatttcttatctggagcagtacatgaccggttacttaatgtctggcaggtccgatcagaaaacaaagaaaagagtgcagtgatgtcatttacagttaccgatgaacctgtctatattgacttaactttgtcagaaaacaaagaagagcctgtcaagttggctgttgtttgcagagatggtcaagtccatctttttgaacacatattaaatgggtactgcaaaaagcctttgacttcaaactgcacaattcagatagcaacacctgggaaaggcaagaagtcaacaccaaaacccatccctattctagctgctggtttttgctcagacaaaatgtcattgttgcttgtatatggcagttggtttcagcctactattgagcgagtggctttaaactccagagaacctcatatgtgtttagtaagagatatttcaaactgctgggcccccaaagtagaaacagctataacaaaggtgaggacaccagtgatgaattctgaagcaaaagttctggtgcctgggattcctggtcatcatgcagctatcaagcccgctcctccacaaaccgagcaagtagagagcaagaggaagtcagggggaaatgaggttagcattgaggaacgtctgggagcaatggatatagacacacacaaaaaaggaaaggaagacctccagacgaatagctttccagttcttcttacccagggcttagaaagtaacgattttgaaatgctaaataaagtacttcaaactaggaatgtaaaccttataaagaagactgtattaaggatgcccctgcatactattattccgttgttacaagagcttacaaagaggttacaaggacatcctaatagtgctgtgctaatggttcagtggctaaaatgtgtgttaacagttcatgcatcatacctgtccacgttgcctgacctggtaccccagctggggacactctaccagttaatggaaagcagagtcaaaacttttcagaaactttcacaccttcatggaaagcttattcttctaattacacaagtaacagcatcagagaagacaaagggagcaacttcccctggacagaaggcaaagttggtgtatgaagaagagtcttctgaagaggagtctgatgatgaaatagcagataaggattctgaagataattgggatgaagatgaggaggagagtgaaagtgaaaaagatgaggacgttgaagaggaagatgaggatgccgaaggaaaagatgaagaaaatggcgaggacagagatacagcaagtgaaaaagaattaaatggagattctgacttagatcctgaaaatgaaagtgaagaagaatgaagacagcaaagcaagccggtcaaactatataaactctggctcaccttgcccagtggtgagggctgcctctgtgccaggatgccaaggaccgctgcacatttccaaattcacagcagtggatcccatgccactttgctgtcctgagcaccccagacttgactgtgtaaataagagtgtttcattcaaatgttaataaactttacacagtatatagacacattttctgcaatgtactgacatcagtgtccaatatatggtatatttttataatataatatcctagtatgattggttatatcaagaattgacaagtgcagataaagacctttcccataggagttcaagaactggactgttgtgaagaagtcagctcttatctcaggttggtatctttcatcaaatccagatgcaaagcagcactagtgaaaatttttttaatttagtacatttaatttggtacattttcataaaatatgaagggataactacaaactggagtaaaaatgatggtaattaaaaaaaatcctcagtatccctagcttgtctattaactgtgataatctgacttgagtcagattgaatatttggagtgcttccccagaataaccacttatttttgaagctatcatgtgaagtatttttttaaaacaaaacaaaaattatggtcattaaaaaactagagaattagccatattaaggatttttcttgactgcaaattacttctaaagaatcatcagtgtatagattagaagtgctcattacctgcaacttttaaaaaaaattcagttatagctgcttttgaagaggtttccatttttatttaaattactaatggatcaaagaacaattgtttattttttctctttggttttagatattaatgataaccttgttggaattttttttccaaagaaaatatttttataattaaataatttaatgtttttcttccttttcattacctactcttggcagtgttagggtatctgtttacctttaaaatgataagtctcactcaagattttttatgtatgtataaatattttggtgtgctacaaaagcctttgcaaattatcagtagtagtttttttttttttttttttttttaaagaatgagccgatattggcttagtgctcactaggggacatgcacatggaagctcacctctaagaaagggctgggcagatggatttattttttcccacctgtgaatatgtaaaacaaaaccattatctttgagggagtttttaataccaatgacagaacagagatttgtgtgctcatcttaagagccagagccatataagcatcttgggaaagcaagtttgaaccagctgctggtgtaatgtacagttatatttgtctataaatggagctgtttatggcaatttaataccattctctttgtaaagtgaataaatattcatcttt

SEQ ID NO: 503682 - DNA, 3286 bp, Homo sapiens
caaactctccatgcataatggaagtaccagaatatcaaggccttatatttctggagaggaaaaaaaggaaatcagaagctgtaggaatgagtaaccagactgacttattggctcttggcacagcagttggtagcattttattatacagcacagtaaaaggagagttacacagtaaattaataagtggtggacatgacaacagagtcaactgcatacagtggcatcaagacagtggctgtttatatagttgttcagatgataaacatattgtggaatggaacgtacagacatgcaaagtaaagtgcaaatggaaaggggacaatagcagtgtcagttccctatgtatcagcccagatggaaagatgttgctttcagctggtcgaacaatcaaactatgggttttggagaccaaagaagtctacaggcatttcacaggacatgcaacgccagtttcgtcactgatgttcactaccatcagacctcctaatgagagccagccctttgatggaattacaggtctttatttcttatctggagcagtacatgaccggttacttaatgtctggcaggtccgatcagaaaacaaagaaaagagtgcagtgatgtcatttacagttaccgatgaacctgtctatattgacttaactttgtcagaaaacaaagaagagcctgtcaagttggctgttgtttgcagagatggtcaagtccatctttttgaacacatattaaatgggtactgcaaaaagcctttgacttcaaactgcacaattcagatagcaacacctgggaaaggcaagaagtcaacaccaaaacccatccctattctagctgctggtttttgctcagacaaaatgtcattgttgcttgtatatggcagttggtttcagcctactattgagcgagtggctttaaactccagagaacctcatatgtgtttagtaagagatatttcaaactgctgggcccccaaagtagaaacagctataacaaaggtgaggacaccagtgatgaattctgaagcaaaagttctggtgcctgggattcctggtcatcatgcagctatcaagcccgctcctccacaaaccgagcaagtagagagcaagaggaagtcagggggaaatgaggttagcattgaggaacgtctgggagcaatggatatagacacacacaaaaaaggaaaggaagacctccagacgaatagctttccagttcttcttacccagggcttagaaagtaacgattttgaaatgctaaataaagtacttcaaactaggaatgtaaaccttataaagaagactgtattaaggatgcccctgcatactattattccgttgttacaagagcttacaaagaggttacaaggacatcctaatagtgctgtgctaatggttcagtggctaaaatgtgtgttaacagttcatgcatcatacctgtccacgttgcctgacctggtaccccagctggggacactctaccagttaatggaaagcagagtcaaaacttttcagaaactttcacaccttcatggaaagcttattcttctaattacacaagtaacagcatcagagaagacaaagggagcaacttcccctggacagaaggcaaagttggtgtatgaagaagagtcttctgaagaggagtctgatgatgaaatagcagataaggattctgaagataattgggatgaagatgaggaggagagtgaaagtgaaaaagatgaggacgttgaagaggaagatgaggatgccgaaggaaaagatgaagaaaatggcgaggacagagatacagcaagtgaaaaagaattaaatggagattctgacttagatcctgaaaatgaaagtgaagaagaatgaagacagcaaagcaagccggtcaaactatataaactctggctcaccttgcccagtggtgagggctgcctctgtgccaggatgccaaggaccgctgcacatttccaaattcacagcagtggatcccatgccactttgctgtcctgagcaccccagacttgactgtgtaaataagagtgtttcattcaaatgttaataaactttacacagtatatagacacattttctgcaatgtactgacatcagtgtccaatatatggtatatttttataatataatatcctagtatgattggttatatcaagaattgacaagtgcagataaagacctttcccataggagttcaagaactggactgttgtgaagaagtcagctcttatctcaggttggtatctttcatcaaatccagatgcaaagcagcactagtgaaaatttttttaatttagtacatttaatttggtacattttcataaaatatgaagggataactacaaactggagtaaaaatgatggtaattaaaaaaaatcctcagtatccctagcttgtctattaactgtgataatctgacttgagtcagattgaatatttggagtgcttccccagaataaccacttatttttgaagctatcatgtgaagtatttttttaaaacaaaacaaaaattatggtcattaaaaaactagagaattagccatattaaggatttttcttgactgcaaattacttctaaagaatcatcagtgtatagattagaagtgctcattacctgcaacttttaaaaaaaattcagttatagctgcttttgaagaggtttccatttttatttaaattactaatggatcaaagaacaattgtttattttttctctttggttttagatattaatgataaccttgttggaattttttttccaaagaaaatatttttataattaaataatttaatgtttttcttccttttcattacctactcttggcagtgttagggtatctgtttacctttaaaatgataagtctcactcaagattttttatgtatgtataaatattttggtgtgctacaaaagcctttgcaaattatcagtagtagtttttttttttttttttttttttaaagaatgagccgatattggcttagtgctcactaggggacatgcacatggaagctcacctctaagaaagggctgggcagatggatttattttttcccacctgtgaatatgtaaaacaaaaccattatctttgagggagtttttaataccaatgacagaacagagatttgtgtgctcatcttaagagccagagccatataagcatcttgggaaagcaagtttgaaccagctgctggtgtaatgtacagttatatttgtctataaatggagctgtttatggcaatttaataccattctctttgtaaagtgaataaatattcatcttt

SEQ ID NO: 503683 - DNA, 327 bp, Homo sapiens
  misc_feature (101)..(101): n is a, c, g, or t
ctagaggattcccactcggagaagcgccaaggaacgttgggtttgagctctgggagctttaggagtggcagctatgtgagttggacagtccgacttccagngggggcccgcacagacagggcacagcttaggaggaatcccgggctgcaggcattctgaggcccagtggccaggcttttggcatatgaagcaaggtccacagggaggttttgaaggagcccctgggagatgtggcttggatgttctgaagtttttgtatgctggagacagggttttgggttgtcttacagtggaggcaggtagctgtaactcacagatgcattgtcg

SEQ ID NO: 503684 - DNA, 1000 bp, Homo sapiens
  misc_feature (533)..(533): n is a, c, g, or t
  misc_feature (782)..(782): n is a, c, g, or t
agcgggtgtgacgtcagcgccccggtcccacggcgcagtccgctgcgatcctccgtgccctgcgcctgagctggagtccccctcgtcgccgccccgtggattgccgccgcggcctatgggcgtgtcccgtggcgcgtggtgcctcgcgggcgccttgctgcttggcttgcttgctgattaggcagtcgccgcaccgaccagatcgtccgacgcctgtcctggcaccgggaatcccgttcgtccgccatccttagcatcggggtacccagctacgtatagctggctagttctgctggtgcctgcggaaccgtcgacctccgtgcccgctcgtcctcgtcgcgcgagcgctgtgcggcctggatgggcggcgctccaggagttcttctcgcttagtgactcgagcctcggttcttggatcgagtaagctttgcttcagcggttagtcttgctctgccttcctttctctcaatcagtgccggaaatattgtagcgcacgacgatgagcgtccgatagagcccgctaaatttgccancgcgctagatatctttcgatgctagtagataagcagcgccttcgctttcgcgaaatcgacctagattgtagacagggaagcgcatgacgcagcgcagagagtcgttgttgccgcgcgggcgtgcggttggcctttgtgatgccccaaggcatcctgcgggtgactccctttgagagcccagggggtgccatgatagagaacgaacacgggggttccccttggtggagaggggcttctcctatgcgggtntggtgtgctgcccccctggcattctccgcgttcctttgtgtggaaagccttcggttctctgtcgccagtcccccttgtcgtgggcgaaacttggaagccaccttcggttgcgaacaccttttccaacgccgccccaggcggcaatttgggggttcctcctcctttcccgaacgcctggggaagcggttatcttaatcttttggctgggatcttggcac

SEQ ID NO: 503685 - DNA, 138 bp, Homo sapiens
  misc_feature (105)..(105): n is a, c, g, or t
catgttacaatcgacagaacatgaggtgcaggtttgatcctggctttgctcagtgtgttaaggatctggcattgcgtgagctgtggtgtaggtcgcagatgcggntcagatcctgcgttgctgtgcgtctggcgtagg

SEQ ID NO: 503686 - DNA, 2385 bp, Homo sapiens
  misc_feature (2343)..(2343): n is a, c, g, or t
cacgtggctgcagcggggccagagcagcaatggcggcgggcggcggcggtagctgcgaccccctggcccctgctggggtcccttgcgccttctccccgcacagccaggcctacttcgctttggcctctaccgacggtcacttacgagtatgggagacggccaacaaccggctgcaccaggagtacgtgccttccgcgcacctcagtggtacctgcacctgtctggcctgggcgccagcgcggctgcaggccaaggaaagtccccagaggaaaaaaaggaaatcagaagctgtaggaatgagtaaccagactgacttattggctcttggcacagcagttggtagcattttattatacagcacagtaaaaggagagttacacagtaaattaataagtggtggacatgacaacagagtcaactgcatacagtggcatcaagacagtggctgtttatatagttgttcagatgataaacatattgtggaatggaacgtacagacatgcaaagtaaagtgcaaatggaaaggggacaatagcagtgtcagttccctatgtatcagcccagatggaaagatgttgctttcagctggtcgaacaatcaaactatgggttttggagaccaaagaagtctacaggcatttcacaggacatgcaacgccagtttcgtcactgatgttcactaccatcagacctcctaatgagagccagccctttgatggaattacaggtctttatttcttatctggagcagtacatgaccggttacttaatgtctggcaggtccgatcagaaaacaaagaaaagagtgcagtgatgtcatttacagttaccgatgaacctgtctatattgacttaactttgtcagaaaacaaagaagagcctgtcaagttggctgttgtttgcagagatggtcaagtccatctttttgaacacatattaaatgggtactgcaaaaagcctttgacttcaaactgcacaattcagatagcaacacctgggaaaggcaagaagtcaacaccaaaacccatccctattctagctgctggtttttgctcagacaaaatgtcattgttgcttgtatatggcagttggtttcagcctactattgagcgagtggctttaaactccagagaacctcatatgtgtttagtaagagatatttcaaactgctgggcccccaaagtagaaacagctataacaaaggtgaggacaccagtgatgaattctgaagcaaaagttctggtgcctgggattcctggtcatcatgcagctatcaagcccgctcctccacaaaccgagcaagtagagagcaagaggaagtcagggggaaatgaggttagcattgaggaacgtctgggagcaatggatatagacacacacaaaaaaggaaaggaagacctccagacgaatagctttccagttcttcttacccagggcttagaaagtaacgattttgaaatgctaaataaagtacttcaaactaggaatgtaaaccttataaagaagactgtattaaggatgcccctgcatactattattccgttgttacaagagcttacaaagaggttacaaggacatcctaatagtgctgtgctaatggttcagtggctaaaatgtgtgttaacagttcatgcatcatacctgtccacgttgcctgacctggtaccccagctggggacactctaccagttaatggaaagcagagtcaaaacttttcagaaactttcacaccttcatggaaagcttattcttctaattacacaagtaacagcatcagagaagacaaagggagcaacttcccctggacagaaggcaaagttggtgtatgaagaagagtcttctgaagaggagtctgatgatgaaatagcagataaggattctgaagataattgggatgaagatgaggaggagagtgaaagtgaaaaagatgaggacgttgaagaggaagatgaggatgccgaaggaaaagatgaagaaaatggcgaggacagagatacagcaagtgaaaaagaattaaatggagattctgacttagatcctgaaaatgaaagtgaagaagaatgaagacagctgcaaacacacaatgccagctgcaaacacacaatgccagctgcaaacacacaatgcagctgcaaacacacaatgcagctgcaaacacacaatgcagctgcaaacacacaatgcagctgcaaacacacaatgcagctgcaaacacacaatgcagctgcaaacacacaatgcagctgcaaacacacaatgcagctgcaaacacacaatgcagctgcaaacacacaatgcagctgcaaacacacaatgcagctgcaaacacacaatgcagctgcanacacacaatgcagctgcaaacacacaatgcagctcacaccat

SEQ ID NO: 503687 - DNA, 896 bp, Homo sapiens
  misc_feature (173)..(173): n is a, c, g, or t
ttgtgcagaaagtacggagatctcatcgataagctaagactcttacagcatgggaggatccggtggaatgggttatcctcgtatagagtggagaatggtggaggaaggtggtgatgtctgggttgtagcccagaacagaatgactttaatacaacttaaagacacggtatccntgggaaatggcgagttcgtcgtgcgtaggcagtagagtagcgtaacacagcaataaattgaagtgccctgaaaggctccaaagggaagagactgggaaatccctgtgcctgtgggtatttcagtcaactgatgaacacatggtaaaattatagcgagaactcaataaagaaaatgacaggaatttggtagctcaatggaggtcttggtggtaaattacttacaaatttcttaccattgaaaggccagaaacgaataattcaccttgatctaaaacttatagctgatgtggcctagtaggattcccaaatgctggaaaatcctctttgctaagttgtgtttctcatgcaaaacctgcaattgcgattacgcatttacaacattaaagcctgaacttggaaggataatgtacagtgatttcaaacagatatcagtagctgatcttccgggttttaatagaaggagcacatatgaacaaaggaatgggccacaaattcctccaagcatatagaaaagaactagacaactacttttggtgtgatatttctgggatttcagctttcttctcacactcaatacaggaagcttttgaaccttaaaactgttcaaagagtggaattgtacaaggaggacttcacaaaaacctggcccctggcagttataaatgggctgcccatggccaacatcagtcatgatgatggccagcccagaaacaagatacgata

SEQ ID NO: 503688 - DNA, 440 bp, Homo sapiens
agtatctctgttttaagtaagaaactaggtccggagcttttaacaggtacttagaagtgagtattgggtaatcactaagagggcatggactgcaccagaccagggctatggggagaaatgagtgactgtttgagatgtatgcgcgtgaactggcctaggatacttctcttgaggctttggaaaactgctgccttggaatttgcagtatccactccaggtctggcaccaaagatgttagtcttgagatcgcggtttcctctctcccagaaaaaaggactacaagagggtcgggggggatgctttggtggtgaagggattgcacgatggttttccttctgttcacaatggtatttacaggagaccttgtcggcagggggggtacgtgaactatctgggtgacgtttggaggtgatcagaggtgtagaaaatagaaaaaaaaa

SEQ ID NO: 503689 - DNA, 3393 bp, Homo sapiens
tccagagaaagcgagaattgaggtagggttaggatgggcttggggaggtctagccagtatggaactttcctggacattcgcgaagttcatctcctgggtcacaggatgtacaactacccattttacattcttatcactctcactcactcattttctgatacttgttgagaatctttatcccatgcctgacaaagggagattgtgctgtgttaaggaatgcaatcaatgaagcttttatcacagtagtatgtccagggttagttacctgacacaagcttttagggaatgtaattgtcacaggacctgaggcgatatttttaatgattgttcagtttgttttttttttattttctgctctgagtaaagttttctctcatgtattgagatgctttttttctcttcacaatatagcaaatggaaaggggacaatagcagtgtcagttccctatgtatcagcccagatggaaagatgttgctttcagctggtcgaacaatcaaactatgggttttggagaccaaagaagtctacaggcatttcacaggacatgcaacgccagtttcgtcactgatgttcactaccatcagacctcctaatgagagccagccctttgatggaattacaggtctttatttcttatctggagcagtacatgaccggttacttaatgtctggcaggtccgatcagaaaacaaagaaaagagtgcagtgatgtcatttacagttaccgatgaacctgtctatattgacttaactttgtcagaaaacaaagaagagcctgtcaagttggctgttgtttgcagagatggtcaagtccatctttttgaacacatattaaatgggtactgcaaaaagcctttgacttcaaactgcacaattcagatagcaacacctgggaaaggcaagaagtcaacaccaaaacccatccctattctagctgctggtttttgctcagacaaaatgtcattgttgcttgtatatggcagttggtttcagcctactattgagcgagtggctttaaactccagagaacctcatatgtgtttagtaagagatatttcaaactgctgggcccccaaagtagaaacagctataacaaaggtgaggacaccagtgatgaattctgaagcaaaagttctggtgcctgggattcctggtcatcatgcagctatcaagcccgctcctccacaaaccgagcaagtagagagcaagaggaagtcagggggaaatgaggttagcattgaggaacgtctgggagcaatggatatagacacacacaaaaaaggaaaggaagacctccagacgaatagctttccagttcttcttacccagggcttagaaagtaacgattttgaaatgctaaataaagtacttcaaactaggaatgtaaaccttataaagaagactgtattaaggatgcccctgcatactattattccgttgttacaagagcttacaaagaggttacaaggacatcctaatagtgctgtgctaatggttcagtggctaaaatgtgtgttaacagttcatgcatcatacctgtccacgttgcctgacctggtaccccagctggggacactctaccagttaatggaaagcagagtcaaaacttttcagaaactttcacaccttcatggaaagcttattcttctaattacacaagtaacagcatcagagaagacaaagggagcaacttcccctggacagaaggcaaagttggtgtatgaagaagagtcttctgaagaggagtctgatgatgaaatagcagataaggattctgaagataattgggatgaagatgaggaggagagtgaaagtgaaaaagatgaggacgttgaagaggaagatgaggatgccgaaggaaaagatgaagaaaatggcgaggacagagatacagcaagtgaaaaagaattaaatggagattctgacttagatcctgaaaatgaaagtgaagaagaatgaagacagcaaagcaagccggtcaaactatataaactctggctcaccttgcccagtggtgagggctgcctctgtgccaggatgccaaggaccgctgcacatttccaaattcacagcagtggatcccatgccactttgctgtcctgagcaccccagacttgactgtgtaaataagagtgtttcattcaaatgttaataaactttacacagtatatagacacattttctgcaatgtactgacatcagtgtccaatatatggtatatttttataatataatatcctagtatgattggttatatcaagaattgacaagtgcagataaagacctttcccataggagttcaagaactggactgttgtgaagaagtcagctcttatctcaggttggtatctttcatcaaatccagatgcaaagcagcactagtgaaaatttttttaatttagtacatttaatttggtacattttcataaaatatgaagggataactacaaactggagtaaaaatgatggtaattaaaaaaaatcctcagtatccctagcttgtctattaactgtgataatctgacttgagtcagattgaatatttggagtgcttccccagaataaccacttatttttgaagctatcatgtgaagtatttttttaaaacaaaacaaaaattatggtcattaaaaaactagagaattagccatattaaggatttttcttgactgcaaattacttctaaagaatcatcagtgtatagattagaagtgctcattacctgcaacttttaaaaaaaattcagttatagctgcttttgaagaggtttccatttttatttaaattactaatggatcaaagaacaattgtttattttttctctttggttttagatattaatgataaccttgttggaattttttttccaaagaaaatatttttataattaaataatttaatgtttttcttccttttcattacctactcttggcagtgttagggtatctgtttacctttaaaatgataagtctcactcaagattttttatgtatgtataaatattttggtgtgctacaaaagcctttgcaaattatcagtagtagtttttttttttttttttttttttaaagaatgagccgatattggcttagtgctcactaggggacatgcacatggaagctcacctctaagaaagggctgggcagatggatttattttttcccacctgtgaatatgtaaaacaaaaccattatctttgagggagtttttaataccaatgacagaacagagatttgtgtgctcatcttaagagccagagccatataagcatcttgggaaagcaagtttgaaccagctgctggtgtaatgtacagttatatttgtctataaatggagctgtttatggcaatttaataccattctctttgtaaagtgaataaatattcatcttt

SEQ ID NO: 503690 - DNA, 524 bp, Homo sapiens
  misc_feature (226)..(226): n is a, c, g, or t
ctaggtgacttagaggatcccgagtgtcttcaagacattaagttttctccagcaactccaccctgcacatcctccttctcagggatttttattaaactaagagctagagagacaaagtttatatttattcaagaatggaacaggtgtcagtctgtcaataacctgctggtaaacagcagcactgtcagaaaccatgccaattatcagtttgagttatacatatatnggaggtagcatttcaacactctggttttgtttctttggctttttttttttccaaaaaaatatactaggagatttaagacttacttcagattaaacttgttacattaagaaaacactcttggccgggagaggtggctcacgcctgtaatcccagcagtttgggaggccaaggctggcaggtcactggagatcaggagtacgagaccagccgggccaaaatgggaaaaccctgtctctactaaaagtacacaaattagccaggcctgggggcacacacctgtaatcccagctactcggga

SEQ ID NO: 503691 - DNA, 2166 bp, Homo sapiens
cacgtggctgcagcggggccagagcagcaatggcggcgggcggcggcggtagctgcgaccccctggcccctgctggggtcccttgcgccttctccccgcacagccaggcctacttcgctttggcctctaccgacggtcacttacgagtatgggagacggccaacaaccggctgcaccaggagtacgtgccttccgcgcacctcagtggtacctgcacctgtctggcctgggcgccagcgcggctgcaggccaaggaaagtccccagaggaaaaaaaggaaatcagaagctgtaggaatgagtaaccagactgacttattggctcttggcacagcagttggtagcattttattatacagcacagtaaaaggagagttacacagtaaattaataagtggtggacatgacaacagagtcaactgcatacagtggcatcaagacagtggctgtttatatagttgttcagatgataaacatattgtggaatggaacgtacagacatgcaaagtaaagtgcaaatggaaaggggacaatagcagtgtcagttccctatgtatcagcccagatggaaagatgttgctttcagctggtcgaacaatcaaactatgggttttggagaccaaagaagtctacaggcatttcacaggacatgcaacgccagtttcgtcactgatgttcactaccatcagacctcctaatgagagccagccctttgatggaattacaggtctttatttcttatctggagcagtacatgaccggttacttaatgtctggcaggtccgatcagaaaacaaagaaaagagtgcagtgatgtcatttacagttaccgatgaacctgtctatattgacttaactttgtcagaaaacaaagaagagcctgtcaagttggctgttgtttgcagagatggtcaagtccatctttttgaacacatattaaatgggtactgcaaaaagcctttgacttcaaactgcacaattcagatagcaacacctgggaaaggcaagaagtcaacaccaaaacccatccctattctagctgctggtttttgctcagacaaaatgtcattgttgcttgtatatggcagttggtttcagcctactattgagcgagtggctttaaactccagagaacctcatatgtgtttagtaagagatatttcaaactgctgggcccccaaagtagaaacagctataacaaaggtgaggacaccagtgatgaattctgaagcaaaagttctggtgcctgggattcctggtcatcatgcagctatcaagcccgctcctccacaaaccgagcaagtagagagcaagaggaagtcagggggaaatgaggttagcattgaggaacgtctgggagcaatggatatagacacacacaaaaaaggaaaggaagacctccagacgaatagctttccagttcttcttacccagggcttagaaagtaacgattttgaaatgctaaataaagtacttcaaactaggaatgtaaaccttataaagaagactgtattaaggatgcccctgcatactattattccgttgttacaagagcttacaaagaggttacaaggacatcctaatagtgctgtgctaatggttcagtggctaaaatgtgtgttaacagttcatgcatcatacctgtccacgttgcctgacctggtaccccagctggggacactctaccagttaatggaaagcagagtcaaaacttttcagaaactttcacaccttcatggaaagcttattcttctaattacacaagtaacagcatcagagaagacaaagggagcaacttcccctggacagaaggcaaagttggtgtatgaagaagagtcttctgaagaggagtctgatgatgaaatagcagataaggattctgaagataattgggatgaagatgaggaggagagtgaaagtgaaaaagatgaggacgttgaagaggaaagaaggaaatatggggaaatggagtgaatgtcaagtggatcagagagatacagtcatgggggtcaggtgtggtatccagaataatgtgggaggccagattgaagtccaggccagaaacagtggtaattgtgggagacccaaagagtgagtatagctgaaggccccggggagcagaaagtatatgcatcaggtgggaggaagaaaatagattttggaagtt

SEQ ID NO: 503692 - DNA, 457 bp, Homo sapiens
tgggtgcatagttgattcctagaggatacacctaagacattttccttgatactgtattcccttccagccactgctccatttctccactccccttcagagtgaaacgccttacaagagttgtctgtagagctgggcgcggtggctcacgcctgtagtcccagcactttgggaggccgaggcgggcagatcgcctgaggtcaggagttcgagaccggcctggccaacgtggtgaaaccccgtctctgctaaatatgcaaaaattggccaggcgtggtggcaggcgcctgtggtcccggctacttgggaggctgaggcaggagaaatgcttggatccgggaggcagaggttgcagttagccaggatcgcgccattgcactccagcgtgggcaacaagagtgagacttcatctcaaaataatagtaataataataactggtagaatgtattaccatttgta

SEQ ID NO: 503693 - DNA, 1697 bp, Homo sapiens
cacgtggctgcagcggggccagagcagcaatggcggcgggcggcggcggtagctgcgaccccctggcccctgctggggtcccttgcgccttctccccgcacagccaggcctacttcgctttggcctctaccgacggtcacttacgagtatgggagacggccaacaaccggctgcaccaggagtacgtgccttccgcgcacctcagtggtacctgcacctgtctggcctgggcgccagcgcggctgcaggccaaggaaagtccccagaggaaaaaaaggaaatcagaagctgtaggaatgagtaaccagactgacttattggctcttggcacagcagttggtagcattttattatacagcacagtaaaaggagagttacacagtaaattaataagtggtggacatgacaacagagtcaactgcatacagtggcatcaagacagtggctgtttatatagttgttcagatgataaacatattgtggaatggaacgtacagacatgcaaagtaaagtgcaaatggaaaggggacaatagcagtgtcagttccctatgtatcagcccagatggaaagatgttgctttcagctggtcgaacaatcaaactatgggttttggagaccaaagaagtctacaggcatttcacaggacatgcaacgccagtttcgtcactgatgttcactaccatcagacctcctaatgagagccagccctttgatggaattacaggtctttatttcttatctggagcagtacatgaccggttacttaatgtctggcaggtccgatcagaaaacaaagaaaagagtgcagtgatgtcatttacagttaccgatgaacctgtctatattgacttaactttgtcagaaaacaaagaagagcctgtcaagttggctgttgtttgcagagatggtcaagtccatctttttgaacacatattaaatgggtactgcaaaaagcctttgacttcaaactgcacaattcagatagcaacacctgggaaaggcaagaagtcaacaccaaaacccatccctattctagctgctggtttttgctcagacaaaatgtcattgttgcttgtatatggcagttggtttcagcctactattgagcgagtggctttaaactccagagaacctcatatgtgtttagtaagagatatttcaaactgctgggcccccaaagtagaaacagctataacaaaggtgaggacaccagtgatgaattctgaagcaaaagttctggtgcctgggattcctggtcatcatgcagctatcaagcccgctcctccacaaaccgagcaagtagagagcaagaggaagtcagggggaaatgaggttagcattgaggaacgtctgggagcaatggatatagacacacacaaaaaaggaaaggaagacctccagacgaatagctttccagttcttcttacccagggcttagaaagtaacgattttgaaatgctaaataaagtacttcaaactaggaatgtaaaccttataaagaagactgtattaaggatgcccctgcatactattattccgttgttacaagaggtaactgactgcttttttcatttcagcatcctaatgccatgagttaaatggaaaattcagtagttagagaaatggatttgtaatacgtaaggacacatggcatttagagtgagtaatggatggaggaaagtactttagacaaaa

SEQ ID NO: 503694 - DNA, 372 bp, Homo sapiens
tctccctagctggcactactaatctaacttacgtctctatggacttgcctattctggtcctttcttataaatggaacgacgcaacatgcagcccatgttttctggctgctttcactgagcataatattttcaagattcacccatgttgtaacacatatcagtgcttcattcctttttatggctgaataatactccatggcatggacagaccatatttgtcttatctgttcatcactgacagacatttgggtttgttccattttttggctgtcatgaataatgctgtcagcatgtatgtatgtacgcggtttccttagtttttatctaatgtcattttcctgttccaggatccccttcaagataccacattat

SEQ ID NO: 503695 - DNA, 1912 bp, Homo sapiens
cacgtggctgcagcggggccagagcagcaatggcggcgggcggcggcggtagctgcgaccccctggcccctgctggggtcccttgcgccttctccccgcacagccaggcctacttcgctttggcctctaccgacggtcacttacgagtatgggagacggccaacaaccggctgcaccaggagtacgtgccttccgcgcacctcagtggtacctgcacctgtctggcctgggcgccagcgcggctgcaggccaaggaaagtccccagaggaaaaaaaggaaatcagaagctgtaggaatgagtaaccagactgacttattggctcttggcacagcagttggtagcattttattatacagcacagtaaaaggagagttacacagtaaattaataagtggtggacatgacaacagagtcaactgcatacagtggcatcaagacagtggctgtttatatagttgttcagatgataaacatattgtggaatggaacgtacagacatgcaaagtaaagtgcaaatggaaaggggacaatagcagtgtcagttccctatgtatcagcccagatggaaagatgttgctttcagctggtcgaacaatcaaactatgggttttggagaccaaagaagtctacaggcatttcacaggacatgcaacgccagtttcgtcactgatgttcactaccatcagacctcctaatgagagccagccctttgatggaattacaggtctttatttcttatctggagcagtacatgaccggttacttaatgtctggcaggtccgatcagaaaacaaagaaaagagtgcagtgatgtcatttacagttaccgatgaacctgtctatattgacttaactttgtcagaaaacaaagaagagcctgtcaagttggctgttgtttgcagagatggtcaagtccatctttttgaacacatattaaatgggtactgcaaaaagcctttgacttcaaactgcacaattcagatagcaacacctgggaaaggcaagaagtcaacaccaaaacccatccctattctagctgctggtttttgctcagacaaaatgtcattgttgcttgtatatggcagttggtttcagcctactattgagcgagtggctttaaactccagagaacctcatatgtgtttagtaagagatatttcaaactgctgggcccccaaagtagaaacagctataacaaaggtgaggacaccagtgatgaattctgaagcaaaagttctggtgcctgggattcctggtcatcatgcagctatcaagcccgctcctccacaaaccgagcaagtagagagcaagaggaagtcagggggaaatgaggttagcattgaggaacgtctgggagcaatggatatagacacacacaaaaaaggaaaggaagacctccagacgaatagctttccagttcttcttacccagggcttagaaagtaacgattttgaaatgctaaatgtaagtatatagcaatttttaactaaattaacatggttaatatttcttagaaaatgattgacatagcacattcacagctgtgagccatcatgttacagagccatttggaatgtaatgttttatgagtttagtcaaacatgtatcacttggtggcattatacagacagtcaccaacctacaacgggattgcattgagttattttgaacctggaatgcattttctcatagaaatactgttctgaattattaggttattaggctttagttcataaaagcctttataaacatagtgtagctgaatgataatactcagcattctagatcacaatttatatttttttctgtaggaaaatgcgttcctgagtttttactctggattccagaaacttatttccccctggccgtgagagggggcagtgaggtggaaccttggcaatgggtaggag

SEQ ID NO: 503696 - DNA, 720 bp, Homo sapiens
agcggggcagccgcaacccgttggggtcggcttccacagtgtgggagcttaattcttttgctcttcttcacaatgactcttgctgctagtcactctttgggtctgcagtacctttatcagccgtaatactcaccgcgagagtctgtggcttcattcctgaagtcagcgagaccacgaaccccccaggaggaacaaacaactccagacgcaccacctttaagaactgtaacactcactgcaaaggtctgcagcttcactcctgaagtcagcgagaccacgaacccaccggaaggaagaaactctggacacagctaaacatctgaaggaataaactcagacacattacccgtaaaaactgtaacactcaccgcgagggtcagtggcttcgttattgaagtcagtgagaccaagaacccaccggaaggaaccaattccagacacacttgttatctaaataaaaacttgaggctgggcatggtggctgacacctgtaatcccaacattttgggaggctgaggcaggtggatcacttgagcctcggagtttcagaccagcctgggcaacatggcaaaaccccgtctctactaaaaatacaaacattagtcgggtgtggtccatgcacctatagtcccagtacttgggaggctgaggcaggagaatcacttgaatcctggaggcaaagattgcagtgagaagagatcaacacactgcactccaact

SEQ ID NO: 503697 - DNA, 137 bp, Homo sapiens
ctgcgtactctattttaaaacaccatttcacttgtaagctacttgactttgggctggtttcccttttcctctttatttggaactgtttctatctgagctcctgtgtaatttataataaaaagttagtagaatatagt

SEQ ID NO: 503698 - DNA, 175 bp, Homo sapiens
cacagcagtgacagttgttttatcaagttcttttcttattcatgactcattatatgtaaacacatcatttgtaaaatgcaaatgccatatttgacttggcttctggtcttgcatgtatttgcataagcacatgattcattcacatgtttaacagttgatgtaacactgcattggg

SEQ ID NO: 503699 - DNA, 562 bp, Homo sapiens
ggccacacagccgaggcccccagcccgggcgcaggccacccaagggggccgggagggccaggcgcgcacgctgggacctgcggcgcccacagtggactcaaacttgtcctccgaagcgcggcccgtgacctccttcctgagcttgtcccaggtgtccgggccgcagctgcccggggagggcgaagaggaggaggaaggggaggacgatggggccccgggcgacgaggccgcgtcggaggacagcgaggaggccgcgggcccggcgctcggacgctggcgtgaggacgccatcgactggcagcgcacgttcagcgtgggcgccgtggacttcgagctgctgcgctcggactggaacgacctgcgatgcaacgtttcggggaacctgcagctgccggaggcggaggccgtggacgtgaccgctcagtacatggagcggctgaacgcgcgccacggcgggcgcttcgcgcttctgcgcatcgtgaacgtggagaagcgccgggactcggcgcgagggagtcgcttcctgctggagctggagctgcaggagcgcgggggcggccgc

SEQ ID NO: 503700 - DNA, 733 bp, Homo sapiens
  misc_feature (555)..(555): n is a, c, g, or t
gggatcaggacaggagcggaactgctgcctgggggaaggggtgctgtgaaggcacgattgggggcttctcagaagaggtgacccagggcctggaagaggagtggctgggaggactggggcaaacatcccaggcaggggactcctcaggacaaaggagaggagacagtggctgtgcctgaggaggagtctgctaccccagtatgaggggaaggttgaaagccacaaaatcaaaactgcttaaggtcctagaatgccacaaaagccccttggaaccttgtcctatgggcggtggctaactcctgaaggtttctgagcaagggggtaacaggacaggcgggcatgtcataaacgtcacctgggacgtgagtggtggccaggaggcccgcgaggaggtgaggatgggcctgggctcgctggtgtgcccccagtcctgccccgaccctggagggggtggctggaaggtggacctgcctgctgggccaacctggaggggcaggtgctgtgccgcggagcccgcagcctccgccaactccaagtcggctgagtttctgtggncagggcggaccagggttgcgggcggggtgcaggctggaagccccagtaccggctgaccgctgagccttgcaggcgcttcgcgcttctgcgcatcgtgaacgtggagaagcgccgggactcggcgcgagggagtcgcttcctgctggagctggagctgcaggagcgcgggggcggccgc

SEQ ID NO: 503701 - DNA, 532 bp, Homo sapiens
ggccacacagccgaggcccccagcccgggcgcaggccacccaagggggccgggagggccaggcgcgcacgctgggacctgcggcgcccacagtggactcaaacttgtcctccgaagcgcggcccgtgacctccttcctgagcttgtcccaggtgtccgggccgcagctgcccggggagggcgaagaggaggaggaaggggaggacgatggggccccgggcgacgaggccgcgtcggaggacagcgaggaggccgcgggcccggcgctcggacgctggcgtgaggacgccatcgactggcagcgcacgttcagcgtgggcgccgtggacttcgagctgctgcgctcggactggaacgacctgcgatgcaacgtttcggggaacctgcagctgccggaggcggaggccgtggacgtgaccgctcagtacatggagcggctgaacgcgcgccacggcgggtatgggggcggccgaacgcgcgccagggcggttttggaggcggggacagccggggagatggaggtcctggccttg

SEQ ID NO: 503702 - DNA, 159 bp, Homo sapiens
ctcctggcagaggaggggactgtgtataagaactaggtattgagaagtctgaaggttgatgtaatctgttactgtccggtgaaaaaaaggaaaaaattctaattaaaaatttattagtttttttttttttgttatatttgtattttctttttattatat

SEQ ID NO: 503703 - DNA, 201 bp, Homo sapiens
atcaaaaacccttgccccccaagggttttttaaaattgcctaaaccccgttaaaacccccttaaattttttaaaccccaaaaaagagctttttaaaaggggtcccttttttaaaggggtaaattttgtaaccccaaaaattttgtttttaaaaacaggatttttttttaacctttgggatttaagggtatttttgggccct

SEQ ID NO: 503704 - DNA, 661 bp, Homo sapiens
gcggccgcgatgccgcggctcccggtgaagaagatccgtaagcagatgaagctgctgctgctgctgctgctgctgagctgcgccgcgtggctcacctacgtgcacctgggcctggtgcgccagggacgcgcgctgcgccagcgcctgggctacgggcgagatggtgagaagctgaccagtgagaccgacggccggggggtccacgctgtgccatccacacagagggctgaggactccagtgagagccgtgaagaggagcaagcgcccgaaggtcgggacctagacatgctgtttcctgggggcgctgggaggctgccactgaacttcacccatcagacacccccatggcgggaggagtacaaggggcaggtgaacctgcacgtgtttgaggactggtgtgggggcgccgtgggtgggcgccgtggacttcgagctgctgcgctcggactggaacgacctgcgatgcaacgtttcggggaacctgcagctgccggaggcggaggccgtggacgtgaccgctcagtacatggagcggctgaacgcgcgccacggcgggcgcttcgcgcttctgcgcatcgtgaacgtggagaagcgccgggactcggcgcgagggagtcgcttcctgctggagctggagctgcaggagcgcgggggcggccgc

SEQ ID NO: 503705 - DNA, 502 bp, Homo sapiens
gaacataaataccccagctccctcaccctggaacataaataccccagctccctcacctgggaacataaataccccagctctctcaccctggaacataaataccccagctgtctcaccctggaacataaatacgccagctccctcaccctggaacataaataccccagctccctcaccctggaacataaataccccagctccctcaccctggaacataaataccccagctccctcaccctggaacataaataccccagctccctcaccctggaacataaataccccagctctctcacccttggggtttgatagctttgaggtgcgggttctagactgcatcccaaagctgtgcagcagggttaagctctggtacccacagtggtaattacttgacccagtgagtccctgactggcttctcccctactctgtttcaacctctcactcagttcctggcatttccttggatcatttcccaaataaactacttgcttgaatttttga

SEQ ID NO: 503706 - DNA, 410 bp, Homo sapiens
  misc_feature (393)..(393): n is a, c, g, or t
gcggccgcgatgccgcggctcccggtgaagaagatccgtaagcagatgaagctgctgctgctgctgctgctgctgagctgcgccgcgtggctcacctacgtgcacctgggcctggtgcgccagggacgcgcgctgcgccagcgcctgggctacgggcgagatggtgagaagctgaccagtgagaccgacggccggggggtccacgctgtgccatccacacagagggctgaggactccagtgagagccgtgaagaggagcaagcgcccgaaggtcgggacctagacatgctgtttcctgggggcgctgggaggctgccactgaacttcacccatcagacacccccatggcgggaggaggtgagctggctcggcctgtaatgggctgggaggcanggcgggggctggggcgg

SEQ ID NO: 503707 - DNA, 828 bp, Homo sapiens
tagttctagatcgctgagcggctgccctattatatttttttttggtaaagacggagttttgccataaggccctgggttaggtctagaaactcctgagctcaattaatccacccatctaggcctcccaaagtcaaggatatacaggcataagccccaccacacccgtgcctgttcccaaatttcacatccaaaagcaacaggacttaacatatgccaaaacaaatctcaaaaagaactgtggtgtaccacctgggccacgcaccaaggctacacgcctgtaatcccagacacatggtggaggaccagaggcaagttgtatggctataaagctacaggagttcaacacagcctggccaacctgtgggtgcaacaccccatcttccacaaaaaatatacaaacacacgagccacacaatatttgcacgctattcactcactatctgttctccaagacacatacctccagcaaactttccataccctttacatcaccaacatagtggtcatgggcgacttcaggacaccagaaacaccggggttccaagtgggccacaaacaccagagtctctgaacacacacccccccccctactaccttttgcgcaactcatcttttgttaacccaaacatggccaccagggtcgaatacgcacgacgacaaaggggggcacgtccttttttcacaacacgttgggttaggtcaaccccagccgtgggactactcataatattgcccccaagaaaaacctgtctagtggctggtaattggacccccttttgccccccccctttcaacacccttctctttcccaatatgggccacaaagcg

SEQ ID NO: 503708 - DNA, 1579 bp, Homo sapiens
gcggccgcgatgccgcggctcccggtgaagaagatccgtaagcagatgaagctgctgctgctgctgctgctgctgagctgcgccgcgtggctcacctacgtgcacctgggcctggtgcgccagggacgcgcgctgcgccagcgcctgggctacgggcgagatggtgagaagctgaccagtgagaccgacggccggggggtccacgctgtgccatccacacagagggctgaggactccagtgagagccgtgaagaggagcaagcgcccgaaggtcgggacctagacatgctgtttcctgggggcgctgggaggctgccactgaacttcacccatcagacacccccatggcgggaggagtacaaggggcaggtgaacctgcacgtgtttgaggactggtgtgggggcgccgtgggccacctgaggaggaacctgcacttcccgctgttccctcatacgcgcaccaccgtgaagaagttggccgtgtcccccaagtggaagaactatggactccgtatttttggtttcatccacccggcgagggacggagacgtccagttttctgtggcctcagacgacaactcggagttctggctgagtctggacgagagccctgctgctgcccagcttgtggcctttgtgggcaagactggctccgagtggacagcgcctggagaattcaccaagttcagctcccaggtgtccaagcccaggcggctcatggcctcccggaggtactactttgagttgctgcacaagcaggacgaccgcggctcggaccacgtggaagtgggctggcgagctttcctgcccggcctgaagttcgaggtcatcagctctgctcacatctccctgtacacagatgagtcagccttgaagatggaccacgtggcgcacgtcccccagtctccagccagccacgtgggggggcgtccgccgcaggaggagaccagcgcagacatgctgcggccagatcccagggatacctttttcctcactccacgcatggaatcttcgagcctggagaacgtgctggagccctgcgcctacgcccccacctacgtggtcaaggacttcccgatcgccagataccagggcctgcaatttgtgtacctgtccttcgtttatcccaacgactacactcgcctcacccacatggagacggacaacaagtgcttctaccgcgagtctccgctgtatctggagaggtttgggttctataaatacatgaagatggacaaggaggagggggatgaggatgaagaagacgaggtgcagcgccgagccttcctcttcctcaacccggacgacttcctggacgacgaggacgagggggagctgctcgacagcctggagcccaccgaggcggccccgcccaggagcggcccccagatccacggttgctaaacaggatcgggcagttgcctaggcataattaagtacagacatcagctagtacgggtatccatcgtatagtaggagagaaagatgtctgtggtacacgacagaataaggacataaggcgcatgcaaaatctggaggagcaataacgtcgtagggagacaggcactgcgcacacacg

SEQ ID NO: 503709 - DNA, 1652 bp, Homo sapiens
gcggccgcgatgccgcggctcccggtgaagaagatccgtaagcagatgaagctgctgctgctgctgctgctgctgagctgcgccgcgtggctcacctacgtgcacctgggcctggtgcgccagggacgcgcgctgcgccagcgcctgggctacgggcgagatggtgagaagctgaccagtgagaccgacggccggggggtccacgctgtgccatccacacagagggctgaggactccagtgagagccgtgaagaggagcaagcgcccgaaggtcgggacctagacatgctgtttcctgggggcgctgggaggctgccactgaacttcacccatcagacacccccatggcgggaggagtacaaggggcaggtgaacctgcacgtgtttgaggactggtgtgggggcgccgtgggccacctgaggaggaacctgcacttcccgctgttccctcatacgcgcaccaccgtgaagaagttggccgtgtcccccaagtggaagaactatggactccgtatttttggtttcatccacccggcgagggacggagacgtccagttttctgtggcctcagacgacaactcggagttctggctgagtctggacgagagccctgctgctgcccagcttgtggcctttgtgggcaagactggctccgagtggacagcgcctggagaattcaccaagttcagctcccaggtgtccaagcccaggcggctcatggcctcccggaggtactactttgagttgctgcacaagcaggacgaccgcggctcggaccacgtggaagtgggctggcgagctttcctgcccggcctgaagttcgaggtcatcagctctgctcacatctccctgtacacagatgagtcagccttgaagatggaccacgtggcgcacgtcccccagtctccagccagccacgtgggggggcgtccgccgcaggaggagaccagcgcagacatgctgcggccagatcccagggatacctttttcctcagtgagagggggcccgcgcgggggcgagggcaggggtgcctgccccagccaccctgtgaccgcacctcctgcagctccacgcatggaatcttcgagcctggagaacgtgctggagccctgcgcctacgcccccacctacgtggtcaaggacttcccgatcgccagataccagggcctgcaatttgtgtacctgtccttcgtttatcccaacgactacactcgcctcacccacatggagacggacaacaagtgcttctaccgcgagtctccgctgtatctggagaggtttgggttctataaatacatgaagatggacaaggaggagggggatgaggatgaagaagacgaggtgcagcgccgagccttcctcttcctcaacccggacgacttcctggacgacgaggacgagggggagctgctcgacagcctggagcccaccgaggcggccccgcccaggagcggcccccagatccacggttgctaaacaggatcgggcagttgcctaggcataattaagtacagacatcagctagtacgggtatccatcgtatagtaggagagaaagatgtctgtggtacacgacagaataaggacataaggcgcatgcaaaatctggaggagcaataacgtcgtagggagacaggcactgcgcacacacg

SEQ ID NO: 503710 - DNA, 392 bp, Homo sapiens
gtgacctcctggggtagatactgaaactgtgacaagtgataacaaaactggcagaaatcagttggacccaatatggccaactggagtttctgcagaaagagcttgctgatatcacagcctgaatttccacgcatgtttcgtattaactgccccggaatttgatttgcacacagcacccatgaggaagcatgaagagataactgcgcatgtctgaggacttgccagacctcctctttccttccaccgatctcctgctaatcccggaacccaccctctaacccttttctaataaaattatttccttaaaggcagcacagcgagacagatttgagctggactcctgtttccgagttggtcaatttgcaatgaaaagcttttcttttctctgaaaa

SEQ ID NO: 503711 - DNA, 473 bp, Homo sapiens
tgatctcccactcagctgttaaagtgctgagatcacaggcctgagccctgctcagccctctgttttgtgtcatgtcaagtaatgtgatgacacgcaggtgggatgggggtgtgggaaaagctctgataacactttatgatcttaggatggaacttcgttgtgtcattgcaattattcgtcatggggatcgtactcccaagcagaagatgaagatggaagtgaaacacccaaggtcagaagagtgtcctaatttacataaataggtttttgtgaggaagactgcatggggggcaagtcctggaggctttgactgtctcatgccacactgaagcttctcgttacttcttcaggttttttgctctgtttgaaaaacatggtggctacaagacaggcaaattaaaactcaagcgacctgagcagctccaggtaaggtagtgaatctgaccaggaggaacagtgccatgagagagata

SEQ ID NO: 503712 - DNA, 112 bp, Homo sapiens
gtctctaaagcagagtgtgttggctgtgaaggcagagacgtatttttccctctagtactctgatttgtgagtgttcctctgctttctgaagggcagagactcttgagtatac

SEQ ID NO: 503713 - DNA, 883 bp, Homo sapiens
gaggagctgagcagacagctgagccctcacactcacaactagccaccgatggacatcgccatccagcacccctggatcacgccgcgcccattcatttcctgttccgagctcccccagccgtctcttagaccaggtgcttcgggggagcgacctgttggaagtctgaactggatgcccgacggtcttactttcccgtgatgtcccttctacgcaattcggacagcctccttcctgcgggcacccagcgtggttggacactggactctcagaggtgagtcatcacccaagataggacgggagaggtccattactggacacctccttggaaacttctcacataccagttttcctttcctacccatgcataaaacccattgacaggggcaccctggtgctgtccccaatgtgacaagacgcaactgagtgaggtggctaagatgccattcctaccccccacctcacccggttctctatgtgaatagtacctcttgtcaattccccactttaatcaccattcataatcatgccacgtggtcaagattacactccataccgcatccccttacgttctctaccaggggatacccctaaacatggtttggttcatggacaacgcctggcagggacacggacgctgccctgtcaaagcatcccgtggcatcaatccctcccagcacgtgggactctggacacgcacgctaccagcaccaggtgccacaagaccaggagacgagcccacgccccatccgagcatgctgcccccccactgggcacctctctgcatcacatgcccccgacaagaccacgagctgccacgacagacacggcgccgcacgggccacaaccacagagacacaacatcggcgccacagcaacggggcac

SEQ ID NO: 503714 - DNA, 248 bp, Homo sapiens
ctgaagttgacacagagtgggtgagggtgatggctccgggaaattggctggacagttgcacactctcctgagaggggatgactttgtacagtgtccccaaaaacatggagcgaacggcctgacaagggcctttgcaggtgtggattccttgcaacccaatgcccacggggacatgaaaccacgacaccacagaggataccaaccgtggcaacgggtgacagcggggatcggcccgcctgtcccaaacg

SEQ ID NO: 503715 - DNA, 860 bp, Homo sapiens
gctctcgccaggtgtcctcgtgaaggcccgggaccgcggatgggtgtcggcgtgaccaggcctgagctccctgtctctcctcagtgacatcgtctttaaaccctgcgtgcaatccctgacgcaccgccgtgatgcccaggaagacagggcgacctggaagtccaatacttccttaagatcatccaatattggatgattatccgaaatgtttcatgtgtgggaagcagacaatgtgggctcaagcagatgcagcagatccgatgtcccttcgtgggaaggctgtggtgctgatgggcaagaacaccatgatgcggcaaggccaatccgaggccacctgaaaaaaacccagctctgagaaactgtgcctcatatcggggggaatgtgggcttgggtgttcaccaagggaggacctcactggagatcagggacatgttgctgggccaataagtgtgccaagtgttgccgtgctggtgcattggcccatgttgaagtcacttgttgccagccagaacactgtctcgggccgaagaagacctccttttccaggctttaggtatcaccactaaaatctcccgggccccatttgaaatccttgagtggtggtgcagtgatcagaatgggcggccatgtgggagcagcgaaggcacgcttgttgacttggttcaaatttccctttttcttgggtgggcactcacgcaggggttcgccctggggcttacacccgaggtggtatcccggggacctgctttcctctggggggcgacagtgcactcttgtggtggccccgtgtggcgcccttattaagggagagccgcgctgggggacccccgagaggcgtggacagtttgcgggcccttgc

SEQ ID NO: 503716 - DNA, 443 bp, Homo sapiens
  misc_feature (23)..(23): n is a, c, g, or t
gctcatttcccaggaggagaagncctggcctgcccccaaccctaggagcccccccaggtgtgtgagtggcaagagcaagctcagaaccgtctcagcgctgggctgtgactgccagccacccttcatctagactgaaggaggttagcatttgccagtgtgttttctctcgatattcatgtacgtgtattttaaaagtaagttgcagtatcatgagactatttatccctagtgttgccctaagaggtagggccttttaccagaccagccagtgccacagccaagacagtagtcctgtcccactaacagccattgtctagtctgtacctaaagttgtctcccagcccccattctaccccattattttagtattggtattggatccaatcagggcaagaacattgtatgttattaaaaagtttctttgaaagctaaaaagttttccc

SEQ ID NO: 503717 - DNA, 319 bp, Homo sapiens
cctccgtctatgattgtcctggacccccagttgcaattcgtaggggctcatcaccgacaggtgcaaatgcctggcgcgggtgctccaggctgtaggcgccaatcacttcggcgaacggcaaggccttgtcgctgacggtggagtcgagcactccgagcttgagggtgccgcgcaattcgcctttcaacgcagcggtgtattgctcgaaaccttcgagttcgcccaacaggcgcagggtttcctgatgaaacagctcacccttgctggtcaggctgaagccgccacggccacgatggcacagcaccacgcgagtgaactt

SEQ ID NO: 503718 - DNA, 758 bp, Homo sapiens
agcggaaggggcggagctccgtggaaaccggaagtaactcttgacgggcactcggagcagttccgatgactgtccacaacctgtacctgtttgaccggaatggagtgtgtctgcactacagcgaatggcaccgcaagaagcaagcagggattcccaaggaggaggagtataagctgatgtacgggatgctcttctctatccgctcgtttgtcagcaagatgtccccgctagacatgaaggatggcttcctggccttccaaactagccgttacaaactccattactacgagacgcccactgggatcaaagttgtcatgaatactgacttgggcgtgggacccatccgagatgtgctgcaccacatctacagtgcgctgtatgtggagctggtggtgaagaatcccctgtgcccgctgggccaaactgtgcaaagtgagctctttcgctcccgactggactcctatgttcgctctctgcccttcttctccgcccgggctggctgaagcaacctacctcaagtctcaggagaattcatgtctgcctggggcccttccgaacctgtgccaactaagggcccccactgtaagcccccgcacccccaccccctgcccagagcaacagcctaaaggcctgccctgatgctctcctcctaccagagtgaagcccacagagtccctccacctccacaccaggccctctctccagttttatcccctgcctaatgctgcgagaagcacagaataaactttttgtcactc

SEQ ID NO: 503719 - DNA, 115 bp, Homo sapiens
gtacaggagcatgggccatacctgccatggtctttcccaatccagtggaactaggaatgtgctccaagccatgctcctacaaatgctagaaattgtagtgatctggagaccggct

SEQ ID NO: 503720 - DNA, 720 bp, Homo sapiens
  misc_feature (645)..(645): n is a, c, g, or t
tcgaaccacgcgtccggttccggtgagtccgtgggtggggtccccacctggttggaaggctgtgggtccgggaacccgagcccaaggagtgggggcggccccggagcgaggctcacactccctgccctgcagatgactgtccacaacctgtacctgtttgaccggaatggagtgtgtctgcactacagcgaatggcaccgcaagaagcaagcagggattcccaaggaggaggagtataagctgatgtacgggatgctcttctctatccgctcgtttgtcagcaagatgtccccgctagacatgaaggatggcttcctggccttccaaactagccgttacaaactccattactacgagacgcccactgggatcaaagttgtcatgaatactgacttgggcgtgggacccatccgagatgtgctgcaccacatctacagtgcgctgtatgtggagctggtggtgaagaatcccctgtgcccgctgggccaaactgtgcaaagtgagctctttcgctcccgactggactcctatgttcgctctctgcccttcttctccgcccgggctggctgaagcaacctacctcaagtctcaggagaattcatgtctgcctggggcccttccgaacctgtgcattaaggggcccantggtaggccccgaacccgaaccctggcagagaagcaagggctgcctgaggctctacaaagaacacagactcaaca

SEQ ID NO: 503721 - DNA, 275 bp, Homo sapiens
gacccgagttagacgggtgctggcacacgccacagggtaacacggtctgggcttgatgagagagagaacctgagatgctcacacatcaatccacctggatcgagataggccagtttctggaacgcagccgcagcatcgtgattcccatcggctccaatgagcaacacggccccaccggcctgctgggcaccgactggatgtgcccggaaatcatcgcccatgaagcgcaaaaaaacgccgacatcctgatcggcccgaccttcaatatcggcatg

SEQ ID NO: 503722 - DNA, 684 bp, Homo sapiens
taaatactgtccagattgtgaggtgttagacctatacgtctgcgggaacgggcagaaacaccacaggaactccaggacgggcccaaacatagagcctctgtactgaagggtaggcagctgagagctgcctcacttcagccctaagcatgtcacgggctctgcgtcgctcagagtttgctgatgctgatggatagtcccatgaaacgagctggcttgttaaaggtatatattcctacatagaagaatgttctgattgaagtgaatccccagatccgaattcccagaacctttgaccgcttttgtgggctcgtggataagaaagcttagaacaaagttagaatgaacttgttagtagggaagaatgggggaagacgaaaagggagcactaattgtggattcctaagcgagaaaatgggagaccaacctgattaataccacgacaaggccgttatcattttctatgtttgtggaaactccacttctgttcttgcagtagcttcctttctgagtgaaaaaggaattgaaccatcaaaatactggattgaattctgctcccagggtcaatatttagacggcgcactcgtgtagtagatttgtcctaataagtaattccatggatatatgtagtttctttaattcacctaaataccccaaagaaacaaaactacatcaacataccaaaca

SEQ ID NO: 503723 - DNA, 163 bp, Homo sapiens
acctgagggaactggactgacaccagctgggtgacagtggtgaagagtgaggtctgctactacagggactaactgtgcgctgcgacacatgcgtgctgtaggatgtacaggtgacgctgaggcgtggctgagtgttagctgagtatgcctgaggtccagaggc

SEQ ID NO: 503724 - DNA, 82 bp, Homo sapiens
actttgatctcaacacagacccctaccagctgatgaatgcagtgaacacactggacagggatgtcctcaaccagctacacgt

SEQ ID NO: 503725 - DNA, 1093 bp, Homo sapiens
  misc_feature (789)..(789): n is a, c, g, or t
  misc_feature (791)..(792): n is a, c, g, or t
agcggaaggggcggagctccgtggaaaccggaagtaactcttgacgggcactcggagcagttccgatgactgtccacaacctgtacctgtttgaccggaatggagtgtgtctgcactacagcgaatggcaccgcaagaagcaagcagggattcccaaggaggaggagtataagctgatgtacgggatgctcttctctatccgctcgtttgtcagcaagatgtccccgctagacatgaaggatggcttcctggccttccaaactagccgttacaaactccattactacgagacgcccactgggatcaaagttgtcatgaatactgacttgggcgtgggacccatccgagatgtgctgcaccacatctacagtgcgctgtatgtggagctggtggtgaagaatcccctgtgcccgctgggccaaactgtgcaaagtgagctctttcgctcccgactggactcctatgttcgctctctgcccttcttctccgcccgggctggctgaagcaacctacctcaagtctcaggagaattcatgtctgcctggggcccttccgaacctgtgccaactaagggcccccactgtaagcccccgcacccccaccccctgcccagagcaacagcctaaaggcctgccctgatgctctcctcctaccagagtgaagcccacagagtccctccacctccacaccaggccctctctccagttttatcccctgcctaatgctgcgagaagcacagaataaactttttgtcactctcaaaaaaaaagaaagacacaaacacgaaanannaaacacaacactgtgtgtggcgcgcgcgcgcctgtggcgcccccttggagagaagcgcctttcatgagaccaccttcgagttgtgggcggcgcgggggccccaggtagggggaaaagagtgagaaaaatgagtggatcaacaaatgcggtgtttcccacatgagagagacacaccgcggggcaccagagagaacaaaaggtgccgtgcgagaaattcttctccacaccatttaaaaataaagagcgcgccgcgagggaaaaaacagagaagcggtcttctacgggaaaacaaactctccag

SEQ ID NO: 503726 - DNA, 825 bp, Homo sapiens
tcgaaccacgcgtccggttccggtgagtccgtgggtggggtccccacctggttggaaggctgtgggtccgggaacccgagcccaaggagtgggggcggccccggagcgaggctcacactccctgccctgcagatgactgtccacaacctgtacctgtttgaccggaatggagtgtgtctgcactacagcgaatggcaccgcaagaagcaagcagggattcccaaggaggaggagtataagctgatgtacgggatgctcttctctatccgctcgtttgtcagcaagatgtccccgctagacatgaaggatggcttcctggccttccaaactagccgttacaaactccattactacgagacgcccactgggatcaaagttgtcatgaatactgacttgggcgtgggacccatccgagatgtgctgcaccacatctacagtgcgctgtatgtggagctggtggtgaagaatcccctgtgcccgctgggccaaactgtgcaaagtgagctctttcgctcccgactggactcctatgttcgctctctgcccttcttctccgcccgggctggctgaagcaacctacctcaagtctcaggagaattcatgtctgcctggggcccttccgaacctgtgccaactaagggcccccactgtaagcccccgcacccccaccccctgcccagagcaacagcctaaaggcctgccctgatgctctcctcctaccagagtgaagcccacagagtccctccacctccacaccaggccctctctccagttttatcccctgcctaatgctgcgagaagcacagaataaactttttgtcactc

SEQ ID NO: 503727 - DNA, 827 bp, Homo sapiens
aaacttacggctaggtacgaggcgggtgtcgcgtgggtggggtccccacctggttggaaggctgtgggtccgggaacccgagcccaaggagtgggggcggccccggagcgaggctcacactccctgccctgcagatgactgtccacaacctgtacctgtttgaccggaatggagtgtgtctgcactacagcgaatggcaccgcaagaagcaagcagggattcccaaggaggaggagtataagctgatgtacgggatgctcttctctatccgctcgtttgtcagcaagatgtccccgctagacatgaaggatggcttcctggccttccaaactagccgttacaaactccattactacgagacgcccactgggatcaaagttgtcatgaatactgacttgggcgtgggacccatccgagatgtgctgcaccacatctacagtgcgctgtatgtggagctggtggtgaagaatcccctgtgcccgctgggccaaactgtgcaaagtgagctctttcgctcccgactggactcctatgttcgctctctgcccttcttctccgcccgggctggctgaagcaacctacctcaagtctcaggagaattcatgtctgcctggggcccttccgaacctgtgccaactaagggcccccactgtaagcccccgcacccccaccccctgcccagagcaacagcctaaaggcctgccctgatgctctcctcctaccagagtgaagcccacagagtccctccacctccacaccaggccctctctccagttttatcccctgcctaatgctgcgagaagcacagaataaactttttgtcactc

SEQ ID NO: 503728 - DNA, 1160 bp, Homo sapiens
  misc_feature (856)..(856): n is a, c, g, or t
  misc_feature (858)..(859): n is a, c, g, or t
tcgaaccacgcgtccggttccggtgagtccgtgggtggggtccccacctggttggaaggctgtgggtccgggaacccgagcccaaggagtgggggcggccccggagcgaggctcacactccctgccctgcagatgactgtccacaacctgtacctgtttgaccggaatggagtgtgtctgcactacagcgaatggcaccgcaagaagcaagcagggattcccaaggaggaggagtataagctgatgtacgggatgctcttctctatccgctcgtttgtcagcaagatgtccccgctagacatgaaggatggcttcctggccttccaaactagccgttacaaactccattactacgagacgcccactgggatcaaagttgtcatgaatactgacttgggcgtgggacccatccgagatgtgctgcaccacatctacagtgcgctgtatgtggagctggtggtgaagaatcccctgtgcccgctgggccaaactgtgcaaagtgagctctttcgctcccgactggactcctatgttcgctctctgcccttcttctccgcccgggctggctgaagcaacctacctcaagtctcaggagaattcatgtctgcctggggcccttccgaacctgtgccaactaagggcccccactgtaagcccccgcacccccaccccctgcccagagcaacagcctaaaggcctgccctgatgctctcctcctaccagagtgaagcccacagagtccctccacctccacaccaggccctctctccagttttatcccctgcctaatgctgcgagaagcacagaataaactttttgtcactctcaaaaaaaaagaaagacacaaacacgaaanannaaacacaacactgtgtgtggcgcgcgcgcgcctgtggcgcccccttggagagaagcgcctttcatgagaccaccttcgagttgtgggcggcgcgggggccccaggtagggggaaaagagtgagaaaaatgagtggatcaacaaatgcggtgtttcccacatgagagagacacaccgcggggcaccagagagaacaaaaggtgccgtgcgagaaattcttctccacaccatttaaaaataaagagcgcgccgcgagggaaaaaacagagaagcggtcttctacgggaaaacaaactctccag

SEQ ID NO: 503729 - DNA, 184 bp, Homo sapiens
ggataagcagacactccatagtgaacagcctttacaggttgccaggtggacacagataatcactgctgattcggaggacccaaaatacattatcaccgtaaagcagtttgccaagtttgtggtggacctcagtgatcaggtggcactactgacattgaagaggtatgagagtgggcgtggatag

SEQ ID NO: 503730 - DNA, 158 bp, Homo sapiens
acaggatctcaccatgttgtccaggctagtcacgaactcctgggctcaagcagtcctccagcctcagcctcccaaggtgctaggattaggcatagagccaccatgcccagctggattctaacagttctgttacaagttagtatatacatgtatcatca

SEQ ID NO: 503731 - DNA, 803 bp, Homo sapiens
aaacttacggctaggtacgaggcgggtgtcgcgtgggtggggtccccacctggttggaaggctgtgggtccgggaacccgagcccaaggagtgggggcggccccggagcgaggctcacactccctgccctgcagatgactgtccacaacctgtacctgtttgaccggaatggagtgtgtctgcactacagcgaatggcaccgcaagaaggagtataagctgatgtacgggatgctcttctctatccgctcgtttgtcagcaagatgtccccgctagacatgaaggatggcttcctggccttccaaactagccgttacaaactccattactacgagacgcccactgggatcaaagttgtcatgaatactgacttgggcgtgggacccatccgagatgtgctgcaccacatctacagtgcgctgtatgtggagctggtggtgaagaatcccctgtgcccgctgggccaaactgtgcaaagtgagctctttcgctcccgactggactcctatgttcgctctctgcccttcttctccgcccgggctggctgaagcaacctacctcaagtctcaggagaattcatgtctgcctggggcccttccgaacctgtgccaactaagggcccccactgtaagcccccgcacccccaccccctgcccagagcaacagcctaaaggcctgccctgatgctctcctcctaccagagtgaagcccacagagtccctccacctccacaccaggccctctctccagttttatcccctgcctaatgctgcgagaagcacagaataaactttttgtcactc

SEQ ID NO: 503732 - DNA, 985 bp, Homo sapiens
aaacttacggctaggtacgaggcgggtgtcgcgtgggtggggtccccacctggttggaaggctgtgggtccgggaacccgagcccaaggagtgggggcggccccggagcgaggctcacactccctgccctgcagatgactgtccacaacctgtacctgtttgaccggaatggagtgtgtctgcactacagcgaatggcaccgcaagaagcaagcagggattcccaaggaggagggtgacgagagggccccggtgcagcccgggcgacctctcatctccaaacacctatagtcccaacccagcccctcctctccaaagcccagctcgttcccgagcccccagcccatctcccggatcaagccgagagctaactctggaccctctccctccaggagtataagctgatgtacgggatgctcttctctatccgctcgtttgtcagcaagatgtccccgctagacatgaaggatggcttcctggccttccaaactagccgttacaaactccattactacgagacgcccactgggatcaaagttgtcatgaatactgacttgggcgtgggacccatccgagatgtgctgcaccacatctacagtgcgctgtatgtggagctggtggtgaagaatcccctgtgcccgctgggccaaactgtgcaaagtgagctctttcgctcccgactggactcctatgttcgctctctgcccttcttctccgcccgggctggctgaagcaacctacctcaagtctcaggagaattcatgtctgcctggggcccttccgaacctgtgccaactaagggcccccactgtaagcccccgcacccccaccccctgcccagagcaacagcctaaaggcctgccctgatgctctcctcctaccagagtgaagcccacagagtccctccacctccacaccaggccctctctccagttttatcccctgcctaatgctgcgagaagcacagaataaactttttgtcactc

SEQ ID NO: 503733 - DNA, 123 bp, Homo sapiens
gagcagatcgccctcaagggcgccaagaagcagcttcagaagcttgaagcgcgggttcggactgaagaaggagcaggacaccagcgcccacctggagcgcattaagaagaacatgacagactg

SEQ ID NO: 503734 - DNA, 756 bp, Homo sapiens
aaacttacggctaggtacgaggcgggtgtcgcgtgggtggggtccccacctggttggaaggctgtgggtccgggaacccgagcccaaggagtgggggcggccccggagcgaggctcacactccctgccctgcagatgactgtccacaacctgtacctgtttgaccggaatggagtgtgtctgcactacagcgaatggcaccgcaagaagcaagcagggattcccaaggaggaggaaggatggcttcctggccttccaaactagccgttacaaactccattactacgagacgcccactgggatcaaagttgtcatgaatactgacttgggcgtgggacccatccgagatgtgctgcaccacatctacagtgcgctgtatgtggagctggtggtgaagaatcccctgtgcccgctgggccaaactgtgcaaagtgagctctttcgctcccgactggactcctatgttcgctctctgcccttcttctccgcccgggctggctgaagcaacctacctcaagtctcaggagaattcatgtctgcctggggcccttccgaacctgtgccaactaagggcccccactgtaagcccccgcacccccaccccctgcccagagcaacagcctaaaggcctgccctgatgctctcctcctaccagagtgaagcccacagagtccctccacctccacaccaggccctctctccagttttatcccctgcctaatgctgcgagaagcacagaataaactttttgtcactc

SEQ ID NO: 503735 - DNA, 144 bp, Homo sapiens
cttcaccttagaagtagattttatatttaactagtcacattttattaagtctacacagaagtacatgaaaatactgtatccatttgggtatagcacatggggcttgtatattaaaaaaacatttatctcctttcctccaatacc

SEQ ID NO: 503736 - DNA, 1091 bp, Homo sapiens
  misc_feature (787)..(787): n is a, c, g, or t
  misc_feature (789)..(790): n is a, c, g, or t
aaacttacggctaggtacgaggcgggtgtcgcgtgggtggggtccccacctggttggaaggctgtgggtccgggaacccgagcccaaggagtgggggcggccccggagcgaggctcacactccctgccctgcagatgactgtccacaacctgtacctgtttgaccggaatggagtgtgtctgcactacagcgaatggcaccgcaagaagcaagcagggattcccaaggaggaggaaggatggcttcctggccttccaaactagccgttacaaactccattactacgagacgcccactgggatcaaagttgtcatgaatactgacttgggcgtgggacccatccgagatgtgctgcaccacatctacagtgcgctgtatgtggagctggtggtgaagaatcccctgtgcccgctgggccaaactgtgcaaagtgagctctttcgctcccgactggactcctatgttcgctctctgcccttcttctccgcccgggctggctgaagcaacctacctcaagtctcaggagaattcatgtctgcctggggcccttccgaacctgtgccaactaagggcccccactgtaagcccccgcacccccaccccctgcccagagcaacagcctaaaggcctgccctgatgctctcctcctaccagagtgaagcccacagagtccctccacctccacaccaggccctctctccagttttatcccctgcctaatgctgcgagaagcacagaataaactttttgtcactctcaaaaaaaaagaaagacacaaacacgaaanannaaacacaacactgtgtgtggcgcgcgcgcgcctgtggcgcccccttggagagaagcgcctttcatgagaccaccttcgagttgtgggcggcgcgggggccccaggtagggggaaaagagtgagaaaaatgagtggatcaacaaatgcggtgtttcccacatgagagagacacaccgcggggcaccagagagaacaaaaggtgccgtgcgagaaattcttctccacaccatttaaaaataaagagcgcgccgcgagggaaaaaacagagaagcggtcttctacgggaaaacaaactctccag

SEQ ID NO: 503737 - DNA, 421 bp, Homo sapiens
gttggaggccatgattacggaatactgtttattgaagatgaccacgcgggcggagaacatctggttttcggtagagcatccgtcgacttcgctggccagctagagcaacgccggcagctcacagatgaagcgatccatcaagcggtgcgcgctcaagagtcgatcagcctggagcgctgtttgcgcaaccgagctggtgaggccgcttatccaggacgagctattctgcgtgcgacataggcgctgagtgacgagacccgcatagcgcaacgcgcaacacactgcattcgtgcggtccagagccatatgcgcctggatgacgcattcaggctaacccatatccagcgatgcgcacacctgtgccgtgcaatggctgcaatgccataacgctgcttcctacaagtcggccagcactgtgccc

SEQ ID NO: 503738 - DNA, 1048 bp, Homo sapiens
tttaaacaccgttgtcttggttttcagttgctcgcgttttgcccaaatgttgtggttttcgacatactttcgattgtgttctcccagctgttactatccaagaccgggttttgttaggtagcatacctctatgctttcactttgggtgcacttggtgccccataatctggtatttctcctgttactcctacaggggtggatatagtacatcctcaattgttggttggtaccaccgttgtcgggtttatcgcacctatatgataatgtgggtcatgctcattaatatctcgttggaactcaacggttggactcgctgacttaacgtcgctctaacttgttgccactaaactgatgctcttgtgtactctcttgtagtgggatatatcgcttccaaccagtacggctttttcgttcagtacccactatggtagcctcttgttgcgatgagtccacgttcactgctctctcttcttgtcaacactgtcctcgagtcagcctacgacacaactacagccttgcttcaatgtattcagttcgctacttacaaagatctctgcaatggatgctacttctgtactacaccacggttctgtcttcttgatactcttgtggaagctgttccagatcaactcgaatttcgccagtctagtgatgagtattctagcattaatgcatgtatgaacccagacatgatttgtaaagcgcgacagtatgtttctatgacactacactttttgatacagcgtctcttgtcttcactgtatacctggagtctccgttgtctgcttggctcccttcgagtttctagttacagacacagatctatagctgtgatatttagtttcttaatatggatatagctatcaagactgtgatacacttataattcactggtcctgcatcaggagatggagtggggaaaacatgtatgttaatacagtcttgtatctgaataatcctgtatgctttatacagtttgtcgttgttcagagaggctataaagtttgatctttgtttttctaaagattaccgccacggccccacttcg

SEQ ID NO: 503739 - DNA, 104 bp, Homo sapiens
gtgattctcaatgctgagctgacatgattgagcctgggcagagcttttgaaaaaatttggatgacccggggtcccgatgcccatgaaccaactgaaatgcaaaa

SEQ ID NO: 503740 - DNA, 287 bp, Homo sapiens
tgtgaagagagaatttcagttggggaatgatcttctgacattagtaaatggctactaatctcagtttgcagctttgtgcttttaagaggatgttaaagacagtcagaaacctccatctttagcctgtctgcaataattggactgtgacttggacctagatcctagggagaacatctggactccagtttcctatttccaaccctgactcggagttagaggctaaatgggtttgagacccaatcagcttaaaaaaggcaattcgaatatagataaatagcaacttatgc

SEQ ID NO: 503741 - DNA, 194 bp, Homo sapiens
  misc_feature (155)..(155): n is a, c, g, or t
tttcggggcagttgaacacggtggtgtgtaggtgctcggcgagcacagccatggggctccatgctctgcgaacagtgcggagccgcacctggactcaaactgcagcagttggcgcatgaagctgaagttgggagagatgatgcttcgccttctgnttcacaaactcaaagaccctcatcggtttatccaagtgg

SEQ ID NO: 503742 - DNA, 293 bp, Homo sapiens
cccccacttcacctccaggtcccagcactcagcagggcagggtctcagtgcggaaattaattggagtgaatgggcttctcaagttttaatactaggaaattcttgctgaatgcaaacactctggagccaacctacctgagtctcatcccagtgcagctgcgcgactataggcaagtcactcgaccctatgtgtgccaattaattcatctgtaaaaatggggggaagaccacctacctaatgcacatgttatgaagatgaaatgagtgaataacatgtaagtacttattggtga

SEQ ID NO: 503743 - DNA, 935 bp, Homo sapiens
gaatcctctcacgttggggtgtgtggcgtgtatgctgtgacagggtttttgttccggttctcgtgagttgcttgtgcccctttttcacggctagcgtgtgcccagttctggtggcccctttacctgtgctcggcaacacctgttgtggcccccccatgtgcatgccggtccagtttggtaaccccgcccttgccccttacgggcctttcaccctctttgccttcggcctagccattggtttcacttccagtccatacgctccgtcatactagggctacttaccatcccccgtgtccctatgcccatgatggcgccatgttacccgtgatccacattccaaggccacccacacaccacctgtcccaaaaggccttcgatacgggataatcctatttattacctcagaagtttttttcttccccggatttttctgagccttttacccctccagccttgcccctacccccccatttggagggccctggccccccacaggcatcaccccgctaatcccctagaagtcccactccttaacacatccgtattactcgcatcaggagtatccatcacctgagctccccatagtttaataggaaaccaccgaaacccaataattcaagccctgcttattaccattttactgggtcctctattttaccctcctacaagcctcagagtacttcgagtctcccttcaccatttccgacggcatttacggctcaacacttttttgtagccaccacggcttccccggacttcaccgtcacttattggctcaactttcctcacctatctgcttcatcccccacactaatattttcacctttaacactcccaacatcacctttggcttcgaagcccccgccctgatactggcattttgtagatgtggtttgactatttctgtatgtccccatctattgatgagggtctta

SEQ ID NO: 503744 - DNA, 249 bp, Homo sapiens
  misc_feature (128)..(128): n is a, c, g, or t
  misc_feature (134)..(135): n is a, c, g, or t
  misc_feature (190)..(190): n is a, c, g, or t
  misc_feature (217)..(217): n is a, c, g, or t
  misc_feature (219)..(219): n is a, c, g, or t
  misc_feature (242)..(242): n is a, c, g, or t
cccctctcctgctgcaaaatgagcagacgcttctagctttttcgtcttcttctgcggcctcccttcaagcaggcgcagcaggcttctctgggatctcatcttcagggaaaatgcctcctgccaggtcnctgcanngcttccggatcactttgtagagacgctttctgttctgagaaggggtgctctggcnggctggccatttcaaacagccctgttnancaaactgctcgtatcaactgganaacgtgg

SEQ ID NO: 503745 - DNA, 413 bp, Homo sapiens
ttcttttttttttttcaaagtctcgctcctgtcgcccaggctggattccgggtacaagcgattctcctgcctcagcctccaagtaactgggattacaggtgtccaccaccacgccggccaatttttgtatttttagtagagatggggttttgccatgctggccaggctggtcttgagctcctgacctcaggtgatccgctggccttggcctcccaaagtgctgtgattacgggcgtgagccaccgcgcctgcctagactccccatttctaagtgtacagttaattcactagtgttaagtacatttacattattgtgcaaccaatctccgtaacttttttcatcttgcaaaactgaaactctgtatccattaaataagaacttcatattcccctgtcccttctgtcgtcttctc

SEQ ID NO: 503746 - DNA, 1763 bp, Homo sapiens
  misc_feature (1)..(1): n is a, c, g, or t
  misc_feature (560)..(560): n is a, c, g, or t
  misc_feature (1430)..(1430): n is a, c, g, or t
ngccatcgtgcgggtgctggttcgtgagtgtcttgtgtgggggagtgcgtggctgctggttttgctgcctcgcgttctcggctcctgggctgggtttgagtgcggtccgacccacgcgaggtgttgcttctgggtcgctatgcctgtttgtgccgcccctcttgttgcgtccccctggaatggaccgcccgtgcttgctcgatgagcgcccgatgcgttttgtttggtgctctgtgctcggtctcgtcgatcatgtcgtgctcccgcccgctgttgtgttgttgatgtgcccgccgacggggtgtgttgttccgggagtgtgtagtgttgcccctttgatggaggtggggcgagggggatgtgtgtgtgttggttggttgtaataattagttgtgtttgtcttctcgcccccccctcgcgggatgtctgcgtttgtgtgccgccgttgccccccacgaggttggtgggacaagctttcttttttttcgcaggaagccccagggggggccctctgttggggtgtcgccaccacagcgtgattgtttgtttgtgccccgccnccgcagtggtgcgaagagagagaccacttctggtgttgcttgcccgcctccgaccgtttgggtagaattccatcgagagaccccccccaccccgcggctgtgtgttgaggcgccacagggttctcccccccgcaaggtgggagagattttcctttgcgaaggccccacagctgtgggggggtttttattctctgggggagaacttgaggacacacgcgcttctcgtgtgttgaggggaatcagccccgtttttgtggggtttgtagaagcacccctcgtagagtgaatatgatttcttccctcgtgtggccgcagcgattcacacggcgtattttctcgtgagaggttgttgggacctttattggaggtggtccaccgcgccgtctggtgtttcccccgggtagcccccccacacgccttgtgggagtgtagacacactggagacacaccgtcgggggtggtgttataaagagtgatgagggggcgcgcgtgtagtccgccctctgcccgcctcgcccccactctttggagggccccccctctggggagatgtctccctctgctctctgtttatggagacccactccgctatggggaccacactcccacctctgtgtatatttggggggatgatccccctctaggggtggtatatatttttgggggccgctcgcgagagttataaaatgattctcccaccgcggtgccccccccccagggagagagtgtttccccccctctgtatgtgtcccccgcgtgtagccccctcgcgtgtgtttccgctctctgtggttttcttgtgtgtgtgacacacctaacacgcggcgcgttttatatatataaaagaaatatagatgggcgtgttatatnttggtgtgtgtgtgttaatattgtgttgcgcgtgttttgatatacacacatataaacgtgcgccactgtgtgcccatatgtggggggagacattgcgtccaccccatatattgcgccccacctctgtccttgaatataggtgtttataacctagggagcgccattccagtgaatatattaattcaccttcttttagcacccctgtgtttacgcccatacaccacacacactctgcttagaaatattttaagacattataataaataccacatccctttgtgatgttccgtttatccctcccccaccccagattataagggttttaaaatttta

SEQ ID NO: 503747 - DNA, 171 bp, Homo sapiens
  misc_feature (53)..(53): n is a, c, g, or t
  misc_feature (89)..(89): n is a, c, g, or t
  misc_feature (122)..(122): n is a, c, g, or t
  misc_feature (140)..(140): n is a, c, g, or t
caacattttcggctgcattttttcacgcacctcggttcctcttcctaaagttnttgtgccctgctcttaagcaccatgggccttctaanacggaaggctctggaatctcccccttgtggggnaggctcttggggccagcntaaaatcatggtttagggtgatcagtgctgg

SEQ ID NO: 503748 - DNA, 270 bp, Homo sapiens
gatgagctcggtaccgtcagttgctgaactatgtgggccctgtttccccctttagtgtccacaggcgccttccatccagcctcgtactgtgctggtggtcaagttgcttgaccatttggggtctcagttgtctcatctcggacgtgggaagataagcctcccttctgtgccttgtaggaaggttacgaagctagtctccttgacccccaggggggtctgagctgctcttcgtctgtttggccatttggatgcacatagttcagcgtctga

SEQ ID NO: 503749 - DNA, 353 bp, Homo sapiens
tggttcacgcgtagagtcagactctgtcttcgtgtgttaatgattcactgtaaccttagctgcagagtgtgcttactcaagagcatctcatactaaagactttaaatgtcattacaatctctttattcctttccctcatagatcaaacttatccagagcaacaattatttccttctgggtgctaattttttcctcccatttcatggcactttcaaccaaagctagcaggcacactgcaatccttcattaactgaaaacatgcaaagtgcacaagcccttccaatggacagtgccaatgcaaaagccaaataaggtacatggcattacttgaccggacctgggacagttgggtc

SEQ ID NO: 503750 - DNA, 565 bp, Homo sapiens
agcggagcgcaggagcccggagagaagggctggaaggaggggactggacgtgcggagaattcccccctaaaaggcagaagcccccgccccacctcgagctccgctcgggcaagcgcctgactgcatgcgctgctgcgggcgcccacctcgcccagcatgccaggcccggcaccgacgcggggaagatccctttctgcgacgccaaggaagaaatccgtgccgggctcgaaagctctgagggcggcaggcggcccggcagaggccaggtcgcgctgcggcgcagccggacaagaacatcgcctggaggactgtcgtcctgatgagctcgctccacttgtggggcctgtttactccctggtgctcactccccacaagccaagaccaatcactctgactctgggcctacttctgcattcctcctggcacgctctgggtgtgacagtggtgcccatcgattgtggagccacaaggtcctaccgggccacggctgactctgaggatattcctggctgtcagacaactccatggattaccagaatgagcatccttcgagtggtccaggacc

SEQ ID NO: 503751 - DNA, 127 bp, Homo sapiens
taaggatccattagaccaggctgatgcgggaggccaggctctctgcgggagcagcgggcagctcacgagggaggacttacagcgactcccagcgtgaaaaggtttaggcagctacgggcagggtggg

SEQ ID NO: 503752 - DNA, 211 bp, Homo sapiens
  misc_feature (48)..(48): n is a, c, g, or t
  misc_feature (120)..(120): n is a, c, g, or t
  misc_feature (123)..(123): n is a, c, g, or t
  misc_feature (139)..(139): n is a, c, g, or t
aggggacaggcactcaggagggcccagtaaaggtttaaataaagtggnttgagtaaaactggaggccaaaagtcgacgtgagttcctgggagtctccaaaaatggggcctggaggcctgnagnaaggggccaggcctcncatttgtggggctccctgaatggcagcctgagcacagggtaggcccttaataaacccctgttggataagcca

SEQ ID NO: 503753 - DNA, 112 bp, Homo sapiens
  misc_feature (53)..(53): n is a, c, g, or t
  misc_feature (75)..(75): n is a, c, g, or t
  misc_feature (87)..(87): n is a, c, g, or t
ataactttgtgatcctccacgccagggcagacgaacacatcgccctgcggttncgggagaagctggaggccttgngtgcccgacggncaccttctgcgaggatttccaggtg

SEQ ID NO: 503754 - DNA, 267 bp, Homo sapiens
acgctggcccccctatggccctgaaaggggcatgctcggcttgtttcatgggctgagtggttcagtgacttgctcgggatcccaacccccgcccaggagccccccacatggcctgggctggttttcttccaactctaaaaacagccctcatttggttaacagtctttttcattttcaacccttctttcttttgaaggggggagcaaagggggatcgggtgccttttataattctcgttttcaatttccatctcttttaaaatgttga

SEQ ID NO: 503755 - DNA, 108 bp, Homo sapiens
gttgggagcatgatttcctaagaatcagggcatgggagtacaatccaagttctcgcttcctcctttgggcatctcttctgcctcccaatcaaggaagctccatgctca

SEQ ID NO: 503756 - DNA, 314 bp, Homo sapiens
ctagcagttccagcctggtgcagagtgagacttgcgttaaaaaaaaaaaggaaaaggaaaaaaaagttctactgtgggtaaaatgctatcatgctatcaaacagcatcacatgctacagagaagtcttgtgaaaggatgtcagtgtggcaaacttcattgtcttttaagaaattgccacagctatcggtaatcttcaaccaccaccaccctgatgagtcagtagccatcgtaaacgtgggcgtaagaccctccaccagcaaaaagatcgttagcattttttaagcagtgatgtatttatcaattatacataatg

SEQ ID NO: 503757 - DNA, 100 bp, Homo sapiens
agatggcggaggtgcaggtcctggtgcttgatggtcgaggccattttcctgggccgcctggcaattcgttggctaaaacaggtactgtcggccggaaggt

SEQ ID NO: 503758 - DNA, 302 bp, Homo sapiens
tatctgactcctcgcggaacacagcactctgggcgtctgctgcatggaaacaggctctgacagtgcttatccccaaccagctttcatcctgaacccttaacatttaccttctacgggaagtctgcctgtagtggactgaagagtggtccccaaaagatatgtccaagtcccaaccccaggtatctgaaagtgtacctttatttagaaatatgagatcaccctgaattagagtgggccctaaatccaatggtgtgtcctcataagagacagaaaagaagatgacatacagagtagaggtgaca

SEQ ID NO: 503759 - DNA, 578 bp, Homo sapiens
  misc_feature (578)..(578): n is a, c, g, or t
aaaaaaccggggggttgtcctttttccccccgtttttgggggccaggaacccaaaagcggttgaaaggggttttttaggaccagggcctttcccagggttttggtccaggggcgggttgaacccccccaaagggggaacgggggcggggggtttttttccaaacgggcccccccatgggtggggggggggggcctaagttccctgccccagggcccccctaaaagggccctggggggcccccggggaaaaaaaggtggttttccccagggggcccccggggggaaaaaacaaggcaggggggcccgggtttttttaaacccacccttggagggggccaaacatttttttgcctttttccctggggccccccccaccccgttgggggggggccctcccggggccggtttctcgggaagccgtttttgggtgggttttcccccgcccatgggcccaattccgggccccaccacagggccgcttctcgggaaaaaaaaaaagcctccccaaactcggcgcgggggaaaaagggcaaaaaggttcccggggaaaatggcgcccccccactggagggggcccn

SEQ ID NO: 503760 - DNA, 150 bp, Homo sapiens
  misc_feature (99)..(99): n is a, c, g, or t
cttgtccttggaaggaaataccatgctaagtaactacaagtaaagatggttataaaaacaaggtattcctgtagacgattgaaaccacactagagaganatactcgacatatgcaaatcatttggaaatgcacttaatgatgttgaggaa

SEQ ID NO: 503761 - DNA, 310 bp, Homo sapiens
ctaagaatattcaagacctcatggatcatgaagctgtccacgagggcttggatcttcacttgcggctactctaccgattgatggatatgagtccagatgccagccttattctacaattccagaatgaactagatggcattatccaagatggtgtgcacaatatcactaaattgattaaaatgtctgagacgcataagctgttgaatttggagggctttctatcagggagccagtcacgattgtcaggaaccttaaagagccaagctagaaggacacgcggcaccaaaagtttagggagtaaagctactga

SEQ ID NO: 503762 - DNA, 510 bp, Homo sapiens
gtccaagatacagactttgtgataaggctgaagttggggcatcgtcctagaaacggtggcacacggcgggttgtgacgtcggtggccttcatgctcactctcccgatcctcgtctgcaaggtgagggactccaacaggcgaaaaatgctgcctactcagtttctcttcctcctgtgtgtgttgggcatctttggactcaccttcgccttcatcatcggactggacgggagcacagggcccacacgcttcttcctctttgggatcctcttttccatctgcttctcctgcctgctggttcatgctgtcagtctgaccaagctcgtccggggaaggaagcccttttccccgttgatgattctgggtctggccgtgggctccgcctagtcccaggatgttatcgctattgaatatattgtcctgaccatgaataggaccaacgtcaatgtcttttctgagcttccggtcctcgtcgcaatgaagactttgtctcctgctcactaagtcctcttc

SEQ ID NO: 503763 - DNA, 782 bp, Homo sapiens
tcgagccacgcgtcggcatttaccatctcacttctaggaatactagtatatcgctcacacctcatatcctccctactatgcctagaaggaataatactatcgctgttcattatagactactctcataagccctcaacacccatctccctcttagccaatattgtgcctattgccagtactagtctttgccgcctgcggaatgctccggtgggcctagccctactagtctcaatctccaacacatattggcctagactacgtacataacctaaacctactccaatgctaaaactaatctgtcccaacaattatattacctaccactgacatgactttgccagtaaaacacataatttgaatcaatccatcaaccacccacagcctaacttattagacatcatccctctatctatattatttgaaagccgatgaatcaaacaacaacctatttagctgttccccagagcttttcctgccgaccccctaaaaacccacctacatattactaactagcctgactcctacccctcacaattcatggacaagcccgaactccaacttactccagtgaaaccactatcaccgaaaaaaatctctacctctctatactaatctccctacaaatctccttaccttatcatcattcacagccactaggaactactccctattataatatcttcttcgaaaccacacttatccccacccttgtctatcatcgccccgatgaggcacccagcaaaactgcctgaacgcaggacatacttcctattctagcacct

SEQ ID NO: 503764 - DNA, 838 bp, Homo sapiens
ctacgagtattttttttattttttaaggttggaggggggaatgctggagatggtaaggggtatggagacatgtcatataagtaaggctagggtgagtggtaggaagtttaatcataggaggtgtatgagtgggtcgtagcggaatcgggggtatgctgttcgaattcataagaaccagggaggtaaaaagtagggtctgggtgacaaacatatgtggtgtagagttcaggggagagtgcggtcatatgtggttcctaggaagatagtatgggagagggtgttatgataataaggtaggggtatcggatatgaagaatagggcgaaggggcctggcggcgtaatacgatggtatgaagcctagagactagtgcggactacccctaacggcaaggtcgaagggggtacggtagggactacggctaaggggggagataaatcatattatgggccaagggtcatagataggcaggagtaatcagaggggtactaggggtcgggagacaaggggtgggcaaggttacaaggagccactatatacggagaggtgagaaaagtacaaatagatcggctcagggggacctcccaaatgaagatgtgtaggggctacatgcatcgacagggcgcccgaaaacagggcgataagatgaagataagaagcacaccctgaatcgaggatggaagtaaaacggtaagaaacacggggcaaaaaaaaaagcggggccagggtagggagaccagaggacggaaggggagaggggtcacaaagaagaacagtaggaaaaacagaccgagcggacataagagacgtaaggagcaacgacgacgcgaaacacacag

SEQ ID NO: 503765 - DNA, 183 bp, Homo sapiens
aacacattaacatttagttacactggcattactcttcaaggctgacctcctgtctaatgttcagtaggtagctgcaatccgtcacagaaataatctcactgcagaaagaatgtgcactcttaaaatgaaccaggacctccctgtgattggccttgcgttgcgatttaccagttgactcttgtg

SEQ ID NO: 503766 - DNA, 364 bp, Homo sapiens
acgtgttacgaggggaaaatgcctaaagagaagagactggtgcgagaaaacaaggctgagaactgccgagaacgtgaaaagacaactaagagcatctggaagcactatagatttagcttaacatccagtgtaatgcctcaatggaatgtgacgtggtgtcagatgcggcagaagaataaagcattttgctaattttgtaattctgtacagaagttaccaatttgtgcacagtgtgggaaaacaaagtgcatgatgaagtcttcagactgtgtcataaagcatgctggtgtatacagtactgggcttgcaatggtggcttgtttctgtgatgatcatacaaggagcaaagtgtttaagcgagaaa

SEQ ID NO: 503767 - DNA, 129 bp, Homo sapiens
  misc_feature (106)..(106): n is a, c, g, or t
ggtagtgagtctcgggtggtctgaggtgtgggggcagcatgcaggcaggatgccgggcgtggaatgctgagttgccgtagtgggccacgtgttgtgcgagtcaagncagaactgtcgggctagtcgggg

SEQ ID NO: 503768 - DNA, 938 bp, Homo sapiens
  misc_feature (77)..(78): n is a, c, g, or t
  misc_feature (129)..(129): n is a, c, g, or t
  misc_feature (195)..(195): n is a, c, g, or t
  misc_feature (225)..(225): n is a, c, g, or t
  misc_feature (232)..(232): n is a, c, g, or t
  misc_feature (242)..(242): n is a, c, g, or t
  misc_feature (261)..(261): n is a, c, g, or t
  misc_feature (265)..(265): n is a, c, g, or t
  misc_feature (267)..(267): n is a, c, g, or t
  misc_feature (272)..(272): n is a, c, g, or t
  misc_feature (286)..(286): n is a, c, g, or t
  misc_feature (288)..(288): n is a, c, g, or t
  misc_feature (296)..(296): n is a, c, g, or t
  misc_feature (319)..(320): n is a, c, g, or t
  misc_feature (323)..(323): n is a, c, g, or t
  misc_feature (327)..(328): n is a, c, g, or t
  misc_feature (339)..(340): n is a, c, g, or t
  misc_feature (342)..(343): n is a, c, g, or t
  misc_feature (349)..(349): n is a, c, g, or t
  misc_feature (360)..(360): n is a, c, g, or t
  misc_feature (363)..(365): n is a, c, g, or t
  misc_feature (372)..(374): n is a, c, g, or t
  misc_feature (382)..(382): n is a, c, g, or t
  misc_feature (385)..(385): n is a, c, g, or t
  misc_feature (391)..(391): n is a, c, g, or t
  misc_feature (394)..(394): n is a, c, g, or t
  misc_feature (399)..(399): n is a, c, g, or t
  misc_feature (409)..(409): n is a, c, g, or t
  misc_feature (425)..(425): n is a, c, g, or t
  misc_feature (431)..(431): n is a, c, g, or t
  misc_feature (447)..(447): n is a, c, g, or t
  misc_feature (452)..(452): n is a, c, g, or t
  misc_feature (500)..(501): n is a, c, g, or t
  misc_feature (511)..(511): n is a, c, g, or t
  misc_feature (573)..(573): n is a, c, g, or t
  misc_feature (591)..(591): n is a, c, g, or t
  misc_feature (920)..(920): n is a, c, g, or t
gccttattgcaaatacaggtaaatgacagttttgtgtatatatatatttgtgtatatatagttgtatatatgtatanngcagtagacacaaagggagagcaatcacagatcagtggttttgtgtttgtnttgttgtgtgtgtgtcattgttatttaactcctgtaccagaccattttactgattatttcaaagangtaaatattatcaatacattttacagagcngtctgancttttatgcngaaacaagaccgggatggnaaangngaaantccatttataaatntngggcattngcctaatccaagagtatattaannggnaggnnatactactagnntnngggcgnggggggcgggnggnnngggggcnnnccacacangcnctaccnggnttcgnattgggggcnccaaggcctatgtggncaaggngtcggtgacttaggcnactcngcgggggggagacatattccctaggcttcacgggggggcggggggaanncatgatagtngcctcagatttggctctggcctcctcatcttccacagcctccctatattgttctggccagtnctgtggtcgctttctgtngagcctggccatgtactccaagactttcattttgatggtttcatggtgggctcgagggccccatagaagctcatattcaactggattagagtaggacagtggcctgcattccagatagcgctgtctcataagcttacgggtgatggaatgctttctccctacatccacactaaatcttcgaagcaagttccagacattggcctctttgacacggttgcccatcaggaagatcaaacctaggattggcattacatattcttgagtgggtctccccaggctctctagcatcacttgctcttcctctgattctggttgctggacaaggaggnagatgtgctcactggtat

SEQ ID NO: 503769 - DNA, 288 bp, Homo sapiens
caggcagtcagatgctcacatgggggtgtgggtgctgttccaggccgtccgatgctcgcctgggggtgtgggtgctgatccaagctgtcacgtgcacacctgggggtgcaggctgctgttccaggctgtcagatgctcacctgtgggtgtgggtgctgttacatgctgtcagatgctcgccatgtggtgcgggtgctgctctaggctgtcagatgctcgtctgggggtgtgggtggtgctccaggctgtcggatgctcacctgcgtgtgcagtgttatgggctcccgt

SEQ ID NO: 503770 - DNA, 1314 bp, Homo sapiens
  misc_feature (594)..(594): n is a, c, g, or t
agcggggggggagaaaacaaagcccccatgctgtcagcaaaaggaaggaggcgacgagcagccaggagacagtgtccgtgtttgcccgagaggaacagttcatttctgagcagccagggagaaagcctgagtatagcgtccaggtagtgggacatggcggtcaaattgtgtcaattaacttaccatcgatgaaccctacagaagactatgcagctagaactatgtactatccatggacatgggatttaatgaccatcatggtgatcttatgaatactacacgaaactgtggtaaacagtgtctgggtcccaggcaggcggcccgtatttgcccatcttgccaagtggcagcaatgtcctccttttcacacttgggacatggcagttgaaggtgttagcataggaagacgtgatacaaatgtcttccacctgccaaagacgacttggggaacgatagaagagttgagtccccatcacagtttctttacataccattgcctggcacgagggcaactcagtattctacatgcagagaattgcaaagcgtttcgaataaagcggaacatttcccagcttggaatggaatggcataggnttgaaaagggggacggtgtctcacggtgggacggaaccggtggaacttggtaaatcctgaaatgcgattctcaaggaacatgttctatctgactggcctaaagcttaccgcactgggggaaagggaagctttgtgaggtccctgttccggaaggtgtcacctggaccaatagggggccaaagaattgccaacaatgtacccgttcttcttccctgcaacccctgtggggggaaagcaagtgattcgtgttcaaaaagcatgattccgaaaagaaaagagtctccaaccgagtgtcggggatcttcgcgcccaaacagattgaagttgatgaggcgttaaatcacgaagtttcgcgagaaaggagcttaaaacccagggcattctcagggagcctttgttcggaagcactccattggaggcccatggaccaggggggtttgccattccaaggtgggacttccagctattcctcaaaattccgcagtcaaaagacatttacgaaaaccgccagaggtctattacgaggcttttcacttgtaaccgcggttaacacttctacttataaacgctttgtccgccttggaaacggtcgttgtgaacatagtgcgaaccagggcggatatccgcttacttataggggacaacagctggtgaacatgcaaaatccgacacggactagtacttgacacgacaaccacaggggagcacagacataatgaa

SEQ ID NO: 503771 - DNA, 198 bp, Homo sapiens
  misc_feature (193)..(193): n is a, c, g, or t
  misc_feature (196)..(198): n is a, c, g, or t
aaggaaaaaaattttttttaattatctggacacagtagcatactcctgtagtcccagctagctactggggattggggggatggggaggtaaggtgggaggatcacttcagcctgggaggttgagactgtcatgagccatgatctggcaccactgcactccagcctgggtgacagagcaagaccttctatcagnttnnn

SEQ ID NO: 503772 - DNA, 1398 bp, Homo sapiens
  misc_feature (328)..(328): n is a, c, g, or t
  misc_feature (481)..(481): n is a, c, g, or t
  misc_feature (505)..(505): n is a, c, g, or t
  misc_feature (547)..(547): n is a, c, g, or t
  misc_feature (1096)..(1096): n is a, c, g, or t
cgacccacgcgtccggtgttggcgcatcaactgtacatcccacgtctactcgtgacggctgaggcaggaaaattgctttgaacccagtgaggcagaggtatgcagctgatgcttgagatcgtgccaagcttgcatctccaggtactggtgcgacagatgcgagactccatctcaacataaaaataaaaattttaaaaacatgtaaaagatatatctatgacgcattcggatgagctcctacaacctctgatgcgatctctagagctctacttatggagcacgggctctagcatggtcgagagacgcgaatcagcatgtgaagctccgngcaaatagagcagaaaggcgttgcaaagatagacacgctaaaggagtcggatcgtccgacgctcacaatcttccaagcccctggacgttggaactagacagtgtggagaaaccactcctgttccttcctaagaacaatacgaacacagaatanatataatttaagcgccaacacttntgcagtgaacacacatgatgcaaaagggatagagtggtccancgagaaccgagggggggaagccatgaagcgcgcgtggtctggaagtctaccgtgtaggtccccgtgaggtatcatgggaccctatgcgctgggggttgatactagcaggttggacatccccccttgattcgtgcttaccatgaatagatactcctaataacatatatttaagcccaggtgggcgccgttggagccattcgcccctcgttggtgggacccccgggggctaatttgccggagcagaggaggctggaacggggccaggggcagaacacaccttgctcgggtgagaaacccccccaggggtgaaggagtccggcgaaattgcttttgtaggacacagtggtggacgccccagaagagaatgaaggcccgcccaagctgtggccactgcattcttaggtaccccgtgagggcgcgtaagaaagtagccggaaggaatcttccccggaaaggggcgggggcgagagaccatcaccgcggaaggcggtcaagggggcacgaattcccgtagccaaaccaattcaccgtgaggcgttagaactaacngaagtttgaacaaacccccccggtgtatttctttacggattaataacattaattaacatacacagagagggcgggcggccgggcagtcccataggaagggaattcacgcctcacagaagtgctgtcgcccctatgtgtgaattgcgcgaacaccccgagttctcttttttgtacacacagtcggtggcgccatataagaagagggcgtcagataacaatcaacgcaatatgagcagggattgaggcagcgatcttacatcaaagtgtcaggcaactatgggggacaacaccgcgtgtacctc

SEQ ID NO: 503773 - DNA, 160 bp, Homo sapiens
cttacacgagggaacattatgggtctcccttgcaatagagctctgcttctctactagactggcacatgtaagacgtgtctattcacctataccaccatagattgtagaggcctgccccaagccatgtaggaactagtgagtacatatcaacctactttac

SEQ ID NO: 503774 - DNA, 231 bp, Homo sapiens
  misc_feature (45)..(45): n is a, c, g, or t
tcttcaggagggtgctgtttcatggggggcagcagcttcacagtnctgcgttgcaccagcttttgacttggagagctgtgcccaacccttgaccggcaacttacttccttaggcttgaccttgcttcaggatcaaccttcttcccttgcccttcttacttcttacttgggggcccaataatggccctttggattcgcttcacatgctaagggagccacaggtgggagccag

SEQ ID NO: 503775 - DNA, 139 bp, Homo sapiens
tttgtcctcatcgctaaacttgccttgaagtttctcatcttcaacatgcgcttacatgacgaaggcatagtactcaagagaattcttggatgacaccttgaccctccgctattaatctacagcttagcacttctcagct

SEQ ID NO: 503776 - DNA, 123 bp, Homo sapiens
aagtagatcgcgtgcgggagtgtgcgagagatgcatgctcagtcctcagaacttaaagtgtgttctcaactcacagtggtagcgtgtgctagagcatgtgatgtcttgggggtgtccttcttc

SEQ ID NO: 503777 - DNA, 358 bp, Homo sapiens
tcccagctaatttttgtatttttgatagagacaggcttccaccgtgttgaccgggctggtctcgaaactcctgaccgcaaggtgatctgcttgccttggtctcccaaaatgctgggattttacagacatgagccgctgcacctagcctcattaatgctattttaaaagtgaaaaatacagtagacaacactggcttaacacaaaatttcttagtcagtgtgagactggtcaaaaaaaatgggccatgatcagaaatgtaaactttaggttctttaagtcactgttacaagagcaactcaaatttggaatatatggaagggagattataatgcaaattaatgattattttctatcctaa

SEQ ID NO: 503778 - DNA, 403 bp, Homo sapiens
ggcacgaggagaccctacacacagattacattgactatatggatgaactctcctccttcattgtggcacagcccaacatcccatggctgtttctcacagatcccacattggccatggaagtttattgtggcccttgtagtccctaccagtttaagctggtgggctccagggcagcggccacgagccagatatgccatactgacccagtgggaccggtcgctgaaacccatgcagacacgagtggtcgtgagacttcacaagccttgcttctttctccattggctgaagctctatgcaattcctattctgataatcgctcgtgtccttgtgttgacctaatcatcattctctctaggatgtctggttactgactacccagacagaggctctgctatatatattt

SEQ ID NO: 503779 - DNA, 426 bp, Homo sapiens
ggtacccgtcctctgatccagtagggtgaaatattgccaagaataaactgtattcatcatttactgacagtgattgtttgctttagcagaataggcgagcgtggagtataaaggaagttgaaatcctgggccttatgtgtgtagactggcaatgtccatttgaagattttgcatttcctcctagtgtcagcgaaaatgtgctaaaaatttcagttaaggaacagggtctgttccacaaaaaagacagtgccaatcaaggctgtgttcgaagagtttacctgaaggacaccgccacagcagagagagcatgtaatgccattgaggatgcacagtcaacgagacagcagcaaaaattgatgaagcagtcatcagtgagacttctcagaccccaattgccatcttaatcacagacctcaggggctccaa

SEQ ID NO: 503780 - DNA, 397 bp, Homo sapiens
tatataccaacatttatgtatctctttacatagtccattacatattcacacatatgtactttttagtgcacacacaaccacagtttttaatcaatggataattacactagaagatctttccttatcaaaatatacagatttttttaaggaattaaaaaatattccattgcatggatatgccataatttattaaaccaggtcactgttaaagaatactttgtttccagagttttttccttccaaaaaacgaagaccaaagaatacaaaaacatttattttatcaaccagtatttctgattctcacaagcactgcggatttcaaagcactcacagatcttaccaacagaaatcaggtttcctacatccgcagagaagggggccatgggggcccatcttt

SEQ ID NO: 503781 - DNA, 184 bp, Homo sapiens
taggaatagcgatagctgttaatagtctcattgcaatagctatagaacactcagatggtatgcactgaggtttgcagctccattgaggctaccggcgcgattcatggcgtaccactgttgcagcacccggtcgttgccaaggttggctgtcgcgcaggctgagaggcgtagtaggttgtcccag

SEQ ID NO: 503782 - DNA, 930 bp, Homo sapiens
  misc_feature (187)..(187): n is a, c, g, or t
  misc_feature (205)..(205): n is a, c, g, or t
  misc_feature (243)..(243): n is a, c, g, or t
  misc_feature (247)..(247): n is a, c, g, or t
  misc_feature (253)..(253): n is a, c, g, or t
  misc_feature (257)..(257): n is a, c, g, or t
  misc_feature (315)..(315): n is a, c, g, or t
  misc_feature (319)..(319): n is a, c, g, or t
  misc_feature (345)..(345): n is a, c, g, or t
  misc_feature (375)..(375): n is a, c, g, or t
  misc_feature (377)..(377): n is a, c, g, or t
  misc_feature (397)..(397): n is a, c, g, or t
  misc_feature (407)..(407): n is a, c, g, or t
  misc_feature (430)..(430): n is a, c, g, or t
  misc_feature (433)..(434): n is a, c, g, or t
  misc_feature (436)..(436): n is a, c, g, or t
  misc_feature (446)..(446): n is a, c, g, or t
  misc_feature (466)..(466): n is a, c, g, or t
  misc_feature (495)..(495): n is a, c, g, or t
  misc_feature (527)..(527): n is a, c, g, or t
  misc_feature (534)..(535): n is a, c, g, or t
  misc_feature (538)..(538): n is a, c, g, or t
cacccaggcgcacttctcccgggagagcggcgcggatggatccaacatggcggcgccgagcctgagccgagagaagagacctgggaaattaagtttcttgcggagtacggtggggattgcagctgctgagcagggattctggaaagcattggtacctgagcccccagcatggcgggcctaaagcggngggcaagccaggtgtggncagaagagcatggtgagcaggaacatgggctgtacagnctgnaccgcntgtntgacatcgtgggcactcatctgacacacagagatgtgcgcgtgctttctttcctcttntgtngatgtcattgatgaccacgagcgtgnactcatccgaaatggacgtgacttcttatngnacctggagcgccagggccgntgtgatgaangtactttcgccaggtgctgcagntgnngngcatcatcantcgccagactgctgccctangtcacctcaagaggagacgggctgtgtgncctgatcttgtagacaagtatctggaggaganatcaatnncgntatgtgaccccagaagccctcaggtgatccagaaccaaggctccccagcctctaaaaacagtgctccccatattctgtgggtgtgttgcccccacttcggttctcagatgtgttgcagcgtcagcccgaggagagccacatgtggggcagcgaaaacgcggagtcactgaaccagattccaagggaacggactttgactcagactggggtcggtaaatgccatgagatgtcggcgggttttttttaagacgacctgaggcattgaggtaacagacacatctagcggacgggccacgggacagttggaccacgcactgggaaaaggttaacggagtgtcaccggggagactgataggctgcgcgcagtgtggctgcacatgcggactcattcg

SEQ ID NO: 503783 - DNA, 153 bp, Homo sapiens
aaaatattagccaggcatggttacatgcaacctgttagtcccagctacttaggaggctgaagcgggaggattgcttagcctaggaggtcgaggctgcagttagctatgattgcacctttgcactctggcctggtgacagagcaagttcctctt

SEQ ID NO: 503784 - DNA, 383 bp, Homo sapiens
tcttggcaaagggattgttggtgataccaggaagagcagcttcagtggctcatggggagagaagccagattacaggagatcagcaactgagagagtgagtggagagcatcttttaagaatgtcttgagtgcgggccggctgcggtggctcacgcctgtaatctcagcactttgggaggccgaggcgggcgaatcacgaggtcaggagttcgagaccagcctggccaacatggtgaaacccgtctctactaaaattacaacaattagctgggcacggcgcagtggtgcgtgcctgtagtcccagctactcgggaggctgaggcaggagaatcacttagaccagggagtcggaagttgcagtgagctgagattgcgccactgcac

SEQ ID NO: 503785 - DNA, 388 bp, Homo sapiens
ccccttattttcccttctttattgtttaacaacatcagctgctgtcaagtctttagacttcttctctttatgtttttcttctttgtgcttttctaggtgaagcatgtttattgtaggcagtagatatttaggtttgtatttttatccattaaggtactctgtttttgattggagagttcagtccatttacatttaatgttatttctgataaggacttattgctgccattttgttttttgttttctggttgtcttgttgtcttccttcttgtcttccttattgtgaaattgattggtgatatgttttaatttcttgctttttatttttttgtctatctgtggtaggctttttgatttgtggttctcatgaggcttgcaataaagaagga

SEQ ID NO: 503786 - DNA, 717 bp, Homo sapiens
  misc_feature (452)..(452): n is a, c, g, or t
gcaggaatggcagtcacgatgatgagaagtttttaattgttcttttttatttgattttggaattcaggtgcactctattcaagtgcaaggatatcagaagtttttttttatttaaaaattttttttttcgagatggagtttcactctgttgcccaggctggagtgcaatggcagcttactgcaacctccacctcctggttcaagcgattctcctgcctcagcctcccaagtagctgggattacaggcacgcgccaccacaccgtggctaattctatttagtagaaagaacgttgccgccacgttttcttcaccatgttggtcaggctggtctcgaactcctgacctcaggtgatccacccaccttggcctcccagcgtgctggattataggcatgagcaccagccggccccaggattttatattaagccttcttgctctcaaaaaaaaaaanggttttaactattccatttccagatgaatcccatgagcgcgtgctatactgggtgtcgcaaaaaatatcaacccccccaaaaagggggggcgtctagggggcttcgggttccggtagacttgcacacgtggtctccatccaagggccttttctgaagttacagaaaacaccaacatgggagggagtctatgaagcaaaggcaaggcaacacgtcggctagcttcaggatagcaccgggagaaaatgggggctgtatgcgaatacg

SEQ ID NO: 503787 - DNA, 381 bp, Homo sapiens
gcaggaatggcagtcacgatgatgagaagtttttaattgttcttttttatttgattttggaattcaggtgcactctattcaagtgcaaggatatcagaagtttttttttatttaaaaaaaaaaaaaaaaaaaaaaattcaggaatttaaatttcggccttaaaaagggatttcacgcgatagttcaggcttactggttctactggtataatctctgtaccttttcatcttgaaaactctagttttgtacaagccagattccagcttattttactcatgcaggtagtgacagcatattgaagtattaaactggcccttccggtaaaaggctttcgaaccatcctttatcccttttgtccgaatgggaccaagtcattcagcc

SEQ ID NO: 503788 - DNA, 233 bp, Homo sapiens
  misc_feature (71)..(72): n is a, c, g, or t
gcccattctgttcctacacggatgcattaacttcttactttcaaaaaatgaatattattagcaatacactnntatgtttctgctgtctcaatcgctgtttaccaaatctatttgccctctctctggcccgattcttacacaaggacaaggtgagtaacatagtatataggggcatcactcatatagatacactctctgccctttttgagggggctctgtgacagagcacacac

SEQ ID NO: 503789 - DNA, 108 bp, Homo sapiens
tatccctcccacaccttgcacctggacactggatctccacaaggtagatgggctccatgagggctgtgctgggtggtcagcacactggcgtagatgcagcgcggtgtt

SEQ ID NO: 503790 - DNA, 838 bp, Homo sapiens
gccccttgaaaggtccggggcgccactgggttcccgaaccccccaccaggtcatttaccccacaggaccaatgccaaccggtctcccaaagaccctccggtaaacccagtcccaagcaaacctcttagaggactctctattgccttcaacttgagaaggaaccccttaggtcccagtagagtcatcacaaaccgaagttcgtcgcggattggtcccccgtggccaatggcgagataccaaccagccaatcaccgaattacagggacacagcctcagtacgggtgttttctcaaggccaacgaaggccccgtcctagccaaataggtcacgagagcatggtgtttttaagatggcgaccgatgtgtcagcgatatctgggcgcagacagaacggggcccccacaaagagggtgcacaaatcaaattcagaagacacagaaatccatggtcattttggacaccagccgacactcagagtcctcagtgctatcaacgtagtacgtccccgagagtcaaccacatgggtggacaccaagagcacgcactaggcagtaaccccatccccggtatctaccttccagatagtggcgcaagagagtggcccccaccgataactcctggccctccagaggccgacaggttcaagaccacctggggcacgcgtaccaagagtgtggacgtgtttccaagtgacaactacaacaaacataagtgggtcagtttttttgtatccgaaaactgaggtacaagatcacctgtacaccaagaaagtaggaccagtggcatctcctccttttatggatttggtacaatcatgttcttcctgctgtgattaccca

SEQ ID NO: 503791 - DNA, 481 bp, Homo sapiens
  misc_feature (397)..(397): n is a, c, g, or t
tcccttctaaccgggtgtacctcatgggaaagggggggaaaataagatgacgggagggtcgcgtgcttttaaagttctcaaattggactttccagacaagcgggtggcctgagccgtgtgccgtgtctccagatcttcacagcacagtctccggggaaggtggagccaccagcctctccttgaataccggggagatgaaccaggaagctctaatgacacacttgatcgaattatgacagacaccgaaaatcacgagtcagccccctcaagaacctctaccggtggcccgccgatcacagccggaagtgcagtgaaagattcccggggggccgggtcccaacggcccaggggggactccgaggcctcggcattggcggggggggcggcctgtgatatngggccatgggcgggtctggctcggtcccccattgtgtctggccagtctctaagtgtctcaacccggtccttcattaaaggcaag

SEQ ID NO: 503792 - DNA, 217 bp, Homo sapiens
accaccatccactacaacatacatgtgtaacagttcctgcatggtgcggcatgaagcggaggcccatcctcaccatcatcacactggaagactccagtggtaatctactgggacggaacagcttagaggtgcgtgtaagtgccttgtcctgggagagaccggcgcaccagaggaagagaatctccgcaagaaaggggagcctcagcgagagctgccc

SEQ ID NO: 503793 - DNA, 551 bp, Homo sapiens
agccgttaccagtacgacggagactctccttagacccaggacagttacggggtctaaggaggggcccgtcaatacactgagatgcagcctcaccctgaattctatggggatggtgtgggcatggcgtaggggggacaatgtgggctgaggggattcagacatccaggatcaaacatgggatgtgagacaaatttgtaaacgaatagaaaggggtttgatcacatagtggcgtgttctgaaatgatacaggaacatttgctatcagattacagaagtacctgtgcttctgataaggcagagtgttcacattggggtgtggaattgtagtgtatctactttgcattgagtgctaggaagctctattctgttcatcatagaaagtttgtaggaattcctgacatacatagtgaagagtatccttacatctggttaccacctgatcttcctgccctcgtgaaaacatcacccagatatcttcagttatcaatatgccatacaccttggtaagtcacctcagatcttcttcaaaagaagcagaccagtgagaacaa

SEQ ID NO: 503794 - DNA, 965 bp, Homo sapiens
ggtattgtggagagtccttgacaggaggtgtagcggccctgatgaagtttgtagaggagtttatctcatacaagttcagtattgggcgccagtgcgtggggccacttacccgttggttcccaacacgtgtgtacgcacccccgcgtgtgtgcgtgccctcgtgttggttccgccgcagccaaccctttgggtgacgcaccttttcagaggcctgtagcccgcctccttggttggtaatcgggcgggcccttctgtgaatagctctttggaggcatatttttacacgccccctgtggctgcgcaacaaggcctacttgcgtcgtcagagatggggtaagagcccgatggccgctgtgtggagaggcggcttgtgtggccaccgcccctacgggtttccggggggcgctcatttgtttaattgtggccccggggtttaaacctccctcgattgggtttgttgcgcgatcaccgaacgcctatggctggtgcccttgacccgtggcgcgactagacatactccttgttcacaacgaggtccgaagctatgttcccccacagataatacggttctgtgggaagctttttcacaagggcctggtatctggtgcctgtaccccctctctgttttatcaatctcgtgggagactcctttgtggtaggggacaccggcgttgtctcggtgggtccacaacaattcgtgcctcctcactatcacggggctctcacaccacctatgtcccgccgccccgcatgagagcttgctgctaaactatgtgttcaccgcacgcacaccacaccggggggtgcacaccacccgcccacccacggactgggacgcaaccaggtcaccccttctctttgtaccactcgggggagaacaccccctcgtatattttaaccccctcccccctttttccccatccccccaccccccaaccttccggggtgtttccccccaaaaaaaa

SEQ ID NO: 503795 - DNA, 672 bp, Homo sapiens
ttacatggcccgtgtggtttacaatttacaggggtctcgcggcgcgagcgctctacccggagctggagacgagagagtagcctaccctctggcctcagtttcctacatgtatgtagtaggctggagcatggcccggaccgggcccccgagaccgccccgtgcaacctcaccgacagcctgggggcctcagtcgactgggaacgggaccaaggagctcggggacttctccctgtcccccggacctggttgcgtgactgaccctcctgttcccagagcccccagcgtcaggccgggatgttcgtcctaggtggaaatggtggacaccgtccggataccccccttgggcagctttgagagcgaaagctcaacgaactccactatgccgaggcagcttgaaaccacggaaggtagggccaacacaagggtccgtagttaccaaccgtggggactctgccatttgctctgttctgactaatcacccaaaacctggagcgatggcctaatggtaattctcctgggggaattggccgcattcacaacatccaaaggtccactttgtcgcctgcgtgggctgttttcaatccagttcctagattgaggattctccattggggcaacgatcaagaggctgcatgccaggaacggacgtgcacgtctctctagagcttcttc

SEQ ID NO: 503796 - DNA, 327 bp, Homo sapiens
  misc_feature (101)..(101): n is a, c, g, or t
tgaatgcgtgtgtcctgaatgccacagaagcattaaatataggacctgaggtttggaagtctatctcaataggattggagagactggttgctgcttctccnccaaaggcgtgcccctgacaggtagaccaggctgtcaccatgcagcaggtacaaccctgcgtctgagacactgagtcgtggtacattcgatagcggaactcatcctcctgcactttttctaaaacaacgccatccacccgtgatgcatctgtccaattctccagcttcaccacagaatcctggtccagagagatgatgtatctacgtttcgctgtgttgttacctt

SEQ ID NO: 503797 - DNA, 156 bp, Homo sapiens
cggaagggtgggccaggctgccgacctctatctgaggggtgtaggctctagtagtgaagaagctacaagaaatcatgatcgatgtatctgggcgactgcattcgagctatcagctcgtgggcatctgtgtgctcgatcgtgtcgagagagtagaga

SEQ ID NO: 503798 - DNA, 679 bp, Homo sapiens
gttccttagtaacctgggcgatatctgccaaagggaaaggacagtcccagaaccagagtgaatattcaatgctgccttggtcgaggatataatcaacttggaaccaggtgaactgaagaaatgaagtctgctgagtagaacgctcatcaaggataactttcaactaaagagctctcaatataatggacctcaccaggatcccttgactagattgctgtggtaccgtgctgacgggaagcttgctttaagaccagtattacccagtatctccatgaagtcgtcacagctgattttggtgaatatggccagcttcccagaggaattggcctggattaggagtcttcagagtacctggcaatccggtcccatcgtctaccatccaactggtcgtgttccgaccttgggcaagttagcttcactctctgaggcctccatttcctcatctgctaatataacgtgtacagcttgcagctatcaaggctataacgagaacacgtggcacatgaatctgaacccacgaagtggaagggacgctaattcgggtacccattccccaattaaccagagagcacagagaaatgctggtgaatgtggccaaagagaacaccgataatgccaaagactctttacgtgaagcgttcgctaccaactcgaatgaacgagcgtgatgaaagtccca

SEQ ID NO: 503799 - DNA, 1561 bp, Homo sapiens
  misc_feature (1019)..(1019): n is a, c, g, or t
ggctcatggtagccatgcgaatcataaggggatgcctaaagtggaccgagagagtacataaattggaggctcagtcatacagctacgcgaaggtgccaaagcagtttggaggcacaccatatggggtacatacgagcgcttgcagatgactgccaataagacgtgcgtgtctagcaaagaagtcgctagaaagccggcagatctaccatatacaagccgtttgagcagtacatcgagcaccgaaactatagtctgcatcaggcatcgtctctcactacgcatagtggaacccaccactgccacgcagtacccaatgcccctgcgggcaatgtcgtcaggcctagagccatcgctacttttatagctacgacgcagacatctaagggcctgaaggcactgcttttcacattcgaagtgcccctacatgcagtgcatggggttcgacgtcaattcatagagccatgcaaagaagtagcgccctcgtgaaaggcagtgcgggcaacgtagcggacgagaagaagaaggcgcccaaagaggagaggtcttccattactgagaaagtgctcaagccccataagggccaattcgaagatgcgtgacgtaaactctatacggattgcatcgtaaaagctaatcgatgggggcgtcccttctaggaaagcacttctgcctagcccccatattattgctagaaaaatacctaaagggaaacgacgcgtacatgaaaatataaccattcccgtggcaccaagtcaaatggcaaggcacgggtggtcgcaattacacttgaagtgcattatatactgtccttcccagcaagggtgaagggcacggagagaaacagcaaaaaccctggataacgccgcgcgtctttatcgaaaccctggttggacaccggaaagggggggcggaaggtccccggaacaagccataagaacgtgcgcacagtgatcatctccacaaccaagttgcggaaaattacatggtccagaccaagggggcccgctcacatagtcggnagcgcatcaaatgtccctttcccattacggctcccggcaaataaaccaacgaaaaccgagtagcatctcacttaagatacagacgcgagagcccctagaaagccacagtgaacaacacaatcgttgtgtccgtaagggaaaccaaaggaacttcatgtgacacggcaacttccgttcacccgcgtggtaaacactcgtaggcaaggaggaataattagaggggccacgaagcaagcgcataatttcttaaagcgtcccgggattcgttcacgggaacactcgcaaccaggagagaaaccccacggaatagcggaaaagggaaccaaagtcacaaagagacttcctaaggaggaagaaacacccgtagcaatgtacaccttagaccatgccgggaagtgtaacaagggtgctcccatagccaccataaaacacacgagagaatgacgcccctcaacaaccgaagaagacacacaaagacaaacacgggagagccaacaacgggcggcgggcacgagcaggcaagcaacgagggaggcgtccaa

SEQ ID NO: 503800 - DNA, 638 bp, Homo sapiens
aataaaaacccggggctaagggacctttattgggctgggggaaggaaatgggaggagggagctacaaagggcccggccatgggggctttgactcctacaaatggccaggagctgggcaccccacccagaactgagcgatggagcgtgggtagggagggtccacagtgtccactccccgggggcgaaaattgactcggaagaacttgtctccagaaaaaaaaaaaacactctggatgggtttacagggggcgggcacaagccagtccatcctgtaaaaatcaaagttgggggctcccaagttggtctcctcactggaaaacaaggacagccacatggcgcgggatggccggcgggagtttttgttgcggccacggttgtggcctctttgggaacggaagcctttgcggttgcgacgcctaaacctttgttttttggcacaagaggggcggggtgccatgcctgagaagaaaaagcggcacacatgggtgtgtcaattgccttggaaaacgggcaaaacccgataaagaaatgggttgttggtacaaaaaggttttgcccaaagaaaaactcaaaaatcctcaaagttgccccgtgatatgggaagggttaaaaccaccgagggggttgtcttaaatctt

SEQ ID NO: 503801 - DNA, 932 bp, Homo sapiens
  misc_feature (11)..(11): n is a, c, g, or t
  misc_feature (171)..(171): n is a, c, g, or t
  misc_feature (411)..(411): n is a, c, g, or t
  misc_feature (447)..(447): n is a, c, g, or t
  misc_feature (453)..(453): n is a, c, g, or t
  misc_feature (469)..(469): n is a, c, g, or t
  misc_feature (562)..(562): n is a, c, g, or t
  misc_feature (592)..(592): n is a, c, g, or t
  misc_feature (594)..(596): n is a, c, g, or t
  misc_feature (614)..(614): n is a, c, g, or t
  misc_feature (620)..(620): n is a, c, g, or t
  misc_feature (626)..(626): n is a, c, g, or t
  misc_feature (648)..(648): n is a, c, g, or t
  misc_feature (681)..(681): n is a, c, g, or t
  misc_feature (686)..(686): n is a, c, g, or t
  misc_feature (699)..(699): n is a, c, g, or t
  misc_feature (705)..(705): n is a, c, g, or t
  misc_feature (757)..(757): n is a, c, g, or t
  misc_feature (767)..(767): n is a, c, g, or t
  misc_feature (825)..(825): n is a, c, g, or t
  misc_feature (847)..(847): n is a, c, g, or t
  misc_feature (927)..(927): n is a, c, g, or t
actcaagaggnctgggtgtgggtaacagccacctcccaacaacgtcagaggtccgggttcagaattcctcaacgcgactgagttactggctcaaataactactgtggagtaacgagagggcattttaacacaacagagactccaattcaactctcttctgttaacacagtnagagttctcttctcaatgctcttacaagttttaaaaatggagaagctataaaataattttgttagaagaaaagtaattttcttctgaaatggagttaagcaaacacatacccaaggatcttaaaaagtttttttttgtttttacagaatatatgtatgtatttgtgttttttttttttttttttttttttgtaacaaacactattaatagtatagctaaaatgttaacttcatcgcagtntctacaaagttgtggatcccagttttggtgccaaangcatanaaaaagctcaaaagcnattatgactataccatgcaaatttatatccagaaaaccttgggaaggagattgcagctctgtggagctccagggggtctctgcctttgatatntgggtacctcaactatgcatcaaaaaagtntnnnatcacttttctcccaganagaatnaatgtnacagttctgaatagtataaatnatacacttaaatagaccattgactgtttttgtncacanccatttacatttnggggtncctcttctgcatgtggacctcacacctttaattactggatatagaaaaaganacctgaagtnttgaaagggataaggtctttgcaaatgtattttttttctttaacatgaaaataatganaaggccactaaacaaggttttncccaatttgtttaacttttaggatcccccattgttacccatgggaaaaatggtcagagaaaagccaaaaccaaaaaaatncctgg

SEQ ID NO: 503802 - DNA, 520 bp, Homo sapiens
atcctggcaagtcacaactacagttttccagtgctatatttgcaaggaagcacctggaactgagaaaaagcctccacgtgggcaatatcaacatcaacctgctcttttctttttgtactacatctctattcaacatgcagtacatgcttgatttcacccaatcgtgatcgctacttacagagcacccgccacgtgtgtgccaggtagtgcataaactgcttgacgtgtgctctgtggtttccacccctccataacgatcgtacgaattagacattacctcctcctgccccacctagtaaacatggaaacaaacctaagcaaggtcacaaggctaataaacggaagaattggcattgatcacagatctgtatgactcacagtgttcatgttatgtttagcttagttaggtctgaatttttcttcatagaaagaaactgagcttcatgagagtatttgtgagagtatttgtatatgttgattttttaacaaattaactacactggatacagaaagatcggca

SEQ ID NO: 503803 - DNA, 328 bp, Homo sapiens
taggtgatggtttctgaatgcacagaagcattaaatataggacctgaggtttggaagtctatctcaataggattggagagactggttgctgcttctcgccgaaatgcgtgcccctgacaggagaccatggctgtcaccaatgcatgcggtacagcccgtgggtcttgagacctggaggtctgttacattcgatagcggaactcatcctcctgcactttttctaaaacaacgccatccacccgtgatgcatctgtccaattctccagcttcaccacagaatcctggtccagagagatgatgtatctacgtttcgctgtgttgttacctt

SEQ ID NO: 503804 - DNA, 277 bp, Homo sapiens
gcttatctgcgtgggtaatttctctcattttttatagacgatatgggatccccctatgttgcccaggctggtctcaaacgtgctgagctcaagtgatcctccctccttggcctcccgaaagtatttgaattacaggagtgagtcactgtgtaccaagccctattactttgttaaactgtttactatagtagaaatgcttgtgatgtagaaaaacggtcagtaggaaatacaaaacctcagcctttattttacttgaaaatagttcttctatttagaa

SEQ ID NO: 503805 - DNA, 393 bp, Homo sapiens
atccccacttaggtccttctgcgtatcaaacttgttttccatttatagggaccttcacctgcttcagagtgaaattgcggtgggaggcgctcatcattgtccacatcgcgccagccatttgacccaacacggcatccccggggggaatgtctctgaggcatggggccggatgtccgtgtggacgtggctggagaccttcaccggctcctccagctcctgcagggcgatgctccgctccgatctgtgcggtgctataactgtgggtgctccatgactcctgtctgaccggtcagcagcatggtcctggtagtaaaggtgctgctcccgcatttgcactctgagggcggacagatcctttacgtccggtcccactctgaacgcgcctaagggtac

SEQ ID NO: 503806 - DNA, 335 bp, Homo sapiens
tcgggttgcgtggggggtagatgagacccagggctggggaccatggcttagggtgcatgaatatgggaacccatttgggagaacggttcttagaagtccggtcatcagcttcaggaaagccagcccatatgcggaatacagatgatctctgggatgtagccaacaactgagaaacacgtaaaatagttctcaatttctaatcatttttctttctttctttttttctttttttgagacagagtcctgctctgtcacctgggctggagtgcagtggcgggatctgggctcacggcaacctccgcctccggggttcaagtgattctccggccttggcc

SEQ ID NO: 503807 - DNA, 1000 bp, Homo sapiens
aagctctgcctcctgggttcacgccattctcccgactcagtctcccgagtagctgggactacaggcacctgccaccacgcccggctaattttttgtatttttagtagagacggggtttcaccattcacaggatggtctggatctcctgacctcgtgatccgcccaccttggcctcccaaagtgctgggattacaggcgcgagccacagtgcctggcctctatgttattttcatagtgtaaacatccagaaaataaatgcttcggtaccctgaaaaaaaaaaaaaaaaaaaaaaaaaaaaaaaaaaaaaaaaaaaaaaaaaaaaaaaaaaaaaaaaaaaaaaaaaaaaaagggggggggggaaaaaaaccaccgcgcagggggggcgccaacatttgccagccgactaacacccaatgaatttgttgtcaagaaagaggggggcgcccaccataaggggggcgtgctaactaaacagcagaggcgggggggcgacgtgaaaaacaaacggccgacgaggagggaaaacaacagtcagcagtggatggacaccttgagggaggcacaaccccacatgatgggggggggggcgccacaaatattgggggcaaaccaccacacaaacaagatgataaccggccggcgggggaaacacaaacaattgacgaggggggatcttgcgggggaccccaaccagggctctattggccgtgggggcgagaacaaacagtttcaggctcgcagcgggttgctatgcctgcacgcaccatcactcacccggcgcgccccgtctcaccaacaccgggcacagcacacccaactaacgaacgagacagaatcgtaataacgcgacggttcatgatgatgacagctgcccgctactacggacgctaagagcgagcgcaggagatcgatcagagagaagcgaacacagcaagcacacagaccaagccgcaacgacagccaagaaagacgcgcgcaacgaagagcacgtaaagatcc

SEQ ID NO: 503808 - DNA, 441 bp, Homo sapiens
gtcgtgtgataggcatcagctgtgaagatcacggtatcgagattaaacctggaatcaggttctgtgctgcctctgggtacggtcagaattcaaatgttggacaataagttggtgttcgcagaattgcttgttgtacagctaactctacacatttgggtgacagagaaaagatatggaatcctggcttggactaatcgctcggtgtctgggactgggaggctctgctctcctgtacacaggctgtcacgctgcccattgtcctgtgattctaggtctcctcccagagtgagagaggatgaaaacttaaggagctctgatgacagtcccccttttgccacagatgccaccacagtattcccacccactcataaacatacccactagacattgacatgtccacacccctccccggactagacaccaccatcaggaacttcacca

SEQ ID NO: 503809 - DNA, 252 bp, Homo sapiens
actccgccaattaccctcactaaagactctcaaacataccttggtgggggtctccgctcaacctcttcttccctaggtcaaagcactattatctgatgagtttaggatgggttctgattggcagaaattaatcagctcccaatggggcccacggaactaagtaggggccaagaaaaaaaacgggaactattccacagagcttgagcattcttgccaaattccattcctcaaacctttagtgagggtaaatcc

SEQ ID NO: 503810 - DNA, 616 bp, Homo sapiens
tgatctccaacgtcggagaacagaactaagagacatattgttttttggctgccggtagtcaagggttactagacctaaggtgtttattggcagctctgaggacagagatacgctaccaaaggtgttggtgccctccagactgtgctggtagctacagatatgggggctgggcactctgagctgcccctaagctgcctgtgggatggtgcagattgggtggggatgctgcacccaggaccactaggactggcataaacaagacctactacaacaaagcagactgtgagaaactgtggcagctgggccagacatggtgccaacacccacccctaccaggaccactgcaccagctaacaccaccactctgcacagaaagtacaaacacctgctctcgtttgcctgggcctcctgctgagcttagtgtctgtctgtctgcccctcggactccctctgagccacaggggggttagactatggcagcccagagtaggagtctgtgccagagcgctaacagcagctgctcggggaagcgctcctggctgcagatggacctaacgctcctgctcctccgctggcgcaaagccacttcttgccagacgaaggctacaggtgagac

SEQ ID NO: 503811 - DNA, 158 bp, Homo sapiens
cggtgtttgcctgttgcacatccaggatctgcatatgggaagcctctccgggcagctacaggtgctgatgtgaatggagcatgcacctggctatgacctctgaccaacagccaaagggatggaacctatcctccagtccaactcctgtccctatctag

SEQ ID NO: 503812 - DNA, 158 bp, Homo sapiens
accaactcgctgtgcctaacaagaattccagaagtaaaccatccgaaaggcactggaccatgacactctccacttccaatcttaaatcttatacttcataccttgtctcagatctctacctggtaccccttccccacgcccttcgcgtgagggtacga

SEQ ID NO: 503813 - DNA, 424 bp, Homo sapiens
cggcgcagcaggcggacgctggcttctccggctgggaccctccgccccgaccgggccccgcggcctcgatgaggacacaccatgctgaccggggtgaccgacggtatcttctgttgcctgctgggcacgccccccaacgccgtggggccactggtagagcgtcgatgtccaggcgactggctacaccctttgtagaagggttcaagcccccggccccgccggttgccttggcgggggtgaaaaggctaattgccagggaaccccggccccagccgctgccccacctccaccatcatccgcatcctcggatgcagcccagggggacctctccggcttggtccgctgtcagcgccggatcaccgtgtaccgcaatgggcggttgctggtggaaaacctgggccgagcccctcgagccgacctccta

SEQ ID NO: 503814 - DNA, 483 bp, Homo sapiens
ataaatctggaaatcggagtgtctaaccccctgcgcttcctgggtgcagcgatgcccaccctgcttctccttgcctctgtgggctgtatccgactgtctaacccatcccaatgagatgaaccgggtacctcaattggaaatgcagaaatcaccccacttctgcattggtcttgctgggagctgcagaccggagctgttcctatttggtcatcttacctgggactcgatcacttttttaactcttctgatttacttcacgaatctctatcttgttcactaaactctttgtaactcgacctacattgtagctcgaccttctttatggtgtatactttaattattaacactgggacaggagggacgaaaagagaacggggccacgtagcatttttttctcaattgtgtaattattctaattcacatttgagaagtctaaatatattctagacatggagaaagtcattttaattctggcagccatta

SEQ ID NO: 503815 - DNA, 401 bp, Homo sapiens
tcacatttttgcttctgtggactgttttcctcttcctatttgctgtttcagcacaagcgatgaagaggactttcctttccacgaggaatactgatgttggttcgcttgatgagattcaagccgggtagattcctttgtccttgtgtgagactcactcctcctgaagcagattttagccacgtctctctaaaatcaacctggatgtaggctaccatttggccatgcaggatttaaatttttgtgttcatcaaggtgcagactctcacagggaaaagtgagtccagagaaactaaggtcaatggttttcactaatgagggctgagcaaatgtttctcatcaggaatgcattaccatggtaacactggagacacagagataaaacaataaaatgtaataacagt

SEQ ID NO: 503816 - DNA, 191 bp, Homo sapiens
gaactgggtgatgcggcttagatataacgcttgtgtattgcatcagcttttgccatgggtatctttatctttgtcttacctgtgaaacacaccccgagtaaaaacaagtaaagatctccgagcggcagtacacaatgggttttggttcttcaaaattgctgcccttattggaatcatggttggctctttct

SEQ ID NO: 503817 - DNA, 113 bp, Homo sapiens
atcaggtctaagggattcaggttaggggaacacacacaaaaagtcaaattcagttattcaagcacctaattagtatatgaacatctgcctggggtactcacagtacattctgg

SEQ ID NO: 503818 - DNA, 789 bp, Homo sapiens
ctccatagaccgcaatacagcatagagatctaagaaaacatggtacatagggcctagtcatctcatatgctaaggcactaacgatacagagactgtctaggcactgagcttcacaaccagtgaaggttctgtctccctagcacagctacccatgatggtgtcggaatcagtagacttcttcctggctaccatgaggcagagtcttacacacatacttatttcctagtttctaggagacagggtttcagagagaattttgtcattacaattctatgccagagttgaaactctcacaaagattgaggcattctgcatttgaattatatacagaaagtcatgaatataattccaaaagaaaagagtgcacttcatttggtcacttaatttcacaccactgggcgaggtaggataactatcttctttgacatgtgtctcgactatataaatggtgattataccgaaaagggttctaatgcattttccacattcttccagttgtgaaaattctctctgtaccatccaagtgttatgtgtactcgttctttccaaggcactttaggtctccatcctaagccatgtattcagtatgacttcagtggttatctcatgtcatagctgggtatatcataacgataatcaaccacaatattccagtatcaagactcgtgaagtaggtatctcttgatcacgctgtactagttcatgggcaagctggcagctcacaatcaacattgtctgatgttataattccacctggcttcccttttataagtacagccctaaatgctt

SEQ ID NO: 503819 - DNA, 274 bp, Homo sapiens
gctcgacgggcggtgcagtggctcacacctgtaatcccagcactttaggaggcccaggcaggcagatcacaagttcaggagattgaggccatcctggcgaacatggtgaaaccccatctctactaaaatacaaaaaaaattacccaggcatggtggcgcatgcatatgttcccagctactcgggaggctgaggcaggggaattgtttgaactcaggaggcagaggttgcagtgagctgagatcacctaccaacagagcaagactctgtcaaaga

SEQ ID NO: 503820 - DNA, 248 bp, Homo sapiens
gcacggcttcgtctgccataactcgctaggccacgctgaggtcctggttcctgaggagtgcaatggaaaccccagattgctgcaggagactacgagccctgtcgggctagtcggggactgtcgggctagtcggggactgtcgggctagtcggggactgtcgggctagtcggggactgtcgggctacgtcggggactgtcgggctaggtcgggcactgtcgggctagtcgggaacggtcgggctagtcg

SEQ ID NO: 503821 - DNA, 164 bp, Homo sapiens
gggaaaattttttttaaaaaaggaaaaaccgttttatttggggaggaccttaggggggttttttttttccttttccaggttagggcctaaaagaagtttttaaattaacctttttcctgggtttcaatttgacctgccctttataaaacaagttttggggttta

SEQ ID NO: 503822 - DNA, 422 bp, Homo sapiens
  misc_feature (360)..(360): n is a, c, g, or t
cacgaggagccagtctgatctgctggctgaccaggctgccgacgaaggccatgctcaggcccatgatcaacgcggcgaggaggaagaactgggtcgagcggttgagtccggccaggaggtgcctcaatcgctgggaccaggtgccgggtgactcgaccatggtctggtgcgcatgctcgacgaaagtctttgaatttgattcgacctttgcctctgtggccattcgccttgctccccgatgctggtgacaagcgctttgtgcaggcagccgatgcaatcagtcgacgcctgtctcaacaagctagtacaggatgcgctgcggggcggcttttatagcggttgccgcctcggctggagtancgacgatgcccgtagagcggtaccggcatcggctgaatcttagcttgacctggccccccgca

SEQ ID NO: 503823 - DNA, 383 bp, Homo sapiens
gagcagtaacttattattgctagtcctgatgtccattctcacctcaataaaagaatgggcggtggaagggggacacaccatacaaccaaacttaccataaggttatatatctttcttttctttttttttgagacaggcctcgctctgtcacccaggctggagtgcagtggtgcgatcatggctcactgcagccttgacctcccaggctcaactgatcctcccgcctatagcctcctagagtagctagggactacaggcatagcaccaccatagcccagctgatttttaattttttttgtagacactgggtcccactctcactatattgtccaggctggtcttgaactcctgggcttaagcgatcctctcacctcagcttccca

SEQ ID NO: 503824 - DNA, 180 bp, Homo sapiens
  misc_feature (8)..(8): n is a, c, g, or t
  misc_feature (46)..(46): n is a, c, g, or t
  misc_feature (74)..(74): n is a, c, g, or t
  misc_feature (111)..(111): n is a, c, g, or t
tatattancccaaactttattaagaattgtttcctaattggttatnacatttttcaatttaatagtttcaaaanaaattgttaatacaactgtataaaatgaacataattntcctcacttgtatttttgttattgagccagtttatcaaaataaattgtctactaaagaaactaaaaaaa

SEQ ID NO: 503825 - DNA, 229 bp, Homo sapiens
attctgcagctggccggcattcagctgcaccgggatctgctggatctctcctgtgttagtgatgatctgctgcatcacctgcaaggtctgtccatgtgccactctggtgcctgttggagcttgcaccctgatgcgctgagcctggactactctgcatccttgctgacccttctccaatcctgtcattgtcactcgcgttttggtcttggcccttgctgacgtctgtgcg

SEQ ID NO: 503826 - DNA, 436 bp, Homo sapiens
  misc_feature (436)..(436): n is a, c, g, or t
gagagagagagagagagagagagagagagagagagagagagagagagagagagacagagagagatagagagagactgtgtcatactgctattcaaacttgccgtgtctatatttttccgcccttagattgttgcttatcctctatatctcctcatgattgttttccccaagctttcgatgacctccttcccctctctactgactctcagtatatctttgaccatatatgagctcttatatttcttcattcattgttctaattccagggtctccctctgtggcccacgctcgagtgctgccccaagatcctacctcactgcttccttgagctcctgggttcctgcgatcctcttgcttcccttccgcgctctgattctatgtgtgtgctctctctcacacctgtccttccgtgttcttggaccatatttgtcacatn

SEQ ID NO: 503827 - DNA, 1120 bp, Homo sapiens
aggcacctgtgatcccagctacttagaggctgaggcagaagaattagctttaaccttggaggcggaggttgcattgagctgagatcatgctagtgcgctccagcctgggcaacagagcgagacttcatctcagaaaataaaaaataggggccaggcacagtggctcatacctgtaatgccagcactttgggaggccaaggcgggcagatcacgaggtcaggagtttcagaccaatatggtgaaaccccatctctactaaaattacaaaaaaaattatccaggcgtggtggtgcacgcctgtaatcccagctactcaggaggctaaggcaggagaatcacttgaacccaggaggcagaggtaggggtgagctgagatcgcgccaccgcactccagcctgggcaacagagcgagactccatctcaaacaaaaacaagaacaaaaacaaacatacagttggcacagaacaagggagcaagtctaacaaagggttccacaatgtacatgcagcacttgcatagtctaaccaacaccaacaagggcctcacaccacacttcccatgccacacatcacagagaacgcgaggacccccacggacagcaacagcacagacacgcacagacaaggcggaaacacgacacacaaccagaaaaactaccgaaacccagtggaaaacaagacaacaacacaccgcgcccacagccagacaaacagagaagaagagaaaacacagaggaagcaataaccaaacagaacacaaacaaaatcgggacaacacaccaaacaacacaacgcaagccataacaacaacaccgagccccgggaaaaaggcagccacagcggctaaccaccagcaggaacccgggaacggcgaccaaaacacctcgcgaaaacaaagcgaaagagaaacccacacgggaggcgggaagggaagcacacaggggacgacagaaagaagagagaggaaaagcaaaaggcgaaagcaaaatgaaagacgaccaacagacaaacagggagatccaaggcgcaaaagatgagggaacagaagacggaacaccaaaaaacaaaagaacacagaaggcaacgatcgacgtctgcaccagaacgacggaaagcagaag

SEQ ID NO: 503828 - DNA, 438 bp, Homo sapiens
  misc_feature (282)..(282): n is a, c, g, or t
  misc_feature (326)..(326): n is a, c, g, or t
ttgaaatgggcacagaaattctagtgataaatacctgcccaaagtcctacacctgtgagctgatggcgccagactataaacttgagtctcactcccctacacgccgtaactttctccagttcacacatcagcacttttataaagtaagcacagagctaaaaagttcacgttccagtttaaagcttccacctacaaggaagatcgagaatcaggtaattttaaaactaatttctgtgcccatttcattgaaatgggcacagaaattgagaatgtgatttgggntcatgtgatgtgtggggagactctgaaacagtcagagaatgagnacaagtcagaaaatggaagacgtgaacttttaattgcagctctgagttatgaaatgagtccctttgagaaatgaaagcagagaatgatttctgtgcccatagcaagggccga

SEQ ID NO: 503829 - DNA, 191 bp, Homo sapiens
tagagcacctatcgctgcccttttttgggggggcaggatcggtggctaacatctgtaatcccagcaacttttgggaggtcgaggcaggcggatcacgagaagtttttcttaaaatccttttttttgggggggcaggatcggtggctaacatctgtaatcccagcaactttgggaggccaaggcgggcagat

SEQ ID NO: 503830 - DNA, 893 bp, Homo sapiens
tgcgagtgtataattgtccagagcagcgttgggccgtgaaatatccgccggggagcgatatatggactgtgcccgcgagtttgtgggtcttcggaacacacaagagtgcctgtttcctgaagagcaagcgcggttccgagcaccggtgtatttacccgggctccagagccttttgagctcggctcggctgaggcgccggcttcgtaccctgtcagggagggcgtaattccttaggaaacgttcgtctctgggtggcagaacaggcagcaccagctcttcgtagtccgagcaggtttgcctgtctatgccgggggccctggccagagcgactacggttgggcccccgacgggacaagcaaagcgtgtgttatagtccctgggctccccccccgaccggggaagaatcaggacgtgacaaatgcctctctactgagacacgtgaagctccccaacgacgtcttctgtctgtgggcagggagcctgcagacatgtacagttctgcgacatagagccaacaactctggagtacatgttctggagagagtggagccatattttcactctcggtgacaggaaacaccgagggtggcttactgaaatagggctgaaccccccgagtgctcccgctagatacaataggagccactgcgaggcaggtacatggtctcttcacgaagaccatagcgagcagtgccgcgcagaggaaccctcaatggtgttgttgaaccgctaccttagtccaccggaaaaggctcatccagcgacacacgacgtatatgggctgcagagggacgatcttgagactggtgacgcacgatgtgaagcagttgggaggtaggaaatcacatatggcagcacacggggtggagtcaattcacggccaaacatgacgc

SEQ ID NO: 503831 - DNA, 395 bp, Homo sapiens
caaactatggaaaatgcctgcatgggacttgcaggctagggaatgaaaatgaaaacaggaaaaaatcatttccagagactctatacatataatatttcaaacattatgaccacagagttgaaaagtgcgcaaagaggatcttgagcacggtgattttttcataccctagaaaaagtgtgtgcttgcggagtcaccattcagttgcacattcaagcttgaatttagcaactgatgggcatgtcttcaaaaccatctactagcagcaacttagcccattgtcacttggatcttgttaaaccattacacgaattcatcaaggacagttcagaagtatggagaagcaacaagtcacagtctcataaaaaagactaaagcaagaagttgcaggaactctg

SEQ ID NO: 503832 - DNA, 179 bp, Homo sapiens
gaggcgacactagaggatcgccacaaccagtttcatcattaggactataacgagactgccaaacaagaagatatttaggacatccacaacacgatgctgcagaatggagcctagaagatggaacgtgtactaccgcaaactgaaacgtcacagattagagacatgacacaataaggatt

SEQ ID NO: 503833 - DNA, 186 bp, Homo sapiens
agtgatacttaaactaaaatacagacttttgacccgtggactatactaccctgacaaaccctagttcatcctcagctctctgacatctttccatgtcacctccttaatgagaagtatatgttttggtatatcctctcttaaatgtgtatgtgtgtgtgtgtgtgtgtgtgtgtgtgtgtgtgtgtg

SEQ ID NO: 503834 - DNA, 195 bp, Homo sapiens
ggatcagaagtgctcagagtagtctttaccattagtagccagctccagaatgaactaatttagcagtactatttctgtccagtggacagcaatttctagctattggaatattaaagaactgtgctatgtacagtagttctacatacaaatagcccatacggtcaacgtagtacgagatagaaaacggtccgtgaa

SEQ ID NO: 503835 - DNA, 342 bp, Homo sapiens
acaaacttgaggcaaatgcgactaagtgactcactgagtccaggctctgctactgctgaatacgctgaactgaagaagatggactggtcgagatatactactacatgataccgcactacgcatgcactagagtgatggatcaccttcgacccttaggcagagtaagatggtactacatggatatgtcgcgcataacaaaggccttaacagatactctgtcaagagattgtagtgatatgtgcaattcggacgctcctacacacctgatgacttgtatggcttgctgtgagacgaggaccacataggatgtcactgatacgtctgtcctacactgagcgtatg

SEQ ID NO: 503836 - DNA, 210 bp, Homo sapiens
tttaatgggcacagaaattacagtgacaaagaacagaaagaagaaatggaaaagactgaagaatgaaaagagactcgaagaattcctatctctaaaaaatgttcaaaatattgaagtacattcaccgtctgactcttctgctcccttaacactttaacagatccattactggaatttctttctagagtacgggtaacccatatttctgtg

SEQ ID NO: 503837 - DNA, 479 bp, Homo sapiens
cagactgccacccgagtgctaaagccaccaattgaagagtcacagaattttcaacaccctggtggtcaaatgccaaagccctcgtactatcatacccaatttccaaggtctttcagaccaaacatgcagaatcttagctttacagaagtctcattatatattaaataaggaccctgtcagaacgcctatgtgtaccatctgaaatagtctcaagctttaaggtcaaaaccaaacaaaaagcaaacaaaagctctcatctcgtctacttttttaactccaaaaaaaaaaaaaaattttaaggctatggcactcgtaggtatttccccaaatgagttcaacacacctgtccacacaaacatctacatgccgacgttacagcagctgtattcatgactaccagaacgtggaagcacccaaaatgccttccagtgggtgaatggataaataaactgtgtaacaatgcagtgttattcagcact

SEQ ID NO: 503838 - DNA, 1616 bp, Homo sapiens
taaagggaaaaaggaatttttttccgggagtaaactttaaagaaaaaaagggaaaaagggaaagggggggggggggcaggggggctgggagaggagaaccacatatatatccgggggtgtattttctccctcaccgcactaaaccaactttcttcctcacagagagggccccactttgtttctctcttgaggccctctccacagaggccctctcgcgagagaaagcgcgcacaaaaaagaacaccgcctctgtgtgtttcgtgggcgacagagagagagagggagaaatctctctctctctctctctgctgtggtgtgcgcgcccactctatattcccctctcttttctctatattgtgtgtgcgccccgtgtgcgccccctttgtgtggcgaacgtctctctctcatacaaaaacaacacacacaacacgcccggagcggggcgcccaaatctgtggtggtggcaggcacaaatataaagaacgctctactctctccagaggggagagagcactatgatgaggcggccactatctcccagagagtggtgtggaccctgtgccacccgcgagagagacagagagtgggctgtaaaaaactctctctgtgagagagagaaaaatagagagcgctcgccctgtgagagagtatatattttacacacccccacaagagacacacacacagtgtgtcgtgcggagagggggagtcactcagggaggtggggggaagcgcggcccccaaagagagcgggtgtggtgtcgcctcccgagatatgatacacccccaccacactgtgtgtgtggtgtgcacaatctaccagcactctatcatcaaaatgtttctgttgtgcacacccaaaagagggggggggggctcctaccccaagagaaaagctctctcgcagagggaaaggaaatcctccaatcatcttcataacaccgcccgctatgatgagttattcctactcttgcggggaagccatccaccccatatataagaaagggaattacccgcccgttcttatttttgttccccccacagagaggaggagggaggaagagcaatcaacccacaagtaggggagagaccaacactctcgagaaagaagaaggcgcgcccagcggtgttctcattcaacaccacaccacgtgctccgctgttgcacacacgcattattcaacgacagaactcaacacccacaactgacgagccagcaccagacggaggaggcaccgcacttaataacagagccagcctactaatgacgccagtgagcgcaccccacgcgggggggcacaacaaccagccgggcggaacaaaaaacattcccgctccatcgggggaacgagacagacagcagacacctaacacacccagactaagttgatggcaagaggcagacaggacagaaaatacacaccaaatcagatatggcgcaccacccaacaatactcatacaataacaaaaagtagtaggcgaccgacagcaccacaccacaatacactcgtagtcgtgagcgagacagccacagcaaacagcgtggagctcacttactgagaaagaacaccaccgacagacagcgtaacacaatgcagagcgaccttccagatca

SEQ ID NO: 503839 - DNA, 331 bp, Homo sapiens
cgtcctgcatattaaaatctagttagtattagttttaaactctagtagcagagcctatatgaatatgagtctcttttgccattctacttaaatgtagtcaagtaaaatgtaccgagagtaactttggggggaaatgaagtatttctctaaaaaatgattatgataaatagacctataaaaagaaataaccatcacatcacagactgtactagtaacatgtctgcagtttgaagaggtcagaactattaatataatggagatatagcacttactttgtgttgaaaggcagagtatttcttctgtttcactaaagtagcctataggtaaaatg

SEQ ID NO: 503840 - DNA, 359 bp, Homo sapiens
ccgctctcacccaccccacagactctgaagtcgtgtctgcagcaaagttcgagatgccagccaagatgaagagagggagtggggacaagaacaaaggaggaggcgtgagagagagagtgactctgtagtgagccacagtcagcatgccaaggggtgagaggatggagcacttaccagaactgcttatctaaaatgaggaaagtcccttagataaagcaggaacgcggtggagtaaacctgaggtgcaagactccaggttgcaggaaccccacaaagggtgtgagatggtggagaagctgtgactcaggtagcaactgtggaacactagtggccaacccaggggtgtgtggagagcggga

SEQ ID NO: 503841 - DNA, 1725 bp, Homo sapiens
  misc_feature (378)..(378): n is a, c, g, or t
  misc_feature (939)..(939): n is a, c, g, or t
tgtcattgtactcctctgttcactgctcacgactgttttttgttctcgtgttggtgggtgtgtcaccgctactggctgtctgcgtcgtatttgtacacatttgtttgttcccaagttgttggcgtctgtctgttcgttgttgattgaccttcgctcatctgtttccttccatgaggtgtgtgttgtgtggagaaagtacttgttttttgtgttcgtctcaccaccccattttctccttggtggggtggatgtgatccacccccgcggtttgtttggtttttatacactggcgcgcatcactaatgtgggcacgcacaccttgtttttgtggccccccccccgtgtgttttctccacccctgggggcgctctagttatngttttgtttgtcactccaggggctgctcaccaaagaaggtgtctgttataaatacccttctgttggcggctatatataacgaggttgttcctttactacgatagtacctccctgttttttggttgtgtggtgccggtttcccacactaatatgccgtcctctcagagaatggcgctcttttaaaatgggtgtttttatcaccgccaccactagtttctctccgtctgaaagtagggtatggtccgcacaggagagcgccggggggcggctcgcttactaatttgggttttgtcacatttcttctcccccccgctttgtttttatctaccacgggctcccacacattttgatgagcccatttgcacccccttttgtatgggtattccagtacacccacacctgtcccggatttttttagggcggcaccacacccttattatggggcactttcctgcagagagagtgccccccccaacagatgtgtggtgcaccaccagaatagacgcccacgcgcgttttgttataaccccgccggcgccccacgttatatcctatttatanccgcgtctcctatagagtgtattactcgagagcgcccccttggggttgtggcgcgaatatatctcgcgcacacacgagagcgccacaaacacatggcgcccgcgcgtttctcgcacccccccaaccctcgtgagaagagaagggcgcgccccgccgcgtgtcactctacacaagagagaaaaggtgagtgctcacacacacgcgcgcccctcgggggcacacacagagactgttccacacacgcgggacacacacggcgcgcgctgtgtggcgcgagagagagagagtgtccccgcactcttagttctccccaccgccccataaagcgctctcgcccacacacacagaatatccaccggttatatgtcacccgcacatcttggagatgagagagcgcgagaattcacagagagagagcgcgcccacgtataagagggtgatatctctccaccactcacacgcccgcacggagagagagagaggagagaagaagaaaaggagagaagaccacacatataatgttcctcgagaggtttcacgcccctggagatccacgcgagagaattatattgaaagtatagaatcccgaccacctaaaggaaaaattctgtaaagacttttggaagacttcggccacagcttctgtccacaccctctcacggtcacactcacgcctcacacacacttgggagtgagatttccacaacgccctctcggggagacctcgtttgaatttttttctgtagtgctgtaattattttccataaaattctgggcacccaccca

SEQ ID NO: 503842 - DNA, 951 bp, Homo sapiens
  misc_feature (200)..(200): n is a, c, g, or t
tccctgtcgccgcggaggggcgggggcaggaccgcgcaatccggccggagctggccgggtcgtgagccggcccgcttggtggggcgccccctcgcgtccaagaggcagacgcatcgggtgggctccgggtctccagcccggccgggaggaagggacccgggacctgcgagagcggggcaacttcgggggcccctcggcgngggtcgcgccacaaccaaggtggtggtcggccccgggcgtttgcgggggcaccttcttgccgcggtattgacccagagggctcccaggaagcgtgtcacggcgcaccgaaatatggcacaggagggccggatacaaggcaaagaaccccccgtgtggctaggcacaggagtgcacacggcgggccaacaggagtattggtggacacaccccggggagtgacacggccccccgggagtgaacggcggggaccccaccaggcgggagaagtttaatggcaccatccgggggtgttatggggagccccgcgcagagggtcgtctaaagccagcgccggggggcaagtcctaagggcagggggaactgccgccacccacagaaccgggcgtaccagaaacgtcggcagcggggatacgtagtccggcggcaacaagcgcgacagcgctgcgtcacactacgctctgaccgcccgtcggtgacatcatcagtggcaccgtggcctacggtcttaagcggggtctcaccaatcgacattcccgtggtaattcccgtggaagcagcagtggcccccaccgggcgttaaaggcagagtcaacggtgacagacgcgcgacatggtgtctcggcgccatgaggatttcggtcccaacgataagacgtttggacttacacgattgcggagctgcgttcggagcgtacacgcggcaaggcgcagtggaagactaggctgtggcagtccccgaccgagcgacac

SEQ ID NO: 503843 - DNA, 814 bp, Homo sapiens
tggccacgggggtttgtggtcttttgtgatttcgtttgggttttctggtccttcgttgtccggggttggtgtttgtatttgtgtggccgtttgcgtccagtgctcggtatctgctgttgattcccatttagctgctcttcaggtagtttcgacgctacaggtcttgtgtgagggtgcaatggagtaaactctgaggtttctttggttcgtcgatgttgtttctgtgtacatttgtttcctaagtctatggctccagggtagacccttacgtattcctcctccatccttcaattcgtcaccctccattggatcctcaagttttaatgaattccatattatacctgtacatcagcaagttagaaagaaagtactttaaaataaagcaaagggagactgtttgctctaccatcaggacactagttgtcagaagacatcatgtggttctgtgtttcctatcggatatatatagaagagcgataaatacttgcactgtaatgtcttgtggtttggagtcccctgacatagataaagagggaatatatttgcagaaagtcgcatagggttttttaaatgcagaattttgtcagaagtacaatggcgctgcatgtttttctttgagtgcaaatgtacattgctaagatttttttaagatggcatgtgctttgacctatgagagatatctgcatattcttaagagttgtaaaaatcttagtgagtgagacatattaaaaaaatcataagatgcatccttcgtttcaggagcattctgtgcagatgttttgtctcatcgtaccgggatctaacttatggacta

SEQ ID NO: 503844 - DNA, 616 bp, Homo sapiens
  misc_feature (3)..(3): n is a, c, g, or t
  misc_feature (75)..(75): n is a, c, g, or t
  misc_feature (77)..(77): n is a, c, g, or t
  misc_feature (82)..(82): n is a, c, g, or t
  misc_feature (115)..(115): n is a, c, g, or t
  misc_feature (118)..(119): n is a, c, g, or t
  misc_feature (133)..(133): n is a, c, g, or t
  misc_feature (135)..(135): n is a, c, g, or t
  misc_feature (142)..(143): n is a, c, g, or t
  misc_feature (145)..(145): n is a, c, g, or t
  misc_feature (147)..(147): n is a, c, g, or t
  misc_feature (155)..(155): n is a, c, g, or t
  misc_feature (157)..(158): n is a, c, g, or t
  misc_feature (161)..(161): n is a, c, g, or t
  misc_feature (163)..(163): n is a, c, g, or t
  misc_feature (165)..(165): n is a, c, g, or t
  misc_feature (168)..(169): n is a, c, g, or t
  misc_feature (173)..(173): n is a, c, g, or t
  misc_feature (177)..(177): n is a, c, g, or t
  misc_feature (182)..(182): n is a, c, g, or t
  misc_feature (184)..(184): n is a, c, g, or t
  misc_feature (188)..(188): n is a, c, g, or t
  misc_feature (190)..(190): n is a, c, g, or t
  misc_feature (195)..(195): n is a, c, g, or t
  misc_feature (199)..(199): n is a, c, g, or t
  misc_feature (204)..(204): n is a, c, g, or t
  misc_feature (206)..(206): n is a, c, g, or t
  misc_feature (210)..(210): n is a, c, g, or t
  misc_feature (216)..(216): n is a, c, g, or t
  misc_feature (223)..(223): n is a, c, g, or t
  misc_feature (226)..(226): n is a, c, g, or t
  misc_feature (251)..(251): n is a, c, g, or t
  misc_feature (254)..(254): n is a, c, g, or t
  misc_feature (273)..(273): n is a, c, g, or t
  misc_feature (344)..(344): n is a, c, g, or t
  misc_feature (473)..(473): n is a, c, g, or t
  misc_feature (532)..(532): n is a, c, g, or t
ggnggtgtccccgtttcccaccatgctgctcgtcctcctcttcttcctgcggtgcactgtcccatcgccctcggntncagantcgcactctgagtcggagtctgacgaactggtnttnntggtgctggttgtntngctggtnntntnggttgctntnnctntngnctnntganggtnatttntntttncnaggtntgcnatctngnggtnctcttnttttatnatntttttccatttttttgtttactttnttntccctcttaccgtcttgtnccataccacagggaagttggtgctgctggcaaaattttttttgatggcgatagttgtgtcgatatttaggncaacatgccaccagcctcctggtacaaagacagtctctcctggtttttgtaagatttccaggggtttgaattcaggtggccaggttggaagctgtgtccggggataaataacattaaaccaggtaatancttcgtcttgctggttccctccttcgtctcgggtcactttgatgagttccctgggagtnctggtaggaaacaggcaccagcgcttgttgccctgaactaaggcattccaggcactggttcccagagggtcgatgtgaatccca

SEQ ID NO: 503845 - DNA, 367 bp, Homo sapiens
tttcctggaatccacctggggacctttagggggacctaattaaaaatccccattttccggagtggggggggccattaaccctctgtggcccgggttaaaaaaaatccctccccggtgtgggcatttttggtcccgtcccaaaaccctttttcccagggattttttgggatggcccccaactgatgtttttttttttaggggctgaaaaaaaaagaagtttatggttgtccccagtttttatgaaaccggttttgtaaaaaaaattttgtggttttagtattgtccttcagggttccaaacccccccccatggccccccggtgggtttaaaaaccttttcccttttgttaaaggcccttttttgggga

SEQ ID NO: 503846 - DNA, 159 bp, Homo sapiens
tagaaggatccgggttgggtttataggccctcccctcctcacagtggccaggtagacccctttgaaggaggggaggggcctagggagccggcacctgtgtcatggtaccatcgattaaagttacccgtgaagggagcccaaaggggtacggacgctcga

SEQ ID NO: 503847 - DNA, 447 bp, Homo sapiens
gtgtacctagttaagcgagttagtgaagagattatctgaaactgctcatgcacttatgaaggggcaatgtcctgagactgtcgttgtcagctggaggcccaggagagctgatggtttctggtccagtctgagtctgaaggcccaggaacctgagaaatgctgctgcaggttccagatctgatggctgaagatccaagaagagctggcatttcattccaagcccagaggctggagaaagaccgaggtctcagctgcagctgtcacaggaggaggccctctcattcatcctttgtatctatgttagctcccaactgatgtggacagaggcccaccaccctggggagggccacccttcacatgctaatctcacttggaaacacccacagcacacccagaacgatgcttggctaaatgtctaggcacccaaggcccactcaggttgacaca

SEQ ID NO: 503848 - DNA, 346 bp, Homo sapiens
cctacgttctacgattgcgaagcggtcgtcttccaagaataaatatctatcattccccatacaccccaaccgtcctatcaccaccacgtacccactgctcgacagcttttgatacacgacaatattcagctcttgggcactcgctgagtctagtattcgcagtataaatccggaagtgtgtactagattaagtatgctcttccaccctgtatgtgagtactgtgtcttacatcttcccctccttcctccctgtgtatcaaacaggaatacatcaatggaagacaagagaccagtaagggacctatcgaattaaacaaaaaaaagacaataataaaaaaggctcatt

SEQ ID NO: 503849 - DNA, 132 bp, Homo sapiens
tctagcaggatcccctttggtctcagattagttgagcggtcatcatgttgtcttctatcattcagtagatgcatctctgaagtgcagtcgattcgatgtaatgaaaaatggtcctctgagtctcacatcgaa

SEQ ID NO: 503850 - DNA, 418 bp, Homo sapiens
gagatcctgaacacgcatctcatgactgagtataggccttagaagaatatcaatcattctatcataaagataaatgcatatgtatgttcactgcagcactattcagaagtagcaaagacatagaatcaatgtaaatgcccatcaataatggactggataaagaaaacatggcgcatacacaccacagaatactatgcagccagaaaaaagaaagaggtcacgtcctttgcagggacatggatggagctggaggacatgatcctttgcaaaccaactcaggaatagaaaaccaaatactgcatgttctcacttataagtgggagctaaacaatgagaacacatggacacagagaggggggaaaaacacactggggcctttgggagagtgcaggcgtggaaagagggagaggatcaggag

SEQ ID NO: 503851 - DNA, 159 bp, Homo sapiens
attcctgagtataccccctcttgaggtgctgacaggaattctatgtgaactcagctacctatcctggtgtagcaaaaatagttttataatagttctataactactttgaatgtgtttgatctaacggtcctctgaccctgagctgcatccttggttcat

SEQ ID NO: 503852 - DNA, 623 bp, Homo sapiens
  misc_feature (93)..(93): n is a, c, g, or t
  misc_feature (576)..(576): n is a, c, g, or t
  misc_feature (622)..(622): n is a, c, g, or t
cggacgcgtgggttttaactcttgtagtattttattgttgttaatttacaagtttaaaaatattaggtactatttttaaccattattaatagnacctaatattaataatggttaaaaatagaaaaatgcatatttttgtatgataatcaaatgtaaaatacttttatttttgctggacagttgttatatcatgattattgtgctacagtttattgtgcataatatgaaaaacaactatgacagccttcagtcgggccagggtgaagctgcttataccacctctgccgtcagagggacatgtggtgacagcagtggtgtggctgcacagggcgcactagagagagctcagcacccctgctgcccgccagcagagcccgtgctgagggaatgccgcacagatgctgatgcactgggtgaaatttctagtattgaacgtaaaggtgtcagtgtcttgctgttattttatgatggaaactgattttgaaaccaaaaatagctaactaactttatttaaggaaaggatattaatttgtctaacagagggtgaaagctgttcacatttgcaacaaaatctgnttgctgcagtagtacctcaagtggtaaaacttgtttccgagaaacnt

SEQ ID NO: 503853 - DNA, 1240 bp, Homo sapiens
atttcaaagttctctttcttttgggaaagaaaaagttggaagtttaaaaatgcctctagaacaaacctatctccacattccatcaactgtataggaggcaggaaagcatgttttatgagcaaaggctttgggagcaggaaatttccattctatgatgtactagctactgccgctgggctttagtttccttatttataaaatggaaatatcaatagcgcttgccttcacagggttggagtgagcattgcacgagataatgcatatgaagggctttagccagtgtcaggcatagagaaggatctcaataaatgttagtgatgatggtggtgatgatgataaaggatttggagtctcaaaaagttgtattgcagcgttacaacataacattttcagataagaaacgagatcacatattctgccaaggttatttgaatttgctatgtggaagggaaaattacttctctgtcacttaatggctgccatatattcttactcagttaggaggtgtgcttacacgtgtttgtgatgtcttgtgtccttgccctgatggtcagaagttttgttttagccctttaaaaaatccaatacagctttcagtattctgcagtgcatgcagtagactttctacaagtaaatgttttaattaaaaaaatcaaattatcatgcaaattatactggtagaaaagattttggccttatgaacatttacaaggcattgatttttaaagtaaaataaattagcaaataaggccttataaactacctatttctggtctatttcctagggactcacccctactcaccattgcttctcttagcactttggctgttacacaatgaaatgaagttaatggtttctaataatgaatgagccatcttcatattagaggtcttggtaccaagcaatagaaaccaactcaggctaacaagagggaatgtactgaaaggaaatgagaggacctacagaactgatgtgaggctggaggaccacacttgaggatgagcaaagagcatgagagctctggcaagttaggggcaggaaccatagccatagtctttgtagcaggaagcatctgctcagcacttggccatggggaaagaaaacccacagtctactttcttctctatgtgggtgacccactccacggtcagagtcctctgagagtgtatgactggccaagctcagataacaggctcacagccaggctataccaggagctgggggtaggggtgtagagat

SEQ ID NO: 503854 - DNA, 111 bp, Homo sapiens
gtgtgctcgtctgtctaagatcccccttctttctcgcttctctttaggaagaaagaagttttttaatttttggtctacgcttataagggcatccccaaaatctcacacatg

SEQ ID NO: 503855 - DNA, 151 bp, Homo sapiens
ataaaaaagacgcacgatgcatcgcctcggccggcgcatagcaaccaacttagaactggtacggaccaggaaatccgacagtaaaataaaaacaaagcatacgcgaaagcccagccggcgggtgtacgacgcgatagtgatacactagccc

SEQ ID NO: 503856 - DNA, 334 bp, Homo sapiens
tcagcgaaatatttgttcccacaagccaaggaagacatgccaatcacaggttccacacactggaaacacaaagattccagagccaggctgtaccacggtccctgagccaggctgtaccaaggtccctgaaccaggtagtaacaaggtccctgagaccaggatgtaccaaggtccctgaagccaggttgtaccaaggtcccatgagccaagagaatacaccaaggtcccatagccaggaagaaatcaggtccctaaccaaggctacatcaaagtttcctgagccaggtgccatcaaaagtactgagacaaggatacaacaaagttcctgtgccag

SEQ ID NO: 503857 - DNA, 469 bp, Homo sapiens
aaaactatgtggccctccagcttcagtctccctttcccatcagtcggccccgcagggagcgtccatatatggagcatcctacccgttccatagacctgtgcttcccatcccgcctgtgggactttatgccacgccagtgggatatggcatgtcccccctgtcctaaggaagaccagatcaatagactccatgatggatgcttgtttcaaagggtttcctctccctctccacgaaggcagtaccagccagtactcctgctttgctaaccctgggggcccccccctaaacggttaggctgacagggccccccgacatagctgaaatttgttctgtaggcggaggccccaagccctgttttcttggggtaattttccaaaagcccccttttcctttcccaaaaattggctctgatggtttttatggataaaaatatatatataataaaatataaaccctttttatccagcca

SEQ ID NO: 503858 - DNA, 920 bp, Homo sapiens
taatgttttcccggcgtttaaaaatcgccctttgtgaatctgggtattttctcatgctgtttacgtactttaagaagcctcggaatatcaccatgtgaagatcacgtatcaatacactgtttccactgatctattcttagatctaaggcaatactacagaagatatttttcatggggcttcagtaacgtttgtcatttttagaatcattgggccccggttacagagtgagttgtcacataaggtacttgaagagtttatgtaggttaattctatttttacagtaacccttgaagttcttctgagttgttgcatgtactctaaattcaagttaaatgctgaacatgaagagtaaaggtactttatctgacaagaagtttctgggcttaggacgatacgtaatgcaatgtagtccatttgtacatggtcttacactgttgtggatgcttctgtaaacattttcctgtatgtttaaattgtgtttcagcaggatgtaattgcccttgtgtgtagttaaaatgagtcatcatctggtcctttgtgaatactggaattcatggtattttctgtaacagttttcctgaagctgtttctggagagccacacatttaaatacagacagctttcctgatcaatgtgatttacttgtgcacctgactttttggtcgtaaaaggaattattcgccacacatatgattttacctgtattcctgttaagattttagccttgtaagttaaagctgctcttacatgatgatgtgtaaagctgtccttgtccctttactgggtttcggcggggttgttacaagatagggaatgaagaatgcaatatggtttatcgttcaaactgtccactctggatccaagcctgtactgatagtacttcccagtatgataattgtgatgtttcatacaatgcagt

SEQ ID NO: 503859 - DNA, 365 bp, Homo sapiens
  misc_feature (70)..(70): n is a, c, g, or t
tatagatatatatctttatatgttgtatagatgtttattaagtaccagaaattaagaagttcataaccgnccagtcacagtggctcatgcctgtaatcccagcactttgggaagccaaggcaggaggatcacttgaggccaggagtttgagaccagcctaggcagcatagcaagcccgccatttctacaaaaaaaaaaaattaataaaataaattagccgggcgtggtggcactgcctgtagtcccagctactagggaggtggaggtgggaggattgcttgagcccaggcctaagctatcatcaagccactgcagtccagcctgggcaacagagttagaccctgtctcaaaaaaaactaaaataa

SEQ ID NO: 503860 - DNA, 334 bp, Homo sapiens
cagtaataacaatacgagaccagtaataacaatacgagacccgtaataacaatacacaggacgagacccgtaataacaatacacaggacgagaccagtaataacaatacgagaccagtaataacaatacacaggacgagaccagtaataacaatacacaggacgagaccagtaataacaagacacaggacgagaccagtaataacaatacacaggacgagaccagtaataacaatacacaggacgagaccagtaataacaatacacaggacgagaccagtaataacaacacacaggacgagaccagtaataacgtcgacgcggccgcgaattta

SEQ ID NO: 503861 - DNA, 156 bp, Homo sapiens
aatcccgtggacatgaccacgagtcaccggcatatggcatacagattcataaagtggtttgaggttactagtatgattggtggtttttgtttgtttttttttatttctcaccgttaaggggaggatttacattggcccccaacgtgattgtcactt

SEQ ID NO: 503862 - DNA, 205 bp, Homo sapiens
cggttcaggtcgcactccatcgaccggcactgggggcaatgacggtgggcctcgcggtggtggtggcactaggcggcggaacgggtggtgagggcgagggtgagggcgacaaggacaaaaaaggctgcggcctgcctggacagcccaaatgcgctatcgacgagaccgggaccccctatggcaagtccgcctacggtgagctcaa

SEQ ID NO: 503863 - DNA, 549 bp, Homo sapiens
  misc_feature (446)..(446): n is a, c, g, or t
  misc_feature (475)..(475): n is a, c, g, or t
gcacgaggagagcagtaccccttatacgagatcactcctgcacctgcgatagcggattgagtgttattgagaacactgctcctattagcctgtgtcaacgctagagttctagcgagaaattccacaggctgagaccttgcatatggcgagccgttcattctggatgaagcactcgaacataaactttctaagactaagatcattcctatccagatgtgagtaacggttgtggaacactcactcactgcactgagagtgtctcaagacatgcgcgtaatctcgttgtatgcgaagtgttcaaccagttggaattcgcaagcaaggctgctgatctttagaaagatatctaatctttccatgtacgggactacatgtgttgagttaaacgaacatccaaccacggcattttatttgatcgaacggtgggctttcagaatttgccgttntatttcggaaccagttggtcttacctgcngagttgacattatatgactccgtcttttcttccgctggcccagggcaggagcgccactaatgggttgctggtgg

SEQ ID NO: 503864 - DNA, 334 bp, Homo sapiens
gctcacacttgacatatcactaatatctaactctcagtttaacactgagtaactattacctgtatcagctatctgtgtgtgtgcagaatgaccttatcactatcaggccgtgtgtatcctcgtggaacagatataagaggtggtagacttaacactggctactggttaaatgatacaaagcttgcatccaggctctacaatttattatgtgccttaggtgagcctctaagcctcttcatcatcctataaaattctgtatcacaaggttaccctgaagattaaatgagtgatgtgggtgaaatcaatcagctgtacatgacatagaaaatatctg

SEQ ID NO: 503865 - DNA, 1291 bp, Homo sapiens
  misc_feature (304)..(304): n is a, c, g, or t
gccgattccggagcctggggtagtcgacgccgccgccgtcggtcgtgactagaccactgcaggcatccgttgccagcgatctgacgtagttggggcttagtgaaggaagagggtcagtctcgctcggagcttcgctcgagaacgggtcttctgttgccctagcaggcctctcccactggcgtaatgacaactggatcaatcaggtgagctgggtacagcaaagccatactcgctgagcaggctgagcgatcatgatgatatggctgcaggccatgcaacggcagatcaactagcaacccagggngacatgcaacgtcctcctgaacagaagtaaccagagacactcttgctccgtcctgtgttgcacctacgaaatgacagtgctgtggtcacggcgcccccgctcgcctgtcattcccgtggccgatgtccaatcgtgccaggccacttggacgccaggagaatacccacaagtgagggaaatgagacgcaaggcaaaggcatgagctgagacaatgaggactgaaaagagaagagtgacacgctgtgagttgaagtgacttagacagtgggcatgcccaagctgaactggcgttacaacactcccctgccttaaatggggaatggttttcccgcgggcagccactgttgtagcagaggcggaaagactttttcctctgaagtttacaccacaaccactttggcattaaaccaaacgacattctcaaagggaaaaacgatcccaaggtggtggattttaccctcaaccttatggaaccatagggttggaagagatccggtaatggaactatgaattgtccttttgcggagttttactacctcttatttcttggggaacagtgcctcgtgggtattttccgtaagagaacttggaaccggcacacgagagacaccataccaccttctagcggttagcgtgcattccagaaagaaccctccaccctaagagcccaggcggtcctctaacccccgaaaggagaatgaagggctactttcttgagagacacactctatggcggtaaaaaaggagaacacacccggaaatcatttttgcgatagggacggctatatggagcgatttcgcttcggaaaaccttattaccggctcagtgggaggtcccctgtgggggccccgcccattagaatcatcgtcctctacagtttcgaatgggacatcggaattgggctatacagcctaacatatggcacgcgagcttttccctttaatataaagcttacttctcctttggacaccaaaaagagggcgcca

SEQ ID NO: 503866 - DNA, 155 bp, Homo sapiens
tcatctttatggctctccctcaattccttcagaggatctgtaacctgcgggttcttcagaaagccttccttgtaacacccatttgaaacacgtgctctcatcaaactcccaccctttcttctgctaccaacatcttcataacacttcattctcca

SEQ ID NO: 503867 - DNA, 280 bp, Homo sapiens
  misc_feature (72)..(72): n is a, c, g, or t
  misc_feature (198)..(198): n is a, c, g, or t
  misc_feature (247)..(247): n is a, c, g, or t
acacagtatttcatgtttctattgattatgaaaggaaacagacaccatgccctgctaattttttgtattttnagtagagacacggcttcgccatgttgcctaggctggtctcaaactcctggactcaagcaattagcctgcctcagtctcccaaagtgctgggatacaggtgtgcaccaccatgtccagctaattttngtattttttgtagagatggggttttcccatgttgcccaggctggttttnaacttctgggctcaagcaatcctcctgttctgg

SEQ ID NO: 503868 - DNA, 380 bp, Homo sapiens
aaggggcaacatttcatgggcgacttcctttattcacaaacacctttcccactcactagcaagaagcaaggatctatttagaacttgccagaatctctgtattatcaatagcctagggtgagaatgatagtcttattcatgcagtgtgggctctgacattcctaatgttaatttagatactacatagagtaggcttctggtcacaactaaggtatcccctttggggtctaaaagacatctccaactcaaggtgtctgcacacagttattgagctattctttattgtagaatcttcctctactgacagcatccttcatgatgttcattgtacttaacttctcagcttgtagggtcattcctagttctcttcctgtcgacgc

SEQ ID NO: 503869 - DNA, 922 bp, Homo sapiens
  misc_feature (405)..(405): n is a, c, g, or t
gctggttgtggggacatgtagtgaatctgtatgcaggagagttgtgttgtgctggatgtgggcgtggtggtcaggtaggaggcgtcggcaacttctggaagaaatcatgtctgaggtgtcgttgatgtgatcatgacagataggtgaagatcggcaagtgctagggaagatgggcttgataggcaaactggaattatcaggagtaccgtggtgagaggagtcagggttgatcgctaataggtaacaaagaggttgtgtttggggttgttgcagattgattgagaaagttatgctgtacgtgttttccagtattagcattgaggtctgggtgaccatttgggagatgccttgcgttataagagcctcggagggatttctactcatgtgcttcccctctcttgcctngcagactctgaggcaagcaattgtggtgtctcctagttagactgtcagtgcgagggagagctgctgcttgactgagctgcagtagagaatttggttcgcaggaggaagatggcacagagaaagcgagtcggaaggaagaccaattgccggtgatgggccaaggacaatagacctgttgggggctgagaaaacacgccatgaaatatgctgccgaataatgaggcctgactccagcagaagggcgtggtacctggaggcttccgacatgagatgtaccaaacagacaaggacgcaagagaaggggtccacctcaagacccatgacagccggacattggcaaactacccacccaggcggtacaagtcagaattgccgcacccggcgcaaaatgccggacataggaggggaacagagggaagggcatacaggccgcaagcaacacggggagacaaagacggtaaaaaaaaacagcgcaccagcaatgcgcacacctagaacaccacggcgacaaccacgg

SEQ ID NO: 503870 - DNA, 202 bp, Homo sapiens
gcggatgtcacgcagggctcgaggaaggcagttggtgggaatgtccagcttgggtccctgagagactgtgagaaggagatgcggctgctgctggcccagtgtcttgacgggagcatatggccctgagcccatgagaatgcgtggaatgcgtgccgaaaacaggagcaaatggctgttttataaagttattttttttgaaagt

SEQ ID NO: 503871 - DNA, 296 bp, Homo sapiens
tccccgggttgtggaagccccaagttgagaacaataatgaacaattattgtatgaacaattgttagagacagctaatcacaaacaacctgcgggcacaatgacctcattccacacgtagcacccttcagcaggaccctataaaactttcatccagcccttgcctctttgcaggtagccccttctctgctgagctgcccactgcaacatattttcacaatttctctaataaatctgcccttctttacctacaactatcttggtaaatggctttaccacctgcaaaactgaccctagg

SEQ ID NO: 503872 - DNA, 787 bp, Homo sapiens
  misc_feature (609)..(609): n is a, c, g, or t
tagacccccttgttctccaaacattgtcccctttcttttggtcaaacaaccgggagttattcccaaatttctccctccccccctcctcatgcgacgagcttccccatacacccccctcaaggcaacacccattctttgcaccacccgggggccccccacatattcactatgctgagggcctacctgttctctaaagaacactttccccgtcccctctaagggtcccaaacacaccaccatgtttcgtccccacaagggcgtgctcctccctcaagggtcacacctgctcggttggatacttcttaatgcttaatcaacacggggtcgccacaccaacaatgggggcggtctctcacaacggtgtaagtacccctccgggtgtgccctcctccgcacgatagtcttgcgtatacatatcatctcccacttcttgtttaaaggtttctacccccacagctgccgatgttatgtaattagacctgtcctagatttttgtctgagaccggggacataatcaaattcgtttcatcactgctgttagccgcttgttggagaacaaactacctccgctttcgccgtactccatgaccccgctttgaccaccccgcnatagggaataatactcacgccacgtctatcaccgcctccctctctcctcttgctcctccccgtgccccgactccccctcttcttctgtcttttcctagtggagactgaagacccgccctttagcttcgtccccctcgccataatcaacgccccttttaaccagacacaacatatccaa

SEQ ID NO: 503873 - DNA, 665 bp, Homo sapiens
ggaatcgaccttaaggccgggcaggacatcctggccaactgggagaaccccaatgtgctaaaaaacgaattagctgcgtgtggtggctgatgcttgaaatcccaggtgctcaagaatctggtgcaggaaaatcactgggacccaggaagcaagtggtgcgggggagccaagattgggccgttgggctggcaggctagggacaaagagggaactgtaggtgagagagacggggggcgaggagtaagcaaggcggacgaggaaggggagcggcgagggacggaggggggcgtgaggggggggggggggggcgaggggcgaggggggggggaggtggaggggggggggctgggggaggcgggaggggggggaggggcggggggggtgaggggaggggggaggctgttagcgtagattgttatgacgcttgtcgtatgcgttggattctagtaattgtataaaggtacgaggggtgtgagatcgaggaggtgtgctgagtataacttgtaggagagaggcgcgatgtgggggagggcggggcggttcacgagggccgctcaacaaactataggacacactcagcagtaaagcgcatgtgtgttggccgtatgtgagattagcactccgtataattttctgtgcacggcacggtaaggaggcttagtgtg

SEQ ID NO: 503874 - DNA, 213 bp, Homo sapiens
ggaatcagaaattacctagaaggcaccatgtttttttctatgaccttttaagtccttaaggtcaatttaaggtccctgcagggggttagtaagaaagggtatactttgtgggtatgtttgctttcctaataggggacatgaaggaaaccccgcaatttgctgttatgtgaatggcctttggagcagagtcaagagcggtgtgctttccccact

SEQ ID NO: 503875 - DNA, 876 bp, Homo sapiens
  misc_feature (876)..(876): n is a, c, g, or t
gaaatactatcaccaacatccccatatccccccccttccccgtttcgcctcccccgtccgtcgccccgtctcctatcactctcccgccctctaactcaccacccgcagaccagctctcgagactactgggcacacagacacgggcattgaagacatctacctgcttctcctttgccttgcatcatgactgacagttgtctgaggtctcccagccacgtgtcctgtccagcctgtgtaactactttaaagaagaatcacaaaatggacactgggattggacgcagagatccgacggccaaattacggactgccaatgacgctcacatccctatcgataccccccgctgcagcctagaggtggaccatacaacaaaaaaagaaacagcagcatgccctctctagcgagcatccgctcataaagggaagggaaaagcgggatactggataccaatgcgcggcctttgtaactccgcaacacgggcttcttgacggcgcttgcgacggccgccaccaactcacgtacgcacgcgtctccctccgcgctcgttaaccgcgttcctttatcgaacctcctccccgtgttagcctatagagatctagagaggttccaggtgcggcagactccgcagcaggggcccatagggataagcggctcgtgaggcttggccacggagcctacctggcatcccttctgcaatgcagcggtcgtgcacgggtgaaacacccgtgatggggactagcacgacgccgcggggctacgccccgcgaggggagggcctgccggggaaacacaggcaaggggcagctccaggtggggggcattacagcatcaccagttccggcaagaaaaacacgacacgatcgtcggagataggn

SEQ ID NO: 503876 - DNA, 218 bp, Homo sapiens
  misc_feature (7)..(7): n is a, c, g, or t
cagtaantggatactacccagccataaaaaagaacaaaataatgccattgatacaacatggatggaactagagactctcatactcagtgaggtaactcagaaagacaaagacaaatatcatatgatatcatttataactggaatctaacatatggcacacatgaacttttacacaggtgggaaaaaaaaaactcagggactgggagaacagaccgctc

SEQ ID NO: 503877 - DNA, 543 bp, Homo sapiens
gcacgagctgagtttgcgcaaacacgtgtggctgatgagagagctgagaatagtgacaaatcactttataccctttttggagacacattatgcacacgtgcgactcttcgtgaaacctatggggaaatggctgactggtgtgcaaaacaagaacctgagagaaatgaaagcgttttgcgacaccaagatgaccacccaaaccttccccgaatggtgagacacacaagttgaagggataggcactggttttcatggcacatggagagacatttttgagaaaaatacctatatgaaattggcacaagacatacttacttttatgccccggaactccttttctttggttaaaggtgtaaagctggttttacacgaatgtgggccagctgttgagaaagctgtctgtctgttgccaaagctctatgaactctgggatgaaaggaaaggtttggctgtcaaaacagactctatgtgccacacttcctttggagaagagctctcaaagcatgggagtctcgcctgagacccagatttccggtggtttgc

SEQ ID NO: 503878 - DNA, 455 bp, Homo sapiens
cgaggattccgggaggccatatattaaacttgattcatcacatgaaatagcattgtgcacagtcactcataagagagccatgatatatgcagaagcaaaggtgcaggcatcatgcaatagtttcgtaccagatttcaagatacccagtatcaaggaaacacaatgaaattgacggctgaggtgaagtacaggcataaggcaaggaaagcagaacattcaagatgtacctatatacaccagttcttaaaacacgcaaatcatttccaataaggcactggctcatgtatttctgtagaggcagaagtcaatcttaggatgtggtctgtacatatctgcagataagattcacaaaagctgaattcagagtaatcagatccttcattcagatgcttcatctatgcattatcaattgctttcctgtgatataacttatctttatctcgggctcccggggt

SEQ ID NO: 503879 - DNA, 674 bp, Homo sapiens
  misc_feature (3)..(3): n is a, c, g, or t
  misc_feature (20)..(20): n is a, c, g, or t
  misc_feature (72)..(72): n is a, c, g, or t
  misc_feature (89)..(89): n is a, c, g, or t
  misc_feature (97)..(97): n is a, c, g, or t
  misc_feature (104)..(104): n is a, c, g, or t
  misc_feature (107)..(107): n is a, c, g, or t
  misc_feature (111)..(111): n is a, c, g, or t
  misc_feature (119)..(119): n is a, c, g, or t
  misc_feature (150)..(150): n is a, c, g, or t
  misc_feature (155)..(155): n is a, c, g, or t
  misc_feature (158)..(158): n is a, c, g, or t
  misc_feature (164)..(164): n is a, c, g, or t
  misc_feature (201)..(201): n is a, c, g, or t
  misc_feature (204)..(204): n is a, c, g, or t
  misc_feature (209)..(209): n is a, c, g, or t
  misc_feature (248)..(249): n is a, c, g, or t
  misc_feature (255)..(255): n is a, c, g, or t
  misc_feature (257)..(257): n is a, c, g, or t
  misc_feature (267)..(267): n is a, c, g, or t
  misc_feature (276)..(276): n is a, c, g, or t
  misc_feature (288)..(288): n is a, c, g, or t
  misc_feature (291)..(291): n is a, c, g, or t
  misc_feature (301)..(301): n is a, c, g, or t
  misc_feature (314)..(314): n is a, c, g, or t
  misc_feature (321)..(321): n is a, c, g, or t
  misc_feature (339)..(340): n is a, c, g, or t
  misc_feature (345)..(346): n is a, c, g, or t
  misc_feature (349)..(349): n is a, c, g, or t
  misc_feature (352)..(352): n is a, c, g, or t
  misc_feature (355)..(355): n is a, c, g, or t
  misc_feature (363)..(364): n is a, c, g, or t
  misc_feature (366)..(366): n is a, c, g, or t
  misc_feature (374)..(374): n is a, c, g, or t
  misc_feature (379)..(379): n is a, c, g, or t
  misc_feature (382)..(382): n is a, c, g, or t
  misc_feature (387)..(389): n is a, c, g, or t
  misc_feature (394)..(394): n is a, c, g, or t
  misc_feature (445)..(445): n is a, c, g, or t
  misc_feature (460)..(460): n is a, c, g, or t
  misc_feature (468)..(468): n is a, c, g, or t
  misc_feature (490)..(490): n is a, c, g, or t
  misc_feature (492)..(492): n is a, c, g, or t
  misc_feature (495)..(495): n is a, c, g, or t
  misc_feature (570)..(570): n is a, c, g, or t
  misc_feature (588)..(588): n is a, c, g, or t
  misc_feature (590)..(590): n is a, c, g, or t
  misc_feature (592)..(592): n is a, c, g, or t
  misc_feature (599)..(599): n is a, c, g, or t
  misc_feature (603)..(603): n is a, c, g, or t
  misc_feature (605)..(605): n is a, c, g, or t
  misc_feature (611)..(611): n is a, c, g, or t
  misc_feature (613)..(613): n is a, c, g, or t
  misc_feature (620)..(620): n is a, c, g, or t
tcncatttaacttttttaangggtctcaaaattctgtgaaaaatttttgggcaagttgtttccattaaaaantactgattttaaaaacnaaaaaccnaaaaccnccncacncaaaaaanaaaaccaaagtgggccacaaaacattccccnttccntcngaaggntttacgatgcattgttatcattaaccagtcttttacnacnaaacntaaatggccaattgaaacaaacagtcccgagaccgtccnncccccncngattaagagngggggggcngggattaggganaanattcatttanccccccgagcctnccgggcngacttggggaccttgccnnccccnnccnccntcntgtccccnncnttgatganacccnccncaacnnnctgtntcaaatcacgaacagcaaagcgacccaaagggggatagtctgagaagcccncaacacacatgggcntcccaggnaccaaaacaacaatggcagccncnccngacttcaagaatttagggccatcttccagctttttaccagaacggcgatcaatcttttccttcagcccagcaaanttgcatgcaatgtgagcngngngggaatncaananaggggnanagccggngcttatttggcctggatggttcaggataatcacctgagccgttaagccagccgc

SEQ ID NO: 503880 - DNA, 867 bp, Homo sapiens
  misc_feature (76)..(76): n is a, c, g, or t
  misc_feature (121)..(121): n is a, c, g, or t
  misc_feature (290)..(290): n is a, c, g, or t
agcaggcggcgtcggtgtcgggacgctctgtgggggcgggcgcaagggaggtttcgagccccggaggtccgcgccnagagctaacgggagtcccaggttaaacactttaagatgagaaaantgatctctgtctgagctctgaaggtccgagtgatttagctacatcagtgatgaaaacacccactgaaatatcattgatggatcagaacgtttgacacacagaatgttcccaggatcatattgttccacaaacatgtaaggattgaaaggcttgtaatccaaagttactntggtaagcaaatcttacattaattttttttttttttttggggggccccgggataagggcgataatatttaaggtttaatttatccttacattttttccacagggcaagaagggattattttgtaaccttggggcaaaacatatagttttccttaataggcaggggaattccaggttaaatggcgggggtagaaagggagggggataatgagggtaaatggcctggagctcagtgggccctctctcaaacggcaactttcagaaacctttccaaagcacttattattttccatggcaattcactattgtaaacggtcttgggcaaagggccctatagaggaacttagagattccagctggctaaaacattatcccagtgacttcttaatccaaaatccattggcccgggagctcattggccaaattcctggtggacaactcggatacccccgatctatcccactggatagctcgaaattcttcttatcacctaggggcattccccaaggactaaggcgggataattccccgggggaccttcttctaactcctatcattaccgatacatgtactcgaga

SEQ ID NO: 503881 - DNA, 306 bp, Homo sapiens
  misc_feature (76)..(76): n is a, c, g, or t
  misc_feature (121)..(121): n is a, c, g, or t
agcaggcggcgtcggtgtcgggacgctctgtgggggcgggcgcaagggaggtttcgagccccggaggtccgcgccnagagctaacgggagtcccaggttaaacactttaagatgagaaaantgatctctgtctgagctctgaaggtccgagtgatttagctacatcagtgatgaaaacacccactgaaatatcattgatggatcagaacgtttgacacacagaatgttcccaggatcatattgttccacaacagtagatgaagctgtatcaagtacttgtcagcctagatgaaagacgtaaggcat

SEQ ID NO: 503882 - DNA, 990 bp, Homo sapiens
gcatcggatgctcgatcttctgtaagtgtaactcttctatgggtggctgtgtcctatatttttaagtcattgccatgtcccccatgttatctgagtaactcacagtcatgtcgacttgtggactcacctccttgagtttacatccagtggctgcctttgggcccaggtgcccccatcagcaggatagtgtgattgagtggtaatcatggagccaggcccgccccctccgtgtgttcaactgtatgcggtctcggtgtgggggccgtggcgcgctcgtgtgacgacgcgtttgccctctgcactaggcccacgtggaagccggaagatgtgatagagagtcgcttctggggcatgctccgagggaagccggcagtggccgcctgggtgacctgactgacctgcccacgtatgagcacatccagaccggcctgtcgagtaaggacgggcgcctgcccaggactgtaccggctcttccggtagaaccgctccccgtgcctgacagacccagggagctgcagctggagcccgttcccgtgcgtgtagtttggacacgaattgagtctaaaaaagctgtctggttgtataaacggtgcatacaattgtctgccacaggaccaccgcggtttgcattctttcggaactcaatgtgccgatcagtggagtcagtatcgagcctgacacgcaagccaggaagcaggtgaagtgcccagcgctggagtgcagcgtgcacgaagaggcggtggtgctaccctctcggctgtgggacatgggggccgaggttctggaggagcctggactggaggcagaaggtgaccataaagctccggagcccggctggtaccggacactgaagaggaagtagggccgaacaccagagcgcccacggggacaattcggaagacggttataaaaaaaaaacaaggggaaatacagcagacacattaagcagaaaaaaggcacgaaaatagacagaaaaacatctgaataaga

SEQ ID NO: 503883 - DNA, 103 bp, Homo sapiens
tgtatcgatccctgctgccggtgaactctccgtgaacagtagatggcttgcggtgggggcttggggagctcgcgctggaagtccaggggccagattatcaacg

SEQ ID NO: 503884 - DNA, 463 bp, Homo sapiens
gtaattccaaactgttagaaaagcgtatactaatccagtatttctgtttaaattcagtatgaacagactcacatctatcattagggaaattctgaaatcacttgagaaaaaagtttcctttatgttgtgaatggaaaacaatacacagtattaaataatataataagatctcaactgtatgacaataggaggaacaaaagcaccataaggaaatgaaccaaaatgttcattttctttagttctcatgacacagagaatttattttcctctgcttttctgtattttccagtattatttcttataaaaagaaacatattaattttaaaaatgcccttctttggcctggtgcagtggctcacacctgtaatcccagcactttgggaggctgaggcgggcggatcacatgaggccagggatttgagaccaggctggctaacatggagaaaccccatctctactggag

SEQ ID NO: 503885 - DNA, 729 bp, Homo sapiens
gtcgcacttgtgagtggtctcgcctgcagtggaaggagccaccgaccccgcccgaccatgtggctgaggagctggtcttagagaggtgtgatctggagctggagaccaatggccgagaccaccacacgggcgacctgtgcctgggagaatgctggtgtgtgctgacgtgggccagcccttctggctgaccctgcactttgagtggccgcaactactgaggccagtgtagacagtctcaccttcagatgtcgtgacctggcccagcccctagccaggaggccgggaccaaggcccgttttccactaagagatgctgtggagtgagggtgactggacagccaccgtggtggaccagcaagactgcacccatctcgcatgcatgctcaccacccctggcaactgcccccatcggcctgtatcgcactcagcctggagggcctccaactggctaccagggatccagcttaggtgctgggcccacttcattttgctctttcaaacgccatggtgcccagcggatgctggtagtaccttggactcgggaagaaggagcggcaggagtatgtcctcacccaggaagggctttatctaccagggctcggccaagttcatcaagaacataccttggaattttgggcagtatgacagatgggatcctagacgatctggctgatccgttctagatgtcaaccccagagtcctggcaggaacgccggcctgtgagtgagtc

SEQ ID NO: 503886 - DNA, 380 bp, Homo sapiens
  misc_feature (28)..(28): n is a, c, g, or t
gaggattttaatggactgcacacccaantgatggaatggtcctctccagctgattcaatcaccgtaaatatttaagcttcttttttaaagtcactgccctggtcccctctctttgcagtgtaacctttgagcctttttaaccatgagagtggaaaaacattgaaccaaaagagaagccaagtgtttttattactgcaagcccaaaggattacatcgttgttgttttttgtcgctgttttttttccgcctccatacaaagtaatagcagtgcactgattcacagttgttttgaaagcttccatgagcaaatggccagtgcactgtaaaatgatgcttttggtgagaaaataaagcagttctaatagtggacttgttcacta

SEQ ID NO: 503887 - DNA, 109 bp, Homo sapiens
ccttccaacatctcatggctatagggaggcgccatgggatgttggaaggagggatgagatgttggaaggcgcaatgagatgttgaaaggagggatgagatgttggaagg

SEQ ID NO: 503888 - DNA, 514 bp, Homo sapiens
gtgtacatcaaataggatgaaatgagtatcaaatcatgtatagaaacgatgtgtgcaagtcaccattctgcctacctaaggcaggagacctgatggatctggggagggtacatggggccttcagttgtgttttctttgttttaaactaaaaattgatgcagaggggtcacaatgttaagattcaaccagggtagtgtggtgggtactatttaactgtttgcttaaagtgtatcaaagtaaaaatattgcttaagcatagtctctgacatctaatgacttaatagacatccctgccaggtacatgatgttacttagagtgagccacctaatctttcaaggcttccatttcctcacctgcaaaaattgggagtgtcagaggcgtatgaaccagagtgactccatctagaatagggaactgggtaaaataaggctgagacctactgggctgcattcccaggaggtaaggcattccaagtcatgggatgagataggaggttataggcagggtaccgag

SEQ ID NO: 503889 - DNA, 898 bp, Homo sapiens
  misc_feature (4)..(4): n is a, c, g, or t
  misc_feature (14)..(14): n is a, c, g, or t
  misc_feature (18)..(19): n is a, c, g, or t
  misc_feature (26)..(27): n is a, c, g, or t
  misc_feature (37)..(37): n is a, c, g, or t
  misc_feature (39)..(39): n is a, c, g, or t
  misc_feature (55)..(56): n is a, c, g, or t
  misc_feature (61)..(61): n is a, c, g, or t
  misc_feature (71)..(71): n is a, c, g, or t
  misc_feature (89)..(89): n is a, c, g, or t
  misc_feature (92)..(92): n is a, c, g, or t
  misc_feature (110)..(111): n is a, c, g, or t
  misc_feature (125)..(125): n is a, c, g, or t
  misc_feature (137)..(137): n is a, c, g, or t
  misc_feature (143)..(143): n is a, c, g, or t
  misc_feature (164)..(164): n is a, c, g, or t
  misc_feature (168)..(169): n is a, c, g, or t
  misc_feature (176)..(176): n is a, c, g, or t
  misc_feature (181)..(181): n is a, c, g, or t
  misc_feature (185)..(185): n is a, c, g, or t
  misc_feature (202)..(203): n is a, c, g, or t
  misc_feature (295)..(295): n is a, c, g, or t
  misc_feature (506)..(507): n is a, c, g, or t
  misc_feature (511)..(511): n is a, c, g, or t
  misc_feature (528)..(528): n is a, c, g, or t
atanacataaatcntagnnaaactgnnctgtaaaatngntagaataagactgatnnactgnagcctgacantggatggctcacacctgntanatcccagacaactttgannaggctgaagcaggnaggatcccttgnggcccnggagtttgagaccagcctggncaannatgacanaagcnccantctctccaaaaatacannggttggccgggcatggtggtgcacacttgtagtcccagtaattagggggctgagacaggaggatcgcttcagcctatgagtttgaggctgcngtgagctgtgattgcgccactacactccagcctggatgacaggacgaaacctgtctcaaaaacaccaaaaaacaaaaaccggtctcctggggtcatggtagcacaaacgcacatgactgagtgctcaggggttctgaggcttgtccgctgacctggggctctggccctgggagatctgggggacctgctgtcctatatgtgatgctttganngacnggggcatcattccaagncaagaggccccagagagggcaccgtgcggtgttcaggcttctgtgaggcccagtgagatcctgtggctgtgccccatcactccaccactctgccctcccactagcttgccaactggatgaatcaacgccttggcagagttatccagcagggccttgccagagagtgtgtgtgacctgtgtgcgcactgccttgagcgaccggttaccgagtaagcttgaacattcaagcgtgagcctattgtcctgttggcagttcagggccaaaccaggaatccattaggcgacccatgggcaacctttctgaccaacaactgtggctgcatgggaccgcgataagcgcccatgccctacgcacaccccgacacaaccc

SEQ ID NO: 503890 - DNA, 108 bp, Homo sapiens
cacgaggagaacctgcagtcctttaacgagatcactgctatgaccggcgatggagtgaacgacgcaccagccctgaagaaagcagagatcggcatcgccatgggctca

SEQ ID NO: 503891 - DNA, 224 bp, Homo sapiens
acaggctctcaaggagtttaaactttactccgactaataggtttttgatgacttctagcaaggcttgctaaccgggccttactctcgactattaacctactgggagaactatctgtgctagtaaccacgatggacggatcaaatatgactctactacttacaggactcaacatactagtaacagtcctatactccctttacatatttaccacaagacaatgagg

SEQ ID NO: 503892 - DNA, 870 bp, Homo sapiens
ctacttctctggcatatgctatctcctctcttcagtttcctttttttttgtaccattggccgaaagatggaaaaacagtctgacctgaaagaaagaagactgcaatcaagtgagagctaaacaaaagaaaacctaaactaatgtcattggaaacaaaagcttgaaagaaacacatcgcatctacatttgtaacatgagaaggaaaacaatttttttttttttttttttggaaacggagtcctcgcctctttcgcccaggcttggatttgcaggggccgcaatcctcggcctccacgtgtaatcctccgccctccggggtccagagggattccttccgtgcctaagcctcccaagtatgctggggactacgggcacacgccaccacacccagataattttgggttcattttaagaaacaggccgggggttcccccatgttacgccaggagggtctccatctcctgacctcgtagatccgaccgctttgtcctccaaagtgcggggataacaggcatagagccatggggcgcggccagataagcttcaaggggtcccttcttggcttaagccttcctgacaaacggtctatctgggccacgtcaagacaaggagtaatagcccgcggttatgggttacgtatttaccccaaatagcgctaacaattcaacttccaggtaccctaagttttttacatacagaattcggcattgtgccactaataatttccagattctaataacgccggggtaatccggctaaactctgtcagctcacaatttttacattcaacacaacgttgaaacttaccctgcttggatcaactttcggactgcaatataacgcttataggccggaggtaatgtgtcccca

SEQ ID NO: 503893 - DNA, 595 bp, Homo sapiens
  misc_feature (336)..(336): n is a, c, g, or t
gatgtgcagctgatcaagactggagaccaagtgggagcccagcgaagccacgctgctgaacaagctcaacatctcccccttctcctttgggctggtcatccagcaggtgttcgaccaatggcagcatcctacaaccctgaagtgcttgatatcccagaggaaactctgcattctcgcttcctggagggtgtccgccaatagttgcccagtgtctgtctgcagattggctacacccactgttgcatcagtacccccattctatcatcaacgggtgaccaaacgagtcctggccttgtctgtggaagagcggagttacaccctcgtctccacacattngcctgtagaaaagggtgcaaaggcctctctttggctgagatccacatctgcctttgtggctgctgcccctgtggctgctgccacccaccacagctgctcctgctgctgctgcaagccccacagctaaaggttgaaagccaggaagagtcggaggaatcggacgaggatatgggatttggtctctttgactaatcacccaaaagccacccacttagcccgttttatttgccaaacaaggaaataaaggcttacttcttta

SEQ ID NO: 503894 - DNA, 728 bp, Homo sapiens
cgcagggggcacccccccggggtaacccagaacaggggtaaaccgggcgccccagagaacccggtgagaagagccgcgccataggccgcccaaaaaagggaaaaaccctgcgcagaaatccaccaccgctgccgggtaaaagaagcgaccctcccaatgagatgagcggacttttgcaaccgatcaaggccaactacggcaaaccctcagcgtcaaatacttcgtggccaatactatatgcctttgcccataagctcaggaaagaagacaaaggatgtctattcgttgtcatttctaacaacactgtactggaggttctaccagaattaataagcagagacaataaagacatccagattgcacagaaaccgtgaaactatctctagtcacagatgacagtgagttctataaatagaaaatctaaaggaatgccaccccccacaaattagaactaattaacaccttcagccaaactgaaggatatagggaccatatactaaaagcaactgtaggctgggggcagtggctcaggcctgtaatctcagcactttgggaggccaaggcaggtggattccttgagttcaggagttcgagaccagcctgaccaacatggtgaaacctcgtctctactaaaaataccaaaacttgctgggcgtagtgagctgagatctcgccactgcactccagcctgggcggggcaacgcaagcgagactctgtccataaaaaa

SEQ ID NO: 503895 - DNA, 349 bp, Homo sapiens
atacagctaggagtctgcatctaggatacatccatgcctctgtgtggcttgatggctcacttctctatttaatcactgaatattattccatcgtacggatgtaccatatctgttcacccactgaaagacatttggttttcggcgattaggaataaagctgctataaacatttgtgtgcatgtttttgtggggacatacatttttaaatcagttgggtaaatatctaggagtatgactgctggattgtatatcagactatgtttagctttgtaagaaactgccaaactttcttccagagtgtctgtagcattttgcattcccagctgcaatgaacaagagctccttctgc

SEQ ID NO: 503896 - DNA, 859 bp, Homo sapiens
gcccccaccacctatgcctcctggggctgcatggacatggacccccatcggctaggaaccccagggcaggacatcctggtcatggacactcacatcctcacccattcccaccgggttgggatgccccatccaggatgtctcagatgcagcttgcacaccatggccctcatggcttaggacatccccacgctggtaccccgctaggctctgggggccagccatcccgcccgagcacccattctggtaatgcctcatcgctggagctcctccattgtgggctatgccctccccgagggctctccattcggatctcccatgtggttcactcgcaggtcctatgtcctccgtcgatggtatgcgtggagctcctccagtgatgcgggcccatgcatactgtcggccctcctatgagccccctgccctaatggactcaccgctgcgtgcgccctgctcccatgcacatgctggaccccacttgccacgcgttgtcacccagtctacccgcttgcgggggcctcccgcggtcgagcagtcgcgggaacaaccgttggtgaagtcgacccattgggcagaatcggctaccgattctcgctagatggtccttgtggacgcagcctgtgactggatccccataggtgtccctgcttctgaccgtgagtcccgcgtatctcctagctagtcatacaatccccaactgcagggctcccgtcgacactgagtcatctggactgggaaggacccgtctttctgggctgggtgtgaccacgcagggttctgggccaggccccatgggagaagcagcaaaagccggtcttcacatcctgccagcccaacagtcagcttcttgctccctagcccc

SEQ ID NO: 503897 - DNA, 343 bp, Homo sapiens
ccaactttccagataaagtattgtaattatatacagactttgatccggtaatttccattctcccttgtctcaatagtcagatgtttaagcagtgatttatataacagataaaatatatacatagaatatatcattcaatactttaagtgttcacaaactttgtaatcgtttatttctcaaagcaacagtgtgttagattatatggatgaggagactaaggcatatcctgtcaaggcaacatagttttggaatcaggcttataacactttccaggccagctacagtcattttagtcactacgctactttgcttcaattctactcatcacagtgtctctatatag

SEQ ID NO: 503898 - DNA, 155 bp, Homo sapiens
ccattaagtcctgtgacgggtaacagaatggaaacaggcctatcaaaaataatcacgtacagagaaaacgtactcagcactacaattgggcaatggccctctgatcttgaattccagctaccagaaattcaaggacagcagccggctcccccaca

SEQ ID NO: 503899 - DNA, 217 bp, Homo sapiens
ttcccttttttttccccaattttctcctggtttttgggcccccaaggaaaaaggggggggggccccaaaaccaaaccaagcccccccctttttttcccccccccggggggttttttggaaggcctggggccccctaagggaaaggccatttaaggtttttttttttttttttccagggaaaagggggtccaaaaaaattttctggttttggctttta

SEQ ID NO: 503900 - DNA, 134 bp, Homo sapiens
cgcactcgacactaccccccagcaggtcctccgactcccactatagtgtgtgtgtgtgtgtgtgtgtgtgttggggcaatgtgcaaaatcagcatgtggcacacccatcagtttccttcagcaccaagcagtca

SEQ ID NO: 503901 - DNA, 976 bp, Homo sapiens
  misc_feature (728)..(728): n is a, c, g, or t
ggcgtcccccacatggaatctgtcattacaaacaggacgggattcatttgcctggaacctctaaaaaaatggctacaggagaaacgttatcgccaagagaccttgctatctagatataggcgcccatcaaaatatacgtaactatctgttaaatatgaaaatataggaaaatttattagttaatctgagatgggcctaagacggggttttttggctgttttttgaccaatttgaattcaggtttaaattcctactcgctccagctcgtcctagcaaacgagcacatgtgcagagaagccagctgaatatgagcactcgtatttccaacgactcaacatatgctgagtgcgatatcgagatctgtgcgcaaccttcgaccggaccccatcaatacataaatcgtattcttcgtctcaaacaggcacccatgagtgaaagaaacagccaacgtggttcttacccaattaccatgtggaaaacgacctttactatcttggataacagtcaaagcgtaaaccagagcaggggttagccccctgtcagtaatggcttttcgctgacgcgttgatacttcgatatccaatattgcccaatcagcaacaagacaataggcacgggaaggaaaatgtagggtggcgagcgccacggcatcggcgtcagcgagtgggcacccgtttatcttctcgcctgcggaaagcagtgaggtaaaccctgccaaattcattcgntcctccggccgatctgtaatccgacttgagcgagaaccgtgtatcagcatagctcgcaactgattacctagttccgatgccgacgaatagcaacagggtcatatcccaccttgcttctctactctcgctttaagtcgctgaaggggatgatttctgttggcggcgtcaccgtaccaagtggtttgcgccagtaacccacgctatgccattggccgtgtttgtacccaacctcagggtaagtaccgata

SEQ ID NO: 503902 - DNA, 1213 bp, Homo sapiens
gatctgagaactcagtgttgaggaaacttcaggcaatctcgggaggttacagccgagagcagtaagtctacatgggtgcgtcctagcatgtcatttcttaaacgacatgattgcgtgtaatctgcactcatgttcctcctcgatctcatattcgcgcgattttatgcgctgcataagtctgttacgtcgagcgaacatatccgcatcgttatccggtgattgtcatcgtctcttaggctagcatagggcagcgtgatgcgttgcgcacttagtagagcacgcagggaagctgtttgcatggacaagtgcgaggcaatgtcacttgtgtcatttgcatttcgatggctatctgtgacttctagagtcgtaaacattgtccgtgaggataatttagggctttagcaaaaggttatatcatgcaaggtgctagattgagtttcgatattccccaatgctgtctttatacatcgacaccttgcgcacgatagcatctctgcatattgctcgcaaatatctaaatttaattggtatcgaagttgaatgcttggactatgcattcctgcgtcctggcgccacacattggaatctggcgtcgcaacgccttggcaaggaacgcgaaaaatgcgcgaggcgaaatatggggtggcgtgcaacaaccatggtaccttgggaaactccaacgtctacaacagtcgtaagcagcgtcaattaattctatgggacgtccgagtgggataaaactggccccttaagaattaacggagtgcctttggaactaatatggcacgtcggtgtgcacactctttttccggccttacctctgggatatattacgattccacatccccgttcgctctcctctgcaaatttaatagcaaccttttccacgcaaggaaggacccccaacataaatcaagtggcatatacttacactttcttgacccagcgacgcatatgcgtggcgccagcactgggtatcaagccatcggcacttttcatgttggcaagacaatttggacgtttggctcacacataatcacaatttgacgggccgagtccggccacttctgtcttaaaaaattacacccctcggtggacttccaacaaccagagcgggcagggctggctttgcaagcacgaacaaggcagtttttatcgcaagtcgcagtaccttgcacaaccgcaatagccacgtatcaggtcgaattcggac

SEQ ID NO: 503903 - DNA, 338 bp, Homo sapiens
  misc_feature (47)..(47): n is a, c, g, or t
  misc_feature (136)..(136): n is a, c, g, or t
  misc_feature (146)..(146): n is a, c, g, or t
  misc_feature (161)..(161): n is a, c, g, or t
  misc_feature (277)..(277): n is a, c, g, or t
  misc_feature (293)..(293): n is a, c, g, or t
  misc_feature (309)..(310): n is a, c, g, or t
  misc_feature (318)..(319): n is a, c, g, or t
  misc_feature (323)..(323): n is a, c, g, or t
  misc_feature (326)..(326): n is a, c, g, or t
ttcaacattaatcaaaaaattcctccatctacaaaaatcaacctatnccattaaatacaaccaaaatcataaaatacaaatttcattatttctacttaatcttgaaattcattcactaaaatacacaaggaaaaanaaaaattttncccttttaaaaaatnttttttattttttaaaaaaacttcttaaaacctcaaacatcttttatttttctaatatcctttacaaagttattttatacaatctatactgattcaactaaaatttaacaagcagntggctggcactagtcnccgctcggggtagcanngtattatnnttcnaantacagtttaacc

SEQ ID NO: 503904 - DNA, 112 bp, Homo sapiens
acacacaacgggaaagaagaggggttaacgggaaaagaaccagaagcccaagcttgaccgaaagaagaagaaaaaggcggctgccctgctcctgaggaggagatggatgaat

SEQ ID NO: 503905 - DNA, 431 bp, Homo sapiens
  misc_feature (420)..(420): n is a, c, g, or t
ggacaagcaccttttgtattcacacactttactatacatatcacagtcatcaaattacatacttttataattacaggttaatgtaaaagattaaaatcttgaaactataaagtatatcattctttctttctgttcccagcacttagcatagtatctaacccagtatatctcaaactggctgtacattagaatcatccaggaagctttatgaaaaatactgatccccaaatactaccacaaaccaactgcatcaaaatctctggaaggtggacccaaataccagtatgttttcaaagcttctccttgactctaatgtgtaaccaggttgagaaccaatggtttaaatcagagcaggtgctcaatacatgtttactggatggatggagggaggaagagagaaagggagaatgatgaaggcangatctagaagg

SEQ ID NO: 503906 - DNA, 389 bp, Homo sapiens
  misc_feature (39)..(39): n is a, c, g, or t
cctaaggcaggactcctaatcctgattgtgggtcaaaanacccgattcccagaggggtccttataggaaggcatgcccacacagagaggcccaagaaaagtctgaggctgggcaacagatgtcacgccctgtaatccccagcacttagggaggccaaggcgggcagatcacgaggtcagaagttcgagaccaccctggccaatatggtgaaaccccatctctactgaaaatacaaaaagattagctgggcatggtgacatgtgcctgtggtcccagctattcgggaggctgaggcaggagaatggcgtgaacccgggaggcagaggttgcagagagccgagattgtgccactgccctccagcctggacgacagagcaagactctgtctc

SEQ ID NO: 503907 - DNA, 339 bp, Homo sapiens
taccatcaagccatgtagccttgtgcagatcacttcagcatactgaaactttagtacgttatgctataaaatggggacgaagactcgcccaagctgcctcaggggtatactgcaattaaggaaggttacttagaccataatcatcagaagaacttaggaactcgattgaaatgcacattcttcagccacatactagacttacaggatcagaaactctgatgactgagggtagcacattgtgtagtaccaagccctccaaccgaagctgatgcaagcttaagaatggtgccaaggtcacgtgaaaccccctgtacaactacaaagaggtactgacatgag

SEQ ID NO: 503908 - DNA, 269 bp, Homo sapiens
ccgcactgccctcctgacgggacagacgcctggcacccactaccagctggatgtgcagctctaccactagggagctcctgggcccggcctcgccccctgcacacgtgattgtgggccccagtgcgccttcagccctccgacagctatacgcgctgaggcgtcttagactccgagatacagctgacatggaagcacccggaggctctgcctgggccaatatccaagtacgaggatggatgtgcacgtggctgagggtgcaggagacccac

SEQ ID NO: 503909 - DNA, 122 bp, Homo sapiens
taggctaatgcactcggtcacttcacgtttgtcatgtcattacctgtgtatacttctctccagaactgttttaaaaagcaaggtggggccggctttggtggctcacacctgtaatcccagcg

SEQ ID NO: 503910 - DNA, 256 bp, Homo sapiens
caggccagggggggattttaaaggaatttttatattaatggatttgttttaatgtgaaaaccaaaaaaaaaagcccgggttttttcccgtccaaccaggaaacccctttggaaaaaaaccccgagttccggttgggggcttaaaccgggttttgttatcccccaaaaaccgaaaatgttaaaatcccccggttgggtttgggtttagaaagggctttttttcctcccccttaaaaaaggggggtttgggtttttta

SEQ ID NO: 503911 - DNA, 403 bp, Homo sapiens
tttttccccggagtataaaagagaaaagtcatccttccttaccatgggcatatatgggcaaaagtgggttgtccttctctcttcgtcaatgttcctaaaacctgaaaaagccaaggaaatatttagttggcaaagttccagagaattttcctaagtgtatatggatgaattttgtcctggtcaacatgatgcagagatcacacactttatttttatttttattttcactttcactatttattacagcagggaaatatgtaagtatcagtgtttgaggtgatatttctcctactgaaataccaagtactatagaggaacacaaatacaagtttaaatcaatgcttataccagtaactagtaacaacaacaataacaaaatctctgcaaaaggggatttcaacca

SEQ ID NO: 503912 - DNA, 1073 bp, Homo sapiens
gatcggggtggctgcaggggcgtgagcggcggccgccatgaacaacagctccactcgcgccggacacagggagcagcgagcacgcgtatcccgcaatccgataccatcggacaggattcgtaccgcctcagtgccgaagcaggggagatctcatggaaacgatgggcatacagaacatgttaatggaaatggtactgaaggagcccatggatactgacgttcgtgcagttatcacgattctaggaaaattttcatgactattgcttgatgctggtgttaccagagaaagttgctgaaaaagtagatgaaatttacgttgaagggctaggttgcacatagtgactgtaagatgaaagagctattgaagactttaaaagaacttcgaggtgatgacggtgcacttggcaggtcgtgcaagacgcttttcatacgacagctgagtgctctctcaatgttcagagacaatagagatgcctggtagatggtgggaagtccactgcaaggactgtcacaggctagcagaaggagaataacgacacgggaccaaaggtacgcagcatgtcgtagtgagaaggagccacgatgacgggcgaaacaaattacagggtctaactctctgtgaaaacgaaaccatggctaaggcagcaagcatggaattagtggaactcacatgcgaaccagaagggaacacgctcactgggacagagaatcgacgctgccgagcaattccacagtgaagaatatccacggctgcagacaggtcctatccttggagaagggctaacgtaagagcaagtgaactctacggcgggggcggaacacaggcacctgccccactcacggatcgcactccctaacattacggaaggaggagaatgcacaagcccgctgccggcacccagtggcactccgtgcaacggaacacacaggcgtggccaatgccagaccaatggggggcacaacactgtaccgcgcgcgcaaaacccgagagggcggaacaccgcggacgtgtccagccacgggggtcacatcacagacacgtgcacgggtgtacaccgccggattaagattcc

SEQ ID NO: 503913 - DNA, 225 bp, Homo sapiens
ccattgagcgatgaacctgggaggcagagcttgcagtaagccgagatcacaccactgcactccagcctgagtgacagaacaagactccgtctcaaaaaaaaaaaaaaaaaaaaaaaaaaaatttccccaagggggggggttttttgggcccggggttttgaacgcccccttagacaagatgggagtggcccctaatatggacccctcttcttctttttaaaaacc

SEQ ID NO: 503914 - DNA, 180 bp, Homo sapiens
catggatttgctggtgcagtacaactaggcttaatagggacatggtggtgtgcacctgtaatcccagctacttgggaggctgaggcaggagaatcacttgaaccgcggaggcggaggttgcagtgccgagatcaagacactgtgctccagtctgggcaacaagagcgaaactccgtctca

SEQ ID NO: 503915 - DNA, 450 bp, Homo sapiens
aagacaataaatatccccaacgctttctcttaatcatgtagaagaagatcgagaggttaaagtattatggggaagaatgatttacagcttagacacatcaagagacctgaggggcgcaagccgagcgacgtggcgcacaagagcatcggggctagctggtggttcggctagcagaagcagaacggtctgagcctgggccatagcacgtgtcgggaagaggtcttcgtggaggcctcgtcaggcacagaggacattgacagtctagaagatgctgtgcgtgccccgggctctgtatgaggagctgctgagcaactaccagcagtaacaggaatgagatgcgccacctccagcaggagctggagcggactcggaggcagctggtacaacaggccaagatgctcaagaagtacggggcacttgtgtctgaaatgcaggagctccgtgacctta

SEQ ID NO: 503916 - DNA, 573 bp, Homo sapiens
ggccgggcgcggtggctcacgcctgtaatcccagctctcagggaggctaagaggcgggaggatagcttgagcccaggagttcgagacctgcctgggcaatatagcgagaccccgttctccaaaaaaaaaaaaaaaaaaaaaaaaaaaaagtgtggggggcgcgaccgggccccggaaaagattttaaacaccaagcggggggggcgcgcgggggccccaaggggacagggaaccggggccaaaacgcgggtcccaaaggaaaacccggggcaagacacaaagggcgggggtttctccacccaattaaaaaacgcgccgggggggcacacccggagcggttctggacaaaatctccaaagggagccgggaggagacaaaaaacggggggacctcctatctcacacgagggaggcccaaagcggaaaagccccaagaattctccaaaatttaccgcccgcggaccgggggggaagcaccaaataaccaataacagaacacaaccacaacacacacacacacaccagacacacaaaaaaacaaaaaaacaaacaccctacacacaaaaacaaaagc

SEQ ID NO: 503917 - DNA, 290 bp, Homo sapiens
ggctgatcaaagcgtatgctatatcaagaaaactggaaaaggacataagcagatctataaccaatagcacagctaacagtagacccccgtgtcaccctgaaggctggtggtaccctgctagtacagtgtaggctctctcatatggaaaatggtggatgcaagatacaaggaaatacgagaagagtacagagggctcaaggtaccaggtaggcagaaggatatagctaacccaaactacaactagaagcgggcccatacactaatatgctagagcatatccagcaaatcca

SEQ ID NO: 503918 - DNA, 218 bp, Homo sapiens
ggtcaggcactgaagcctggtcaggcactgaagcctttaccctgggcctggtggtgtactgagtgctttggggctgttaactcctttaatcctggctggtgcagtggctcacacctgtaatctaagaactttgggaggccgaggcaggaggatcgattgagcccaggagttccagaccagcatgggcaacacagaggcttcagtgctgaccagggggt

SEQ ID NO: 503919 - DNA, 538 bp, Homo sapiens
tggatgtcatttggtgtaagggcccaaactgctgcaaacagaggggtgatagcgcctaagcttagtgtaaagttgggattagggggctatttctgctagggggtgaaagcggatgataaaaaaatcccggctacaactatagtgctggagtggagtagggctgagacggggggggggccttctatggctgaggggagtcaggggtggagacctaatggggctgattggcctgctgctgctaggaggaggcctagtagtggggtgaggctggataagcgttagaagggctattggtgggggtctcatgagtcgagtgtaggaaaaatcagcgctagggcgaggatgacaaccgatatcgccagatagggtggaaacataggatcgctcgaagagctgcggtgtggcgcatctgcacgggcgtatcaaccaaccggactgcgcaagaagcgactataagtcctcacgccctctcagccgatgaaccagctgagcacataggtggcacgcggaacctaacgatagcatcggaacaggacga

SEQ ID NO: 503920 - DNA, 265 bp, Homo sapiens
gatcttgccttgtaaatgtcatcttcctgaaaagaactaggacctttcagaaaaaatggctgattccaggctggcagagcacatgatgagtcctggagcatgttttgcctacacagtgacgagggcatgtcacagaacacagagtcagcctgaagggcttcatccacccatcagaagcaatttggctcgtgataactgacaaaacgaaaggatatgacttgtttataaaataggaatacaaaatacacacaggtgtagatataca

SEQ ID NO: 503921 - DNA, 419 bp, Homo sapiens
  misc_feature (1)..(1): n is a, c, g, or t
nagattgaatgattctgcccttgggcagagctcccaattagggaggattaggtaagctttttgtggcgatgggtaataccattcttttcctcattgtgcctgttttttgtttggatattttttcccctacgttaagtgaggctgaagctggacaatgtgattttcagccctagcttgacgtgtctgacctgctcccaggaagatgaaggatgtacgtcatctttgcattgcattgcatggtacacaaactgtacatggtcttcctgccttccatggcagaaaaggcggcaaagggttataaacactggggaatgggaatcaagtttttcagtggtttctggagtaagaacttcattttataatagatttctgtatacacttgagcaaggtgtgttagcaattaggagttttgcaaaaaa

SEQ ID NO: 503922 - DNA, 826 bp, Homo sapiens
cctcacctgccatccaccttcaactacaaccctgctcagcaagcttcctaaaaaaaaaaaaaaaaaaaaaacaaaaagagattctccctttttcttggggggattggggcgggtctcctccacgcccaacatcacttcaacattacactcttggcgagaactacggttggtggcgctcaggcgccccttggggtttaaattccctttggagggactctggcgcacattggggttaccgcaaaaggtgtccccaattaggagggctccgtggcgatacctcaaacttatttctggtgtgcgtggcgccaaccaacctttaagatttgagctgcactacgaggtgttgctcttcaatagaggtttttggagccgacgggcgtcatgagaacttttctccacactttataaagtcccccctattatagtgggcgcaacgacggcagaaccagggactattgcggagctcttggtgaccacgacaaacgaggccaaatatcacccctgtggagccagagaacagttctccccaacgagaatgtgtccataaaacgagtggtcagacaatcgaaagaaagccccccccaaaagagaaactccccgaccgacagatgtctagaccacgccacgaaatcttttgtgcaccgtgggcactcattgcggtgcgccaccatctcgggggacagacacaccactgtacacaccaacagtctgttggtgaggccaacctcataccgagcgtgcaaaagaacacacctcaacctacgcggatactctccgccgattgggggacaaaacgttatctggtcacacaaacgaaggcgtcttg

SEQ ID NO: 503923 - DNA, 167 bp, Homo sapiens
tttttttcaaaaaaaaaaatgggggagggtaaaactattttccaggggtttggtggggaaaacggtttttaacaaaagggttaagggttcttgggccaattttgaaaggttcccccgggaaaaaaggggggttaaccgggatcaataaatcccttgggataatttta

SEQ ID NO: 503924 - DNA, 154 bp, Homo sapiens
ttcactttctctctctcttgctcccactctctaacgtggatgaactgggctttccccttgccttctgccatgattgtacacttcctgaggccttacccagaagctgaacagatgcctggcaccatgcttcctatacagacctcacagaaccgtg

SEQ ID NO: 503925 - DNA, 985 bp, Homo sapiens
gggccgggggcctggtgggcctgggatggggaaccgcggtggttccgcgggaggttacggcagtggatccggggccggggtctgcggccgtgacggggcgggccgagcgggaagtcgcgaaggaacgcgccgggtaaggagtggttgcccgtcaccaaaggtttgggccggtttgctcaaggacctctgaagatcactttccttggaggagatctattctctttcttcgcttgcccaattaggggaactcagagatcaatgatttcttccgtggggggcctctcctcagggatgagggtttggaagattatgccgagtgcagaacaaagaccccggttgcggccagcgcaccaggttcaggcattggtcgctatcggggcactaccatgtgggccaccgtcgactctggggtgtaaaggttgcctccaagagaggtgtgacaccgggcaattcgcggttggggccaatacaatccgtgggcccaaagtcttctccaattcgtcccccctggtggcgacaggagggactacacgtgcgcgagacacaagaatcgggaaaaggcccaaatttggtcccttgcaaggttgagacagggccggctacgggcttctgtgcttgggtacgcctcaatcctatgcacccaagagccagtgggtgtctgtctccgcacgtgttgccttaaaaaggctgcaccatgatgggcaggacttcgatggcttgtaacacctccagccggggcgtgcactgcaacccgttgggaatttcgtcaaggcccacttgattgcatttttaagacctagaggtacttacccccgactttggagggactttttcaccaggtcccctataggagtcactgcacttgtaagaccacaccaagtttcgtgcggggacagctccgatgggcacacacggttttaccacacacaagtgcttcggtggaaaaaatcatcatatattatagaagaaagggggggatacaggg

SEQ ID NO: 503926 - DNA, 265 bp, Homo sapiens
ttgctgggggctacaagtcaccaccgtgctgcaacgtaataggatgcaccagccacacatagaagtcgtgttgctgctgtttacttcccaagtttcgtcttcagtttacagggcttgaggaaagcatagcttagatatcagtgatttccaattaggacacaggacacaaaaaaggaaaaaattgacgacaccgtactttgggtgtactactacgttttagaaaccaactttttttctctatagaagagggagtctgggctcttgt

SEQ ID NO: 503927 - DNA, 1323 bp, Homo sapiens
gcaggcgtgtgccaccacacccagtaattttatttctcatatgtagatacaaaaggatattcttaaaatttttatagagacagggtcttgctgtgttacccaggactggtctcacactcctggcctcaagtgaccctcctgtctcagacctcccaaagtgctaggattataggcgtgaaccaccacgcccagctggttcctgacggaagtcagtgtgggaatacttttttattatatatatacggagtctcgcatctgtcacccaggctggagtgcaggtggcacagatctcggatcactgcaagcctccatctacacacaggtacacgaccataaacatacccgcactacaacctacccagagaaaagctgggaataacaggtaacccacacaacaacgccacagctaataatcaggctcggacgtcatataaaagcaacagaagaacggcgaatatacagacatggtgctataagacacaacgagaggcgacggaggcacaccaacacaagcacacaatatgcggaaaccagtgcacgtgagcacaccagagcagcactcaccacaaaaggagtcagagaacaaaacagaacgcaccagcaagccaaccgagacgagcaccaacacccaaacagaagcgaaaaataacacagaggcatagacgaaaaaatagccaagagaagccccaccgaaatacagcaaaacacacgcaagaacaaaaacgcaaaacacaacaggagagcaaagcaagaacaaaaaaaagcgaagccaaagcaatgaaccagagatgcagaacaaaggaagcgaactcacgagaccacaaagcggacgaagcataacccgacaggataacacacaacaaagagaaaacacagatacgaacatagagcaacacagacacaacaacaaccaggaggaagaacgaataacacataacagagaacccaaacacccaggaaaacgccacgacccacacaatcaaaacaaaagacgaacaagccaatcgagcataaagcagacccaggggcgatgagtgagcagagagacacaaggaaactgagcaaaaggcgaaacagaaagcaggtgcgagactgtatacctaatgtaaccgaagcccccgcagctacgacagagagggacagcaaggagcgagccgagtagatccacaacctcacaaccggacagtaaaaagcataagcactgatcggccaacgacacgcaggagcagacacaataaagaaagaaagggagaagaaggagagagaacaaaagacaaacaaagagaaaaacataagccaggacgaaggtctaaaatgacgaat

SEQ ID NO: 503928 - DNA, 440 bp, Homo sapiens
  misc_feature (13)..(13): n is a, c, g, or t
  misc_feature (44)..(44): n is a, c, g, or t
  misc_feature (46)..(46): n is a, c, g, or t
  misc_feature (70)..(70): n is a, c, g, or t
  misc_feature (75)..(75): n is a, c, g, or t
  misc_feature (97)..(97): n is a, c, g, or t
  misc_feature (106)..(107): n is a, c, g, or t
gggggtcccaaanggccccatcaagggggaaaaataatcactgngnaatggatggcacacattaaaggcnctggngacaaataaggatcctcagaangctccttannaggttttatcctgaacatatttccctttttccagaatagggcctttttgtgctccctagcatcactttgcagattacaaaaaaacagtgtttcccaaacagctcaatcaaaagccacatttaagtcagtgagatgaatgcacactttacaaatcagtatctcaaaaagcgtctgtcttgattttttccaaagatatttcctttaacaccataggcttcaatgtgctcccaaatattctgttgtagattctacaaaagcaatgtttccaaactctcaatcaaaaaataggtttaactctgtgagctgaatgcacagctcacaaagcagttcctc

SEQ ID NO: 503929 - DNA, 404 bp, Homo sapiens
ggctgtgtctagaggaccccgagggtgcttcaagatgaggaagttactacggagtaggtttatgaaaatagagtttccttttaggaaaatggtctagattcagaaatgtcgtctagaacaagcatttaaaaagaactaataaataatcataaatcaggaatacattaaaataaaattacagtacatcatcgctcctagaacattcaccatacaagacgatcctttcaaaggttcataaatgaaagtcttcttgactcgaaatcgtgtcctgcgtcgtgatggagagtatacagaatactaagaagagtcgcaagttttcagtagggtgatgtccaaactacttgatctggtgcggggcggagagactgtctagcttcggatccaagtgaagactatctatcttc

SEQ ID NO: 503930 - DNA, 284 bp, Homo sapiens
tcacaggattatgttagcagcgcagcacatccatcccgtaagtggaataaggctgttgtccttgcagtggatctgatttggacacagcagcaatttgtaagtgtacccgttccttattgaaaccaagccaaacccaacctgagccttggacaccaacagatgcagccgtcagcttctccttaaacttgtcacaggaaccaaagtcacgtatgatggcttcagcaacatcccttgggttctccaccaccgttagggatgatgtatgccagacaaatgctactgat

SEQ ID NO: 503931 - DNA, 394 bp, Homo sapiens
  misc_feature (394)..(394): n is a, c, g, or t
ggtcaggggagacctccaggcgcacggaaggacggccagagtgacacggaagcatgcgacgggtgctgatccctctgtccctgtggctgtgtgcgcggggcgtgggcgtcgccgagctcacggaagcccaacgccggggcctgcaagtggccctggaggaatttcacaagcacccgcccgcgcagtgggcctttcacagagacacaagtggagagcgccgtggacacaccctttccagatggaatatttgtgagggtggaatttaagctgcagcagacaagctggcgcaagagggactggaagaaacccgagtgcgaaggcaggcccaatgggaggaaacggaaatggctgggctggattactgggctctgaggcggtctgggccgcgtggtcn

SEQ ID NO: 503932 - DNA, 177 bp, Homo sapiens
  misc_feature (44)..(46): n is a, c, g, or t
gcgtcctccctagcaaatcaatattggaccctttttgttgaagnnngggtctctgttgggtgtgatttttttcccaggtgtgttccctttttcctcccctagttgttccttaagttcctccctccacagggatacattctattttgggcttgtatgtttaattaatagttagaatag

SEQ ID NO: 503933 - DNA, 112 bp, Homo sapiens
ccggcccggattaactgcttatagagcctgactacatcttctaagtcagtcacatagatatatgccagaatgggatgagaatgtgagctataattttgagaaactgaactcc

SEQ ID NO: 503934 - DNA, 416 bp, Homo sapiens
  misc_feature (12)..(12): n is a, c, g, or t
  misc_feature (46)..(46): n is a, c, g, or t
  misc_feature (307)..(307): n is a, c, g, or t
  misc_feature (403)..(404): n is a, c, g, or t
  misc_feature (408)..(408): n is a, c, g, or t
ctggaaagcctncctacacatgttgaactgcctgacgggaaaaganccccagtagataaatcctaggctttcccactcccatatattagctgaggcaggagaattgccttgaatctgggagacggaggttgccgtgagcccaagatcacgtcactgcactccagcctgggcaacagagcaagctccgtctcaaataaataaataaataaactaataactaaatgttgtaacacaaaagaggatgaatgcttaaggtgatggatatcctgtttaccctgatgtgattattacaaattgcatgtctgtnccaaaatatctcatgtacccgataaatatatatacctactatataccgacaaagttaaaaatagaaactggaagacaaaaaataaataaaaaatannattnagcttctc

SEQ ID NO: 503935 - DNA, 101 bp, Homo sapiens
cagggaactgtgggatgttcacacaaccagtcatgttcccacttccatcctgtaactaactgtgccaaaccagggctgggagtgaacttgttttgaaggac

SEQ ID NO: 503936 - DNA, 551 bp, Homo sapiens
  misc_feature (386)..(386): n is a, c, g, or t
gtgaatggcaagatcctgtcaccccagttgggggttgttattagggccctgggccaaacccttcccccccgagggtgctcaaggtcctggggacccccaaaaatgatgaaataaatgtgaaggggggggcctttaggcccttttttccccttttccaaacagtggccaaaaacaagggcccgggccccttttgggttttttttcaaggactttgggggttttccaaaaaaaaaaaaggcccccccctggggggttaaatccggcctgtttttttccccctggggggaaaaattcccaaggaaaaaataaaaattttgggggccgggccttaggccccccatggttgtttcccctataaaaaggttgccccccaggggtttaaaggntgggggccttccccgtttccccaaaggcggggcccttccccgggggaattttgtttttaccccaaagtttccccagggttttttttttcaccccctttcccctttttttttttttgggtaatttttcccggcccccttcccccaaaaaactttctttttgggcca

SEQ ID NO: 503937 - DNA, 274 bp, Homo sapiens
atgcatcttagactgtcataaggataggtcatgctgaaatagatctgagcatatagagtcccaggactcagaaggcctggacaaatagaactaagatagaggcagaggcaggaagctgcgggtctatctggtacagcgtttagcatcactgtaagagtgtgtgtctgagattaaattaaactagaagcagcaggtgcgtatttggtaagtacttctgtgactcggctcaattcccactgggcagggggcttctcaactgcacggtgcatcaaga

SEQ ID NO: 503938 - DNA, 374 bp, Homo sapiens
gtaatctacgagatgcttcacagtatagaagagagatgtgtctaggttatatacacacatgctatgccgcttgtatatcatgccaacatcagtctccagggaaggtcttggaaccaatcccccatggatactgagggattactgtagttctttacttaagactgatctgcctgaggacacagaaagctattttccttttctacttttctctttcacaatggtctcttccgtcccactctagaaaataaagccctctatcacatccatctgcaatcttactataaagaaaactgaagcagagagattaggaaatgtactcagtcacccagttaacaatagatgaagcctaggaatcaatacttaggctgcaacaa

SEQ ID NO: 503939 - DNA, 207 bp, Homo sapiens
  misc_feature (18)..(18): n is a, c, g, or t
tgtgttcatgcatagagntcatctcaggtgggatatggttggatgtttgtcccctccaaatctcatgttcaaagtgtgacattcagtgttagaggtgggcctagtaggaggtatttgggtcatgggggcggatcccttatgtatgacttggtgccatccccatagtaatgagtgagttctcactctggtggtttatgcatgaacaca

SEQ ID NO: 503940 - DNA, 318 bp, Homo sapiens
attgattctttctgtgactcatcagttccttctccgtgttatattcatgttttgctgtacatttgtgaatagaaccagcagcttgtagaaaccactttaatcatatccaggagtttgcaagaaacaggtgctttacactaattcacctcctgaacaacaaaaatgggctgtgaccggaactgtccgctcatcgcaggggctgtcattggtgctgtcctgactgtgtaagcccgtatgctaatgccagttggagacctgcttatccagaagacaattaaaaagcaagttgtcttcgaagaaggtacaattgcttttaaa

SEQ ID NO: 503941 - DNA, 713 bp, Homo sapiens
  misc_feature (89)..(89): n is a, c, g, or t
  misc_feature (93)..(94): n is a, c, g, or t
  misc_feature (330)..(330): n is a, c, g, or t
  misc_feature (332)..(332): n is a, c, g, or t
  misc_feature (340)..(340): n is a, c, g, or t
  misc_feature (399)..(399): n is a, c, g, or t
  misc_feature (403)..(403): n is a, c, g, or t
  misc_feature (436)..(436): n is a, c, g, or t
  misc_feature (464)..(465): n is a, c, g, or t
  misc_feature (497)..(497): n is a, c, g, or t
  misc_feature (505)..(505): n is a, c, g, or t
  misc_feature (510)..(510): n is a, c, g, or t
  misc_feature (527)..(527): n is a, c, g, or t
  misc_feature (532)..(532): n is a, c, g, or t
  misc_feature (537)..(537): n is a, c, g, or t
  misc_feature (539)..(539): n is a, c, g, or t
  misc_feature (541)..(541): n is a, c, g, or t
  misc_feature (544)..(544): n is a, c, g, or t
  misc_feature (546)..(546): n is a, c, g, or t
  misc_feature (549)..(549): n is a, c, g, or t
  misc_feature (556)..(556): n is a, c, g, or t
  misc_feature (568)..(568): n is a, c, g, or t
  misc_feature (571)..(571): n is a, c, g, or t
  misc_feature (578)..(578): n is a, c, g, or t
  misc_feature (596)..(596): n is a, c, g, or t
  misc_feature (637)..(637): n is a, c, g, or t
  misc_feature (649)..(649): n is a, c, g, or t
agtggagagagaacgaggtgctgggagggatagagggggtctgcctggcccccagctgtgggtacagagaggtcaagcccaggaggacngccnngtgcagactggaggggacgctggtagagatggaggaggaggcaattgggatggcgctaggcatacaagtaggggttgtgggtgaccagttgcacttggcctctggattgtgggaattaaggaagtgactcatcctcttgaagatgctgaaacaggagagaaaggggatgtatccatgggggcatgggcatgactttgtcccatttctaaaggcctcttccttgctgtgtcataccngnccgacccngacctctgagcccctgggtactgctgcttcattaaccccagataagccactgccacacntctnaccctactccaccccatagctgaccagctgctntttccctaaaccaaggtgacctcttgcnntcccttcttactcacacacaaaatgtacccantattctangtatnccctattttacaattanctgangcacnancnaantnaanacactgnctcatattcctncancctggangccaggtgctcaaggctnacacatccaccccatacacccactctactttaactgagcanactggtaaacanacttgtgggatctgtacccatatatgggactggtatggcccctttcgtttctctcttccctctg

SEQ ID NO: 503942 - DNA, 150 bp, Homo sapiens
gaaggcactagtctagggaatggagggagaagggataccttacaaccccacgatcaccatattaccttggtgcgctctatccagaaatattttgaggcataggacaggcacactatagtcatactagtatctagtacctatgcttatcta

SEQ ID NO: 503943 - DNA, 103 bp, Homo sapiens
  misc_feature (10)..(10): n is a, c, g, or t
cagcctcctncgtctttctcgcttggatcttggcactgagtaggcggtggccgtcgggtatcggagaaaagtaggaatgaatcctgcccaatgaggtccggta

SEQ ID NO: 503944 - DNA, 689 bp, Homo sapiens
atgggatgttccagccgactggccccccttgttcccgtatttcccgagagcgcgcccgattttcgtgccccttttgcctctagccaggttcccccgttatataggatgaccactctcccgagacgtgggaggccgactccaggcccctgtaggtttattcccacccgagattagtgccccttctggggccttgagcttgagcttgggctttagagcttgggctccagcttttgacccctccaggccatcttccctgttccccttccctgtcgttcctcctccccttcgtcctctgctgccagccatgatttttttgaatcttccaggaccacctcccatattttccatggccacccagagcttacacctctctggtgccccgaccacaccttcacagagccacacttcactggcgctccctcttggccctctgggtggacacttggccaacctcgtgggctttgcccaaatgttgaccccggttcacaccaggggattttttttttttagccatgataatccctcgttctgggtcactcttttaaggcttggtgagaccgccccccccagagcttataattttaaaagtattttcctttgtttaagactgctgcttcctctgtttcattggattgtgcccgttatccatggctcttgggttccaagtaataaagaattcccaaactgga

SEQ ID NO: 503945 - DNA, 392 bp, Homo sapiens
agaggacaataatccaattctctgtaactttattgtctgaaactttgacttatttatgtttccaagggtctcctgatgtatggaaactcattatacaaaacttacttttacaaaatgaaagatcagggaattactctgtttttgttactctcttggccaattcatacatttttgtaaaaaagttttttaaaatcatgttcagggtcatatagggattaaaagtttaaggtttgaaatctggggggccctaaatttgacccacggcatcgccttttttggctgcaaagtttttgtcaggatccttaaccagtttgcttttgtttgctcattgggaagggggtcatgggggggatttgcacccaagcaaactccacaaagcatccccttaagcg

SEQ ID NO: 503946 - DNA, 1208 bp, Homo sapiens
ggcaaaattcagacttgagtatgtctttgaataccttaagaagttacaattagccgggcatggtggcccgtgcctgtagtcccagctacttgagaggctgaggcaggagaatcacttcaacccaggaggtggaggttacagtgagcagagatcgtgccactgcaattccaagcctgggtgacaagagagacttgtctccaaaaaaaaagttacacctaggtgtgaactttgggcacaaaggagtgacaaacttatagttaaaagctgaataaccttcagtggtggtactaaaacgtgggttccacaggctatgctcgtgatcggctgaaaagaattctagtttacctcaaaatccttctctttccccaaattaagtgcctggcacagctgtcataacattacatattccttagggttacattcacacaggttacctgttcacagacgtgacacaactacgatgttctgtctgaaggctaccatgccggatctggtaaatgaacctgttaacattgctgtatttgctccaagcggttactatcgaactgttacttaactaccaatattgctacttttttacaaattttaacctaatagggcagtggcactacgggtaaaagttagcccccacttcttagaggggccactgtttaagctcttcaccaattcctttaactggcttgaactcattggcaagaccttgcacgcacggctgagccaaccccttcgcacaattcgcggagacgtaaacacatcccagaccgggcgcgcgaaacaacttgggcaactatcaagcaggaagcacacatggggccaacccacaacacaaagggggccgcgcctgagaaccccggcactaatcacaagcgcgacagcaacagatcggggcgcaccgagaagagaacatcatagcggtgccagcaacaccaaaaacaagagcagccacacagcgtgcacggggggtaggtagtgttggtgtgaagagcatcgcatccagggcccgacggcagcgaaactaaacacacacgaacccagcacacctagacagattgaagcgaggaggcacagacgacacacaaaacaacaacgcacgccaagagcactagcagcagctaggacggacgaacaacacgagccgaccaccgcaaacaacccacacaacaccaacacaacgacgacgaaacaagtacacacaacagcgcacgcac

SEQ ID NO: 503947 - DNA, 1098 bp, Homo sapiens
  misc_feature (73)..(73): n is a, c, g, or t
  misc_feature (84)..(84): n is a, c, g, or t
  misc_feature (198)..(198): n is a, c, g, or t
  misc_feature (217)..(217): n is a, c, g, or t
  misc_feature (283)..(283): n is a, c, g, or t
  misc_feature (286)..(286): n is a, c, g, or t
  misc_feature (303)..(303): n is a, c, g, or t
  misc_feature (311)..(311): n is a, c, g, or t
  misc_feature (353)..(353): n is a, c, g, or t
  misc_feature (391)..(391): n is a, c, g, or t
  misc_feature (435)..(435): n is a, c, g, or t
  misc_feature (438)..(438): n is a, c, g, or t
  misc_feature (452)..(452): n is a, c, g, or t
  misc_feature (457)..(457): n is a, c, g, or t
  misc_feature (500)..(501): n is a, c, g, or t
  misc_feature (509)..(509): n is a, c, g, or t
  misc_feature (515)..(515): n is a, c, g, or t
  misc_feature (528)..(528): n is a, c, g, or t
  misc_feature (544)..(544): n is a, c, g, or t
  misc_feature (550)..(550): n is a, c, g, or t
  misc_feature (584)..(584): n is a, c, g, or t
  misc_feature (594)..(594): n is a, c, g, or t
  misc_feature (610)..(610): n is a, c, g, or t
  misc_feature (619)..(619): n is a, c, g, or t
  misc_feature (647)..(647): n is a, c, g, or t
gagcggagcgcatggacctgtgaggcgtgcgaactggtggcagtgagagacttcggcggacatggctcccagngtgccagcggncagaacccgagtatcctaaaggcatccgggccgtgctgcgtggggcctcccggggccggtaaagggacccaggcacccagattggcgtgaaaacttctgtgtctgccatttagnctactggggacatgctgangggccatggtggcttctggctcagagctaggaaaaaagctgaaggcaaactatggatgctgggaanacntggtgagtgatgacaantggtagtnggagctcattgagaagaatttggagacccccttgtgcgaaanatggttgcttctggatggcttccctcggactgtggagngcaggcagaaaatgctcgatgacctcatggagcaacgaggacanganaagcttgatctgtnattgnattcagatcccagactctctgctgatccgaagaatcacaggannggctgatncacccnaagagtggccgtncctaccacgaggagtncaaccntccaaaagagcccatgacacagatgacatcaccnggggaacccnttgatccgtcgatcangatgactanatgagaaggccttgaaaaatccgcctgnaagcctaccacactcaaaccacccactcatagagtactacaggaaacgggggatccactccgccatcgatgcatcccagagccccgatgtcgtgttcgcaagcatactaggcagcttctccaaaggcccattcctagtatcagaagggcaggcgagactggaagactgttcatcaacccggggagtgatccctggtctaacgtgctgggcagaagggcacggggggcaagcggacgcgaagtcaagaacggctggcgacgggggcccagggaaaccggggacccaccgcacgcgacggcgaagcgggacgacacaccacacaccgcacactcaacgtgagcggaacaacccacaccaacacccgctcagagcgcggcaaccacacgcacacctcgcaacaggaaaacggcggggcagaaagtagcacgcgcgcacgccatgcacgcctaca

SEQ ID NO: 503948 - DNA, 705 bp, Homo sapiens
ggggaatagaagggatgaggaaacattaataatagttattcaaaagacccaaatgcttatacttctctctcccttcttctctctctgacacacacacacacacacacacacacacacacacagcgtgcactattcctcccttatagtgctcatgtgtgccttaaagtgtgccttataggtaaatccagggatgagtgagggaatccctcgtcacgtgggagattgtgtatatattcttatattatgagattgagtgggtgtggggaaaaatttttcctcggtgagagggctcaaaaatgtggtttcctaaagagtgagccactatcagatgtgcacactcagggagaaagagaatataggggttaacgtccaattaggaaatctcccatgtgtgcagggagtgcagtcatatcaaaaaaacaagccagccagggattaaagggtattataaactcctcatagcggaactatttctcagggcaagaggaaccgtggctcatgtgaaagatgagtgtcccatgcctgtgtgggtcaaagcggtcagcacttaacagggggaaaaaactaggtgtggtggtgggttattggggagcaatataaaattcaggaatgtttatagagcctgggtctctagaaggaggggaataatattctggagcattactagggtgggcggggtggcaagtaattaagtctccaggttat

SEQ ID NO: 503949 - DNA, 1148 bp, Homo sapiens
  misc_feature (73)..(73): n is a, c, g, or t
  misc_feature (84)..(84): n is a, c, g, or t
  misc_feature (198)..(198): n is a, c, g, or t
  misc_feature (217)..(217): n is a, c, g, or t
  misc_feature (283)..(283): n is a, c, g, or t
  misc_feature (286)..(286): n is a, c, g, or t
  misc_feature (303)..(303): n is a, c, g, or t
  misc_feature (311)..(311): n is a, c, g, or t
  misc_feature (353)..(353): n is a, c, g, or t
  misc_feature (391)..(391): n is a, c, g, or t
  misc_feature (634)..(634): n is a, c, g, or t
  misc_feature (644)..(644): n is a, c, g, or t
  misc_feature (660)..(660): n is a, c, g, or t
  misc_feature (669)..(669): n is a, c, g, or t
  misc_feature (697)..(697): n is a, c, g, or t
gagcggagcgcatggacctgtgaggcgtgcgaactggtggcagtgagagacttcggcggacatggctcccagngtgccagcggncagaacccgagtatcctaaaggcatccgggccgtgctgcgtggggcctcccggggccggtaaagggacccaggcacccagattggcgtgaaaacttctgtgtctgccatttagnctactggggacatgctgangggccatggtggcttctggctcagagctaggaaaaaagctgaaggcaaactatggatgctgggaanacntggtgagtgatgacaantggtagtnggagctcattgagaagaatttggagacccccttgtgcgaaanatggttgcttctggatggcttccctcggactgtggagngcaggcagaaaatgctcgatgacctcatggagcaacgaggacagatgagaacggcgttgagtatctgtgagtcgagattgcaggcagtcgcccagaaactcctgcgtgactggaatcccggaagcaattcatgagggagagggtcggattcagcacactcaaggagttggcgcggtttccgtagccaccggaggaagcttcaagggcctctgaaaagagcccatgacacagatgacatcaccnggggaacccnttgatccgtcgatcangatgactanatgagaaggccttgaaaaatccgcctgnaagcctaccacactcaaaccacccactcatagagtactacaggaaacgggggatccactccgccatcgatgcatcccagagccccgatgtcgtgttcgcaagcatactaggcagcttctccaaaggcccattcctagtatcagaagggcaggcgagactggaagactgttcatcaacccggggagtgatccctggtctaacgtgctgggcagaagggcacggggggcaagcggacgcgaagtcaagaacggctggcgacgggggcccagggaaaccggggacccaccgcacgcgacggcgaagcgggacgacacaccacacaccgcacactcaacgtgagcggaacaacccacaccaacacccgctcagagcgcggcaaccacacgcacacctcgcaacaggaaaacggcggggcagaaagtagcacgcgcgcacgccatgcacgcctaca

SEQ ID NO: 503950 - DNA, 868 bp, Homo sapiens
gctgccttattgctgtaacccggcttgtcgagatgtcgaaccgaggacgtgatgcgtcctctggtgcgaaatgccggcattccttgggtctcccgagtaggagactgtatatctaaatggttgctgatgaacaacaggaagcacaataggaacactgttatatgatcatcctgtggaaggggatctaagggacgggtgaagagtacatgtccaacgtgttgcttggtgtggtatgatgaatggatggagtggacggagtcatggaaaggccaatgcaagtagctgagaatgaatggtacatacaaactagatgtggtcattcggacagaggaaaaggtcaatatcaggatgaaagaattatggcggtgtttcgttaatggtatgaacgatgagtgtcatggagtcagtatgtgaacaaattaagagggtgatgatgaacaggttctgggcagtatgacaagggaccagtatggaaaagggagtgtggaagatgatgtggggcccggaatatgctttactaggtggatgggtgcagttgccactgaattctccggtagtattgttgaaatgagtagcaaaaaggtgatgacccgattcaaaaatgtattttgtaatgctacgtacaaaaactggtatatttgcctcataactttgtttggtaaccttatcctgtccacagggtgcttccttaactggtctaaaagagtatgcctgtatcgtaactcaggctttcattcctccaagtttttttcccatgaatcttctggcatgatcgtaagcgttatttcccaaaatgataacgtagctgtcagttggtttcgccatattaacgctctgcatctgcttaacggtgccagggacatggtcg

SEQ ID NO: 503951 - DNA, 1193 bp, Homo sapiens
  misc_feature (1)..(1): n is a, c, g, or t
  misc_feature (8)..(8): n is a, c, g, or t
  misc_feature (10)..(10): n is a, c, g, or t
  misc_feature (623)..(623): n is a, c, g, or t
ncctctcncngcttgtcaacgtgaagaaagaaagcaatgactgacagaatagcggaagcgttagtgcgatttgtgtgactgcctctgcgcttgttttctcgtgttgatctcttcgcgcgagtgatcttcttgttgctttacgtctgctgcacgtgtggctttctggggcatatttactgtgatctcctcccatatctcgtgatcctgcccccccctgcgctctgctcacacatcgaagcttttgtgcacacaaccaaagaccggtgttatttggcacgcgggcacaatgctcccccccggctttaaaattctttcgcgaggaccccccaccccgtggcgactcttcccggtttagacttttggaaagccttgtaaaataataaagttgcttgggttctagaagtgcccccccttagaggacgacctggttaaaccatctagttctcgctgtgttagtgtcccctttgcttgaggactagggtgtgccggtgtgcctaccgttttcatcacgggaatccccccaaggtgtccacaaactttttgtttaccagagatgtgaccttccgaagtgaacccgagtccgtaattggtccccgaaaggaactctggctgtagactggccnctttgacactaggaaagtatttcccttggaaaccctttctggaaaattctccacgaggactggaccccctacccaaaccttgtgtttgccctccactaaccccaaggcttcacggttagaaatttagaaaaatagaaatggttgggtaccctgatctaaaatgtttaaatgctaaaaggtatatcgtaaagggtaatgtcttgtttttgaaccgagtaaatttatgaagtttctcactatggaaggcgtattaacactaggtcttcacgaaacctatttaaagaattttcaataatagtattataaatccactagacttaaatctgagaattttttaacactaatgccagtcacgcccaacacttagctatccccaatataagagccactgtgttctggctgttttatacttccaccattttttccctaaagtggtaagccattactttgtaaacatatttttataaaacatcggtatcgggaggctgccggtggctccggcccggttgtcctggcacaacaaaggaggcgaggctatgcgtttcgaggcccacctaggccaaattggga

SEQ ID NO: 503952 - DNA, 824 bp, Homo sapiens
  misc_feature (41)..(41): n is a, c, g, or t
  misc_feature (61)..(61): n is a, c, g, or t
  misc_feature (82)..(82): n is a, c, g, or t
  misc_feature (193)..(193): n is a, c, g, or t
  misc_feature (228)..(228): n is a, c, g, or t
  misc_feature (237)..(237): n is a, c, g, or t
  misc_feature (240)..(240): n is a, c, g, or t
  misc_feature (265)..(265): n is a, c, g, or t
  misc_feature (385)..(385): n is a, c, g, or t
  misc_feature (452)..(452): n is a, c, g, or t
  misc_feature (507)..(507): n is a, c, g, or t
  misc_feature (509)..(509): n is a, c, g, or t
  misc_feature (525)..(525): n is a, c, g, or t
  misc_feature (562)..(562): n is a, c, g, or t
  misc_feature (564)..(564): n is a, c, g, or t
  misc_feature (582)..(582): n is a, c, g, or t
  misc_feature (584)..(584): n is a, c, g, or t
  misc_feature (588)..(588): n is a, c, g, or t
  misc_feature (618)..(618): n is a, c, g, or t
  misc_feature (670)..(670): n is a, c, g, or t
  misc_feature (672)..(672): n is a, c, g, or t
  misc_feature (674)..(674): n is a, c, g, or t
  misc_feature (701)..(701): n is a, c, g, or t
  misc_feature (703)..(703): n is a, c, g, or t
  misc_feature (717)..(717): n is a, c, g, or t
  misc_feature (721)..(721): n is a, c, g, or t
  misc_feature (724)..(724): n is a, c, g, or t
  misc_feature (729)..(729): n is a, c, g, or t
  misc_feature (735)..(735): n is a, c, g, or t
  misc_feature (751)..(751): n is a, c, g, or t
  misc_feature (819)..(819): n is a, c, g, or t
tcatcaacaaccaacacagcaacacaaatgccacagccagntcctcacggcaacctttttngaagtcaagagcaaggccctnaatgagccacctacatggaacatagtatttgcaatatgcaaatggagacctaaaggctcatgaagggaacagaaggtggctgtttacagaggaacagaaacgaagtgaagntaatgggaagttcaatcaacaattggcaacaagcnaggtcagtngtntacgaaagtggtcatctatacagtncctaagtgtgggttctgggcctggatcatgttagatagggagccaagtctgggtgccatgaataaaaactgccatcccagccctctggaaaactgtggtgagatgtgatctcttaaagcnatggccttgaaaccagcctgggtaacaaaaccaagcccttgtatctaaaaaacaaaagggcaggaanattccagaaaaataatgttgcaggaagggggtaataaaatacagaaatgtgatananagcaaaacctcaactnctgtttcattggctcccagttttttaatctgtttttncnaaaactttaaggtacatntnaaanaccccccaaacccagaaagctttttaacanctaggttgttcaagaacttggaaaattcaccttctgatgttctccaagaaanantncattttttatacaccttatttgctcananctgttaattcagcntggngtnaacanagaaanctagttttcctcaaantcctcttgggctttagaaaaaaggtgctggccctttgagccaagcaggttattggttagtagttcctnttaac

SEQ ID NO: 503953 - DNA, 310 bp, Homo sapiens
taattattgatactccacacaaagcaaaacctaatataccaggcaagaatagctatgcttagataaaatagactatatccaaaactgtaaaaagagacaaagaaaatcattatataatgataaagagatcaattcaaaaggctaaaacaactgtaaatatatatgcaccgaacaccagagcaccaaaataaataaagccaatattcttatatttcaaggggctctcacacctgtaatcccagcactttgggaggccaaagtgggaggaatgcttgagcccaggagtttgagaccagcctgcgcaacataa

SEQ ID NO: 503954 - DNA, 338 bp, Homo sapiens
atctgtttctattacataatcttggcatattacatttcataataaacacatacatttagttgcatgctacatcactattgcttttataattaatttcttaagcttcaaccatgtattataccttatttcgttacatcatatattcgtaatgtgtacatatgaaatcttttgctttacatgtctttttttcaaaatgtagacatgtactaaacttgcaacggcaattgaatgtagtatgatgaaaatgtgaatgttttgctgctgtcatgaccaaagatacagagctagtggacatttaggaataataattacagctagagtcttgtatgtcttctctt

SEQ ID NO: 503955 - DNA, 609 bp, Homo sapiens
aacctgggaggtggaggttgtagtgagcctaagggaggagaccacccctcatattgtcttatgcccaatttctgcctccaaagaaagaaaaagtaaaaactaaaaggcagaaatgaaatccacaagcagacagcccggggccacaccctggacctggtagttaaagatggacccctgacctaattggttatgttatctatggattccagacattgtatagaaaagcactgtgaaaatccctatcctgttttgttacgacctaattaccggtgcatgcagcccccagtcacgtaccccctgcttgctcaatcgatcacgaccctctcacgcacacccccttagagttgtgagcccttaaaagggacagaaattgctcactcggggagctcggcttttgagacaggagttttgccgatgcccccaccgaaataaaccctttcttctttaactcgagtctgagagttttgtttgtggctcgtcttattcaagccaaaaaggtgccattggacttcagcctgggcaacaagaacaaaactttattttttaaaaaaattatatattatataaactttgggggggcccggacccaattcccctttgggggtgttt

SEQ ID NO: 503956 - DNA, 1916 bp, Homo sapiens
  misc_feature (380)..(380): n is a, c, g, or t
  misc_feature (1478)..(1478): n is a, c, g, or t
  misc_feature (1618)..(1618): n is a, c, g, or t
gcccttctctcagtgtgccctaagccaagtactcgttctcatttgggtgtctgcactgttggaagctactgcactgtgtttccacgcagacagagtacagtgggaaaggctttctccagctgatggatggctgtctctttatttggagtatcttactggttatgtaagcgacctcgagagaaattatcctgacccagatcggaggatgcagtagtgcttcagctgcaggatttcttagtcgttaacaccacagtgctgatgacaaagagcgagttgtaatcctcatcactgccagggctgagccagagcagacagaaaatcgtcatttgctcgttggagacttgttaggttacagctcctgcttcgttctgtggtctggnttttcttcctatacaatgacgccgctgcaagtgagctcagaaatgcttggtttgagagccatttgcctgtgatttttgaagactaaagaagtatttacactagatactcttccagaacaaaatagaaatttcagcaaatacttactgacctttaaagccttgttgtggatttctgagatttaaagatactttaaaattctcaagaacaaaactttcaaacctctggttgaaagaaatatacccagttcagtcactgcagtagaattccttgtagataagcaactggattttttaactgaagatagtgcctttcagccctaccaggacgacatagacagcctaaacccagttctcagggacaacccgcagcttcatgaggaagtgaaagtctgggtaaaggaacaaaaggttcaggagatttttatgcaaggtccttattccttaaatggatacagagtgagagtatatagacaagactctgccacccagtggtttactggcataattactcatcatgatctcttcacccgcaccatgatcgttatgaatgatcaggtactagaaccacagaatgtcgatccttctatggttcaaatgacctttctagatgatgttgttcactctttgttaaaaggtgaaaatattggcattacatcacgacgcaggtctcgtgccaatcaaaacgtcaacgctgttcacagccattatacacgtgcccaagcaaatagtcccagaccagcaatgaactcccaagctgctgtaccaaaacagaatacacaccagcaacagcaacaaagaagtatccgtccaaataagaggaagggctcagatagcagtataccagatgaagagaagatgaaggaggaaaaatatgattatatatcacgaggagaaaatcctaaaggtaaaaacaaacacttgatgaataaaagaaggaaacctgaggaggatgaaaagaaactaaatatgaaaagacttcgaactgacaatgtttcagacttttctgagagcagtgactcagaaaattcaaataagagaataatagataattcctcagaacagaagccagagaatgaattgaaaaataaaaatacttcnaaaataaatggagaagaaggaaaaccccataataatgagaaggcaggagaagagaccctaaaaaatagccagcctccctgggatcaaatacaggaagataaaaaacatgaagaagcagagaagcggaagtctgttgacantcagcttcaagaagatatgattattcattcgtcagaacagtccacagtttctgatcataattctaatgatttacttcctcaggaatgcaatatggataaaacacatacctggaattgctaccaaaggagaaggtatccagaccacccacaccaaaatgtgttattgatattacaaatgacactaatttagaaaaggtggctcaggaaaactcaagtacctttggccttcagacacttcagaaaatggatcctaatgttagtgattcaaaacactctattgcaaatgcaaaattcttgg

SEQ ID NO: 503957 - DNA, 139 bp, Homo sapiens
aaaacagttcacctgtaaatactttttcctttttcaccgttgtattatacatgtatatgctgggtcctttttcagaaactcttttcttacctgagagttgtcttgttttctgggctgtttttaactgaggaaaaaaaaa

SEQ ID NO: 503958 - DNA, 1190 bp, Homo sapiens
cgggtttgccgtcagaacacaggtgtcgtgaaaactacccctaaaagccaatagatggtgaaatggaaaagagctcatatcaacgatgtcgtcatggtgacacggtagattcggggcgaagatccgaccactactggccatctgcatcgtataagatgccggtggcatcggacacatagagcaaccgattgcacaacacatttgcagcaaggaggctgctgagatgggaaagggctccttcaagtatgcctgggtcttggatagactgaacagctgagcgtgaagcgtggtatcgaccattgatatctccttgtggaagattggagaccagacaagtagctatgtgactatgcattgatagcgccaggagcacaggagacgtgttatcgaaaaacgatgattacagggacatctcaggctgtactgtgctgtcctggatagtagctagtggtgtaggtcgaattgtgaagctggtatctccgaagaatgggcagagcacgagagcatgccctctcgtggcttacaacaactgggtgtgaaacagactaagtagtcggtgtagaacaaaagggattcactgagccaccctacagccagaagagatatgaggaaatggttagggaagtcagcggttacattaagagaataggatagaaacacgacgatagaagcatggtgcaaattctggtggcatggggacaacatgttggagacaaggtggctaagaatgcacttggtacaagggaactgcaccgtcagcacggcaaagagatgcgaagccaagaggaaacaaggatgagatgagcgcactgcacctggcatacaaacaacaaccagcacccctgcagaacgccactgtgcctgacctcacaggcatgatcaccacatggaggactaggggcaaggccaccaggtggacacgagaggaacacgtggcgcccaaagaccgggagggtgccagcatggacaacgccacgggacacacgggcaacaacaatggtagaagaacgagagaagcaacagaacagaggaccaaaggacaacgagaaaaacgcccaggaccaccgcgagcacgagagaacaagaagacagacaccagaccaaagaaaccacaggccacagcacaacgaacgcatagatcggaaagacgaaaccgaacgggaggacacgaccgacacccgccaagagcc

SEQ ID NO: 503959 - DNA, 88 bp, Homo sapiens
tggaaatgatttttcctatttcctttgttcccacttgtggtgtttataaaaacccctctttaaaaaccaaataaattgggttcctttt

SEQ ID NO: 503960 - DNA, 725 bp, Homo sapiens
gaggttccttaagttggtcttagaagttgcttagtcatgtctggccgtggtaaaggtggaaaaggttgtggcgtaatgggagtgagctaacgccgtcatcgcaaggtttagcgcgataacatccagggcatcactacagaccagctatccggctgccttgctcgtcgcagcggtgtcaagcgaatttctgtgccttatctatgaggagactcgctggtgttactcgaaggtgttcctggataacgtgattcgtgacgctgtcactttacacatgagcacggccatactgctaagaccgtgtacagcaatggattgtggtctacgcgctgaagcgactagggacgctactctttacgcgcttcggtggctaaggctccctgcttgctgctcgtcttattctgcagttgtgtcataccataaggcccttttcagggtccgcctcgacgtttcttcattataagagccagtacgatcttgtttatcctgctttgtttccagatttgtcgctgatggaagtatgtctacttgtgcacatgttgtagattggcaaagtctgtggctcctgatggatctgagcaagatggccgttgtgaggaatgcacgaatctgtcttgattatttccgaactgatgtccagtctgctatggaagattgctgcctatatggtcgatcgttgcagacgttaaagtcctagaccaaagccttgttttccatactcagagacc

SEQ ID NO: 503961 - DNA, 620 bp, Homo sapiens
aggatgtcgtagacggagatcctggacgtgcggatggatgtagccacctctgagctccatgggaactcctggcgatcttcccagatcttcagagttaaggtctgagccatcttccccctgctcttcctcctccctcagctccgagtcatagcgtttctcggcagagccatccagcgaggctcttggggtaggggaggtgctccatgtgaagacagagtccttggcacccccactgtgtctcctgggagatgacccaacatcctcatttgaaaccgtccagatcaacgttatccccacctctgatgattcctcagatgtccagaccaagatagaacctgtctctccatgttcttccgtcaactctgaggcctccctgctctcagccgactcctccagccaggcttttataggagaggaggtcctggaagtgaagacagagtccctgtccccttcaggatgcctcctgtgggatgtcccagccccctcacttggagctgtccagatcagcatgggcccatcccttgatggctcctcaggcaaagccctgcccacccggaaagcgccactgcaagcccaaaactgtagtgctaaccactgttccaatgccatcagagctgcgt

SEQ ID NO: 503962 - DNA, 226 bp, Homo sapiens
  misc_feature (72)..(72): n is a, c, g, or t
  misc_feature (78)..(79): n is a, c, g, or t
  misc_feature (85)..(85): n is a, c, g, or t
  misc_feature (111)..(111): n is a, c, g, or t
  misc_feature (202)..(203): n is a, c, g, or t
  misc_feature (208)..(210): n is a, c, g, or t
  misc_feature (212)..(212): n is a, c, g, or t
  misc_feature (214)..(214): n is a, c, g, or t
aacctcagatacattctcagcgcccccgccatcgtctctcgtcttattggtctactcggaatacgtactaanagcttnntgtcanacacactctgaagaatcctgtaagcncctgaattaagcagaaagtcttcatggcttttctggtcttcggctgctcagggttcatctgaagattcgaatgaaaagaaatgcatgttcnntgccnnncncnctttgccgaccc

SEQ ID NO: 503963 - DNA, 324 bp, Homo sapiens
gggatcccctgcaaagtgaatgatgagaggtttagtagtctgttttaaattaaagttgtaatccggaacacatgatccgaacagagctatgttaacaatattacagggacatctctcccttcatttactttgtcttgctataagcctatatttaggtttctttactatttttttctcccatttggatccttatgaggtaaaaaaaacataatgtcttcagcctcataataaaggaaagtttaatttaaccaaaaaaaagcaaagagccattttgtcctgtttacttgggttccatcagagtcctattttttaacctttatccat

SEQ ID NO: 503964 - DNA, 327 bp, Homo sapiens
  misc_feature (18)..(18): n is a, c, g, or t
  misc_feature (56)..(56): n is a, c, g, or t
  misc_feature (66)..(66): n is a, c, g, or t
  misc_feature (322)..(322): n is a, c, g, or t
tcgcaggcaggtgctccntactagaaaaagtaaggggccacagctgggcgcagtgncttgccctgntaatcccagcattttgggaggccaagatgggcggatcacttgaggtcaggagtttgagaccagccttgccaagatggtgaaacctgtctctacaaaaaatacaaaaattagcctggtgtggtggtgcacacctgtaatcccaggctacttgagaggttgaggcaggagaatcactttaacttagggaggcagaggttgcagtgacacaagattgcaccacttgcactcccagcctggggtgacaaagttgaaattnttcaa

SEQ ID NO: 503965 - DNA, 384 bp, Homo sapiens
gagactcagtcttactctgtcgcccaggctggagtgcagtggcacagtcttggctcactgtgatctccgcctcccaggttcaagcgattctcctgcctcagcttcccgagtagctgggattacagggacctgccacctcgccgggctaatttttgtactttagtagagatggggtttcaccatgttggccaggctgttcttgaactcctgacctctcaggtgatccacccaccttggcctcccaaaatgctgggattacaggcatgagcgactgcgcctggcccagaactttttcatcttcccaaatcgtaactccatgcccattaaataataactcccaggcgaggcacaatggttcaagcccatgtcgacgcggccgcgaat

SEQ ID NO: 503966 - DNA, 827 bp, Homo sapiens
gggcggggggatgtcacaatggcttgaccatggtatggccagctcagagtaccttacagttctgatgtttaaaattacattcttttttttctttaaaaaaaaaaaaaaaaaacggggtttcactctggtcacacaggctggaagtatagtgggcatggtcatgggctcgctgggggccttaaacttccgtggggctcaagcagtccttggcctggagtaccagcgactacttacggtggcaccaccacatccagctaatttttaaaaatatatttgggtagagaagagatctctctatgtggcctaggtggccctcaaactccggagctcaaggcggatcatccttcccttggcctcccacattggtggggctttacaacctggtggagccactctggctgggccctttattcttttacattttttaatttttgtaaaaaatcaccaaagatagagggaaaacccaaagtggaatacgaccgggacaatcaatctgaactgtgtgtcaagtgcgtaatacgactatgtacacgggaccacacacaacaacaggtggggggctagacatttagaaataagaaggccaggcacgcgggctcaactccgcgtcatccaagccattgggcaggcgatgcagaaggggtacttggacgcgggtttcaagaccaagcgggcgcaatatggtgagccacagtcttgaccccaaaaaaaaatttgaaaataaaacaatggcgggccgggggtgaatgcggatccccagcacccaaaggggggagaggtgtgggccagaggcacagctcggggttagtgcccgtcccataaggatg

SEQ ID NO: 503967 - DNA, 477 bp, Homo sapiens
  misc_feature (14)..(14): n is a, c, g, or t
  misc_feature (65)..(65): n is a, c, g, or t
aaaccctggcccantcacggaactttttgtggtcaatgtcccagtggttagccctaaagaataanaacccggctgggatgaaagcccaccgtggaacagtcgtgcccattagacttttcccccctgcactcgttcaagtgtagatgaccgtatttcttccctttaaaccctggaacccgctttgctggtttgctggcctctgtggtgtcctcacacaacctgaacttaggcttctgcctcagctctttggaaagagggaaagacaatctctcttcctgcgaagtatgggaaggtgcatagaaatgccttttgtggttcttgctgtggttctaagtcacgaaggtattgaacttcattttggccactccggcttcggtgatggccacaaaagtgaagagcggttccattacttttttctttcttctttttttttgagacagcatctcgctctttttcccaggctggagtgaagtggca

SEQ ID NO: 503968 - DNA, 246 bp, Homo sapiens
ttcagtgtacccgtttgtcgagcactgtactccagctgatcactagagcgagagtccgaactgagaagaaagagcaatcgaaaaagcatacgtgtataaccactggtgatgagtaccacaactaaaatagagatggtaatgccctatcatctataggacttttatatactcctgccattttccattttaaatcccatttccatttggttgacaggtgaagaaaacccagtaccgtgatcgaccacg

SEQ ID NO: 503969 - DNA, 105 bp, Homo sapiens
tgtgtcagcgcaatcagcaaatcatccattcgggcttgatgtggggaggggtgtttaaggggttggctagggtataattgtctgggtcgcctaggaggtctggtg

SEQ ID NO: 503970 - DNA, 115 bp, Homo sapiens
cttcccctcaagctatttctatcagtcttcacatttagctgatatcttgcctgttaatcgggatagtcgaaagagaatccttcaggcattaagcctacctacctatccagctgcg

SEQ ID NO: 503971 - DNA, 275 bp, Homo sapiens
gcccgaaataatttactgcccttttacaaaatgtatttaaaaagtttttccagataaactaatcaaataaattagaataatgtgccaccattacaaatttaatttgttagctgcattccttttgatgttcccccgaaaaaatgttactgatgattcagggctatttttgaagtttgtatgttgctgctgtccccagtgatggtggacttatttttcccttccctgatcccaaattatgttggggaaaataaaaatttaatatttttttaaataga

SEQ ID NO: 503972 - DNA, 102 bp, Homo sapiens
  misc_feature (1)..(1): n is a, c, g, or t
  misc_feature (85)..(85): n is a, c, g, or t
nacagtgatgagacgtagaaggccttctacgtctcatcactgcaggttaaggacctgatgtagtctctgtgaggatatgagtttngattcctggcctcgctc

SEQ ID NO: 503973 - DNA, 492 bp, Homo sapiens
  misc_feature (245)..(245): n is a, c, g, or t
tagaacggaagaatgggtgcaatggtggttcctggaaagctcacccagcacagctgccctgagctcgtgggcgttggtttctgtccctggggatattatattcaataaatttttatataattacacagagaactagaaaatataaaatctgaggggttggggaagaaacgtgaggaactcagcaggaagccagagctggagaggtccattcaggccaagtttgacctcctctttgaccccttggncttctggcttctcctccttggtttgctcctcttcggtgagttctttcttctcctcggagtctacctcttttccatcctctgttttgactctcttggctttttggaagtgggaagagtacttgcggaccccctctccctcctcttcagaatcggagaactcttcctcacaggcaattcgttggtcagaggagcagatcgagatgcgctggtcagggtcgtcttcgtcctcatcgccactctcctcagg

SEQ ID NO: 503974 - DNA, 1112 bp, Homo sapiens
gacagacagtcagccgcatcttcttctcgcgtccccagccgagccacatcgctcagacaccatggggaaggtgaagggtcggagtcaagcggattaggtcgtattgggcgccgtggtcgaccagggactgcttttaactctggtagagtggcatattgttagccatcaatgaccccttcattgcacctcaactacatggtttacatgttccaagtatgattccagcccatggcaaattccatggcaaccgtcaaggctgagaacgggaagcgtatgatcatcaatggaaattccatacaccatcttaccaggagcgagatccctccaaaatcaagtggggcgatgctaggcgctgagtacgtacgtggagtccactaggcgtccttcaccaacatggagaaggctggggctcatgagcagggagggagccaaaagggtacatcatctctgaccccactactgctgatagaccccatgtacgtcatggggtgatgaaccatgagaagtatgacaaacagactcacagatcatacagaaatgacatactgaaacaccaactgcattagcaccacctggaccaaggacatccatgacacacttgggtatcgaggaaaggactcatgaaccacagaccatgaacatcactggcgaaccagacagaatggggatgggcacatccgaggaaactgggacgtgaatggcgcagggcatctccagaaccatcatacctgacatctcactggacgctgccaaggctgttaggcaacggtactcccatgcagctgcacgggacagatcaaagagaatggcattcgatgtcccaatgacacggtgacaagggtagacctgacctgcggcaacaaaaccttgcaaaataagtaatcaaaaggggtgaaaaagcattagtagggaccaccaaggagaaactggagaacgagtgagacaaggggacctcatgtagtcacagcgtcacccatgacaacatagaacctgaggagaaagtaactagaccagtcaagtgacagaaagcaagaaggtaccaggtgtgacctacaagccacagaaaccggaaaaccgaaaaaacgagtggacgcaacccaccacagtatgag

SEQ ID NO: 503975 - DNA, 365 bp, Homo sapiens
cgggcggggatcttacgcttcccttacccgcccccttttgtctttcacctcaggccccgccggctgctgtgggagcggcggccgtccctctcctggaggtcgtctcctggcatcctcggggccgcaggaaggaagaggaggagcagccggacctgtggcgcctgagtgagaccgaccggccctttggaatatggcgacgtgctaccggaccagcagcgcctcggcggcagcaccacagacttcctggaggagtggaaggcgaaacgcgagaagatgcgcgccaagcagaaccccccggcccggccacgggagggggcagcacgacgccgctgggacccggcggggctctgggcaccccgcggtcc

SEQ ID NO: 503976 - DNA, 141 bp, Homo sapiens
cgctgttgctgaaccggctgatcgctcgaggcaacctggtgaatgtcaccagcctgttctacttggtgcccgcggtgacggcggtgatggattacctgatctgtcgacgcggccgcgaatttagtagtagtagggggccgc

SEQ ID NO: 503977 - DNA, 232 bp, Homo sapiens
gattctgtccagatctctttgtccctgaggtgtcagtttgcggccgccatcttggtcccttttccaccatttttcagccccctccaggtttgggaggaacccggcggcccaacacctctttggagccctcggctgtaaagtggcctgggcattgaacgcccgtttttccggaaattttccagcctgaagcgcccgggttggtaacccattaaaccagtttgggtgctgggtg

SEQ ID NO: 503978 - DNA, 211 bp, Homo sapiens
aacttttggggtggagactagaggcaggagcttaggggctgattcctgtggttggaaaacttaggccgccccctaaggtggaggtgggggaatagtgtttccccggaagctcctttagttgtgtgcgggtggctgtgcattggggacccatacccctcagttctgtagcatgaaacaaaggcttaggggcccaccaggcttccagctggga

SEQ ID NO: 503979 - DNA, 425 bp, Homo sapiens
ccgggaagggtatgtgaaaggtgaggatatggagtggttgggtaataggttcaaaactgcagcaggaataagttctactgccctatagcactatagggtgactatgattaataatgtcttggatatatgcaaatagctacaagagaggatttttgaatgttgccaacatagcatacaatgataaacgaatgaggagaacagatctgctgagtaccctgattgattgacacattgtatacatgtatatcactattatgagtacgtacagtgatatgacaatcaaaattgaaatatgaatgacaagaacacggctaggtgtagatggcacatgcgtgcccagctaccagagaggctactgagtcatgatctcttgagctcatgagatgttggctcatgagcagcatagggagaccctacatcatgtt

SEQ ID NO: 503980 - DNA, 532 bp, Homo sapiens
tagttgaagggtagtcatcagtgtagataagatctttcagagaaacttttttttggagacagggtctcactctattgcccaggatggagtgcagtggcgtgttgtgatcttggctcactgcaacctctgcctcccaggctcaagtgactctcctgcgtcagcctcctgagtagctgggaccacaggggtactctggctaatttttccacttttggtgcagacggtgtctcgctatgtggcccagggtggtctcaaactccgggccgcaagcaatcctccgtgcttcagcctcccgtaatgctgagattacaagtgtgagccaccacgctgggccttctttctctattctaaaacttttggtggctcttgagtgtaaaatgcagaacctaagttatactatgcctttgcaagggtggttccttagcctagaattacaacaaattgtccttcaagaattacttgtccttcaagcacaatgtaaaacgccatctttcttctgcattcccctgtggtctgagtagcacctacgggt

SEQ ID NO: 503981 - DNA, 356 bp, Homo sapiens
  misc_feature (6)..(6): n is a, c, g, or t
  misc_feature (65)..(65): n is a, c, g, or t
  misc_feature (69)..(70): n is a, c, g, or t
  misc_feature (77)..(78): n is a, c, g, or t
  misc_feature (80)..(80): n is a, c, g, or t
  misc_feature (103)..(103): n is a, c, g, or t
  misc_feature (107)..(108): n is a, c, g, or t
  misc_feature (112)..(112): n is a, c, g, or t
  misc_feature (115)..(115): n is a, c, g, or t
  misc_feature (118)..(118): n is a, c, g, or t
  misc_feature (120)..(122): n is a, c, g, or t
  misc_feature (127)..(127): n is a, c, g, or t
  misc_feature (130)..(134): n is a, c, g, or t
  misc_feature (153)..(154): n is a, c, g, or t
  misc_feature (160)..(161): n is a, c, g, or t
  misc_feature (182)..(184): n is a, c, g, or t
  misc_feature (186)..(187): n is a, c, g, or t
  misc_feature (194)..(194): n is a, c, g, or t
  misc_feature (197)..(197): n is a, c, g, or t
  misc_feature (220)..(220): n is a, c, g, or t
  misc_feature (230)..(230): n is a, c, g, or t
  misc_feature (238)..(238): n is a, c, g, or t
  misc_feature (252)..(252): n is a, c, g, or t
  misc_feature (268)..(268): n is a, c, g, or t
  misc_feature (272)..(272): n is a, c, g, or t
  misc_feature (280)..(280): n is a, c, g, or t
  misc_feature (286)..(289): n is a, c, g, or t
  misc_feature (296)..(296): n is a, c, g, or t
  misc_feature (298)..(298): n is a, c, g, or t
  misc_feature (308)..(308): n is a, c, g, or t
  misc_feature (337)..(337): n is a, c, g, or t
  misc_feature (344)..(344): n is a, c, g, or t
gggggnggggggggggggacaacccctgcaaatggaatgcaaaaatgcccaaggccccggctttnctcnnccccaanngngtctacatatatcagtgataacngtgnnatgnggnagngnnnggggnagnnnnnaaaagaaaaaggaaaaaannacaganntagcaaaaaaaaacaaaaaannngnnagacacntcnccgggggtggcggcgtggggggngacccacagngggccccncgccgggcacccgnaaaccccccccccaangggnaagggggnccgggnnnnggcggcngnggggccgcgngggggcgcccacgggggggggggggcggngccccgngggccccccccc

SEQ ID NO: 503982 - DNA, 600 bp, Homo sapiens
  misc_feature (202)..(202): n is a, c, g, or t
  misc_feature (234)..(234): n is a, c, g, or t
  misc_feature (268)..(268): n is a, c, g, or t
  misc_feature (337)..(337): n is a, c, g, or t
tctgcgcccgtgccatgctcagactggtgcggcgattccgggcatggtggaacttgaccccaaagtgatgatgcaaggcattctgcgggtccaggtccagcgccacacctgactcgcccagtgcgctgcaacccactgctcaaggccgtgaccagcgtgctgcggccacaccgccattgatagacaccaacgccactatttnagggcgcagctccggggcaacgatgggctgtnggtggatactttcgtcaggaacactgccgaaaangtgcattcttgcattgatgccgtcggcatcatgggtaacgtctttaccaaacaacgccagaatttcttngcttaggctcatagcctgctcctcaagacgcagcttaaagacgtgaaggtcagcaagtgcgggcacttgccgcagatctattcaataggcgcccttgtaggggggcattctgtgacaaaggctcgagagtgtcattataaggctgtctttatgcccgattttcacgatggacggacgatagtcaatttaatggcttaccagccgtgtgtattccacagccttgcagctgtgaaacacgagcccaagacacctaatcgaagaaa

SEQ ID NO: 503983 - DNA, 820 bp, Homo sapiens
ggcctcggaggcgtcagcgtgcttcaacgatgaagctgaatatctcctatcccagccactgtgcggccatgaaactcattcgcagtggacgatgaactgcaaagcttcgtacgtttctatgagacgcgtatggccacacgaagttgctgctaggacgctctgggtgaatgaatggaaggggttatgtggtccagagatcagtggtgggaacgactaaactaggtatcccctatgaaggcagcggtgtcttgactccagtggccgtgtcctgcctgctactgagtaacgtgggcacttcctgttatcagaccaatggatgatacttggatgactcgaaatgacgaaaattcagttcgttggttgcatcgtcgtgatgcaacatcttgagcgtttctgcacgcttggcttatgttggaaaaactagggatagagaacggatacttgccctgagtagctgacctgatgacgtagcaggtgtgctcgacgcctagggcgcccaagagatgacgctaagcatacattcgcgcaaagatttatcatagcaaatactcgtgctactagacagctagtgcttgtccggctcagcttattagttgtgacaagacaacaggaccccttcagacacttacattggacatgcgtactggaaaacctctaagggaccccaagtaacgcgactcgccaagaatctcaaggcgtatcctcgctctatcctcctaggcgtcgctcccgtgcaggccaccaaaacgcgtgtcgtgctgctaatttggcctcctgactcgacaggcaggctgtacccacggaaaacaccttacaggaa

SEQ ID NO: 503984 - DNA, 345 bp, Homo sapiens
agaagtaaggtgaaacatattctaatgacccgttaagatgtagaacgcgcctgtttaacatgatttacagcaaaagtgaagaactaatcaaagaaagaaatgatcacaatgcttcattatgaccttctacatcacccgttatgaaccatctggaaataaaaaaggcaaaactgtagggtttggtaccaataattcagagcacattacctatctggaacataatcgcttatgaacaagttgctccaaaagaaagatgctgagaaaaaagggcccaaggactgatattagggtgcagcgagatggaagtggttaaacaaggaatgagccatggagagctctcaagtg

SEQ ID NO: 503985 - DNA, 113 bp, Homo sapiens
  misc_feature (62)..(62): n is a, c, g, or t
  misc_feature (107)..(107): n is a, c, g, or t
cgagatcatgtcccacgaccgcccgcctggacaccacagagaagaagacggagcagcagcgncggcgagtagaaggctgtgcacaggctgcgggtacagcaggccgngttggc

SEQ ID NO: 503986 - DNA, 140 bp, Homo sapiens
tttcttagagggtttcaaaaggacagcctttgcgcggccttttcctttcttaaccttttgagtccagcccttttccagtttttcatttccacttcggagtaacttccacttaaagcttgttctcaaaaatcgggcaacgc

SEQ ID NO: 503987 - DNA, 136 bp, Homo sapiens
caggatcctgaacgggtactgcggttgcggtacgcaaagactcgtgcacttgcactccagcctgggcagcaagaggaaaacaatctctgtcatacacacaaaaaaaaaaacggcacgaaagaacagacatatttgg

SEQ ID NO: 503988 - DNA, 867 bp, Homo sapiens
  misc_feature (1)..(1): n is a, c, g, or t
ntcgttgcgtcgcgccgactagccggagcgctgctgcccgttatggtggtggtgacaccgcacagccgcgtttgttgtgtcgtctcgcccaacctccccccccggcgcgggtgttgggttgtccgcgagcgcgcgcgcaggctattgttcttggtctattggtgtggtctcggcgccccccgggcgcgagggttgagatacaccactgctcgctcagctgggtatatttgtgttttgctcgtcgtcgtcgctcgccggcgcgctccctccgttatgcgcgtggggggcgccgcgctcgcttctcgcgcgctctgtcgctcggtccgattgcaaagatacctctctctgctctcactagacggacatccctctgccatggtctgttctcatgccccctcgctatagttaggatttttggtggggcgagttgttttctgtgctgcgacgctcttcgtcgtatggacgggtgcgccgtttcgttaccaccccccgcctctttgtgtgatgcacctttctctgcggggggagtacatcttctctgttgtgtggcttggtgatgcaacacacacttttcttttgtctcaatatagataattatactcttcttccatattcgagagcggtgctctcacactttctattgtatgtcgtccaccacattttaaatatatccctctgcaatcattattagtcacccacacacaccacaagggggtgtccataacaccccccccaccatgttttcccaaccacatgattaacacctcctttttccaccgcggaggacaccccccttttttttaaccccctccccccttttttcttttttccccccccccccccctctttcccgggttttttttttta

SEQ ID NO: 503989 - DNA, 325 bp, Homo sapiens
  misc_feature (235)..(235): n is a, c, g, or t
tgggacagagtctcgctttgtcacccaggctggagtgcagtggcgcagtctcggctcactgcaacctccgcctcccgggttcacgcaattctcctgcttctgccccctgagttgctgggactacaggtgcctgccagcacgcctggctaatttttgtatttttagtagagatggggtttcaccgtgttagccaggatggtctcaatctcctgacctcgtgatcagcccacctggncgacctaaagtgctgggaattacaggtgtgagccactgcacctgggcctataccattatattactatttgaggtgtccatttctcctgcc

SEQ ID NO: 503990 - DNA, 273 bp, Homo sapiens
acggatagactgcgccgcagacccatggtgtacacggaggatgatggaggcatcgaagctcgtgctcagacacacgccccttgtcaaatttagtgcagacccgcgacgcttacactgagatccttgatgggaaaacacctctggcgtcctgggtgaggtctcctccctcatattctgtcctgtatcccagctccgaccccaagtcttctcacctgaagggccaggcggttcctgccagcaagacgggcattctggaggagtcgatgtgcccgc

SEQ ID NO: 503991 - DNA, 1405 bp, Homo sapiens
ggcacgaggatgggaagatgtgcctacttcccctttgccttccaccgtgactgtacatttcctgaggactccctagccatgctttctgtacagcctgctgaactctctgcccaaatttcagctgtcacagaatgagtgatcctcatagtataatggaaatgcatcatctcagtttccccatggcctgaatgtccatacaaaatgagagccagtagagaaaaacagaggacgtgaggagtttttaaaaattgaggaaaagtggaaggaaaagtaaggatgaaggtgaagatgaaggaatatgtcagagatgctagcactggcatcccccaccacacagtaccatgtactgctaaagaactctagaacatacagggtgtagacggcagtcttcttggggaaaaagaggcttcaggattgcaagatttcagctactgtctctcctcggagcaggattccatcttttccatggctggggcccttgacacatgtcactgtgcactgctcttctcgctgggaaaaggaaactgaggcccagagagggcaagtgaatttcccaagagtgtccagatgatacggagctgagctggaaagtgagcctggatctctctggttctgaaagctttgctcgaaagcacaggatgacacctccattcaaccaataagcactgagacccttccatggactcagcaggtcctgctgtccctgaaggttgacactctcatttcaaaccacagcgagaaccccaaaaggaaacagtgcaaggaaaataatgtgatatttgagaggcagcatgggttattggggacagggttcatgtcccttctctcccacacacgtggcatgatgttaagcgggtcacctcacctctccagggttgtttcctcaactgagaaaatgagggggttgagatgaacgccagccctggggtgctcaatgctgcagtctagggtggtgtggactggaatcagaattctttctcctccgctctgggtgctgacacatgatctctggctctcactccccacccctaatcttgcccatctgagtttcaggttattttttccttcctcctgctcttcaatttccttattgaggaagctctttcctgctgcctctgtccccgctggagctgtttgatccagtagagccagtcgaagccaaggggaccctgacttgaatcttgctttctgacatgctggctgtggcttgcttgggacccgaataagagcttgcttactcccggtgttcaccacagcggaaccatgggtgcagaaatgtaattctcaaccagcccagtttaatcagcgaaagacaatagagcttgcaggcggtgtcatgctgagtatctgaacacaccatggctgctgtcgcccttttcattaaaatgattgaaaatgtatttct

SEQ ID NO: 503992 - DNA, 786 bp, Homo sapiens
gttgctcaactttaattttgcagtcagaattgtgtaagctgaaccagttggaatgtctgtggcgttggctatggtttgtactgttaatcatcagtactcttcaattagggcacaaacaagattttttttttccttgcaaatggatgtagttggtcttctatagtgggcttcatcttcaacatcatctcatcttttcttaaaataaattattcattgtgtaaactgccaatttcttgggggcatgcccccactaacatttgtgtaaagcagcaatgatttcctgattttcccacccaaacttccccataaattgtgatgtctggctttaattttagcagaatggacattgctctgataaggggctcttttcaaactgatttcttatcctttttttgtgcctcaaaatagatcctgtcagacatgttacaaattagtacaagtttatttggatataaagaaaaatggaaatccatgtatagtttttccataatatgtatttcccatgaaaacttttgtgaaattcttcatattggctgagatgatatggcaaaggagttatattatattacaaagttcctgttggtgtgttcatattatgtggcatatgttatatttttcacattatcatggctttctgatacaagttaaccttttatttgacctaactcaatccaacttggaactccctaaatcgggagggagaatactaaggctgttaatttggggctagcaacgccaagagtttaagacgcttcttaaggactcctttgaaagacaacttgaact

SEQ ID NO: 503993 - DNA, 923 bp, Homo sapiens
catcgggggagtcgcctcatgtgaaggttgtccttgcggctgccgtcttcgacggctcctcgtctgactcacagctggtgacgtggagctttactagcgagactgtgtgaccaagaaagaaagaggaccaccaccagtatgactgtccaaaggatatatgtctaggatcttccgagaacttgggtagcatgagatcatggtgaggcccgtgggtgatccagcttggtgggtctctgtcagagtaccacagcagttcccagaggagagtggggacatcaactcgggtctgggccctagaggcttgcctgtgaggagaaacgagtgatggtgggctggaccaggccgcaagtgtaaaggccccctcgccgataaatcctagggagctctgcatggaatctcaggggaggcagggtagaacctttcaaccacgaggagaaaggagtagtgaccgcacgggtcgtgatatacgaggccacttgtacctggccgtcgagcctcttcaccaaggctagcatgaggtctattgtatatgcaggtcacatcaggggtgtgatgggcatggtgccgaggaaatgtgcccatatgccaacaggtaagaaaagcattcaaacgtgtggatcgcgcttattacattcaagtaccagaaggagatgcatgtatagccttcggttaaaggatgagtaaagacagtgttggtagattgagtactcaaagttagggtgcatgagtgcatggctcagtggatagtgagaaggcgtggaagagggccaaagtagaagaaagcgtggggctgaaaatcccctggacagggtgtccattcgtattcatgcattgagtggaggaatcaagggtgtgctaaacgcgttttggcaaaacagatccggggtagtgactcgggttattgtactaaactgacatttggg

SEQ ID NO: 503994 - DNA, 924 bp, Homo sapiens
gcatggaatgcatgaatcctgatccggtatcaaggaatgtcaaaacctgcttagagcaatgcagagggcgttggtatacaggttctagcaggtgtatagtaggatgtgatacaacggaaggccacggagtgctcatcccagggattaacttcctggacttgtgggtgcatcaggaagcattgggaaggtcttcttcgggggaatctcaatggatacttatatcgggccagcacctagctgatgaacatcgaagtcaatccatcgagtcaggtaatcacacatgaaactctgagaaggatcgaggctagattgtattcaaggcagatgctagtgaggtctctggggcgtgggaataagatctctcagctaacaggaatccagcaagattcaggcatgtattcgggacacaaaaaactgggaatcagaggtccagccgtgaaatgtgcgagtttctctggaaatcgctgtcggaacgccacacagttgcgctaaagctcctatagtagacacactagggatggtgtatcatgcgaactgcctagccttagtttagtaactggttgacctgtggtcgtcccactccactacatagcatgcagtatcggtcatcttgaacaaatgtaaattttagtctttcgatagacggttcttagatcttcacaagtacctcgctttatttcactttgagctcttggaatctctgtgctggttgtaagactattgcaatatgatgcgtaacaagggtggacgtacgggtaacgaggtcgtgggtacaactgaatatgctcttcttggaacggggggaattacgggtactggatgcataacgtctgcattttctgacccctttgttacccatcatcgcctattatagctggtgccggattgggctgcatcgacagatttcgctttaagattagccag

SEQ ID NO: 503995 - DNA, 504 bp, Homo sapiens
  misc_feature (368)..(368): n is a, c, g, or t
atttctaatgtctaggcagtcatgtgatcagtctgtgactgtatgtcttctgaattggggatgcttagaaaggcttttagccggctggaagcggtggctcacacctgtaatcccagcactttgggaggttgaggttggtggatcacttgaggttaggagttcgagaccagcctggccaacatggtgaaacaccgtctctactaaaaatacaaaaattagttgggtatggtggcgggtgcctgtggtcccagctacttgggaggctgaggcaggaaaatcactcgaacccaggaggcagaggttgcagtgagctgagatcacaacactgcactccagcctgggcaaacaggaggtgaggaactatgttncgttggaaataaaaacaaaaaataacaaaacaaaaacaaactgtgttgcggccggcccgtgggccctcggaaaaaggttttctaacaccctttcgggtggaggcgccgggggccccatgggctaaggggaaccgtg

SEQ ID NO: 503996 - DNA, 260 bp, Homo sapiens
  misc_feature (230)..(230): n is a, c, g, or t
  misc_feature (232)..(232): n is a, c, g, or t
gggtaaaattaagttcctggaagagcaacttcaacatgaatttcaaacaaaatggaagagattaagatctaaatggccacacatagcattaatctcagaagttcagtagctacagtactcttgtttctgacaagacttatggatgttgtagaacacttgaaaagtgatttacgtaagtgggatgttaagtctgtggagagttacttaaactggacttttgaggagacacnangagagcgctattgaatgacgtgattatt

SEQ ID NO: 503997 - DNA, 175 bp, Homo sapiens
cgacggtctgtaccatatgttgtgtctaatctccgttctgagaaggatgaaaaactttcttccaagtgaagatccattataagaacacatgtattgacatgccgtatatatgctggattgtagtatgctcttgtctttaacagttattaataggaacgttcttaagcaaatacat

SEQ ID NO: 503998 - DNA, 154 bp, Homo sapiens
cactaagacacttgtctctgacttcggaattgagtgtctgtgtcttacacgtgatactgggactgaacggatctgtgcgcgatctcggactgctgcgtgacgtcttgactcttgctcgatgctttctcggcgagggaggggcttctccttttgg

SEQ ID NO: 503999 - DNA, 736 bp, Homo sapiens
  misc_feature (73)..(73): n is a, c, g, or t
gaattacttctactcctctttacagggggaacaaaaggaggatctccggcggggcggccccctctaaaataanatgtatctcccgggctgtgggatttttggacgagataaccttaccctaagcatcgatgagctcacaggcttaagcaccagctgcatcttacgctgtcattatttagatcccaagcaagagatggtgggcattggctatcccacactatagcggagaagagggcagtgctagactagacatcgacttcctagtgaagatccatgaaatctcagaaatatgaattgacgtccagaacgtgatttatcattcctgtatgctacagaagaatacttgcaagacagtgtatggcttccctgtatcttctagatatgtcatctagacgttgagccaggaacacaatcaagcaacctttcatgatatagccaggccccaagcctcttcagaactgcgaataatgttttgaattgaaacagaggtgtaaagcagagaggtcagagcagatcaatactggttatgggtgatgagatccagacagaacagtccacagacaaataactgtcttacaacgagggggtgtgatggatgtgttatcttgtttcttatgagtctagtagtattactgtctgacactggtcagtctttaggggctacttcaaaatgttatttgtgtctttcttggaatacctgccgtagataatactcaatcagatgccatgacttgga

SEQ ID NO: 504000 - DNA, 118 bp, Homo sapiens
tccatacggaggggcgtgggcggaaggggggtagatacagaaatgaaccagaccgtgcccgtgctctttatcatctcttccccgcagaatgacgcacggaatgacccgcagaatgccg

SEQ ID NO: 504001 - DNA, 169 bp, Homo sapiens
  misc_feature (15)..(15): n is a, c, g, or t
  misc_feature (142)..(142): n is a, c, g, or t
  misc_feature (161)..(161): n is a, c, g, or t
gtccgtggtgaagtnccactcaggatgacaccatcaccaaaaaaggtttccacctgcgatacaccagcaccaagttccaggacacactccacagcaggaagtgaccacgtgccagagcaggggcggggacgtagagccagcntgccctttgccgcctgacntagaatgc

SEQ ID NO: 504002 - DNA, 1069 bp, Homo sapiens
gagccaggctggctcctgtctccccacggtgtagccagcatgaggcctggagaaggccagaggcagccaagaagaccctgggagttggggtggaagccaggcctgtagggacttcctggaactagctgagactcacagccggaaatggcagcgggctctaaattatgagcaggagcagcgtgtccacctggaagagacaattgagcagttggccaagcagcacaacagtcttgaactgggccttctgcaacacccctggcgggccagccagctccagcaagagcttcagcgagggaagcttcttgacttccaaaggagagaacagtgaggaagatgaagatactgagtactttgacgccatggaagactctacatctttcatcaccgtagtcactgaggccaaggaagacagaaagcctgagagtggacctgggaccaccactgtggactggacctcagcagataactgtattagatggtgcctcattcatgcccaagaattcatgcaaagttaagaggcgagtccgcatccctgacaaacccaactatagccttaacctctggagcatcatgacgaattgtattggccgagagctttcccggatcccatgccggtgaacttcaatgcagccctgtacatgctcccagcgacttacagaggacctggagtacaacaactgctggaccaagcgggtgaacttgacaggctcggtggcagcatatgttgccttggtaagccggctttcgtggtactcctaatcccacagtggaccggttggccaagcctttatccctagaccggagacctcgactggcctatgcggagttgtgccggtccctcggagcgggttgccacaccgagtggagcgcacaactgttcttcctcatggcctagcacgcctgaaaaaaccgcgacattcgtggaacaatttcatgagaagagatcagaaaatacaagaactaaggaaggcaacacagacaactacgcacaacagacatacacatcaaaaacaggagagtcaactcagacagagaatcacaaccatagagataatgtgaaagacaatag

SEQ ID NO: 504003 - DNA, 156 bp, Homo sapiens
gaactgggcaggcgcctgggagctctggacacctgctcagctctcggggccccaggcctggcaggtcacgcggctgccctggtggatgatgtctggctatatgtgtctggaggccgcaccccggcacgaccttcttctccgtctgcgcctcccagc

SEQ ID NO: 504004 - DNA, 911 bp, Homo sapiens
tgtaatcccagctactcaagaggctgaggcaggagaatagcttgaacccgggaggcagaggttgcagtgagccgagatcacaccactgcactccagcctgggtgacagagcgaggctccgtctcaaaaaaaaaaaaaaaaaaaattggtttagcgcggggttccccagggggggaaaaacagacccagcgtgggagttgggcccctgggccttggtgtggcttgacttcttgggggtcctccaaaccacgtggtttttttctggtggagcctggtactgggggagagatcagtagcatttggagggaagtaagagaaaagattcttgtgtacctcagggtttctttccctttactcgctgggcaagccattggtctggtggggccctcatggtttttccacactctactgggcgccgtgggaggtaacagatcacccacggccagtctcctctgcggggatgcgccctctgagagagaggcctagcagggaaggctccctcggggcatcccgggatgcagactctgggacaaattgcctcctttaaagtgtccgggtgacagctcaggtgaagtggagggtagacgggagacccagacttgtttaccacgcgtttccaaagctcttgatctttccaagattgttactgaaaatgtgtctctggtggtgcgagggggggtggggggggtggtgggccagttcttgtgaagtgatgtggtgtctttgattaggatacaggttctctgctaattgaaaaaggtttttaaattattatttgtttggacccagggttcagggtttatccaacgaggtttaaggtataaccttcagtatggtgaataatttctgttggtaaaagcatgggacatttcaagatttggttttaccattggtggcttggtctaaaccgtt

SEQ ID NO: 504005 - DNA, 1168 bp, Homo sapiens
gactaatcatatagtacaacccatcccatgaccccttaacaggggccctctcattgccctcctatatgacgctcgcggacctatccatgtgatttactgcttccactccgataacagctcctcaatgtactcacggcctacgtgaacgcgaactacgactaacgcatattaccattgatggcgctgctgatcgttagcaacgtgatgcaataagccacatgaccgaaggcacgaccatagcaacccccctggtcacatagaaagcgtccttcgatcaccgggataaatccttatgttattaactcttcagagaacgttttctctatcctgtgctgcgatggattcctctagacgcctgttgtatcctatctgccaggccttatgctctccttacccacccaatatatggaagggcactaggcctcccagtacagggcacttactcccgcataaatgcccctatagagtcccagatcctaagacgacagtccggtagttatctctgctattcatggagtactcgaaatgcacccgtgatgctcacgcagtatgtctaagtacgaaacaccaagctcggaaaccaatactgacttcagaagctagctgcattattgagcaaatgttataactggggtgctcatacttgttacccatccgtacagagcctcagaggtactctcgaagtctcccttcaccatttccgactggggatctacggctcaacatttccttgtagccacaggctgtccacggacttcatgtcatcattggcgtcaaccttgtccgcagtagtctgctgcatccgccaactaatatgtcactttactatccaacatcactttggcttcgaagccggcggctgatactgacatttcgtacgactgttggtttgactatttctggtatgtccccacctatggcgaggcgcgtaaaaaaaacccaaagcagacacaactcatacacaccacagtgagcgcgccacctcgtaaaacaccccgaggagccacaaatcggcacccgcgtttcgtaaaagcggcccaaagagggccctaaaaagcgcaggcgacaaacacgcggtgtgaaaaaggagccgctacctataagaccacgtggttgtactaggagcccacaatgcgccgccaatcagtggataatctcgggagccgtt

SEQ ID NO: 504006 - DNA, 517 bp, Homo sapiens
tactatggatagaaacagtgttgcagaagaattaggaattgccaagtaagttgctggtcagggaaaatttcacagaaaaagtactatttgattaaagatctgaaggagatgtgggaactagatacgtagatatttattaaagagaatgtgatttgggaaaacggacagccagttcagagatcccaaggccggagcatgtttggtatgtgataaggtttggctctgtgtcccacccaaatctcatcttgaattatacttcccacgtgttgagggagggacctggtgggaggtgattggatcatgggggcagttctcccatcctgttctcatgatagtgagggagttctcacaagatctgatgatcttaaaagtggcagtttcccctgtgcacgtgccgtctcctgacacctgtgaagaaggtgcttgcttctcctttgccttctgccatgattgtaagtcctgaggcctcctgagccatgtagaattatgaatcaattaaacttatttataaattaaa

SEQ ID NO: 504007 - DNA, 417 bp, Homo sapiens
  misc_feature (53)..(53): n is a, c, g, or t
  misc_feature (280)..(280): n is a, c, g, or t
ttactgtcccatgagactgtactggacgggtgcagcccagagtgggcgcagtncactaaggtgcggcccgccctgcctgcccggtgcctcccactgacctgagcttactaagggatggcagcagctccccagaaaaaaacgacactgcgagccctcgggacatgactgagttccacctcctgaagccagactccacctcttgtgcttttttgcttgggaaaaaggagtttttctttagaaacagtgccaagaatgatataaactacttttaactaagatnctaacaggcttttaacacaggtgtccatctccactctgtccccggtctctgtcccagctcaggctgcgttctctaactcatactgtgaagacaaccgtgtttttgattaaaaaaaatatatctacatagtcttaatt

SEQ ID NO: 504008 - DNA, 391 bp, Homo sapiens
ttttctgtctcagcctcccgagtagctgggattaggggcgctcaccaccatgcccggctaatttttgtgtttttagtagagatggggtttcatcgagttggccaggctggtcttgaactctcgacctgaggtgtacgcctgccttggcctcccagagtactgtgattacaggcgtgagccaccgtgcccagccaatttatattctttaaaatatttccatgcttgttttacggtccagcatatggtttatcttggtgaatgttctatgtgtgcttgaaaagatggtttatcttgctgttggtgggtgcagtgttctataaatagcaattatgtcaagttggttgataatgttcttcagatcttacatatttttaataattttctagttact

SEQ ID NO: 504009 - DNA, 220 bp, Homo sapiens
gttgcaaggtcagagggagaggcgccagacactaagagccaggagtggacacagggacccttcaggtcaacagctctttatcaaacacctgctgcgtgctctaggccagatcctagagacgcaggctgagcacgacccgtctctgtgcctgagctcttggttggatgggaggcgccccttaaccagatcatcagcacacatggtaaggagtgtgggacgg

SEQ ID NO: 504010 - DNA, 788 bp, Homo sapiens
ataaagaaataaattattgatggcatctggcatcccaagatactgggatgtgtgtgggggtatgaggtgtggtacttttgtttgttccaaggacagagtctcactctgtctccctaggctgaagtgtagtggcgtgatctcgagctcattgcaacctccacctcccgggttcaagcagttcccctgcctcagcctcccgagtagcctgggattacagtgctcccggccacacgcccggctaattttgtattattagtagagatggggttccactgtgttggccaggctggtctcaaactcctgacctcatgatccacactacctccagctcccaaagtgttggaattgcgggtgtgagctaccatgcccagccgtgtttccatgtcttaaattctttattcggtacgagatggggtctcacttttgttgcacacgcctggtcgttgaactcctgacctcgagcagtcctcctgtcgttggctccccaagggagctggacatcacaggcatgatgccactgtggcccagccccaagaatcctgtacttttaacacacacttcctaaattatatttgaaccaaccatcccatttaagtaagtcgtggggttaacgaaaatttcaggccagggggacagaaatgtgtcctagaaagaggctgtggtagggaaaacccgaggagaacatgtcattatccaaggctgtccaacatagaacgttcaatagagtgaccttggccagcctaaaaggttgctcccagcaggagttaaatataacacttgccgtagga

SEQ ID NO: 504011 - DNA, 133 bp, Homo sapiens
taagtaactctagcaggatcttatcactgggataaggaacgtcactgggataggaacgtcactgggataaggaacgtcactgggatagaggaacgtcactgggatagaggaaccgtcactgggatagaggaac

SEQ ID NO: 504012 - DNA, 1733 bp, Homo sapiens
  misc_feature (1089)..(1089): n is a, c, g, or t
  misc_feature (1298)..(1298): n is a, c, g, or t
  misc_feature (1733)..(1733): n is a, c, g, or t
atctccaatctgtcagtcatgatttccatggctccatatcttctacatcggaaattatgtcaatagagcagcgacgcagtggacattacaaactgcaggaatgatcctcatccgtgggagcgacaatgcagacacatcgatgttctattcctcatggaatacctgaagtagtcctggacgataagctgaccattcttctgtaacactgtctatcagatacatgctcttaaagcgtccagccaaccgtggttcttagtgcacttatgaagatcaagctcatgtactgcgttggtatttcgtacttgttactcttcctgagaatgattgtacacgcgagtgtaggttccttaaaaataaagttagaacaagacaaatatgggataagaagaggatgagacacaaaacagaagaataataacggcgcgcggccgtggatcatgaccaactatattctccgctcagtagggtggctccaacaagtcttctacacgtgagtgatcctcaggggtctatctctttggagtccctggtggcgcgcgaccacacttatatgagactgtggagaggctaccgctatgtcattgtacaaactttgtccgcgggcaatggtgcctgcagtatagcgttatataaaaccaaactttgtttccacgcgcgaactggagggggagaaaaccaggggggcggatcatctgcgtgagcagagctttctagagtggggataggctgggaaacattctagattggcctcagcgcgagaggagtgccgcaccacgatataatcttgtggcgcccgaatacacgttcgcctttaggacaaatgtgggatatttcccacggcgttgcgctcctctcagatcggtgtgtaggaaatatattcaagaggaggatcctcgggacaaagtgggtgtgctcgccatacgatggggtgcttccacaccccctttgctttcaatgggccctcctatatgtgaagcaaggcccgcggtattaggagaaaaaaaaatttgagggggcgcaccggagggaagtttgtggacagtgcaactcacaggccagcctcactttcactataccacggggaacgcncggcgcgcctcgatcagcaacaacagacgcgacgaccaccaacccagagtgaagtgcagcaaccagcacgcctagaccaacaacacgcagagcaccatccagagcgccgacatctccgcacacacacgagacatcagggagcgcagcaacacagaacacagcggcaagcgccacgacccgaaataaaaaagcagacgcagcaccgaccnccacgcgcgcgacagcctagcaacacacaaccgcgtgacacacgccgcaagaaccaacatgcacgaagccgggaagcggcccactctcgcgcaacgacccccgcacacacatgagggcaacgggagaagaacgatagatgcacacactagacaccagggcacacaaccacgcccgccagggaggcccccacaccacacacaggccgcagaggcggaccaccaacgcagtgctggcagcgaacgaaacggtgcgggagacatcgcagagcaatacgagcgcacgcaggcagaaacaagccgcacgcggcagcgcagcagacagcagcgccatcagccagcacacgcgcgaagcgcggcggccacacacaacagcaccgacccaagcgccagccaggcagtgagccaacagatacgagaggagacacagaacaggcn

SEQ ID NO: 504013 - DNA, 213 bp, Homo sapiens
tcctctctccttcacatgcctgtccctctgaccaaactctgggggtgggcttcctcaggaccttgtcctgagcactctatatctctctttatggatcacctcacccagtctaagtttctctatcacctttatgcagacttcagaaacagagttcctgagtgagggacactgagatccaagggcgcctgcacaggacagccccacagagagcgt

SEQ ID NO: 504014 - DNA, 173 bp, Homo sapiens
tatttaaattggagctttattttcttgggagggagggtctggcttgtcatccaggctgtagtgaaggggcttgtcataactcatggtttccacaacctccggggctgaaatgatcctccagcctcggcttcccaagtagctgggactacaggtaagtgccagcacatgggtgg

SEQ ID NO: 504015 - DNA, 891 bp, Homo sapiens
ggcgcagagcggtttggtcgggcgtcgatgcggtgctggtctatcgctcgtggaatgcggctctacctcgggcagcggaagcgggcggaggccggagaagtgggcaaaaatcgaacgagggttggggtgaacaggaacaatggccgcgacaaacaagcgagaacggtggcgtaagatccaacggaggtggaaatagacccccgtcaggacaggttgggaacacgcagagccgcgcaggatacagacgcatcccgctaccggtggggtgaagcacgtccctcgagtcgactacaggccacgggaatacgtggcagcttcgaagcagaagtcggacgctatatggcagacagtgcagaatcccggagactggatcaattccgagtaagctgtcgctcatttcacagaagggtgggtgagggaagatcggagcaggactttgagatagatgcgatctgacaggtggcatgaagcgccgtccagtcggttgcgactgtagagacgcgcttatgagaagtcggttagcacctggttgggctctgttcgaaagaataacccaaactcggtgtgtcatgcaccgctataccacgagtgcgagcaatcattgcgccaatgggagaatcccaagtttggcctaaggtcgagatagcggtggaaaggagaagacgtctaaaagtgagaggcacgaggaactgagggtttgagtaagtaaatttcgttgtgaacatactgtgagggtttgagtttggtggactatgggtcgtaacggaaaatttgtttagtaaatatggtttgggttgttggttactttaaagttaatttgaattctttacttcaaggattgaattggggaacaaggactggtcgtaagaccttcggtgtgtgggagcacta

SEQ ID NO: 504016 - DNA, 566 bp, Homo sapiens
  misc_feature (404)..(404): n is a, c, g, or t
  misc_feature (526)..(526): n is a, c, g, or t
  misc_feature (560)..(560): n is a, c, g, or t
aattcgggccgcgtcgatacggctgcagacgacagaaggggctgtctcttggatataagccattttaactggggcgagatgatatctcattgtagttttgatttgcatttctctaatgatcaatgatgctgagcaccttttaatatgcctgcttgtcatttgtttgtcttcttttgagaaacgtctattcaaatcctgtgcctatttttgattggattattagactttttcctatagagttgttttagctcctcatacatattatggttcttaatctcttgtcagatggatagtttgtaaatttttctcctattctgtggttgcctcttcacttttttgatgctccttgctgtatagaagctttaaacttaagtgatcccatttgtccattttggcttgatgcngtgctagggggtattactcacgaaatctttgcccagactgatgtcaggagagtttccctgttttcttgtagtagttcatagttgaggtctagattgtctttaatccattgaattgcctttcnggtgagagaatgaagtcagtttcatctctggcangggatg

SEQ ID NO: 504017 - DNA, 488 bp, Homo sapiens
  misc_feature (143)..(143): n is a, c, g, or t
  misc_feature (149)..(150): n is a, c, g, or t
actaagtctttaaaatagtttgcagccttctcccacaggagaccagttgaaagataagtgtgattttagatctttcttgcccataggtgtttccagtgggagtcttcccatctgggtcctacccaaaaggctggggttttttntttttnncttccaattccccatccaccaccgcctgccagctcacactaatagatgattcttaattgccaaatgtgttagaggtttggtatatcctactcctgggccttacatgtcgcctgtggggcttaagaccaggtttgataagtaggaactgaaaggtcttccagattcacaggtagaaaattttatagacatttctggttaaagaaatatatcgattttatggtttttcaattatggttactggtaaatacctttggtacctgttcatggattattttattctaaaatattttgtcaaatggtggtatcaaccaagttaaaaagaaaggttttccatgtcc

SEQ ID NO: 504018 - DNA, 170 bp, Homo sapiens
gctctcccaccataacccctacttcctccactgactcctggaccatagtttcctataatagttggaacagcaagagaaaacaaacatactttgatttcccatgatcagcctaacactacagatgattctattttatatccatccagtcttttaaacaagcagttcctcat

SEQ ID NO: 504019 - DNA, 1515 bp, Homo sapiens
  misc_feature (501)..(501): n is a, c, g, or t
cacctatatcgagtgttttatgggcggccccccttttatgggtcccttctgcggaagcgagttccccccccacgggttggctccgccacaaatgccccgcgcctctttgtttataactggtccgcgcccactgtaacttatatttaccccggtctctttataagagttatccccggggccccctttgtgtgtgccccgaatatttctggcgcccccgaggagcgctttgtgtgtctccccctcgtcgttgccgtgcccctctctcccggaagaggtcccccccgggggttgagcctttgccccctacaggggttcctcaaattccgcccaccctgtgtggggcccctccgccaacagggtatttttgccgaagagattttattaataggggggtaggaaccccctcttgggggagcccccccccccccgataaagtccttgtggcaaaaattgggggaacactatattggcgccaatctctacgggggaaatttttgggcnttctctatggaaaatgttctgttctctcccacagaactagactacttgtggcagatatccgccccttgggaccccccccacgcggcttctcatcagcccgggaggagttcttttgtgtaatatataagcgggaattatctagaaatcggtttatagagagagacaacgctcaccccgcgagacacccctctggagatctctcccccgctttgtggttgaaagagaatataaagcgcgtctccccaaataaatcgcccacactttttccctctaattgttgtcacgccacgttgtctctgtgcgctctattattgtgtcttcaaagagccgcacagagatcttgctgagtatatcacttgtctgctgtgttctcggcggagagggctcacacagctgatattaaaggagagcctctcctctgggagacactctgggagagcacccaccagagagagatagaccctacacgccccacaccactctctcacagcctcttgtgtgtctcttctcttatgtctgtatcacttctgagaagacccactctgtgttgcccacacagagggccacagcgggcgctctggcacacatgtgttcactttgtcccacacagagaagtgtgagtttgctctgagagagaagagtgatgtgaaagaatagtgttgttctcttggagaaacatttaccgctttaagaggaatagtcacatgtggggaaaatttccccacaggtgtaagaaatagtgccttgcgttctcccctttgcccttcttgcccataggattcttaagatttctctgaggcctctccccagatacgccagaagccatgttaagccccccagaacccggtcccagtctgtctgaccctctgaactgctttgaagacccctcccggaggttccctgccgctgcgttgaacacccagtgccctggactccctgctccctgaggcgaatttaccccgggtcccactgggtccgacccgagttttgaatttaaacctgcctccccaccca

SEQ ID NO: 504020 - DNA, 1108 bp, Homo sapiens
  misc_feature (115)..(115): n is a, c, g, or t
gcacagctgctgcaggtgctggccggcggccggttctgtgccgtgctggagggcggctaccacctggcagtcactggcggagtcagctgtgcatgacagtacatgtacgctgctngtggtgacccggtcccactccctgtcagggcctaatggcgccatgtcagaagtgcccttagagtccatccagagttgcccgtgcttgcccagggtcccgtcactggaagagcctccagcagcagagatgtgaccagctagtagccgatgtagccccgagcatgccgacgtccccacgaggggagtgcctccacctctgcatgcctgtggcgtgtcctacgtgtgtagaggtgcagctgcgagtcttgcagccgtagcttccacttccgtggatccaaggcctgtgcctcttgtgcaccgtgatctccctcgtggtacacgcaaccgtcgtgctatgcccctgagcacagcgcccggattacttcacagttggtatcgttgccacccgtgatcgttcagtcccaacaggacaggcgtcaagtccccttgacggggaagggagaaccatgcaatgtcccttggggccaagtggccaacgaccgaacgattcgccttggaggccccgcgtgaacgggcacaggcccttccatctgaccaacctctgtgggacatgcattcccttggtaacccttcttttaaagcacttaggtggcacttgaccacttggggaaactttggtggggcccaaaggggctttgaacgacgcacatggttgggcgcgttacttaaccagtacaacgttgccaaagcctttctcgacgtatcgccatacaatggtcctttgcccacagggcacaatatgccctaacgcccaccttgtgggggaacattgttttggggcccttgggtcttaccccggggcgaaaagaaggatgtgctcctttgggaatcccacccatattgagcgacaaggtcccccctatcaggtaagcggaccttgcccttgcatagaccggtctgagggtccgcccattgaggtgcaacacatgagaacatgggtgaaaacccggtgcgctgcgtttccctcacaggaaaccgcgttccgtgaccacca

SEQ ID NO: 504021 - DNA, 170 bp, Homo sapiens
atgcccaataaaaccacaaaaattatgctgttgtggtggcacatgcctgtaatctccactatttggtaggctgaggcagaggaatgggttggagccggtttgtggaggttgcagtgagctgagattgtgccactgcgctccagcctggcgacagaaggagactcagtctc

SEQ ID NO: 504022 - DNA, 568 bp, Homo sapiens
cttacgcaatggttatgtgagggtgtacggtagaaacgctattattcatcctactgtgggtaattgaggagtatgctcacgatactgcgtagctgggtttggtttaatccacctcaactgcctgctactgatggactaagacttgacgacgacgtgacggaacacggcttacgtttacgtacgggacgacgacttcggtatatgacttgacactgggggctacgtttttgtcatgtgacgacacgacagcaggccggatgtccgacggggtgccttgggcaacctctgggactcagaagtgacaagggggctattcctagttttacttgctactacgccattatgattattaactgactgagtactcgattggtagtacttggttatggttccttgtccggagagtatattgttgaagaggatacgctattacaaggactatggctgcggttgcttgcgtgaggaaatactagatggcagcttctgtggaacgagggttactattccggttagaactggaataaaagctagcatgttaatttctaggcctactcaggtaaaaatcagt

SEQ ID NO: 504023 - DNA, 914 bp, Homo sapiens
ggctctctggccttccagacactgttttcgaaatcacggagttgcaactctctagaacttgaatgtcattaatgaacgtaatgataccatgccacctattgcacagctagtacaatcttcagagagactcgtctctgcagccaggtgttctgtcaaaagtccacaggtgcggacgctctcgttatcctgaaggaaaacctcaaggtcttgagcgtcaagttcgattgacatgagggaatctccccccctggatgtatgggctccgaaatctggaagagctgtagcctagttggctctctaagtcatgatatttccagaaatgtcacccttgagatctctgacgggatcgtcaaaagccttaaaagttctctctagtcaaaaggcacacgtatgccagaaagtccctcaggtcagtggctagagtgtgaccaggccattctccagaaggatgtgcatacgtaatgactggcatcaacgctgggtgatgctcaacaacttaacagaagatgagcaaatctgaccagaagctggaagcttggtgccactgatgaccttgggagcagtattcctcatgctgtgttcaggactagctcagcctccgagggaacttgcgaccctggacggtacaaacgaatcctgacactctactccgaaacgaaactcgttaagctttcaaggcactttaaggaccagctagacacgctgctagacaacctggttgcgccctataccaggcattcaaaccgtagaattccacaagaaagccttatgcaatgggcagacgctcacccagccctgggacaccgcccgtaccctgttagttcacacagtaaagctctcgagggatctggccctatcccaacccatgctccctattttcaacaaggagccggaatccttgtgacatattcgga

SEQ ID NO: 504024 - DNA, 795 bp, Homo sapiens
  misc_feature (325)..(325): n is a, c, g, or t
tcccaaatgaaaatcgctttatatttatactcgctttggtttggatatttttggcaacaaaaaccccctggttccaaagtctcagacgtgatacctgaacgtgtccaaacgtggaaaagtggaccaggcgtggtgggcgcaccccgtggtcccctctctctcctgtgggcaaggcgcccccacccccaggggaacagagggtctccaggcgggccagctctcactgtgcacgcgtggccaccaccacttatacccatatacaggctcactcactcattgtgctcttctcgtggtgtttacactgtgcccacctgtgtgtgccgcnctctccacactgtgccctgtgaaatgtgggcgccagagctctccacacccctgtgtgattcccctgtgacagagagggacaactctgtgacaaccagtgccaaaatagcccgcacagaactctcagtgactgtgaaaagaggtttctgtggggcacaaaccaaatctgtcatatatctctctccagaaatgtgctcactgtgtgcgtcaactgtagacccagaagaaaccagcgcggccacaaaagaagccggacaaggtggggcacttcttctatctcagaagaggtgtgaatctccctccgaacggagacactctctcgacgggaacactgtgggtatctcatctcccactctatctctataaccctctccacaggtgggcctgtagaatgtggagcatttgtgtcacggtgcccactccatccctcgggtatctcgcggccaataaaccctctcaaccctccgacga

SEQ ID NO: 504025 - DNA, 140 bp, Homo sapiens
  misc_feature (106)..(106): n is a, c, g, or t
taggaggagaaggtgaaggagcagctggaggccggcaagcccgagccgtcatcgaggaggtggactggccaactcgctcctcggaaggcgtgactgggacctcaangagagatggtggccaagcaagcttggagaaacta

SEQ ID NO: 504026 - DNA, 143 bp, Homo sapiens
  misc_feature (97)..(97): n is a, c, g, or t
  misc_feature (106)..(106): n is a, c, g, or t
  misc_feature (133)..(133): n is a, c, g, or t
atgaaaagaagaagagtctaaatttgaagaaatgaagaaaaagcatgaaaatcaccctaaagttaatcacccagggaagcaaagatcaacctaaaangagggtatnggaaggagactcatggatttggatccnaaatgacctt

SEQ ID NO: 504027 - DNA, 312 bp, Homo sapiens
ctgatgcgattcttgaatcactgcgaagctccgcctcctgggttcaagcgaattctctgcatcagcctcctgagtagctgggattgtaagcacccgccaccatgcccggctaatttttgtgtttttagtagagctgaggtttcaccatgttggtcaggctggtctcgaactcctgagctcaagtgacccaccctcctcggcctcccaaagtgctgggattaaaggcgtgagccactgcacctggtctgaaatgcataatcttttaaaactgaaagccatatctaatagtgttcttaatttgtcaagaatcgg

SEQ ID NO: 504028 - DNA, 211 bp, Homo sapiens
tagcaaccggcgttcaatggaattcctttttaccaaaaacccagacgttttattccgcaaagcacatacgcacatacttcaaacacggaaaattaattcggaagtgaatgccataacaaatcaactactgaccatcacgtagcaggaggtgacatggaccaactggctttcaggtccctcataccgcctgtcggtggggcggaagaaccgg

SEQ ID NO: 504029 - DNA, 120 bp, Homo sapiens
gtaagagcttatcacctcacgatggatcacgtccttagtaatcattttgcctttattctgctttcctaagtccttgttattgccttctacttaacacttacaacaataacttcacttagt

SEQ ID NO: 504030 - DNA, 491 bp, Homo sapiens
acacgggtgatgcggttgacgcctgacttcgccttttctccccgtgacccaaaggtggcgacctgcacatgacccagtttttccgaggcaatctggctggcttaactctccgttccgggaaactcgcggataagaaggtgatcgactgtctgtatacctgcaaggaggggctggacctgcaggtcctcgaagacagtggcagaggcgtgcagatccaagcacaccccagccagttggtattgaccttggagggagaagacctcggggacttggataaaggccatgcagcacatctcgtacctgaactcccggcagttccccacgcccggaattcgcagactcaaaaatcaccagcacaatcaagcgtttaacgacggcacctgcatttcggtccccccggtagatgtgtgcccagccacagttcgtgcacccggaacaccgctcctttgttgacctgtcaggccacaatctggccaactgaatcacccgtt

SEQ ID NO: 504031 - DNA, 752 bp, Homo sapiens
  misc_feature (318)..(318): n is a, c, g, or t
agcggagctggccctagtgagcccagcgccggcggcatgtcctccggggctagtcgcgagcgccctgcagcgcttggtagagcagctcaagttggaggctgggcgtggatgaggatcaagggtctcatcatggcagctgcatgagtcttcaaacagatactgtgagtgcaagatatgcctgcgaggatgcctactgctggtgggctgttccaggtggaagtaaccccttccggagagcctagatcctgtgctttactctgaagactcgagagaagttggctgaggaagtgccttcagaggcacaagtgtgatgaagtngactggctcttcgacgtctcaaggaagagacgactgtttctcctaagcattttacgagatctttcatgccctttgcctgtggcctggtcctatagccgaaatcacaggatattcatgagttactacttgagtgagaaaactgggtgaaggaatagaaattttaatatagtaataactgctagtttgctttgtgcaagtacttttatatcattaagataaacaaagaaccttacgaacaaacatacgcatatatgctaccgtctttcataagtgagttactaagatttctatactctggaatatcatgtatgtgtcatttactggatgtatagattttaggaaggaccatagttctgtctatgtaaacaagtgaatacttatagaactgtagtacctggaagttattattccgtagaaaattgtcttcgtcatga

SEQ ID NO: 504032 - DNA, 167 bp, Homo sapiens
gccaggtacatctgcctgtgatgacaggaaagaaatcaggtgtgattcatgttcttgtttacccatagccacctctcctcatacaggcttctactgcaggaaactacacatccagtggtggtaaatcacctaatttacatctacatgcattgaaacaaggtcactca

SEQ ID NO: 504033 - DNA, 224 bp, Homo sapiens
ccagttacttcgagtctcccttcatcatttccgacggctctacggctcaacattcttgtgtagccacaggctgccacggagcttcccgtcattattggctcagagctttcctgcactatctgcttcatcctgccaactaatatttcactttacatccaaacatcactttgggcttcgaagccgccggctgatactggcacttttgcagactagatggttggtgt

SEQ ID NO: 504034 - DNA, 284 bp, Homo sapiens
atacaaattatggctgaaaatagtgtattaacatccactactgggaggactagctaggcagactcttccatttacgattctaaagtttctgatattttcaaggaaaacttacttattggatctactttatatgtacaaaaagagatgcctcacattgaaacatgagtgatatggcttcaagaagctggaaaacacgaagaacttataagagccttaaaagacattaaagtgggctttgtaaagatggagtcagtgaaagaatttgaaggcttgcatactccgga

SEQ ID NO: 504035 - DNA, 728 bp, Homo sapiens
  misc_feature (31)..(31): n is a, c, g, or t
  misc_feature (80)..(80): n is a, c, g, or t
  misc_feature (95)..(95): n is a, c, g, or t
  misc_feature (100)..(101): n is a, c, g, or t
  misc_feature (117)..(117): n is a, c, g, or t
  misc_feature (128)..(129): n is a, c, g, or t
  misc_feature (145)..(145): n is a, c, g, or t
  misc_feature (156)..(156): n is a, c, g, or t
  misc_feature (160)..(160): n is a, c, g, or t
  misc_feature (213)..(213): n is a, c, g, or t
  misc_feature (219)..(219): n is a, c, g, or t
  misc_feature (251)..(251): n is a, c, g, or t
  misc_feature (302)..(302): n is a, c, g, or t
  misc_feature (312)..(312): n is a, c, g, or t
  misc_feature (342)..(342): n is a, c, g, or t
  misc_feature (347)..(347): n is a, c, g, or t
  misc_feature (421)..(421): n is a, c, g, or t
  misc_feature (426)..(426): n is a, c, g, or t
  misc_feature (434)..(434): n is a, c, g, or t
  misc_feature (453)..(453): n is a, c, g, or t
  misc_feature (455)..(455): n is a, c, g, or t
  misc_feature (475)..(475): n is a, c, g, or t
  misc_feature (524)..(524): n is a, c, g, or t
  misc_feature (536)..(536): n is a, c, g, or t
  misc_feature (552)..(552): n is a, c, g, or t
  misc_feature (560)..(560): n is a, c, g, or t
  misc_feature (584)..(584): n is a, c, g, or t
  misc_feature (600)..(600): n is a, c, g, or t
  misc_feature (602)..(602): n is a, c, g, or t
  misc_feature (728)..(728): n is a, c, g, or t
tctatctcctgcccttaaggaaatctattanattactaagccagaaaaacaatatgcaacaagctgcttcaatgtattcnttcagatgtcaaacncaganntacgcatttactcctntgagcataatnnaacacactaccttganacatgcttgtnaacncgctggtcctgaaggcacagccttatgcccacctgccgttagaaggcaaccangatttncttcaggcactttttttccccgtgtgtgttangaaatcatgctgtccaaccagtcttccagctcttcctcggtaacatttttngaggtacttngttgctcaggttccatgtttttttcttcantcacngatggttttgcacaaacttcttcctcttggaccacctccccatcttccttggatttcaggtcctgagacgtctnatctngtaagatnttatctccctcttttatangngcatctaaattaagcaacanatctagttcttcttccaaatggtctcctgctgactgcactgggggagtnggctttctgcanactcccttgaaggacncgggcttnggttgtctttgcccagcaacacanggcagccagcagccananatttcagctcaaagatgggcccccttcctccaggcccaagggcccctttaactgcatccctaatcccttgccatcatcagttctctttggtttcactgaggaatctctaaaggactgtaccctggn

SEQ ID NO: 504036 - DNA, 983 bp, Homo sapiens
ggtcctgcctggccggggccgcacggcggtggctccctcccgtgcgtccgtcgtgggacctttgtccctgctctgccctgctgtgggtgacagctgctgctgctccgggtccagcggcagtgggctgggtgactgcccggccttgtggcccctgctgccccacaaatgataaacgctgagggcttcggccagggactggtgataatacccacatccccggaaactagggtgatcagcggttggcaggaacccagtgtgtgcccttcgcagggaatcccatgcgcttcgagggccccaggaaacgccaccagaacgcacagcgatgcctgtgggacgccgccggcgggccttgggggagtggcgcgggacgtgctggggccccagagtgccatcggcgacgccaggacgccggctacgcacgaagccggcaggaaaggcatgttgcctcgcacaggtccgtcagggtagcggcactttcttacccaaggtgccggttgccagccgaacagtggattaaccccggtgttgcgctcgcgtgggacgggcacttattgccagcctgcccaaggcgaaagggcacactatccacaaacaggtggggagaaaccgaaagccggctggcgggcacgctcggcccgtgacacgcgacacataacagtctggccgcccctacattggaaaaggtggcagcaataggcttaccagtaaaccagcaccgcggccattcacgggtatgcgacacaccatgaaaccagcagacgcacgaaagaggggcacgggcttcaaccggcgccacgcgcaattttaaaaccctgtgtggcctttgggggcacaccacacgaggtttgacccaccgaggacgagggggccagccacgacgcggcgccatccaggcacaaaacacgggccccaaaatgttgtgcccagtgtggattatatccaccgcgcagttggacattcgaacagcagtgggagatataccc

SEQ ID NO: 504037 - DNA, 149 bp, Homo sapiens
aatccaaccccaaaaaaaaggcttttgtcagccatggggcaatacaaattaataccacctccggggtttttaaaacagtgacgatacggcagttccaaaatctgactgcagtatctaggtttctaagtacaaaaaaaagttcaacagtt

SEQ ID NO: 504038 - DNA, 411 bp, Homo sapiens
ccccgtcacacttatcgctactagctattttccatctttattttttcattaatccagcaatgctcctttaattccacaatcatttatatccagagaatacattgctgtctattgtgaaaccaaatattattagtccaggaattgttcctaataatcgaaggaccataaattgtattcccaaggctagggaccgttgtctgtgatttacacaccttaggattacacactgttataggagtaccgtccataaaggtaaaaattattacaataaagaatatgctaaggaatatgggcagtttcgcacaatgagtttcacattttccagctttggcttcaaaagcaaaagtttctgcagtgtatgttttttctgttttcctttctatacaggaacagttgtaatataccttttgg

SEQ ID NO: 504039 - DNA, 1390 bp, Homo sapiens
ggcccagcgagactcagcagtcccgggccctgaggcctctcttccccatctgagctcagcaggcccaggaggagtcacatcgtcccagtgcgccagcagagggcagtcgctgtcaagcactgggtgcatcatcacacgttcgctgatggagagtctagatagcttcacaggaccatccgaagggctccagtggacacaccatacctgagtactacgtgccccactcccagggtagacggaagccatagccattcctccagtacatcctgttccacgtgcgtggttatgaggcgcaacgatgaggatgggcggacggacaacctggctggatacctgaagactagtctgggcgtccctgcgagtcagacgaggcgacggagaacgggagaatgctaccgagtgagttgcccacttacactctgctttccagaccagacatcggtgacgccctgacgggctaccatgggacgctcggtaggccccactctgaagactaatctcggggaagagactcttgctcgccgagtcaggggaacccatcgatgttgtcacggggcaccaagacacaagtggacttgctccattagatcagacggccatgccgaaggatgtgacgtggcacgtggtacccccgcattcacggtgatactgttagttcaccacagaccacacttggcgagccatcatcggtcgggcgaccaatagcttttgtgacgagacgagaagagacacgcgcgggctactgcatgagccgaattggtctgacccttggccttagttggcggcgggacccattgtgccgaattgttgagccaattcccggacagtaacatggacaaggccaccggggactggggaacggaccatataccaagtgggacgccgtggcgtaccaacaggcacgtataatgccaccaccggaaagagaggcctgggcggcagtgacagggcggcacgaaccccataggttggccaggattggtaccgggaggcggccatcctgggcgcacgcgcattaaggcaaaacccccgggtggggaaccagggcgcgttacagctccaaacacaacgggggaacccgggggaggtaccccccgctgagaacacggagaactgcgcaaaggaaacaggaaaaccaacatgcggaaaggcgcgccccatcccctgagagagagccaggagaagggcgaacccgccgggcacgtaatggagcaacctggggaacacccgtggggcaccgacaaggacaaacacacgagcacgggagggaggaaacaccggcgtgccacgtcgatgaggcatggcacgagcgacaaccgctgtggaggggccccgctgacaagcacaccacgcgcgacacacgatcaagcagaagcgaccagaagagaag

SEQ ID NO: 504040 - DNA, 1054 bp, Homo sapiens
  misc_feature (557)..(558): n is a, c, g, or t
  misc_feature (568)..(568): n is a, c, g, or t
  misc_feature (574)..(574): n is a, c, g, or t
  misc_feature (583)..(583): n is a, c, g, or t
  misc_feature (593)..(593): n is a, c, g, or t
  misc_feature (603)..(603): n is a, c, g, or t
  misc_feature (615)..(615): n is a, c, g, or t
  misc_feature (622)..(622): n is a, c, g, or t
cagaccgaaacctcaacaccaccttcttcgatcccgccggaggaggagaccccattctataccaacacctattctgatttttcggtcaccctgaagttgatattcttatcgctaccaggcttcggaataatctcccatattgtaactatatctatctccggaacaaaatgaagccagttggatacataggtatggtcatgagctatgatatcaattggcttcctagggtttatcgtgtgagcacaccatatattgtactagtaggaatagacgtagacactacgagcatatttcacctccgctactcataatcatcgctatccccaccgggtcaaagtatttagctgactcgacacactccacggaagcgaaggatgaaatgatctgcatgcgagtgctctgagccctagggattcatcttgtcttattcaccgtaggtggcctgactggtattgtattagcaaattcatcactagacatcgttaattacatcgacattgtactaattgttgtagctcaattccactatgtcctatcaataggagctgtatttgccnncataggaggnttcatncactgattncccctattcncaggctacancctagaccaaanctacgcnaaatccatttcactatcatattcatcggcgtaaatctaactttcttcccacaacactttctcggctatccggaatgccccgacgttactcggactaccccgatgcattacatccactatgaaacatcctatcatctgtaggctcatggcatttgcctctaacagtcacgtaactattaagtaatttctcagtgatttgagaatgccttcgcttcgagagcgaatacagtcctacataggtagaagaaccctccataaacctggagtgactatatggatgccccccaactctaccacacatgtcgaagaaccccgtatacgataaaatctagtacaatactaaggacggaatcgagccccccaaagctggtttcaagccaatcgccatggactccatgacttttccataatcatactttaaacttaagggaca

SEQ ID NO: 504041 - DNA, 137 bp, Homo sapiens
ggccccgggttaaaaaggaacctattaacctttgcccggaatttatgggtggggaatggcttgtcaaagcatgttagttttataaggcaattggggttttttttgttaaaacacccccccaaaaacagggtttgtta

SEQ ID NO: 504042 - DNA, 798 bp, Homo sapiens
  misc_feature (557)..(558): n is a, c, g, or t
  misc_feature (568)..(568): n is a, c, g, or t
  misc_feature (574)..(574): n is a, c, g, or t
  misc_feature (583)..(583): n is a, c, g, or t
  misc_feature (593)..(593): n is a, c, g, or t
  misc_feature (603)..(603): n is a, c, g, or t
  misc_feature (615)..(615): n is a, c, g, or t
  misc_feature (622)..(622): n is a, c, g, or t
  misc_feature (745)..(745): n is a, c, g, or t
cagaccgaaacctcaacaccaccttcttcgatcccgccggaggaggagaccccattctataccaacacctattctgatttttcggtcaccctgaagttgatattcttatcgctaccaggcttcggaataatctcccatattgtaactatatctatctccggaacaaaatgaagccagttggatacataggtatggtcatgagctatgatatcaattggcttcctagggtttatcgtgtgagcacaccatatattgtactagtaggaatagacgtagacactacgagcatatttcacctccgctactcataatcatcgctatccccaccgggtcaaagtatttagctgactcgacacactccacggaagcgaaggatgaaatgatctgcatgcgagtgctctgagccctagggattcatcttgtcttattcaccgtaggtggcctgactggtattgtattagcaaattcatcactagacatcgttaattacatcgacattgtactaattgttgtagctcaattccactatgtcctatcaataggagctgtatttgccnncataggaggnttcatncactgattncccctattcncaggctacancctagaccaaanctacgcnaaatccatttcactatcatattcatcggcgtaaatctaactttcttcccacaacactttctcggccaccgtccgaccgtatggccgacacgtactaccgttgtagctcacttccacctatgtncctatcaatacggagctgtatttgccgatcataggaggcattcattcactgat

SEQ ID NO: 504043 - DNA, 1547 bp, Homo sapiens
gcgggcggcggcggccggcgggcggcggatggcggcgtgcggagtgccggtggcgacgacgcccgctgcggtgcggctgagcgccgagcgggcacaggcgctgctggccgacgtggacacgctgctgtatcgactgcgacgggtgctgtggcgcaggggagaccgcacgtgccatggcgcggcacccgaggccctgacagggcgctgcatgagcccgacggacaagcgccatggagccttcatcaccaaacaacagcagcacagacccgcgctgccatacgccgagaagctgcaggcgccctggagcattcaggcaggcacccagcaggggagcccggacagccaaggccataggaagggtcattcgggcaccgagagcatacatagaaaccagcagcatctacacattgatagccaagcgaccgtggacctggacagccacaccggaagaccacaaaaggcctaccgatgactagagggcatgaccacaaagacacttgagacaggacaggaaacaatggagagagacccagataggaggacaggtcagacccaagaacggagtgggagcgatgtagggcacacaggcaagcacaacgtgaaagtgggaacagtacgggggctcacacggggcaggaacatggggcaatgacaacagacagacccgagattgagaaagaccaccgaaactggtagcagccgacgcgatgagatagagataggaggacatattatgaaaccacggaaagctaacagagagatacacaattgaccacggcttcaagccgacgagagggcaccgccttggaggacttcaccacattggcacagcaaatagacaccagaagacataagcacattcagatatccagctgagaggggacacccagaagacaaatttagggaaccacagcgcaagggtgctataccgaggcctttgaggaaacaccaggaccgagcatatccattcaggcgtgagggtaaccccggggttaggtctgtgagaccacaggaaaggacccagtaggaacgactttgggaccggcacgaaggatgcgacgaaggggcgaggacaaatataaattcgaggggaacaaaggcgccgcaaaagggctagggatatacgctatatattacagacggataggcgagagattagtttaccacaaggggaagattacagagaggacatctaaaggcgaagcagataagcgacggaagcgaagaggccagattggatttgagtaggcagccgaactgtgagatatataagagaacatattgcttatcgtatagagaggaacagagcattgattgtggcaatggtaagcaacacagttcgatttagaccattatagcgtgtatgtttacaaagctgattaggggatgaaagtattgaacgaaacatatctgagtgagaatagatgaagagttgcaggagatgttaaacatagaagaaaatggatgcgatgtagacatcatattgtatagaacgtgaagttcaagaacacgattgatcagagatggacataacaaggatatagaaa

SEQ ID NO: 504044 - DNA, 268 bp, Homo sapiens
ggaccatcaccctaaatttattatgcttcaaaaactaagacgattatggaagacaaaagaaaacataaactggacttccacaaaatgaaaaactttgtgcagcaaaggacgttattaagaaagtaggcccagcgcagtggctcatgcctgtaatcccagctactcaggaggttgagtcaggagagtcactcgaacccggaggcagaggttgcaggcagagttgtgccactgcactcctgcctgggaaacagagcaagactctgtctcc

SEQ ID NO: 504045 - DNA, 385 bp, Homo sapiens
caagctatccggttcaatgcccatgctttcccccacacaccatgccaccacatgtccctcaggaaacaggtctgcaatgattcaggagacctcgtagtctacattgatagatgtaaacaggcattggtttctgtcttagagagtgggccagtgaggaaggcatggatcaaagcaaaaagaaaagccaaggagggggaggatggagattaaacaggtccctggttgtcaggggcaaaactgttaatgacggtggagcaccatgaaattaatgacccacccaaagcacctgagaaattgaaccggatagcttgcccggggtaaccgaggctccgaatttccgctaatcaatgggtccataggcttggtttcctagtggtgaacattg

SEQ ID NO: 504046 - DNA, 100 bp, Homo sapiens
ataggaggagagcatctcagccgtgttgcctgacgttggttgatgtatgtagagttgttcatggactagaatacatcgcctctgatcgcgatcactctga

SEQ ID NO: 504047 - DNA, 135 bp, Homo sapiens
gtgtcgggctacgcgttgcgtctggccggcgactgacgagcggtcgtgacatggtggccactgcgctggtggccctggcgtgtggttggttctgtgtctcccccgtcccctctcctggctaccctggacgacccg

SEQ ID NO: 504048 - DNA, 669 bp, Homo sapiens
  misc_feature (52)..(52): n is a, c, g, or t
  misc_feature (585)..(585): n is a, c, g, or t
  misc_feature (591)..(591): n is a, c, g, or t
  misc_feature (625)..(625): n is a, c, g, or t
  misc_feature (628)..(628): n is a, c, g, or t
caggcatgagtcactgcgccagccctagtttcttaatttttacacatcaggntggaaatatcttggttatgtaatcagagtttaattggcagtttatagttggttaagcctgaagcttgtttccggcaatgtagtaatttaccaaaaaatgctcttgagtttagattattttttagaagtagaaatccggggactagagccacctcagtctaattgcctgccacttaattattttcacactccgatggtgacggatttttccctgaatttttcacatgtgtgccaagcaggacctcaagtccacccctcatcccatattcctccagcctaactctggcttacagcaaaatactaaatttccagtttcgtctgatattcccaaatgccaatttcccctccctaattcactttatcaactatttgtccttgagtgtacatttttatattattttaatcttttcttttttttctttcttctgttttttttcgagacggagtttcactcttttcgcccaggctggagtgaaatggtgcaatctcagctcaccacaatctctacctcccgggttcaagtgattctcctgnctcagnctcccgagcagctgggattacaggcatgcaccancangcccattcaatttggtatttttagtagagaaggggctctct

SEQ ID NO: 504049 - DNA, 117 bp, Homo sapiens
atagagttaacatcttcctgagacaaaaattggaatgaccccaggcttaagcccccagtgattttaggggtcagatgcactgacagtgatccacaatgtacaagtgttatgggaacc

SEQ ID NO: 504050 - DNA, 116 bp, Homo sapiens
gtctctacaacctgctctctttaaccaaggaccaaggtaaggggcagcctagaaaggcagaaaactcttagagtgtaactgctctactctaggtcaacatctatgaaaaacctatg

SEQ ID NO: 504051 - DNA, 255 bp, Homo sapiens
cttgagctcggtaggtcgaggctgcagtgagccatgatcgcgccactgcactcagccttgggcgacagagttgagactttttcttcaaaggaggaaaaaaaaggattgacggcggggttttttcttttccccctctcggggccttaaagcttccgggccgtttgtttgccgtgtctgtctgtgcagagtcgtgcgtgctcatatcataatcagagcgctctttgagacccccgagaggggtgcgcagaaagagca

SEQ ID NO: 504052 - DNA, 137 bp, Homo sapiens
tagagtgatcccccgcgagctggcgcgcagcatgcgcgcatcggatggcgcgcaatacggcaccgaggacgcgagcgtcaatgcttccatgccgagcatcagcggcaggccgatcagcggtacttcgtaatcgaagg

SEQ ID NO: 504053 - DNA, 292 bp, Homo sapiens
ccaggataagcactgcagaatcaggtctggggagggctgtcatcatagatggctgtgttttcacgtaacctgcatggcagaaggggcaaggaagctctttgggtcctattctataagggaactaatctcattcgtaagtgcagagccatcatgacttaatctccttcccaaaacactacctctgaatactatcacattgggggtgaagatttcagcaattttggagaaacataacccttcagactgtagtacttgtcttttacctttcttgataatgtcctttgatgctgga

SEQ ID NO: 504054 - DNA, 871 bp, Homo sapiens
  misc_feature (88)..(88): n is a, c, g, or t
  misc_feature (125)..(125): n is a, c, g, or t
  misc_feature (133)..(133): n is a, c, g, or t
  misc_feature (231)..(231): n is a, c, g, or t
  misc_feature (278)..(278): n is a, c, g, or t
  misc_feature (294)..(294): n is a, c, g, or t
  misc_feature (307)..(307): n is a, c, g, or t
  misc_feature (339)..(340): n is a, c, g, or t
  misc_feature (355)..(355): n is a, c, g, or t
  misc_feature (358)..(358): n is a, c, g, or t
  misc_feature (368)..(368): n is a, c, g, or t
  misc_feature (399)..(399): n is a, c, g, or t
  misc_feature (410)..(410): n is a, c, g, or t
  misc_feature (415)..(415): n is a, c, g, or t
  misc_feature (424)..(424): n is a, c, g, or t
  misc_feature (432)..(432): n is a, c, g, or t
  misc_feature (442)..(442): n is a, c, g, or t
  misc_feature (444)..(444): n is a, c, g, or t
  misc_feature (569)..(569): n is a, c, g, or t
  misc_feature (609)..(609): n is a, c, g, or t
  misc_feature (712)..(714): n is a, c, g, or t
  misc_feature (716)..(716): n is a, c, g, or t
  misc_feature (725)..(725): n is a, c, g, or t
  misc_feature (730)..(730): n is a, c, g, or t
  misc_feature (735)..(735): n is a, c, g, or t
  misc_feature (738)..(738): n is a, c, g, or t
  misc_feature (751)..(751): n is a, c, g, or t
  misc_feature (761)..(761): n is a, c, g, or t
  misc_feature (769)..(769): n is a, c, g, or t
  misc_feature (777)..(777): n is a, c, g, or t
  misc_feature (796)..(797): n is a, c, g, or t
  misc_feature (799)..(799): n is a, c, g, or t
  misc_feature (805)..(805): n is a, c, g, or t
  misc_feature (807)..(807): n is a, c, g, or t
  misc_feature (869)..(869): n is a, c, g, or t
gtctgcagtcggcagcctcgccggcagctcgctcggcccccgcttggcccggcccgcagttctctccccttgccaccatgagcgagtnatttgactgtgcaaaatgcaacgagtccctgtatggncgcaagtncatccagacagacagcggcccctactgtgtgccctgctatgacaatacctttgccaacacctgtgctgagtgccagcagcttatcgggcatgactcgngggagctgttctatgaagaccgccatttccacgagggctgcttccgntgctgccgctgccagngctcactagccgntgaacccttcacctgccaggacagtgagctgnnctgcaatgatgctantgnatgcgttttnctcgcagtgctccgcttgtggggagactgtnatgcctgggtnccggnagtggaaanggagccanacaggctgancnctgcttcctgtgcagtggctgtgaacagccactgggctcccgttcttttgtgcccgacaagggtgctcactactgcgtgccctgctatgagaacaagtttgctcctcgctgcgcccgctgcagcnagacgctgacacagggtggagtacataccgtgatcagccntggcatcgagaatgtctggtctgtaccggatgccagacgcccctggcagggcagcagttcacctcccgggatgaagatccctactgtgtggcctgtttttggnnnantctttgctnctaantgcancanctgcaacgccccnatcgtaagantcggtggnagcaaatnagtgtcctttgaaaaacgnnantggccncnaaaatgcttctcctgcgcccgctgctctaactccctggtggggccaggcttcgttacgggtnga

SEQ ID NO: 504055 - DNA, 355 bp, Homo sapiens
ggggtactgaggatcccctagagttaaccaggctcagctaaacgatatttggaggtcagcacggtgctcacgtgtcgacggaacttgtacagggaggcatgcaccgacaatgtaaatacacgtcgaccaggctccatctttaacgatatttggagatcagcacggtactcacgtagatcgacggaacttgtacagggagtgcatgcaccgcagtggtaaatacacgtcgagctggaggcatgcatgcatgaactggtactgaaggctcctctagagtcgcccaggctccagatataacaatatttggaggtacagcaaggagctcacgtgtcgccggaacttgtaccgggaggca

SEQ ID NO: 504056 - DNA, 183 bp, Homo sapiens
ggctgtttcacgggcgatggtcactcatattcggctcagaataaatctcttcaaatattttagagtttggcttttcgttgacagcacctatcacttcctgctgttttcgtttgtttgtttttgttttgttttgtttgaaacaagggtctcactctgtcccaggctggagtagagtggcacgat

SEQ ID NO: 504057 - DNA, 617 bp, Homo sapiens
  misc_feature (29)..(29): n is a, c, g, or t
  misc_feature (261)..(261): n is a, c, g, or t
  misc_feature (275)..(275): n is a, c, g, or t
  misc_feature (289)..(289): n is a, c, g, or t
  misc_feature (299)..(299): n is a, c, g, or t
  misc_feature (361)..(361): n is a, c, g, or t
  misc_feature (384)..(384): n is a, c, g, or t
  misc_feature (452)..(452): n is a, c, g, or t
  misc_feature (482)..(482): n is a, c, g, or t
  misc_feature (535)..(535): n is a, c, g, or t
  misc_feature (567)..(567): n is a, c, g, or t
  misc_feature (583)..(583): n is a, c, g, or t
  misc_feature (594)..(594): n is a, c, g, or t
  misc_feature (617)..(617): n is a, c, g, or t
cctatcatttcaatagatgcccaaaaagngtttaataaaaaacaatacccattcattatttaaaatacaacccttggcaatgtagtaatagaggggaatttcttcaacctaatgaatgattttgcccttgaaacacgaacatgtcacaacagaagtaggataacttctcttaccatttatattcagtaatatattgaagtttgtaaccagtgcattaaggggctttaacaaagtttaggaccacaaattagaaagaatganataagtaaaacggnttctggttggaagnaccagaaacnaccaaagtctacatacaaaaatgtttttaaaaccatcaaaaacccaccagaactgtaagcanttatattgaaaggttatttaatnaacgtgactgacaacattgtcacttggataattttcaatttgcatggtaatatttcataagaatttcnactattttaaaaagaaaaagcctttctatnatttagctgtaataaggtggaagctgtggaccaaccatgtgggctgagtattncatggctgagttggcgggatttaagtattcantatttattttgagacngagtcttactnttggcatccaggcttggagtgcn

SEQ ID NO: 504058 - DNA, 830 bp, Homo sapiens
  misc_feature (52)..(52): n is a, c, g, or t
  misc_feature (99)..(99): n is a, c, g, or t
  misc_feature (109)..(110): n is a, c, g, or t
  misc_feature (113)..(113): n is a, c, g, or t
  misc_feature (143)..(143): n is a, c, g, or t
  misc_feature (172)..(172): n is a, c, g, or t
  misc_feature (188)..(188): n is a, c, g, or t
  misc_feature (190)..(190): n is a, c, g, or t
  misc_feature (208)..(210): n is a, c, g, or t
  misc_feature (217)..(217): n is a, c, g, or t
  misc_feature (227)..(227): n is a, c, g, or t
  misc_feature (236)..(236): n is a, c, g, or t
  misc_feature (266)..(266): n is a, c, g, or t
  misc_feature (296)..(296): n is a, c, g, or t
  misc_feature (301)..(301): n is a, c, g, or t
  misc_feature (304)..(304): n is a, c, g, or t
  misc_feature (314)..(314): n is a, c, g, or t
  misc_feature (319)..(319): n is a, c, g, or t
  misc_feature (321)..(321): n is a, c, g, or t
  misc_feature (332)..(332): n is a, c, g, or t
  misc_feature (348)..(348): n is a, c, g, or t
  misc_feature (380)..(380): n is a, c, g, or t
  misc_feature (384)..(384): n is a, c, g, or t
  misc_feature (395)..(395): n is a, c, g, or t
  misc_feature (403)..(403): n is a, c, g, or t
  misc_feature (460)..(460): n is a, c, g, or t
  misc_feature (471)..(471): n is a, c, g, or t
  misc_feature (475)..(475): n is a, c, g, or t
  misc_feature (630)..(630): n is a, c, g, or t
  misc_feature (729)..(729): n is a, c, g, or t
  misc_feature (808)..(808): n is a, c, g, or t
cctgtgtacaggacagaccctggcacacaccaggtgccagtcaatatttgcngaaggaagtcacaaatagggatcagccatcattactttatcatcatnatcaacaggnnacnccactgtcctcacccaatcccctccaaaangctttgaagcagatgtcaacattaattcnctgtctcaggtgacancnctcatcctgaggccaggnnnggggggnggtgggaatngggggaganttgggtttcatgttccaggttccttgatancccccaccccacccagcaaggaaaaaccangaggnagnaaaggttaanttgantnttgttgttttnttataaatatattatntatatccaaaatatgatattaaaatattattncgtnttatagaaaanatattaangttttttattatttatattaaaaaagcaagcacttttaaaaaaaaataaaataaaanaatctctactntttnttttttgatatactctggccagaggggataccgtgtcctcttccaaatgaccaagatgctctgcaggggctgtgcctgtgaagacatcttggtattggaaacatcagctctggcagggtgggggcagcagagaagtaggggtctagacttgagcnggaggttccagcctcttctggccggctaccctcagacccctgctgagcttcaccatccttgggggacaggctaggctgaaggtggtggctggggctgtncacctgcccagcctcccggggtcagtatgcagggctgtggcagaacagtgctccacgacgcttaggtgtgcctgggggnttcccagaccactggggccaga

SEQ ID NO: 504059 - DNA, 163 bp, Homo sapiens
gttgtgggtagataacatagataaaatgaaacatgtagggctaatggtaaggaatgaagccaccagaggtgaagcacgggagactcatgctgaagagtttgcttctaatccaggggtaggggaagcccatcaggttaagcatacttagacaggatccatgctt

SEQ ID NO: 504060 - DNA, 108 bp, Homo sapiens
tactcatcgctaaacataaacactcacaagactcaacccctgcacccatgcctcaggatactcctcaatagtttatgctgtaatagtttatgctgtaatagttatatg

SEQ ID NO: 504061 - DNA, 741 bp, Homo sapiens
agtccgctcacccagcccagtccgtccggtcctcaccgcctgctggcggccaccccccaccgcagccatggacgccatcaagaagaagatgcagatgctgaagctggacaaggagaacgccatcgaccgcgccgagcaggccgaagccgacaagaagcaatgctgaggaccgctgcaagcagctgtgatggaggagcatgcaggccctccagaagaagctgaaggggacagaggatgagtgtggaaaagtattcttgaatccgtgaaggaggcccaggagaaactggagcaggccgagaagaaaggccactgatgctgaggcagatgtggcctccctgaacctgcgcattcagctggttgacggacggacgctggtgacctggtgcccagtgaagcgcctgtgctacatgccctgcagaagcttggatgtgagtgccgactgaaagtgcggctgatgagagcgatgagaggacatgaatggtcatcgaaaaccggggccatgaatggatgatctgcgacacgatgcgcactgcacggaagatgcacgctgaacgaggccaagcacatcgcctgaggatacagaccgcaacatatgaaccaggtggcacggcaacccggtgatcctggaaggagagctggagccgcacggaggacaggacctggcgtggccgacgactaaatgtgcggaccaacgaggacgacacgacaactcggaccaaccaaacatgacatccccaggag

SEQ ID NO: 504062 - DNA, 365 bp, Homo sapiens
gcgtccctggtagactaaccaagcacagctctgcttaattagctataccagggcgggggtacagggagaatcactgggaatagagtgtggctaccaatctacaagggccctggcctcagaatcctcctgggagagactacaggcaaggatgtttcctgagaagttagttgtgagagtgacagtccctgatttcaagcatggacgatggattaggggagtacattggaccaatctatccattaacctgccaggtcccttttgggataggttagcaagattgtgtggccatggaataccagaaaactcactgtcccatgcatatttaaaacctgaaactttggccttcttagtgttaggtctacctg

SEQ ID NO: 504063 - DNA, 262 bp, Homo sapiens
acctccagccaggagacaagtgatgagtgtccaccctctagacggggagagaaaagatacacaaaactggctgggtgcggtggctcatgcctgtaatcccagcactttgggaggccaaggtggtcaggtcacctgaggtcaggagttttgagaccaggctggccaacacggtgaaacccagccaaaaaataaaaatacaaaaaaattagccagatgtgatggcaggcacctgtaatcccagctctttgggaggctaaggcag

SEQ ID NO: 504064 - DNA, 126 bp, Homo sapiens
catactggaccttctcagtgtggtttcggtaaataattaacaacagataaactttcgaaataaccaaaattcaggagtaatcatgtgacaatgtgaaatgcatttgcaagatgtgaggatagaagg

SEQ ID NO: 504065 - DNA, 120 bp, Homo sapiens
tagttatggaagtggcttaggtgaattgagtagagggtcattccaattcctactgtataggtgtctgtgtctcaaacatttatttgtgaatccattggctaccactatggtggcctccaa

SEQ ID NO: 504066 - DNA, 230 bp, Homo sapiens
gtcgacgccgagaaagaccggcaaaaagcaactcttccttcgagccggagtcgaaccagcgacctaaggatgtctgtttattcaactacagtcctccgctctaccaactgagctatcgaaggtcgtgacgctggtcgggccacgggacgaagtgaaaagtggacgaatggacgtctatgagaaacagggaaaagatacgtccgagtagctgtaggagcgtaaaaaaagca

SEQ ID NO: 504067 - DNA, 1448 bp, Homo sapiens
  misc_feature (236)..(236): n is a, c, g, or t
gtgttgtttcgttcgttcggtgcaacatcacgccccggacgttgtggggagtcctctccaagggagggaagtataccacatgttgtctctcttggctgtttcttctacaccctcgcctaagagccagccttcgtggtagccgctgtgccctcccccgagattttttcccactaaacgccggaagttgttgcttgtctccccccattgtcttgccacaaacccccgttgtccctgcnccaagtgtgttagcgctctgttggggtgtataaccttcttcatacttggcgcgcccaccatagggttcgccctccgccacccccaaccatggtccccccaccacagccgttttatagtgtgtcccgctgtgtataaactacgtcctgtgtgtgcttttgtatgagagagaacaccaccggcgggcgttgtccttctccttatagtcgccacagcgtgttataaaagggctttttgtcgaaagacaatacattgtttatattctcttcggcggggaaaaagggcgccctctttcctcttcgtggatatgggggactagtgattaatatggggaaataaacaggaaatagttgcaccagccctttttgggggaggctcccacagaaaatttgtagtaaagctgatatctgtgtctgggaatgttatatcatcgaagcagggggaacacctcttgtcgaaagctcaccttctggttatggggctcctctttcgcgaatagacacccccctcttttttggggctccaccacatcgctatatctccccctctcacgcggagaggcaaaaagggctactcgaaagatctctcgaaaggtgtgtaaattaagattataccacatttgttggtgtgtcctcccctctgtgcccccctcggtgagatttgtacactctctgggactctggagagacacacactgtgctctcacagagactctctttgtggccacaccacactctgcctctgtgtcacttttcacatactgtctctctcccacacttgtgcacacctgcgagggaataagcgctgcgtgatctctagagaagtacaccacttgttcttctaacctctctcaactctccacagagaagaagtataggtgttgtaagggcacaggtgtgtcacaaagaaagaaaatctcccccacagcttctaagacacctgtggtggtccacaatatggcacgccactgaggccacacaccactggtgattgaacacactggggagtgtggctggtttgaaactgaagaatatatgcctgtaacgtgtaaaaatacacccaccacgacttcacagaggccttcacagtgaaaaaagaatgtaaaattttttattaatactttcttatattgattaagcaaatgattgtaaatgataaccttttacataatgagttaaataaaatgcattacaaaattgaaaaataaaaataaa

SEQ ID NO: 504068 - DNA, 332 bp, Homo sapiens
ccgttgacagtgctgctgaattgttgatgacaagattgtcctctttgaggtaccagtccatctcctgaggaaggcctgtgagatgaatttgaccttatagatcattctgacttacacatttagtactgtagccctagtctgaagactctgtgcaaactggccgtgattcagaataacctagaccagtcctgtttgcctcacgatatcaggtgggagctgaatgccatgaccaccaacagcaatatcagtcgccccatcgtctcctcccatgggtaggaggaagtttctgccacctcccctcctgagcctgctgtcatcttcactgacaacgg

SEQ ID NO: 504069 - DNA, 148 bp, Homo sapiens
taacacaacatcactccaaacaccctcctacctcccctcgcatacaccatcacaccacccatcacctcaacccactcacacatacacactcccactcaccactcacccaacagacaactgataatcactatagggccctaggttttat

SEQ ID NO: 504070 - DNA, 244 bp, Homo sapiens
gattcagaggaagcgggacattcaatgggaaatggccaggccaacacaccctgcaaagaccacgatgctgggagaaaagccaggcccttggcccatatggccagttgaggcgggaattttcccaagcaccagccccacagaaagtgattttccgtggtcctcagagagcatcacatccctccaacatcaaagaattctgtggaaaatcaggcttccgtcaccttccagtaatgtgggctggtcg

SEQ ID NO: 504071 - DNA, 733 bp, Homo sapiens
taaatggggcttgggtgagggaggtaggtggtagttggtgtttaatattttaagtggggtgatgagaaatagtgtaaggagtatgggggtaataatggggggccatacggtagtatttagtgggggcatgggagtaggttaaggtaatgtacgtagtctaggccatatgtgtgtggaaattgacaactagtagggctaggccccccgctgcttcgcaggcggcaaagactagtatggcaataggcacaatatgggctaaaagggagtgggtgtgagggttatgagagtagctataatgaacagcgatagtattatcccttctaggcatagtagggaggatatgaggtgtgagcgaaatacaagtatccctaaaagtgagagggtaacggctcagtataatatttatggtaaagccgagcgtccgccgttgcccgtgcgcctctggcctccgcgccagggccggcctcaaccccgggaggcggtgaaacgcaagatccaggcctgcagcagcaggcggacgaggcgaaaaaccgcgcgcagggcctgcaggggaagcttgaacggaaagcgcaagcggcgcaaaaaagctgaaggtgattgtgggcgccctcaaccgaagcatccagctccgttgagagaggacttggaccggggccaggaacgagtgtcccagggcctgaaaactggaggggcacaaaagtgcatgaagtggcaacggcaagaggggtaaaac

SEQ ID NO: 504072 - DNA, 137 bp, Homo sapiens
tccccctacacgttggtatgacgaagacttccggactcatgttgatcggaaacactcaaccccgctgtaatgaggtaaccgaggtgatcgtcacatcagtaccaggccaagagctacaggtagaagtctttgacaag

SEQ ID NO: 504073 - DNA, 1177 bp, Homo sapiens
  misc_feature (181)..(181): n is a, c, g, or t
  misc_feature (609)..(609): n is a, c, g, or t
  misc_feature (646)..(646): n is a, c, g, or t
  misc_feature (693)..(693): n is a, c, g, or t
  misc_feature (721)..(721): n is a, c, g, or t
  misc_feature (755)..(755): n is a, c, g, or t
  misc_feature (886)..(886): n is a, c, g, or t
  misc_feature (891)..(891): n is a, c, g, or t
ggctccggtcaaccgctccggcaacgccaaccgctccgctgcgcgcaggctgggctgcaggctctcggctgcagcgctgggtggatctaggatccggcttccaacatgtggcagctctgggcctccctctgctgcctgctggtgttggccaatgcccggagcaggccctctttccatcccntgtcggatgagctggtcaactatgtcaacaaacggaataccacgtggcaggccgggcacaacttctacaacgtggacatgagctacttgaagaggctatgtggtaccttcctgggtgggcccaagccaccccagagagttatgtttaccgaggacctgaagctgcctgcaagcttcgatgcacgggaacaatggccacagtgtcccaccatcaaagagatcagagaccagggctcctgtggctcctgctgggccttcggggctgtggaagccatctctgaccggatctgcatccacaccaatgcgcacgtcagcgtggaggtgtcggcggaggacctgctcacatgctgtggcagcatgtgtggggacggctgtaatggtggctatactgctgaagcttggaacttctggacaagaaaaggcctggtntctggtggcctctatgaatcccatgtagggtgcagancgtactccataccctccctgtgagcaccacgtcgaacgggtcccggnccccatgcacgggggagggagatacccncaagtgtagcaagatctgtgagcctgggtacagnccgagctacaaacaggacaagcgctacggatacaattcctacagcgtctccaatagcgagaaggacatcatggccgagatctacaaaaacggcccgtggagggagctttctctgtgtatcggacttcctgntctanaagtcaggagtgtaccaacacgtcaccggagagatgatgggtgggcatgccatccggatcctgggctggggagtggcgaaggacaccctactggtggttgcatcggaaacactgactggggtgacatgggtcttaaatacccgaggcaggacacgtgggaccgcacacatggggggggaaccggccgagcagcggaaaaataatgcgggcgtggcactgcggccacaggaaaacgtaatcagcacacaaaaagaggaggcaggaacaacccggaaactgacgtgga

SEQ ID NO: 504074 - DNA, 337 bp, Homo sapiens
  misc_feature (43)..(43): n is a, c, g, or t
  misc_feature (69)..(69): n is a, c, g, or t
  misc_feature (71)..(71): n is a, c, g, or t
  misc_feature (88)..(88): n is a, c, g, or t
  misc_feature (90)..(90): n is a, c, g, or t
  misc_feature (101)..(101): n is a, c, g, or t
  misc_feature (128)..(129): n is a, c, g, or t
  misc_feature (132)..(132): n is a, c, g, or t
  misc_feature (145)..(145): n is a, c, g, or t
  misc_feature (163)..(163): n is a, c, g, or t
  misc_feature (168)..(168): n is a, c, g, or t
  misc_feature (229)..(229): n is a, c, g, or t
  misc_feature (251)..(251): n is a, c, g, or t
  misc_feature (306)..(306): n is a, c, g, or t
aagaaatcttattttagtatagctacagctgcagtagcttttnagtatgtatcaacatttcattataantnatagcttcctggttctntntctcagctgtntcagaactttcagccaagttaaatctnnccnggtgttgaaactnttagtaagttgagtaagntattnccctccctacggtaatccacaatctgttctttgtgtgggttgacacctatttataattctnaaaataagggtagctcaaaggngccaagtacagtagtttagcttgctactgttgagcatgaatagcagtaggttgtnttcattaatgcagttttcataatgtctccca

SEQ ID NO: 504075 - DNA, 293 bp, Homo sapiens
  misc_feature (90)..(90): n is a, c, g, or t
  misc_feature (271)..(271): n is a, c, g, or t
ttggcctcccagagtgccaggattataggcatgagccactgtgtctggcctgtcttcacatcttgacagaagaagatttaccatagaggnagaatcatggaggaatgtacctgcctgcagagacatggtcttgctctgtcacccaggctacagtgcagtggcatcatcacggctcgcggcagtctcgacttcctgggctcaagggactcccatctcagcctcctgcatagccgggactacaggtacgcaccaacattgcccagcttaattntaaaatatatatatatatatat

SEQ ID NO: 504076 - DNA, 1289 bp, Homo sapiens
  misc_feature (141)..(141): n is a, c, g, or t
  misc_feature (293)..(293): n is a, c, g, or t
  misc_feature (721)..(721): n is a, c, g, or t
  misc_feature (758)..(758): n is a, c, g, or t
  misc_feature (805)..(805): n is a, c, g, or t
  misc_feature (833)..(833): n is a, c, g, or t
  misc_feature (867)..(867): n is a, c, g, or t
  misc_feature (998)..(998): n is a, c, g, or t
  misc_feature (1003)..(1003): n is a, c, g, or t
ggctccggtcaaccgctccggcaacgccaaccgctccgctgcgcgcaggctgggctgcaggctctcggctgcagcgcgtgggcgtggatgctgcaggtgggtgcgaccagcggtgcctcacggcagcctcagcgcacccangactggtaacgcgagtcctggcttcccaccttcagccatcccgacgtatgggtggatctaggatccggcttccaacatgtggcagctctgggcctccctctgctgcctgctggtgttggccaatgcccggagcaggccctctttccatcccntgtcggatgagctggtcaactatgtcaacaaacggaataccacgtggcaggccgggcacaacttctacaacgtggacatgagctacttgaagaggctatgtggtaccttcctgggtgggcccaagccaccccagagagttatgtttaccgaggacctgaagctgcctgcaagcttcgatgcacgggaacaatggccacagtgtcccaccatcaaagagatcagagaccagggctcctgtggctcctgctgggccttcggggctgtggaagccatctctgaccggatctgcatccacaccaatgcgcacgtcagcgtggaggtgtcggcggaggacctgctcacatgctgtggcagcatgtgtggggacggctgtaatggtggctatactgctgaagcttggaacttctggacaagaaaaggcctggtntctggtggcctctatgaatcccatgtagggtgcagancgtactccataccctccctgtgagcaccacgtcgaacgggtcccggnccccatgcacgggggagggagatacccncaagtgtagcaagatctgtgagcctgggtacagnccgagctacaaacaggacaagcgctacggatacaattcctacagcgtctccaatagcgagaaggacatcatggccgagatctacaaaaacggcccgtggagggagctttctctgtgtatcggacttcctgntctanaagtcaggagtgtaccaacacgtcaccggagagatgatgggtgggcatgccatccggatcctgggctggggagtggcgaaggacaccctactggtggttgcatcggaaacactgactggggtgacatgggtcttaaatacccgaggcaggacacgtgggaccgcacacatggggggggaaccggccgagcagcggaaaaataatgcgggcgtggcactgcggccacaggaaaacgtaatcagcacacaaaaagaggaggcaggaacaacccggaaactgacgtgga

SEQ ID NO: 504077 - DNA, 1120 bp, Homo sapiens
  misc_feature (181)..(181): n is a, c, g, or t
  misc_feature (636)..(636): n is a, c, g, or t
  misc_feature (664)..(664): n is a, c, g, or t
  misc_feature (698)..(698): n is a, c, g, or t
  misc_feature (829)..(829): n is a, c, g, or t
  misc_feature (834)..(834): n is a, c, g, or t
ggctccggtcaaccgctccggcaacgccaaccgctccgctgcgcgcaggctgggctgcaggctctcggctgcagcgctgggtggatctaggatccggcttccaacatgtggcagctctgggcctccctctgctgcctgctggtgttggccaatgcccggagcaggccctctttccatcccntgtcggatgagctggtcaactatgtcaacaaacggaataccacgtggcaggccgggcacaacttctacaacgtggacatgagctacttgaagaggctatgtggtaccttcctgggtgggcccaagccaccccagagagttatgtttaccgaggacctgaagctgcctgcaagcttcgatgcacgggaacaatggccacagtgtcccaccatcaaagagatcagagaccagggctcctgtggctcctgctgggccttcggggctgtggaagccatctctgaccggatctgcatccacaccaatgcgcacgtcagcgtggaggtgtcggcggaggacctgctcacatgctgtggcagcatgtgtggggacggctgtaatggtggctatactgctgaagcttggaacttctggacaagcataccctccctgtgagcaccacgtcgaacgggtcccggnccccatgcacgggggagggagatacccncaagtgtagcaagatctgtgagcctgggtacagnccgagctacaaacaggacaagcgctacggatacaattcctacagcgtctccaatagcgagaaggacatcatggccgagatctacaaaaacggcccgtggagggagctttctctgtgtatcggacttcctgntctanaagtcaggagtgtaccaacacgtcaccggagagatgatgggtgggcatgccatccggatcctgggctggggagtggcgaaggacaccctactggtggttgcatcggaaacactgactggggtgacatgggtcttaaatacccgaggcaggacacgtgggaccgcacacatggggggggaaccggccgagcagcggaaaaataatgcgggcgtggcactgcggccacaggaaaacgtaatcagcacacaaaaagaggaggcaggaacaacccggaaactgacgtgga

SEQ ID NO: 504078 - DNA, 1042 bp, Homo sapiens
  misc_feature (181)..(181): n is a, c, g, or t
  misc_feature (558)..(558): n is a, c, g, or t
  misc_feature (586)..(586): n is a, c, g, or t
  misc_feature (620)..(620): n is a, c, g, or t
  misc_feature (751)..(751): n is a, c, g, or t
  misc_feature (756)..(756): n is a, c, g, or t
ggctccggtcaaccgctccggcaacgccaaccgctccgctgcgcgcaggctgggctgcaggctctcggctgcagcgctgggtggatctaggatccggcttccaacatgtggcagctctgggcctccctctgctgcctgctggtgttggccaatgcccggagcaggccctctttccatcccntgtcggatgagctggtcaactatgtcaacaaacggaataccacgtggcaggccgggcacaacttctacaacgtggacctgaagctgcctgcaagcttcgatgcacgggaacaatggccacagtgtcccaccatcaaagagatcagagaccagggctcctgtggctcctgctgggccttcggggctgtggaagccatctctgaccggatctgcatccacaccaatgcgcacgtcagcgtggaggtgtcggcggaggacctgctcacatgctgtggcagcatgtgtggggacggctgtaatggtggctatactgctgaagcttggaacttctggacaagcataccctccctgtgagcaccacgtcgaacgggtcccggnccccatgcacgggggagggagatacccncaagtgtagcaagatctgtgagcctgggtacagnccgagctacaaacaggacaagcgctacggatacaattcctacagcgtctccaatagcgagaaggacatcatggccgagatctacaaaaacggcccgtggagggagctttctctgtgtatcggacttcctgntctanaagtcaggagtgtaccaacacgtcaccggagagatgatgggtgggcatgccatccggatcctgggctggggagtggcgaaggacaccctactggtggttgcatcggaaacactgactggggtgacatgggtcttaaatacccgaggcaggacacgtgggaccgcacacatggggggggaaccggccgagcagcggaaaaataatgcgggcgtggcactgcggccacaggaaaacgtaatcagcacacaaaaagaggaggcaggaacaacccggaaactgacgtgga

SEQ ID NO: 504079 - DNA, 174 bp, Homo sapiens
tcccacctttggccgtcccgtgcatcttagtcaacacaatgcctgtaagcatccgaatgaaatccttaaagagtttggcttgctgtaaacgcattttgacccgttcgttgctatccaaaacaaagcaaggccttcaatgcgggtgcatcttggaattttgcgttgaattaatcg

SEQ ID NO: 504080 - DNA, 348 bp, Homo sapiens
  misc_feature (16)..(18): n is a, c, g, or t
  misc_feature (24)..(24): n is a, c, g, or t
aaatggaaacagtctnnnaagttnttgtgaggattaattaacagaatgtacacaaagtgcttgccaatagtaggtgctcaatacatgctccgatgacctgcatatcaccatgggactggcagtggtggctcacccatgaggccatggtggactctctcctccagcgcaggcacgatctccctgtggctgtgtctgctctgatgcccgtccatgtgctgagaagcacccccagctgtgagcaccaagctcccagcctcccactctccctgcagccaaggagccctgcaccaagagctgctcctgggttagcacggtccgtcctgcccactcgcctgggagatagagaag

SEQ ID NO: 504081 - DNA, 93 bp, Homo sapiens
ctagaagattcagcaaagtacttttgtgctcttggcgctccccttcctagcccggaaaggtactgggggatacggatggattcggccctgatc

SEQ ID NO: 504082 - DNA, 356 bp, Homo sapiens
gagagaactagtctcgagttgttagttatttttgtttttcgttttttttccctacgctcctgactatcctcaactaggggacccttttcttccgacttgccttgcggacctctgatatctctttcaggtactggatctccttggccagggaatgcgccctctcttttagagcctggttcttattttccagctcttggcactcaccagagagagccttctgttccgccctcttcttctggcggtacctagtggctgctgacttgcaatgctccattgttttcagcttcttatccaggttataaccctttacttttgctgctaccatcttctctccaggaggatcgcggatttggcgg

SEQ ID NO: 504083 - DNA, 970 bp, Homo sapiens
ccggtcggtagtcgtcgccccagcccgccgggggctgcagcgcccgagctcgccggcctcgaggacgggcaccgatgagcatcatgggcagcatcgtgtcccgcgtctccgcgctccgtgctgtttctgctgtttgtctgcctgcgccgggtcctgaggctagtcctgctgggggccgatgctcaccttcgagctgccggacaatgccaagcagtgcttccacgaggaggtggtagcagggcgtgaatgaattctcccatggattatccaggtcatcactggagagccactacccactgttgattgctagtgtaagaggatccccaggggaacaccatctacatgagtaattacgaaacaagcagtacgacagcgttcacgtaccggcgctgaagaagtcaaccggcgtgttatcagttgttgcttcagttaatgagttttgccacacgttctctcacatagaccgtctatcgtttgatctttcaaagtgacgcggatgagctctcccattctcccagactatggggaacagggtcacagagtctcatccagatggatgtcctgactgcgtgaccatccatgaggctctgaaaacggtgatagactcccagacgcattaccggctgccgggaggccaggaccgtgcccgagcggaagaccttaattagcgagtctctttactggtctgtgggggcgacgatctgaattgcccctggttcgtggtcagctatcacgtcaggtgctactgtttgaaaagcttcctttcccagtaaaacggccattcggcgggggagtcccattctatgcccggatcttgtcctagggccctttgtccccgggtggagcgcgcctctatgtaaccctgtgggcggtccctacccggggggcccaaatcgtgggggccgtcttctgccagcgttttgcccccgtgggccaacccagccgcgtttgtgggaaaatcggcctgggc

SEQ ID NO: 504084 - DNA, 452 bp, Homo sapiens
tcaagtagtaactcacgaaacataacacgattttaaaatggggagacactctgactagacatgactccaaagaagatatacaacgcagaccaataaacatgaaaacatgctcaactcttattactcatttaacacaatgcaaatcaaaaccaatgagaaagcactccacatccatcaggaaggcaataactagagagacagattacaataagtgtttagtgaaaatgtgtggaaactggacccctcgacattgctggcacggaatataaaatgatgctgtcctttgacaagcagtctggcactttgtcaaaaagtgaaacacggggatgccatataactatagcaattgcactcctagatctggagaaatgacatcatgtgaaacgcttgtatgtgaacgctcagagcagccttatttagaacagccaaaacgtggaaacgacctaaatccc

SEQ ID NO: 504085 - DNA, 552 bp, Homo sapiens
aatgtgaggattgggaacttccctttcagctcaatcttcacaaaattacatatactatacctgagggggaaatgtaactttaaaaagagttacaacatctttcaaataaagcaaattccgactgtaggaaaataaattatcacttgatattggggtatatgtttgttaaatcacttggcacatctgcgggcagaaactccattcactaagtaaacgaaggaacttttttcttccaagggctgggaccaaatttcctgtgcaaaaaccttcctgtataagggaaacctgtcattctcccagcaaaggataattgatattagagagtgtgtaaaacaaaaattccactttattccccaaattatttggcccccatacagggttagaaaacctggcccttccgaaattcttgcgtaaaaggacttttatttgttttttaggggggagaaaattagaccaacacatttttgggggcacatggtgggttccctggcccttacccttaattaatttgaccaaggggagacaaaatggggtctttcgggaaaggagggc

SEQ ID NO: 504086 - DNA, 709 bp, Homo sapiens
  misc_feature (110)..(111): n is a, c, g, or t
  misc_feature (215)..(215): n is a, c, g, or t
  misc_feature (226)..(226): n is a, c, g, or t
agcggattcttccggtggagatggctgcggccgtggcggggatgctgcgagggggtctcctgccccaggcgggccggctgcctaccctccagactgtccgctatggctcnnaggctgttacccgccaccgtcgtgtgatgcactttcagcggcagaagctgatggctgtgactgacatatatccccccgaaaccagccatccacccatcatgccntgccatctccntcccagccccccacaggaggagataggcgcatcatacaggtcttgctccgcctcggcgagatagcaggcatgctttgtgccacgtgactagaccgatatgtgattagtcccggtcatgcgcaggaagtgtgtggcttctgagatggtcgaggacgggaacaaagtctgtcattagttgcgatgatcctagcctggcgggtagaacgagcgaaagattgcgctgtagtgagacggtcttcgcccgaaccaggtccgtgaggcccttccgtggaggattccaagtaccaaaatctgctgctccctttttgtggggcacaacgatgcatgctggtcagtgacgagcccaatggtcacggagatggtacggatcttaaggactgtgccattcctggccgcgtgctacagtggctgcgttgatgacagccatacctgcagcaggcagggctttatcaaactactccaagctccccagacctgcccctg

SEQ ID NO: 504087 - DNA, 689 bp, Homo sapiens
  misc_feature (195)..(195): n is a, c, g, or t
  misc_feature (206)..(206): n is a, c, g, or t
agcggattcttccggtggagatggctgcggccgtggcggggatgctgcgagggggtctcctgccccaggcgggccggctgcctaccctccaaggctgttacccgccaccgtcgtgtgatgcactttcagcggcagaagctgatggctgtgactgacatatatccccccgaaaccagccatccacccatcatgccntgccatctccntcccagccccccacaggaggagataggcgcatcatacaggtcttgctccgcctcggcgagatagcaggcatgctttgtgccacgtgactagaccgatatgtgattagtcccggtcatgcgcaggaagtgtgtggcttctgagatggtcgaggacgggaacaaagtctgtcattagttgcgatgatcctagcctggcgggtagaacgagcgaaagattgcgctgtagtgagacggtcttcgcccgaaccaggtccgtgaggcccttccgtggaggattccaagtaccaaaatctgctgctccctttttgtggggcacaacgatgcatgctggtcagtgacgagcccaatggtcacggagatggtacggatcttaaggactgtgccattcctggccgcgtgctacagtggctgcgttgatgacagccatacctgcagcaggcagggctttatcaaactactccaagctccccagacctgcccctg

SEQ ID NO: 504088 - DNA, 284 bp, Homo sapiens
gaacgcttcaggacgatgtagaggacccccgggccctaagcatttggatgatgacgaagatctttacgaatccagcatacatacctcggaaagggcgtggtctttgagcatgatcttcgagggcaaactcaggaggaggaagccagacccacggagagccagcagcccgctatggaaggatgagggtcgctgggagcatgacaagttccgggaagatgagcaggccccaaagtcccgacaggagctcattgctctttatggttatgacattcgctcagctcata

SEQ ID NO: 504089 - DNA, 413 bp, Homo sapiens
tcacgccggttatcctaggacttcggatgaccaaggcaagcagatcacttgaggtcaagaggtcatatccaggctagccaacatggtgaaaccctgactctactaaaactactaaaaaatcagccgggcgtagtggcaggtgcctgtaatcccagttactcagcagcttgaagcaggagaattgctggaacccagcatgcgtaggctgcatgtagctgaggtcccgtcaccattgcactacagcactgcgaaacagagcacgactccatctcaaaatatcaatcagtctctaaccatgtcagcccgctagtcctattagcttctagactagagtacgcttatgcatgcaaccgcacttcgagcttacttgaccattcggccatatcgcgagacgatttaccttcactgccgcg

SEQ ID NO: 504090 - DNA, 526 bp, Homo sapiens
  misc_feature (342)..(342): n is a, c, g, or t
gccgcgggaggatgaggcaactcccatcagattagaaagatgttaacactgtaacaaaagtggggctcgaggaaggggaaaagcgcagctctctttttaagacgccagaaagtagtcagacatgctaagaacaaaacaaacacaaacgaaaaccagcaaagaaagctcttcgagaagagtaaggctactgatctttaggaatcaaatcattatttccacacatgtcatgaagaacacagacattaaagcacaaaggagaaacttaaatgaaagtaggagggagaagtcaaagctcaagtaaagagatttttaacctagagaggctgagttatcaaggaaganagaaggccaagccagcttgttgcagaatgttccagaagataagataatgatagacttaaataaatagggactgatcaaggtgatagcgagttcttggtgaaattgcttccaaggattttatagaagtgtatttcatggaaatgtacagtaaccggatgactgtattaaaattttaaaactgcaa

SEQ ID NO: 504091 - DNA, 110 bp, Homo sapiens
  misc_feature (6)..(6): n is a, c, g, or t
  misc_feature (10)..(10): n is a, c, g, or t
  misc_feature (15)..(15): n is a, c, g, or t
acacangtangtaancaaagtaaattcgtgtcacgagtagtatagtacgtaagtgtgtaacgtgtaaactgtttttgggtaaagtcgtctgcgacaaaagtacgctacca

SEQ ID NO: 504092 - DNA, 105 bp, Homo sapiens
agctcctccaggaggcctcctaaagcccttggatggctgggtacacaccagtgttcctgtcagctgtgtgacaggcgggtgttggaatgatccacacgttagtgc

SEQ ID NO: 504093 - DNA, 482 bp, Homo sapiens
ccccttctcttccccgaggctatgtccacccggtgcggcgaggcgggcagcgccagaggcacgcagccgcacaggggctacagagcccacaatcagccctacaagatgcacttaggacccccgcggctggaagaatgagcttgtccttcctcctcctcctcttcttcagccacctgatcctcagcgcctgggctcacggggagaagcgtctcgcccccaaagggcaacccggacccgctgccactgataggaaccctagaggctccagcagcagacagagcagcagtagcgctatgtcttcctcttgtgcctcctcctcccccgcagattttttgggcaagccacggaagttgttttgttccaaacaattttccatgggaccccctggggggcccgacccgcagccctttctgtagagggggcatcggatttccatctcgaaatactacaccctacggggggggggaacggatcccaacaac

SEQ ID NO: 504094 - DNA, 159 bp, Homo sapiens
ggcgtagctttcgatcacgccgctgtacatcggggaacgttcaggccgccgcggatatgtcatgggtgcgggcgttggtatgcgtgatccagcacggcaactgccgggggatgcatggccacactacccatgtacgaaaacaccggaatcggatccagg

SEQ ID NO: 504095 - DNA, 194 bp, Homo sapiens
ctagtcgacgccgacggtgtcagtgatttgggaatattgcacaggagttattctaaagttaagagtcatgtgactattaggcgaactgttttagaagaaattggaaatagagttacaaccagagcagcacaagtagataagaaagctcagaaaaccaaagttccagttcagaccctcagttcagaccggggact

SEQ ID NO: 504096 - DNA, 1403 bp, Homo sapiens
  misc_feature (578)..(578): n is a, c, g, or t
ggtcgacggcgacctgcgtcagttaggtgctcgaactgcagtacccggcagtgccggtacatgtctgcgagatggaatttgtcttgccattgtctctggctgcttaaaaccaacctagtgacgagctccagatctcggtggtgcggcgtgacctgtcgcgtgcgcaccgcggtacactgcgtgtgttcttcctggttgaccgtgggcgcgtactggtcctcggtctagcgtgctcttccagtcgtagtggacctttccttctgtcatgcggcttcttcatagtcgcgcgcgttcatcctcgttgctgtggccgtaggtcttcgatcgcatacgtcggtgtttgaccattgagaaaactaccagacgtgaagtccccagaatttaaactaaaagcctaggagtcatcacgaaggagtcgagattgtctgccgcagaaggcggagccacctattgactgcaagttagtggtcggttctagcctatacaaccccataccttgcccattcaagggcttccgatcgatgggacgaccttcccggttcggcggcgttgaagaattcaggatatcgttcaagctngttacccttcttacctatgtacagaaagttaagagaacgtatgcgtacacccaaagaaacgtccggtgtcgacacagtctctctattgagaaggtcatggtgattgcggacatagccaatgtaaggccccccatgcggagagaaatttgttgtgaccctaataaagttggccgctatacccacagatgggagaggaccaccggaaaggaagagactttagcagcgcagggcatataccccaagcaattatcgtatatccttaccgtaatagagaagaagtatgcaaacccccgagttagaaaggggggccggcagaccacacgcctttttagcagtggttcgtaggtatggcgtggatataccagaacgttagtcctcctccagtagccaacaggaggtgtatactcaaacagattcgccagtgcaggttccataggcggcaatgtctgaaacttatgcgtagatgacagaatcccccatgatgttgggacactatgaagcaccacagttcttactcgtttcagaatccattcccccagtttgcggaaaggcgcatacgagtatagtttatcccgacatatccgttggagagaggaattccatggccaaaatcggaacagaacatcttctggaaggaccttattgggcgcggacatatgcgggcggccacggacagcctatagagcagaagcagggaaggtaaactcgattcctaaccagaaccgaaggcgttaggcaacctcgccaagaggcaaagagagcagcccctatacagaaggcagtggtgcttttgcggccacatcgctctcatagtgggcacccacg

SEQ ID NO: 504097 - DNA, 228 bp, Homo sapiens
  misc_feature (3)..(3): n is a, c, g, or t
gcnagttaccaatgttctgtctcagcctctgacactctagcgtgtcaaacaggactatgctgaatctgttgctgccagagtctctgtgctgaacatgacgtacttgaccgatgtctgcaatgcgtgacgatactagatttcatgagcgtagaatcgtccagtgtgtgatatgagttctttacctatagaccccaagacgtgcgcagtgctcctgataccgatcatgtc

SEQ ID NO: 504098 - DNA, 1012 bp, Homo sapiens
  misc_feature (544)..(544): n is a, c, g, or t
cctcgctcctaccccgttggggggtccatgacgcaactccgccttgtgggtcagtgtcccctcctggagggaggcccgtcgtcactcaaatgttagtgattttttcaaagcgggatttatatctggggtgtcctctgttgtttcccctcgagcgctagttgcaagctggtagattttctgctccaccaagggggtgttcttactacatgtgtcgggcggcgtgcctgccgcaaccctctctccccggagagagtgttttatagtcgtggggcgccccccacgttttttttgttggggcgcgcgagtgggtggatttctctgtttccatctgtcttgtcccccgcggtttgtccctgctttgacgagcttcgaccgcttctctttttttcgcggcgagcgtgtgtttttgtgtgcccgctccttgatctatctctggccgcacccgtcagtctcgcactggtggtgcgacagagatagatgagtgtgttccctctcacagaccagcgtctcactacctgcggcggccgcccccccacgttctganttttgttgtgtcgggagcaaacgaccgttcgctcgcctcgcgcctcagggcgcttcgatctcccctcgcgccccggtggtcgcctcgccagataagaggttctcaccatctgcacagagagatcgccggtgatcctccccctagaggcacacggcacgcgttgctcccacaccccaccgctgtggagaaaaaaatcactgcaaatgctggttgttttcttggcagtccggcaataatactgacttttctttatgtaaatatcaccacgaaataattagcaaggagggttccgccatcttaagatagtttttatggcagataatttcctttgggggagaaaagaaaaagagggtttttttttcccccatatttaattttttggccttcgtggaacacaaagcggtcatttttggggcttttcccaaccatttttttatttttatttacatcacggttttgccttttcca

SEQ ID NO: 504099 - DNA, 324 bp, Homo sapiens
attgaacaatgacttaccgtgtaggctctcagacttgaaatgcagtagactctgacatctgattagtaccttaaagacgtgcttattccactagagctgttctcgctgttctctgaggacatatatatgtatactagcattcttagatattaatcatggccaagcttttgcactgaaactcaaaagttaccttacagtatgtcccgaagacgacatcacattacattatgggggaaactactagttaagactctaaaacgcacacaaggctgagtgcagtggctcatgcctgtaatcccagcacttcgcgcacgcgctgagagg

SEQ ID NO: 504100 - DNA, 165 bp, Homo sapiens
aaagtttcaggttccaggaaagcccccaggcctggggtgttggtccccctagcagctgaggggcttttcaatacaaaattagtttttgtgccctggagatgaatatacttttatttgtaacatgtgaaaacatctataaaccttttctgaagcctgttttgtcca

SEQ ID NO: 504101 - DNA, 169 bp, Homo sapiens
taatacgcaagtatgacagaggacacacattttccccatccaagagtgctctggcatccaatccaaacaccaggatacaatttatggtcccaaattctatatgaaaaccagacagttcagagcatcagccaaggccattttgagtacgacttcctaccaaactattccc

SEQ ID NO: 504102 - DNA, 116 bp, Homo sapiens
gcttctgccgctcctgcttctcgcttctgcttctgccgcttctgcttctgctgcttcctgcttctgccttcctcttctgcttcctgcttctgcccccgctccaggtcttggtgagg

SEQ ID NO: 504103 - DNA, 396 bp, Homo sapiens
  misc_feature (273)..(273): n is a, c, g, or t
aacgggtgatgcggttggctctgttttgaactactgcgagtatagatggtgaaaaggtgggtgagaaacagacgctgtggatgaaagctggagttcttcaaatatgctgagcatgagccgtccaactcctctccgagcaggtagctgcttacctgcgttcaatgaggagagaggagtcatggctggggatgtgattttgggtatcatctgattctagagaacaggacacacctatttcatgcttagtgcacttaggactagagatagcagatntctgcgccacatctatcgtctgaggtctgctggtaaaggaggatgacacagggggcagccagagagcagcaggaaaaacctgtgtgtgtcttcagagaagcccagattagagatgttttcaag

SEQ ID NO: 504104 - DNA, 1909 bp, Homo sapiens
ccttattaggacagtcgtcggttgtgtagcagcttatagtctcgtttcatcgtgcacgtcgtgtctcatactactccggtcttgctgttctaatcctctgtctggctctcagtgttagtcactttctaccactacattagcttcatctagtcctatcatcaagtcgtagctatagctcgtcgcgtagtcagtggtttcatgcttctatcactcagactccatcctctgtatgagtttacttcgtcactcgatggttatggtccatcactataagaaagagattttctctcgtgtcttttttgttggtgtggacagacaaatatacatatatctattcgtcgtattgtggtcccacccaccgacgtggtgggtgttcgtttctgtccattctatcatagtttgtgtctggtgcggcgtctgtctgctccctccgggtgtgggtggttcttcggctccgtgccttcgctcgttcgtgagcgtaggttggctgtccgcttccctgcacggtacgtgttgcattcgatgtctcgtggtcgtgctcgaccgtctgtcgttctttatcatcgatgtttggcggggggggggatcgacacacccccactcttgcggtgggtggtgtggtgcgggccccgcctcactccacctccgcctagcgtgcttttagtctgtttgtattttgtttctttcctcccccatgtttttgttttggttccggatttcgcgtatgctatactgtctcttgtttgttgtcgtgcgtctttcgcagccaccctccctctctggtttggttgttttcgtctgtccctcgccctcttggtttgggtcttctgagacttttttggcttttcgtcgtatgatgttgtgccgttgctctcttgctccccacacgttttctcttctgtcctactccaccagtagttgtgttggtggtacttcgtcttcttgtctgtgttttgtgttgttgtcctggtgtgatacttctcttctgtgtgttgccgcgcgctcgggtgtgttggctcccgcccacagccctcgccgtcatgagttgactactctacccaccgttgctgtgtttgagtttctttctttgtatattattattattagcagcgcaggagcggatatatataatatatatgttctccgtcgcgtcggtcgtgggttgctagtgtggtaggttgtgtagactacctccccaacactcctctactcactacacatctcatgtcgctcgcgtcgcgcgtgcgagcaagagaacagaaaatattatgtatgagtggggtgagtacagagaggagcttcgtgtgtgtagcagactgtgtgtgtggtgctgttgggtatgtactcactcgcagcgcgcgtgagtctctctcacacacacagtgtgtgtgctctgctgctgtgtgtgtgtgtgtgtgtgtggcgcccgcgcgcacgcacatatgttcacacacgcctcgcatgtgtgtgacaccacccgcgcgcgctctcgggagaggacacacacgcctcactattttgtctctatataagagggggggagaaaagaaaatgcacatctatccactccctctgttctgtccgagcacacacactctctctcccacatagtttttcgtctctctctgtgtgtgtagagaataaatcacaccccacattgcattatatattgtgtgtgtgtagagagaggaggtgcgcccccaccgcgcgcttgtaagagaggaagaagagagagggatcctcctcgcttgttgtgaggggaccacacacctcttttttttaaaatctcttctgtggtgtatctttgtttgtggtgtccgccccccggttgcaagcatggaaaaagagagggggagggggggggttctcgccccaagattccccccccaatatttttttttttttttta

SEQ ID NO: 504105 - DNA, 138 bp, Homo sapiens
ctagcttctcgcggttggccttgtggttcatggcgggcctcggtcagcagcacggggtgctcctcgggtagccacacgcagcctcattgtagaaggtgtgcgtgccagattttctccatgtcgtcccagttggtgagc

SEQ ID NO: 504106 - DNA, 194 bp, Homo sapiens
ggaccgtgggctgtcacagattctaacagtatctcatagatcggaattcacaaacctgccacaatgacattggggctggatacttctattatgggcaggtcttatatatgtaggatgcttttgcagcatctcttgtcctcatctattagaaataaataggccagtcacagtggctcatgcttgtaatcccagca

SEQ ID NO: 504107 - DNA, 370 bp, Homo sapiens
  misc_feature (273)..(273): n is a, c, g, or t
  misc_feature (292)..(292): n is a, c, g, or t
  misc_feature (331)..(331): n is a, c, g, or t
atcaagttttaaaatattcaaaaaatggaaataatatcaaacatctactctgaccacaatgggataaaactagaaatcaataacaaggaattctgaaaaccatacaaatacattaaaattaaacaatatgcttctgaagaatcagtgggtcaatgaagaaaccgaaaaaaagttgaagaattccttgaaacagatgataatgaagacaccatctaccaaaacctatgaaatacagcaaaagcagtattatgaaagaagtttatagctaaaaanaaaaaatctaacagtgtgncttgaactagaaaagcaagagtaaaccaaaaccaaaatncagtaaataaaggaaatactcaaaggatggacaggcagg

SEQ ID NO: 504108 - DNA, 416 bp, Homo sapiens
  misc_feature (8)..(8): n is a, c, g, or t
  misc_feature (31)..(31): n is a, c, g, or t
  misc_feature (181)..(181): n is a, c, g, or t
  misc_feature (213)..(213): n is a, c, g, or t
cgaatctncattttctaaaaaagccaaaagntgccaacacacagagagaaagggcacagaagaaccttgaaaggaaatgaacctgtgactattgaagaaggcttgtcttgattatgaagtcagaattggaagatacccatgaatggatgtttgtttcagtgttgcactggcacttccttcntaaagattagagttgtgagtgtgaggaatggntatgagaagaccctaaagagatgtttgggtgacacgagtgaaccctaccctaaaatggtttaaagataacatgaagggtccttaaaataaattgaagaaatcctcaaatcttctggtgacctggatggacagcaaaggaatcaaatccctcaaataatttatttgacttaaattaaaaataaataaatatatacagtaaaaag

SEQ ID NO: 504109 - DNA, 171 bp, Homo sapiens
cccaggatatgttctatagacgtaagattacagcaatgatagatctctgcctcacggaagcacgaacgttcttctctagaggagaatatctataacaggcaagcttactatctccccggacactttcctacaccaagacttctccgaaatacgaccttatgccaagtgcta

SEQ ID NO: 504110 - DNA, 378 bp, Homo sapiens
ttttgcagaaccagaggatgcttctggaagttgtgactagacaggtggcacataagaaatccagtctacagacatctgcaaagcaaattgaggacaggatttttgaagtgaagcatcagcataggaaggtggaaaaccagatcaaaatggccaagatggttctgatgaatgagctgaacaaacaggccaatgggctaatagaggaattagaggggattactactgagagaaagcggaagctggaacagcagttacagagcatcatggttctcaaccgtcagtttgagcatgtgcagaatttcatcaactgggctgtctgcagcaaaaccagtgtcccttttcttttcagcaaagagctggtaagaggaatctcccaac

SEQ ID NO: 504111 - DNA, 919 bp, Homo sapiens
tgtccctggccttccaggccactgaggagggtagagaacctctcacacagcctggagttcctcagagtggcttctaggcacccagaactagtgcctctctggctgatcagatgagggacagaagagtggttctcaaagatgcccacatgacagccccaggtcctgtgtgtccttgccacagtggaggaccttgacaaggggacttagggtaggtaggcctgaaggattgagaaaggattgagaaagtctacaccaatgggtttagtgtggacacagggcccctcagaagtggacagaaagatgcccaggactgagtctctgttgctgacctgaagatgaggacatgaaatacattgaagagacttaggaggacagcacagctccagccagcaaagaagccaggatgtcacgcacgcccataaccacaaggagctgaaactggccaaagcctgagtatacagcaggcagaccatcagagccatgagggaggaggccagccagtggcccctggatctgacctatatgacgctgagcagagccagctaggtcgataacactgcaatcacgcatgcgtgtgtcaaccgaggcacatgggtgcatgggcagagccaccaaggtgtggtcagagtgagagaaagccagctttgaggattgacctgtgctctcggggcacggacggtctgaagcagaacccaaagggaacctggcgggctctgcttcaggggggaaacctccacgcattgggaattccaaccggctattccgggggtgtggaccccgggtgcggctatgttcttggggtggggtaaaccctctcttccgtgtaaaagggttatggcgctattaacggtgcaacatggcacagtcaccacgaggatgccccaatattgaacgcgagggagcggtgttacagaaaggc

SEQ ID NO: 504112 - DNA, 186 bp, Homo sapiens
atactggtcttgcagcgtgggcaatgctggagcattgtccatgggtattgagacatgtcatattagtatgctagcggtgagtggtacgaagtttttcataggaggtgtatgaattggtcgtaacggaatcggccgtatgctgttcgaattcataagaaaagggaggttagaagcagggtcttggtg

SEQ ID NO: 504113 - DNA, 320 bp, Homo sapiens
tcgacagcctgggggcactcactcgcggccagcgacagaccggcggccagaacctgttcgacccggccgacaatctcgaaagcgattatgcccgggaagcgctcaatcaatggtatcatctgctccatgacggcaagctcgccagcaccacgcttgaagccttcgttgaactgacggggctgaagctcgtcaatgccgacgacggttcgctgctcgagcatcttccgccgatccagcgttggctgaaccgtatcctcgcgctacgcatcgccacgcaaaatgctattttcgaggaatatctcgggcccatccaggcccgg

SEQ ID NO: 504114 - DNA, 461 bp, Homo sapiens
tggagtgcaggggcgcgatctcaactcactgcaacctccggctcccaggttcaagtgattttcctgcctcagcctcccaagtagctgggactacaggcgtgtgccaccatacccggctaattttttgtattttcagtaaagatggggtttcaacatgttagtcaggatggactcgatctcctgaccttatgatcggcccgcctcggccttccaaagtgctgggattactggcttgagccacaccgtgcccagcctctccctcttgtcctgttttagaattttattttattttttagtcaggcttcagaagggccctggaacatggctctgtgtgatctggcccctgcctacctctgccacatctcagagccctctgtcccacagctgcatcttcctgtcctctgccactcccagctccccctgccccacctctctgttccctctgtctggggcatcttcct

SEQ ID NO: 504115 - DNA, 340 bp, Homo sapiens
  misc_feature (1)..(1): n is a, c, g, or t
ncagtcattggatccgtaagcaactttgggtatcatatctcattcgcatagtagcctattcccaaacattgtgttcagcattcggaaacctcgtgtcgtaccgtgctcacggcatcatctgtgactcatggatgacaacctcacctgtagagcacagcatgtatccatcgtcatccagggtcgaagcttgaaagctacacccgtgggaccagcgtgcagtcacatctggatagggcattggctaagccgtcagctacaatccgctcagcacgctcgcgagaaagaggggttacaatgtcaggatatcagcataggctcctcaactccagctcaacgggag

SEQ ID NO: 504116 - DNA, 220 bp, Homo sapiens
gtaggtccgagcggcccggccagaggcagggcagttcgcgagcccagccgccgcttgtcgccggcagtagacagtccattcgtgcagtcagtcggctcgtcggcggaaccggtgcgtcagagggagcggatgccgcgggatcgctgacaagcccgagctccagcgcgcgaggccgtatgtcccctccgcgcgacggccagtgtgccagtagactggttgg

SEQ ID NO: 504117 - DNA, 810 bp, Homo sapiens
tggcattttaggaggctgaggttggagaatcgcttgaggccagaagtgcaagaccagcctgcgcaaacagcaagaccctgtctacaaaaaaaaaaaaaagtattctttatgcctcagactcccaggttagctgagacctacccacaccttggtcccagctactcgcggaggctgacggtgggcaaaatcacttttgcccaggaatttcaaggccgcaagtgagctatgatggcaccactgcacttccaggaaacagagttgagacccgtgtcttaaaaaaagaagggagaaaagtgttcagaagtggcatgatgaggttcggggggggaaatagcagcaagtggggactcaggcagttgttggcatggcgtgctatcccctcaccaagaaggatgacttgttgagccagggccagcctgggaaggttgcaggcgttgtctgacccgtggtggcaaaatcaggggacaaacgctttccaggcctgatggagaacaggccaacggcacgacggccgttgatgtctggccatgtgccacttgtcgcacgtgagcttgggaatacggggcagatgaaggatggtctgaaagacgcgtcggatcaggacaaacacacactgcctttatttaaagaccaaggtttgtacagcaacctgcctacaaagccttgaagctgtaagctgtaacatttggcactcaaaggcagaaggaagccaagcaatatgaagaaaaccctccttacctacacaaattggtccctataaacgaccatttgggcctgcatgtgcctaactccggcgcataaggaaggccg

SEQ ID NO: 504118 - DNA, 139 bp, Homo sapiens
ggatccctctagagacacatgatagcggattaggtttccctttaatcacatcaaagttcatggtgtccaaagcccgctcagcgtcggccggctgctggaagttgacgtacgcatagcccagtggagcggcgggtgatca

SEQ ID NO: 504119 - DNA, 319 bp, Homo sapiens
agctggggcccccattgggcacgcgaggtccaaaaggatggcatttgcccgccccacccctggcccttttgctgcctgcactcatttgccatggaccctcctaggataggaatgccctccttcctggccccctgccgccatcctgctagccacccacataatgaccatctcaacccaactatagtggccctctagagtctccatgcattcttactgccctagagtaggcagttcaccaaggcctttattccccggcccaggaaaagggtcagggagggaaggggctgttccacccctgagacctcatagacttgggata

SEQ ID NO: 504120 - DNA, 192 bp, Homo sapiens
gggtgcagccaatatgttgaacagtggaggttagtcagtgtacaatttcactttatacttgtgaacacattaggcagtttctgtaaagcatccattctcattctctgaacactagaattttacctggcttgacaaagggtctccagggaccaggtcttgagtcatcacccctcctgggaatccgatcgtcgt

SEQ ID NO: 504121 - DNA, 196 bp, Homo sapiens
gccacaggttcctcacctctcctcccttaaatctcgccttcccctcatgggctttttggcttttttaggggaccctaggaagccggagttttttttggtcctttaactagggtcgccaaagtccagggggcccagcgcaggggctgattaaaaggcacttttgtccgtgggagacccagcccccatgactttttca

SEQ ID NO: 504122 - DNA, 1191 bp, Homo sapiens
  misc_feature (331)..(331): n is a, c, g, or t
agcggggagggatagggagggattgacctttccgcagcggagaaatcgcactgatcctcgtcgctgtctgttgagtactgcctcgtttgagctatttatgtgcctaagagatgactcgagatgagttgtgaagaagtgtagggcttaccttgtgctaggttattggtaaggttagtcgagtccttcaccactaggatgtctgtgtactgtatcttgttgagcatttcattgcatagttggcacgccttgttctgttctcgtaatttcatacatttatatgggctcatgaatagattagtgggtgtataccgagcattgagagacatggaanagacgttcatagacgaggatattggtcactctgattcagagagttaacgcttccattgtggtatccgtaggttaacgcgaactattttcatagctacgattaccgccatgcatctcgttcatcctgcagcttcttttgtgcgttaatcctgtatgcattacttctccaaattctttgttcttgctgcgtcggttcgttgaccgtatgggtatctttcctcaatgcgggtctcgtcccgacgcattagcaatgggaggcatttgcgatttgcgacgccttggtctaagaattccctccatgcatacttctgtgaacaaatggcaccattttgaagaaacaatcccttggggaatgcgtccttaccgaatgtccccattacgcgttttccattatggggtgtatcaaccgtgccgcttgtatggccaccgagtgttggtgtgtgcggcgggcaccacggttccattcgtttggcatctcaacagcgtggcggacactccgtccactttgggcgtctcgcacttcaccattgttccgggctcggcgcagctattttagcccaaccgccgtacctttttgtgcgtttcatcccaggttctgcaatcgcacgggcccgcactttaactttagctttcacatgcgaagtttccgcacaaggccccccaaaccttcagggaggttttgagggctttgtttaaagccgtcttccgtgctactcgcgttttcatacgggccctaaactggttttgccggttttccttggaggtggcccttctctaagagacgcccagtctacccccttatatgaaaattgtccaacgcggccgcccttttttacctgcgcccgagttgaggcctcggtg

SEQ ID NO: 504123 - DNA, 209 bp, Homo sapiens
tttagtatgcttcccgggcccaaaggagctgacatcattttcacggccaccgcccactgttggaggaagatttttagagatgaggggggcaaggccttcttcaagggtgcgtggtccaacgtcctgcggcgcatggggggcgctctttatctggacctgaacaaggagctcaaaaaggtgatctaagggccggggtcttctacactcac

SEQ ID NO: 504124 - DNA, 488 bp, Homo sapiens
ttgtctgcactcagccccgaccccctctgattctctactgaagagtgtgtccttccctatgtctgtatgtgtttaacacgacgcaataattcgaggccaaacttagtgtgtacgatagactcgagagagttatgggacgcttacttgaggaaaatccttaccgtgatctggttctaggaaaaaggcagtgaataattatgcaaattcgccagaagaaggggaaacacgctaatgggccttactgggtgagggtaagaaatgggtacatgggttggaggaagtacgccatcaaggggttggatggagcagccccgagcgagcgagcgagcgttctactgtgacagtgtgattgcgcagtgaggagggggctggccatctctgccacttcggcacagtaaccaccttgggactaagaccacctagatagtgagagctgaacaacaaccagaccatgtcacacaagccagaaactccagttacctttgcca

SEQ ID NO: 504125 - DNA, 207 bp, Homo sapiens
gcctcacgccagtgtcacaacaacctcatcaaggcaatatataaggagtatgaattaaatgccagaatgatggccggggcgaggtggttgtggtagaggatataaaagaagttttggagacagaattcaaaacattggttccattcaagctaagtataagcagaggaaagcagtcctagggccaagtgaaaaccatcacagagaaag

SEQ ID NO: 504126 - DNA, 362 bp, Homo sapiens
caaggcaggcacggcagctcacgctgtaatcccggcactttgggaggcgagacaggcggatcacctgaggtcaggagtttgggacagcctgaccagcatggagaaaccctactactaaaaatgcaagattagccgggcaaggtggctcatgcctgtagtcttggctactcgggagactgaggcaggagaattgattggaccggggaggcagaggtcgcagtgagcctagatggcaccgctgcactccagcctgggcagcagagtgagatgctatctcaaaaaattaaataaataatatataaaaagaacaaaaaagacttaaggaaataaaaacattatttttatttcagtgcttatctatc

SEQ ID NO: 504127 - DNA, 974 bp, Homo sapiens
cctttcacggaaagagacaggaatctacctacacataggaatggtcaaggtagaaccactgaatcttgtcattgtaatattgacagctggtatctggtcgctgggaagctttatgtgtgtgtctgtcagctcagcatcttttactcgtgtctgataaaccctcgtgacttctcgctgttggaagcatctctgggtttcttgtggcgtctggtgtggaatggccttcctctctaggtgcctgaggtgtccgctgacgggtggcctctcacccccctctagagaaagctgacatttacaagtggattgtatttgtccggcaaaaagaggcggattcattcatagagcagaaagaacctgtcggcgtaaggtcttccactagttagatggtttcttttggggaaatgttctatatttggtaacttctagaaagccagaaaatggactctgatttcatacccgattttgataaagatgccacaaaataagggctatagagagattctttacaagtcagattttttgtgccccaaatcttttaaatgaagccagtgactcccagttctcaacacatggtcccagtcagagacagaacactcatggaaatagaacccttgtaagtattatggcactctccgaatcctcctgaaggcatttcctctacagacatagtggttaaccggaagttgaagtggcaattgtgcaattttgttaaacgggagcttttaaccaaggtaatattaatgggctgttgagaacatcagtggccttattctaagattccataaggctgaggtttgcactgctgtgtgacttgcagttctgctaggcatgtcaagagtggtggactattaaaaaccgtaagaggttaatcatgacaagtcacctggaacagactcaaagaaacaggttcttctgggcaacgagacaaagaaggaatcaagtcttgtgctgtcccgtgagtgtgtcctgagtac

SEQ ID NO: 504128 - DNA, 603 bp, Homo sapiens
gcacgaggctacttgttatacggctaaatgcacttccgagggtaacctgttattcaggattatatgaacagagagaataatgatgtgagttactgcaaatagcataattactggactatattcttgttggcttatattattacaacgatatttaccattaaaagtgtctatatcttatattattgatgatctgccattgctacaggattgcacgcgactaataattgtctattaagtatatttggatgacttaacacaagaattgttttctctctcctttctgaactagccagctttatcttctttccttttatgatctggacgggaaccaattcgcctaggttctgctcaacattttttaagtcgtaaatctgtatcaaattgtcgccaacgagaatcaaatgattaccatggaagctcgcgccggtacaacaaaaatcaagtaagagaatatcctttctccaatcagacatctcaccgtagcagtttattttcactacggcttcatcataaaccaaggcaaaaaatctagattgtgatatttgaaaaaaattgaccggtatagctttgcaagtggcgatatccttttttgcttcttcagtg

SEQ ID NO: 504129 - DNA, 397 bp, Homo sapiens
gtgtacatgaaaatagtgtacatgtatacacattatttagaatctagtacaatggaatgagacacgcttgaaaacatgcagacaaccatctataccatgatctagtaacatctgccccataccccaggtaccatccagggtctcacagaaccccatgatatgtggaaaaggcagtctactatctgcccacacctgctactacctatgtccacccagatgaggtaatccgctagaattgctacataaagtggtactgtggaacatttagtaacagagaaaatcagagctagagggagcaccatccaggttagaaaagataagaacattatgttagaaaatctgaactaatctacctgtcttgattaggaggattcgagttgatgtagaatgggtctga

SEQ ID NO: 504130 - DNA, 336 bp, Homo sapiens
atctctaccccacgtgcagcagccctggccccagtctcattccctcacctcttgggccaccatttcctgacagctgtgtgctacagccccaatgccagatgtaactaattcacacaggaaccacacgcagaatctttaacttctcagctcttcacgaacctcagccattgtcaaaactggtgccactgggaggaggtgacatcttttttttataaaaggattattacaacatatgtctggttatttttctaaatgttaacaaccaggataatttgggaaagtgtgatgacacttaaaagccagaggcaaagctattttgaggcagaagaatctaaa

SEQ ID NO: 504131 - DNA, 427 bp, Homo sapiens
tggtgccttacatggtgccttataggtaaatgaggatgaaggaatccctcgtaagtgggagatattgtatatatgcttagatgatcagattgagtggggtgtggggaaaaattgttttctgaaggctcaaaagtggttgcctaaaagtgagccactatcagatttgcacatcaggagacaagaaatagggttacgtccattaggaaaatcccagttggcaggagtgcaatcacatcaaaaaaaacaacgcagccaggatgaaaggtataataaatcctcatagcggacacattgctcagggcacaggaaccgtggctcatatgaggatcacgtgtccatgcctttgtggtcaaagggtcagcacttacccacaggaacaaactaggtgtggatgggcgtggtgatgtgggcacaacataaaattcag

SEQ ID NO: 504132 - DNA, 142 bp, Homo sapiens
ttatcacttgtctgcgttttcgtcgcaaacgtccataactgaaagtagctaaggcaccccagccggaggaagtgaagctctcctaggggcgtgggttgttcgtgatccttgcatcctcgttacttaggggcaaaggcttggg

SEQ ID NO: 504133 - DNA, 104 bp, Homo sapiens
  misc_feature (43)..(43): n is a, c, g, or t
  misc_feature (58)..(58): n is a, c, g, or t
  misc_feature (94)..(94): n is a, c, g, or t
cagtaacatagagcttttagcggttcaagaaggaataaaagtncttgaaacactggtngctcttggtgaagaacaaaacagagtccagttactngctcttttag

SEQ ID NO: 504134 - DNA, 554 bp, Homo sapiens
gtacaatgattgtttatggcaacgaaatattccattgaaatattgtgctgtaacatgggaacagtgtaacatgtttttcactggtttcgtatcaactgctgaacataaacatttaattcgtgacaaacacaacacaaaaaaacaacaaacacaaaacaaaaacaaacacaaaacaaacaacacacacacacaaacagacaacacacacgagcaacgccaccaaccaacgccccacgaaccaagggcagcaagaacaaaaaggaggaggggagggcaagaggagcgctcgtctgcgcatcacggagcgcagacaagggagtgaaccgcacgcgcggctagcggaacacaacgggccggctcggcaccggcccgccgaggacagggagagcagtctcggagaaaccacaagaaaaggaaaaagagagcaagcaacaagaagacggaacagggaggcacagagcgggacaaacaggaggggagcacggtaaaagggcacaaaggagacacaacacaagggcagccgagggaaaagaaggtccagaagagaacacaac

SEQ ID NO: 504135 - DNA, 466 bp, Homo sapiens
tcattcttccccggaaccgcagacccgggttgacacgcgtgtggagaagagtgtaagcccactgtggtcccggacctacgatgctctacccacgccacgccatggcttgtgttgttccccctgacaaaagggcgtccaaaacacgacacgccgaggccgtcgttttttaccgcggctgtttgccaaaagccccccccggcttatagaatgttgttaacccccccctccagggtaagttctatttagtctgatcatgcgagcgcggaggcaggtctgcccagtgggccgagggacacaactgggtcgctctggcccccagaaggttttcggcgaatagtgcttggatagcccccaccagcggtggaaaaattgtctttcgctgggaccgcgcttttcccgaggtcgcccccgcgacaaaaccgtttgatttttaaaaaggagaaaaaccccttttttgggtcaacaa

SEQ ID NO: 504136 - DNA, 813 bp, Homo sapiens
gaagtggcaactaactaacatcctcatttggtcatggtaaaaatgactccagttgcctaggtggtactagaccttgaagatgccggttatccagttttctaggtactgaccggctaagactaagctagttaattccggactccctaggaagaggtggtctctctttttccctaatcataatccccacattgcttgaagaagccacaattcgatctaagcgcactctattttggctgcagagtactacagtgtaacatcttacaaggattatcccagcaagctgagcagatgatagatcaacacagatctctcttcatagtccggtggatgcagaagaataccagtgatttacacagtaagtctgtagttagttcacattgccaggcgtaaatttcctggatcatggtactctccgtgtatttaggtatagtggtaacagaattatgcttgtaacttaccatgttaatgggcatgcctattcatgtcaccaaaacgaccgtaagagcttatgtatgggtacatctgataacattaggggcccctcacggcttccaagggacgctatacttggtcctgacaccagggcgcaaggagggctggtgtgtggacacggctcgggcccaaagagctcagtactgtcattcgcgtcacagaacctagctactaattccaatcggcggacaacagcaccgtttccaggaaccgggttcacgactcacgctgttacaaagcggtctcccaccaaagggggaaaagacttttcaaccactgccgtacaaagcgtgcgccttggacgacaacgaacttgagaaa

SEQ ID NO: 504137 - DNA, 327 bp, Homo sapiens
gaaataaataaatgtttaggtgaacattaaaacagcaaattaattaagtaaaatattaaaataaaaagtaccgatcatttcatctcagtgtagtatttgcttttgtgccccttttccccctatgcacaagtggtttatagttgtttatcagactgagctttcactgtcttcattagagaatgaagcaaaataaaaccaaagctggccgggcgccgtggctcacgcctgtaatcccagcactttgggaggccaaggcaggcggatcacgaggtcaggagatcgagaccatcctggctaacacagtgaaaccccgtctctactaaaaaa

SEQ ID NO: 504138 - DNA, 278 bp, Homo sapiens
ggtcgacggattgcataatctaaaaatatgaaaatgtgtataaatattttgtttcttaaaaggccactgctgtggtagcttatctagtatccttgctacatttactgaaaatatatgttagagatatctgcactgctatgttcttttcagcatttttcacaatagccaagatatggaaacaaccttaacgttcatcaatgaatgcataaagaaaatgtgatacatacgcacttgcaccatgaaatattattcagcattaaaaaagaagaaaatcctgc

SEQ ID NO: 504139 - DNA, 100 bp, Homo sapiens
tgagaagcaagatgggtcaccagcagctgtactggagccacccgacgaaaattcggccagggatctcgatcttgtcgtgtctattcaaaccggcaagact

SEQ ID NO: 504140 - DNA, 817 bp, Homo sapiens
gtgctctggactgtatcctaccaccaattcgttcaactgagaagcccttgcgaactgccctactccaggatgtctcatcaaagattggtggtataggaacggtgtcggctgttggtcgagtggagactggctgttctcagggcccggtctggtgctcacctttgctccagttctgcgtcagcagacgggtgtggggaatctgttcgaaagtgcatccactggaaggcgttcgagatgggagtctcttcgctgggtgacattgtgggcttctaactgtcagggcatgtgtgctctgtcaggggcactgttcgtcgtggctcatcatttcgctggtggacggttgggacctgagccatgcaagtgggggcctgttgggcttcatctggcgtcaggtgaattagtcccgtgaacccaatcgcatggccgacgtatgtccgcctgtctgatgcatccctgtgttggctttgcctccagcgggatcactatttgctctgcagggttgtgcttcatgcgtggtggatgagatgctcggccgttcgtggtaaaaggtctggcatgatgacccgtaaattcgttgagaggtctggtgatgctgccaatggttgaatatgggttcctgggaagcgcccatgtgtggttgacacgctgtcttcaagagtatgcagctttgggtcgcttctggtgtccgggatatgtgacacactggttccctgtgggtgccttcaagcgtggacgagaaagtggtgacgcttggcaagtccaagttctggccaaaaagtccaaggcaattgatattatccctatacggcaccaatta

SEQ ID NO: 504141 - DNA, 1530 bp, Homo sapiens
  misc_feature (1437)..(1437): n is a, c, g, or t
  misc_feature (1496)..(1496): n is a, c, g, or t
  misc_feature (1501)..(1501): n is a, c, g, or t
  misc_feature (1506)..(1506): n is a, c, g, or t
aaaagctgtattttattcaagcattgaatttagaaagataaactataaatttattactgcttttcaacatgctttggattttaaagctaatggatcttttattaataccttttttcctttcatcttaacccagtgttactaaaattagatttcccattttttcccctatatgaaagataatttacatttaccttgtaaaaattatcaccctgctccacttgagaaccctgctgttgtttgcaaaatcaggaccaagcccatattttttgagagctctctagaagaatttatcttcaagaaaatatggtttggtgtttttggttttttcttttctttttcaaagtcccatggccagatatcctataatatactagatgcatgtttgctaatttttacttgaattttttttaaattgtaccaatcaaaaggttctttttctttccagctccaattttttgtaaaacagaagttccagagcacagaaggtcatcatcacaagcaaactttattaaaaaaaaactagaagtgtgctttgattttgctgttatttgttttatcacttctatatttggtgaacagccacagttactgatatttatggaaaagtactttcaagtacaaggtcaatacataagccagagtgaatgatactacaagttgagcatctctaattcaaaaatctgaaatccagaagcttcaaaatctgaatctttttgagcactgacttgaccccacaagtggaaaattccccacccgacacctttgctttctgatggttcagtttaaacagattttgtttcttgcacaaaattttgtataaattactttcaggctatatgtataaggtggatgtgaaacatgaattatgtaattagagtcgggtcccgttgtgtatatgcagatattccaaacctgaaatccaaaacacttctggtccctagcatttggataagggatactcagcttgtacctatatattcatatatattcactgttgttagaaatgtttaagttgctgttctgtgatgaatctaaatcttttctcttgctaccaagctatgtcactgcagtgcattataccaaagagcgaagtcagtgccactgaaaatacagaacccattaatatcgtggctatctgattacatttatattccaagatgaaccttttttatatatgctaaaaatttggggaatatgtttgggatgtattatggagctaaaactctaacctcttaatagttttatagaacttaaaaattttttatacaattacccaattggtgatatgatcttaagctttggtgtcagattatttaatatgatgacttcatgctttattatgccttattatggctgacgtattactgtggtgaaacaaaatatctttaaaagttaaaacatccagatatttaagactattttccctaagattaagtnacttgagcatgagtgtttccaggttcatagggaaactttcttacatacttgttaactgntccgngaaanaaagtaacttaaaacttgcatccg

SEQ ID NO: 504142 - DNA, 660 bp, Homo sapiens
  misc_feature (14)..(14): n is a, c, g, or t
  misc_feature (61)..(61): n is a, c, g, or t
  misc_feature (130)..(139): n is a, c, g, or t
  misc_feature (142)..(143): n is a, c, g, or t
  misc_feature (145)..(145): n is a, c, g, or t
  misc_feature (149)..(149): n is a, c, g, or t
  misc_feature (175)..(175): n is a, c, g, or t
  misc_feature (179)..(179): n is a, c, g, or t
  misc_feature (186)..(186): n is a, c, g, or t
  misc_feature (199)..(199): n is a, c, g, or t
  misc_feature (213)..(213): n is a, c, g, or t
  misc_feature (226)..(226): n is a, c, g, or t
  misc_feature (234)..(234): n is a, c, g, or t
  misc_feature (252)..(253): n is a, c, g, or t
  misc_feature (275)..(275): n is a, c, g, or t
  misc_feature (278)..(278): n is a, c, g, or t
  misc_feature (286)..(287): n is a, c, g, or t
  misc_feature (290)..(290): n is a, c, g, or t
  misc_feature (309)..(309): n is a, c, g, or t
  misc_feature (312)..(312): n is a, c, g, or t
  misc_feature (319)..(319): n is a, c, g, or t
  misc_feature (356)..(356): n is a, c, g, or t
  misc_feature (528)..(528): n is a, c, g, or t
  misc_feature (531)..(531): n is a, c, g, or t
  misc_feature (538)..(538): n is a, c, g, or t
  misc_feature (575)..(575): n is a, c, g, or t
  misc_feature (611)..(611): n is a, c, g, or t
  misc_feature (621)..(621): n is a, c, g, or t
  misc_feature (646)..(646): n is a, c, g, or t
  misc_feature (649)..(649): n is a, c, g, or t
  misc_feature (653)..(653): n is a, c, g, or t
acttccgcctctgntacctactgacaaaaatacaccacaaaattataaagcgctcagcggnttttgctagggacaacttgttattccgctttgaatgacaaatgaatttacaggtgactcagggtgattnnnnnnnnnnggnngngggnggaaaaatcagatgagagcgtttggnaggntagtttnccccatgctagtnttattacccagctnttgcatacgatgntctctgcnacacagcaagccacaaannattttcctttacatggcctgtnggngttttgtnnggnggcagtaccacatctcaanttnccaattntcccagctggttctggccctgtgggtcctggagctgncaccctgcagaactggcctccctgaaacatttgtgagaggcaggcgaatgcctgatacggttccagggaactgggaggcctggtcaaggctggatgctgcctccttgtcaggagcttctagaactcggttggggagtttggacaaatgtccccttttaacacaacgaagtgngcnaaaaganagtcccatttttcagcttcctttagaaacgatttggnattgtggtggccccaaccttcaggtctcttcctggntgtcacttgnggctcctggttggaatccgtattgntgnggtnattgtta

SEQ ID NO: 504143 - DNA, 654 bp, Homo sapiens
aaaagctgtattttattcaagcattgaatttagaaagataaactataaatttattactgcttttcaacatgctttggattttaaagctaatggatcttttattaataccttttttcctttcatcttaacccagtgttactaaaattagatttcccattttttcccctatatgaaagataatttacatttaccttgtaaaaattatcaccctgctccacttgagaaccctgctgttgtttgcaaaatcaggaccaagcccatattttttgagagctctctagaagaatttatcttcaagaaaatatggtttggtgtttttggttttttcttttctttttcaaagtcccatggccagatatcctataatatactagatgcatgtttgctaatttttacttgaattttttttaaattgtaccaatcaaaaggttctttttctttccagctccaattttttgtaaaacagaagttccagagcacagaaggtcatcatcacaagcaaactttattaaaaaaaaactagaagtgtgctttgattttgctggaatttggttgataattctatattggggaacaacaccattactgtttttttggggacttttgtcagggccattcctcccgagggattgttcttcccgtggcctttttttt

SEQ ID NO: 504144 - DNA, 116 bp, Homo sapiens
tgcagcagcgagctggcacgatcgtcgctggacacctgcggacgacccggatcggcgtacgcggtcctgcgaatcgcggtcccacagcaggcgcggctcggtaccggcgttgtccg

SEQ ID NO: 504145 - DNA, 1476 bp, Homo sapiens
  misc_feature (1383)..(1383): n is a, c, g, or t
  misc_feature (1442)..(1442): n is a, c, g, or t
  misc_feature (1447)..(1447): n is a, c, g, or t
  misc_feature (1452)..(1452): n is a, c, g, or t
aaaagctgtattttattcaagcattgaatttagaaagataaactataaatttattactgcttttcaacatgctttggattttaaagctaatggatcttttattaataccttttttcctttcatcttaacccagtgttactaaaattagatttcccattttttcccctatatgaaagataatttacatttaccttgtaaaaattatcaccctgctccacttgagaaccctgctgttgtttgcaaaatcaggaccaagcccatattttttgagagctctctagaagaatttatcttcaagcagatatcctataatatactagatgcatgtttgctaatttttacttgaattttttttaaattgtaccaatcaaaaggttctttttctttccagctccaattttttgtaaaacagaagttccagagcacagaaggtcatcatcacaagcaaactttattaaaaaaaaactagaagtgtgctttgattttgctgttatttgttttatcacttctatatttggtgaacagccacagttactgatatttatggaaaagtactttcaagtacaaggtcaatacataagccagagtgaatgatactacaagttgagcatctctaattcaaaaatctgaaatccagaagcttcaaaatctgaatctttttgagcactgacttgaccccacaagtggaaaattccccacccgacacctttgctttctgatggttcagtttaaacagattttgtttcttgcacaaaattttgtataaattactttcaggctatatgtataaggtggatgtgaaacatgaattatgtaattagagtcgggtcccgttgtgtatatgcagatattccaaacctgaaatccaaaacacttctggtccctagcatttggataagggatactcagcttgtacctatatattcatatatattcactgttgttagaaatgtttaagttgctgttctgtgatgaatctaaatcttttctcttgctaccaagctatgtcactgcagtgcattataccaaagagcgaagtcagtgccactgaaaatacagaacccattaatatcgtggctatctgattacatttatattccaagatgaaccttttttatatatgctaaaaatttggggaatatgtttgggatgtattatggagctaaaactctaacctcttaatagttttatagaacttaaaaattttttatacaattacccaattggtgatatgatcttaagctttggtgtcagattatttaatatgatgacttcatgctttattatgccttattatggctgacgtattactgtggtgaaacaaaatatctttaaaagttaaaacatccagatatttaagactattttccctaagattaagtnacttgagcatgagtgtttccaggttcatagggaaactttcttacatacttgttaactgntccgngaaanaaagtaacttaaaacttgcatccg

SEQ ID NO: 504146 - DNA, 199 bp, Homo sapiens
tggagagggagtctcattctccagccgggcaacagagtgagaccccatctaaaaaaaaaaaaaaagaagggaactcttggccttcttaaaagcaggaggaaactggagttcttctatagagacacagtatctaatatttataagaagcctatttatttatttttttggcccccttttttctctttttgtttccacagtc

SEQ ID NO: 504147 - DNA, 1152 bp, Homo sapiens
  misc_feature (1059)..(1059): n is a, c, g, or t
  misc_feature (1118)..(1118): n is a, c, g, or t
  misc_feature (1123)..(1123): n is a, c, g, or t
  misc_feature (1128)..(1128): n is a, c, g, or t
cgggttatcctcggcgaacgtgttatccgtgatccaaaacacttctggtccctagcattttgataaagggatactcagcttgtacctatatattcatatatattcactgttgttagaaatgtttaagttgctgttctgtgatgaatctaaatcttttcttttgctgttatttgttttatcacttctatatttggtgaacagccacagttactgatatttatggaaaagtactttcaagtacaaggtcaatacataagccagagtgaatgatactacaagttgagcatctctaattcaaaaatctgaaatccagaagcttcaaaatctgaatctttttgagcactgacttgaccccacaagtggaaaattccccacccgacacctttgctttctgatggttcagtttaaacagattttgtttcttgcacaaaattttgtataaattactttcaggctatatgtataaggtggatgtgaaacatgaattatgtaattagagtcgggtcccgttgtgtatatgcagatattccaaacctgaaatccaaaacacttctggtccctagcatttggataagggatactcagcttgtacctatatattcatatatattcactgttgttagaaatgtttaagttgctgttctgtgatgaatctaaatcttttctcttgctaccaagctatgtcactgcagtgcattataccaaagagcgaagtcagtgccactgaaaatacagaacccattaatatcgtggctatctgattacatttatattccaagatgaaccttttttatatatgctaaaaatttggggaatatgtttgggatgtattatggagctaaaactctaacctcttaatagttttatagaacttaaaaattttttatacaattacccaattggtgatatgatcttaagctttggtgtcagattatttaatatgatgacttcatgctttattatgccttattatggctgacgtattactgtggtgaaacaaaatatctttaaaagttaaaacatccagatatttaagactattttccctaagattaagtnacttgagcatgagtgtttccaggttcatagggaaactttcttacatacttgttaactgntccgngaaanaaagtaacttaaaacttgcatccg

SEQ ID NO: 504148 - DNA, 587 bp, Homo sapiens
  misc_feature (58)..(58): n is a, c, g, or t
  misc_feature (60)..(60): n is a, c, g, or t
  misc_feature (586)..(586): n is a, c, g, or t
cccgctcttttcaaattcatcacccatactcccttccacacaagcaatactccggcantncacagaattacttacttgtctcccagatagacaacaaacaccactgtctgcaaaccgttgttcacttggttccctttgctatgaagctccactatcccaatacatccatgtttacgtctaacttctgctcgagcctcaaagggtaagtttttttgggttttttttgtttgtttgtttttttgaggcggagtgccactctactgcccaggctggagtgcagtggtgcaatttcagttcactgcaacctccacctcctgggttcaagtgattctcctgcctcagcctcctgagtagctggaactacaggtgcataccaccacgcccggctaattttcatatttttagtagagacagggttttgccatgttggccaggctggtcttgaactcctgacctcaggagattcgcccacctcggcctcccaaagtgcagtggtgcaatttcagttcaactgcaacctctacctcccaggttacaagtgattcttaggcgctcagccttctgagcagctgcaaacacaactgcng

SEQ ID NO: 504149 - DNA, 735 bp, Homo sapiens
agcgggctcctgggctttgggctggctgcagtctgtctgacggcggccgaagtggtctggctcatttaaggatgaggcttctgctgcttctcctatggcggcgtctgcgatggtccggagtcgaggcctcggcaatctgggcggcgtgtcccatgcagacgcagattaaagatgcagtacgccacggggcgttgctcaagttccagatttgtgtttcctgaggcttataggcggggtgtcatgagtgagtacatgcgcggttataagccagtgggtacccagacgttccgcattgacggagagaattacctcgcctcaaccagatatatacgcacacatacgcatctttcctgtcagtcttcaaactagtattaataggcttaataattgtaggcaatggatccttttgctttctttgtgatatgcaaggctcctagctatctgggcagtggtggccaaggaaacataatggtttatgcatgtatgatggttttcttcttgagcgatatgatatgagaaccagtgtatgtcaacatggtgcatttgagataatctcgagaatgatgtacctgtgtggtctaagctggaatctggtcaccattccatccatgcaacaactagttcaaattcttgataattgaaatgaatgctcagtgtgccatatggattcaatccccacaccatcgatcatagcaacacctatcaggactgagaactcttttgcattaagggata

SEQ ID NO: 504150 - DNA, 395 bp, Homo sapiens
tgagaaaacctaccgcaggatcttactgggcttcataggtaagcttgcctttgttctggcttctgtagatatataaaataaagacactgcccagtccctccctcaacgtcccgagccagggctcaaggcaattccaataacagtagaatgaaccctaaatattgatttcaaaatctcagcaactagaagaatgaccaaccatcctggttggcctgggactgtcctagttttagcattgaaagtttcaggttccaggaaagccctcaggcctgggctgctggtcaccctagcagctgagggactcttcaatacagaattagtctttgtgcactggagatgaatatactttaatttgtaacatgtggaaacatctataaacatataccgcagcctga

SEQ ID NO: 504151 - DNA, 404 bp, Homo sapiens
  misc_feature (58)..(58): n is a, c, g, or t
  misc_feature (60)..(60): n is a, c, g, or t
cccgctcttttcaaattcatcacccatactcccttccacacaagcaatactccggcantncacagaattacttacttgtctcccagatagacaacaaacaccactgtctgcaaaccgttgttcacttggttccctttgctatgaagctccactatcccaatacatccatgtttacgtctaacttctgctcgagcctcaaagggtaagtttttttgggttttttttgtttgtttgtttttttgaggcggagtgccactctactgcccaggctggtctcaaactcctggcctcaagtgatccacctgccttggcctcccaaagtgctggtattatagatgtgagccaccgctcctggccagattttaaaaattgggacatttcatatgaaaacactaatttggggt

SEQ ID NO: 504152 - DNA, 233 bp, Homo sapiens
tctgcatcgctaatccttttgcacggtttgggtaccgcggccgttagacatgtgtcactgggcatgcggtgcctctaatattggtgatgctagaggtgatgtttttggttaaacaggcggggtaatgcatttgccgagctccctctttactttctttttaactctttcctctatgagcatgcctgttgttggtgttgacaggtgcaggcgttatacctgaacaggatttcagc

SEQ ID NO: 504153 - DNA, 176 bp, Homo sapiens
tataattatggctcatagggatagtacaaggaaggggtaggctatgtgtttgtcaggaggttgacgaatgagtgtgaggcgtattataccatagccgccgggtcaagagtactgcggcaagtactattgacccagcgaaaacggcatcttcatcggcgaaaacggctcttcatcgg

SEQ ID NO: 504154 - DNA, 754 bp, Homo sapiens
  misc_feature (373)..(373): n is a, c, g, or t
ggcttatccccccgagtgcgtctctccgcctctgaccccgctctgttttacgtgttgataccccctactcttgtagaggatgggccccccctcctctaagagagagagagtgattcttctctgtgaagatagtgtcccgcccgcccgccgacacactctgtgtgattgtctgtgcccgcactgtcacagacccctctttgtggggagatgtgtggcgaagaagtgattctctcttgtgtttctccccccccactctcttctctcttatgccccgcgtgaaataatagatctgtgagaggagataagagaggagcgagcgagaagagagaagaattatagtgggggataaacctcctgggtgggttgttggaanccctcagaggttcttgtgggagactctctttgtggaggaggtttcttgtataacaccggggagtattttcccactccccccccctgtgggaaaatattagtatgaggtgcatattgactcgtttttaggttttcgacccatattgggaattttttccttcacaaacacttaagcccaccccctgttcagggaggggtatatttttaattttttcgcgtcagagtaagatgtttcccctctctatctggggcactctgaagaggataatatgtgaaccacatgttcacatatttgggatattttccacccgcgggtttttttttttaacatttttttagggaaaccgtggggaaaaaaaaattttttttttttatttcccca

SEQ ID NO: 504155 - DNA, 270 bp, Homo sapiens
ggggccaaattgtggactcagcgatgagtggcagtcagagagaaactgtcagttggtggaggttctgtgggtggtgctcccttggagttaacaggtttttttttatttttataacttcaccttttattttagattcagagggtacctatgcaggcttattacctgggtatattgtgtgatgctgaggtttggggtcctactgatcccatcacctaggtactgagcacagtaccagtagtttttcaattctcaatcccctccctctctcct

SEQ ID NO: 504156 - DNA, 446 bp, Homo sapiens
  misc_feature (73)..(73): n is a, c, g, or t
  misc_feature (123)..(123): n is a, c, g, or t
  misc_feature (178)..(178): n is a, c, g, or t
  misc_feature (195)..(195): n is a, c, g, or t
  misc_feature (207)..(207): n is a, c, g, or t
cggtctgtgaagctgctgcccctgagctggaggggggtctcattctacaaagagagaggtggcccccctttcntgacctcctcctccttcaagctcaaacaccacctcccttattcaggaccngcacttcttaatgtttgtgctttctctccagcctctcttaggaggggtaatgtgnagttgcatctgtaactntccttctccttngtcccctttctctgtccgcctttcccatcttgctgtaggcctcttgattgtcagtctgtgttctatccagtgattgttttggtttctgttccctttatgtctgccctaggggctcagaaccccagcaatcccttccgtttctgataccttcttttctgggggtagttggaagggtccgaaagtgttgggggaaggtagtaggcccatcaatgaagaggaaaccacccagatgaaaaaaa

SEQ ID NO: 504157 - DNA, 480 bp, Homo sapiens
tgctgaggtcactctagagttcccgaacgcgtcacaatcgaagatgggtgctacagactggcagacactttgtggcatacaataataccgtggtagaacaatagagtactttgtttcttcttgactgaaatttcttactgaattccctggctgatatttttcattgtgagttgcttatctcgatgtcctgctttgaaaagtatgtgtttagggactgtttttatttgcatcacttactcatgtttgctatggcaaaatttagaaagtaatgttcaagtaaaatgcaagcaaactcacaaccatctgtactccctccattctagcattaactcactatttagattttggggcatcaacagttttcctgtctttttacattacatacaataatagttcacatttattcacgcattttctagtaccaagtactataccaagttgctttacatgtattcgtctcatcttcgattttgacgcgta

SEQ ID NO: 504158 - DNA, 1001 bp, Homo sapiens
  misc_feature (23)..(23): n is a, c, g, or t
  misc_feature (37)..(37): n is a, c, g, or t
  misc_feature (49)..(49): n is a, c, g, or t
  misc_feature (58)..(58): n is a, c, g, or t
  misc_feature (75)..(75): n is a, c, g, or t
  misc_feature (77)..(78): n is a, c, g, or t
  misc_feature (81)..(81): n is a, c, g, or t
  misc_feature (123)..(123): n is a, c, g, or t
  misc_feature (140)..(140): n is a, c, g, or t
  misc_feature (248)..(248): n is a, c, g, or t
  misc_feature (327)..(327): n is a, c, g, or t
  misc_feature (345)..(345): n is a, c, g, or t
  misc_feature (401)..(401): n is a, c, g, or t
  misc_feature (448)..(448): n is a, c, g, or t
  misc_feature (452)..(452): n is a, c, g, or t
  misc_feature (456)..(456): n is a, c, g, or t
  misc_feature (461)..(461): n is a, c, g, or t
  misc_feature (474)..(474): n is a, c, g, or t
  misc_feature (478)..(478): n is a, c, g, or t
  misc_feature (488)..(488): n is a, c, g, or t
  misc_feature (501)..(501): n is a, c, g, or t
  misc_feature (504)..(504): n is a, c, g, or t
  misc_feature (508)..(509): n is a, c, g, or t
  misc_feature (513)..(513): n is a, c, g, or t
  misc_feature (517)..(517): n is a, c, g, or t
  misc_feature (541)..(541): n is a, c, g, or t
  misc_feature (560)..(561): n is a, c, g, or t
  misc_feature (567)..(567): n is a, c, g, or t
  misc_feature (799)..(799): n is a, c, g, or t
  misc_feature (866)..(866): n is a, c, g, or t
  misc_feature (892)..(892): n is a, c, g, or t
  misc_feature (905)..(905): n is a, c, g, or t
  misc_feature (917)..(918): n is a, c, g, or t
  misc_feature (931)..(931): n is a, c, g, or t
  misc_feature (934)..(934): n is a, c, g, or t
  misc_feature (962)..(962): n is a, c, g, or t
ttgcggtacggaagctacacagnaacacgtatagganactctccccganatcttctanggagtgacccatctatntnngtntaggaagaggaaactccgaaatgggatcgcggaagacttaangggccaggctgattttnttttcctactggtctctgaggctgtggttgctacagggtcaccacgagcttggcttacttgtctcatccttcccttgcctggtatcattttctcagttctcccaaaanccatgtcccggcccttgctcatcaccttcaccccagccactgaccccagcgacctctggaaggatgggcagcagcaacnacaacccgagaagccaangtccaccctggatggggctgcagcccgagctttctatgaggccctgattggggatnagagcagcgctcctgactcccagagatctcagactgaacctgccaanaaanaaangaaanagaaaagaagaanaatnaaggcaccancagcagaagcagntgngcannaagngagncatcaggaagacatggtacaaggngagatcccttgaggctganngataangatgactcaccggatactgagaggcagcccagagagggaggacctgcacagaacttaaggagactgctgagaaccgcatgagcgcagggaggagctgggggggaatatgaacgcccggggatgccttctggtggaccccactgatgtgtgctgctcgagcgggccagggggcagctgtgagctatctcctgggccgtggggctgcctgggtgggggtctgtgagctgagtgncagggatgcggctcagctcgctgaagaagctggcttccctgaggtagcccgcatggtcagggagagncatggagagacaaagagcccggaaancggtctctactcnctccctccagtnntgcgagaactgtnaanccacttccaaattccaccaccgacatcnctgctcactgctgtatatcgcgggtctcagctccaacct

SEQ ID NO: 504159 - DNA, 179 bp, Homo sapiens
agacccggcgaccgtacttctcccagcctaattatttaggacattaacctagttatgcagatgggtctcgcacaatcagtgatgtgacaaaagccagatcctgcaaggccaccttttctaattgttcactgtttaaaccacatcatgattactgaaggtatcgagaaagtacggttgca

SEQ ID NO: 504160 - DNA, 112 bp, Homo sapiens
tgcttcgagtcacggtcagattgctccctctttctttctttttttgagacagggtctcactctgtcacccgggggggagtgtggatgacactagtcatggctcactagcagc

SEQ ID NO: 504161 - DNA, 266 bp, Homo sapiens
aacctaattacgacattaaaggagcattgatgggaatacaataataatagaagactttaacaccccacttacatcaatggatagatcctctaggcagaaaatcaataaggcaacaggaatcctaaatgacacaatataacagttagatttaattggatattttcacggacattacatccagaaaaacccacgaatatatattcttctacaaagtgcacatgcgaacattctctcaggatcgaccacatcaccgtaattacgggttt

SEQ ID NO: 504162 - DNA, 126 bp, Homo sapiens
cacgaagtggctgcccatctgcccacaagtggagtccgtcaaagaggtatctttactattaaagctattgtgttagctaactcatattaagttgttggctcaggagctttgacacttcgtgggcag

SEQ ID NO: 504163 - DNA, 199 bp, Homo sapiens
gcctaaaaacacaaaagacacaaaacacggaaaaacaaagaaatacaaaactccagtgttcccatcgtggcttaacaggttaagaacctgacatagactagatagcaatgagatcctgctgtatagcacaggaagctatatctagtcacttgtgacagaacatgatggagcctaatgtgagacaaagaatatgtatatg

SEQ ID NO: 504164 - DNA, 171 bp, Homo sapiens
gaagtgcacccagacctgagagtgtacttgtaaattgcttatttaaaagaaaaaaaaaactgtatcatgagcatagtttcatcttgacaacaatctgacacatcttttggtgttttggtagacatcacttcattgcagtggatggcatcagtgatttatttaacgcaattt

SEQ ID NO: 504165 - DNA, 567 bp, Homo sapiens
  misc_feature (85)..(85): n is a, c, g, or t
ggagctaaaccaatctggttttcaacgattttggaaaagcccccaggggtcccccccggtttgttgagggttggggtggttagangcgctctccaaagttagacgtccagtcacgtccttggagatgtccttggctcccatgagaaatttgaaggcccgcttggataacaaccttagggaggtggaggcccccttcgcccttcagatggaacagctcaacggggtccttctgcccctttagtcaaagctggcccacacccgggccaaggggcagccgccggcccccgaggtttagggcccttcttaccctcaaggccaagctggggggttagatcgccccccccccccccctcctggaaaatggcgagggcttttattttggtgatgccttgggcagcagcaactccctgcaaacccttcaaaagaccccccccccccggatagtggatggcaaagtggtgtttgagacccattccccccaagtttttgggcctttagccccccaaagcaggggtccctttggggggccgggggcccataaaaagttccgggttccttgggtggcca

SEQ ID NO: 504166 - DNA, 347 bp, Homo sapiens
ccccgggagttcataagcttgaaattcagactctatccatccagttcaaatgaacgcccacataactgagcctacatgtctaaactggtttaggtgttatagacagcgtatctgctcctaattcacagccagtctaagatcttttacatgttggttataagcaaaaggcagcttgacttccagttgctcgccatttgaccctcctcggcaaatcaggtctccaatgccacattcaagcattcttcaagagtctggtacatcaaccaacagagcttacggcgcctctgttgttgacatgtgcgtgtatttcgcgagctccccgtgcacagtgtgtgtcgtcatgtgcg

SEQ ID NO: 504167 - DNA, 863 bp, Homo sapiens
  misc_feature (27)..(27): n is a, c, g, or t
  misc_feature (194)..(194): n is a, c, g, or t
  misc_feature (224)..(224): n is a, c, g, or t
  misc_feature (268)..(268): n is a, c, g, or t
  misc_feature (270)..(270): n is a, c, g, or t
  misc_feature (272)..(272): n is a, c, g, or t
  misc_feature (274)..(274): n is a, c, g, or t
  misc_feature (360)..(360): n is a, c, g, or t
  misc_feature (406)..(406): n is a, c, g, or t
  misc_feature (491)..(491): n is a, c, g, or t
  misc_feature (493)..(493): n is a, c, g, or t
  misc_feature (512)..(512): n is a, c, g, or t
  misc_feature (545)..(545): n is a, c, g, or t
  misc_feature (547)..(547): n is a, c, g, or t
  misc_feature (554)..(556): n is a, c, g, or t
  misc_feature (565)..(566): n is a, c, g, or t
  misc_feature (568)..(568): n is a, c, g, or t
  misc_feature (571)..(571): n is a, c, g, or t
  misc_feature (576)..(576): n is a, c, g, or t
  misc_feature (619)..(619): n is a, c, g, or t
  misc_feature (649)..(649): n is a, c, g, or t
  misc_feature (742)..(742): n is a, c, g, or t
  misc_feature (750)..(750): n is a, c, g, or t
  misc_feature (760)..(760): n is a, c, g, or t
  misc_feature (798)..(798): n is a, c, g, or t
  misc_feature (855)..(855): n is a, c, g, or t
tgcaataaaaatcagcatggatcttanatgatctagaatacactgtgttttgaaatccacagctggttgcatttttaaccattatgaaaaaccagtactcctattccatcaaatgtgttttataagcaataataaattctgatccactgtattatgcaacatacatctttggaaagcaacataaacagtgagancagatcagtagaaatatacacagttaaaanatatacacaaagtactgttgttttattaaaaactactacttgananananatctttccacaaatagcataaaactgtagaatgatgaaaggttttgggaaagctttacaaaagcgtaattccaattgtatcccccngagggtggtggcaaagggtatttccttccttctctgggataccccngtcccccgccacgaccatctcgcccgggtggatacccaccaggcccagcgagcatctggcaccggtttggccggaaggcggcatncngggtgggcagcatccggcnccatgggagcagaggttcagccccaacgcctcngncaaaccnnngcggccggnnanccnggggnggacctcgccaggcatcctggggcctcatatttgacataagtnttggaatctgggcttgtcctctcaaaagcngcctgtataagtttccctggtaagtcacaggtggtggtgcagcattgctgtaaatgccagtccctgagcctcttggcatcacatggcccaaantcctgaangctgcctganccaggtgcacaggcctccggtcacggttaaagcaagcngaggctccactgccgtccattgctgggattttcccagtcacaaggttcagtactgcngcggcttc

SEQ ID NO: 504168 - DNA, 201 bp, Homo sapiens
  misc_feature (43)..(43): n is a, c, g, or t
  misc_feature (78)..(78): n is a, c, g, or t
  misc_feature (131)..(131): n is a, c, g, or t
ggtgccctcctcaggtgaaggaagcagcaacgaatctaatttntttccaaaacactgcacagagcctgaacgccagcntcaggcgggccagcagctcgaggctccgtaaacgggctccatcccggcttctnaccgggtaccggggggttttcaatgacagcaaacagcgtatgattttaccagtaagcaaagcagcctatt

SEQ ID NO: 504169 - DNA, 98 bp, Homo sapiens
cagtactatttatgttgagagaggcaaagggacaagttttggttttgccttcttcacaagtttgtttttaacgacaactaacaccagaccttttccat

SEQ ID NO: 504170 - DNA, 174 bp, Homo sapiens
caggtggagcagaatagtgcagaggctctccgttccaggcccatttatgacagatggcgggacaggaaatgcaatagaccagcctgcaagaaggacatgtgttttgatgacaggcagtgtggccggatggaacaagcacaggccttggaaatccaataggactgaatcagtaac

SEQ ID NO: 504171 - DNA, 298 bp, Homo sapiens
taccagcgttatgcctcacgtctgcctttaaactggataataaatgcggtactcctactcccaatatgagcacacacgtttgcaattctcatgtttgactgataacacaaactgtaatggtgaatgtgaaaactacagtctgtgtcatgacactgtcagtctttttcctattctccaattcattaagttcactgacgtaacctaaatttagacaaatccttttttctgcattatttatatgaatgtgcgcattattgtactaaatgtcatagctgatttgaagctttgtaactgtggt

SEQ ID NO: 504172 - DNA, 101 bp, Homo sapiens
tagaggatcccccagctactcgggaggctgaggcaggagaatcgcttgaacctgggaggtagaggttactcatatcactatgagattgttttttgttcttg

SEQ ID NO: 504173 - DNA, 192 bp, Homo sapiens
gtgcggaagactccactgtaggtggaaggcgtggcttgagacgggaattggaggccgagaaggaccttcccgttgggggaattcgtgatgatccaggtcccccaaggttggtgctcagtttttgataatcctagaacggctttagttccactggatgcagctctgctcgccccaagctagcggggaagggcc

SEQ ID NO: 504174 - DNA, 268 bp, Homo sapiens
  misc_feature (16)..(16): n is a, c, g, or t
cgccctataatccctngcacctttgggaggattccttgaccctctggagtttgagacgagctggggcaagatggtgagaccttgtctttacaaaaaaaaattcttttaagttagctgggcatgggggcacactcctacagtcccaactacttgggaggctgaggtgggaggatcctttgcactcgggagtttaaggcagcagtgagctatgatcacatcactgcactctagcctgggtgacaaagtgagaccctgtcttataaaagag

SEQ ID NO: 504175 - DNA, 193 bp, Homo sapiens
  misc_feature (71)..(71): n is a, c, g, or t
catgatctcagctcactgcaaccgcgactactgggtaaaagcgataaaactgccaaggactactgagtagntgggattataggcacgcaccaccacgcccagctaaaaaaaagtatttaaagtggagacagagtaacaccatgttggccaggctggtcttgaactcctgaccttgtgatccacccacctcggc

SEQ ID NO: 504176 - DNA, 383 bp, Homo sapiens
gagaggactgacagtggaggcacctactgtgttatctgcgccttcgatgaagtgagaaccttgtggagaacgggctgtggattaaggagtggaatgcaggcttgggctagacactgggctgggatcttctgggtcatgtgactgtgtatccaggagcagaaacttgtattctcaggattcaggatctaaccaggaccaaagatgtattttcaggagaacagacctagaaatgggcctgtctggcatttcagagtcaggcaaagcaggcagggcagggagcttctgtgggtctacacaagaaggttcctgtgagggctatcagttgttgccttctagcttgctggtaactttggggcctccgcaaagacctgtcagagtcccct

SEQ ID NO: 504177 - DNA, 131 bp, Homo sapiens
gacatgatatgaagtttgaggtgtgtactgtaaagtgcagcatattcatttgcaagctagagggttgggtgtcgggattctgtggcccagtgttgagctggtgtagcacctatttcttttgagtgttgtgg

SEQ ID NO: 504178 - DNA, 481 bp, Homo sapiens
gccgggacaaataagggaatagaagctggccaccccagccaacagcaggaacccgctgggtccaccttccatgctgtgggagctttgttcttttgctcttcatgataaatcttgctgctcctcactctttgcctccctaccacctttaagagctgtaacactcacagtgaaggtccacggtttcattcttgaagtcagcgagaccacgaacccactggcaggaacccactccagacacatcatgagacactaaaggagcactatggaggggctcacatgggtgaggaactgatttctttgagccatcttggaaatgtattttttaacctgaggcaaaccttcatatgattcctgccccagctgacagattgactgcaaagttatgagagatcctgagctggaaccagccacccagctaagatgctcatcaattcttgacctacagaaattgctaaagaataaatgtttgttgttttaaaaa

SEQ ID NO: 504179 - DNA, 186 bp, Homo sapiens
  misc_feature (7)..(7): n is a, c, g, or t
  misc_feature (55)..(55): n is a, c, g, or t
  misc_feature (72)..(72): n is a, c, g, or t
  misc_feature (83)..(83): n is a, c, g, or t
  misc_feature (107)..(107): n is a, c, g, or t
ggcacgngggtatcttgggtgttctcaagtagctaagtaagacaagaagaagggnggaaagacaatgtgacnagggtattgcnaaggataaaaggaaccccctgggngttttgtacacagatacataaaaggtggcaaagagcacaggaaagatgcacagtgagcacggtgttgggaccacgagtt

SEQ ID NO: 504180 - DNA, 363 bp, Homo sapiens
tgtttgctgctaaaaaacccaagattttgccctttttaaaccccccgtccctgtgatacccctttgaaaaaacttttaaaaatctctgagggaggggctctttttttcccaaagaaattatggacatctgggatgttttccaggggggcccccttttaaccaggggacatattgggcccccctgaaatgtcataaaccccttctctccttaaaattggttatttcctgtgggttcctttcccatgggtttttgggtggtgctgttttctccccgaaaacgggtttcataaaaagccccctgggatgggccatttttttgtaatttgccataaagtttgaagaataaagatctttaaaagttta

SEQ ID NO: 504181 - DNA, 589 bp, Homo sapiens
  misc_feature (6)..(6): n is a, c, g, or t
  misc_feature (13)..(13): n is a, c, g, or t
  misc_feature (26)..(26): n is a, c, g, or t
  misc_feature (28)..(28): n is a, c, g, or t
  misc_feature (43)..(43): n is a, c, g, or t
  misc_feature (45)..(45): n is a, c, g, or t
  misc_feature (53)..(53): n is a, c, g, or t
  misc_feature (60)..(61): n is a, c, g, or t
  misc_feature (67)..(67): n is a, c, g, or t
  misc_feature (72)..(73): n is a, c, g, or t
  misc_feature (97)..(97): n is a, c, g, or t
  misc_feature (103)..(103): n is a, c, g, or t
  misc_feature (124)..(124): n is a, c, g, or t
  misc_feature (132)..(132): n is a, c, g, or t
  misc_feature (137)..(137): n is a, c, g, or t
  misc_feature (158)..(158): n is a, c, g, or t
  misc_feature (446)..(446): n is a, c, g, or t
aaactnaaagagnacaaagtggcgtncnaaggtccacctcaangnactaaagnaacaagnncaaccnaaccnnaacccagcagaagaaaggaaatanccaagntcagagcagaactaaatgaancaatcaancaacnaaatatgaaagataaatgaancaaaaagccagttctttgaaaagataaatataattgatagatcattagcaagattaaccacgaaaagagagaaaatccaaataacctcattaagaaatgatacaggagacattacaactgacaccactgaaatacaaaagaccattcaaggctactatgaacaccttcacacacataaactagaaaacctaggaagagatggatagttcatggaaaaatacaaccctcctagtttaaataaggaataattagataccctgaacagaccaataacaagcaacgagattnaaatggtaatttaaaaattaccaacaaaaaaaagtccaggaccagagacactattccatgagacagagaaagaaggaaccttccctaactcattctatgaagccagcatcaccctaataccaaaaccaggaaaggacataacc

SEQ ID NO: 504182 - DNA, 819 bp, Homo sapiens
  misc_feature (79)..(79): n is a, c, g, or t
  misc_feature (191)..(191): n is a, c, g, or t
  misc_feature (226)..(226): n is a, c, g, or t
  misc_feature (242)..(242): n is a, c, g, or t
  misc_feature (250)..(250): n is a, c, g, or t
  misc_feature (257)..(257): n is a, c, g, or t
  misc_feature (282)..(282): n is a, c, g, or t
  misc_feature (331)..(331): n is a, c, g, or t
  misc_feature (335)..(335): n is a, c, g, or t
  misc_feature (349)..(349): n is a, c, g, or t
  misc_feature (369)..(369): n is a, c, g, or t
  misc_feature (378)..(378): n is a, c, g, or t
  misc_feature (386)..(386): n is a, c, g, or t
  misc_feature (397)..(397): n is a, c, g, or t
  misc_feature (401)..(401): n is a, c, g, or t
  misc_feature (423)..(423): n is a, c, g, or t
  misc_feature (436)..(436): n is a, c, g, or t
  misc_feature (439)..(439): n is a, c, g, or t
  misc_feature (445)..(445): n is a, c, g, or t
  misc_feature (447)..(447): n is a, c, g, or t
  misc_feature (449)..(449): n is a, c, g, or t
  misc_feature (452)..(452): n is a, c, g, or t
  misc_feature (455)..(455): n is a, c, g, or t
  misc_feature (633)..(633): n is a, c, g, or t
  misc_feature (641)..(641): n is a, c, g, or t
  misc_feature (647)..(647): n is a, c, g, or t
  misc_feature (651)..(651): n is a, c, g, or t
  misc_feature (655)..(655): n is a, c, g, or t
  misc_feature (657)..(657): n is a, c, g, or t
  misc_feature (661)..(661): n is a, c, g, or t
  misc_feature (679)..(679): n is a, c, g, or t
  misc_feature (681)..(681): n is a, c, g, or t
  misc_feature (686)..(686): n is a, c, g, or t
  misc_feature (690)..(690): n is a, c, g, or t
  misc_feature (692)..(692): n is a, c, g, or t
  misc_feature (694)..(694): n is a, c, g, or t
  misc_feature (703)..(703): n is a, c, g, or t
  misc_feature (708)..(708): n is a, c, g, or t
  misc_feature (753)..(753): n is a, c, g, or t
  misc_feature (803)..(803): n is a, c, g, or t
ctgcaaccccaggcatgaaccaaggtttctgaactactgggcgggagccaacgtctcttctttctcccgctctggcggnggcttgtcgctgcgggctgggccccagggtgtcccccatggcggggccgcgggtggaggtcgatggcagcatcatggaagggggcggccagatcctgagagtctctacggcnttgagctgtctcctaggcctccccttgcgggtgcngaagatccgagccggncggagcangccaggnctgaggcctcaacatttatctggantggaaatgattcgagatttgtgtgatgggcaactggagggggcagaaantggntcaacagaaataanctttacaccagagaagatcnaaggtggantccacacngcagataccangacngcagggagtgtgtgcctcttgntgcagtctcatgncgngtgtgntntnttntgncttctccatcagaacttcatttgaaaggtggaactaatgctgaaatggcaccacagatcgattattacatgatggtctttcaagccagtgttgaaaaatttggtttcatatttaattgtgacattaaaacaaggggatattacccaaaagggggtggtgaagtgattgttcgaatgtncaccattnaaacantggnaccncntaantttaatcgaggtgggtgngnggatnaagnananaggaagagntttcntcgtcggtgttttgcctttaaaatagcaaagatatggcagcggcncagttagatgcatcagaaaggagatccgggatttgtatgttaacatccanctgttcaagaactaaa

SEQ ID NO: 504183 - DNA, 437 bp, Homo sapiens
gagtgaacaaatatctgatgtgtgtgtgtgggtgtagtgatgacaaatatatactcagtctatcacagcataattagtacagaaactgaaaatcatacacatttccagttagggatcctaatttttccccatcactgctatataaattgaacaggcattaggcttatttaatagtttttatacatcagcaacttcagaaaagccacactgccgaatttaagaaacagtcaattcataactcattataaatatttaaagagcattaaatatggaggcagatatggtcccaaaaataatattccagatattgtgatagatgacataatataatgtttagtcccatactttctaaaatcagggcttctcaaacttttccattgaaactgcccctcttgacaaaatatcctaataaaaaggctgagagggaacatatatcc

SEQ ID NO: 504184 - DNA, 119 bp, Homo sapiens
ggcaggtcaaaaagaacctttattactttttatgattggcgacaacgactctcttgccaaatgccatggtagcaggtgcagtctggtgtcgtccttctatccccttctgtcgtcttctc

SEQ ID NO: 504185 - DNA, 572 bp, Homo sapiens
  misc_feature (8)..(8): n is a, c, g, or t
  misc_feature (24)..(24): n is a, c, g, or t
  misc_feature (120)..(120): n is a, c, g, or t
  misc_feature (129)..(129): n is a, c, g, or t
  misc_feature (539)..(539): n is a, c, g, or t
agatgtgnggaggtgctggatgcnttgatcaggaataaaaaggaagtgtagggagtctgtctcagtacccgtgtggctttcactgcaagtcaaaagtacgatcttgcacaggtcatagcngtgttcagnttgggcaagaaataaggctaattttttataggtataccgtactttccaaattgtgggttatgaaccattaatgcatcatgaaataaatgtagtgggtcacaatcagcattctttttaaaaatgagaagtatatgccatgtagtaacttacatgtaaattttgtttatacacagacaaaatgtgggtgtgtactgggtcctgacatgagacactgttcccattgtcgcggatcagggatagttctttgtggttttagttgttgagttctgtttctttgttattcctttcgtggcagcactacattgtagcgtgctcactaagtgtcagaggtttacctcacgccagttgtgttcatttggctgcaggtaactgaagacccaacctaaggcaaagcagacttctttattttngtaagacttcattaagagcagtttcagattctc

SEQ ID NO: 504186 - DNA, 415 bp, Homo sapiens
atgtttccttcactcactcctaccctctcacagagtttatgcactggctgttactggttgcaaaagtcataataatatctacagatagtctgtgtgtgtccaagacatgctcgctcctctgagaatctcaaacagccagaagcatctcgtcccacggactgccaggcgccagtgcggcttcacggtgcctctttctcgaccattatcacttaaaagcactgtgagtagaatgagctgagccgttgctgccacaagggagacagcctggtcaagaggcgtggcttgggatgcaataaggccactgcatggcgcacaccctaccgtacacacctctttctcctcttaccaatgaccatatactatgtgatccgtctcgacaaatgctgtccgctgctgagctgaagttcgggctagt

SEQ ID NO: 504187 - DNA, 145 bp, Homo sapiens
caccgcgggaacccacgcccacccccggcctctcctactccttaactacctctctcctttacaacctggcggcacccctcactctaccttactacaacacaccttctgtgtactccacttcccacgactaggctcacgggtgtac

SEQ ID NO: 504188 - DNA, 134 bp, Homo sapiens
aaattctattgttccattttatgcagaagatattttgtggtttgaaagattatgatgataagtttagatttcttatttttaagattttttgtattttgatggtgtagatttattattgttctattatatatatg

SEQ ID NO: 504189 - DNA, 1186 bp, Homo sapiens
  misc_feature (486)..(486): n is a, c, g, or t
gctcggcacggaggccacggatgccacatgcttcgcggtcgtccctggaactcgcggtgttcatcctgatatgatccgcgctctaacatgccgctggaagttcgaccagcgaacgagatcaaagtcggtataccgtgaggtgcagccggaggtgaagtcggcgtgccaggtgtctgccctggcccccaagatctggtcgccctggctcgtgtctccaaagaaaagttggtgatgacatttgcctgaggcacacgggtgactgcaacgggcactgacggacttacggcggcaaagtgagccattcagagcagcacacggcccacgatcgacggtggatgcctatctgcctctgcccctgaatcagtcaaacgccctcaacggaactcacccaccgacgaccagcaaacgacaagcacgtaacagcagactagtttagagcccaccaagcttgcggcacctcacttctaccttgtctttggacctgangcacttggctcgaccccacgtgttgacctcggcgcacgggactagcgcgcacacgcgcatttcgctataacgccccaggcaaggaaagcttcctcgtgaggaaactcccagtattcacccactgaagcactcccttgtgcggaaccctgacccccatagggtccacgtgtgcgggacctgggtaagaatcggcctctgtcacttggtgtgcctggtgcgtaatctctttcgtattgtaaaccgaatctagttccggctcttcgcacagttcgaaggcccaggaatggggtatgactatgcattgtcgcaacacgtgtgtccgcaaagtccgccacgtgctctcacacatgggcacccagaaactggaggaacaacagacgcaagttatgtcacaatcttaaccccgggggaagtgtccactcgtgtggaacccacaagtcgttcgtggcctcggcaagcaggaccactaacagatagacagcggaccaacagcacacaaccagaaacagagaaacacgggcggccgagacagacaacaacaagcgaaaagccactctgcacgcacctaaagtgcgagtgaccagcacacaaggacagagcagcagcagtaggggaaggcggccagatagcagaagagaagggcgcgagccatcaaagagagcgttcccgcacgtagagaacaagatgggataacccacgg

SEQ ID NO: 504190 - DNA, 370 bp, Homo sapiens
gtagacttttctatacataatatcctttttcccacagtagatttgtttttctgttttgttcttccgtttttttttttaaagtctagccgggtgcagtggctcacgcctgtaatcccagactgtgggaggccgaggcgggcatatcacgaagtcaagagacggagaccatcctgcctaacacgttgaaaccccgtctctactaaaaatacaaaaaattagctggacatggtaacgggtgcctgtagtcccagctaatcaggaggctgaggcaggagaatggcatgaacccaggaggcagaggttgcagtgagccgagatcgtgccactgcactccagcctgggtgacagagcaagactccatctcaaaaaa

SEQ ID NO: 504191 - DNA, 811 bp, Homo sapiens
  misc_feature (98)..(98): n is a, c, g, or t
  misc_feature (213)..(213): n is a, c, g, or t
  misc_feature (237)..(237): n is a, c, g, or t
  misc_feature (256)..(256): n is a, c, g, or t
  misc_feature (307)..(308): n is a, c, g, or t
  misc_feature (327)..(327): n is a, c, g, or t
  misc_feature (346)..(346): n is a, c, g, or t
  misc_feature (357)..(357): n is a, c, g, or t
  misc_feature (382)..(382): n is a, c, g, or t
  misc_feature (427)..(427): n is a, c, g, or t
  misc_feature (586)..(587): n is a, c, g, or t
  misc_feature (605)..(605): n is a, c, g, or t
  misc_feature (608)..(608): n is a, c, g, or t
  misc_feature (611)..(611): n is a, c, g, or t
  misc_feature (648)..(648): n is a, c, g, or t
  misc_feature (654)..(654): n is a, c, g, or t
  misc_feature (658)..(658): n is a, c, g, or t
  misc_feature (675)..(675): n is a, c, g, or t
  misc_feature (730)..(730): n is a, c, g, or t
cgggagaagccactacggctaggtcgaggcctggtgttatagaactcgtggccaggctgacgatagcctgaaaaactccacctggagctcacggaaanctgtctggacatgatggctcgatacgtcttctccaacttcacggctgtcccgaagaggtctcctgtgggcgagttcctcctagcgggtggcaggaccaaaacctggctggttggnaacaagcttgtcagtgtgacgacnagcgtgggaaccgggaccnggtcgttactaggcctggactcgggggagctgcagtccggcccggagtcgnngctcgcagccccggggtgnatgtgtagacagaccatgnaggctgccggnctagctggtagtcccaggctgggcngccaggtgtcccgctggtgcccgggatcgggtccgttccatgtcntgggggccatggtcttcgagttggcgccctggacgtgcctggtctcccagttcctgtggctgtgctgcttctccaggaccatggactgaccaggcgcgaaatctgagaaggcctcagctggcacccgggttcctgtgcaggagacgacgaacctggtgnnctatgtgcccctgctganccnggnctgggcggagatcctggtccggaggcgcacagggaanaccagntggntgatgagcctggagaanccgtcagccctttctcctcggacatcaacaaatgcccctgcaggagctgtctaangcctcatggcggtagagcgcttcaaaggaggcaccgggacacaagccctgttaccagtcacctgtcgttgccggcaagcag

SEQ ID NO: 504192 - DNA, 438 bp, Homo sapiens
  misc_feature (62)..(62): n is a, c, g, or t
tgtacaaataatataatatgtaatttgtgtattagtgacaggtgaagctagttggatttttngggtcgagtggggctttggagaacttttttgttttacaagaggattgtaaaatgtacctattagtggtttgtaaaacacaccaattagtgttctgtagctagtaataggtttgtaaaatgacccattagtattttgtaaaacgcaccaattagcattctgtaaaatgcaccaattagcaggattttaacagtagacaatcacagggaggattgaaaaaaagggcactttgatagggcaaaaacggaacatgggaggggacaaataagggaataaaatctggccaccccagccagcagcggcaacctgttcaggtcgcctgctgctgtggaagctttgtccttttgctcttcataataaaccttgctactgttcaaa

SEQ ID NO: 504193 - DNA, 250 bp, Homo sapiens
gtatcggcggaattcgactaaaacgttgctgatcggtggtgtcgggctatccttatggagaaaatgatccgagaaattagtagataaataaaaatataggtaaaacgttatttacaggtttatagaggagtgaatacgttgtatgatacatgtaaaaagactgctagaagcgtttctcctttcagccttgacgctgcttgtgcttcttgttcgacttgcagtagatgtacactcgcccttttcttctacc

SEQ ID NO: 504194 - DNA, 418 bp, Homo sapiens
gccggtcccttataatgggccagaaatttcacttatcctatagctagcattctagtagcttggccaagttatctcgtaattctgttagttcaaatatactattccatccacgcatttctacagagtgtctatacaggttatatagcgaacaagctatctatgtaacatatctagacttattctaccagaacgtatgctactaagtacagaacagtatagtaccccccagagtctatatagtatccagaatttactactatacctagtaagtattctagagtacaaaagaataccctactagtatctatgtaagtatactactaggacatatatacacattatactatgtattataaacctataactaatattacctactatacctatacaaatatttctagatggccccaatatatac

SEQ ID NO: 504195 - DNA, 127 bp, Homo sapiens
gcacgttgtgaccacccgctcagcctcccaaagtgctgggattacaggcatgagccactatgcccagcaaaaagcaatgtagtactttaaatgaatctactggtaaggtgggtatgataaacaaaag

SEQ ID NO: 504196 - DNA, 472 bp, Homo sapiens
atgatggagtggctttctcctaccgcatcccaccactgctaaaccacatgagaaatatttctaataggacaccaggaaatctgccaaaagaaacagtttcttagggaggctgaggactgagggtcctgtcttatagatcaccccagctgccaggagagaattactgtaggatggaaggtatttgtttaccacagcccctgaagtccgcctcctctgggagagaagtggtaccagccccctggttactcatgcaactctgtggtcatataaatgtcagtgctgatttgttgaaaggtcccttcacctgggatggagagcgcagcttgtttgtctctagtgccagtacctttttcaggccaccctatcagaaacagtcttatttttgaaacagttaagagaggcctctatttttaaagactgacttgaaatctttctttttttctgtttaagtaatcatcaacaggattttttt

SEQ ID NO: 504197 - DNA, 208 bp, Homo sapiens
cctccctctatacccccctgtggctatggttctcccccacagggctggcctcacgtttttcctcaacacggcctgggggcaagcccttctccctgcccatgtccccgcctgaggtgcccagccccccacaccccgcctgccgccccctgtcccaggttctcctcccccccacccagtgaaattaagcatcccccccccccagtttcca

SEQ ID NO: 504198 - DNA, 989 bp, Homo sapiens
  misc_feature (989)..(989): n is a, c, g, or t
cacttcctgtatggagagtcagaagcttccagtgcctccaagggtccatggtaccacctactgagactctgcccactcccagggagaggaacctagcatccccatcaccttccactctggttgaggcaagagaggtggtgggaggcaacttggtggtcctgagctatctggaggtccctcgaggagagagcgaggagacaggaagctccgagggtgccccattccctgcttccagccacactgggcccctgagggtaccagtggagcatggaggccccctctgaagataattctggaagaactgccccagcagggacctcagatgcaggcccagaccagatgcatgacccactgacagcgccagacacgaggatggagatggccgatgggtccccgacatcaggatgacctgatgtccccagacccctgaccacaatggtgggacatgctatagaggaggaggaaggggtccagatgcctatgtactgcctggctatagaggaggaggaccatgtagcgacatgtaaggcacatcacgcttcatgcaaacaccggcatggagacgacctacacagggacagcactgaatacaagacacaaaaccaacacgacaggaagcaggagaggaggacaaaagaacacagaagacggatggataacgcgaacgcaatacagaaccagcgaatacaaaagaaccagaaggaaacaggacatcaaacaacaaaccaggtaaccgggaagtaacagatgaatcggaatcaaagacaagaaaaccaataagaaatgcaaacttccattatgcaggggacagaatatggaagtcacaacattggagcctatgagaagacacttgtgaaacacatagagaatagcctaggaaagataacataaccaaggttcttgtgaaaaaaaaatggagtagaacaatggagtaatggaatcataattaggaacaaaatgagataagaaagtgcaacgggaaaattagn

SEQ ID NO: 504199 - DNA, 463 bp, Homo sapiens
gtggcattcattgtcctccagcgttttggagggttctgtctactattatagactattcgcttctaagcgaaggcttctcatatcattaaaattattaatattactgctgtttgagaaatgaatgatcctacagattataggatgtttcatgtggtgtatgcatcggggtactccgagtaacgtcgtgactttcagaactctccgagaaagtgttgtgggaaggttaggtctacctggcaggtagacctaacgtctttacgtgggtacttgcgcttactttgtagccttcatcagggtttgctgaagatggcggtatataggctgagcaagaggtggtgaggttgatcggggtttatcgattacagaacaggctcctctagagggatatgaagcaccgccaggtcctttgagttttaagctgtggctcgtagtgttctggcgagcagttttgttgatttaactg

SEQ ID NO: 504200 - DNA, 1616 bp, Homo sapiens
  misc_feature (1290)..(1290): n is a, c, g, or t
gcacacatacattctagcgcgaccaagattgacctctgtgcgctagattagaatattagatatcggaaaagggtgaagagatgacaaatgttgtagaactcaagacgatccaacatagctaagggagcattaaactcccgtgataacctgttctgactagtctagtggatagtgtaactatcctacatatgcttcaggctatgagcgagaccaccgtcctattatgcccacgcacaaacagtgatgcagtgctcaccatacgtacaccagatttagaaagagatagctgcgaccaccgtcctcatagcttatgcgcttagatcaggtgggcagcaatggatatcttaggtagcgttgagcacggccaggtacacacatagcatggacacggcatgctttggagataggaatgaagcatatggtatagtgccctaagtgattgaaggacatctatatactttacgaaaccctatgtagtagtataatggccctccatggaatgcaaaagccacgtacttgatagacttgcgcgcgcttctgattagacacttatgtgatagcgttgttgtaaagggtacgcaacacacggaaggagtataagcgaaggcagtccagttattagcgtgatcaaccataaatggtgaagaactaaacacctcgtgtggttgagcaccgcaagaagggtcaccaaaaggaaaactatttgacccacccaccgtctccaataagtcttaagccgtgccgttggacacgagatgggcccacggacacaaaaccaccaaagttccagatgccgacaagcaggccagctatcccgagaaggacgggacgataaccataaactggaccaaactgtaaactcggttacaacatccagattgtcaccttccagagaaccagttgaaatagagaggcgctgcgaatacgatacgccgaacaaaggaaactctccgaaaattggggggtgatcgcccataggtacattgaagttcgagcagcccttaaattagggaaaaggaaatagcggtaacacgttgcttttcacggagtaaagttaaaagcgcatagagccaggtgggaatataagcgactataccgtgtcgcaatctacagttcactacaggggccccatgagccgcgtccagggcacttggactgggaaactatcggtggagagcccgttttggattgacacgtataaaggcgcacgttcgcgcgacaggataaattcttatccccgacatccgaagcccccgagacgagaatagcgtcgaattcaacatgtacacnctgcgtccctacttgggattgaaaccaccaaaaacaacataggggtgctaatatgcaaacaagtataaggggggaaacatctgttgacaactaccaccacgtatggaggtgggtaaacacactcgtgtgacatagttcgtgtatacccaccgagccgtagataacacgcacacaaaatatcgaacccaccaaacgacttaaacccagcgatataaataaagagagagaatgcacaagtcaccatagaggacgacgacatatgaattaatacgggtaacgtaagacaacccttacacaagcgggatcacaaggaacaagcataacaa

SEQ ID NO: 504201 - DNA, 225 bp, Homo sapiens
gctgctcctgcggtcgctctagcggtccccctcgcttacggtgtccttctttcgttttcccggtgcttctttgacccggctcttcctcctcctcttcttcctcctcctctatcatcttcatcatcatcatcttcatcctcttcgtcgtcgtcgtcctcctcgtcctcatcatcctctacttcatcttcatcctcagccccgttcttggctttccaccaggcacac

SEQ ID NO: 504202 - DNA, 569 bp, Homo sapiens
  misc_feature (158)..(158): n is a, c, g, or t
  misc_feature (336)..(336): n is a, c, g, or t
  misc_feature (348)..(348): n is a, c, g, or t
  misc_feature (360)..(360): n is a, c, g, or t
  misc_feature (385)..(385): n is a, c, g, or t
  misc_feature (387)..(387): n is a, c, g, or t
  misc_feature (410)..(410): n is a, c, g, or t
  misc_feature (445)..(445): n is a, c, g, or t
  misc_feature (475)..(476): n is a, c, g, or t
  misc_feature (513)..(513): n is a, c, g, or t
  misc_feature (522)..(522): n is a, c, g, or t
  misc_feature (546)..(546): n is a, c, g, or t
agggtgcacatgtatccctgaacctaaaatataagttatagaagaaaaaaattcactcaagtctgtactatacaactactcttgtgtttagtgacctctagctactccaaagtgacttggtagtccatacctgatttcttcatgtctacctctacggnggctacctctttttctgatattctgtcaaaagtgagacagttcatgatttcatctctctttggtgagacttgtcacttaatttttaatggatgggttccttgtaaacccagggctctgaagggctcaagaaaactgagaaatttaaagcttaatttggctttttatcattaattattngggaaccaatanatctatcccagntttttaatgctctaaaatgaaagcngnaaggtacttaattggggcaattnattttggggttaatgcctttaattggggaatagcnattcaccatatctaaaaaattcccaatttnnaaataatgtaggttaaggtggtggtttaattttcacnggatcatgnggccatactacctttcaacttccngaatatttctataccccggcccc

SEQ ID NO: 504203 - DNA, 877 bp, Homo sapiens
gttgaagggggaaggctccactgcattcttggctaaggcctgaatgctggctgcatctgtaagatctatactcgaggttttgttatccttttaaaattctttagggagagagggatggtttctcgaggggtcctgaaagtatgattcaatgtgcaacatacaggtaggtcttcagcataagctgaagatatatgcatgtaaaaacttgagcatcttttggtctgaattcccgcactttcttcttgaaacttgacttctcgttttgtccccccccagtcttacagaagttgaggccaagggagaatggtgggcacagaagagacgtggcaagactgctctgtgcgtttgcaaagccaagagtgttccccacccgaagctcccaaaattgtactaagcagccgggccagtctggtagggggggcatgggtgttctacaagccaaattctgggtttgttcttctttctttaaacatagaggtaccaccaaagggatgccctactctctcgcaggtcttgaaagcatctgtttgagggaaggtctctgggcaagcagtggttattgggatgtgcttgcttccctttttccacctgggacatggcaatcataaaataaccgtaaattccaaacctcaaaatattatgggctgagcaccaggtgaatctagcagagtttactcttctgcccctgtgtggcactataatcaggtgcgcgggggtcgaacagagccgaaaacggtatgccagttgcgtccggggaccccctggggggtcccggtagccaggggggcccccctccacaagggggggccacgagggggggggaggccagagggggggccccctgtagaaaaaggggcggacagcaaggcccccgaga

SEQ ID NO: 504204 - DNA, 568 bp, Homo sapiens
ggagaaccagaaacatatctattatatcacaggtgagaccacggcaccaggtagttaagtcagcctgttggtgtaacgtcttcggaaacatggcttagaagtgatctatatgattgagcccattgatgagtactgtgtccaacagctgataggaatgggaggggaagactttagttgtcagtcaccaagagaaggcctggaacttccatgaggcatgaagacgagaaaaatgaagcaggaagagaaataagaacaaagtttgagaacctctgcagattcatgacagacatgttgggaggaaaaacgtggaacgcggtggtggtgtcaaagcgatgggtgacatctccagtgctgtatgtgtcacaagcacatatggctggaaagcaacgatggacgagaatcatgaaagctcaagccctaagagacaactcaacaatgggtttacatggcggcaagagaaacaccgtggagataaacccgtgaccattccattatggagaccttaaggcaaccaggcagaggtgagaatgaacgacaagtctgtgaaggctctggtcaaccttgcgga

SEQ ID NO: 504205 - DNA, 172 bp, Homo sapiens
cgatgttatccccaacactttattacaaaataggctttgggctgggcgctgtggctcatccctataatcccagcagtttgtttggccaaggcgggtggatcatgaggccaggagatcgagaccacagtgaaaccccatctctactaaaaatacaaaaaaattagtcgtcatg

SEQ ID NO: 504206 - DNA, 636 bp, Homo sapiens
atctttcctgccggatcgactctatacgatccccccatgctgtcttcatgatgctatcctgtctttttagaaaagctgctaacttattcagtgtattgcagttggcatagcaggccttgactgccttggaaattttgtcacggagacatagtaaagccattctataggcggctggtttggcagactgcttgctgtacctagaattcttcagcattaatgcccaaagaaatgcattagcaattgcacgctaattgctgccatagtatcacgccagatgaatttcatattgtggcagattcactcccattgctaacccaaaggctaacacatcaggattaaaagtcagtacaaagcacttgcctttgttttgcacgcctagtgtacaacttccagcatgaggagaatttactccagcaggttgcttccaaagatctgcttacaaatgttcaacagctgttggtagtgactccacccatcttaagttctgggatgtttataatggtggttcgcatgttttctctgatgtgttccaactgtccaactttagctgttcaacttatgaaacaaaacattgcagaaacgcttcactttctcctgtgtggtgcctcccatggaagttgtcccgaaccgattgat

SEQ ID NO: 504207 - DNA, 175 bp, Homo sapiens
  misc_feature (170)..(170): n is a, c, g, or t
atcgtcaaagccggattgaaatgtggacccattacatcaactacaaggttcatttttgagaaaaaattggctcaggctttactggagcaagaaagaagacagccttcctccttgctccagtaaagcctgagcaaggaggaaggctgtcttctttctactaccatgaggcnggtgt

SEQ ID NO: 504208 - DNA, 381 bp, Homo sapiens
aactttggacaattttattagtatttttgttttttattttagagcagcaatgtagggtaagaaagaacaagaaattgaaatcaactgtctcctgagttcagactgatttcactgcttgttagctgtgtgatcaataacaagtgccttagtctttctgatccccagtcgcctgcaaagtgaaaataatgtttaaatgcattttaatggctaagtgacatgatacacgcaaattatttaagagaatgactgacatgagatttggccgggtgtggtggctcatgcctgtaatcccagcactttcggaggccgaggcgggcggatcacaagatcagacgattgagatcatcctggctaacatggtgaaaccccgtctctactaaa

SEQ ID NO: 504209 - DNA, 891 bp, Homo sapiens
  misc_feature (356)..(356): n is a, c, g, or t
  misc_feature (372)..(372): n is a, c, g, or t
  misc_feature (416)..(416): n is a, c, g, or t
  misc_feature (434)..(435): n is a, c, g, or t
  misc_feature (438)..(438): n is a, c, g, or t
  misc_feature (446)..(446): n is a, c, g, or t
  misc_feature (449)..(449): n is a, c, g, or t
  misc_feature (451)..(451): n is a, c, g, or t
  misc_feature (476)..(476): n is a, c, g, or t
  misc_feature (480)..(480): n is a, c, g, or t
  misc_feature (493)..(493): n is a, c, g, or t
  misc_feature (504)..(504): n is a, c, g, or t
cgcgccgtgggggagtcgtgcgcaggcgcggacagcgctgcttccgcggcggttggggtggtggggccccgggcggcgttgaccatgacccagcagggcgcggcgctgcagaactacaacaacgagctggtcaagtgcatagaggagctgtgccagaagcgggaggagctgtgccggcagatccaggaggaggaggacgagaagcagcggctgcagaatgaggtgaggcagctgacagagaagctggcccgcgtcaacgagaacctggcacgcaagattgcctctcgcaacgagttcgaccggaccatcgcggagacggaggccgcctacctcaaaaacctaaaaaactcccaaantttcctcaacattatnaaaaaaaaaactaaaaacctaaccaaactacaaccccaaaccanaaaaataaccactacaannacntttttttnttntncgtccaattccttcctcctttttcncctnttttcaacccctncaaatttttantcaaaacatctttgttcttcacggcagcagctaccttccctcactgtctcaggtgccgagaggggcaggtgccagcctccactggcatcagtgacaagcccagggcacagcccacccgggggtcctcgcttcatgctcacacaggctatggggatggtgggctccaggtcagctctgcaaggggcttgtctctgtggcacccacactcctgccctgccagggaggctctggttgtctgagcaccatgggggccccctcaccttgtccctcctcagccagcagaggcccagggcaagggacaggaggacaggggttctccttcaccacagaacccaaacctcaggtctcacccctgtggcctgtgattatgaataaagattatctttg

SEQ ID NO: 504210 - DNA, 731 bp, Homo sapiens
ggtggaggccatcagtggccttcatagcacaggagtttcaatggtgaaccatgcctctttgggtagagggctgcgcacaaggctgtgtgcaggaatcatggttaggagtgagtaagctggaccaggttggtgtccacgatcaacaggctgttgcgcctgtgcatggctgatcgcaagagaatacagtggtggtgtcgatggcactcttcattcagtgactggtagagatgcaatgggcacgttagagcgcgctggtagcgtctacggcagagatggtcgtccgtgggagcaagatagaccacttcgaccgtattatcatctaggagccgcctactggcttttctgttgcgttatcatgtgctaggaaaccctttgtctttgaaggcttccttgaggtaacgtgcggccgtcttgatgtatctattctatatgtattgtattggtcaagtaagaggcgatcagttctagagattccgtcattctgtattttaatggcccgtcagcaccaggatccaggacattccatgctaggttttagcagtgagagatagcgctctcaagaaacatgtcgaaagcgactacttataggaccagaatccttgtctaagctagtcctagccttacgacaaacatctttaatagggttagcagctcttgttgctttatatattgatacctgtaccaagggactcgtataatgagtgtacaggcgcactctagaatgacaaggc

SEQ ID NO: 504211 - DNA, 992 bp, Homo sapiens
cgcgccgtgggggagtcgtgcgcaggcgcggacagcgctgcttccgcggcggttggggtggtggggccccgggcggcgttgaccatgacccagcagggcgcggcgctgcagaactacaacaacgagctggtcaagtgtgagcggcgcagccgggacggggaggtcgggagggccgcagggccgggttcccggctcgcagcggggtgcccctggacccgcctcgctgcgggcatcgcgcggctgagcagagccctccgtgccggaggccgggtgtccgtggcccgagccctcgctggctcgcaggccccgcgccgggcgctcgggggtggtgcctgactctggcttcctcgggtggaaggaggcccgccctccgccgccgcgctcctgccctgggcccacagcgccgcccctcccggcccccaggcatagaggagctgtgccagaagcgggaggagctgtgccggcagatccaggaggaggaggacgagaagcagcggctgcagaatgaggtgaggcagctgacagagaagctggcccgcgtcaacgagaacctggcacgcaagattgcctctcgcaacgagttcgaccggaccatcgcggagacggaggccgcctacctcaagatcctggagagctcccagactttgctcagcgttctcaagagggaagctgggaacctgaccaaggctacagccccagaccagaaaagtagcggcggcagggacagctgaccagaccacgggcagggcctgcctccgtgtgcccctcagctcagccccagcaagtgtgtgctcagagcatctttgttcttcacggcagcagctaccttccctcactgttctgagcaccatgggggccccctcaccttgtccctcctcagccagcagaggcccagggcaagggacaggaggacaggggttctccttcaccacagaacccaaacctcaggtctcacccctgtggcctgtgattatgaataaagattatctttg

SEQ ID NO: 504212 - DNA, 829 bp, Homo sapiens
cgcgccgtgggggagtcgtgcgcaggcgcggacagcgctgcttccgcggcggttggggtggtggggccccgggcggcgttgaccatgacccagcagggcgcggcgctgcagaactacaacaacgagctggtcaagtgcatagaggagctgtgccagaagcgggaggagctgtgccggcagatccaggaggaggaggacgagaagcagcggctgcagaatgagatcctggagagctcccagactttgctcagcgttctcaagagggaagctgggaacctgaccaaggctacagccccagaccagaaaagtagcggcggcagggacagctgaccagaccacgggcagggcctgcctccgtgtgcccctcagctcagccccagcaagtgtgtgctcagagcatctttgttcttcacggcagcagctaccttccctcactgtctcaggtgccgagaggggcaggtgccagcctccactggcatcagtgacaagcccagggcacagcccacccgggggtcctcgcttcatgctcacacaggctatggggatggtgggctccaggtcagctctgcaaggggcttgtctctgtggcacccacactcctgccctgccagggaggctctggttgtctgagcaccatgggggccccctcaccttgtccctcctcagccagcagaggcccagggcaagggacaggaggacaggggttctccttcaccacagaacccaaacctcaggtctcacccctgtggcctgtgattatgaataaagattatctttgtaaaacaacaaagacaaataaaaaaaaaaggggggggcctcaaagattcca

SEQ ID NO: 504213 - DNA, 370 bp, Homo sapiens
  misc_feature (39)..(40): n is a, c, g, or t
acttagaggatccgccacggtagattggctgggcgatgnncgttactcatcatgatcgccaggatcaccacttccaccaataccgcggcgagggtcaggatcatggtgccgtaggggtcgccgactttttccgccaactgttcggcgtgatgggccacgcgcatcgacgccatcacgataaacgcgatcagcgcaaagccggccagcaacgcaaccagttggccgctgtggagcatccagtgctccagcgggtaggcggcgatggcggcaatcagcgccagcagcatgaatttttcttgcttgagggatgtgagcattccgggccttttcgtacagcgaatcagtcattgatggaaatctaccggtgggg

SEQ ID NO: 504214 - DNA, 412 bp, Homo sapiens
cgcgccgtgggggagtcgtgcgcaggcgcggacagcgctgcttccgcggcggttggggtggtggggccccgggcggcgttgaccatgacccagcagggcgcggcgctgcagaactacaacaacgagctggtcaagtgcatagaggagctgtgccagaagcgggaggagctgtgccggcagatccaggtccaggtcagctctgcaaggggcttgtctctgtggcacccacactcctgccctgccagggaggctctggttgtctgagcaccatgggggccccctcaccttgtccctcctcagccagcagaggcccagggcaagggacaggaggacaggggttctccttcaccacagaacccaaacctcaggtctcacccctgtggcctgtgattatgaataaagattatctttg

SEQ ID NO: 504215 - DNA, 230 bp, Homo sapiens
tgtccttccccagtgacgggtcatggcatcttggtcaaaaatcagttgattatatttgtgagagtttattttggggttcttttttcttcttcttttctttttttcaggttggatgggtagtgctgacatcataacaaggttcaagaatgactcatctcacatgtgtgtgaaacacccaggtatcatactgatgaactacagaagatctgggctctctatggttttatatg

SEQ ID NO: 504216 - DNA, 288 bp, Homo sapiens
ctgagaagccaggctggctgctggtgaatgtgaacgctccagctaaggctcggaggctgctgcggtcccagacccttcaccggcccttgggacccaaggctaggcgtaacctgttggtgctgacccccaaaacgcaggcttaagtccactccccgccctaagatctctgtgtgtgtactgggggaccagcatcactgtgacgaggctaaggccgcggatatcccccacatggacatcgaggcgctgaaaaaacttaacaagaataaaaaactgtgtcaaaagcttgcc

SEQ ID NO: 504217 - DNA, 150 bp, Homo sapiens
cttttctgcgtttgtgccatgcatcatgtttgcggtttcgcatgcatgtggtctttggcagtagcaacactgtgcaggccaaggtcattcctagctcaatgctcaggcttgcccaatggtgcagggcaggttgcaagtgcagcagcgtca

SEQ ID NO: 504218 - DNA, 256 bp, Homo sapiens
acaggaactgatagcaagtgcattaaaaacatgaatttatgtgcacacatggtctcatgcttccggctcagagcaggatgatatcctctcagcgtatttccaaacagcttttttgctgagcagaagactcctcctggctacagagggggttatagttgtctctgcttccttatatgtagtctcttcccagtcttaagagatcctccttgatatgacgcttgtccctccctttcccatggtgtatgctcgcgctttg

SEQ ID NO: 504219 - DNA, 659 bp, Homo sapiens
  misc_feature (525)..(525): n is a, c, g, or t
ttcgagtcaggaggatggccaccgacgcatcctcctcttctctggagaagagctacgagctgcccgatggcgcaggtcactcaccattgggcaagtgagcggtatccggctgtccgccaggcgactgatatccagacctctacctatccgtgggctatggtaagtctctgcgagacatccagcgagcaccatccgttcaagcgtccactctatgagagtgtagacgtggagcagtccgcaacagacctgtacgccaacgacggtgctgtcgggcggaaccaccatgtatccggggcattgctgacaggatgcagaaggagatcaccgccctggcgcccagcaaccatgaagatcaatgatcatcgcagcccccagagacgcaagtactcggtgtggctcggatggactccatcctggacctcactgtccaccttccagcagatgtggattagcaagcaggagtacgacgagtcgggcccctccatcgtaccaccgctaaatgctatctaagacggactcagcagnatgcgtaggcatttgctgacatgggtacaagtggacgaatagacaatttgccccgtggcaaagtgcacacacctcatgctagcctcacgaaaactggactaagccttcgaaaagagattgtccttgaagcttct

SEQ ID NO: 504220 - DNA, 161 bp, Homo sapiens
tccataatgtgtgcccaccaccacacgggctaacttctgcattcttagtacagacgaggcttcaccatgttcgccaggctggtcttttttcttctcagataaaatgttttaatttcagagattggtctctattttatttgactgggacacacattatggag

SEQ ID NO: 504221 - DNA, 125 bp, Homo sapiens
tatattagcactccttttcttcacatcctcaccacatctgttacttttgactttctaaaaatagcccttctgactgtgtataagattggtatctcctagcatttttccttatctctgcatgatat

SEQ ID NO: 504222 - DNA, 1773 bp, Homo sapiens
cagtttgggaggctgaggctggtggatcacctgaggttgggcagtttgcagcaccagcctggctcaaccatggtgcaaaccatcatcgctcactcacacacacatcccagcacacattcagcctggcatgacagcaatgcagcacccaccatctcgtcaacacaacacacacacacacaacacaacaacacaacaacacacacacacacaacaagcaacaaacatagaaaacaaaaggtgcagaaggagacaagacagagagagagagagggagacacccgcgcacgctttacagacagaacacacaaaacacacaacaaaaacaacaccaacaaccagacaccacaaaacacacacacaaacaaaaacgagcaccactagcaacacacaacagactagacacccgcaagagcggagagcgggagagagacaagagagcaaaaccaaagagagagggagcgacagaaacaaaccacacaccccagacacacgaaagcagataagatagaaaaagaagaggaacggggaaagaagaaaaacgagaagcgataaaaatatgacaacaaccaacaagaagacccgggaagacgaccgaagaaggacacacaaaacaaacacaaaagcgagagggcagcaggcgcgcgccacaacggcgcagacgagactgcgagagagagtcgaacacagacagggagagtgcacgcagcacagagacaacgcaaaaggagcgaaagctacgagactacacaacaagagcgcagggagctcgcgcaacgaccaacagagcactcacagagcacaagaccgaagcgaagaagcacagaagcagacaagagagcaggaggagaagagaaacacaaataaaacgaaggaccacagaccagacgacgagcaggacttacagcccactcagtgagcagagaacaagcagacagaagacaacgacacgcagcacaagaaccaagcgcgacaagcaggaggaaggctcacgagagagaccacgtatcgacaggcgcacgacatcacactgcaaggcgaaagaaagaggcaaagccagacagcaagaaacaacacagcaccacgcataaagaaccgcgagaccagagaacaggaatcacaacataccggtaaagcaaacacagacgcacaggacaagaagcacagacggaaacaagaaaggaaagacaacagcaaataacgaacaccgagaacaaagaagacagaagcatcaacgagaagagcggagacagcaaaggccggagagaagccgaagagacacaagaggagccagcgagagatacaacagacagagacgaacgagagggaaagaacagcagatctgatgcaggcgagagagggacggaggcggcagggcgcgcgcgcgagcggagaagcgcaccaagggcagagaaagagacacaagaaaaaggaagcgggaaagagggcagggaaaacgaggcaacacagcggcagcgagagcacgaccagcaggacgcaggcgcagacaccggacacaacacgaacagcaagacggcggcacaggaacggagacccgaagggagaaaacaaggaacgagtcacgggcgcgtacgcgacaaggacgagatagctagagagcaggccgaacacgaagagaggcgacagacaaaggaggagggacacacagagacgaagcagactggcagcagtggcagaaagtagcaagcggacgagagcaaccgacacgaaccagcggaggagcgaagagagagcagggcgacagagcgcaaacgg

SEQ ID NO: 504223 - DNA, 475 bp, Homo sapiens
acatgcattctaaaaagcagcacactaaacagtatctacaaccaaggactgggtctacctcactcccctgccacctccatccaagcaagtgctggcatccatgcctgggagacctgaagacagatcacatcacaggactctttgcagacattccctagcaccagcgcagagcctggtagtcctgctgggtggctagacccagaagagaaataagattcactgcagtccagctcttaggaagccccatcctcaagaaaagggggagagcaccacatcaagggatcaccccatgggacaaggaaatctgcacattaagacttgagttccacacctttccacttaaacagactaccaaaatgagaaggaaccagaaaagtaattctgggaatatgacacaacaggattctacactaccaccaaaagatcacaccagctccctaacaatggatctgtacctagaagaactctctgagat

SEQ ID NO: 504224 - DNA, 447 bp, Homo sapiens
  misc_feature (7)..(7): n is a, c, g, or t
  misc_feature (18)..(18): n is a, c, g, or t
  misc_feature (59)..(59): n is a, c, g, or t
ttttggnaataacccccnggtttaaaacccaccccttcatggaatccaagtccccatcnaaatagactgtaactattccaagggagaaaactagtatgtttccccccttgaagaacatggaattaacagtgttcctcaatccccaaatgtgtcatattagttatagaagaaattatggggtgggtgcggtggctcgtgcctctaatcccagcacttcaggaggccaaggtgggcaatcacctgaggtcaggagttcaagaccagcctggccgacatggtgaaactccgtctctactaaaaacacaaaaattatccaggcgtggtggtgggcacctgtaatcccagctacttgggaggctgaggcaagagaactgcttgaacctgggaggtagaggctgcagtgagccgagtttgcaccactgctttccagcctgggcgacagagcta

SEQ ID NO: 504225 - DNA, 258 bp, Homo sapiens
cattttgtgaagctgccacactcatccattctatcgctgatggcatttgggtgttttcagtttggcactatttttagtttttggctattatgaatcatgctactatgaacaatctttgcttttttaatgactatggttcaaattccttaggttatctactatatacaatagggaaggccagccatggtggttcacacatgtcatctctgcactttggaaggctgaggcacatggatcacttgagctcaggagttcaca

SEQ ID NO: 504226 - DNA, 660 bp, Homo sapiens
ggggaaaaaaaaaaaaaaaggatataaaaaaaaaaatttaaaaaaaaaaaccaaaaggcaaaaaaaaaaaaaaaaaaaaaaaaaaaaaaatataaaaaaaaaaataaaaaaaaaaaaaaaaaaaaaaaaaataaaaaaacaaattaaataatttgaattaaataataaaggctcaaaaataaaaaaaatgaatgattaatatataagataatataacataatttatatggactttaataacatgtcatttttacctgtatcacttgatttttttggagttgcattttgtttgacatttcacatatttgttcaatgggagtggcattttaaaattggactcatctttatgtcactctgtgtcgggaaaaaccttgggtgtatccatttaatttgttatttgtacagcctgatttttagaaggtctttacgattaataggtgttcattggagtatgttctagttcacattgtttttgatacaatgtctaatgtcattttaagtgtgcttctacttaagaaatttatagactgttttcatttcattgtcttttttataagcattctgctaaatgggaatttgttttttgattttccgaggtcacattttgtttacctttgggacttcatgtttttctttatggattttttttttccagttgtt

SEQ ID NO: 504227 - DNA, 394 bp, Homo sapiens
tctgtagctatgtcatgccccctgagtcccctgacagcgagggtgctgctctcctaactccaggctcccccatcatcttgaccataggttcgggtaggtcagttccccctgctagaccaggagctctcttgtgtcattggccggatcttgttcatcttggcgtcctgacaagctcagactctctgaagcccagctcctggggccaatgcgggatcagcactgggcatcttctctccagctgtcttcctgccggcccccgcaacttctgctctgctagaatcctgtgcggtgactcagcctctgggcgatgttccttcttccagttccccaatttggggaaatgacttcgacccacagcaagcatctctagcttacccaggaggatctgtcttca

SEQ ID NO: 504228 - DNA, 270 bp, Homo sapiens
  misc_feature (33)..(33): n is a, c, g, or t
  misc_feature (49)..(49): n is a, c, g, or t
  misc_feature (86)..(86): n is a, c, g, or t
  misc_feature (140)..(140): n is a, c, g, or t
tcacacgcatgggacactcattcaaatgcgtgnctcaatgtatctaatnatactgaaacaactactaactcactctcactactganctgctattatcatggggtcttttagccatataagagttattatatgcagacatntaaacagaaaaaaattggcttcagtagactaagaagctggaccttaaaactactttctttctcgtgggagctgagtattccactcagaaatagatgtataactccgatattctgcccagttgcgggtgaa

SEQ ID NO: 504229 - DNA, 623 bp, Homo sapiens
  misc_feature (118)..(118): n is a, c, g, or t
  misc_feature (180)..(180): n is a, c, g, or t
  misc_feature (402)..(402): n is a, c, g, or t
  misc_feature (501)..(501): n is a, c, g, or t
  misc_feature (571)..(571): n is a, c, g, or t
  misc_feature (618)..(618): n is a, c, g, or t
ggacgcccaaggaccacctgaacatgggggatcctaacggggaacctcagttgaacaggaggtatttccctcaataactcagaaaacctcccaagccccaagagtttgagtggatttnagcgaaggccctaccccgttcccttgagccaaatgtttcaacaccaagtgaagtatattccnggggatccccccacaagttggagatggttcagcgccaaggcgattcctgtccctccgggaaagtgtagaatacccactaagctatctctatattccttccaagtaaccaagctgttgacgtttcttgactacttgcagtagcctgtccccaacttttccatccagtgcgtaagcctaaagaactccttaactctgccgtgacctgaggaagaccatgctacnctggtgttattttgtatgtaccctgtgcttgagtctatagcagtaaaccccatacgcaggtgggagggaggaacaccggtgcctcggtcactctggggncagtttagatgctgtgaaattgaacctgtactaagtgtacttgtatgaactgattgtattgtaatagaanttgttgaatgtagtaattaggaatttatgaatatagtgctgtaatgnctggc

SEQ ID NO: 504230 - DNA, 971 bp, Homo sapiens
gatgtcgatcagcccagtctcctcgcgaagcagacatttatgacgatcgcaaggtaccaacgatgtggcacacctggtaaactctgaataaagaactgccactagtcttgcaagttggggatgtccctatagtttgcttcgagagtagtgcattccggcagacagctggacgcctcacgggcacccgcacaggcgagctggcccgcgaacagccccagtcagagaactgcagcatgcgcgatcgtcgtcggtgacagagatccgagagatagatatgcaactatagtaggcttcccagacgtagaacagttgaatttattgtcgaaaagtttcttgtgtgtcttagagaatggcgcggtatactttatgacatatgtgggtggcgttgcataggagctaacaatatgattctgtggagtttggaatagtccttcaaccacattggagtaaactttttcacgtagtgcacacgatggcgcccagctcagatggcctaccggagtagcgcgacaacacaacacaagacacacaaagcataacgcaaagcagcggcgaacactcaccatattcaacgactggcagacattttccctctagatagctctatcggacggaattctcacaagggtaatgctgccacatggcgcagggctacaagcccagccattgtcctgcttcgatcctagcgctcgcgaacagttcgggttgcagtatagttccgcacgaaaagacctacttttaacccccctctttgcggggagttaccattacctagcaagctaggtaagcgcacaacagttggggagactccttggctttcgggacaccttttgttgtcccatggcacctctatcctacttcccggaacgccgggtgcccacatcccgatcataaggccaatccctattggtgtcaggtgattgccccactattccccatcgcaatccccgtggagtgacacgcaagacggc

SEQ ID NO: 504231 - DNA, 512 bp, Homo sapiens
  misc_feature (377)..(377): n is a, c, g, or t
  misc_feature (472)..(472): n is a, c, g, or t
ttttgtgtatgtgtgcatgtgtgttaagttctgtgcaatcttaccacttacataggtttgtgtttccaccacagtcaagatactgaacattcccatcatcacaaggctccctcttgttgctctttaatagctacacccacttccctcctgcccgcaccccctccattatcctggcaaccacaaaacagttctccatttctgtgactttttcatttcaacattgttatataaatagaattatacaacatgtcacctttgggaattgtcttttttcactcagcataattccctggagattcatccaggtcgtgtgtatcagtagttcactccttttcattgccaagtagtaagtccacagtatggatgtaccacagtgnggtttaaccattcacctggttaaaggacatctgggatgggtttccagtttaaggctattaataaagctggcaataaacgtgtgtgcaaggttttnggtgtgaacacagtcttcatttctctgagataattggccc

SEQ ID NO: 504232 - DNA, 147 bp, Homo sapiens
taaggcttggaatgggtgctcattctattattgcactagaaacagcatagaaagcaagagaagtgggaatttattctaaaatagaatggaggtgtcatctacagcagcactcctcactcctctgttgccatttttagcaagtactcc

SEQ ID NO: 504233 - DNA, 572 bp, Homo sapiens
taatcctagcgctctgggaggccagggcgggaggatcccttgagcccaggagtttgagatccagcctgggcaatatagtgagacctcatctttacaaataactgagctaagctgggcacagtggcactcagctgtggtcccagctactcgggaggctgaggtgggaagatcacttgagcccaggagacagaggctgcagtgagccaagattacaccaccgtactccagcctggatgactagagtggcactcagctgtggtcccagctactcgggaggctgaggtgggaagatcacttgagcccaggagactagaggctgcagtgagccaagattacaccaccgtactccagcctggatgactagagtgagattctgcctcaatacaaagttttaaaaaagtaaatacacgacgggcactcctggcttacacggtgaaaatccgtttttactaaaaatacacagaattgtctgggacgtgcttgcgggcacttatagtcctagctactcgtgacgggtgaggccgggagaatagcatgtaacccggtatacccagctgctaagatgcttaaga

SEQ ID NO: 504234 - DNA, 326 bp, Homo sapiens
ctgagtttgggggccgggccaaccggcagcccccaaggttgccccgctacccaaggaggcccgccctttttccctcaaccccgggccaggccgccctggccgcccgcctgtcactgcaaccgcccctgccctgggccggggtggggtcccctgcctccccagccaaccgctgacctttcgggtttcccttgggcaaagggggccctttgggggggctgcttgttttttttggttttggggggggggagggatgggggtcctggaccccccccccccctagtttttttttcccgcccaggggaataaagttttggttcccttttcca

SEQ ID NO: 504235 - DNA, 872 bp, Homo sapiens
ggagagagagagagaactagtctcgagttatgatgtttttgaatttttaatctggggaaaccggctccattctggggtctgagttaaggagctgggggctgtagtgggggagctaggagtcccatgggaaggggcctgcagcgacgggctgtggatgcgcacaggctgggcccatggtggcccgtgcagcagtggcgccaaataagccaaatgtcagcggccgagagcccgggcactacaaccaggtcagggtcaaaagcaggggtcgaaggtgctcaaatgcggcgcggtagaaggctggggggatgccacaaggtggcggaagcgcagggtgaggctcgggcagtgagcccgaaggcgctgcagacacatgcccagaaagacgtcgcacgagggggaagagctcgacctgggcacaggcgccagccagggggtcgcaggcgttgggccccggaaagcaacaaagccacggacgcccgcgttaggccggatacggggggaggccgaacagggcctcggggatgaacggactggcaaagcccgagtagcggatgacgccgcgcatgcacaatcaggtcaccagcaacgcgggtcttgcacgccggggcccggcggcgccgaggacactccaggggaggattccccacggttaaacaaaaacaccctacgggagattcgccctttcaaaaaacgacggcgacacgtccggggcaaaaaacgtgaggcccgggtagaacaggggaccaacgggagggcacagggcaaacaacggtggcgccgacgcgccaaagcagaagcccgataagcaaggctccggccgaaaaggggcgcaggggataggcgcccccaataccgccggccagctggccgga

SEQ ID NO: 504236 - DNA, 221 bp, Homo sapiens
aactctcaaggattcatcgacggctgagaaataagggattagtacaaacgagagaaatttaaagcttggtgtcccacggggagacacgccatgtttgcaggttccgtgatgccccgagctgcaaaacagccagttttattattggatttcaaaaggggaggggagtacgaatagggtgtgggtcaccagagatcacatgcttcccggtcgaacggggtacc

SEQ ID NO: 504237 - DNA, 433 bp, Homo sapiens
cccgttttggggggttttaaaaaacttgggcaaaaaacctggttcccttaaacatagaggatttatgggcctttccagggtttttttttcccttttaaaaaagcccgccccatccaaaggattccaggggtccccccttggttggggaaaaatcacgcccccaactttttttttttttaagggggggggaaatttttttttccttaaagcccccctattaaggtcaaagtttttaggggggttgccgccccaaaaaaaaaatgttttaagggggggaaacctggttttagggcaagggccccctccaccggggtttcccttcgggggggttttttttggataataaaaaccctttttttacctggtgccggttgaaggaaaaaattttccaaaagggtggccccccaaaatcctttaaatgtttgccggggta

SEQ ID NO: 504238 - DNA, 356 bp, Homo sapiens
cgactctcgccgccgcgcgatagaggcgcgccaggttcttctgtcctgagagccggaggtttctacggccccgaggccatcgaggcgcgatacgatgtccggatcgacgctcgtagccgtgagggtggcgttctctggatgccaactactacggttcgctgactcaggcggtcaccgtgagcctgggtctggacgccgatgccatgaggtgttcgtacccttcagcgcggtgctgcccatggttggctgcgccaatcgacctcgtgttcgatggctgggacatctcgtcgctgaacctggaccgagggtgatgcggcgctgcgaaggtgcttggactgggggctgcaggagcaact

SEQ ID NO: 504239 - DNA, 195 bp, Homo sapiens
tctcacacgtgactcagttttgtaaatccttaatcatgtgatgtagctcactaagtcctcatgccttgtctatagggtctcatataccgtggggttctttaacaagtccttaacccctactttactagacaccatattatagattccattacattcccgatcatatctccgtagagagtatcttccggggggtac

SEQ ID NO: 504240 - DNA, 758 bp, Homo sapiens
tgtattcagtactgcacccatcactcaactccattgaattacatccaacacctgaaggatgaatgccgaacttatggtacaccctgtgtatctagcctcacaccgttaacaaagagtatgtggcaagagacatataccacccgatagtgcttcacaaaatgcacttctattggagccagcgtttattgtagtaaattattcttaataagactcagtcactgtttataagtgttgtggtatgcattctttatagtgaatgtgttaatacatcacaatcttatttattttatgcaaaatcgagtatatttactgtatttaagttataagaaaattaacttagtttgtaaagatttatttgcaaaatatactttactttttccatttggcactatggtttgttgtctacctagtctgcatctatatatgtcagcttatcctaaggctgtcgcacgtacttaatttatttaagtgttcattttaagtaagcgtgcgtcacgtgtgtataggaatttgtatttggaggtgcttgatctatctacaaagaaaaattacttaggaattactttattataaaatgctcctagaagtcgttacttgtgtttattctgttgaaaaaaagcaaatgttagacttgtgtgcagtggacagtattaaggtacatcattattgtaggtttgaaagttgtacatgatacgacatttggttctactgtatgttggtatggatgatctattccccatccaggggaagcgtgatta

SEQ ID NO: 504241 - DNA, 404 bp, Homo sapiens
gccaccctgtgtcttctggtgagtctggcggaactctcaagggtttcgacctagggaggtcagagccaggctgggcatagcagcgacggctcaggtttcgggtgttcagcttgtcacaaggccctttgtccagaaaggccctggtgcttcagagacaataggaggcattctgcatgctgctattgctactgtcattattattagtattagtagtagtagtagtattctctgtgtcctttggtgcaagaagaagacaacatcagctgcggagtccaggtgagaaaacggggcagtggctggagatggaaggactcctctctgggcagaagggtcccctcatagctcctgcacaggatagacatgttggtaacaaggtcctggaacagggggatggacattggggg

SEQ ID NO: 504242 - DNA, 125 bp, Homo sapiens
cagcacagatgacgtgaatgatgcaataagacgccttagatacactagaaaacagtgctcagcgcgacatttaccttctataatatattattaacaccacttatcgactcataccagtaccctta

SEQ ID NO: 504243 - DNA, 167 bp, Homo sapiens
  misc_feature (100)..(100): n is a, c, g, or t
ggtttaaagcaagcgtttgcaggtaattggaaaaagtggttattggttgtgagtgtgtgtgttctttatcgaatgattaagtggcgttacaagggatgtnggtttgaccttccccgttccttgttactaatggccggttgaacaaaatttaatggaatttgtttttg

SEQ ID NO: 504244 - DNA, 267 bp, Homo sapiens
ggatctgagtctgtccatgtctgagggggtaggatgtggtactggtgtgaagatctggctctctccatgtctcacgaagtaggatctggtacaggtattgggatctgggtctgtccatgtctaaggagttatgaatctggtacagatataaggatctgggtgtgttcgtgtctgaggaggtaggatttggtgcatgtattaggatctgggtctgtccatgtctgaggagatcggatctggcatggatatcaggatctaggtctttta

SEQ ID NO: 504245 - DNA, 282 bp, Homo sapiens
ccccctgagatggagtttctccatcacccagtctggagtgcaatgtgccatcccggcttactgcaacctccccctcaggttcaagtgattctcccgcctcagcctcccaagtagctgggattacaggcacctgccaccacgcccagctgatttttgtattttcatagagacagggtttcaccgtgttggccgggctggtcttgaacttctgacctcaggtgatctgcccacctcggcctcccagaatgctgggattacaggcatggccatgcccggccaagt

SEQ ID NO: 504246 - DNA, 178 bp, Homo sapiens
aacgaagtacagtggcctcagtgatggctacggttcaccaccgacctgtacgggagagacctacagcgactgtctctccggaatgtatgaccacagatacggcgacagtaagttcacagtgcagagcaccacaggccacctgtgtccacattaaggggcctgccgtacaaatgcgacc

SEQ ID NO: 504247 - DNA, 356 bp, Homo sapiens
  misc_feature (34)..(34): n is a, c, g, or t
  misc_feature (141)..(141): n is a, c, g, or t
ccatgaactaccctgggactttcatctttcacanacaaatgacttgttttgatcctactcaaaaaatgatttataatcagctataggattttgacaagtgttctcagtgcaagattccattaactctggagattatgacanttgaaaaaaatacagtactcatgaagaactgaaatgttcatgaatatcaagcagaacaagagaacagaatggattgaactaatagaaaacaagtattatttttaacctttttgcttaaaactttggtgatccttgctttgtttttctgagtcaaggatacttattttgaactatttaaagcctttaataattgagtaaactatatgcctgtgaac

SEQ ID NO: 504248 - DNA, 258 bp, Homo sapiens
tttttccccccccgggggggggggttttggggaacccccattttttttccaaaggggggcacgggggggggggggggaaaccccccccccccccttgggttcccttttttgggggaattgggggggggggggggggaggggttttttttttttttccccccccccttttttttttttttttccctttttttcccccggggttgttttgggggggggggggggggccccggaaaaaaaccccccctttttcccccccca

SEQ ID NO: 504249 - DNA, 955 bp, Homo sapiens
ccaccctctcccaacaaaaataactatgctgttgacagtgctattcaccttacaatagaaatgatcaggtctgctatctcttcatccccaggatgcccactacatattttggaatcatcactctgattgtaagctgaatgttaccatcactagctgctttgtctatgaacccaatattgtagcctggtgtctttacatcagtacttgtgcactgcacgacagctagtattctgtgtctatggactacaacagaagacacaccttgtactgatagtgccgattctatcttttttaaaacataaaaaaatagctcaagttgcttgccagactgggcggcagccaatttggaggggctgacgaagcaagatgatagctgttccgcataaacaggtacactcatcgtaatctgacctgtgcgtcatcaggtatgatatccctaagcatggtcctgtccatcacgtgttttagccacagcttaagtatacatctcagttcctggtgtgccccagacagggcctcgtaacccctgggcaagaccacagacgccctggttcgtacactttgttcgttccactcctgcctgtgggctgtcactgcacttggatcattatgctataaatgaatcacagaatccttgtcacacgttcggagaatcctttagtttccgttcaatgactgggcaagcctccttataactggagcgagaacattgttcctcacaactgtggtcttgtgcgacacaaacgcggggtttccctgcaacgcgacaatgcccacaataccgtaccattgaggacatggcagattatgccaataacacacgtgtgtgttgaacatcaaaacaccagcacaacgatggggtgagtgaatctgccataataaacaggcgcgcccaaaaacggtgtgtctgatgggaacctgtgagcctctcctcccctcctctctcgccttcaca

SEQ ID NO: 504250 - DNA, 291 bp, Homo sapiens
cccatctcgtttgtagcagctactcagagaggctgattgtatgagaattgcttgaacccaggagacagaggctgcattgagccaagatcacaccactgcactccagcctggtgcagcagagcaagactccatctcaaaaaaaaaaaaaaaaaaaaaaaaaaaaggtttattctttcagttaatggaggtggaatgaataaagcttgttggatgtaaaggtggttacgggagggagtgcctttgaaacactttgtattccagaactctccttgaagtttccagtaccattat

SEQ ID NO: 504251 - DNA, 145 bp, Homo sapiens
  misc_feature (94)..(94): n is a, c, g, or t
  misc_feature (142)..(142): n is a, c, g, or t
ttaagaggcctgtttggctcatcaggaacctctggttcactattctgaatattttgtcctttgccttcaaaaaaaaaaaaaaaaaaaaaagagngatctactacatcagttttaagagttctgtggagtgctcataccagtnctt

SEQ ID NO: 504252 - DNA, 124 bp, Homo sapiens
gggttggttttggtttttgtttttgttttttgagatggagtcttgctctctgtcccctaggctgcagtgcagtggcgcgattgcagtgaaccaagatcatgtcactgattgcattccagcctgg

SEQ ID NO: 504253 - DNA, 139 bp, Homo sapiens
cggtgaccgtttactgccctctgaaaatggggatggttcatagtactaatctcataggggtgttgtgaggaaggaataaatcatggaaagcacctaaaagagtgctgggcccgtagccttcccacgggataaggtggag

SEQ ID NO: 504254 - DNA, 203 bp, Homo sapiens
ctagaggatcccctgcgagcctcatatgaaagtctcaaggtggcagaaataggtcagacttatccattgtcctgttttccattagaagcactgacagtcaagtagcctaaggtgtagaacaaatactgacatgtaaggggagtttcactctcatgtctttgtgaagtgaagaccttaagagagattttttttctagtattata

SEQ ID NO: 504255 - DNA, 241 bp, Homo sapiens
gaggatcccagagacgcgaagactagaaagggaaggtgaggggatgtggggagagagtgggcgaggtgcctttactacatgtgtgatctgaaaacccggctggttctgagctgcgtctcatgacatggtaaagtaataccaatggctttttatcatttccttcttccctataagtttcacttgaaattttaaaaatcatggttatttttatcgtagggatctttctgtcttcgggtcgtta

SEQ ID NO: 504256 - DNA, 467 bp, Homo sapiens
gccttttaccactccagcctgtcccctaccccccaattggagggcactggcccccaacgggcatcaccccgctaaatcccctagaagtcccactcctaaacacatccgtattactcgcatcaggagtatcaatcacctgagctcaccatagtctaatagaacacaaccgaaaccaaataattcaagcactgcttattacaattttactgggtctctattttaccctcctacaagcctcagagtacttcgagtcccccttcaccatttccgacggcatctacggctcaacattctctgctaccacaggcttccacggactccacgtcactattggctcaactctcctcactctctgcttcatccgccacactactatttcactctccaccccaacaccactttggctccgcagccgccccctgataccgccacttcgtagctgtggtttcactacttctgtacgtctc

SEQ ID NO: 504257 - DNA, 112 bp, Homo sapiens
gctgtatcccagctactcgtggaggctagagactgatattgcttgaacccaggtggaagaggttgctttgagccaagatagcgccactgcattttctctgagacgctgtgtc

SEQ ID NO: 504258 - DNA, 403 bp, Homo sapiens
cgcccaacgtctgtttcccaggcaggccaagggccccaattggggccatcccggttgggtcccaagaagcatctgaagcgggtggcagctccaaagcattggatgctggataaattgaccggtgtgtttgctcctcgtccatccaccggtccccacaagttgagagagtgtctccccctcatcattttcctgaggaacagacttaagtatggccctgggacccaagcgaaggaattggaaacgttaaaacgaaagcatttgcattgcagcggttcattaaaatcgatggcaaggtccgaactgactataagcctaccctggctgcgcattttccattggggccaattgggttccaatttccaggccattttggaccaaggaacgggcagcagaatttcccgtg

SEQ ID NO: 504259 - DNA, 256 bp, Homo sapiens
ggaaattttgattttttagccaaagggttttcccaagtgttatttgaagcccattcagatgccttaaaaggggggcccgggcacgggctttcaaaaaaatgttttcgggacactgggttttttttttgaaaggacattttttcattggttttgccgtgaaaatcctggggagattttgcaaagaaaacgcacccttacatttggtcattaaagacagatttccttcccaagtcgccatgaataaaatgagagggta

SEQ ID NO: 504260 - DNA, 160 bp, Homo sapiens
cgacctctagacggactccctgacgacgaccgtgttgaatgggacggccgggcgagatttaccaccctcttccccggattttcacagggccagcgcgtggtccaccggactgcgctgaaccgggaccgtttccagggcaggggcccttctctgggggggt

SEQ ID NO: 504261 - DNA, 290 bp, Homo sapiens
  misc_feature (34)..(34): n is a, c, g, or t
  misc_feature (93)..(93): n is a, c, g, or t
  misc_feature (177)..(177): n is a, c, g, or t
  misc_feature (243)..(243): n is a, c, g, or t
  misc_feature (259)..(259): n is a, c, g, or t
tactcctgattctactgggacagagaaaacctgnaaggactttacgataaaaacgtgtcaattccttagcattggcccgaaagaggtaagggnaccgtattttgcacttctaatgagagaaaaaagacaccgtttggccgcctataaggttggaatatggttaactgcttgcagagnaaatatcttgggttggactttccaattcaaaatctctttatttccccctttcttgggccctctggnaccaggtcacctttcnaattttttttgggggtccgggcctttctggg

SEQ ID NO: 504262 - DNA, 870 bp, Homo sapiens
  misc_feature (795)..(795): n is a, c, g, or t
gcttcccaaagtgctgggattacaggtgtgagtcactgcacccagccgagttgctttcttactaaatcctattaaaatatgcaaaaataagtcagattttaaggcaaataaagtgacataaggtgctttatattttattttggtatatttaaacagtgaaaaactaactgaaagcacatgaagagttgtaacttgggggaaaataggtaaacatagcttctagctaacacaggagacctattcttagcctttactaatttcaagcagtgtatcccatatggtatctcttgctcttccttcaactccaataaatttaatgactaaatgccaagttaacaaatcaacttccatttggattgtaggtgtgaaggcacaactctaattgctattagtctacatgtatttctgtaatagtattgtgtcatatcaatttttaagatgtctaaattttatggtcacaagttatccctcctcagtatgaaaaataaattagatattgaaaaatgtctaaacttcagtgatggaaagaatatttcaagaagttttttaacctaaatacttttattttgaatttaagtctttgcacataaaatatagcaagcttacatattaaactatttacgtaaatggaatgtaagccatgactttaactgaagtgttcacattcactaatttgatagattgctgtccttaataattttggaggaaattaagccaaatgattattgtactacagtattttcagaatatgggaaatcaattaaaaatgtaatctaatctagtttaagattttgnttaatcatcatggggtcctacctggataatttaactattaagacaaaggattttttttaaaggacccacctgaaa

SEQ ID NO: 504263 - DNA, 355 bp, Homo sapiens
gcatgatttgcctaggtggagcacgtggtggtgacggagccggagccctagctgcgccaaccgaccgtgtggctgagctaccagtgctgggaactgatattgcatcgcttccgtgattacctgctctgggtgcacacactgtctgagcagactcaagtagagcgtgctcagttctcaggacactcaggaactgagcctgctgaaggacgagacctttaaggggccagagaacctacaacatgtaatctgcaggaactactgacccggccggtctataagtcgtcgacgacactatccggagctttgtgcatctcatctctcctgccatcccgatcttggtgatgattcttgtgct

SEQ ID NO: 504264 - DNA, 633 bp, Homo sapiens
tatcgatgccactcaacatactttacattcagccaaatactgaaggtttcaccatggaaaaacacttttatcacttttaaagtaacttgactatgttcaccctgagtgctcttgcctcagtatggcaactgattatgagttcaggttaagagcaacaccagggaatacagaaacccacgttaagttggccattctgacatgaatctatacttgaaaatgaaaacaatcccaaagaaaacctgtatgtcaaaaacagaactgttcctgcctttcaccccaaaatatttaaaactaaatctaagccacttttaaaatgcatgctggccgggcgcagtggttcacgcccgtaatcccagcactttgggaggccaaggcaggcggatcacttgaggccaggagttcgagaccagcctggccaacatggtgaaaccccgtctctactaaaaatacaaaaattagccagatgtggtagtagatggctgtagtccgagctgcttaggatgttgaggtgggaggaaggcttgaggctaagaggttgaggttgcagtgagctgtgattgtgccactgctctctagcctgggcacagagcaagacctgtctcaaaaaaaaactgtattaagaaggactattaa

SEQ ID NO: 504265 - DNA, 167 bp, Homo sapiens
atgtttatagatttaccatattgtcttccatctacaggcttggtccctggattatggttgtatcctaccctttaaaatgccagcagatattttctttaaagataggttttaagtattggctagaggatttttctatatttacttacgttgagacagcttaagacttc

SEQ ID NO: 504266 - DNA, 252 bp, Homo sapiens
agtgtgattcagtttactcaatgcggtatatgaggagaggtaagggtcaaggtttatatattgatgggagacagagtcaggctcggtctccgggccagagtacagaggcgcgatcgtggctcacggcaaactccaccggccagattacaggtgcacaccaccacacccggctaattttggtatttttagtagagatggggttgccccatgttggccaggctggtctggaactccagacctcaggtgatccgc

SEQ ID NO: 504267 - DNA, 220 bp, Homo sapiens
tagaacaggacttatccaatctccgggtctagagcctgaagggacattagaatgtagaagcttcattccatgatgacaagttaatccaggtagggcatggcggatgcacaagggtcgaaaatgagacaaactcggacaggcgtggtggctcatgcctttaagtctcagccactttggtaggctgaggtgggtggatcgactggagttagagaccacgcct

SEQ ID NO: 504268 - DNA, 1292 bp, Homo sapiens
  misc_feature (269)..(269): n is a, c, g, or t
gcctgcagggctgtacaccttccccgttatgcgtgactcgggaccttaccgactgtctaccgcgtacccgaacggccgtattgtgacgacacgccccgtgtgagcagctactattgagtcgctagagtggctagacaggcagatagtgcaccttggaagactcggccgagacgaatcttgagagctcaatccaatcggacaaagccatgctagtccgcatcttagacgatatccagacgaaagcggcgtgtagcacagcctccaaaacncggagaaccatgggctttttcaaaactcccgcatgttcatagcgcgccaccaattgaaccacagtcaactggtcgacgctttggcgatcagatgcctagcttactggactcatagaaattccgcacggatccagagattcagcacagttggtggggacctaaatactcagataggttcagtttgagggagtcagcccgtcggagagtacttgccattgacactcggagacccattggttggcgcacactagttgtgactatccccttgttgcgaacgaaggacgggcaagctttttcagacccggagtaccgtcctggggaaacatggcattggagctcgacgtaatccaagcaagtacaacccggcgtgccccaacgtagtggaacctacctattactcgattccccccctagtttcccccacagactgcctgaacccgaacaaagctgtgcccatagcatttccccaagttctcgcaatagggccacgttgttacaaccacacaaagccgtaccttgagtatttgtgtcaacggctgtttgccctgaacgtgggcctagggaatggcttggtttgcggaacccagggtacacggggcagtgacagccggttgaaaccgtcgtgacactgtgatttgattgtaccttgaagcccggcccacagggcgtggtgcgtgcgacatcagagaaccattgttccacctacaagccctttaggtctagagccgaggcctatcttgcctcgaagcaattcctgcatgggcccgttggcacaactcaggtggactcacggggacaggttcccagagcgtttccccccatgtaaattaggtacctatgatagctccattgctaccgtgcttgccttgcggcggtgtaccactatgacgttggctgagttccaagaaattccacggaggtccctaggtcgttccgggccttgactgatcccaacaaaggtttttcccatcaaaagttcctgcgctattcccccctttgctgcaggtagtatgcctcccgtca

SEQ ID NO: 504269 - DNA, 511 bp, Homo sapiens
acggcaggattcggttaggaggaacagcacagcatgctgggctctggatttaacacgctgagcgcttaagagtgaatttgagattagtcactacaatcgccttaaactactggagcaaaaaggataaacggcacactggcccagcagaagcaaggcaaggagattgcgtgactatctggctgctggcgaacacgatgaacgagctcggatccgctgctggagcacatctatccgggcacagacgtaccgtcgtgcgaggccacctggacgactcctgcgacgctgctagctgatgatcctgcatgcgtggcctcgccgtatccggcctctagtccagatcataatgacaggaactatgattctggctctggctgaatctgtgtctacattgatctgggcatgctcctcgactccagtcagaagctggctgagttgaaaatagttgctgatcagctctgtgccaagtatagcagaggaactatggcaacgctagtgtagcgaccaatcacga

SEQ ID NO: 504270 - DNA, 412 bp, Homo sapiens
  misc_feature (112)..(112): n is a, c, g, or t
acagagggccaggctggagtgcatggcatgatcacggctcactgaagcctcgaactcctgggagacacccatactcgacacctcacagccagcaccatcagcagatcctgcncaactgctctacaaaactcggccggcgggatgcggtggctcacacctgtaatcccagcacgggaggccgaggcgggcggatcacctgaggtcaggagcgagaccagcctgaccaacatggagaaaccccatctctactaaatatacaaaattagcctggtgtggtggcacatgcctgtaatcccagctactcaggaggctgaggcaggagaatcgcttgaacccgggaggtggaggttgtggtgagccgagatcgtgccattgcactccagcctgggcaaaaagagcgaaactccgtctc

SEQ ID NO: 504271 - DNA, 388 bp, Homo sapiens
gcagcattctggatacctggcgaagcctcatctctactataaaaggaatatcccgattagccgggcgtggtggtgggtacttgtggttccatatgctcgggaggccggggcgggagagtggcttgggccctggaggcggaggttgcattgagattgcactattgccttccagcctgggcaacggagtgagactccgtctcaaaaaaacaaaacaatttgatttttaggtaacgttttaaatgtacctttattgtaagactatgggatctgggggagagtatgtcttttaatgccattcttcttacttgagtctccggtgacacatgtttacttgtgggaatatttcacttatcagtacttttaaagaccttttgctatacgcttgctc

SEQ ID NO: 504272 - DNA, 374 bp, Homo sapiens
  misc_feature (48)..(48): n is a, c, g, or t
  misc_feature (90)..(90): n is a, c, g, or t
acagtatgcctgaaggatgtgctgtctgggaaaagtgtctgctgacancaacggtgggccgctttcttgatgagccttgtcaaccaagtncccaagataggttcctgatgactttgagaccatgctcaacagcaacatcaatgacctgctgatggtgacctacctggccaatctcacccagtcacagattgccctcaacgagaaacttgtaaacctgtgaatgagccccaagaggcacttgtgctggtcgaggttttcaccacagggctgagaccgaagtggaggcaaagggtttctttgtggtcttgagtcacggtgactcagtcagctgcttgtgactccaaataaacatagcttaccttttgtaaatgaaa

SEQ ID NO: 504273 - DNA, 397 bp, Homo sapiens
gcatctctctgtccttggccagatggtctcgacacgtgcgggcacctctaacccagtgctatgccatacctttctcttgtgtacattcggaaacagaagccatctctgacccgcccagctcttccctggcgctgcaaagcactggctttactgacaaacgtctccaccaaagaactcatctgactgctttcatggacagtggcattctatcacatctttcaaaggaaatgtggaaagttccttaaatgggctacttatccacccattgccgttgaaacccccatttggttcaccttccatttggatccccaaagccaaggattctggtggtgctgctgttgctgctgtttcagtttattcagaagtttggcaataaaaagatcacgtggttaaaaaa

SEQ ID NO: 504274 - DNA, 852 bp, Homo sapiens
tcgacccacgtcgtcgtttctgagcggcatgaaggcacctcccaggcggacgagcgtgccccggacgcgcgtatcatggtgcgaggtgacctggtcccgactgagccttggaggcagctcgcgataatgcggcatgctagatgcgactcctgcagagcgcgagcatgtggccagcgcgagagccagtgacgtcacacctgagcatggcccggagagcttgctgtgtggtcctgagtagcagatggccttgatgatccaggtgtcttcactccaggcagctctaacgggcctgagtagccctgggaggccattcacgaaatgtgcatcccgggtggccttcaggggaccaaggctgcccgggagtgcacagcccccatgcccaccatagcaggtcttggactgtgatcatggctagatgaatgataaacagtggccaacctgtgaagaaatgcccctgggcaggtgggcttttctcagcatgtgtagctcaaccaatcgacgtgcccacggaaaccgtgtcagcaccttcctgacaactcgcaagacgccacacaaggcccaacgacaggccccgtgagaaatgcccttttgcttccttggagctgccccctgtggcaggaacagtcgactgaacgccggcgcccttgtaaattaccctagtcctacatgccccacttgccttccacccatatactatcccgaaaccccagagtgaacttccttgaccacctgtcccctgtaacaaaaccatttctaagatcactcagcatgcatccctcccacttgcacataacgaccttatgctatatgcacacatatgcaacaagatcttcaagtaacatgttcactgct

SEQ ID NO: 504275 - DNA, 275 bp, Homo sapiens
ttacatgccagtcctggacccattgctcttgaatatcaggaacttgtatgcatgagtccttgtcagagccttttcataaatctccttgaacaaaaagcaattggggactgtagctgatggtaaatactttgaggaagaacgacagcaactgtctgacagtcttcctgaaatacagaaatgacatcacggcgtgctataatggattaaggccaggaagatgtcctgtacctgaaggagcagagacttggactgtcagcgatgtgcagctttcctcg

SEQ ID NO: 504276 - DNA, 690 bp, Homo sapiens
agcagtgtctcacacctctaatcccagcactttgggaggccgaggtggacagataacctgaggtcaggagttcaagaccagcatggccaacatggtgaaaccccgtctctactaaaaatataaaaattagctacgcatgggccgggtgcggtggctcatgcctgtaatcccagcactttgggaggctgaggcgggcagatcatgaggtcaggagatcgagaccatcctggttaacatggtgaaaccccatctctactaaaaatataaaaaattagccaggcatggtggtgggcgcctgtagtcccagctactcgggaggctgaggtaggagaatggcatgaacccgggaggtagagcttgcagtgagctgagatagcaccactgcactccagcctgggtgacagagcgaaactccgtctcaaaaaaaaaaaaattaacttggcgtggtggtgggcgcctgtaatcccagctactcaggaggctgaggcaggagaatcactagaagctgcgaggcagaggttgcagtgagctgagattgtgccagtgccctcctgggcaacaagagtgaaactctgtcttacacatactataaatttaagcgtcttttatatgttcgttgaatgaataaattggttcagtcccccaatatatttaaagggctcaaggaagtgtttattattagtttcctcc

SEQ ID NO: 504277 - DNA, 128 bp, Homo sapiens
acgtttcgaaggatatcggccaaatctagccgagtcgtgtccatgtcgacagtaccgagcctatgttttaacgcattccggcgaactctacgagcgtcccgagcgttcagacaggcagatttgtgttt

SEQ ID NO: 504278 - DNA, 580 bp, Homo sapiens
caggctggtctcgaactcctgggctcaagtgatcctcctgctttggtctcccaagagtgctgaggagttataggcgtgacgacagccagatcacttcgtttgatgactacatatgacaagacacatagagatagcattacatagaaaaatatactctttaagaaatcatggttctcaagtgatacgactctagagcacattaggacacaataagacataattaatagacatggataaaaatttattaaagcaacaacgtaaggtacttagatgactgacatgaagtataataaaccatgtcgaaatacagtacaattcattggctacaaacaccaaacttgaacaaacaaaatgagcaatctttccttaccaagcagatggaccaaatcaatcagagttataatacccaaaatactcattacacttggtgccagcaaattgttgaggagatctataccatctacccacatacgaacaaatgcacctataactgtctaactaaaacgacacaaatagctgagctaagtatgactaaaatctataaggactgaaagaactacgatattcaagctcacctaga

SEQ ID NO: 504279 - DNA, 165 bp, Homo sapiens
gaatgccttctaagccactcttggagcatcttccgatgacagtgggggatctgaagggggctcccttgggtgctaatggtctttcagaaggctctgtagtgctctgtgggttggccctgggggggcctgatctcatttgagctgattttccattaacgctgaaga

SEQ ID NO: 504280 - DNA, 154 bp, Homo sapiens
gataaggtgctcaaaaactattctgtcttcaaatattgactcggctcaacttttctgtctgatagtcagtgactacctatcaggccctgccagcaggtcctccatgtgtcatcttgtcatcccatgttgtgtgtaggcatgtcggagagggagg

SEQ ID NO: 504281 - DNA, 1323 bp, Homo sapiens
aaaaccgagaagcaacaattgcatgatgaggccgtgtgtttactggcacgaggcaaagaatgattttgctggcccacgagaaactctctgttcctgtcacgtgcaaaatccgtgtcttcccggagattgacaagaccgtgaggtacgcccagatgctggagaaggccggctgccagttgctgacggtgcacggacgcaccaaggagcagaaggggcccctgtcgggtgcagcgtcctgggagcatatcaaggctgtgcggaaggctgtggccatccctgtgtttgctaacgggaacatccagtgcctgcaggacgtggagcgctgcctccgggacacgggtgtgcagggcgtcatgagcgcagagggcaacctgcacaaccccgccctgttcgagggccggagccctgccgtgtgggagctggccgaggagtatctggacatcgtgcgggagcacccctgccccctgtcctacgtccgggcccacctcttcaagctgtggcaccacacgctgcaggtgcaccaggagctgcgagaggagctggccaaggtgaagaccctggagggcatcgctgctgtgagccaggagctgaagctgcggtgtcaggaggagatatccaggcaggagggagcgaagcccaccggcgacttgcccttccactggatctgccagccctacatccggccggggcccagggaggggagcaaggagaaggcaggtgcgcgcagcaagcgggccctggaggaagaggagggtggcacggaggtcctgtccaagaacaagcaaaagaagcagctgaggaacccccacaagaccttcgacccctctctgaagccaaaatatgcaaagtgtgaccagtgtggaaacccaaagggcaacagatgtgtgttcagcctgtgccgcggctgctgcaagaagcgagcctccaaagagactgcagactgcccaggtcacggattgctttttaaaaccaaattggagaagtctctggcctggaaagaggcccagcctgagctgcaggagcctcagccagcagcacctggaacaccaggtggcttctccgaagtcatgggcagtgccctggcctgaaggcccacaacccccacccccaggactgctgctggagcctggacacgtcctacttaagaaaatgccttttactcagggaatctcctgctacttaatgtggaaagacacgcccatgtcccccttcggcccactctgggggcctggaaatgctgcagtggggagcaggccccaggctggacctgccctgtcctcagcacgcgtgtgcaaaagtgaacaataaatcatttcaaagatg

SEQ ID NO: 504282 - DNA, 299 bp, Homo sapiens
  misc_feature (5)..(5): n is a, c, g, or t
tgtanctatacaagagcacccaggtcataaagcaagttattggagaccttcaaagagacttagactcctacacaataatagtgggagactttaacaccacaatgacaatattagacacatcatggagacagaaaattaacaaagatattcaggacctgaactcagctgtggatcaagtagacatgatagatatctacagaactctccaacaaaaaacaagcgaatatacattcttctcatagccacatgacacttaccctaaaactaatcataaattaggaagaaaaacactcctcagc

SEQ ID NO: 504283 - DNA, 555 bp, Homo sapiens
  misc_feature (135)..(136): n is a, c, g, or t
  misc_feature (172)..(172): n is a, c, g, or t
aaactttgaacttggaacaagccccggccggggtgggccccttaaacaatagcccggtagccccctgccctcttagcccaaagggccagggccctgccttggcctttggtgccctttatccattgtcaaataaanncgctcagcccattaaaaaaaaaagtgccgctgcagnctgcccaggtcacggattgctttttaaaaccaaattggagaagtctctggcctggaaagaggcccagcctgagctgcaggagcctcagccagcagcacctggaacaccaggtggcttctccgaagtcatgggcagtgccctggcctgaaggcccacaacccccacccccaggactgctgctggagcctggacacgtcctacttaagaaaatgccttttactcagggaatctcctgctacttaatgtggaaagacacgcccatgtcccccttcggcccactctgggggcctggaaatgctgcagtggggagcaggccccaggctggacctgccctgtcctcagcacgcgtgtgcaaaagtgaacaataaatcatttcaaagatg

SEQ ID NO: 504284 - DNA, 367 bp, Homo sapiens
agcggaggtaggttcgtgagacggggatgggggacgctcgtcacagtcctcttgctgcacccatcagctgtatcttgtctgaagtgattaaggagatgggggagagcctcccagcgctcgtggtcgtgtgcgccattggcgcgcttagagaaggacttgtcgcgctcgtccgagtcctcagtgttctcatctggaagaatagagtgtggcaaggtccattgtactcgctatcacacgtcatgagccctgaatgtggaagaaagtggagttccatgtgcatgacaagccagggactagatttatggcaagaagaacctccagattctgtcttagggttcccagtgcatttgctcgcttgtactcgagg

SEQ ID NO: 504285 - DNA, 555 bp, Homo sapiens
  misc_feature (135)..(136): n is a, c, g, or t
  misc_feature (172)..(172): n is a, c, g, or t
gcgtggcacctgggagcaggacccctgccggtggtgcgcccctaaaacaatagcacgtagggcccctgctcctcttagcacaagaggcccaggccctggcgtggccttcgtgccctttattcattgtcaataaanncgctcagcccattaaaaaaaaaagtgccgctgcagnctgcccaggtcacggattgctttttaaaaccaaattggagaagtctctggcctggaaagaggcccagcctgagctgcaggagcctcagccagcagcacctggaacaccaggtggcttctccgaagtcatgggcagtgccctggcctgaaggcccacaacccccacccccaggactgctgctggagcctggacacgtcctacttaagaaaatgccttttactcagggaatctcctgctacttaatgtggaaagacacgcccatgtcccccttcggcccactctgggggcctggaaatgctgcagtggggagcaggccccaggctggacctgccctgtcctcagcacgcgtgtgcaaaagtgaacaataaatcatttcaaagatg

SEQ ID NO: 504286 - DNA, 173 bp, Homo sapiens
aatcacttaacatcctttcgacggtgtctggtatgatgctgcgatcttaccttttgcaggatcagcgcgcagtgctccatactgtgtgtgtccccagcccgtgacccagatgccttgcggctggacgacatgggaggcgtcggcaggcagatgggccgcaccatgggtgctgt

SEQ ID NO: 504287 - DNA, 1864 bp, Homo sapiens
agcggggtggcggcgcggagccttgggcccggctgcggcccggcggcggccccggcgcggtgcgggcgttcgcggcgccccgggagctgcaggggccccgggcggcggcgaggccggagaggggcgggcccgggacaccggcacccggcgccctcggagccaaaggcgcgcggcggacacggcggggccctcgcgcgcctggagacgatgccaaagctgcagggcttcgagttctggagccgcaccctgcgaggggcccgccacgtcgtggcccccatggtggaccagagcgagctggcctggaggctgctgagccggcgccacggggcacagctctgctacacgcccatgctgcatgcccaggtctttgtccgcgacgccaactaccggaaggagaacctgtactgcgaggtgtgccccgaggaccggcccctcatcgtgcagttctgtgccaatgacccggaggtgtttgttcaggcggctctcctggctcaggattactgtgacgccattgacctgaacttgggctgcccacagatgatagccaagagaggtcactatggcgcctttctgcaggacgagtgggacctgctccaaagaatgattttgctggcccacgagaaactctctgttcctgtcacgtgcaaaatccgtgtcttcccggagattgacaagaccgtgaggtacgcccagatgctggagaaggccggctgccagttgctgacggtgcacggacgcaccaaggagcagaaggggcccctgtcgggtgcagcgtcctgggagcatatcaaggctgtgcggaaggctgtggccatccctgtgtttgctaacgggaacatccagtgcctgcaggacgtggagcgctgcctccgggacacgggtgtgcagggcgtcatgagcgcagagggcaacctgcacaaccccgccctgttcgagggccggagccctgccgtgtgggagctggccgaggagtatctggacatcgtgcgggagcacccctgccccctgtcctacgtccgggcccacctcttcaagctgtggcaccacacgctgcaggtgcaccaggagctgcgagaggagctggccaaggtgaagaccctggagggcatcgctgctgtgagccaggagctgaagctgcggtgtcaggaggagatatccaggcaggagggagcgaagcccaccggcgacttgcccttccactggatctgccagccctacatccggccggggcccagggaggggagcaaggagaaggcaggtgcgcgcagcaagcgggccctggaggaagaggagggtggcacggaggtcctgtccaagaacaagcaaaagaagcagctgaggaacccccacaagaccttcgacccctctctgaagccaaaatatgcaaagtgtgaccagtgtggaaacccaaagggcaacagatgtgtgttcagcctgtgccgcggctgctgcaagaagcgagcctccaaagagactgcagactgcccaggtcacggattgctttttaaaaccaaattggagaagtctctggcctggaaagaggcccagcctgagctgcaggagcctcagccagcagcacctggaacaccaggtggcttctccgaagtcatgggcagtgccctggcctgaaggcccacaacccccacccccaggactgctgctggagcctggacacgtcctacttaagaaaatgccttttactcagggaatctcctgctacttaatgtggaaagacacgcccatgtcccccttcggcccactctgggggcctggaaatgctgcagtggggagcaggccccaggctggacctgccctgtcctcagcacgcgtgtgcaaaagtgaacaataaatcatttcaaagatg

SEQ ID NO: 504288 - DNA, 1032 bp, Homo sapiens
  misc_feature (830)..(830): n is a, c, g, or t
gctgcacctctgtacctggatcctgtcctgttctccatgctggtgtgtctgaccgtacccgggaggctcctgatgggcgctctgacagtgacactgatggtgctgatgcgtccccactgctctttggctgggcgactccggacaacgtttacttggtagcaggttaccacatgagtgtcatttcttcacgtgtgaacccgaggcggtgtgcggttccgtggtacagaatcttcgtatcgaccacatgtaggagtcgctgcgcttcgacagcgacgtgggggtgagtacccgggcggtgaccggggcgtggggctggcctagcgcccgagttactggaaccggcagaacggacctccctgtgagcagatccccccggcgcggctggagaccgtactgcgggactcacctacgggcgttgtggggatgccttccctgtgaagcggtgatatctatcctgaggtgacgtgtgaatccttgcaaagacccaagacccttgtctatgcaccaggaatctcctggtctagctcttgtgagatgttatgctaatcgcaggccaagcaattgaaggtcaggtggttcccggaacgggcaggacagagaaaacactgggggtggtgttcacgagaggcgtgatcgaggaaatggtagacttgtaactgccagagcctcgtgatgctgaaaacagttctcgggagtgaaaatcgttacccctgtcccatggagcatcgaagtctgaggagtccgtcacccgtgagtgagagcaccgactgaggtctgcctgagaaaatgctagtgactcggactcgtgtgaccagcgcttcctgaggggnggagcccttttaaaaggggaagagattggtgtgcaggaccgacccgagaaactacgctatagaaggccgatatatgcgcgggagagaaactcaaggggaaagctccgaaagttcaagcggggaaaacttaatgtcattacaaaatgagaagtgtgcagctcgggccaactctgaactaaagtgcatagaaagttacataggt

SEQ ID NO: 504289 - DNA, 2147 bp, Homo sapiens
agcggggggagtctcgcgaggggcgcccctgtggcgtttcgggccagccgggccgcctggccgggtgcggagaaggaagctctgcccttcccctggcccggcgcggagccgattctcccgggaaggggccgggggtcctaacttcaccgccgggcggcctgctcagggccaggcccgcggggacgctggcgtcaaggtttcttcccccttcacgccagtcccctaccaggccgacatcgagtcccgctccccagggagggtcaagtcccaggggtccagcggctcccccgaggtccgctaggaggtggcggcactggagtggccgttctccagcctgcaccgacccccgcctttagtgcccccgcgtgtgacccaacggtggtactggagcggccttagaagggtgaccgctgcctctgagttgagtcttaagcccctcgttgggcctggctgaaccccgggtctgcgcctttcccccagcctggagacgatgccaaagctgcagggcttcgagttctggagccgcaccctgcgaggggcccgccacgtcgtggcccccatggtggaccagagcgagctggcctggaggctgctgagccggcgccacggggcacagctctgctacacgcccatgctgcatgcccaggtctttgtccgcgacgccaactaccggaaggagaacctgtactgcgaggtgtgccccgaggaccggcccctcatcgtgcagttctgtgccaatgacccggaggtgtttgttcaggcggctctcctggctcaggattactgtgacgccattgacctgaacttgggctgcccacagatgatagccaagagaggtcactatggcgcctttctgcaggacgagtgggacctgctccaaagaatgattttgctggcccacgagaaactctctgttcctgtcacgtgcaaaatccgtgtcttcccggagattgacaagaccgtgaggtacgcccagatgctggagaaggccggctgccagttgctgacggtgcacggacgcaccaaggagcagaaggggcccctgtcgggtgcagcgtcctgggagcatatcaaggctgtgcggaaggctgtggccatccctgtgtttgctaacgggaacatccagtgcctgcaggacgtggagcgctgcctccgggacacgggtgtgcagggcgtcatgagcgcagagggcaacctgcacaaccccgccctgttcgagggccggagccctgccgtgtgggagctggccgaggagtatctggacatcgtgcgggagcacccctgccccctgtcctacgtccgggcccacctcttcaagctgtggcaccacacgctgcaggtgcaccaggagctgcgagaggagctggccaaggtgaagaccctggagggcatcgctgctgtgagccaggagctgaagctgcggtgtcaggaggagatatccaggcaggagggagcgaagcccaccggcgacttgcccttccactggatctgccagccctacatccggccggggcccagggaggggagcaaggagaaggcaggtgcgcgcagcaagcgggccctggaggaagaggagggtggcacggaggtcctgtccaagaacaagcaaaagaagcagctgaggaacccccacaagaccttcgacccctctctgaagccaaaatatgcaaagtgtgaccagtgtggaaacccaaagggcaacagatgtgtgttcagcctgtgccgcggctgctgcaagaagcgagcctccaaagagactgcagactgcccaggtcacggattgctttttaaaaccaaattggagaagtctctggcctggaaagaggcccagcctgagctgcaggagcctcagccagcagcacctggaacaccaggtggcttctccgaagtcatgggcagtgccctggcctgaaggcccacaacccccacccccaggactgctgctggagcctggacacgtcctacttaagaaaatgccttttactcagggaatctcctgctacttaatgtggaaagacacgcccatgtcccccttcggcccactctgggggcctggaaatgctgcagtggggagcaggccccaggctggacctgccctgtcctcagcacgcgtgtgcaaaagtgaacaataaatcatttcaaagatg

SEQ ID NO: 504290 - DNA, 1823 bp, Homo sapiens
agcggggtggcggcgcggagccttgggcccggctgcggcccggcggcggccccggcgcggtgcgggcgttcgcggcgccccgggagctgcaggggccccgggcggcggcgaggccggagaggggcgggcccgggacaccggcacccggcgccctcggagccaaaggcgcgcggcggacacggcggggccctcgcgcgcctggagacgatgccaaagctgcagggcttcgagttctggagccgcaccctgcgaggggcccgccacgtcgtggcccccatggtggaccagagcgagctggcctggaggctgctgagccggcgccacggggcacagctctgctacacgcccatgctgcatgcccaggtctttgtccgcgacgccaactaccggaaggagaacctgtactgcgaggtgtgccccgaggaccggcccctcatcgtgcagttctgtgccaatgacccggaggtgtttgttcaggcggctctcctggctcaggattactgtgacgccattgacctgaacttgggctgcccacagatgatagccaagagagcaaagaatgattttgctggcccacgagaaactctctgttcctgtcacgtgcaaaatccgtgtcttcccggagattgacaagaccgtgaggtacgcccagatgctggagaaggccggctgccagttgctgacggtgcacggacgcaccaaggagcagaaggggcccctgtcgggtgcagcgtcctgggagcatatcaaggctgtgcggaaggctgtggccatccctgtgtttgctaacgggaacatccagtgcctgcaggacgtggagcgctgcctccgggacacgggtgtgcagggcgtcatgagcgcagagggcaacctgcacaaccccgccctgttcgagggccggagccctgccgtgtgggagctggccgaggagtatctggacatcgtgcgggagcacccctgccccctgtcctacgtccgggcccacctcttcaagctgtggcaccacacgctgcaggtgcaccaggagctgcgagaggagctggccaaggtgaagaccctggagggcatcgctgctgtgagccaggagctgaagctgcggtgtcaggaggagatatccaggcaggagggagcgaagcccaccggcgacttgcccttccactggatctgccagccctacatccggccggggcccagggaggggagcaaggagaaggcaggtgcgcgcagcaagcgggccctggaggaagaggagggtggcacggaggtcctgtccaagaacaagcaaaagaagcagctgaggaacccccacaagaccttcgacccctctctgaagccaaaatatgcaaagtgtgaccagtgtggaaacccaaagggcaacagatgtgtgttcagcctgtgccgcggctgctgcaagaagcgagcctccaaagagactgcagactgcccaggtcacggattgctttttaaaaccaaattggagaagtctctggcctggaaagaggcccagcctgagctgcaggagcctcagccagcagcacctggaacaccaggtggcttctccgaagtcatgggcagtgccctggcctgaaggcccacaacccccacccccaggactgctgctggagcctggacacgtcctacttaagaaaatgccttttactcagggaatctcctgctacttaatgtggaaagacacgcccatgtcccccttcggcccactctgggggcctggaaatgctgcagtggggagcaggccccaggctggacctgccctgtcctcagcacgcgtgtgcaaaagtgaacaataaatcatttcaaagatg

SEQ ID NO: 504291 - DNA, 151 bp, Homo sapiens
aggtcggaccgctgaggtgtctccatctctgcctcacttcatgggactgagctgtacctccccgtagctgtacctcacccgtagctgtacctcacccgtagctgtacctcacccgtagctgtacctcacccgtagctgtacctcacccgta

SEQ ID NO: 504292 - DNA, 928 bp, Homo sapiens
gttttttagccatttcccccccctctgttaatatgggtataatcccagggcgttcccaaaatgttgttgtgtaaaccccggttgcttttttttgttgggctccacatcttcggggcgcaattttcctccattgcgcttttcctcagaagggaggtcctcctggtaaggtcgagtgcatgtattataattcgggccgggcctgcctgtaggtcactttcttggttgtccccccaaacccttctggggtttatatatgccctgcagtgcgcacacacgttgtaattgttcgaactctattattcccccctttggggacaaaaaccactaacttctgaagacccttgctttctggagccaccgcctctctaacccccgtggtgaccctggtaataatactggttaggcccccgctgtttcacaagcccaaaaaaaattccttttttccatcgagaccacactagtttcacccgagtaaagtcttcgcttctcccccacactcgttgttaacccccctttcttcgtgtccataaagttaacatacggggccgctcccccgtgccccctctgcgtcttattttcgaacgccccccatctccccatcaatcgtatttcgacccccctctcctcaaatagtccccctccttcttacttcttaactacgctggcacctcgttcttatcatacagcactaatacatcgcatattgagagaagacatatactttcgctgtgtatcgctcataaatgactccccaccccatttcttgattaaaaattcagctcgtagattatacacacctttattaataattcaatagtcccggccagatgcaccccacaaaaatactatttgtgtcattgattgaatcctatacttttaaatagcgtataattttggccccccccaaaaaaaaggccttcacaaaaca

SEQ ID NO: 504293 - DNA, 2228 bp, Homo sapiens
agcggggtggcggcgcggagccttgggcccggctgcggcccggcggcggccccggcgcggtgcgggcgttcgcggcgccccgggagctgcaggggccccgggcggcggcgaggccggagaggggcgggcccgggacaccggcacccggcgccctcggagccaaaggcgcgcggcggacacggcggggccctcgcgcgcctggagacgatgccaaagctgcagggcttcgagttctggagccgcaccctgcgaggggcccgccacgtcgtggcccccatggtggaccagagcgagctggcctggaggctgctgagccggcgccacggggcacagctctgctacacgcccatgctgcatgcccaggtctttgtccgcgacgccaactaccggaaggagaacctgtactgcgaggtgtgccccgaggaccggcccctcatcgtgcagttctgtgccaatgacccggaggtgtttgttcaggcggctctcctggctcaggattactgtgacgccattgacctgaacttgggctgcccacagatgatagccaagagaggtcactatggcgcctttctgcaggacgagtgggacctgctccaaagaatgattttgctggcccacgagaaactctctgttcctgtcacgtgcaaaatccgtgtcttcccggagattgacaagaccgtgaggtacgcccagatgctggagaaggccggctgccagttgctgacggtgcacggacgcaccaaggagcagaaggggcccctgtcgggtgcagcgtcctgggagcatatcaaggctgtgcggaaggctgtggccatccctgtgtttgctaacgggaacatccagtgcctgcaggacgtggagcgctgcctccgggacacgggtgtgcagggcgtcatgagcgcagagggcaacctgcacaaccccgccctgttcgagggccggagccctgccgtgtgggagctggccgaggagtatctggacatcgtgcgggagcacccctgccccctgtcctacgtccgggcccacctcttcaagctgtggcaccacacgctgcaggtgcaccaggagctgcgagaggagctggccaaggtgaagaccctggagggcatcgctgctgtgagccaggagctgaagctgcggtgtcaggaggagatatccaggcaggagggagcgaagcccaccggcgacttgcccttccactggatctgccagccctacatccggccggggcccagggaggggagcaaggagaaggcaggtgcgcgcagcaagcgggccctggaggaagaggagggtggcacggaggtcctgtccaagaacaagcaaaagaagcagctgaggaacccccacaagaccttcgacccctctctgaagccaaaatatgcaaagtgtgaccagtgtggaaacccaaaggtgagtgggttccggctgcaagccaccaaggcttcagctttgggggtgggcagggtggtctctgcactgcttggggtggcaggtctggtgcccgcccagctgggtttgcaacgtggctcaaggtggcatggatgcctcaggacggccccttgcttccagccaagcccctgcccaggcctggaggggaagagagtctgggtgggttggggtgagggagaggcatctggcttgggagcagttcccagggctgcatccaggccgtgggcatctggcagaggcttccccagtggggctgctcccctgctggccagcctggccccgggagtggtgctggccacaggctcccgagatttcctgtgcccagggcaacagatgtgtgttcagcctgtgccgcggctgctgcaagaagcgagcctccaaagagactgcagactgcccaggtcacggattgctttttaaaaccaaattggagaagtctctggcctggaaagaggcccagcctgagctgcaggagcctcagccagcagcacctggaacaccaggtggcttctccgaagtcatgggcagtgccctggcctgaaggcccacaacccccacccccaggactgctgctggagcctggacacgtcctacttaagaaaatgccttttactcagggaatctcctgctacttaatgtggaaagacacgcccatgtcccccttcggcccactctgggggcctggaaatgctgcagtggggagcaggccccaggctggacctgccctgtcctcagcacgcgtgtgcaaaagtgaacaataaatcatttcaaagatg

SEQ ID NO: 504294 - DNA, 831 bp, Homo sapiens
  misc_feature (41)..(41): n is a, c, g, or t
  misc_feature (67)..(67): n is a, c, g, or t
  misc_feature (99)..(100): n is a, c, g, or t
  misc_feature (106)..(106): n is a, c, g, or t
  misc_feature (108)..(108): n is a, c, g, or t
  misc_feature (113)..(113): n is a, c, g, or t
  misc_feature (150)..(150): n is a, c, g, or t
  misc_feature (166)..(167): n is a, c, g, or t
  misc_feature (178)..(178): n is a, c, g, or t
  misc_feature (209)..(211): n is a, c, g, or t
  misc_feature (213)..(213): n is a, c, g, or t
  misc_feature (234)..(234): n is a, c, g, or t
  misc_feature (239)..(239): n is a, c, g, or t
  misc_feature (248)..(248): n is a, c, g, or t
  misc_feature (275)..(275): n is a, c, g, or t
  misc_feature (277)..(277): n is a, c, g, or t
  misc_feature (282)..(282): n is a, c, g, or t
  misc_feature (286)..(286): n is a, c, g, or t
  misc_feature (295)..(295): n is a, c, g, or t
  misc_feature (297)..(297): n is a, c, g, or t
  misc_feature (299)..(304): n is a, c, g, or t
  misc_feature (336)..(336): n is a, c, g, or t
  misc_feature (342)..(342): n is a, c, g, or t
  misc_feature (348)..(348): n is a, c, g, or t
  misc_feature (362)..(362): n is a, c, g, or t
  misc_feature (424)..(424): n is a, c, g, or t
  misc_feature (556)..(556): n is a, c, g, or t
  misc_feature (565)..(565): n is a, c, g, or t
  misc_feature (591)..(591): n is a, c, g, or t
  misc_feature (643)..(643): n is a, c, g, or t
  misc_feature (652)..(652): n is a, c, g, or t
  misc_feature (702)..(702): n is a, c, g, or t
  misc_feature (824)..(824): n is a, c, g, or t
ctaacaatggaaggctctttctttcttgtaattcataattntatctggaactctgcctctccctttnaacatcattttgtcaggatagacatgaactgnnccaaangnttggntgtctggagctgtttcaataactccttctaggttgangtggtatacaccaaanngttcctcagtnttgccaccatcatgggtgtgaccagcaaagnnncncaccacacactcatggggccngatgnctgcccggncctctctgtcgttcccggccaggcccncnttgtngggngcgtccggngngnnnnnngggtggcaatcaccaccttttcttggtttgtntcaganactgtnagcccttcattcanccagtttagctgttcttggctgagtcctccattaaactggacagactggggctcagagagtncatggttgtccatactataatgctgaataggagggagctgaagaattttaagacaatctattagattctcagctcaaagggataattcaccttgagggctattcagttccgtatttgggttgtgctccctcnatatcttcntacactgctcgtattttggagaagantgatccacgcccaagacactcaagtcatatgcatcaagtaaaatgaaccggnatttagggnatggtacaaaatgataagcataataatcttctgaaggcatggtctcaggntgatgtacaatctgatcttctagaaacttagtgttaagtttagagtgtgttaaatactctctactgaagttatagaattcatggtttccccatgtatgatgaactgggactttaagcatccngggaatt

SEQ ID NO: 504295 - DNA, 2144 bp, Homo sapiens
agcggggtggcggcgcggagccttgggcccggctgcggcccggcggcggccccggcgcggtgcgggcgttcgcggcgccccgggagctgcaggggccccgggcggcggcgaggccggagaggggcgggcccgggacaccggcacccggcgccctcggagccaaaggcgcgcggcggacacggcggggccctcgcgcgcctggagacgatgccaaagctgcagggcttcgagttctggagccgcaccctgcgaggggcccgccacgtcgtggcccccatggtggaccagagcgagctggcctggaggctgctgagccggcgccacggggcacagctctgctacacgcccatgctgcatgcccaggtctttgtccgcgacgccaactaccggaaggagaacctgtactgcgaggtgtgccccgaggaccggcccctcatcgtgcagttctgtgccaatgacccggaggtgtttgttcaggcggctctcctggctcaggattactgtgacgccattgacctgaacttgggctgcccacagatgatagccaagagaggtcactatggcgcctttctgcaggacgagtgggacctgctccaaagaatgattttgctggcccacgagaaactctctgttcctgtcacgtgcaaaatccgtgtcttcccggagattgacaagaccgtgaggtacgcccagatgctggagaaggccggctgccagttgctgacggtgcacggacgcaccaaggagcagaaggggcccctgtcgggtgcagcgtcctgggagcatatcaaggctgtgcggaaggctgtggccatccctgtgtttgctaacgggaacatccagtgcctgcaggacgtggagcgctgcctccgggacacgggtgtgcagggcgtcatgagcgcagagggcaacctgcacaaccccgccctgttcgagggccggagccctgccgtgtgggagctggccgaggagtatctggacatcgtgcgggagcacccctgccccctgtcctacgtccgggcccacctcttcaagctgtggcaccacacgctgcaggtgcaccaggagctgcgagaggagctggccaaggtgaagaccctggagggcatcgctgctgtgagccaggagctgaagctgcggtgtcaggaggagatatccaggcaggagggagcgaagcccaccggcgacttgcccttccactggatctgccagccctacatccggccggggcccagggaggggagcaaggagaaggcaggtgcgcgcagcaagcgggccctggaggaagaggagggtggcacggaggtcctgtccaagaacaagcaaaagaagcagctgaggaacccccacaagaccttcgacccctctctgaagccaaaatatgcaaagtgtgaccagtgtggaaacccaaagggcaacagatgtgtgttcagcctgtgccgcggctgctgcaagaagcgagcctccaaagagactgcagactgcccaggtcacggattgctttttaaaaccaaattggagaagtctctggcctggaaagaggcccagcctgagctgcaggagcctcagccagcagcacctggaacaccaggtggcttctccgaagtcatgggcagtgccctggcctgaaggcccacaacccccacccccaggactgctgctggagcctggacacgtcctacttaagaaaatgccttttactcagggaatctcctgctacttaatgtggaaagacacgcccatgtcccccttcggcccactctgggggcctggaaatgctgcagtggggagcaggccccaggctggacctgccctgtcctcagcacgcgtgtgcaaaagtgaacaataaatcatttcaaagatgcgagagcccacagcctgtgaccactgccctctcagacgcagggaggcatgagccggggcaggtgcggttggggccagtgggggcttctgaacaacaggatacatctaaatgaaggcagcatctgggtagacaaaagtgggggcttaggtcccctccccacctcccctaggcgcctccataggcaagtggccaaagcctccgggagcttcggatgcctcacagccttggaagcaccgcctgcgaggccacagtggctgctgctgggggctgttgaatctga

SEQ ID NO: 504296 - DNA, 296 bp, Homo sapiens
tcacagggctcccgggtcttggacaaggatggcaagggttatatcagggcagaaaaactactgtcacgtgtcatggacaaatcttaggagaaaaaaatctaacaagatgagaaaaatgtaagatgagaaatggatcaagaaaacgcaagattattggatgggaaacgggacaatgtcaatctatggaaaaattcgtacagatgatgatctggcaaataggaaaacctatctttcaatcccctttttccccctctctaaaaaaatcaatatggaattctttaatctaaccttctggc

SEQ ID NO: 504297 - DNA, 190 bp, Homo sapiens
cacgtgtcgcaactcctgacctcaggtatcaccctgcttgcctcccaaagtgctggtgattacagtgtgtgggccacgcgcacctggcctaaattagtcctttctttttttttttttttgcaataaattctcgctttgttgcccaaactgaattgcattgcggcaatcctggcatcattgcacccccggt

SEQ ID NO: 504298 - DNA, 1924 bp, Homo sapiens
agcggggtggcggcgcggagccttgggcccggctgcggcccggcggcggccccggcgcggtgcgggcgttcgcggcgccccgggagctgcaggggccccgggcggcggcgaggccggagaggggcgggcccgggacaccggcacccggcgccctcggagccaaaggcgcgcggcggacacggcggggccctcgcgcgcctggagacgatgccaaagctgcagggcttcgagttctggagccgcaccctgcgaggggcccgccacgtcgtggcccccatggtggaccagagcgagctggcctggaggctgctgagccggcgccacggggcacagctctgctacacgcccatgctgcatgcccaggtctttgtccgcgacgccaactaccggaaggagaacctgtactgcgaggtgtgccccgaggaccggcccctcatcgtgcagttctgtgccaatgacccggaggtgtttgttcaggcggctctcctggctcaggattactgtgacgccattgacctgaacttgggctgcccacagatgatagccaagagaggtcactatggcgcctttctgcaggacgagtgggacctgctccaaagaatgattttgctggcccacgagaaactctctgttcctgtcacgtgcaaaatccgtgtcttcccggagattgacaagaccgtgaggtacgcccagatgctggagaaggccggctgccagttgctgacggtgcacggacgcaccaaggagcagaaggggcccctgtcgggtgcagcgtcctgggagcatatcaaggctgtgcggaaggctgtggccatccctgtgtttgctaacgggaacatccagtgcctgcaggacgtggagcgctgcctccgggacacgggtgtgcagggcgtcatgagcgcaggtgggcagtgcccaggacagcagccaggccccatgcacacggcctgataccaccgcccagagggcaacctgcacaaccccgccctgttcgagggccggagccctgccgtgtgggagctggccgaggagtatctggacatcgtgcgggagcacccctgccccctgtcctacgtccgggcccacctcttcaagctgtggcaccacacgctgcaggtgcaccaggagctgcgagaggagctggccaaggtgaagaccctggagggcatcgctgctgtgagccaggagctgaagctgcggtgtcaggaggagatatccaggcaggagggagcgaagcccaccggcgacttgcccttccactggatctgccagccctacatccggccggggcccagggaggggagcaaggagaaggcaggtgcgcgcagcaagcgggccctggaggaagaggagggtggcacggaggtcctgtccaagaacaagcaaaagaagcagctgaggaacccccacaagaccttcgacccctctctgaagccaaaatatgcaaagtgtgaccagtgtggaaacccaaagggcaacagatgtgtgttcagcctgtgccgcggctgctgcaagaagcgagcctccaaagagactgcagactgcccaggtcacggattgctttttaaaaccaaattggagaagtctctggcctggaaagaggcccagcctgagctgcaggagcctcagccagcagcacctggaacaccaggtggcttctccgaagtcatgggcagtgccctggcctgaaggcccacaacccccacccccaggactgctgctggagcctggacacgtcctacttaagaaaatgccttttactcagggaatctcctgctacttaatgtggaaagacacgcccatgtcccccttcggcccactctgggggcctggaaatgctgcagtggggagcaggccccaggctggacctgccctgtcctcagcacgcgtgtgcaaaagtgaacaataaatcatttcaaagatg

SEQ ID NO: 504299 - DNA, 1416 bp, Homo sapiens
agcggggtggcggcgcggagccttgggcccggctgcggcccggcggcggccccggcgcggtgcgggcgttcgcggcgccccgggagctgcaggggccccgggcggcggcgaggccggagaggggcgggcccgggacaccggcacccggcgccctcggagccaaaggcgcgcggcggacacggcggggccctcgcgcgcctggagacgatgccaaagctgcagggcttcgagttctggagccgcaccctgcgaggggcccgccacgtcgtggcccccatggtggaccagagcgagctggcctggaggctgctgagccggcgccacggggcacagctctgctacacgcccatgctgcatgcccaggtctttgtccgcgacgccaactaccggaaggagaacctgtactgcgaggtgtgccccgaggaccggcccctcatcgtgcagttctgtgccaatgacccggaggtgtttgttcaggcggctctcctggctcaggattactgtgacgccattgacctgaacttgggctgcccacagatgatagccaagagaggtcactatggcgcctttctgcaggacgagtgggacctgctccaaagaatgattttgctggcccacgagaaactctctgttcctgtcacgtgcaaaatccgtgtcttcccggagattgacaagaccgtgaggtacgcccagatgctggagaaggccggctgccagttgctgacggtgcacggacgcaccaaggagcagaaggggcccctgtcgggtgcagcgtcctgggagcatatcaaggctgtgcggaaggctgtggccatccctgtgtttgctaacgggaggaagaggagggtggcacggaggtcctgtccaagaacaagcaaaagaagcagctgaggaacccccacaagaccttcgacccctctctgaagccaaaatatgcaaagtgtgaccagtgtggaaacccaaagggcaacagatgtgtgttcagcctgtgccgcggctgctgcaagaagcgagcctccaaagagactgcagactgcccaggtcacggattgctttttaaaaccaaattggagaagtctctggcctggaaagaggcccagcctgagctgcaggagcctcagccagcagcacctggaacaccaggtggcttctccgaagtcatgggcagtgccctggcctgaaggcccacaacccccacccccaggactgctgctggagcctggacacgtcctacttaagaaaatgccttttactcagggaatctcctgctacttaatgtggaaagacacgcccatgtcccccttcggcccactctgggggcctggaaatgctgcagtggggagcaggccccaggctggacctgccctgtcctcagcacgcgtgtgcaaaagtgaacaataaatcatttcaaagatg

SEQ ID NO: 504300 - DNA, 961 bp, Homo sapiens
gttgcccaccgtattcacaaaccgtttgaacgtcctttttactgtggaccaaggaggccccagatatacgagctggtggcacagactgttgtcggagcggaaaaacttgttgtgctctcatcactgaggactgccggatccctgaaagtgccctgcgcgctgcctctcgccctaagccccggcccagcccgagcagcacccgagaacccctcctcagcagctctgagaacggcaatggtggccgagagacgtctccagctgatgcccggaccgagagaatcctcagtgacctccggcccttctgcagaccaggccccgagggccagctcgctgccacggcccttcggaaagtgactgtaccctgaagcagcattcatgttatccggacggaggaagacaatggggcggggcctccatcgagaatggggtaatggggtcccaaggcggccggccacaccgagcccagcacggacccaggaaatccaggagaacctgctcagcttggaggagaccatgaagcagctggaggagctaggaggaggaaccttcgccgcctgagacccctccttcgtctcagctataggggggaacatctgtacccccagcctaggctagcacattgaggttcccgacccaggaagagcctatgttgcaagaaggagagcgaatggggcgagaggacgtgagggaccacccccaccgacacagctgcactgcagcatctcacaccccgagggccgtagacggagagggagctgtgggccacgacatgggagagggcccagactcggggttactggcacccgtcatagacgacctcgtgccatctctccactcctgccctctgacttggggtatctcagggctccattctggagggcaccacgctgacccgggccatctcagatattgcctgtggggccacccctccaccccataccccgagtgccttcgctctgat

SEQ ID NO: 504301 - DNA, 320 bp, Homo sapiens
tcggcctcttatttagttacactggtttgcaggcctcttcaataaaggtggggctgtgcgtagagcacttggtcgatgcagcaatgatcaagacagactacataaattgtcccttcaaagaagagccgtccttctggtgtgtgagattgacagtatgcaggatgaattagtgctcgagagcaccacgtttgtgtcgttgcggataaagcctgcgaaggaggatgttgagtgtcccctggtggtagccagggaaggcctccctgagatggtggcagtcgcagctgctgctagccagaacctgctgtcatgcatcttacttt

SEQ ID NO: 504302 - DNA, 250 bp, Homo sapiens
ccatatacgtggagcccgaggacaggcgcgagcagtaacgcaacccctgtgagtccgacgagatgagtcatcagcaaaaactgccctgtgagcaagcgcggcgcacgactgtgcggcgccccttggatctggaccgtcgagatgatccctattgcccgtaacccaagcggccaactttggatgaaccctatcattatgactttaacacccaacacggctttcacgaatttgagcacagggaccgcggccg

SEQ ID NO: 504303 - DNA, 503 bp, Homo sapiens
tagatgcactttagcctcttgatgttagcagttgagtcctccctgcgcacaaaatacatttgtggtaatgaatgcccagaatctcactggcacacccaagagtagttaaactaaaattgctactaacacaacattgtagaattcgttgccttaatggatgtgatcttctaggcttactgtgtcttaacaagcagtcttatatatatttatcttgcccagaaagtacacttgtagaatttaacatttgctcctttctccaaacagattaaaggttatgcagctgaatgattctgtgtcccattttaaaggtccaggctatcccctagatttagattagttcctaaaaaatcttccagtctgaatcctgacaaatggatagctaaattaatttccactcctcttctctcttgcactgtttggtacattacagccaccattagccttaaaagctgcagcagccaaattcggtgacagtaacataaagcctgagcttaaaaaaaaaa

SEQ ID NO: 504304 - DNA, 433 bp, Homo sapiens
taatgcaaataaatcccactttagatcttacagctaactgtgtgccttagaaaccagataccttgcgcaagtggcctatcagctaatccagtgtcttgaagagccatcactccaagtcttacgtgaattttagtggcaaagagatctgattattttaagattacacaactctcgtgcaaaggctcagtcttatagagcttcattttttcccccatcgtctcattatttttgcttaccacagaaacataaggtatgtgggggcttatttaaaactgtatctaaatacagcataaaaacaatataataacatgaaagaatgcttccctgagttgaatgcaaaggacagattgggaacccatttaacatcatctacaggtagattttttggtgacctgagtgaaaagtttattttgagagaaagtatgtaaccaaa

SEQ ID NO: 504305 - DNA, 863 bp, Homo sapiens
tgccaagctagacgcctcaaactccagcatttaagcattaagtgcattggtacatttaggccactggatccagatttatattggcagttccatcgagggcaaaatgcaagtatattgtaacagaatgtataaatattgtgataaaacagtctatattggattaaaaaatgaattataacactaaagctgtacctcaaaggtttcaaataataatttgatgaaatattttatacaactctttgcaaaggatccgtctgtggctttgttatactctttgagggtggtctttttagaaaccatgatttccatggcctgtagtttaagtggtttggttggttgatttaatatttttttctcctaatctatgactttatatgttttttcttagtttagtaatagcatctttgatcctgtgcttagcatgttagggtcattatacctcaggaatagcaagctgttaagtaaccatactgaattaactatttaattacagtgagctcatctcttaaaaatctgttcaggtgtaaattccttatgagaaaacatgaaaaaagcacacttgatttatggcagagttgagctaaaaacatttataacatacttggctgggatgttaagccatcttttcaatgtactctgagaacaattaacattgtccagagatcatttatattacctcccaattgtattacccagaaccttgggagaaatccttagatggggcacacctgtgttcaacgtctttaaaatgccgtaattcctcggcaaggcacagagacatagtaatgctgtaatacagtggaccacttaaaacacataatttggggcgcgccttggccaacaacaaagtgtaaaggtcgcga

SEQ ID NO: 504306 - DNA, 171 bp, Homo sapiens
agctggaatgttcctcaagtacataatgcaggattttaattttaataagaagctggaagttgaacaaatgatatcatttaagacacatgcctgccttagggacctggtttttggcttcctgtttctggcttttataagggtaacgaatataatagccacccgacttgtacc

SEQ ID NO: 504307 - DNA, 193 bp, Homo sapiens
  misc_feature (119)..(119): n is a, c, g, or t
gctatgatgctagctactcaggaggctggggagagaggatcagttgaaccctgggaggtcacggttacagtgagccctgattgtgccactatactccagcctgggcaacagagtgagancctgtctgaaaaaaaaaaaattaccctgtgtactgcccgatgcaaataaaaatttagattaccaattccttgct

SEQ ID NO: 504308 - DNA, 1426 bp, Homo sapiens
  misc_feature (33)..(33): n is a, c, g, or t
  misc_feature (76)..(76): n is a, c, g, or t
  misc_feature (752)..(752): n is a, c, g, or t
  misc_feature (870)..(870): n is a, c, g, or t
aggtagatgttagtgttacggtgttatagaaanatagataactaccccctgggcggggagaccccacttgtggtgntttgttgcaccacacaaagcgggagccgcagccaccccagtcggaatagtaatatggttgggtagagacttttgtttgggttagtaaatacgattttttttataagtagaaagattggggggacaccccaccactgtataaatagagaaaaaattggggtgggtacgtattataatcatgtgatgggttggtagtattatatacaaagcgtccctgcatgaaagagtagtggtttatcttttcgctcacgagtgggttcccgcgtaaaaatatatattgttcttatcgacaaacaggggaatcaacaccgctgttgtgtgttgtagaggaaaacagtttttattagtatgtacttccaacaacacctttgtgtagtagtatcacgcgggggccccaccatgtggagacaacaacactgtgggagacctctcattgggctacattgggggggaaacatcgcgtttaatagggtgtaataaatgtgtcgtcgtggtggaagacctccccacatagcccccctttttaaaattatctgcccacacacattgtggagtgttatcacaggcgtcttcactccttctaacattgcacacacccacacgtttattttccatataatagagagcctctcccaccttggggaagacacactttgtagagacgccttgtctataanaaggggaaaaaaacaggtgtttataccccctctggggagagccacacaggagagacacatatcacaggggtttttggccttttggggagagacactttgagagagagggtataagagncctcacagggggtcatatagagcgcatttgtgtgcacacaggggccccgcggcgacagacacactgtgctatatacttttgtggaagagggagaggcgcacactgtgcaacacccttgtgtatatatatataggttatattataaacaaagtatatatacattgttgtgggcttcgtgggcggcacacacatgggctctcacacgcgctcgtgaaattccccacagcacactctcttggggagagttctcgagaggacactgtccggagtcacacttggagaggtgtcacagagagagtttcgagagagccacaccccttggccacaatatatggtggaaaaccccacttttgtatctataaaaatacacaccacaaagttatagccggggcgtgtgtggcacaggcgttctgtaaatcccacagctgtcttgggagaggctgaaggcacaggaagaatcacacttgaaaccctggagaggtggcggttgcaatgaggcaccagatcaagccacctgcaactccaagcctgggcaaccaaacgagacttcgtttca

SEQ ID NO: 504309 - DNA, 223 bp, Homo sapiens
ggaatccgacaggatgttggcgtaaacagcggtcattttatccatgcaattgtgtgcttcgtttggaaagcttgacgtgagtgtgtgcctttcttggtctgaggcattctcttgccggcagacaacttcttggatgtcccgacaccttgatcactgggggcggcttaggacggggtacccgaagcctccgaaatttcgtaaatccattggtccatagccttgt

SEQ ID NO: 504310 - DNA, 917 bp, Homo sapiens
  misc_feature (46)..(46): n is a, c, g, or t
  misc_feature (63)..(63): n is a, c, g, or t
  misc_feature (128)..(129): n is a, c, g, or t
  misc_feature (239)..(239): n is a, c, g, or t
  misc_feature (260)..(262): n is a, c, g, or t
  misc_feature (267)..(267): n is a, c, g, or t
  misc_feature (269)..(270): n is a, c, g, or t
  misc_feature (273)..(273): n is a, c, g, or t
  misc_feature (281)..(281): n is a, c, g, or t
  misc_feature (286)..(286): n is a, c, g, or t
  misc_feature (289)..(289): n is a, c, g, or t
  misc_feature (315)..(316): n is a, c, g, or t
  misc_feature (320)..(320): n is a, c, g, or t
  misc_feature (465)..(465): n is a, c, g, or t
  misc_feature (508)..(508): n is a, c, g, or t
  misc_feature (535)..(535): n is a, c, g, or t
  misc_feature (546)..(547): n is a, c, g, or t
  misc_feature (557)..(557): n is a, c, g, or t
  misc_feature (571)..(571): n is a, c, g, or t
  misc_feature (585)..(585): n is a, c, g, or t
  misc_feature (594)..(594): n is a, c, g, or t
  misc_feature (598)..(598): n is a, c, g, or t
  misc_feature (643)..(643): n is a, c, g, or t
  misc_feature (748)..(748): n is a, c, g, or t
  misc_feature (835)..(835): n is a, c, g, or t
gcaaacgggcaggctatattattatttcaggtaataagttggtganaattcaacgaagttgcntatcaaaacaataaggtgccatgctggggcaggggcactgccagctgcacaagccccaggcaaanntggtatttggtaatgggggctgtctctcctttgctctaggggagtccgctcatcctcgcccaagttgctttctttttctcccttgattttcctgttgccaggggtttgtntcatttgggctctgttttttnnnggggntnngtnggcgatgnttggngtnggctttctttccttatgttcttttanngccnggttttcccaaatccggttcttctttttctctgttgttttcttgttgccttctgctcctctttttctgttctttcctagtttcttgtttttttctccttcgttacccccttctcttcttggggggggtgtttctgcgaggttgtnctgtctttttgtttcacacagcctcaggggccttcggccagtngttctgcttcccattatttgtgtgtcntcacctctccnntgtctgcgcngtctccaggctganagatgcagcatgtnataattttnaganatgtacatccacatcttgatgaccagaaatggggatccacaaggnacatttcaaagttcttatccaaactagtctacctcccagttccacatcttaaaatcaacttgtatgcccttgtataaattaccccaaatcaagaaaacaaagacncagaaaactttctttcccttctaagttagtgacctcattgattttgtttcacagcttatggaagatggtggggtgacacttttggtnaacaggatgttggcaacaaagagaaaatatctctcctcagactccaccaactctaacctgccagcctgttagtacctgtgta

SEQ ID NO: 504311 - DNA, 236 bp, Homo sapiens
  misc_feature (3)..(3): n is a, c, g, or t
  misc_feature (9)..(9): n is a, c, g, or t
  misc_feature (39)..(39): n is a, c, g, or t
  misc_feature (61)..(62): n is a, c, g, or t
  misc_feature (69)..(69): n is a, c, g, or t
  misc_feature (80)..(80): n is a, c, g, or t
  misc_feature (90)..(90): n is a, c, g, or t
  misc_feature (92)..(92): n is a, c, g, or t
  misc_feature (94)..(94): n is a, c, g, or t
  misc_feature (133)..(133): n is a, c, g, or t
  misc_feature (213)..(214): n is a, c, g, or t
  misc_feature (219)..(219): n is a, c, g, or t
  misc_feature (226)..(226): n is a, c, g, or t
  misc_feature (233)..(234): n is a, c, g, or t
tgnttatantcagattttattttaaaagccatgctgttnaacaagaaaaagcacaaaaganntccagantcctggttcancattctgtancntnctcactttttcaaggtatctattttgtgcataaactaantgttaactattcatggaacagcaagccctgttaataagacttgaccaagctataagccacgtacatattcagtatgtgtnnttaantcctcanagacctnnat

SEQ ID NO: 504312 - DNA, 266 bp, Homo sapiens
tacgctatagatttacacaggcgcgcagtggtcctgcctgtaatcccagcacttcgggaggcgaagacgggcagatcacttgaggtcagaagctcaaagccaacatggtgattcaaaaaattagctgtctctactaaaaattcaaaaaattagccgggcctggtggtgcacacctgtagtcccagctactcgggaggctgaggaaggagaatcgcttgaacccttggggggcaagaaattgcagagagcccggggatggtgccacg

SEQ ID NO: 504313 - DNA, 366 bp, Homo sapiens
tggaatatttgtatagacaatcggagttatcttaagaataaaacccaactctaaaaatgaaattcatttatgtttcatgtatgccttattacacattgcctgaatataactttatacaacattttaaataattttatatatgaaacaaagtttgtttgcattaaaccatcagaaactaaatgtttcattatctcagccacccataaggacaatctgtggttgtgtgacatcaccatcgttcctgacactgaatttatatgttactaataagcaatcattttcttataataattcatacgtaagtactgaatggtaaaaaaatatgtcataccactaatacagtgaaaaaaataataggtgcagggt

SEQ ID NO: 504314 - DNA, 640 bp, Homo sapiens
  misc_feature (273)..(273): n is a, c, g, or t
gccatgatggggacgatttttgggccctcccccaccccctggtttccagaacccagaaaacgccagttttttctccataaccagcttggtttggggtggacccagttccggctggtagatatggttaggagaccctgcaaaacggtgaagggaatttatgctttgtcatgatgaagaacatgagaacctgtttgccctggttcgaagaatgttagaatatgttcccaccccaagaattcccttggatgaagccttgcagcctcccttctttgncttattaaaaaaaaaatgaaatggggacccgtggtcttcctatatacttctctagaaaagatttcttaaggctggggccggcccctaacccttttaatatttttggaacccttaaattattttggcccgttaaggggaaaaattggatgttttggctccaaagcataattaccctgttaagccaggatggtcttgataatgccttagaaaaattaaaattaatttttctttttggaattcccctttttaaaaccccttgaaaaatcccttggggcccgtgataaatgggattggtcttcccctttggccctggggggcccccctgaagggattttttttgggtaaaaggaaattttggctcctttta

SEQ ID NO: 504315 - DNA, 252 bp, Homo sapiens
tcccttcgtgtttgtgcatccgaggtgctggtggacagcgcggaggaggggtcctcgctgcggggggagtggcgtcagaagcgcgaacagagactgcgcaattccgggagctgcacctgatgcggaatgaagctcgtaaattacatcaccaggaagttgtggcagaagataaaagactaaaattaccctgcaactttggaaggcaaacaaagctcgttttggacgtgggaacctacaacggaacgacggacc

SEQ ID NO: 504316 - DNA, 259 bp, Homo sapiens
  misc_feature (219)..(219): n is a, c, g, or t
cttgtgtagaaggttggccgaactgcagggtgtcgcgccaaaacgcacatagaaaccggcttccacaacgcatgctggctcgaatggacgcacgatggcatctccatcacgtggggaaatctgaatcgcacggccaggccgtagttgcgaatgtcgatcacattcttgcttgccttcaaaccgtgcagcgctttctcaacagtgcggcgcgatttcggntaaccctctgcacccaaggtttcttttcttgcaacagggt

SEQ ID NO: 504317 - DNA, 890 bp, Homo sapiens
ggagagaactagtctcgagttttttatttatttttttccctcgtgctcagggatttaataacacaaatagtggcggaaagggcctcagcccagcccaccctcacctgtctttcccagcccacaaggggggacgactcagggcccagcaaaagcgatgctgaaaggggaacacagtccagagtccaaacagcaaaactgggggaaagcggctcggggtgggccaggaaccataaacatagtgtataggggccgggggctttcgtgcccgaagggtctcccgctgggaccaggacgccaggatagggacggggaaaccttcagtatagttcctcacaccacagcacattctcagaagaagtgaatgtggcgttcaattaaccttctttacaatagcccaaagttgggggagaatgaggcgtgttacccgtggggaccagaggggggcctccagggagctccaagcggggggctcaaaaacaattaggaccacacaaaaaacatgtacaaagagtggcaccacacctacagaagtatgttcccactgagccaagaagccagaaaagcgtgtaacagtggcccccacctagtgggagcatttgtgaagaatagcgccacagaggaggagtatcccccccacgagactaattaacaaatgttcttaccaacaagaaaacggtctagcaggaaatctctatgtctgccggcgaccaacacacaaccaacagggcgtgtaataaactgtacacaggcgacgagggagaaattgtagtaccttccgcggcgtaactactcttacccctcttcatgctctaacctacaataattccgacaccactcttggaggacaagaaccaacaacaaacagaggtcttaccatgctaacccataag

SEQ ID NO: 504318 - DNA, 125 bp, Homo sapiens
tgtctcgtctagaggatcccttgggctggggcgagagggagaacagtgcggagtgctccagctcctcatggtgcagatctgcgaggcacacatgacccgcagtgtccccaggtgacgcctcatta

SEQ ID NO: 504319 - DNA, 674 bp, Homo sapiens
tgagttgcatgtgagagtagaggaaaaacgctgttacagagtattttccagataaaaccgcccaacccaaaagccttcctgtcagccctagggttagcagacgagcttaaccaacatggcaaaaccctatctctactaaaaatacaaaaattagccgggcatggtggcaggcgcctgtaatcccagctacccaggaggctgaggcaggagaatcacttgaacccaggagacagaggttgcagtgagccgagatcgcgccactgcactccagcctgggcaacagtgtgagactctgtctcaaaaaaaataaaaatacaagatgcccaatgtaatttgagtttcaaatatataaggactgatttgtaatgtacgccccaggcagtaggtgagacatactaaaaacattttttgtttgttttctgaaactcagattccacctgagttttatctggcaactgtagttagcaacagccattggagggtgctcctggatcctcatgactgaatcaggcctggggtaggcttccccacccatgctcccaacctgtatcaccaaacagatcccactagaatgtggctcctaaggagatagggataaggctgctttggccagtctgtcccctttggtatgggtgccttggccagaggcctttggccctgcagatgcagcttcc

SEQ ID NO: 504320 - DNA, 395 bp, Homo sapiens
  misc_feature (361)..(361): n is a, c, g, or t
  misc_feature (379)..(379): n is a, c, g, or t
  misc_feature (389)..(389): n is a, c, g, or t
attctttacactgccggtttacactgtttctccaagacatcacagctgatatctcctggtgctatccccaaactgccactctaaactcttgaagtaaataaataatctttgctggcaggactctgctgaatctccttaggcactctctaatcagatatcctaggtcctcccaattcttagaccttttatacctgtttttctccttctgttattccatttagtttctcaattcatccaaaaccgtatccaggccatcaccaatcattctatatgacaaatgtttcttcttacatccccacaaatatcaccctttaccacaagacctcccttcagcttaatctctcccactctaggttcccangctgcccctaaatcccanttgaagcagncctgag

SEQ ID NO: 504321 - DNA, 413 bp, Homo sapiens
  misc_feature (4)..(4): n is a, c, g, or t
atgntggtggaccccaagcaccaccgccactttgttatccgcagaggccaggtcttgcgggagattgctgaagagtatggcggggtgatggtcagcttcccacgttttggcacacaaagcgacaaagtcaccctcaagggcgccaaggattgtgtggaggcagccaagaaacgcattcaggagatcattgaggacctggtaggcacttgggtgttcggggaggggttttcaccccccagtggccactcaccgaagccgtgtatgagtgttcgctcccccctgtagggaggtgactccctcatacagccctggaaggcttcagaaggggctttttggggctcgcttttttttcctcagcctgtttggcctccttcctgatagttggtgagaattctgcctgcgagaagccctta

SEQ ID NO: 504322 - DNA, 200 bp, Homo sapiens
acaatcgcggtaaatacaggatccgcatatggccgctaccctccggaagatggtgaagaaaattgagactcggccattcaacgcctccggccattcaacgcctccgggccattcaacgcctccggccattcaacgcctccggccattcaacgcctccgggccattcaacgcctccgcctccgggccattgaacgcctccg

SEQ ID NO: 504323 - DNA, 122 bp, Homo sapiens
aggctatctatgtgcctgctgatacttgactgaccctgcccctgctacatacgtttgcccatttggatgctgccactgtactgtcgcgtgccattgctagagctgggcatctatccagctgt

SEQ ID NO: 504324 - DNA, 385 bp, Homo sapiens
ttttacgccttatttctagatggttaccacaggctcgcggcacatggtatgccactgaagcgaaaatgtgtggttacaatccgggcttttgcaatacgtattgctacgtgaaatgtagggcatcatatcgccagataacgaaatttcacgatagttagtcgcaggccattgcaaataaagtcgttttctcccccgatttagccaagctgttgattttgcagcgagttgcaccggggcggattgggggtatcgctgggagtgtcgaaagtgcttcggagcattggaatccggcatgcgcatcatgttggacagcagcgtccacgaccttcccaacaaacgtcagttaccaaagccaaaaccggaagtcggttgacgttattcgatc

SEQ ID NO: 504325 - DNA, 125 bp, Homo sapiens
cgggccagtacggatgtgagggccagtacggatgttccctaagcagcaggcatacgcctaaggtctcggggcaattctgacgttaccaaacaggatccactactaaaatgccacatccgtacggg

SEQ ID NO: 504326 - DNA, 100 bp, Homo sapiens
actatcaatccccagctgtggaataaggctgttgttccttgcagcggatcctgatttggacacgcagcaatttgcaagtgtccccgttcctatattgaaa

SEQ ID NO: 504327 - DNA, 320 bp, Homo sapiens
  misc_feature (320)..(320): n is a, c, g, or t
agttcgatggatactctcgttcttccgagccagctcgtcatttgggcccggatgtctgccattgattcttggcgaggtcctgctgatttgcgggcatctaactccatcggtcaaaccatgatctgggccctctgggcttgtaggccttttacttcctcttcgctggttcttcttcatgaagagcagtctcctccttgagagccttcgatctctgtctccagctgcggtcgtgtgatataggtgtcatcaatgaccttggtgagcccatggatgtctttctccacagactggcgcatggccagctctgtctcatacttgan

SEQ ID NO: 504328 - DNA, 435 bp, Homo sapiens
ttcgggcccaaggtcccccttttcccccccgtggggagagctggccctgaacaatttggttccgttagtgtccttggcaggtggcttcagccccagagttgttttggttccctggctccaggggtcccaggaattgccccccaaaaagtactttatttgggtttcccggcaggagcccaaccagggcccccccccttttttttttaccagcattttgggcgtggcagcccaggattggaaaaagggggaccccttttcctgcatggtgggccccgaggcccttccgttggcctttccacaaaagacctttgaccgcttggggggttaacccccccatgtcaatgtgtttgttgtcatggcggaggtggacggcccctgttttttaaccgcccgcctgtccccccccctgaattaactccatgttccccccagcca

SEQ ID NO: 504329 - DNA, 767 bp, Homo sapiens
tggtacaaaatacatagcggtggtggataatgtctggtgtccagggttcagcgcagaaaacactatactcttctggggctcagggacagtctggcttgtcccccagccagcagtcggggtgctccactggcgagagaacgcagggtagaaagacgcaagagccgcccagttgagggcgtacacggactccccagggaatgcggtacccggatagaaagaatcgcagaagaatgggcagaaagattagaagacgcaccaccacggcctcaccaggggagcaccgccccaatgcatagaggtagaagctctgtacgcggggtctcgcttgggaagaagatagaccgactgtgtagaacccaagacgggtttgttgtgtagatcgcccaccggccaatagatagactggcctctggtgtttgtaaaacgctgggcgagatcatcccccaccatgtacagacaggctgggcggccaggacctgacttgtgcaacagggttcccagggggatgctattcgccggaagttccccacaacagctgatggaccgatgagagagactgacagaaagacggcaaaggagacattagtaggctccagacattctccccggaacaaggcccttcacctccgaacaaaggtgaacccagaccccggtggcacggtcaccgacgctgcagggtcggcctaggaacccttgcgatgaaggcctgacgatgccctgcccccccgtgtggccggaagctcggtgcataaagagtggggcccctc

SEQ ID NO: 504330 - DNA, 293 bp, Homo sapiens
  misc_feature (70)..(70): n is a, c, g, or t
  misc_feature (252)..(252): n is a, c, g, or t
  misc_feature (269)..(269): n is a, c, g, or t
gatcatcaccgggatcacttccgcgccgtgatacttgacgccgccgaggttgatgccgatgttgcgccanccgcgcgccacaccatgtagccggcgaggatgaacatcacgacgtagacggccgggcccgcgaagtcgatgaacttcttgatcgtctccatcccgttccagaacacgaacgcctgcagcacccacagcagcatgaagccggcccacccgaccgccgacagcccgagggaagccgtagcggtnggacattcgcatacggnagccatttttggggaagaattttt

SEQ ID NO: 504331 - DNA, 195 bp, Homo sapiens
gtacgatcgagcagaggagattgttataaagatggtattgtttatcctatatggctgtccattgatcactacttatcacggttacggttggtgtcggaaattagactgccgggggcttccaccggtcttgggctcttctgcaagaggctgcggaggccctggagccttgaggtgtggaactcgtacgcttccgtg

SEQ ID NO: 504332 - DNA, 794 bp, Homo sapiens
agcataatagtccttgtagggtagattatatgtcatgtccagttcatttctcttagaggtgattacctctaggcatcagccttagtccatcccatgttggtatgcaatttgagccggcaaggctcgtatcgccaatagtctatatacattttgtctccatttgttctgtgcttgacagagtccatgatagaactgtggtctagttgagttactattcctggagtagctactgtatttgctccttggaaagttagagtttctaaagttgcacctaaggaatctgtcacattattcttgtcagaatcatggtcttggttttcgttttcaaccagatattccttctgatacggacttgaaaagttaggtgtatggtgacctgtgtttcagcaaatacaaaggtactactacaaatactgtatagttatatagcttaatgagatttccagaccccgcccttttggtccggggaggtggggacgaagctagtcgggggcgggcgacttgtaatgctgatgatgtggcaaattggggcggctcgatgcttggaagacagcccgtgttcgtgaacacacagtggatgtactgcacaagattatatcctggtaaacctcgccttggaattggtctcaacgagactctctctagaaagaccaccagtgttccccttgatccctagctttctcaaacctttttctgacaccgcgggtgtgcggactggcaaggcgcagggccgggttcaaaaagcggtgttgggacgttatgcgccagaagggaacccggaacattttccgcgg

SEQ ID NO: 504333 - DNA, 145 bp, Homo sapiens
cccgctcggggctgaggcgggcggtcgtctgccccggctcgcgctcgaccccgccggcgctggccctgtggcgtgaggagtcgatcgagacgacggtgatcgtcgacaagcgctcggcggccttctacgccctcggcgcggcgca

SEQ ID NO: 504334 - DNA, 139 bp, Homo sapiens
tacaacctgtatcagtgctggtgcctgctgtccctcgcgcctgggcgtctgttgtgctgatctggcgccactgctgtcctgctggcttccgctgacgcagcctgggtgtaccaacgtgtttgctgcacgggcaggcccc

SEQ ID NO: 504335 - DNA, 356 bp, Homo sapiens
ggcactagccaggggaggggttccctcctgctagctgtggcaggagccacttctatggtgaccttgttgctggcggtgcctatcactgtcctgactgtgctggccttagtgccccaggatcagggaagactggttacagatactgccggccccggcgcacacgcccatcaaggactggggtttaagaacctgccagaggaggagccagaaacatatctaagcctcgggctcccaactgcccacctaataagcgctccgctgaaggggctggggctaggctgggagactactaaggaacatgcgtttttgacgagcgggacgcagttctaggacgcccaggggctggcgctcccgcc

SEQ ID NO: 504336 - DNA, 334 bp, Homo sapiens
  misc_feature (91)..(91): n is a, c, g, or t
atttaccttcactccagataatagcatctctgcatccatatactagtacatattccaacacatctatactcaactactgtacatcaatatntctcctcactgcaacaactctaagcagactatgttattatttcaaattcccatactgacacatataaatgctattatataggatgggggagctaacaacggacattcatgtttagctctaagccctacactgtctcaaaatgtggattgcgactttttacaaagtcttcttttagaatgtttaaacgtataaaaagtaatttctggccgggcacggtggctcacacctgcaatcccagcactt

SEQ ID NO: 504337 - DNA, 246 bp, Homo sapiens
gcttgtgggacaccactgtgatatttagagagcttgcaattacttcaagttttttgaaagacacctgggaaattcatcgcaaaaagatcatcacctaggcacatcgtcgtcaggttatccaaagttaagatgaaggaaagaatcttaagagctgtgagacggaagcaccacgtaacctataaaggaaaacctatcatattaacagcagatttctcagcagaaaccctacatgccagaagggattgg

SEQ ID NO: 504338 - DNA, 2066 bp, Homo sapiens
  misc_feature (1291)..(1291): n is a, c, g, or t
  misc_feature (1359)..(1359): n is a, c, g, or t
  misc_feature (1465)..(1465): n is a, c, g, or t
  misc_feature (2015)..(2015): n is a, c, g, or t
  misc_feature (2066)..(2066): n is a, c, g, or t
ggctcctggtatagagaggaaggcaatcgggaaggcgtgagcccgacagtaaccagagagtcacagcaagttgctctccgtggcagagatcaggaacggcaggcgtggaacgaggagcacgattggtacattgactgaggcatgcaggacacacccgcgtacgatatccgatcgcatggcttgcttgcctgtcttggctgagatgtcatcaagatgtggcggggcgatgtgtataagtgcattgacttttcattagagattgggtgcgttggacaactaaggcacaaactaagggcgtataccatgtaatagttaggtcaaaacagggctaaggactagagcgaaagacgcggaacgaggattcgtagttagtacgcacacagggtggacaagaggtcaccggaatgtcttcgtcaaagtggttgctcgtgagaatgcaagtctagagaagggcaccattttgcttcacaaaacaggtgaggggagaacaggggaatgcctcccaaaagactgtgtgaacctgcgcttaaggggcccttgactattgcgcgtcaacacattgataaatacacccctggacaacctactgacttgagaagcttgagcctgagttggtgacacgcattcagcgctcgtggtcaggggaatgcttaatgggtaccctttgggagaatacccgacaccgttacacaggacccagtccatgtggggacttttccgaagcaccgccggtatggaagaagaggaggggtgtggagtgacgtacagttgggtggtggtcacccagtctgtagacagacattcgggtcaaaatggtcgggttgtatatacgttgcaatacacgggtggcgaaagagggcctccgaagaaacgggttatgcccacggcacatttgcactcttgggtcaagcggtagtggaagcgggtcattgctatacgcattggtgcaaccctgtgccctagggttgtaatgtggtctcccttgttttgtaggacatgtagggacccccgttccaactggggacgtggaccctaacaacgggatgtgccgtgcgtgtccacggtgggatggtcccggaatatgtacgttcccacattggcgatatggaaagttgcaaaaaatatccaatgttgagacaagtgtgcatgtgacagagaccgttggaaaataacttgtatagacattataacaactccaacggacgcgggcccatacggagatatgtggtgggcaccccaagcggagtcacactaacaacccgtggtcaacctctcccctgtgaaatgaggnggaacaccgacaacaatcactgggagtcatgggcgcagcggacaccacagccaaggatataacaatgnttgcggatcgaacacacaatcgagagaggtggtggggctgccccaccaaaataaatgagaggcgaacgtgcgagacaaacacaacccacgcgcaccatagtagganagcaatagacgggaggcccagctatgagatctacacacaagagaagttagcgactggacgaggcgggcacagacaacgtagcagctagcatcgactagcgacacacgactaggggacaccaagagagcaccacggaaagagcaacaccacggggggcgaggaggacacccaacaaacacgggacgcgccgacaaagtagccaacaacaccggaggggatgaacaagcgcacgcaaacggcggaacacgactagacgcctaacaacacggggggaaacgtggtgcagcccacaaccccgagtgacatagacttgcacaagaaaaaagaagtatcgtacacggacggcgagcagtcagacaacactatccagcgcgacacccgtgcgtagacagccaagcacggcacgcgacgctcactagagatgaacggttagacggacgcaagatcacgagtaaagacagcagtcgacgcagcgcagacgcgtacgcacagcccaccagctacgtaccggaaccccagccagaacagacgaacgcacgacacagacaancagcagcagcgaaagagtgaaatgacagcactagtcaatcaactgcaagan

SEQ ID NO: 504339 - DNA, 970 bp, Homo sapiens
  misc_feature (178)..(178): n is a, c, g, or t
gtacgacgatcagtgccggattggcctcaaaaaaatccgcgcgatcgtccctcgggggtccctccccaccaagagacgcacacgacggggtaatctcgggcatgggcctaaaaaacgttgcaagaaactcggcaaaactggggggccacgacaccccccaggccacgtggcccccccngggggcccccgcccccccgcatatccccccgcctcccccctatggggggccccagcgcccaagcaaaaaaacaatcctcggttcggtgacgaaaagggctggcccgctgcgttccaactgcagcaagccgcctatacctcttcaatttgctggcgaccccccccctcggtaaaggggctccctccccggcccccagcggaagaagctgttcggagagtaatccaccaccttgggcgacacacatcggggtcttggaacaaggaaacacaagccaccaacggggagggtggcaaccacaaaaccagagggaccaaaagaggccttcttggcgagcggccacaaaacacgcaacagcgtcgccatcagaagatccccacaaaggcggcgaacaaacagaaatattgcatgcccctcgtagaagcccgcccccccactctcctataacacgggggctggttaggacaggccgcgttctcacagaccttggtattgtctccaaggagcgcactccaactatagagtcaagattgaaattcacaagccaggcgtttccaattagaatagacacacagctcttggctagatccactctctcacaacagaaagccaacagaacagtatcaatgcggcgcaccacgcatcgagcgagttctttgtacagtggcggcggcaccagttttcaaacagataagatgtcttcaaacccagcctctttgtgcgggaccgacagagcccccaaagtttgccacgaattttggagccccgttaaacaaattacaaagaaacaaaaca

SEQ ID NO: 504340 - DNA, 105 bp, Homo sapiens
gagttaagggctaccagaaacgggaggccaccgaagccctgttgcaagtgaggacaaagtgtgggaaggcgtgagggtctgcagtccgggttggccttggattgg

SEQ ID NO: 504341 - DNA, 129 bp, Homo sapiens
ttctgcacatggagccatcatttatttagcacctttgttaaacagaaaggggtctgtcctgcgtgtgcagtctttgcatttaaaattatgcaaattcttcacgcacaaaatggccacatatggctatca

SEQ ID NO: 504342 - DNA, 423 bp, Homo sapiens
  misc_feature (423)..(423): n is a, c, g, or t
tagcttttcagatacaacttaagctgattccccatatgtcaaaatggactgctgatgaatgaatgcttttggtacatattcttgtagtaattacttgtatctttgtgaattttctattaactttaaaaaaattcaaagctattacaaaggaaatatttaaagagcgacgataaaggcaaaagaccctgttttgttttctaaatgtcacagttctatacatctttgcattggatgaactgctatttctttttaatatgcttatgtaattttgttcatgtatgtatgcatatagatttttatatctctcagccttatgtaatttctacgcagttttctgaacaatgacttttaagttacttcttacgtctctatttctaatacgctgatttaccataacagagtatctgccggttttctgtggcn

SEQ ID NO: 504343 - DNA, 355 bp, Homo sapiens
acttgggtgaaacaccccaggtgggtcaccagacaccttatacaggagcatttctactggcatcaggtgggtgcccctcaaggacagagatcccagaggaaggagtggggtcccatctttgctgttctccagcaccctctggtgacatcttcaggtgtgggagggacccagataaatagggcttgaagtgaatccccagcaaaccacagcagccctacagaagaggtacctgactgtcgaaagaaaaacagaaagcaacaacaacatcaaccaaaaagtccccacggaaaacctcatcttaaaggtcagcagccttcaaaggttcaaattgaggacaaattccttggaagatgag

SEQ ID NO: 504344 - DNA, 302 bp, Homo sapiens
ctatgtcaatccgttcacgtgcagttccgtgacacatgttgaactgtgcctcctggtattcgactaggttcataaactttgatgacacggttcctgtgtctcagtaaggcgtgtatggcaaggtcatttccatacagatctgggtccagatgtccatgttccacaaatgtgtgcaagcttgacagtagacccttgccaatagacaccttgcagcctggataagggcatagtgtatgttagtgcccataagtggcttcgatatgatgtggttataaggcccaacaatacattgaacaagctcg

SEQ ID NO: 504345 - DNA, 331 bp, Homo sapiens
  misc_feature (32)..(32): n is a, c, g, or t
  misc_feature (105)..(105): n is a, c, g, or t
gacgtcaaatctaggggaaaaagcaaatactnaatagtaaaatttggccgggcacagtggctcacgcctgtaatcccaacactttgggaggccgaggcgggccgntcacgaggtcaggagatcaaggccatcctggctaacacggtgaaaccctgtctctactaaaaatacaaaaaaatattagctgggcgtaggtggtgcacacctgtagtcccagctactagggaggctgaggcaggagaatggtgtaaaacccaggaggcagagcttgcagtgagccgagatcgcgccacggcactccagcctgggagacagagcaagactccgtctc

SEQ ID NO: 504346 - DNA, 6067 bp, Homo sapiens
gacggggtttcaccatgttggtcaggctggtctcaaactcctgacctcaagccatccgcccgcctcggcctcccaaagggctgggattacaggcgtgagccagcgctcccggccctgacctcattttttttttttctatttttaaaatagggattctagttctgttgcctgggctggagtgccgtggcgccatctcggctcaccgcaatctctgccttccggattcaagctattctcttgcctctgcctccggagggactgggactacaggcgcgcgccaccatgcccggctaatttttgtatttttagtagagacggggtttcaccatgttggccaggctggtctcgaactcctgacctcaggtgatccacctgcctcggccttccgaagtgctgggattacaggcatgagccactgcgcccggccctgacctcattatttctacccaccccctcccccaccactaccaccatcttcatctccagcctcagagatgcaaactcctggaccgcctgcccctttcctcagataaaccaaggtcgtaagttcaggctccgcctccccgcagggcctccccaaggtcacccgcttctttcctcgctcagctccttggtggcgttgtccgcgtgcccctccacagcggggccggcgctctaggctgcagcgggccgttcacacagcctcatcatctcgctggtttccggtgctcggcggctactctagccctcagccgggccctgggactctatcccctaaggccggttctctatggtcgacatcgcccctttgtcccgaatttcctccgggaggacgctctggtgggatccaagcacttcccccgctgcgtctgtggtcgcttttaggtgcaactggagaaggcactgaagccctacgagattcacaccgtcttcggtctcctggggtcggcgccgagtgggaggatggcggaagtaagtatgaaggtgcccttccctcccgccgctgttctctatggtctcttccttcagcgacgggaaagggggtcctgacgcctgcgcggaaccgggctgggcgctcgtcgcgtagtgggtgggggcgcagggagcgggagccgccgccgccgccgccgccgccggagctaacctcggggaccgagatgcaggtgggaccggaaccggaacccccctcttcaagtaccttttccctctccgcgacccggccctggcgcccgagaggattcctgggtgggggtgggcgtggagggccgggggctggagaggcactcggccccggagagtgcagcagacagggctggtcccgaggtggatgcggccccggaaaatgggcggctggggggtgtccagggagtagggtcggatcggagtatatggaccaccgggcccggagggtccgagccgagagcggagcctgcaccctccacctcccgcccttcgggaaatatcagaactgagccaggaggcaggtgcaccgggaaaatgtgtctgagtcctgcttggcagaagagaaactgagtcaccagcttaggagtcgcagggtcagcgggcctgaagggggctgggtctgtctgcggtgcggaggattgggtgggcctgtgtgagccgaggtggccgctggctggagattggtttgcacttcttggctgggttcccccgtgctccatgactcctgcatctcctgattgtttctcgttggtttggagttgtccctgcggttggagccatctgagcttgtagggtcgaggcccaggaggaaggggagggttcaccgacttacagcctggctgtaggtttgaacaggagtctgaggtcgctgagggtttggggaggctttcctgagctgctctggccccagtcctggggctgtcaccttccagtattgcgtggcgggaggagcgctaacaagagccaagggttgtaaattccacacccagctctgccactttctagttgtaagaccttgagagggctcctcctttctctaatttctattttagaaaattggaacaataatattcttctcccacatgaagatagtaacaatggcagtcgttcagcggatgcttactttgcgttcagcgctgacataccccattccatgtaattctctcaacatttcgaggggagggatcattagctttgtttaacagatagaaaaacggaggctcagagaggacgtggaatttgttcaagataacatcgctcataaggtggctggactgggtgctcataaggtggtttgagccctggtctgactcaagtccatggccttaaccagaaggctaacctgcctttagggcatactccccagtgggagaagaggaaggtgaaaaatcctagggccccagctctccctgtgatgttttgtttacgtgaggccagcaaagacttgacctgagccaacccagtttctcctctggggcccctgcggcctctggccccagactgaagggataccaaagaagtgggctgtagctatttcacatctccttcacgcagtgcgtgggtgctggactctggggtcagctttcaagacaattactgttttggtccatcatgcatccatcctcattaatgaatcggccccctccaaagagttggaccctaagatgcgtgaggcaggctctctaaggtctagaatcccagctcctctctagccccctgcgagctggggcggtgaggtgctatggctgaggctggcccagccgggccctggggacagggactatgaagtggggaaaacagtagacttggagttctgaaacttttctgagcttcggtttcctcatctgttcgagaggtctttgaaacctctcagggaaaggtaagataaccaagtgggagcctctagaatggctcatgggaagtgtgacatgaatattggaggatccgatgtagagggggggtgatctggaaaagttcccttttttagggggaaggtgctccaaagccctctactgctggatccaaagctaaggaaagtgggggcaaatgtggcaggctcggggcaggttagacgctggggagccagttggctggggcctgcagggtgccaggatctgggagagggaagggaggtgttgggctcccttccccattgctctctgcggagtctgaagtagggtcggacgtctctggctgggggtgggatgcagcctccggtgcgccctcagcagtgaccctcgtgtgtgcctctctcttcctttcctgctgccgcccacccctcgtcttctggctgcctccctctttgtgccccacaggctccccctctccacctcctggggcccatcatgaatggtgccccttccccagaggacggggcctccccctcgtctcccccgctgcccccacccccgccccctagttggcgggagttctgtgagtcccacgcccgggctgcggctctggactttgcccgccgttttcgcctctacctggcctcccacccccaatatgcggggcccggggccgaggctgccttctcccgccgttttgctgagctcttcctgcagcactttgaagccgaggtggcccgggcctctggctccctgtcgccacccatcctggctcccctgagccctggtgcggagatttcgccacatgacctgtcccttgagagctgcagggtgggtgggcccctggctgtgctgggcccttctcgatcatctgaggacctggccggccccctcccttcctcagtctcttcctcctctacaacctcctccaagccgaagctcaagaagcgcttttccctgcgttcagtgggtcgctctgtccgaggctcagtccgtggcatcctgcagtggcgggggaccgttgaccctccctcctccgctgggcccctggagacctcgtcaggccccccagtcttaggtggaaacagcaactccaactcctctggcggggctgggaccgttggtaggggactggtcagtgatggaacgtcccctggggaaagatggactcaccgttttgagaggctgagactcagtcggggagggggcgccttgaaggatggagcagggatggtgcagagggaagagctgctgagtttcatgggggctgaggaggcagcccctgacccagccggagtgggccggggaggaggggtggctgggcctccttcagggggaggagggcagcctcagtggcagaagtgtcgcctgctgcttcgaagtgaaggagaaggaggaggaggaagtcgcctggagttctttgtaccacccaaggcctctcggccccgactcagcatcccctgctcttctatcacagacgtccggacaaccacagccctggagatgcctgaccgggagaacacgtttgtggttaaggtggaaggtccatccgagtatatcatggagacagtggatgcccagcatgtgaaggcctgggtgtctgacatccaagaatgcctgagcccaggaccctgccctgctaccagtccccgccccatgaccctccctctggcccctgggacctcattccttacaagggagaacacagacagcctggagctgtcctgcctgaatcactcggagagtctacccagccaggacctgctgcttggacccagcgagagcaatgaccgcctgtcgcagggggcatatgggggcctctcagaccgcccctcggcatccatctcccccagctctgcctccattgccgcctcccattttgactcgatggaactgcttcccccagagttgcccccccgcatccccattgaagagggacccccagcagggacagttcatcccctctcagccccctaccctcccttggacactccggaaacagccacagggtccttcctgttccagggggagccagagggcggtgagggggaccagcccctctcagggtatccttggttccacgggatgctctctcggctcaaggctgcacagttggtgctgactggcggcactggctcccacggtgtcttcctggtgcgccagagtgagacaaggcggggtgaatacgtcctcaccttcaacttccagggcaaggccaagcacctgcgtttgtcgctgaacgaggagggtcagtgccgggtccagcacctgtggttccagtccattttcgatatgctcgagcacttccgggtgcaccccatccctttggagtcgggaggctccagtgatgttgtccttgtcagctatgtcccatcctcccagcgacagcagggccgggagcaggctgggagccatgcgggggtgtgcgagggagatggatgccaccccgatgcctcctgcaccctcatgcccttcggagcgagtgactgtgtaaccgaccacctcccatgacccaccccagccccctgaacccccttcatggacagatcccccacagcctggggcagaagaggcgtcgagggcgccagaagtggcggcagcagcagccgcagcagccaaagagaggcaagagaaagagaaagcgggcggtggaggggtcccggaagagctggtccccgtggttgagctggtccccgtggttgaattggaagaggccatagccccaggctcagaggcccagggcgctgggtctggtggggacgcgggggtgcccccaatggtgcagctgcagcagtcaccactagggggtgatggagaggaagggggccaccccagggccattaacaaccagtactccttcgtgtgagccaaccccacccgctccaccctttttaaaccccccagccctgctcgtgagattgggctgggtagggacagaggaggccgaaatccctcccccatgcttcctgacccttgttggccaagggcatctttgatggtacaagcagaggctcgggagaggctcccgtcacacactacaggtcccctccccagggcaggggatttgggctccatgagctccttgaggggctcttctggtcagccccaccctgggggccatttccccattaactacccccagcccgaggcagggtgagggggaagggctgtcagttacattaaggtggttgttgttgttgttttaaacaaaatggagaagcataaataaataaaaaggtttatctcggttcaaaaaaaaaagtggaccaaaacag

SEQ ID NO: 504347 - DNA, 594 bp, Homo sapiens
ttcaatcgtacggtgtctgtgacacatgatctgagacctgatgtgtgcggtattttgtgtgaggtagtgcttggtgtgccctgctaattgtgtgtcagtggtgtggtcgactcacttatggggtgatgtggtatggtcatgaggtctggcccagggccattaacaaccagtactccttcgtgtgagccaaccccacccgctccaccctttttaaaccccccagccctgctcgtgagattgggctgggtagggacagaggaggccgaaatccctcccccatgcttcctgacccttgttggccaagggcatctttgatggtacaagcagaggctcgggagaggctcccgtcacacactacaggtcccctccccagggcaggggatttgggctccatgagctccttgaggggctcttctggtcagccccaccctgggggccatttccccattaactacccccagcccgaggcagggtgagggggaagggctgtcagttacattaaggtggttgttgttgttgttttaaacaaaatggagaagcataaataaataaaaaggtttatctcggttcaaaaaaaaaagtggaccaaaacag

SEQ ID NO: 504348 - DNA, 549 bp, Homo sapiens
ctgggagtttcaaaacacaccccgtggtctcacaccgaggcgaagaacccccgttccacagagtgtcccgggggggaacacccactccccactcccgcacacaccagggggtcccccccccgcgaggggagcgttctcccccccacacgcgcacacaagcgggagggcgccacccgcgggggaacgcccgtaagagcggcacaccacggcgttggggagaaacatttccccccccctgcggccgtgatggaaccaccggcgcacatatcagggcgtgctcgcaacaacgcgcgattgtgaggcgtgcccttccgggaccattgagagcccctcggtaggcgcccgccagaatgagcgcacaccaatgaccccaaggggccccttcaacccctagatccccctagaaagaaaggcggcatgggggccggggccaaggccccccgccgaagttttccccgcggggccccacaaaaacgccgcgtgtatgcacacacccttgggggcacagcgcctcccacacacacacacaaaaacagagagaaaaacaaa

SEQ ID NO: 504349 - DNA, 358 bp, Homo sapiens
ccctgaaagaaggctggcagaacgcaagtgccttttttccctgtgggaagaaagatcaagtgacatattattttttcctggttgtcccttaatgggctgagtaaaaagcttgaaaactcagactttcggttttggttttgcccctcattggttatgaggaggcccaaagcaggtaagttccccttcctggccttactttcctgatgtgtaatacggaattacttcccagtagcatgccagtataagccccccccagtagatacaactatgatgcccttccatgagttggtatttttagttctaactgctaaatttgttctctttacgggccagatttttaataaagtgcttggtttta

SEQ ID NO: 504350 - DNA, 3992 bp, Homo sapiens
gacggggtttcaccatgttggtcaggctggtctcaaactcctgacctcaagccatccgcccgcctcggcctcccaaagggctgggattacaggcgtgagccagcgctcccggccctgacctcattttttttttttctatttttaaaatagggattctagttctgttgcctgggctggagtgccgtggcgccatctcggctcaccgcaatctctgccttccggattcaagctattctcttgcctctgcctccggagggactgggactacaggcgcgcgccaccatgcccggctaatttttgtatttttagtagagacggggtttcaccatgttggccaggctggtctcgaactcctgacctcaggtgatccacctgcctcggccttccgaagtgctgggattacaggcatgagccactgcgcccggccctgacctcattatttctacccaccccctcccccaccactaccaccatcttcatctccagcctcagagatgcaaactcctggaccgcctgcccctttcctcagataaaccaaggtcgtaagttcaggctccgcctccccgcagggcctccccaaggtcacccgcttctttcctcgctcagctccttggtggcgttgtccgcgtgcccctccacagcggggccggcgctctaggctgcagcgggccgttcacacagcctcatcatctcgctggtttccggtgctcggcggctactctagccctcagccgggccctgggactctatcccctaaggccggttctctatggtcgacatcgcccctttgtcccgaatttcctccgggaggacgctctggtgggatccaagcacttcccccgctgcgtctgtggtcgcttttaggtgcaactggagaaggcactgaagccctacgagattcacaccgtcttcggtctcctggggtcggcgccgagtgggaggatggcggaagtaagtatgaaggtgcccttccctcccgccgctgttctctatggtctcttccttcagcgacgggaaagggggtcctgacgcctgcgcggaaccgggctgggcgctcgtcgcgtagtgggtgggggcgcagggagcgggagccgccgccgccgccggagctaacctcggggaccgagatctgctgccgcccacccctcgtcttctggctgcctccctctttgtgccccacaggctccccctctccacctcctggggcccatcatgaatggtgccccttccccagaggacggggcctccccctcgtctcccccgctgcccccacccccgccccctagttggcgggagttctgtgagtcccacgcccgggctgcggctctggactttgcccgccgttttcgcctctacctggcctcccacccccaatatgcggggcccggggccgaggctgccttctcccgccgttttgctgagctcttcctgcagcactttgaagccgaggtggcccgggcctctggctccctgtcgccacccatcctggctcccctgagccctggtgcggagatttcgccacatgacctgtcccttgagagctgcagggtgggtgggcccctggctgtgctgggcccttctcgatcatctgaggacctggccggccccctcccttcctcagtctcttcctcctctacaacctcctccaagccgaagctcaagaagcgcttttccctgcgttcagtgggtcgctctgtccgaggctcagtccgtggcatcctgcagtggcgggggaccgttgaccctccctcctccgctgggcccctggagacctcgtcaggccccccagtcttaggtggaaacagcaactccaactcctctggcggggctgggaccgttggtaggggactggtcagtgatggaacgtcccctggggaaagatggactcaccgttttgagaggctgagactcagtcggggagggggcgccttgaaggatggagcagggatggtgcagagggaagagctgctgagtttcatgggggctgaggaggcagcccctgacccagccggagtgggccggggaggaggggtggctgggcctccttcagggggaggagggcagcctcagtggcagaagtgtcgcctgctgcttcgaagtgaaggagaaggaggaggaggaagtcgcctggagttctttgtaccacccaaggcctctcggccccgactcagcatcccctgctcttctatcacagacgtccggacaaccacagccctggagatgcctgaccgggagaacacgtttgtggttaaggtggaaggtccatccgagtatatcatggagacagtggatgcccagcatgtgaaggcctgggtgtctgacatccaagaatgcctgagcccaggaccctgccctgctaccagtccccgccccatgaccctccctctggcccctgggacctcattccttacaagggagaacacagacagcctggagctgtcctgcctgaatcactcggagagtctacccagccaggacctgctgcttggacccagcgagagcaatgaccgcctgtcgcagggggcatatgggggcctctcagaccgcccctcggcatccatctcccccagctctgcctccattgccgcctcccattttgactcgatggaactgcttcccccagagttgcccccccgcatccccattgaagagggacccccagcagggacagttcatcccctctcagccccctaccctcccttggacactccggaaacagccacagggtccttcctgttccagggggagccagagggcggtgagggggaccagcccctctcagggtatccttggttccacgggatgctctctcggctcaaggctgcacagttggtgctgactggcggcactggctcccacggtgtcttcctggtgcgccagagtgagacaaggcggggtgaatacgtcctcaccttcaacttccagggcaaggccaagcacctgcgtttgtcgctgaacgaggagggtcagtgccgggtccagcacctgtggttccagtccattttcgatatgctcgagcacttccgggtgcaccccatccctttggagtcgggaggctccagtgatgttgtccttgtcagctatgtcccatcctcccagcgacagcagggccgggagcaggctgggagccatgcgggggtgtgcgagggagatggatgccaccccgatgcctcctgcaccctcatgcccttcggagcgagtgactgtgtaaccgaccacctcccatgacccaccccagccccctgaacccccttcatggacagatcccccacagcctggggcagaagaggcgtcgagggcgccagaagtggcggcagcagcagccgcagcagccaaagagaggcaagagaaagagaaagcgggcggtggaggggtcccggaagagctggtccccgtggttgagctggtccccgtggttgaattggaagaggccatagccccaggctcagaggcccagggcgctgggtctggtggggacgcgggggtgcccccaatggtgcagctgcagcagtcaccactagggggtgatggagaggaagggggccaccccagggccattaacaaccagtactccttcgtgtgagccaaccccacccgctccaccctttttaaaccccccagccctgctcgtgagattgggctgggtagggacagaggaggccgaaatccctcccccatgcttcctgacccttgttggccaagggcatctttgatggtacaagcagaggctcgggagaggctcccgtcacacactacaggtcccctccccagggcaggggatttgggctccatgagctccttgaggggctcttctggtcagccccaccctgggggccatttccccattaactacccccagcccgaggcagggtgagggggaagggctgtcagttacattaaggtggttgttgttgttgttttaaacaaaatggagaagcataaataaataaaaaggtttatctcggttcaaaaaaaaaagtggaccaaaacag

SEQ ID NO: 504351 - DNA, 834 bp, Homo sapiens
gaaatgatgaatgagttgttgaaaacaaaatggtcaaacccacgggaatctcagatgccctttctcattcttgggctgcatcgagctagacaaatcatgtagcccaagaattccacctcgggctccaggtgctgcaagttctaagggaggctgtcggggaactgaggaccagaccagaagtctcgtgtaggacgtctgatctcctctggcaggaaggccattggtgggagtgtttccactaacaaccaagagagatgaagagttgagagcttgaactgaggctcggggtgggatagagggggcatgacaaaagtctgagtaccaggtgggtcatctattcaaccttccacaaatattgactgaggcactggaatatagatcatgaacacagcacagactgttgctcatgggacatatgttctaacgcatgagcaacacgcatgtttcttcgtatattctaatcaggttaagtgaccaagaaaatggaataataagaaggaccaggcacggtcggcagtagggctctgtgcatgtcaatcaccttagtcagcgttgtggtgatgggccagagtacagtgtgggatgagctccaggtgcatggaagatctgagaaccaagccacagactcatacatagctgttatactctgttgttacttttgatacaaaaaattagctcgatgtggtggcacatgcctgtaaccccagctactcagggaggctgaggcaggagatcatttgatcctggaaatggacatgcagtgaacctagtcgtaccattaaactcgagcatggcacagcagctttcgctttctgttgtgttctttccgcctct

SEQ ID NO: 504352 - DNA, 787 bp, Homo sapiens
attcggcacgaggccagcttgattatattttacataaatcagtaataagcagccatcattattgttaagggtgtcagaatatgaaatggaggacctgcgttcaagttgtaattttttcattaactagatgcgtgatttggaaaagttgcttacattatctgaaatgtaatttccttatctgtaaagtgaatatgaccagaaagactgcgaggagagaatgagataatactaaggctttgaaggtataggtatcatatattaataataaggtgctaaaaacataatttaagactaaaggaaaatgtacatacaggtcccttaaccacagccatgttgtattaatattctctgctactaattagacattgcacccttcaaaggaatggtttaattctcgctgttcaatcacattaagttgtgccatgattcttgctttagaccccagggcctcaagaattttgaacttgtacttggtatttattcgaggtaagcccacttataattgttgggaatctaattcgtcaatggaaaattaaaaaggttggccttgattaattggtggcactttgttaaaccgactgggacctttttacattatagcttcttggccctttgggaattgtcccgtgaattaacttaaaagtttaaaaaatttaaatcccataggtctttggcctattttaaacagagggcaccctattatgggtccacgtaggccctttactatcctccattcctttggctaaattggttttgttgtttccgtcctgtaggttctttttgcttt

SEQ ID NO: 504353 - DNA, 3814 bp, Homo sapiens
gacggggtttcaccatgttggtcaggctggtctcaaactcctgacctcaagccatccgcccgcctcggcctcccaaagggctgggattacaggcgtgagccagcgctcccggccctgacctcattttttttttttctatttttaaaatagggattctagttctgttgcctgggctggagtgccgtggcgccatctcggctcaccgcaatctctgccttccggattcaagctattctcttgcctctgcctccggagggactgggactacaggcgcgcgccaccatgcccggctaatttttgtatttttagtagagacggggtttcaccatgttggccaggctggtctcgaactcctgacctcaggtgatccacctgcctcggccttccgaagtgctgggattacaggcatgagccactgcgcccggccctgacctcattatttctacccaccccctcccccaccactaccaccatcttcatctccagcctcagagatgcaaactcctggaccgcctgcccctttcctcagataaaccaaggtcgtaagttcaggctccgcctccccgcagggcctccccaaggtcacccgcttctttcctcgctcagctccttggtggcgttgtccgcgtgcccctccacagcggggccggcgctctaggctgcagcgggccgttcacacagcctcatcatctcgctggtttccggtgctcggcggctactctagccctcagccgggccctgggactctatcccctaaggccggttctctatggtcgacatcgcccctttgtcccgaatttcctccgggaggacgctctggtgggatccaagcacttcccccgctgcgtctgtggtcgcttttaggtgcaactggagaaggcactgaagccctacgagattcacaccgtcttcggtctcctggggtcggcgccgagtgggaggatggcggaactgctgccgcccacccctcgtcttctggctgcctccctctttgtgccccacaggctccccctctccacctcctggggcccatcatgaatggtgccccttccccagaggacggggcctccccctcgtctcccccgctgcccccacccccgccccctagttggcgggagttctgtgagtcccacgcccgggctgcggctctggactttgcccgccgttttcgcctctacctggcctcccacccccaatatgcggggcccggggccgaggctgccttctcccgccgttttgctgagctcttcctgcagcactttgaagccgaggtggcccgggcctctggctccctgtcgccacccatcctggctcccctgagccctggtgcggagatttcgccacatgacctgtcccttgagagctgcagggtgggtgggcccctggctgtgctgggcccttctcgatcatctgaggacctggccggccccctcccttcctcagtctcttcctcctctacaacctcctccaagccgaagctcaagaagcgcttttccctgcgttcagtgggtcgctctgtccgaggctcagtccgtggcatcctgcagtggcgggggaccgttgaccctccctcctccgctgggcccctggagacctcgtcaggccccccagtcttaggtggaaacagcaactccaactcctctggcggggctgggaccgttggtaggggactggtcagtgatggaacgtcccctggggaaagatggactcaccgttttgagaggctgagactcagtcggggagggggcgccttgaaggatggagcagggatggtgcagagggaagagctgctgagtttcatgggggctgaggaggcagcccctgacccagccggagtgggccggggaggaggggtggctgggcctccttcagggggaggagggcagcctcagtggcagaagtgtcgcctgctgcttcgaagtgaaggagaaggaggaggaggaagtcgcctggagttctttgtaccacccaaggcctctcggccccgactcagcatcccctgctcttctatcacagacgtccggacaaccacagccctggagatgcctgaccgggagaacacgtttgtggttaaggtggaaggtccatccgagtatatcatggagacagtggatgcccagcatgtgaaggcctgggtgtctgacatccaagaatgcctgagcccaggaccctgccctgctaccagtccccgccccatgaccctccctctggcccctgggacctcattccttacaagggagaacacagacagcctggagctgtcctgcctgaatcactcggagagtctacccagccaggacctgctgcttggacccagcgagagcaatgaccgcctgtcgcagggggcatatgggggcctctcagaccgcccctcggcatccatctcccccagctctgcctccattgccgcctcccattttgactcgatggaactgcttcccccagagttgcccccccgcatccccattgaagagggacccccagcagggacagttcatcccctctcagccccctaccctcccttggacactccggaaacagccacagggtccttcctgttccagggggagccagagggcggtgagggggaccagcccctctcagggtatccttggttccacgggatgctctctcggctcaaggctgcacagttggtgctgactggcggcactggctcccacggtgtcttcctggtgcgccagagtgagacaaggcggggtgaatacgtcctcaccttcaacttccagggcaaggccaagcacctgcgtttgtcgctgaacgaggagggtcagtgccgggtccagcacctgtggttccagtccattttcgatatgctcgagcacttccgggtgcaccccatccctttggagtcgggaggctccagtgatgttgtccttgtcagctatgtcccatcctcccagcgacagcagggccgggagcaggctgggagccatgcgggggtgtgcgagggagatggatgccaccccgatgcctcctgcaccctcatgcccttcggagcgagtgactgtgtaaccgaccacctcccatgacccaccccagccccctgaacccccttcatggacagatcccccacagcctggggcagaagaggcgtcgagggcgccagaagtggcggcagcagcagccgcagcagccaaagagaggcaagagaaagagaaagcgggcggtggaggggtcccggaagagctggtccccgtggttgagctggtccccgtggttgaattggaagaggccatagccccaggctcagaggcccagggcgctgggtctggtggggacgcgggggtgcccccaatggtgcagctgcagcagtcaccactagggggtgatggagaggaagggggccaccccagggccattaacaaccagtactccttcgtgtgagccaaccccacccgctccaccctttttaaaccccccagccctgctcgtgagattgggctgggtagggacagaggaggccgaaatccctcccccatgcttcctgacccttgttggccaagggcatctttgatggtacaagcagaggctcgggagaggctcccgtcacacactacaggtcccctccccagggcaggggatttgggctccatgagctccttgaggggctcttctggtcagccccaccctgggggccatttccccattaactacccccagcccgaggcagggtgagggggaagggctgtcagttacattaaggtggttgttgttgttgttttaaacaaaatggagaagcataaataaataaaaaggtttatctcggttcaaaaaaaaaagtggaccaaaacag

SEQ ID NO: 504354 - DNA, 921 bp, Homo sapiens
  misc_feature (164)..(164): n is a, c, g, or t
  misc_feature (327)..(327): n is a, c, g, or t
  misc_feature (692)..(692): n is a, c, g, or t
gagatggggtttcgccatgttggccaggctagtgtcaaactcctggcctcaagtcatctgcccgccttggcctccccaaagtgctgggattacaggcatgagccactgcctggctgccttcagacttttctaaaggaagaaaacctcatgttaataaaaatgtnttaatcattacttttgtcattaatgatctcgatatagttaacatcttaagcactatgaaatatggtaattaaaatggcaatatattgaaatgtgaaaacagttttagcacagcacttattgactatgaaatacttactgcagttgcctgtagattattggggnagacattaaggagctcctgaggagggtttaaaggtttgagataacgtgtgataaaaacagtttttccgcttatatcaattactgttgtaaggcactgacgatttggaaactttaaggcacattcagcttgaaacttctcagttgcttgaagtaatttctcatcttcctgagactcaaacttcaaaaagaaagacttcatggagtttatgtatgattacaagagagaaagtacgtgttcagattccacagtcaacatgcaggaaatgtatggtttgggaatatgactgactccttacaaagctgtcatgtcctggtgtccctgcagctttatttaaattaaatttgtagtttgaaaattagaccgnctcattaaatacttaaaatatatttgacaggattgaaataaagtagcaggtaagcagccatatggaaactactacattaataatctatgaaattaaactgtgatgtactaattctgattgatgaggctagaattaggcagtagagttttgtgtgtattttgatggtggttttaagtgtgcaggctggggggcggccccagaaaatctaacatctcatatgtaaatctta

SEQ ID NO: 504355 - DNA, 5684 bp, Homo sapiens
gacggggtttcaccatgttggtcaggctggtctcaaactcctgacctcaagccatccgcccgcctcggcctcccaaagggctgggattacaggcgtgagccagcgctcccggccctgacctcattttttttttttctatttttaaaatagggattctagttctgttgcctgggctggagtgccgtggcgccatctcggctcaccgcaatctctgccttccggattcaagctattctcttgcctctgcctccggagggactgggactacaggcgcgcgccaccatgcccggctaatttttgtatttttagtagagacggggtttcaccatgttggccaggctggtctcgaactcctgacctcaggtgatccacctgcctcggccttccgaagtgctgggattacaggcatgagccactgcgcccggccctgacctcattatttctacccaccccctcccccaccactaccaccatcttcatctccagcctcagagatgcaaactcctggaccgcctgcccctttcctcagataaaccaaggtcgtaagttcaggctccgcctccccgcagggcctccccaaggtcacccgcttctttcctcgctcagctccttggtggcgttgtccgcgtgcccctccacagcggggccggcgctctaggctgcagcgggccgttcacacagcctcatcatctcgctggtttccggtgctcggcggctactctagccctcagccgggccctgggactctatcccctaaggccggttctctatggtcgacatcgcccctttgtcccgaatttcctccgggaggacgctctggtgggatccaagcacttcccccgctgcgtctgtggtcgcttttaggtgcaactggagaaggcactgaagccctacgagattcacaccgtcttcggtctcctggggtcggcgccgagtgggaggatggcggaagtaagtatgaaggtgcccttccctcccgccgctgttctctatggtctcttccttcagcgacgggaaagggggtcctgacgcctgcgcggaaccgggctgggcgctcgtcgcgtagtgggtgggggcgcagggagcgggagccgccgccgccgccgccgccgccggagctaacctcggggaccgagatgcaggtgggaccggaaccggaacccccctcttcaagtaccttttccctctccgcgacccggccctggcgcccgagaggattcctgggtgggggtgggcgtggagggccgggggctggagaggcactcggccccggagagtgcagcagacagggctggtcccgaggtggatgcggccccggaaaatgggcggctggggggtgtccagggagtagggtcggatcggagtatatggaccaccgggcccggagggtccgagccgagagcggagcctgcaccctccacctcccgcccttcgggaaatatcagaactgagccaggaggcaggtgcaccgggaaaatgtgtctgagtcctgcttggcagaagagaaactgagtcaccagcttaggagtcgcagggtcagcgggcctgaagggggctgggtctgtctgcggtgcggaggattgggtgggcctgtgtgagccgaggtggccgctggctggagattggtttgcacttcttggctgggttcccccgtgctccatgactcctgcatctcctgattgtttctcgttggtttggagttgtccctgcggttggagccatctgagcttgtagggtcgaggcccaggaggaaggggagggttcaccgacttacagcctggctgtaggtttgaacaggagtctgaggtcgctgagggtttggggaggctttcctgagctgctctggccccagtcctggggctgtcaccttccagtattgcgtggcgggaggagcgctaacaagagccaagggttgtaaattccacacccagctctgccactttctagttgtaagaccttgagagggctcctcctttctctaatttctattttagaaaattggaacaataatattcttctcccacatgaagatagtaacaatggcagtcgttcagcggatgcttactttgcgttcagcgctgacataccccattccatgtaattctctcaacatttcgaggggagggatcattagctttgtttaacagatagaaaaacggaggctcagagaggacgtggaatttgttcaagataacatcgctcataaggtggctggactgggtgctcataaggtggtttgagccctggtctgactcaagtccatggccttaaccagaaggctaacctgcctttagggcatactccccagtgggagaagaggaaggtgaaaaatcctagggccccagctctccctgtgatgttttgtttacgtgaggccagcaaagacttgacctgagccaacccagtttctcctctggggcccctgcggcctctggccccagactgaagggataccaaagaagtgggctgtagctatttcacatctccttcacgcagtgcgtgggtgctggactctggggtcagctttcaagacaattactgttttggtccatcatgcatccatcctcattaatgaatcggccccctccaaagagttggaccctaagatgcgtgaggcaggctctctaaggtctagaatcccagctcctctctagccccctgcgagctggggcggtgaggtgctatggctgaggctggcccagccgggccctggggacagggactatgaagtggggaaaacagtagacttggagttctgaaacttttctgagcttcggtttcctcatctgttcgagaggtctttgaaacctctcagggaaagctgctgccgcccacccctcgtcttctggctgcctccctctttgtgccccacaggctccccctctccacctcctggggcccatcatgaatggtgccccttccccagaggacggggcctccccctcgtctcccccgctgcccccacccccgccccctagttggcgggagttctgtgagtcccacgcccgggctgcggctctggactttgcccgccgttttcgcctctacctggcctcccacccccaatatgcggggcccggggccgaggctgccttctcccgccgttttgctgagctcttcctgcagcactttgaagccgaggtggcccgggcctctggctccctgtcgccacccatcctggctcccctgagccctggtgcggagatttcgccacatgacctgtcccttgagagctgcagggtgggtgggcccctggctgtgctgggcccttctcgatcatctgaggacctggccggccccctcccttcctcagtctcttcctcctctacaacctcctccaagccgaagctcaagaagcgcttttccctgcgttcagtgggtcgctctgtccgaggctcagtccgtggcatcctgcagtggcgggggaccgttgaccctccctcctccgctgggcccctggagacctcgtcaggccccccagtcttaggtggaaacagcaactccaactcctctggcggggctgggaccgttggtaggggactggtcagtgatggaacgtcccctggggaaagatggactcaccgttttgagaggctgagactcagtcggggagggggcgccttgaaggatggagcagggatggtgcagagggaagagctgctgagtttcatgggggctgaggaggcagcccctgacccagccggagtgggccggggaggaggggtggctgggcctccttcagggggaggagggcagcctcagtggcagaagtgtcgcctgctgcttcgaagtgaaggagaaggaggaggaggaagtcgcctggagttctttgtaccacccaaggcctctcggccccgactcagcatcccctgctcttctatcacagacgtccggacaaccacagccctggagatgcctgaccgggagaacacgtttgtggttaaggtggaaggtccatccgagtatatcatggagacagtggatgcccagcatgtgaaggcctgggtgtctgacatccaagaatgcctgagcccaggaccctgccctgctaccagtccccgccccatgaccctccctctggcccctgggacctcattccttacaagggagaacacagacagcctggagctgtcctgcctgaatcactcggagagtctacccagccaggacctgctgcttggacccagcgagagcaatgaccgcctgtcgcagggggcatatgggggcctctcagaccgcccctcggcatccatctcccccagctctgcctccattgccgcctcccattttgactcgatggaactgcttcccccagagttgcccccccgcatccccattgaagagggacccccagcagggacagttcatcccctctcagccccctaccctcccttggacactccggaaacagccacagggtccttcctgttccagggggagccagagggcggtgagggggaccagcccctctcagggtatccttggttccacgggatgctctctcggctcaaggctgcacagttggtgctgactggcggcactggctcccacggtgtcttcctggtgcgccagagtgagacaaggcggggtgaatacgtcctcaccttcaacttccagggcaaggccaagcacctgcgtttgtcgctgaacgaggagggtcagtgccgggtccagcacctgtggttccagtccattttcgatatgctcgagcacttccgggtgcaccccatccctttggagtcgggaggctccagtgatgttgtccttgtcagctatgtcccatcctcccagcgacagcagggccgggagcaggctgggagccatgcgggggtgtgcgagggagatggatgccaccccgatgcctcctgcaccctcatgcccttcggagcgagtgactgtgtaaccgaccacctcccatgacccaccccagccccctgaacccccttcatggacagatcccccacagcctggggcagaagaggcgtcgagggcgccagaagtggcggcagcagcagccgcagcagccaaagagaggcaagagaaagagaaagcgggcggtggaggggtcccggaagagctggtccccgtggttgagctggtccccgtggttgaattggaagaggccatagccccaggctcagaggcccagggcgctgggtctggtggggacgcgggggtgcccccaatggtgcagctgcagcagtcaccactagggggtgatggagaggaagggggccaccccagggccattaacaaccagtactccttcgtgtgagccaaccccacccgctccaccctttttaaaccccccagccctgctcgtgagattgggctgggtagggacagaggaggccgaaatccctcccccatgcttcctgacccttgttggccaagggcatctttgatggtacaagcagaggctcgggagaggctcccgtcacacactacaggtcccctccccagggcaggggatttgggctccatgagctccttgaggggctcttctggtcagccccaccctgggggccatttccccattaactacccccagcccgaggcagggtgagggggaagggctgtcagttacattaaggtggttgttgttgttgttttaaacaaaatggagaagcataaataaataaaaaggtttatctcggttcaaaaaaaaaagtggaccaaaacag

SEQ ID NO: 504356 - DNA, 255 bp, Homo sapiens
ccgggaaggtcgaggctgcagtcagcggtgatagcactactacactccagccttggacaacagagggagaccctgaataacatgtggcccagtcagtctctcttccgggattcagaagtctttcagggtagatccagctccagctctgtggccctggggttggagactgctgctcaagtgcattggaaaggatccatcccacgccattcttcagagtcatcttcactgctgcagtggtcacttgtagcaccccaa

SEQ ID NO: 504357 - DNA, 4045 bp, Homo sapiens
gacggggtttcaccatgttggtcaggctggtctcaaactcctgacctcaagccatccgcccgcctcggcctcccaaagggctgggattacaggcgtgagccagcgctcccggccctgacctcattttttttttttctatttttaaaatagggattctagttctgttgcctgggctggagtgccgtggcgccatctcggctcaccgcaatctctgccttccggattcaagctattctcttgcctctgcctccggagggactgggactacaggcgcgcgccaccatgcccggctaatttttgtatttttagtagagacggggtttcaccatgttggccaggctggtctcgaactcctgacctcaggtgatccacctgcctcggccttccgaagtgctgggattacaggcatgagccactgcgcccggccctgacctcattatttctacccaccccctcccccaccactaccaccatcttcatctccagcctcagagatgcaaactcctggaccgcctgcccctttcctcagataaaccaaggtcgtaagttcaggctccgcctccccgcagggcctccccaaggtcacccgcttctttcctcgctcagctccttggtggcgttgtccgcgtgcccctccacagcggggccggcgctctaggctgcagcgggccgttcacacagcctcatcatctcgctggtttccggtgctcggcggctactctagccctcagccgggccctgggactctatcccctaaggccggttctctatggtcgacatcgcccctttgtcccgaatttcctccgggaggacgctctggtgggatccaagcacttcccccgctgcgtctgtggtcgcttttaggtgcaactggagaaggcactgaagccctacgagattcacaccgtcttcggtctcctggggtcggcgccgagtgggaggatggcggaagtaagtatgaaggtgcccttccctcccgccgctgttctctatggtctcttccttcagcgacgggaaagggggtcctgacgcctgcgcggaaccgggctgggcgctcgtcgcgtagtgggtgggggcgcagggagcgggagccgccgccgccgccggagctaacctcggggaccgagatctgctgccgcccacccctcgtcttctggctgcctccctctttgtgccccacaggctccccctctccacctcctggggcccatcatgaatggtgccccttccccagaggacggggcctccccctcgtctcccccgctgcccccacccccgccccctagttggcgggagttctgtgagtcccacgcccgggctgcggctctggactttgcccgccgttttcgcctctacctggcctcccacccccaatatgcggggcccggggccgaggctgccttctcccgccgttttgctgagctcttcctgcagcactttgaagccgaggtggcccgggcctctggctccctgtcgccacccatcctggctcccctgagccctggtgcggagatttcgccacatgacctgtcccttgagagctgcagggtgggtgggcccctggctgtgctgggcccttctcgatcatctgaggacctggccggccccctcccttcctcagtctcttcctcctctacaacctcctccaagccgaagctcaagaagcgcttttccctgcgttcagtgggtcgctctgtccgaggctcagtccgtggcatcctgcagtggcgggggaccgttgaccctccctcctccgctgggcccctggagacctcgtcaggccccccagtcttaggtggaaacagcaactccaactcctctggcggggctgggaccgttggtaggggactggtcagtgatggaacgtcccctggggaaagatggactcaccgttttgagaggctgagactcagtcggggagggggcgccttgaaggatggagcagggatggtgcagagggaagagctgctgagtttcatgggggctgaggaggcagcccctgacccagccggagtgggccggggaggaggggtggctgggcctccttcagggggaggagggcagcctcagtggcagaagtgtcgcctgctgcttcgaagtgaaggagaaggaggaggaggaagtcgcctggagttctttgtaccacccaaggcctctcggccccgactcagcatcccctgctcttctatcacagacgtccggacaaccacagccctggagatgcctgaccgggagaacacgtttgtggttaaggtggaaggtccatccgagtatatcatggagacagtggatgcccagcatgtgaaggcctgggtgtctgacatccaagaatgcctgagcccaggaccctgccctgctaccagtccccgccccatgaccctccctctggcccctgggacctcattccttacaagggagaacacagacagcctggagctgtcctgcctgaatcactcggagagtctacccagccaggacctgctgcttggacccagcgagagcaatgaccgcctgtcgcagggggcatatgggggcctctcagaccgcccctcggcatccatctcccccagctctgcctccattgccgcctcccattttgactcgatggaactgcttcccccagagttgcccccccgcatccccattgaagagggacccccagcagggacagttcatcccctctcagccccctaccctcccttggacactccggaaacagccacagggtccttcctgttccagggggagccagagggcggtgagggggaccagcccctctcagggtatccttggttccacgggatgctctctcggctcaaggctgcacagttggtgctgactggcggcactggctcccacggtgtcttcctggtgcgccagagtgagacaaggcggggtgaatacgtcctcaccttcaacttccagggcaaggccaagcacctgcgtttgtcgctgaacgaggagggtcagtgccgggtccagcacctgtggttccagtccattttcgatatgctcgagcacttccgggtgcaccccatccctttggagtcgggaggctccagtgatgttgtccttgtcagctatgtcccatcctcccagcgacagcagggtgagcagagcaggtctgcaggggaggaggtgcccgtgcacccaagaagtgaggccgggagcaggctgggagccatgcgggggtgtgcgagggagatggatgccaccccgatgcctcctgcaccctcatgcccttcggagcgagtgactgtgtaaccgaccacctcccatgacccaccccagccccctgaacccccttcatggacagatcccccacagcctggggcagaagaggcgtcgagggcgccagaagtggcggcagcagcagccgcagcagccaaagagaggcaagagaaagagaaagcgggcggtggaggggtcccggaagagctggtccccgtggttgagctggtccccgtggttgaattggaagaggccatagccccaggctcagaggcccagggcgctgggtctggtggggacgcgggggtgcccccaatggtgcagctgcagcagtcaccactagggggtgatggagaggaagggggccaccccagggccattaacaaccagtactccttcgtgtgagccaaccccacccgctccaccctttttaaaccccccagccctgctcgtgagattgggctgggtagggacagaggaggccgaaatccctcccccatgcttcctgacccttgttggccaagggcatctttgatggtacaagcagaggctcgggagaggctcccgtcacacactacaggtcccctccccagggcaggggatttgggctccatgagctccttgaggggctcttctggtcagccccaccctgggggccatttccccattaactacccccagcccgaggcagggtgagggggaagggctgtcagttacattaaggtggttgttgttgttgttttaaacaaaatggagaagcataaataaataaaaaggtttatctcggttcaaaaaaaaaagtggaccaaaacag

SEQ ID NO: 504358 - DNA, 3906 bp, Homo sapiens
gacggggtttcaccatgttggtcaggctggtctcaaactcctgacctcaagccatccgcccgcctcggcctcccaaagggctgggattacaggcgtgagccagcgctcccggccctgacctcattttttttttttctatttttaaaatagggattctagttctgttgcctgggctggagtgccgtggcgccatctcggctcaccgcaatctctgccttccggattcaagctattctcttgcctctgcctccggagggactgggactacaggcgcgcgccaccatgcccggctaatttttgtatttttagtagagacggggtttcaccatgttggccaggctggtctcgaactcctgacctcaggtgatccacctgcctcggccttccgaagtgctgggattacaggcatgagccactgcgcccggccctgacctcattatttctacccaccccctcccccaccactaccaccatcttcatctccagcctcagagatgcaaactcctggaccgcctgcccctttcctcagataaaccaaggtcgtaagttcaggctccgcctccccgcagggcctccccaaggtcacccgcttctttcctcgctcagctccttggtggcgttgtccgcgtgcccctccacagcggggccggcgctctaggctgcagcgggccgttcacacagcctcatcatctcgctggtttccggtgctcggcggctactctagccctcagccgggccctgggactctatcccctaaggccggttctctatggtcgacatcgcccctttgtcccgaatttcctccgggaggacgctctggtgggatccaagcacttcccccgctgcgtctgtggtcgcttttaggtgcaactggagaaggcactgaagccctacgagattcacaccgtcttcggtctcctggggtcggcgccgagtgggaggatggcggaagtaagtatgaaggtgcccttccctcccgccgctgttctctatggtctcttccttcagcgacgggaaagggggtcctgacgcctgcgcggaaccgggctgggcgctcgtcgcgtagtgggtgggggcgcagggagcgggagccgccgccgccgccgccgccgccggagctaacctcggggaccgagatgcagctgctgccgcccacccctcgtcttctggctgcctccctctttgtgccccacaggctccccctctccacctcctggggcccatcatgaatggtgccccttccccagaggacggggcctccccctcgtctcccccgctgcccccacccccgccccctagttggcgggagttctgtgagtcccacgcccgggctgcggctctggactttgcccgccgttttcgcctctacctggcctcccacccccaatatgcggggcccggggccgaggctgccttctcccgccgttttgctgagctcttcctgcagcactttgaagccgaggtggcccgggcctctggctccctgtcgccacccatcctggctcccctgagccctggtgcggagatttcgccacatgacctgtcccttgagagctgcagggtgggtgggcccctggctgtgctgggcccttctcgatcatctgaggacctggccggccccctcccttcctcagtctcttcctcctctacaacctcctccaagccgaagctcaagaagcgcttttccctgcgttcagtgggtcgctctgtccgaggctcagtccgtggcatcctgcagtggcgggggaccgttgaccctccctcctccgctgggcccctggagacctcgtcaggccccccagtcttaggtggaaacagcaactccaactcctctggcggggctgggaccgttggtaggggactggtcagtgatggaacgtcccctggggaaagatggactcaccgttttgagaggctgagactcagtcggggagggggcgccttgaaggatggagcagggatggtgcagagggaagagctgctgagtttcatgggggctgaggaggcagcccctgacccagccggagtgggccggggaggaggggtggctgggcctccttcagggggaggagggcagcctcagtggcagaagtgtcgcctgctgcttcgaagtgaaggagaaggaggaggaggaagtcgcctggagttctttgtaccacccaaggcctctcggccccgactcagcatcccctgctcttctatcacagacgtccggacaaccacagccctggagatgcctgaccgggagaacacgtttgtggttaaggtggaaggtccatccgagtatatcatggagacagtggatgcccagcatgtgaaggcctgggtgtctgacatccaagaatgcctgagcccaggaccctgccctgctaccagtccccgccccatgaccctccctctggcccctgggacctcattccttacaagggagaacacagacagcctggagctgtcctgcctgaatcactcggagagtctacccagccaggacctgctgcttggacccagcgagagcaatgaccgcctgtcgcagggggcatatgggggcctctcagaccgcccctcggcatccatctcccccagctctgcctccattgccgcctcccattttgactcgatggaactgcttcccccagagttgcccccccgcatccccattgaagagggacccccagcagggacagttcatcccctctcagccccctaccctcccttggacactccggaaacagccacagggtccttcctgttccagggggagccagagggcggtgagggggaccagcccctctcagggtatccttggttccacgggatgctctctcggctcaaggctgcacagttggtgctgactggcggcactggctcccacggtgtcttcctggtgcgccagagtgagacaaggcggggtgaatacgtcctcaccttcaacttccagggcaaggccaagcacctgcgtttgtcgctgaacgaggagggtcagtgccgggtccagcacctgtggttccagtccattttcgatatgctcgagcacttccgggtgcaccccatccctttggagtcgggaggctccagtgatgttgtccttgtcagctatgtcccatcctcccagcgacagcagggaaccgaccacctcccatgacccaccccagccccctgaacccccttcatggacagatcccccacagcctggggcagaagaggcgtcgagggcgccagaagtggcggcagcagcagccgcagcagccaaagagaggcaagagaaagagaaagcgggcggtggaggggtcccggaagagctggtccccgtggttgagctggtccccgtggttgaattggaagaggccatagccccaggctcagaggcccagggcgctgggtctggtggggacgcgggggtgcccccaatggtgcagctgcagcagtcaccactagggggtgatggagaggaagggggccaccccagggccattaacaaccagtactccttcgtgtgagccaaccccacccgctccaccctttttaaaccccccagccctgctcgtgagattgggctgggtagggacagaggaggccgaaatccctcccccatgcttcctgacccttgttggccaagggcatctttgatggtacaagcagaggctcgggagaggctcccgtcacacactacaggtcccctccccagggcaggggatttgggctccatgagctccttgaggggctcttctggtcagccccaccctgggggccatttccccattaactacccccagcccgaggcagggtgagggggaagggctgtcagttacattaaggtggttgttgttgttgttttaaacaaaatggagaagcataaataaataaaaaggtttatctcggttcaaaaaaaaaagtggaccaaaacag

SEQ ID NO: 504359 - DNA, 151 bp, Homo sapiens
  misc_feature (1)..(1): n is a, c, g, or t
ncaacacaacacactcactactaacgctactactcactacaactaccaacgacgtttgcacacaccactaccaacgacgacactactacactgtaccaccaccaacacttactactactactcgacacgtaccacctcgtacactcttact

SEQ ID NO: 504360 - DNA, 3924 bp, Homo sapiens
gacggggtttcaccatgttggtcaggctggtctcaaactcctgacctcaagccatccgcccgcctcggcctcccaaagggctgggattacaggcgtgagccagcgctcccggccctgacctcattttttttttttctatttttaaaatagggattctagttctgttgcctgggctggagtgccgtggcgccatctcggctcaccgcaatctctgccttccggattcaagctattctcttgcctctgcctccggagggactgggactacaggcgcgcgccaccatgcccggctaatttttgtatttttagtagagacggggtttcaccatgttggccaggctggtctcgaactcctgacctcaggtgatccacctgcctcggccttccgaagtgctgggattacaggcatgagccactgcgcccggccctgacctcattatttctacccaccccctcccccaccactaccaccatcttcatctccagcctcagagatgcaaactcctggaccgcctgcccctttcctcagataaaccaaggtcgtaagttcaggctccgcctccccgcagggcctccccaaggtcacccgcttctttcctcgctcagctccttggtggcgttgtccgcgtgcccctccacagcggggccggcgctctaggctgcagcgggccgttcacacagcctcatcatctcgctggtttccggtgctcggcggctactctagccctcagccgggccctgggactctatcccctaaggccggttctctatggtcgacatcgcccctttgtcccgaatttcctccgggaggacgctctggtgggatccaagcacttcccccgctgcgtctgtggtcgcttttaggtgcaactggagaaggcactgaagccctacgagattcacaccgtcttcggtctcctggggtcggcgccgagtgggaggatggcggaactgctgccgcccacccctcgtcttctggctgcctccctctttgtgccccacaggctccccctctccacctcctggggcccatcatgaatggtgccccttccccagaggacggggcctccccctcgtctcccccgctgcccccacccccgccccctagttggcgggagttctgtgagtcccacgcccgggctgcggctctggactttgcccgccgttttcgcctctacctggcctcccacccccaatatgcggggcccggggccgaggctgccttctcccgccgttttgctgagctcttcctgcagcactttgaagccgaggtggcccgggcctctggctccctgtcgccacccatcctggctcccctgagccctggtgcggagatttcgccacatgacctgtcccttgagagctgcagggtgggtgggcccctggctgtgctgggcccttctcgatcatctgaggacctggccggccccctcccttcctcagtctcttcctcctctacaacctcctccaagccgaagctcaagaagcgcttttccctgcgttcagtgggtcgctctgtccgaggctcagtccgtggcatcctgcagtggcgggggaccgttgaccctccctcctccgctgggcccctggagacctcgtcaggccccccagtcttaggtggaaacagcaactccaactcctctggcggggctgggaccgttggtaggggactggtcagtgatggaacgtcccctggggaaagatggactcaccgttttgagaggctgagactcagtcggggagggggcgccttgaaggatggagcagggatggtgcagagggaagagctgctgagtttcatgggggctgaggaggcagcccctgacccagccggagtgggccggggaggaggggtggctgggcctccttcagggggaggagggcagcctcagtggcagaagtgtcgcctgctgcttcgaagtgaaggagaaggaggaggaggaagtcgcctggagttctttgtaccacccaaggcctctcggccccgactcagcatcccctgctcttctatcacagacgtccggacaaccacagccctggagatgcctgaccgggagaacacgtttgtggttaaggtggaaggtccatccgagtatatcatggagacagtggatgcccagcatgtgaaggcctgggtgtctgacatccaagaatgcctgagcccagggtgagaagcctgacttctgtcgctaagggacatagagtggggttggggagcagccttgcgcctctcacctggtgactttcctcccagcaccatcttccctgtctctgcagaccctgccctgctaccagtccccgccccatgaccctccctctggcccctgggacctcattccttacaagggagaacacagacagcctggagctgtcctgcctgaatcactcggagagtctacccagccaggacctgctgcttggacccagcgagagcaatgaccgcctgtcgcagggggcatatgggggcctctcagaccgcccctcggcatccatctcccccagctctgcctccattgccgcctcccattttgactcgatggaactgcttcccccagagttgcccccccgcatccccattgaagagggacccccagcagggacagttcatcccctctcagccccctaccctcccttggacactccggaaacagccacagggtccttcctgttccagggggagccagagggcggtgagggggaccagcccctctcagggtatccttggttccacgggatgctctctcggctcaaggctgcacagttggtgctgactggcggcactggctcccacggtgtcttcctggtgcgccagagtgagacaaggcggggtgaatacgtcctcaccttcaacttccagggcaaggccaagcacctgcgtttgtcgctgaacgaggagggtcagtgccgggtccagcacctgtggttccagtccattttcgatatgctcgagcacttccgggtgcaccccatccctttggagtcgggaggctccagtgatgttgtccttgtcagctatgtcccatcctcccagcgacagcagggccgggagcaggctgggagccatgcgggggtgtgcgagggagatggatgccaccccgatgcctcctgcaccctcatgcccttcggagcgagtgactgtgtaaccgaccacctcccatgacccaccccagccccctgaacccccttcatggacagatcccccacagcctggggcagaagaggcgtcgagggcgccagaagtggcggcagcagcagccgcagcagccaaagagaggcaagagaaagagaaagcgggcggtggaggggtcccggaagagctggtccccgtggttgagctggtccccgtggttgaattggaagaggccatagccccaggctcagaggcccagggcgctgggtctggtggggacgcgggggtgcccccaatggtgcagctgcagcagtcaccactagggggtgatggagaggaagggggccaccccagggccattaacaaccagtactccttcgtgtgagccaaccccacccgctccaccctttttaaaccccccagccctgctcgtgagattgggctgggtagggacagaggaggccgaaatccctcccccatgcttcctgacccttgttggccaagggcatctttgatggtacaagcagaggctcgggagaggctcccgtcacacactacaggtcccctccccagggcaggggatttgggctccatgagctccttgaggggctcttctggtcagccccaccctgggggccatttccccattaactacccccagcccgaggcagggtgagggggaagggctgtcagttacattaaggtggttgttgttgttgttttaaacaaaatggagaagcataaataaataaaaaggtttatctcggttcaaaaaaaaaagtggaccaaaacag

SEQ ID NO: 504361 - DNA, 163 bp, Homo sapiens
ttctcgaggatctccgcaacaacttcgtccatacgcacctgtgtcaacaaggggtatgggcgctcggagtgtgcagcaacaacttcgtccatcatgatctgcaacaacttcgtccattccgatttgacttcaagaagtgtctggtccctcggcgtgtgcagga

SEQ ID NO: 504362 - DNA, 1672 bp, Homo sapiens
gcatgaccctccctctggcccctggggcggggactggtagcagggcaggccccatgaccctccctctggcccctgggacctcattccttacaagggagaacacagacagcctggagctgtcctgcctgaatcactcggagagtctacccagccaggacctgctgcttggacccagcgagagcaatgaccgcctgtcgcagggggcatatgggggcctctcagaccgcccctcggcatccatctcccccagctctgcctccattgccgcctcccattttgactcgatggaactgcttcccccagagttgcccccccgcatccccattgaagagggacccccagcagggacagttcatcccctctcagccccctaccctcccttggacactccggaaacagccacagggtccttcctgttccagggggagccagagggcggtgagggggaccagcccctctcagggtatccttggttccacgggatgctctctcggctcaaggctgcacagttggtgctgactggcggcactggctcccacggtgtcttcctggtgcgccagagtgagacaaggcggggtgaatacgtcctcaccttcaacttccagggcaaggccaagcacctgcgtttgtcgctgaacgaggagggtcagtgccgggtccagcacctgtggttccagtccattttcgatatgctcgagcacttccgggtgcaccccatccctttggagtcgggaggctccagtgatgttgtccttgtcagctatgtcccatcctcccagcgacagcagggccgggagcaggctgggagccatgcgggggtgtgcgagggagatggatgccaccccgatgcctcctgcaccctcatgcccttcggagcgagtgactgtgtaaccgaccacctcccatgacccaccccagccccctgaacccccttcatggacagatcccccacagcctggggcagaagaggcgtcgagggcgccagaagtggcggcagcagcagccgcagcagccaaagagaggcaagagaaagagaaagcgggcggtggaggggtcccggaagagctggtccccgtggttgagctggtccccgtggttgaattggaagaggccatagccccaggctcagaggcccagggcgctgggtctggtggggacgcgggggtgcccccaatggtgcagctgcagcagtcaccactagggggtgatggagaggaagggggccaccccagggccattaacaaccagtactccttcgtgtgagccaaccccacccgctccaccctttttaaaccccccagccctgctcgtgagattgggctgggtagggacagaggaggccgaaatccctcccccatgcttcctgacccttgttggccaagggcatctttgatggtacaagcagaggctcgggagaggctcccgtcacacactacaggtcccctccccagggcaggggatttgggctccatgagctccttgaggggctcttctggtcagccccaccctgggggccatttccccattaactacccccagcccgaggcagggtgagggggaagggctgtcagttacattaaggtggttgttgttgttgttttaaacaaaatggagaagcataaataaataaaaaggtttatctcggttcaaaaaaaaaagtggaccaaaacag

SEQ ID NO: 504363 - DNA, 225 bp, Homo sapiens
aggtgtgacgtcgtcaatggtcagtttgtggacccgcccacggttggacacctttatgcggctgctcgggcaccagcctccttcccacttcttcatgccacacacacccgaaccacatctcaatctgagagcctcacaatttgagacaccgacctggtccagttgacggcccaccaatcaggctctgcgaatgctctggttacacctccagtcttacgttttcct

SEQ ID NO: 504364 - DNA, 3768 bp, Homo sapiens
gacggggtttcaccatgttggtcaggctggtctcaaactcctgacctcaagccatccgcccgcctcggcctcccaaagggctgggattacaggcgtgagccagcgctcccggccctgacctcattttttttttttctatttttaaaatagggattctagttctgttgcctgggctggagtgccgtggcgccatctcggctcaccgcaatctctgccttccggattcaagctattctcttgcctctgcctccggagggactgggactacaggcgcgcgccaccatgcccggctaatttttgtatttttagtagagacggggtttcaccatgttggccaggctggtctcgaactcctgacctcaggtgatccacctgcctcggccttccgaagtgctgggattacaggcatgagccactgcgcccggccctgacctcattatttctacccaccccctcccccaccactaccaccatcttcatctccagcctcagagatgcaaactcctggaccgcctgcccctttcctcagataaaccaaggtcgtaagttcaggctccgcctccccgcagggcctccccaaggtcacccgcttctttcctcgctcagctccttggtggcgttgtccgcgtgcccctccacagcggggccggcgctctaggctgcagcgggccgttcacacagcctcatcatctcgctggtttccggtgctcggcggctactctagccctcagccgggccctgggactctatcccctaaggccggttctctatggtcgacatcgcccctttgtcccgaatttcctccgggaggacgctctggtgggatccaagcacttcccccgctgcgtctgtggtcgcttttaggtgcaactggagaaggcactgaagccctacgagattcacaccgtcttcggtctcctggggtcggcgccgagtgggaggatggcggaactgctgccgcccacccctcgtcttctggctgcctccctctttgtgccccacaggctccccctctccacctcctggggcccatcatgaatggtgccccttccccagaggacggggcctccccctcgtctcccccgctgcccccacccccgccccctagttggcgggagttctgtgagtcccacgcccgggctgcggctctggactttgcccgccgttttcgcctctacctggcctcccacccccaatatgcggggcccggggccgaggctgccttctcccgccgttttgctgagctcttcctgcagcactttgaagccgaggtggcccgggcctctggctccctgtcgccacccatcctggctcccctgagccctggtgcggagatttcgccacatgacctgtcccttgagagctgcagggtgggtgggcccctggctgtgctgggcccttctcgatcatctgaggacctggccggccccctcccttcctcagtctcttcctcctctacaacctcctccaagccgaagctcaagaagcgcttttccctgcgttcagtgggtcgctctgtccgaggctcagtccgtggcatcctgcagtggcgggggaccgttgaccctccctcctccgctgggcccctggagacctcgtcaggccccccagtcttaggtggaaacagcaactccaactcctctggcggggctgggaccgttggtaggggactggtcagtgatggaacgtcccctggggaaagatggactcaccgttttgagaggctgagactcagtcggggagggggcgccttgaaggatggagcagggatggtgcagagggaagagctgctgagtttcatgggggctgaggaggcagcccctgacccagccggagtgggccggggaggaggggtggctgggcctccttcagggggaggagggcagcctcagtggcagaagtgtcgcctgctgcttcgaagtgaaggagaaggaggaggaggaagtcgcctggagttctttgtaccacccaaggcctctcggccccgactcagcatcccctgctcttctatcacagacgtccggacaaccacagccctggagatgcctgaccgggagaacacgtttgtggttaaggtggaaggtccatccgagtatatcatggagacagtggatgcccagcatgtgaaggcctgggtgtctgacatccaagaatgcctgagcccaggaccctgccctgctaccagtccccgccccatgaccctccctctggcccctgggacctcattccttacaagggagaacacagacagcctggagctgtcctgcctgaatcactcggagagtctacccagccaggacctgctgcttggacccagcgagagcaatgaccgcctgtcgcagggggcatatgggggcctctcagaccgcccctcggcatccatctcccccagctctgcctccattgccgcctcccattttgactcgatggaactgcttcccccagagttgcccccccgcatccccattgaagagggacccccagcagggacagttcatcccctctcagccccctaccctcccttggacactccggaaacagccacagggtccttcctgttccagggggagccagagggcggtgagggggaccagcccctctcagggtatccttggttccacgggatgctctctcggctcaaggctgcacagttggtgctgactggcggcactggctcccacggtgtcttcctggtgcgccagagtgagacaaggcggggtgaatacgtcctcaccttcaacttccagggcaaggccaagcacctgcgtttgtcgctgaacgaggagggtcagtgccgggtccagcacctgtggttccagtccattttcgatatgctcgagcacttccgggtgcaccccatccctttggagtcgggaggctccagtgatgttgtccttgtcagctatgtcccatcctcccagcgacagcagggtgagcagagcaggtctgcaggggaggaggtgcccgtgcacccaagaagtgaggaaccgaccacctcccatgacccaccccagccccctgaacccccttcatggacagatcccccacagcctggggcagaagaggcgtcgagggcgccagaagtggcggcagcagcagccgcagcagccaaagagaggcaagagaaagagaaagcgggcggtggaggggtcccggaagagctggtccccgtggttgagctggtccccgtggttgaattggaagaggccatagccccaggctcagaggcccagggcgctgggtctggtggggacgcgggggtgcccccaatggtgcagctgcagcagtcaccactagggggtgatggagaggaagggggccaccccagggccattaacaaccagtactccttcgtgtgagccaaccccacccgctccaccctttttaaaccccccagccctgctcgtgagattgggctgggtagggacagaggaggccgaaatccctcccccatgcttcctgacccttgttggccaagggcatctttgatggtacaagcagaggctcgggagaggctcccgtcacacactacaggtcccctccccagggcaggggatttgggctccatgagctccttgaggggctcttctggtcagccccaccctgggggccatttccccattaactacccccagcccgaggcagggtgagggggaagggctgtcagttacattaaggtggttgttgttgttgttttaaacaaaatggagaagcataaataaataaaaaggtttatctcggttcaaaaaaaaaagtggaccaaaacag

SEQ ID NO: 504365 - DNA, 248 bp, Homo sapiens
tgggtttccaaaactgcacaaaacattttatttttttgggaaaccccatggccccctttttttgaaaaatggggcatgggggaacccaaaattattttgggggggaaaatttattcatccttttccaccttgatttcaaagaatgagttcaagtcaggacaacaggttttggggggtggggcaaaaaaaggggagccaggggcattttaatcccccccctaattttcctttttttggaaattaggatt

SEQ ID NO: 504366 - DNA, 550 bp, Homo sapiens
gcttctggtaaggtggtaatagaagctcagactatttttatgtggatttcagttttcatcatcagaagtcctagacagtgacatttcattaatgggtgggagtccagctcatggcattgctgatgtatacagaacgagttgcgagtgaggttatgttgtgcatttcagtttttgtactgtaaattatgagactaaacaatttttacatagtaaatactgtgtatttaccaaagtatttgaaatgcagttgatgtaagttaattaactcagaatactgtgtaacgtatctctaaaacgactagaaaaaagaaatgtgtagtatctcagattacgaccaatctgtgctagatatgaatctttgatagaaatagaaataatctacatgggccttggtgaaatctggggaagagctttaggattctagtagatggatactgaatactcgaggcccacttagattattaatgtatacattgtgtttttgtctttatgctatgtacagagaaatgtgataattgtctataataaatatttgtatgatgagaagaaa

SEQ ID NO: 504367 - DNA, 180 bp, Homo sapiens
ggctagcaccatagcttcaataccctgtttccaaaaataaaaaaaaataaaaaattagccaggtgtggtggtgtgcaccagtaatcccagcttctcagaggaggccaaagcaggaggatcacttgagcccaggagttggtggccaaagtgtgctacaatcacaccactggattccagcct

SEQ ID NO: 504368 - DNA, 414 bp, Homo sapiens
ccattttacctgtcctaaaaccagacaaggcttacaagttagttcagaatctgcgccttatcaaccaaattgttttgcctatccaccctgtggtgccaaacccatacactctcctatcctcaatacctccttctactacccattattctgttctggatctcaaacatgctttctttactattcctttgcacccttcatcccagcctctctttgccttcacttagactgaccctgacacccattaggctcagcaaattacctgggctgtactgccgcaagttccacaaggcagcccccattacttcagttaagcccaaatttcatcctcatctgttacctatctcggcataattctcataaaaacacacgtgctctccctgctgatcgtgtccgattaatctcccaaacctcaat

SEQ ID NO: 504369 - DNA, 828 bp, Homo sapiens
agcctaggaggcagaggtggcagtgagccgagatcacaccactgcactgcagcctgggcgacaaagactgtcaaaaaaaaaaaaaaaaaaaggttattacccaaaaagtcaaagggagaatttataagggaatgtcagaaaatactgtggagggtggattggaaaatacagaacgaacttcatcaaattctggtggagatggtggttggaaaggcaacggcttcacggtggaacatgatatagtctatgacctttggtatgtggacattggagaatgtatcttcaaattaactaggcctaacttcccacctttagaaatatacggtaaaaaaagaacaatttaaattcaaggccagaagggatttattaaccgttcaggtggtgggaaatagagattaaacattatgtggagaaaacacagcgatttcgtggacttattcataaaataaaggctttattaaaatggagaattgtcaaaaggtgatgtccctaaatggaccttattccatacaggggatcagtatttggacaaatatcttgggggaagtagacaattcctagaaagacatggattaagcaaaaatatttcaggaacaaggtgaagacattacgttgggtaatttaaaaatctgcacccttgccttgaacacattgtgaaatcccaagtccagtgtctccttgggtattttgttaccaaagctttgaaaattcccattgggataaaattgttttaaaacttgggagacgttgtaccatttaaagtcaagagccttggtttcagataccagtgggaatctacacgggaactctgataaacggaagaggatg

SEQ ID NO: 504370 - DNA, 335 bp, Homo sapiens
gtacagacatactctgagcaaagatattaataccgtgaccagtacaagagatgaccaccgaacatcagaccagtgcagacaaagtatacgatcaaatatgggttcctagaacgaaagaccctctaacaagaatcctgcctatttacaaaattggtcagtcttgtcagagattacattggaaacaaaatgtctatatagcagtagtaattcacatagaatttacttagtaacatacttcctctcttttaaacagatgtcacaaggtaagacccagaatggcgctaaggactttgggttccactggatactgtgctgtcagttatggaatctcgctt

SEQ ID NO: 504371 - DNA, 856 bp, Homo sapiens
agcggggcggccgtatctcgagccccagcggctgagggcgggcggtcgggcgcggggcgagggaggggggccggtccgcgacgactccccgtgacggcgtttctcctccgagcggcgccggttgcgcgcttggggggggcggggtacatgcccactccagtgaccatggtgcgacaacgaagagcccgacccaggccaaaaagacaagcgaaacctgccgcagacgaagggtgcgggattgtaggctgtctgcagccttcaggaaacatgtgctgaagcctttagaatgcagcatctgcgatgtgaggaaaggcacctccaggcagaaaacctcggatcaattctcagctggtggtcacagctacgtggcacaagcagtatgccaccccaacacccccgtaaaaacggacgacgaagggaggaaagtttgaaacagcgggatcagaagagaacacctgagaaagacggggacagtagtcctagtgttgcgctggaaagaatagcaacaaggaaaaggcaaggccgaaagtctgacagttctgaaagatcctcctagtgaagcaagacagcagtacagctctgcaaagtgctacagacgaagaccagcgaaacaaaatcacacctcagggcccccggctgaaaccacgtggaccggagcacttgcacagccaaggtggcagtaaactgtgggcaacgtccaccgtcatgatcacggactttaacgggagaagcttcggtccttcatcgacattctcattcacagtgacctccagtgcatggttcaaaacggcagaaccagagccagtcgggggtcagagaggaccaaccatgggttcctcccgttcctcacggccag

SEQ ID NO: 504372 - DNA, 756 bp, Homo sapiens
  misc_feature (46)..(46): n is a, c, g, or t
  misc_feature (186)..(186): n is a, c, g, or t
ttgtaaaccattcgtttggagcgctggtcccagttggcgtacaggntgtaacatggctctctagacttgtattgtcctaggtagcactccttgcgtatcataatcatagctggcgttggtagttcctacatcgcaatgttgactatactgacccgtgacgagacaggccggagtcgattcatgacncatatagtccaagatgtgcagatacgtgtagggatcactatacctggtgttcgtactcactcgaggagctccatggcgatgcgtcgtagtatcgaagattaggtccactcgtctctgaaaattacgcttcatttcaagtagtttatcagtcccatcctttcccttctctgagcaatggaactactgtatacaaataagccttctggcctattttgcatcttatacttccgaaacccgaatcttagtaggcatgttcctcattttcaaaaacgaggggaacaagaccacgagtttttcacggagaaaactggcaggacaaatgggcacaagaaactcagaaggcagctattcccagcagcttcctagttaacaagccccatgctgcctccagtctttgtctgtattcttctgtatttaaccttcagattgtaacgccttttcttggcaagcttttcttcatttttttaaactcttttcctgaaactttttatgaatggctatggcaccattaatgctgctgaatatctttaaactctgcacaagcaagtgtgtagcttacggccactactg

SEQ ID NO: 504373 - DNA, 540 bp, Homo sapiens
  misc_feature (3)..(3): n is a, c, g, or t
  misc_feature (61)..(61): n is a, c, g, or t
  misc_feature (63)..(63): n is a, c, g, or t
  misc_feature (70)..(70): n is a, c, g, or t
  misc_feature (167)..(167): n is a, c, g, or t
  misc_feature (176)..(176): n is a, c, g, or t
  misc_feature (209)..(209): n is a, c, g, or t
  misc_feature (211)..(211): n is a, c, g, or t
  misc_feature (233)..(233): n is a, c, g, or t
  misc_feature (244)..(244): n is a, c, g, or t
  misc_feature (281)..(281): n is a, c, g, or t
  misc_feature (367)..(367): n is a, c, g, or t
  misc_feature (370)..(370): n is a, c, g, or t
  misc_feature (435)..(435): n is a, c, g, or t
  misc_feature (456)..(456): n is a, c, g, or t
  misc_feature (499)..(499): n is a, c, g, or t
  misc_feature (519)..(519): n is a, c, g, or t
ctnatatgaatgcagttctgattgtacgacacagcaagaaaattcactttcacagttaacntntcatctnactcagtagaacacaaagtaaatggtttataactccaatatttgcaaggaaaatacagtacaaattactaaaaaatactaaaatatagaattgtgtncaggcatcnacactacatcaatagcagcagtaacctgaaatnanaaacttttaataaaaagttctnaaatataaatnatatggcaaatgtacagtacattgcttttattcagtntctttttccagtgttttgcagtagaacagggttcctaccatcacctcccttaggtttaaaaaacccaaaacacaagtgtgccgttnttncttcagcatcatgagtgtgagtgagctgagtgtggaataccactgtgtctgtagcttcggttacnactgctttcactgtgattgtntttgtacagattcattccattaggaggaaatatggtgtgtatnacaaacccctccctcgagangggttcattgcctattggtaa

SEQ ID NO: 504374 - DNA, 224 bp, Homo sapiens
gtttatggcaggacagcctcttctcagcatcctggtctaagctaaagtgccagtcctgagggctcccttcccatcagcccctttccacacccttctctccatttgctcccccttgggagacaggatgtcactctgtcactcaggctggagtgcaatggcatgatcatgactcactacagccttgaactcctgggctcaagagacccttctgcctcagcctcctg

SEQ ID NO: 504375 - DNA, 422 bp, Homo sapiens
cccaggccgggggggttttttggtttccctttttcccccgggccggttttttttttgggatttgggcccccccttcttccccgggggggggggcccaaaaagcccccccccctttttttgggggggggcccctgtttttccaaggttgtttttccccccccgggggggcccgggatttttttttttggggggggccttggggcctttttccccccccccccatttccttttttttgttccccccccctttggggggcccccccccgggggggggccccgggggtttttttttttccctcccccccccctggggtaggggggggggggggggggtggaaggggggggcccccccccccggtttgggggtttgggggggggggtttttttttttttttaaaaattttttcttttttttttggga

SEQ ID NO: 504376 - DNA, 853 bp, Homo sapiens
ctatatgctagtacgagccccggttgaatcggcaccgaggatcttccgtggtggtagacggggtttcaccatgttggccgggctggtctgggactcctggcctcaggcagtccacttgcctcagcctcccaaagtgctgggattataggcctaagccaccgtaaccagccagaattttttttttttttaaagcaccagaacattgggggaaagattgtgtctttaacaaattggtgctgagaaaactgtttaaccacattacaaaagatttgaagtttggacccttacctttacaccatatacaaaaacacaaaactttttaaagattaaacttaagacctgtaaaaaaacaaaaaacaaaaactctctcgacacttagttctctctcttcttcttctctcttcaaattttccccgaaggcgaaagagtgccccagaggtgacacacaggggtgtggctctccggcccccagaggttgttctgttgaaaacaaccacggacggctctaaaacacggttggtagactctcccctgtgttttgcagagacaaagaggcgcccataaaggaatttctggcgcattttggcaacaggagaaccatctccagcgcccccaacaaagaggaactcctacacccgcggttgttgtgtgcaaaatgtgcgccccggtttattattccagggcttttgccacggcgcgaagaaaaggcccacttcgcctctataataggccgggctgtgaaagagcgtgtgcccttccgtgcgaattttaccgcggggtttacccccccggggcgcttggaaccgcgcccaaaagagggtttacctccacgcttgcttataaggcggggccc

SEQ ID NO: 504377 - DNA, 254 bp, Homo sapiens
atggttggagcaacacgatcgtacgcgtatcgagttgctatccatacggtgaatcccttctgtatttctgtgtggacgattgtgacgctcggggcacaccgggactgtcaccggcgccctgccgcaaaccgttagatgccatagtccttccgaccgtcccacagctgccaactggccacaagcaccgtcgatctcagagcctcgggtatcgcgcactgtcaccgggatcttccatgcgctcaagttgtctcgaa

SEQ ID NO: 504378 - DNA, 696 bp, Homo sapiens
tagcatgtgtctaggtgcgtggctgggtgttgagtcggccgagggatcgctggtactgctatggcggggtcatcggatatccttcaccatggcgtccagcccggccccagcgtcgcgcgaggcacctgactcctctcacctccagccctggccgagagctcccggcgtactgatgccctcacctcctacgccctggccgtgacctttccaccatttgacggatgagtccgaggggctcctaggcacagcaggggcccctggaggaagaagcaggtatggagaggtagctcgattggcagcatggcatggagaacgggactaccgcgccatcccagagctggacgccctatgatggcccgagggactggctctggactgcatgaggacgtacgagtgagcgtgatcggccagctcagagggcaggctagctagacgctgggtccactgccgcgtcagcgtgacgcgggaggcatgcgccggggcctttgggcctgcagtgctgcccgtgcgactccgtgatcttgaccacgcgattgcacgcgaggaccgaaggcagcgctcctgaccccgcaatccgcctgtccaggtgctgccgggcctgccgtcgtgactggcgaggcgcgggcccgatcgagagtgagtccgagtagcattctgagaccctgggagtgcctctccacaaggccactcctggtc

SEQ ID NO: 504379 - DNA, 453 bp, Homo sapiens
cagaaatggaaagaagtgtgagattttattctaggaaaagcaagcacttacataccactctaacggtttgagaatttagcaagcatgaagaaagatattctccttaaagttttgccttaaaattattgaaatgtattatattctttttcaaattaatcaatttggttaaagaaataattaagtaggctgggcgcagtggctcacgcctgtaatcccagcactttgggaggctgaggcaggtggatcaccaggtcaggagatcgagaccatcctggctaacacagtgaaaccccgtctccactaaaaatataaaaaattagtcgggtgtggtggctggcgcctatagtcccagctactcgggaagctgaggcacgtgaatggcataaaccctgtaagcggagcttgcagtgagccaagatcacgccgcgacagagggagactctgtctcaaaaa

SEQ ID NO: 504380 - DNA, 161 bp, Homo sapiens
attacccgagtagccgacaggccacctgcacatcgcacacaccacccctacagtctgggagtgtctgagaagaacacaggcccagggatcagaacaggagggtgtccgcatggcatgccaccacactaagtaacaaccgtgtaggtgacacgcataataga

SEQ ID NO: 504381 - DNA, 1141 bp, Homo sapiens
tgttatttattattttcttttattatttgtttcttcttatatatatatatatatatataaaaaaaaagagagagagagaagaagagagagagagagagagagaggaggggggagggaggagagagagaggggggggggagagagagggggggggggggggtgtgtgtgttaattaaagagtgagtatgttttttatttgttgcgtgggagaagaagagagagaggaggagagagaagagggtggggagggggggtggtaataaatagaggggggtaaaaaaaaaataagaaagaagagagaggggtgggggggcggataacgagggggggaggagaaaaagaacaaaaacgatgggagggcgagagaaatctccacaagaagagcggcgccaggcaggaggagaaacaaaacgcggcggggggggcgcggcggccctccggcgggaggaagagagggagggggagcagcgacagagcggggggtcggcaaccacgagcgcgaaacgtggcggaggggaggagagagaaaaaaaaaggcgaagagacggacggggcgagggcgaacccaaaacccaaacacaaaaagacgcaaccggtggggcggaacagccaccacaggaaacaacaacgcagaaaaacacccacgagaagaagaggaacaccagagacgggcaagcacccaacccccacaaaaaacccgaacaacacccaccccacaggagagcgacaggcaggcgacccacccctacaatagagaccaggagaataatccatggatgacctacaccacacccccccaccatgtacccgcatcaacaaaacaaacacccaacagcagagacaatgactcgacgacccgtccacacaccaaaaagtcagagcaacaaaggtgggtgaaaagtcgatacgagagacgaacgggtgagcgcaacaaaaaaccgccgcccagacgcagggggggggaccgccacgccacaccaaaaaaagaagctggaccacgacaatctcccagaccaaagaacccacgcgaacacgaacgaggcacgcgggccaacgccccacaaacaacgagaaacccacaaccccagcccgagggacaacaaaaaacgccaccagaacaagggaaaaaagcgaaaggaga

SEQ ID NO: 504382 - DNA, 862 bp, Homo sapiens
  misc_feature (2)..(2): n is a, c, g, or t
  misc_feature (69)..(69): n is a, c, g, or t
  misc_feature (90)..(90): n is a, c, g, or t
  misc_feature (97)..(97): n is a, c, g, or t
  misc_feature (117)..(117): n is a, c, g, or t
  misc_feature (119)..(119): n is a, c, g, or t
  misc_feature (122)..(122): n is a, c, g, or t
  misc_feature (124)..(128): n is a, c, g, or t
  misc_feature (136)..(136): n is a, c, g, or t
  misc_feature (166)..(166): n is a, c, g, or t
  misc_feature (168)..(168): n is a, c, g, or t
  misc_feature (180)..(180): n is a, c, g, or t
  misc_feature (208)..(208): n is a, c, g, or t
  misc_feature (214)..(215): n is a, c, g, or t
  misc_feature (220)..(220): n is a, c, g, or t
  misc_feature (257)..(257): n is a, c, g, or t
  misc_feature (389)..(389): n is a, c, g, or t
  misc_feature (428)..(428): n is a, c, g, or t
  misc_feature (503)..(503): n is a, c, g, or t
  misc_feature (539)..(539): n is a, c, g, or t
  misc_feature (589)..(589): n is a, c, g, or t
  misc_feature (660)..(660): n is a, c, g, or t
  misc_feature (674)..(674): n is a, c, g, or t
  misc_feature (726)..(726): n is a, c, g, or t
  misc_feature (735)..(735): n is a, c, g, or t
  misc_feature (763)..(763): n is a, c, g, or t
  misc_feature (772)..(772): n is a, c, g, or t
  misc_feature (787)..(787): n is a, c, g, or t
  misc_feature (789)..(789): n is a, c, g, or t
  misc_feature (799)..(799): n is a, c, g, or t
  misc_feature (853)..(853): n is a, c, g, or t
tntagatgttttgtaatgattagcaacattgtaaacaccaccaggtttttccaacactaactgctagtnttttccagttatttttttttncccaganaaaatatccaaacctaatananttncnnnnnccggtganaccatcagcctacccccccaaatcccccancncgcaatccttancatcatgcatatcatttcaccatttcanaaaacnnatttnaaaatttctacaaactttcccagtgtaaaagactccncaaaagccgcatgacaacattaaactacaaaattcactttggaaaagtagggagttatttttctaattttggctttaagattttttttttttaaatgggttaaaagatacggtgaggagtgttttgagagangtggagaaaaggagcctccagttaatgcattcaccatanctgaaaatacttcagttatacaaagggaacacttcgagagttaggatatattataaataagtctctcagcaagangaacggatgaacagttcaattgcacccacaggaganaggtcttcttggagaatgcctgtttatagaatcttctgttaaatagagtnggctacttctaatgattcaccttgtactaaaacaatatcataagagttcatgtacttttctaaaagctcanccactctatcattnagatatccaattttcagaatgtgctcaacattggccactccatctgccattnttaagtttncttgggagtttcccagaagaattatgtnactattgtnttttagttgattgananattctgtatncctcaaggcaccatcatggtttgtaaaatacatgaataagttctcctttaaatncctttgagc

SEQ ID NO: 504383 - DNA, 116 bp, Homo sapiens
taggtattaaaattttttaaaattgtttgcggtggtttaaaattccttgattctaaaaaacactaatacattttaaacgggtaaattttatggtatatgatttatagttcaggaaa

SEQ ID NO: 504384 - DNA, 570 bp, Homo sapiens
tagaggatccccgttcgacggtgtctgagcactgcagctgaccagctgttccctaagatacaacaatactgaaattagaccaattagtaatcctgcaatggtctctaagtgttcaagtaaaaggaagagttgcatatctctcactttaaatcaaaagctagaaatgattaagcttagtgaggctaaggctacgctgaaggtgaggtttcttgcaccagttaaccaagttgtaaatgaaaagaaaaagttcttgaagaaaattaaaagtgttactccagggaacacacaaaatataagagagtgaaacagctttattgctgatatggagaaagtttaaatggtctggatagaagatcaaactagccacaacattcccttaaggccaaagcctaattcagagcaaggacctaactgtcttccaccctgcaaaagctgagacaagtgagaaagctgcagaagaaaagtttgaaggtaacagatgtcggttcgtgaggtttaaggacagaagcagaccctgtaatataaaagtccaaggtaaagctgcaaccggtgatggagaagctgcagcaa

SEQ ID NO: 504385 - DNA, 216 bp, Homo sapiens
  misc_feature (171)..(171): n is a, c, g, or t
gggggctaattttttgtattttagtagagacagggtttcgccatgttgcccaggctggtcttgaactcctgagctcaggcaatttgcctttcttgtcctcccaaagtgctgggattactggtgtgagccaccgtgcctggcctctgttgagtttttcatgtctgctattgngtctttaatttccaagaactatctttttttctctgaatgcatttt

SEQ ID NO: 504386 - DNA, 335 bp, Homo sapiens
ttttgagacagagtcttactctgtcaccaggctggagtgcagtggtgtgatctcagctcactgcaacctccacctccggggttcaagggattctcctgcctcagcctcccgagtagctgggactacaggcgcccgccaccacgcccagctaatttttgtatctttagtagcgatggggtttcaccatgttggccaggatggtctcgatctcctgacctcaggtaatccacctgcctcggccgcccaaagtgctgggattacaggcgtgagccaccgctcccagcctcaccgagcctgtttctatgatctattttctccccttctgtcgtcttctc

SEQ ID NO: 504387 - DNA, 692 bp, Homo sapiens
cttggtggctcatgcctgtaatcccagcactttgggaggtcgagacaggcggatctcttgaggtcagaagttcgagaccagcctggtcaacatggtgaaacgccgtctctactaaaaacacaaaaattagccacgcgtggcggggggggcacctgtaatcccagctactcgggaggccgaggcacgagaatcgcctgaacccgggagacagaagctgctgtgagccgagaccgtgccactgcactccagcccgggcgacagagcgagactcagcctcaaaaaaaaaaaaaagaatctttatctggtcttggtgacagggctatggggaggcaggacctttaacaaagtctgtgtacggtcttgaggcctccaccctcataaattagactactgtggctgacactctacggagtagactccatcatcgtgactagcgggtttgcccccatcttgtggctttctctctctctctctttggcccttctgctatgcgatgctgtctcctgctcatgttttgtgaccacagcacagcagggccctgcaccagtatgccttgcattggggacgttcctcgtcttccagaactattgacgtccgcacactcctggtcccttctcacctttaccccgtctggtgcaccttcctggtcctaccgggcccaaccacaactctgttttccgctgcccatgcca

SEQ ID NO: 504388 - DNA, 281 bp, Homo sapiens
tctatctcattcatagccatcaattgcctaaaaagaaagtcattatactcagcgctacgatcagcgaaacgattgctaaaatgatgtttggaccagaagttaaatactgggatgttggatgacggaatcaaaaggggaaattgtgcaaattcccatcaaaagttttagccgctatgcgataaaagagaacgaagaacttttgaacttggcaaaaaagttaatagacatctacaatcctaacagcactattattacctacaaaggatttatggaacaagatg

SEQ ID NO: 504389 - DNA, 300 bp, Homo sapiens
  misc_feature (10)..(10): n is a, c, g, or t
  misc_feature (94)..(94): n is a, c, g, or t
  misc_feature (117)..(117): n is a, c, g, or t
  misc_feature (121)..(121): n is a, c, g, or t
  misc_feature (133)..(133): n is a, c, g, or t
  misc_feature (191)..(191): n is a, c, g, or t
  misc_feature (198)..(199): n is a, c, g, or t
  misc_feature (219)..(219): n is a, c, g, or t
  misc_feature (223)..(223): n is a, c, g, or t
  misc_feature (228)..(228): n is a, c, g, or t
  misc_feature (231)..(231): n is a, c, g, or t
  misc_feature (250)..(250): n is a, c, g, or t
  misc_feature (259)..(259): n is a, c, g, or t
gctctctgcngcattatttttcattgtaaaatagcagatcgaatttattattcaataattataaaatggtcaaatgtatgtgactatatttggncaatgaaaaatgcggctgttaanggcngacaatactgangattcagatgatgttactgatgaaaataataacagatgacaattattgagcatttctngcattcnncccggcattaccttatttgnggtncaggnctnccaaggggaagagtgactngtggcaggngtgagaggttccgaggcacaaaaggaagataggcattcaag

SEQ ID NO: 504390 - DNA, 1457 bp, Homo sapiens
gctcccgccggtgggctccttgctcggccggtgccgcggcatgggagaggccgagtgtgtgtgctgtgcgtgggtgcgccggaggcgacaagggcccggtggtgagtgctgtgccaccagccctggccggagtgagacagtggtgtggagccccgaggtggagtgtgtgcctcttccacgccatgctgggccacaagcccgtcggtgtgaaccgacacttccacatgatttgtatacgggacaagttcagccagaacatcgggcggcaggtcccatccaaggtcatctgggaccatctgagcaccatgtacgacatggcaggcgctgcattgagtctgagatttcttccattcccgaatccaggagaggaacttcgtccttccagaaggagatcattcagggaggtccgagaaggacaacacgtgactgatcagaacgaagcgcagatgaccacgcaggcagactgagagggccggcagggtggaccccccgagaatcgcggccctgaccgatgcctgccccgcacaccttcgagcgaagttgcgggcgccgagccgtccggacgaggtcgtcccgggcagcgagccagcgagcagcgcaaccgcccgtccagggagcgcgggagcggttgacgaagacaagcggcaggcacgccgacagagggggggcaacgaggcacggacgggggatccacgcaggagagaagagggccgaggggaccgcgccgagacgcaggagggagcacgcgaagtgccaagagagaccacagcgtggcacggccgcaacagcgcgcagcacagccacggcacaagctagagcaggcccgtcaggacgagcccgagggatgttagggccaccgcgagccgcaaagaacacgcactgaggcctgggaatggcgtaacgcatgaggctgggataccaagcttaagagaggcatgggtcgatatagaggctgttgggcgaagccataagaagggttgcaccgagcgccgccccgagaggcgccagcagcacatgtaaagcttcacgctgagagccccgagaagtgccggcaaagtatcaatgagcggcacgcagacagatgagcccgacagcagctactccacagtgggcaacgacacagcgcgatgcaaacacaagtggagcaccgcgacacgggagagagagatgaacacagcacggacgaaggacggccgccggcaggaggagacagccacgaaggagagagaaccaggacgcctgaagatgaggacagcccgaggaagcgagaggccacgccagagcgcgagaggcgggcgcgacacgaacggagccggagcacccctgacacgggcgaccccgcagagacgacgcggcgacaccgacgagcggagcgccgcgcgacgccggggagggcggcgcgagtaagtgaaccgacacaccggcgcgcgagcggcggcaaggcaacagtgggccaa

SEQ ID NO: 504391 - DNA, 461 bp, Homo sapiens
gggatcgagccctcgccgaggcctgcctgtcatggtgccctgcgccgcctgcgccggctgtcacccgggccgcgcgggccgtgagcgtcatggccttggccggggcccctgtgggctggccatgctgcgcctggcgcttggatggccctgctcggggcctggcgctgcgtgcggctgctctgactcctctgcagcatcgtcatcatctccgcctgcgcagtgactgccagcgccccgccggcttcccacctggccccgctggctgccccgcgccgggccctgcgacccttgacctagctagctcttctgccacacctgcatgtgtcgcccactgggcccacacccaagtgctgcctgcaggacctgctgctctggacagcccgaacggttgaagcaggaggctgggacctggaaaacttgaaccatcagtaccctaggccggaggaagcagtggtgccagc

SEQ ID NO: 504392 - DNA, 389 bp, Homo sapiens
atggctcggtgcagccttgaactcctggggctcggggaatccttccacctcagcctcccgagtagctgggactgcaggcgtgcactaccatgcctggctaatgacattgcttttatgaagcaaaacataggatgttgtcgggcatggtggctcacgcatgtgatcccagtgctttgggagcctggggcgggcagatcacctaaggtcaggagttcaagaccagcctgagcaacatggtgaaaccccgtctctactaaaaatacacaagttagccgggcgtcgtggtgtgcacctgtagtcccaactactcgggaggctgagacagaaaaatcgcttgaacccaggaggcggaggttgcattaagccaagattgtaccgctacactccag

SEQ ID NO: 504393 - DNA, 368 bp, Homo sapiens
  misc_feature (222)..(222): n is a, c, g, or t
  misc_feature (289)..(289): n is a, c, g, or t
  misc_feature (355)..(355): n is a, c, g, or t
taaaatgttttctagccttggaacatggtgaaactctgcctctacagaaaaaaaaaaaaattagttgggtatggtggtatgcgcctgtggtcccagctacttgggaggctgaggtgggagagtcacttgagcctgggaggcagaggttgcagtgaactgagattgcaccactgcactctggcctcacagagtgaggaccccgtctcaataaataaataaatnggctgggcgtggtgcctcacacctgtaatcccagccctttaggaggccaaggtggatgaatcatttnaggtcaggagttcgagaccagcctggccaacatggtgaaatcccgcctctactaaaaaatacaaanattagccacgtgt

SEQ ID NO: 504394 - DNA, 481 bp, Homo sapiens
tggctcgctatggaaggatgtcatggacggatggaataactataggtgttacatcccacatgatatagcaaaatctactaaacatactcttcaaaaataggtgctgaatatcttccattataccctatcagatcctatacgtctctctaacctatctacaacactgtatgtgccttaggaggttgacctgcattgaacacatcattgggcttactgtctgtggtcaatggcaaattgtagcaggagcaagagcagggttgagatcccctggtctatatcctgcagggttgtcctgggtcgtcttcattccaccacagaggtatcatcccttgtaggcagccttctcatcacaaggcccgctgactctagcttttgaaaaaatactgctcttcagatctaggaatgaaaataatgtctatttcttattagagcagggatactacagtatctcttatagttatcctacatgcttgcttcacag

SEQ ID NO: 504395 - DNA, 198 bp, Homo sapiens
ctatttctcgatcgttatataataatgagagccagagcaaactgtaagagatactaagtaatagaggctaagggggcactgtagttataggcaacgcagtcaatttttctatataaaggattctctaaacctgccataaatgtaaacatgaagcaatagcagcctaaggaacagaacacttagaagcacataaaacat

SEQ ID NO: 504396 - DNA, 121 bp, Homo sapiens
tccaagatgagccggggcaacatagagagaccctgtctccacaaaaggtaaaaaaatttacccaggcttgcgggcacacatctctaattccagtggctggtccggaggggggatcctctag

SEQ ID NO: 504397 - DNA, 180 bp, Homo sapiens
accactaatgagacagaaattcctctcctgcagggagacgattgttgataatctgttagaggaaaatcaagggctttagtctccagggtgttcctgggggacacatttaggaatgtgcctgtggagagaaaaaaggcaatggtaattaagtatcttttcctgaatgctggcctttgaatg

SEQ ID NO: 504398 - DNA, 340 bp, Homo sapiens
aacaaacccgtgagaacatgaacgagacatctgttcgcttacatacatagtccccacaagcctagggctgcccgccgtggtacatgagcatgctatttcgcgcgctctcgatcgatccccaactccaaatatctcatccgcaatccgaatgatcaacagccgaagagagtgagctaatcaaactaacctcagaacgaatgataagccatagcacaaggactaaaggacgaacctgatctcttagactagtatccgtagtcatttttattgccacaactaacctcctcggactcctgccttactcatttacaccaaccacccaactatctataaacctagc

SEQ ID NO: 504399 - DNA, 436 bp, Homo sapiens
  misc_feature (4)..(4): n is a, c, g, or t
  misc_feature (129)..(129): n is a, c, g, or t
  misc_feature (150)..(150): n is a, c, g, or t
  misc_feature (152)..(152): n is a, c, g, or t
  misc_feature (158)..(158): n is a, c, g, or t
  misc_feature (166)..(166): n is a, c, g, or t
  misc_feature (225)..(225): n is a, c, g, or t
  misc_feature (242)..(242): n is a, c, g, or t
  misc_feature (255)..(255): n is a, c, g, or t
  misc_feature (261)..(261): n is a, c, g, or t
  misc_feature (269)..(272): n is a, c, g, or t
  misc_feature (277)..(277): n is a, c, g, or t
  misc_feature (282)..(282): n is a, c, g, or t
  misc_feature (285)..(285): n is a, c, g, or t
  misc_feature (293)..(293): n is a, c, g, or t
  misc_feature (295)..(295): n is a, c, g, or t
  misc_feature (299)..(300): n is a, c, g, or t
  misc_feature (311)..(311): n is a, c, g, or t
  misc_feature (330)..(330): n is a, c, g, or t
  misc_feature (332)..(332): n is a, c, g, or t
  misc_feature (336)..(336): n is a, c, g, or t
  misc_feature (338)..(338): n is a, c, g, or t
  misc_feature (345)..(345): n is a, c, g, or t
  misc_feature (360)..(360): n is a, c, g, or t
  misc_feature (376)..(376): n is a, c, g, or t
  misc_feature (381)..(381): n is a, c, g, or t
  misc_feature (393)..(393): n is a, c, g, or t
  misc_feature (416)..(416): n is a, c, g, or t
  misc_feature (424)..(424): n is a, c, g, or t
  misc_feature (435)..(435): n is a, c, g, or t
ggcngcccaggcatcttccatgcacacacacaccccgccccgttacagtttaggggttaataagctttggggagcgcaggaggcaggtccacagttcatcaatcccaagacacccccatgaggtagggntgcctcacacagccagacggntntcaagngtatgatnggtagctttttcctctcctagacatctccaaaaataagcctacatctggcaactgacantgtcttaaatacaatgngattcagccactncaaggncctccatnnnncccanacccnggntcattaangntatnnttacaccacanatcccaagtccactaaaananacananggccccnaccacaccttctgcngggggggctggtgcgnaggtnttggctcttgtncctttctccctgggggctcgcgnggggcccntcttcggggtnt

SEQ ID NO: 504400 - DNA, 320 bp, Homo sapiens
agaggatcccgtgatgtatccccaacactaaggtatcctggatgtatatgaatcttctagagggcattcttcagagtagattagttagcctcctggtgttgcttttcttttagagatggagtctcaccctgttcccaggctggatggcaatggcgagatcttggctcagtgcaaactctgcctcctggtttcacgtgattcttctgcctcagcttccggagtagctgggattacaggcatgcatcaccacgccgggctctttttttgtgtgtgtatctttagatagagatggggcttcaccgtgttgggcgataacatca

SEQ ID NO: 504401 - DNA, 317 bp, Homo sapiens
  misc_feature (210)..(210): n is a, c, g, or t
aaaagattgaaaataaccaaagcctcaggaggtgaacgaggtcacctcctacggcagggaggagaaatctgagccaagtggcaatttcctttctaatactgagcactccattagtctccttaaaaactgctttcctaaggggaaaacgaggcagcacaggacaaggatttgggggtgaaatctcagctccacctctctttagttgtttanccctgggcaaataatgtaaccattctgcacctcagtttcttcatctacgaaatggggatactaccacttaccttggctcttgtgaggatggtaactcaagctctggg

SEQ ID NO: 504402 - DNA, 365 bp, Homo sapiens
  misc_feature (51)..(51): n is a, c, g, or t
  misc_feature (67)..(67): n is a, c, g, or t
  misc_feature (78)..(78): n is a, c, g, or t
  misc_feature (95)..(95): n is a, c, g, or t
ggaattgagcaagaagccacattttaaacgaaaaagagagaaaagaccagnaaagtctgtgtcttcnggtccaccccnttctctcttccaccccntaggtcagcacccctcacgcccctcagctctcaccctcgttagagtccaccagggatccttcctgcctcctcaaccccctcccgcccccgcgggcctgttaacccggagcagatttgggaagggaaatgtggctaatatctctagcagctgtcaaaggagggaccttccttcaaagggactggacagggatcctccacaagttctccattagctagcaggccagcaatttgataaggagcctggacctccgctacaagttgccactcagt

SEQ ID NO: 504403 - DNA, 1561 bp, Homo sapiens
  misc_feature (1560)..(1561): n is a, c, g, or t
ggacgcgtgggtcgacccacgcgtccggagcgcagaatatcaagtgctggcattgtcttgggaccacttgcacctccacctcctccaccacgtcccaccagggcctgcacaggcttcagtagccctccctcctccatccaagggacacactatcgggaacacttagatcaagaaagccgtgtagccgtaagcatggcgccgtcgaggcggaatagcctcataggaagccgagccaggcacacataccaaacactcacagaaacaagcaccaccaaaaaaatggaaacccagctagcacagagtaaacagaggaagaacacaaagaatagatgcaagagaacacacaaacaaagacaaacaaacagaaaaaaaaagacccacccaactgagaggaaacaaaactaccgacaaaatcgatcaaacaaaacagagcagcaacaccggggagacaaaaaggcacaagagaaagagggaacaagaaaagaaaataagagcagggagaacaatgagaataaaagagacaaagcagaacaagaagacaaagccctacaccgcacaggagaaggaggacgaagaaagacacaacaaaaagaacaacaaaacaagggcagcacaacatgaccacataaaaactacaaaaaaaaaaagggatagaaacaacccacaagcacaccaaagaccaacagacagaaaacaagataaaagaacaatgacaaccaaaggggaagaagaagcataacgcaaccacaaaaccccacatccaatctacccgacaaaacacacactagcaacaacaagacacacacaagagtaccacatacactaaaacatcctatcataaatcatcctgcgcaaccacactcttacatatgcctataaacctacctacccacaaaaaccatcacctacacaacgcgcactaacagtcgcaacaacaacgaccaccccaccaaagataacataacagaaacaacgatacgaccacagatcgccagacacggacaacacagcctctcgagcgggcacagccgacagtcatccatccaagccacacagatatagcccagcgcgagacgcgcgagcacacaatcacacgaacgctacggagagagcgagacacgaacccagcgtacgagagaacagaaccagaacaagacgcaccaggagcgcgcaacagcacacggacagaactaaacgaggcggcatgacgcagacagagtagcgcacgtagcctggaacaacataaacatcagagagagaacacatacaaaacgaagaacaagacaacatagatcgaacaaaacacgagaacaaaagaaaccaatgaaacaaaaacaacaaacaactcatcactacatacagtcaccgacgaaaagctacgactgaacgagatcatcaatagacacaatagacatgaaagacagataagacagagaatacccaatcacactaggcagacacagaccgaacgctacacgaacatcaacaaacgacgcaacaatacataaaagatcaaccaacaaacgactagtcactccgcccttgctacgcttccttccnn

SEQ ID NO: 504404 - DNA, 439 bp, Homo sapiens
ccagacagaagattgaacacggctacaagaaattggaaatgacattgatctcattttcctctcaattgcagtcatgatatcacatgaatatcaactggaccatcagctcagaagtaggtgagcattatgatctctaaaacgccagtgctgatttctaatccttctcaaaaaattccggatcccaaattgagggctgatgagaagatcttacaccgaaggcactaactgggactaattgtgagccagcaacatgtgaaaggctaaatccaggagatgcagaaatgcacatgggttccaggtgtcttttctaagtgacaatgggccttccttactggacagtagtcaggagacaattcaaatgtacttactacaaatggcaggtgggcaaccaaagggaagagacttaaaagacctcccagaactgggatgcaaaatacgc

SEQ ID NO: 504405 - DNA, 393 bp, Homo sapiens
  misc_feature (15)..(15): n is a, c, g, or t
  misc_feature (229)..(229): n is a, c, g, or t
  misc_feature (267)..(267): n is a, c, g, or t
  misc_feature (288)..(288): n is a, c, g, or t
  misc_feature (316)..(316): n is a, c, g, or t
  misc_feature (329)..(329): n is a, c, g, or t
  misc_feature (346)..(346): n is a, c, g, or t
gtttcctgtaagctnggccttgtgcagggtgtcagagatgccaagtaggtttgacacggcccatgccccagtgatctcacaagctcagggggaaagatccacatagccacgctgtgtagtaaccctgccttagagaagagggcgggtagctggacactcaggcagacacattcacccctgccaccaaggtcagggaggacttctgctctggagctgtgtcctgagggtnaatgaaatgggctgttgtatgtgtggttccccctacancccttccctatagcacttccnaccaggaatagacctactgctgtgggtnccttagcatggangaccagggatacaaggnctgattaaggtatcctacaaaacagattgattaattccctaaaattt

SEQ ID NO: 504406 - DNA, 272 bp, Homo sapiens
catgttgtattacaagtactcccatcttaaaaaataaaaaattaaaaaaattaaagttgactgggcgtggtggctcatgcctataatcccagcactcttggaaaacggtctagcaattcctcaagaggttaagcatagatttaccaaatggctcagcaattccactcctgggtgtatacccaagagaaatgaaaatatatgtccccaaagactttgtacacgaatgtgtacacagcagctttattaataatcgccaaatggtagaaccgact

SEQ ID NO: 504407 - DNA, 388 bp, Homo sapiens
  misc_feature (365)..(365): n is a, c, g, or t
tcttatccagtatctactcctgcaatctattctccacttagctgcttaggggatctttctaaaactcaaatctgatcatgtcactcctctattaaaacccttcaataggctgggcccagtggctcatgcctgtaatcccagcactctgggaggccaaggcgggcagatcacttgaggtcaggagttcaagaccagcctggccaagatggtgaaaccctgtctctactaaaaatacaaaaattagccaggcatgctgatgggcacctttaatcccagctactcgggaggctgaggcagagaattgcttgaacccgggaagcagaggttgcagtgagctgagattgcaccactgcactccagcctgngtgacagagtaagactccgtctc

SEQ ID NO: 504408 - DNA, 279 bp, Homo sapiens
aggatactaaagtccatgatgttcaagtcccttatagaaaatggtgtagtatttgcatataacctgtgcacatcctaccatacactttaaatcatctctagattacctataatagctaatacaatgtaaatgctttgtaaatagttgttatactatattgtttaatgacaaaacaagtttgtacatgttcagcaaggcgcaaccatccatttttttcccaaatattttgaccacagtggctgaatcacagatgcgagtatgacatgagccactggggag

SEQ ID NO: 504409 - DNA, 910 bp, Homo sapiens
gcctggggtgattccgtcctgcgcggttgttctctggagcagcgtcttgttatctccgctcgcgcctggctctcctacgctaagtgcgtgccgcacccgatggaagatccgatggacatggacatgagccctctgaggcccgagaactatcttctcggttgtgaactacaggccgacaaagattatcactttaaggtggatcattgatgaaaatgagcaccagtgtatctttcaagaacggtcagtattaggggctggtgcataaggatgagttgcacatgttaggaagcagaggcaagtgaatgacgaaggcagtccaagttaaagtaacactggcagctttgaaaatgtctgtacagccaaacggttgtcccttgggggcttggataggtaacgccaccaggtggtcttaaggttgaagtgtggttcagggccagtgcatataggggacagcacttaggtagctgtggaggaagatgcaccagtcagaagatgaagaggaggaaggatgtgaaagtcttaagtaatatctggaagcggtctgccctggaggtggtagcagggttccacagaaaaaagtagactgctgcttgatgaagatgatgacgatgatgacctggagaaggattggtgcgatgacggatgatgctgacgatgcattcgcgctcaggaagctggagaaagcgccgcggagacattatcgagaatacccaggcagaagccattgtcaccttatgggaagcctcaactcttacacaggacaaagggggactttgaaaaggaaaatctaaacaaggcattctgaaaatacgcaagtcgcagaaagggcgtctcaggcggcacaacgtagagcggcggacaagcacgcggggggaaagagagacctcaaggcgtttcgaccattggagcc

SEQ ID NO: 504410 - DNA, 130 bp, Homo sapiens
gcagggattgagtgctgctgttagtttagagaaggagagatgtctaacccttgaggtgaagggctctgggagggtccaagaagacgtaggctttatttttatatcattccacacattcagtgctcagcta

SEQ ID NO: 504411 - DNA, 117 bp, Homo sapiens
tcagctcggccctcataagcactgggaagtagatgaattgtacggtacttggcgtaaagccgcttccctcaagagtaactacaatcttcccagtgcttcagagcccagtgcttcaga

SEQ ID NO: 504412 - DNA, 737 bp, Homo sapiens
  misc_feature (638)..(638): n is a, c, g, or t
tcggtgggaccagcaagcatcaaaaatggggtgtgtagctatggagtctgacagaacaagacataagtatgaataagttagtagccacagtctctggaaggaaagttccatgtatgtgacatgagaacacagcatccaagccaaaggttttggcctctgtttcagaaaaggctcataaatctacgtgtgtggctaggtccgacaccgtgtcgcgcagaacagggagctctttctgactagctggatggcgccggcggcacttcagcctctggaagtatgaattaccctattcagctggtcaatagaaagattctcgagtggtaatacgaacatgggagctcgcgaggttctgtgaacgccgttctgcagaactgttacgttgtccacccagtcccatttcaagtttggattggacgtccagcataagacacggtggtctctgcgtctgtagtgtcattttgaccaaacggtgacgagtactgatcgtttacaaaagctcaataaaatttgacttcaagacttgtggacttgaggctgggcgcggtggctcactacctgtaatcccagcaactttgggaggccgaggcgggtggatcagacaggtcggagatcgagacatcctggttaacatggtgaanacccgtctctactaagaattttgacaaatttgctgggtgtcatggcgggctttgtagtccaagctattgggaggctgagcggagaatgggtaaccggag

SEQ ID NO: 504413 - DNA, 198 bp, Homo sapiens
attacatatagaatcgagcttgtaccaccgccggtgcttcacacggtgtgctgcccggcccgatggtctggccggagcggtgatcggtgtcggtgatcgtgccgatgcctacagctattcgcatgccccgcatgccctgccggaaggcagcgtgtggcagctggccagcgaaactgccggcaggccgatgggggggtg

SEQ ID NO: 504414 - DNA, 382 bp, Homo sapiens
tgtttatttctttttttcttgagacggagtctagctctgtcacccaggctgtagtgcaatggcgcgatcttgcctcactgcaacctccgcctcccgggtcaagtgattctcctgcctcagcctcccgtgtagctgggattacgggcgcgtaccaccaggcctggctaatgtttggtattttaagtagagacgaggttcaacatatgggccaggctggtctcgaacccctgaccttgtgttctgcccgcatcagcctcctaaagtgctgggattacaggtgtgagccagtgcgcccagccccggccagacttttttaagttcaaggaactcttctattcatcactgaccaacttttttttttttttcccggaggacccatctc

SEQ ID NO: 504415 - DNA, 216 bp, Homo sapiens
ctgacgataagtcaggttgaagaagcagtgaaactggacggcgagttgatatttgcagttcagtatataggagtctagaataagatacttccagatggggggggtgtattttataggatgaaatgagcataagatggatgggttaaccattggcagaaggctactatataaagatgtttacaaatttgcattataaaggcttagcaatatgctgaa

SEQ ID NO: 504416 - DNA, 214 bp, Homo sapiens
atcaagtagataagtgaataaatgagccagatgaactgtgtgacacggaaacacagaagtgaggatatagtggatcgagactgtggctcgcaagagagacagtgtccacccagcaacctggagaatgtgaccttattcgcgctgttacagctggctcacagctggtaatcccaggcacttagggagggcacaggttgcggtggatcagcttcag

SEQ ID NO: 504417 - DNA, 129 bp, Homo sapiens
  misc_feature (8)..(8): n is a, c, g, or t
  misc_feature (18)..(18): n is a, c, g, or t
tcagtcgnacctgatttncgtgcctctttgaagaagtaggattaggagaaatgtacttttgcgtttactgtcaccgcgtagtcgaaaagggcataggcatgcctctttgcaagctgcatagccttctct

SEQ ID NO: 504418 - DNA, 120 bp, Homo sapiens
gaggaagaagaatctgtatatctgtatatattggctagcaaatgtgccctgctctctcccctcttaaaaataggcaggcacccccatctttggcaaaggaaggcttgccctataggggca

SEQ ID NO: 504419 - DNA, 605 bp, Homo sapiens
  misc_feature (597)..(597): n is a, c, g, or t
gggctgtaggattttgcacgagggctcctggtctcagaatggcgctgtgctgtgctcttacagtcctgagcctcctacctctgctggaagcccatatcccattgtgtgccaacctatgaccggtgcccatgaccaacgccaccctggacacacatcactcggaagtggttttatatcgcattgggctttcgaaacgcggagtacaataagtcggatcacgagatacaagcaaccttcttttactctacccccaacaagacataggacacgatctttcttagagagtgccagacccgacaggaccagtgcgtttataacaccacctatctgaatgtgcatcgggatgggaccatatacagatacctgggatgccaagagcatttcgctcaattggtgatccttagggacaccaagacctacatgcttgcttttgacgtgaacgatgagaagaactgtgggctgtctgtctatgctgacaagccacagacgagcaatgagcaactgtgagagagttaccgctcttgactgcgagcgcatattccaagtcagatgtcgtgtgcaccgattggaggggaggggtccttatctggacacgtnctttggtt

SEQ ID NO: 504420 - DNA, 414 bp, Homo sapiens
ctagggggaaagcgagggtgtagttggcagacctgggaaaaatctggccacagtatctggcaggtatagcgctcctttcccttccgcagaaggttctcgggcagggcatggggaggcgcccggaagtggaacatagagggcacggacggtaagagctcacgggcctcaggtttcagggcacggaagctctctagcttttctgccaggttttcaatagctgacatccaagttctcggatcaggcagtgggaatggggggtgaaacaagaatccgggagaaggcctcaagtatttctcttttaaagcttcaggtgggtcagttagtttccttttctctactcggtaaatagggtccataaagaacggagggcgtcttgcatgctgcaaggaaccatcggaagcaggtctggatccg

SEQ ID NO: 504421 - DNA, 854 bp, Homo sapiens
tgagcaccccggccaccccccgaggccttattattcatgttggacccccgccaggagatttcggtggctgaggaatggctattataccaacccacgggccacaaaaggttggaagaacatcgagagttacttacaagggatgtccctaactggcatagagatcttggtacgagtgggtgaaacaatccccatgtgttgggtcgcaaacacaagtggatattaagggccaggaaagtgaaggccgaatccattgtcgttcccccgaagaagaatcttcagtactcacgacctttctgcccaagtactaccactttgaaagcccttcctctggcttgctaggaagctccttggagaccctaacttggaatttgttccatgcctgctctcgccccccccgaagttgtcatggaccccgctttggccgccccgtatgagcccgacttagaggttgctccagaaccaactgctctcccggatgaggatgatgacctgtgagaatgaagctggagccccgcgtccagaagtctagttttataggccagctgtcctgtgatgtcaggcggtgcagcgtgtgtgccccctccattattatctagctaagcggaacatgtgcttcatctgtgggatgctgaaggagatgagtgggcttcggagtgaatgtgcccagtttaaaaaataacttccttgtttggacctgcatatttagctgttttggaaccccgttgattccttgagtttcatatataagactgctgcagtcacatcaccatattcagtggtgaaatcttgtttgttactgtcattccccttccttttcgtttagaatcagaataaagttgtatttccaatatcta

SEQ ID NO: 504422 - DNA, 842 bp, Homo sapiens
  misc_feature (394)..(394): n is a, c, g, or t
  misc_feature (403)..(403): n is a, c, g, or t
  misc_feature (446)..(446): n is a, c, g, or t
  misc_feature (453)..(453): n is a, c, g, or t
  misc_feature (469)..(469): n is a, c, g, or t
  misc_feature (534)..(534): n is a, c, g, or t
  misc_feature (565)..(565): n is a, c, g, or t
  misc_feature (581)..(582): n is a, c, g, or t
  misc_feature (589)..(589): n is a, c, g, or t
  misc_feature (608)..(608): n is a, c, g, or t
  misc_feature (637)..(637): n is a, c, g, or t
  misc_feature (652)..(652): n is a, c, g, or t
ggacccggcggctcggcaggacccatggcggattcctcgcccgcactgtccctgcgggaaggcggccccgcgcgccgggccctcggcccctcgccgcgccggctcgcgctccggctccgagtccgaggaggccgagctgtcgctgagcctggcccgcaccaagacccgctcgtacggcagcaccgccagcgtgcgggcgccgtgggcgccggcgtcatcgagcgccatgtggagcaccgggtccgcgcgggcgacacgctgcagggcatcgcgctcaagtacggtgtccacgatggacccaggattaaaggggccaataaaactgtttacccagtgatgtgtatattttctgaagaaaactttgaacatcccagttatatcagagaagccttgngtggtttantggacttactccattgattctccagaaaatgaaactgtgatancagtttnctcaggacgaggagcnagtgtgggccgggaagacctccctcctcccagtcctcaagaatctgatgtcagcctgtgcagccngaggaagtgtcagcagagattctgcagaganttgattgcagatagtnntcacacnggcagccagaagtaaaagnagagagcagagatgaagaaagtcctatgnaatcctctatacgtnaggggattgtggggggataatctaccaaagtacgatatgttgtctacgatccactttgggtttaaaacatccctgggtccatagggcctttgaaactacttgggttaccgggggggcggcgggaaaaccggttctaaaaaggtatgggggggggaggaacacacatggggggggtaacaggagaaatatc

SEQ ID NO: 504423 - DNA, 472 bp, Homo sapiens
agtgctctatcgggaaaaaacatgggattgagaaaatttagaatttctttgcgcaccggctatcttttcgttagtacctttctttttcattcgtttttttgacaaggtcttactctgtcatccaggctatagtatagtagttcaatctctactgactggaaccccctcctcctgggttcaagtgatcctcccacctcagccttctgagaaattgggactacaggtgtgagccaccacgcccggctaattttttgtatttttggtagagatggggttttgccatgttgcccaggttggtcttgaactcctgagctcaagcaatccacctgcctcggcctcacaaagtgctgggattacaggaatgagccatcacgcttggccttctgtttttaagccatttgttggatactattccttcctcactgactgtatcaattaagttactctggttgcaagtaacagaaagtgacca

SEQ ID NO: 504424 - DNA, 366 bp, Homo sapiens
ccaaggaggtcgaggctacagtgagccatgatcggccactgcatttcagcctgggtgacagagtgagaccctgtctctaaaaaaaagaggggcaacatttcattcgtaatcagaaggggttttgcttggaagtaacattagagcccatctaatgggcctttattttagaggtgagaaaaatgagtcatagagttatttgtgataacaactagttcttggtggagatggcatttgaagatgggtcttctgggcctctgaccgctccatcctgctgtctctgtctcagtgtataacacgtcattttcaatatatttgtcaggagaggtttttggtactgtttttagaaccttgttctttgaaacacat

SEQ ID NO: 504425 - DNA, 180 bp, Homo sapiens
gggagacttaaatacaacctctgaccaaaaaacaaaggatataaacaataagctactttgacccagggttgactctcctggcaagacaggcttaaaaataaaaccacaatcatccttctcaatttgtaagatcatgagcattctcaagtctggatcctttcagaagtgatcaaagtatta

SEQ ID NO: 504426 - DNA, 308 bp, Homo sapiens
gctctgttgcccaggctggagcgcagtggcgccaatctcggctcactgcaccctccgcctcccaggttcaagcgattctcctgcctcagcctcccaagtagctgggattacaggcaagtgccaccatgcgtgctcatttttgtgtttttagtagagactgggtttcaccatgttggccaggctggtcttgaactcctggcctcaggcaatccactcccgcagcctcccaaagtattgggattacaggcgtgcaccttcacccagcaaatctctacttattataaacaataacttccggttcctttgtc

SEQ ID NO: 504427 - DNA, 767 bp, Homo sapiens
agcggagtctcgtagctctcgctgacctgcgggtgtaggtgctccgggatcgtcagcacccgtccgggcgccatcgacggtcgctaggcttcttctggacataccatactgcgccacttgtccgcttcacgacatccgcgcgggcatcatgggtgaagctcgcgcaaggcgagggtaaaaatctataggttgacgcgccagagtcaaatggctccgtcctactcaacagtgacggtagaatgaatgatagatgaatgatgagagaatatgttggaatgatgagaaatcgatgatatgagtggagaagaggtcgtcgtagcgtcatgaggaataggggaatgaaggctagcatgtcaaccatcagaaaagaaggtggtcgttgccccgatcgatacaaaggttgctacgttgcctagcaatcaggcacgagaagaacagcaagcatgtcactccacggcaaagcaggcaggacgacaagcaccgtgccagaggacgacacgttgaatcaccaatggcaaaacgtcacgtgtaccacaaaccctgagcggaggaaagggacgcgcagcagtcgaagggtcaaaagctattggatagacaatctcctgggttacagaaggggtgctgagcaatcgacagcacaagggggccaagaatgggcgatgaatgcacaagaacgtgaatgatcagtgtatgaatgagggatgatgaatgagctgatgaggacggactgaggaggatgacggaagagactgaggaatgaaggatga

SEQ ID NO: 504428 - DNA, 752 bp, Homo sapiens
gagggctcggagttcttgtgggctgttcgcggctgagtgtttggacctcctgcgtacagacgtgattaatagtggtggtgcctatcccaacatccccctctcttactcccttacctggagtacccaagacctgtttatgctacatgttgatggacatggaaaatgtttgaaaccaaagtaaccacattggatcatgggcttctgctgtggccatctcagcaataagttttggacagtttttgtacagtaggaattcttatcaattcaggatcgagatatgaaggcgacataccttagtggaatttgctccactttcctggaaaactttggcatttacgtctactgctcgatttgacagcaaagatgaaattctgctatacgtttggaaactgcatgggggtatctgtgactgccagacatcaagagacaccaccatgtatgctgtgtcttgctgctagcaaatgtgcttgtgacacggttgtgtttgccttacttgtgctgatgttggttctgcagacccggctaacagatgaagaagtcgagatagacgcggatggctgtgtccaatatgaagcctggagtgaacctgaacctgctatgacttgacccaaaagacattctcaccgcaatgattcattgaaacgggtttacatggagaacacagttggcctccaccgtttctgcccacagcaaaactacaagatcatcgaatgtgctgatcctacttatgactactatccgacgatgatttc

SEQ ID NO: 504429 - DNA, 150 bp, Homo sapiens
atagtagcagcaaaggcatagtgccatgggagaagcggatgcacgaagagcgtactccagcaggcgctatgatgaagtggaatgagtgacagatgcaggcgaggtgcaccacatgtattgccgacatggacgtaaagtcaatactttgat

SEQ ID NO: 504430 - DNA, 232 bp, Homo sapiens
ggtccggatttcgtggaggcgcggcttaccagagcagatagctttactctggaaaccctagatattcggccggaaggattctcaccttcctctcgctactcattccggcattctctcttcttaaaaatccactgctctttacagtacagcttcttctctttaagaatgctcctctaccaatcatcattcgatgattccacggcttcggtagtgtgtttcagccccgcgacat

SEQ ID NO: 504431 - DNA, 1181 bp, Homo sapiens
  misc_feature (109)..(109): n is a, c, g, or t
gttgtgagcatcgaggcatcatggcctgcactggtcagagattgtgcggccattccgcagtatatgccaacacactggtggatgtgtgtgcatatgcaggctctgggantgtgctgaaggtgcagcagctgctccacatttgtagcgaacactttgactccaaagagaaggaacggaagacaaagacacagaaggacacacgaacagacacggacaagaaggcaagcccctgcatgacatgggagcacatcagggcagtggctgttctggggattgcccttccattgctatgcggaggaggagcattggtgcagagctggcattacgaaccatttgcgccacttgctgagatatgggggagcctacaactccgagagggacattgtaaccatcttagccacatggaccctcatctctgtaatacaacatccacgactcaacatcctgagataccactaagcaaaattactatcatgcatgctgatccagaagtttcactataactccaatatatagaacatggagcactggtgcgcgcagtggtaaccaaatacttgccgcgtactggcctgcacaatgtctgcagccagatctatgcatcacaattactcatagacaacaggtgaacccacaaacacaaccatcattcactggatagcgcctatgagacaccaagggacacttgacaacacaattgttaggaggcaaacggagcacaaccccatcaaacgaccgctcattgccccccccataccccgcacaacagcagagacaccaggagcgaagaccatacaaagcagaccccaacgggatggcagcccaggtgcgcagtggcgaacacatcgggacccccaacccatgagcacgccaccgggaccaccaacaatgacaccacacggaccaagctgcataccccggcaaaacacgaaagtcacaagtccccgctaaagaggagcaaaacaacatgccacaaacgcctacagcggacaacataacaggcaccatacgcgggacccagagatgaggcacctacagaccaacatgacccgagacccacacaggaaaaaaagaactcagagcacacacacagcgcaacagacaacacgacagcgcagagcagcaacgacaggcaccacagcaaggcgcaacagagtgaaacagtcgacaaccgaagaccaccg

SEQ ID NO: 504432 - DNA, 299 bp, Homo sapiens
cttacccattagctgtcctgtaccatctaactaaaatgtactgatacatacttgtggccaggcacggtggctcacgcctgctatcacagcactttgggaggccaatgcaggcggatcacctgaggtcaggagtttcagactagtctggccaacatggtgaaaccccatctctactaaaaatacaataaaaaaaagaaaaaaattagaataaatccccggttttgtccttgactgtggctaccttttatcccactgactaaggtggatggggatacaggccccaaatgcctaatcatgtc

SEQ ID NO: 504433 - DNA, 104 bp, Homo sapiens
ggaaagcggacggatacatagatgacctgcttgccgaaatatcgaagtgcgtgaaaaagaaaaatcgcgtgctcgtgactacgctgacgaaggtcagtgcagaa

SEQ ID NO: 504434 - DNA, 129 bp, Homo sapiens
ggcaggacgctgcgcacaacatgggcaaccacctgccgcttcctgcctgcgaagagtggggaggaagatgaaatggaagttgaagacccaggtagttaagaagccaaaaacccaacatcataaattttg

SEQ ID NO: 504435 - DNA, 141 bp, Homo sapiens
tgtgttctagaggatcctcgtcaagcaaaggtctggtcctttcttttttatctcgaaatagtgattccatacatttccaggtcctgagcaatcttcaggtatccaacatagcattatctttgagcatccacggtgttccgc

SEQ ID NO: 504436 - DNA, 128 bp, Homo sapiens
taccacaaaggaaaactgccccccaacctaggcaacggggcagacctgcccaattaccgctggtcccagaccctgtcgtagctggacctggcggtcccttttctgtgtgaacttccggctgaaagtga

SEQ ID NO: 504437 - DNA, 1149 bp, Homo sapiens
ggatacctgtaatggctgcttcctaaaatgtctgtgatcgacgatgctaaagctctataagtctctaggcaatccggagactccagtgtacagggtaaccattccaagtcagatagcaattgctatatataccatttctttggtaatccttcgagcccctcaaggattccatcatgcatgaacctcagtgtttcatcacagttgtccttagtgcctcatgtccctgctttaggtgctgcctgtctgtggaagacagtcagaagaccggctgatgcaatcgccctttggttaggctgttggctgctcaagcatgacagtgcattggttgcctgatttgagggcggtatatgcacgtaataagatgatgtgtactcgacttgtgtccttttgacaagagccatatcggaagtcatatagccgtcaacctcttgtaaagatcgcgtttgctgcctcataaaggctagagagtcatgagagtccgagtgtgtggacccggttccatatgacctcatgtccaatactaacgggagagttcacattttttcccacttggtgttacgcgttgcatagttggggatagcataaagcaatatcaattttctctcaccatctgcctgaggaaaagctcgtggttcacttttcccaagcacatataatggccacagcaaagattggcagtcttataaatttggacaaaggtctagaggtaggttcagcgacgaatgtgcacgaatagggccttgaccatttgtcctcattaaaggtaaactaatgaatccataagagtccttaaggaaatgtactctttcaatagagtccttgttgaaccattcggggacgcaccggcaagtttctttggctcccgaaattcttacggaccattccgtcacctggtacgggttcaatacacttcgatctggccgtccctgaaattcccgttggagcggaggtacctcgtgaacattttcagcattcctcgggtagatggtttgtctcccccaaggtttacttattcatatttctcgaaatactacgaagaagtcagggcccaagaagggaacacttcttatccctccaagggacacaaaaacttttgacacacaccgcttcccgggggatttaattactggaaataggcggacaaagatt

SEQ ID NO: 504438 - DNA, 152 bp, Homo sapiens
gtatatcaccatatgtagcatcaacatgcgtcagcaaatttgattctattcttggactgtactcttcgcatggcactgggaagttcttttcaaatcattaaatattaagacgaccatctcttctattaaattacagtacatgttcgttccat

SEQ ID NO: 504439 - DNA, 418 bp, Homo sapiens
tctgaggacagagaacgggagaatggggaggagaaggggcggcacatagagctcagcagaggagacagacagaaggaaagatggcttggagaaaccagcagtctgcgaagctggggaggatggagagtggtttggggttttgggtcgggctctagtgtgatcaactgcagaagcattaccccgtggcctggtttctttactcagcccctggggtagatcccagccccccgcattagtccttttgctggaaaaggaagagggagtggtgggacgaatctgaggagtcgttggaggaggagccacggaaggtgctcgcccctgaacctgaggagattctgggtggcggagatgctgtgtggcctcaagatgaagctgaagcgacggcgagtgtcgctcgtgctccctgagcaccacgagg

SEQ ID NO: 504440 - DNA, 242 bp, Homo sapiens
cgatcgcttatgctccctcttcatttccagcacagggtatcaggtcctggctgcatagggaattggttactgcgctggccaccgaggagggggtagggactctgttatcaatgctggctgctgcctgggaacagcggtgtgccaaggaggctggagcgtgcacagtgcgtcaggctagtttgctgcgatagactagagggggtagccacacgacggggcgctgacactaggggttatgagag

SEQ ID NO: 504441 - DNA, 139 bp, Homo sapiens
gctatgccaccttactgttcacctcatcaaattagttctgcccagtgaaaagatacagccttcccatgccgtcgaggtggcgatcgtaatcgaggatttctgctagttttatacaggccatgtgtgatcaagagcgtcg

SEQ ID NO: 504442 - DNA, 129 bp, Homo sapiens
ctcagggagcacaggtggttaaaaacccgtgacttgggcagttcttccgaagagagggaccacttgaggagccagaaggactcagaacctgacgaacgtggcatcgatctgccgcacggaggggagggc

SEQ ID NO: 504443 - DNA, 259 bp, Homo sapiens
ctttattttttttcggtagagtcaaggtctctctctgttgcccatgctggccttgaattcctgggctcaagcaatcttcctgtcttggcctatcaaagtgctgggattacaagcatgagccactatgcctagctgtatgcttcatttctaaagggagtatattagtccattctcacactgctataaagatcctacccaagaccgggtaatttataaagaaaagaggtttaattggctcatacttccacatggccgggga

SEQ ID NO: 504444 - DNA, 2111 bp, Homo sapiens
  misc_feature (1447)..(1447): n is a, c, g, or t
gtgtctgtgtggtgtcgttgctgcgtctgtgctggtgtgttgggctgcgtgcggtgcctgtgtgctgtttgttgtgtggtttcggcttcttcggcgtccgctgtgctggctgcgtgcgtctcgtctgcttgtgtgtttgtcgtgtctggtgcgtgtttgtgcgtgcttctcgctgttgtttgcggcttctggcgcgctgtggcggcgcgtgtcgtgttttgtctcctgcggtctctctcttgctcttgtcgtgtctgtcgcggcgtgggtggctgctgtgcttgccttgtcgggctggctttggggccttgtccctccgcttctgtgtccttccgtgcgtcctcctccgctggcgtggtctcttttggtccctttcggtcgtccgcttgtgtcttctgcctcgtgctgcttttgctgctggcgtctgcgcgtgttggcctccgtgtgctgccttgctccgtctgctgggttgttttgtttgcttctgtttgtctttcgttttgttgttttgcgtgtttgtgttttgtgttggctctgttgtttcttggcttgttttgttggtcgcttcggttgtgttgtgtttggatggtgtttgttttgtgtgtttggctctccgtctgggtctcttctacctggtctcttctattgttgttagttctttgtgtttgtttgtgtgttggctcctgtgttgtgtggtggtttctgttgttgtgttgtgttttttcttttttgttgtgtttgttgttttggtgttgttggtggtgctgctgttgttgtgtggtgtcggtggttcctgttctgtgttgcgcccccgacatgataccttcccgtgttggtgttcatacaccactcctggttgtgcgggccagcatgttggcccgtgcgtgggtcgcctcccccggtgtgggccacataaagtcgccggcctgtgttgttgacgtccggccccgtggttctatgtctccggtggccttaatgggtgccgcatgcctcttggggttggcccgatatttgccgtccttccgttgggtctcagttcctgtgttgtgttatgtgccctgccatagtgttgcgctggctccatgtgccttgaccaaatggcctctccccgcgttgggcctattgctgtgtgcccctctgggggctttgctttctcctccaattgtggtgggggtgtttcatgagggaacttcagcgcccccgtgtgaggtggttatagggtatcctgagttccgggtatctcagtcatttgttgtggatgcctcccacggggtgtttgtgccctcgtttacctgtctaggtgcctcagggtattagggggctcagggttaggtaggaaaccctgtgctgtgccttatatgggggttgtggtgttttagaaggcctcggaactgtaagaaaagggggccccccatgtctctggcgctgtgggcgcccagacccaganaatgacgtggtgtgcccccctagaggccctggtgcgcctcagacgctggggcgctcagatcctcagaggctttgtctccaagggcccagggagtggggcctgcggcccaagggagctgtctgtgcgagggcgctgcccctgcgtgcgtgtctgtgcgtgtgcttgccctcacacctttggggcctcggtgcgtgcatggtcaccccgggggttgccccaagcctcaccccccgagagctgtctgtctggctgggtgtactatatatgtgtgggagacatgtagtgtgtgtgtgtatgtgcctcgtggtggatagtatgtgatgatagactgtatgtgtgttgtttgaaatgccgtggtgctggtgatatgtgataggtggtggagggatctctgctgtggctgtggccagtagcgcgtggctacctgggagatgctggttggccccggagattgggaccggcctggatggctgccctgcccctggccctggtgccccgggaaactgggccgaaggtgcctcggctgtcctgaaggggcatgctggcccctgccccccaccccccccccccacttggttgccccgctgctttggaaatgaatgctgggtggaaagtggtaaatgcgccctgtgccaaggaatgaactggggtgtggactgccaag

SEQ ID NO: 504445 - DNA, 331 bp, Homo sapiens
accagcctggccaacatggtgaaaccctgtctttactaaaaatacaaaaattagccgggtgtggtggtgggcacctgcaatcccagctactcgggaggctgaggcaggagaattgcttgaacccaggaggtggaggttgcagtgagccgagattgtgccactacactccagcctgggccacagagcgagactccatctcaaaaaaaaaaaaggaaaggaaaaggaaaaggaaaccaaaggttaaccttcctcaacatcatgtgagtcccaggcacaccttgacaggcaaacacaaggccgggatgtcatatccagctgttccttgtctcca

SEQ ID NO: 504446 - DNA, 1097 bp, Homo sapiens
ggtactaccccatgctccggtttgtgggtcgcgtggtcgttgccacatcccgtccgtcgctatatttcctgactcatccctgtacatgcggtctcttgctctctccctattcctcaggtacttacgaggggacctggatcctaggagtggatccatcctgtccaggttactatgcgtgtcgctatactatctctcttacgtcgcaaaatagtcagagtgtcgtcatgacggtctgcatagtgagcaggtgataagggggcagatggttggacgtcccatgttatgaatgaagggaattagacaagcaaattgtagaatgtcccctggaaagttgtcacatggcagggaagagtcagacctgagttttggaggtgggaccagtgatttgggtgatagacacagtaaggattattgctatggatggtacaagaaagtcttggtagagaggaatccacatgttatctggatccgtggatgccaccacttactatgtgcgctgatctggtgcctcgaggatcttgaggggcacaaactctcttcaactgtacagtcagtcatgaatgcttaatagatagaatagacgagttggccgctgatagataaacaaaaggaatttctgcctctcgattttcaatttgctggaagctttcgctgatctccactggcaacatgcagtggtgagaccacgtacacattgctgttggactgtgtattcgacttgcttgttctgcacgctagagtatggcttgccctatttggcggggagcggttataaccggtgcgcgatccccagtgcggatgctttggagcatttgagtctgacatcgtactaggatcagtctccgttcactccgactctattgtccgcacgagccctcctggtggttcccattggtcttggctagtgttcgattatgaagacccgactaagcgcgactcgcttcatatcacgtgaaacagttagacacgcctagtacacacgatagagtataaccgcttacgggagcctgagctttgcaaactactcactactagggttcgttccaccagcctcaccagttttcgccacagtaacaacacatgtaaaaagcagtatt

SEQ ID NO: 504447 - DNA, 342 bp, Homo sapiens
tcgagtgttttgttggtttgtttgttttgagacagagtctcgttctgtcgcccagactggagtgtggttgcgcgatctcagctcactgcaacctctgcctcccggattcaagcaattctcctgtctcagcctctggagtagctgggattacaggtgcatgccgccatgcccagctaatctttgtatttttagtggagatggggtttcaccatattggtcaggctggtcttgaactcctgacctgaggtgatccacctgcctcagcctccaaagtgctgggattacaggtgtgagtgactgcccccagttgttagaagcttttaaagcaaaactttaagtcac

SEQ ID NO: 504448 - DNA, 1579 bp, Homo sapiens
aaacttacggctaggtacgaggcctgggtgttagacagaaaagtgacgccaatgccccctttgcccagtggagcacagagcgtgtgtgtgcatggctggaggactttggcctggctcagtatgtgatctttgccaggcagtgggtatcttctggccacaccttattgacagccacccctcaggacatggaaaaggagctaggaattaagcacccactccacaggaagaagcttgttttagcagtgaaagccatcaacaccaaacaggaggagaagtctgcactgctagaccacatttgggtgacaaggtggcttgatgatattggcttaccccagtacaaagaccagtttcatgaatctagagttgacggacgaatgctgcaatacctaactgtgaacgatttactcttcttaaaagtcaccagccaactacatcatctcagcatcaaatgtgccattcacgtgctgcatgtcaacaagttcaacccccactgcctgcaccggcggccagctgatgagagtaacctttctccttcagaagttgtacagtggtccaaccacagggtgatggagtggttacgatctgtggacctggcagagtatgcacccaatcttcgagggagtggagtccatggaggcctcattatcctggagccacgcttcactggggacaccctggctatgcttctcaacatccccccacaaaagacgctcctcaggcgccacctgaccaccaagttcaatgccttgattggtccggaggctgaacaggaaaagcgagagaaaatggcctcaccagcttacacaccactgaccaccacagccaaagtccggccaaggaaactaggattttcacacttcggaaacataagaaaaaagaagttcgatgaatcgacggactacatttgcccaatggagcccagtgacggtgtcagtgatagtcacagggtctacagtggctaccggggcctcagcccccttgatgcccctgaactggatgggctggaccaggtgggacagattagctgatgcccttgtcacctgccctctgtgcaccctgagagctcacagtaacactgtgtgtgtcaccatataactgcacctcacccccgcacgtgtgcatgactcgcagagaatattccagcaattgtgtacccctgggccagtctctttgaaccctgagggtggccaggatctggagctgcatctctaaggggccaggctttggggaccattgccaaaggtggactcaggaggaaagacacttaaagacacttttacatgtctagtaattcttgatgttcatcttcagcaccagtggaaacacatgaacttcgatgcaggtccagagaccatggacactcccacgaggctcagctctcaggcaccccctacacttcagttgagggaaaagctcaagtgccttaggcccgtggaccacagtcttggctgagatcaaagggatgagcaacagggacttctgccacagtgacaatggaattgtgttgtgccttacttcagaggtggtctcttctttcttgtaataaaagcaatatttatgcggaaagcaagcaaaaaaa

SEQ ID NO: 504449 - DNA, 1816 bp, Homo sapiens
  misc_feature (102)..(102): n is a, c, g, or t
acatgatctcaggagggccatacaggctgccccattctctaagtagcctgagatttgaaattcagatcttgtgttattaagaaaactctagggtctacctcntatgagtgtgttgtagtggaattttgttcagcagaatcccatgatggaggttgtttgttaaaaaacaggttttttgttttgttttttcttttcttttcttttgtttgtgagacatgattagattcagaacctcaggctctcccactaacaggaatatgctgttttcctgacagaaaagtgacgccaatgccccctttgcccagtggagcacagagcgtgtgtgtgcatggctggaggactttggcctggctcagtatgtgatctttgccaggcagtgggtatcttctggccacaccttattgacagccacccctcaggacatggaaaaggagctaggaattaagcacccactccacaggaagaagcttgttttagcagtgaaagccatcaacaccaaacaggaggagaagtctgcactgctagaccacatttgggtgacaaggtggcttgatgatattggcttaccccagtacaaagaccagtttcatgaatctagagttgacggacgaatgctgcaatacctaactgtgaacgatttactcttcttaaaagtcaccagccaactacatcatctcagcatcaaatgtgccattcacgtgctgcatgtcaacaagttcaacccccactgcctgcaccggcggccagctgatgagagtaacctttctccttcagaagttgtacagtggtccaaccacagggtgatggagtggttacgatctgtggacctggcagagtatgcacccaatcttcgagggagtggagtccatggaggcctcattatcctggagccacgcttcactggggacaccctggctatgcttctcaacatccccccacaaaagacgctcctcaggcgccacctgaccaccaagttcaatgccttgattggtccggaggctgaacaggaaaagcgagagaaaatggcctcaccagcttacacaccactgaccaccacagccaaagtccggccaaggaaactaggattttcacacttcggaaacataagaaaaaagaagttcgatgaatcgacggactacatttgcccaatggagcccagtgacggtgtcagtgatagtcacagggtctacagtggctaccggggcctcagcccccttgatgcccctgaactggatgggctggaccaggtgggacagattagctgatgcccttgtcacctgccctctgtgcaccctgagagctcacagtaacactgtgtgtgtcaccatataactgcacctcacccccgcacgtgtgcatgactcgcagagaatattccagcaattgtgtacccctgggccagtctctttgaaccctgagggtggccaggatctggagctgcatctctaaggggccaggctttggggaccattgccaaaggtggactcaggaggaaagacacttaaagacacttttacatgtctagtaattcttgatgttcatcttcagcaccagtggaaacacatgaacttcgatgcaggtccagagaccatggacactcccacgaggctcagctctcaggcaccccctacacttcagttgagggaaaagctcaagtgccttaggcccgtggaccacagtcttggctgagatcaaagggatgagcaacagggacttctgccacagtgacaatggaattgtgttgtgccttacttcagaggtggtctcttctttcttgtaataaaagcaatatttatgcggaaagcaagcaaaaaaa

SEQ ID NO: 504450 - DNA, 1621 bp, Homo sapiens
agtatcgtgagtataaaatgaggcgccgagtcatacgtgtagtcctgaattttctaggaccacgaattctctacggacagaaaagtgacgccaatgccccctttgcccagtggagcacagagcgtgtgtgtgcatggctggaggactttggcctggctcagtatgtgatctttgccaggcagtgggtatcttctggccacaccttattgacagccacccctcaggacatggaaaaggagctaggaattaagcacccactccacaggaagaagcttgttttagcagtgaaagccatcaacaccaaacaggaggagaagtctgcactgctagaccacatttgggtgacaaggtggcttgatgatattggcttaccccagtacaaagaccagtttcatgaatctagagttgacggacgaatgctgcaatacctaactgtgaacgatttactcttcttaaaagtcaccagccaactacatcatctcagcatcaaatgtgccattcacgtgctgcatgtcaacaagttcaacccccactgcctgcaccggcggccagctgatgagagtaacctttctccttcagaagttgtacagtggtccaaccacagggtgatggagtggttacgatctgtggacctggcagagtatgcacccaatcttcgagggagtggagtccatggaggcctcattatcctggagccacgcttcactggggacaccctggctatgcttctcaacatccccccacaaaagacgctcctcaggcgccacctgaccaccaagttcaatgccttgattggtccggaggctgaacaggaaaagcgagagaaaatggcctcaccagcttacacaccactgaccaccacagccaaagtccggccaaggaaactaggattttcacacttcggaaacataagaaaaaagaagttcgatgaatcgacggactacatttgcccaatggagcccagtgacggtgtcagtgatagtcacagggtctacagtggctaccggggcctcagcccccttgatgcccctgaactggatgggctggaccaggtgggacagattagctgatgcccttgtcacctgccctctgtgcaccctgagagctcacagtaacactgtgtgtgtcaccatataactgcacctcacccccgcacgtgtgcatgactcgcagagaatattccagcaattgtgtacccctgggccagtctctttgaaccctgagggtggccaggatctggagctgcatctctaaggggccaggctttggggaccattgccaaaggtggactcaggaggaaagacacttaaagacacttttacatgtctagtaattcttgatgttcatcttcagcaccagtggaaacacatgaacttcgatgcaggtccagagaccatggacactcccacgaggctcagctctcaggcaccccctacacttcagttgagggaaaagctcaagtgccttaggcccgtggaccacagtcttggctgagatcaaagggatgagcaacagggacttctgccacagtgacaatggaattgtgttgtgccttacttcagaggtggtctcttctttcttgtaataaaagcaatatttatgcggaaagcaagcaaaaaaa

SEQ ID NO: 504451 - DNA, 104 bp, Homo sapiens
ggaccggcccgtcgcgccagggtagatgtaggcgatgtccatgagggtgtagtattccttcagtggctcgtcctcgtacagaacctccaccccgtcgggtggag

SEQ ID NO: 504452 - DNA, 623 bp, Homo sapiens
  misc_feature (22)..(22): n is a, c, g, or t
  misc_feature (50)..(50): n is a, c, g, or t
  misc_feature (85)..(85): n is a, c, g, or t
  misc_feature (101)..(101): n is a, c, g, or t
  misc_feature (109)..(109): n is a, c, g, or t
  misc_feature (170)..(170): n is a, c, g, or t
attaggttccccttctaccccnactctttggccccttccctcttccccanatgggggaaccttggaatttaggacctatccccanccggaaatttaatccngtaatccnggacttaaataccatccagtggagtatgtgtgagctcagatggatgatgaccattaatttngtgtttttaatgggtatttttattcaccaaatactaatatttattcaaaagcctttttttaatttttaaaagctcattctcagagaggctgatagggaggttgtctgtgcaggaatagcgcctgtccatgcacagtgtcaagtaacctgtctttaaatattttccacatttaactggctacttttcacagtcaaatgataccacgtaaactagttctgatgatctcctgatggaaaaccaaaaacagacttcattgtttttatctttatcctagttttcttcaaattaatttttttatattaagtatttagaaagaataatggtttgtgcagcctggcatggtggctcacacctgtaatcccagcacttggaagccgaggtgggcggatcacttgagcccaggagtttgagatcagcctgggcaacatggttaaaccctatctctaaaaaaaa

SEQ ID NO: 504453 - DNA, 296 bp, Homo sapiens
caggtatcgtcagtgtttctccttgtagggctacatatatggtcccagttgcactgtacaggttgtgcactgtctactgtagtaaattggctcaaagacaataagtctgctgctgttcctgtggaatggtcagcacggtggacaccggctgccctgagatggcgtaagacacagtgatgggcatgttcactttgcgcttcttcactggttggaggacactggcctgtgccaacccgccgttccccttcccggggtgagccctgctgggatggtggtggggaaagggcagccacggt

SEQ ID NO: 504454 - DNA, 3272 bp, Homo sapiens
  misc_feature (17)..(17): n is a, c, g, or t
gagcgggctggccagcnggtccccgggaacaggaaccctggtggacgggtccagcaggcttcttcggtgcccgagagggagcgggtgcccaagggggtggtccctgtggcaggtcccggggtgggggcgcggcgctccgggaagagccttccgcaggtccccgccccgtcacgtgggcgccggccccggccgctgcggtcggtccgctggttggtcgggcgcttggtccggcagttggtcggtgggccagtggcccgtcgctcgcttctgggctctcatgtttgaaggtgggagggacacgggagcggcccgcacacctgagccgcccggagaggagcctcggccccgtacccagtaagaagaggaggaggccaggcaggcaaaaggagtcatggcttctgatgctagtcatgcgctggaagctgccctggagcaaatggacgggatcattgcaggcactaaaacaggtgcagatcttagtgatggtacttgtgagcctggactggcttccccggcctcctacatgaaccccttcccggtgctccatctcatcgaggacttgaggctggccttggagatgctggagcttcctcaggagagagcagccctcctgagccagatccctggcccaacagctgcctacataaaggaatggtttgaagagagcttgtcccaggtaaaccaccacagtgctgctagtaatgaaacctaccaggaacgcttggcacgtctagaaggggataaggagtccctcatattgcaggtgagtgtcctcacagaccaagtagaagcccagggagaaaagattcgagacctggaagtgtgtctggaaggacaccaggtgaaactcaatgctgctgaagagatgcttcaacaggagctgctaagccgcacatctcttgagacccagaagctcgatctgatgactgaagtgtctgagctgaagctcaagctggttggcatggagaaggagcagagagagcaggaggagaagcagagaaaagcagaggagttactgcaagagctcaggcacctcaaaatcaaagtggaagagttggaaaatgaaaggaatcagtatgaatggaagctaaaggccactaaggctgaagtcgcccagctgcaagaacaggtggccctgaaagatgcagaaattgagcgtctgcacagccagctctcccggacagcagctctccacagtgagagtcacacagagagagaccaagaaattcaacgtctgaaaatggggatggaaactttgctgcttgccaatgaagataaggaccgtcggatagaggagcttacggggctgttaaaccagtaccggaaggtaaaggagattgtgatggtcactcaagggccttcggagagaactctctcaatcaatgaagaagaaccggagggaggtttcagcaagtggaacgctacaaataaggaccctgaagaattatttaaacaagagatgcctccaagatgtagctctcctacagtggggccacctccattgccacagaaatcactggaaaccagggctcagaaaaagctctcttgtagtctagaagacttgagaagtgaatctgtggataagtgtatggatgggaaccagcccttcccggtgttagaacccaaggacagccctttcttggcggagcacaaatatcccactttacctgggaagctttcaggagccacgcccaatggagaggctgccaaatctcctcccaccatctgccagcctgacgccacggggagcagcctgctgaggctgagagacacagaaagtggctgggacgacactgctgtggtcaatgacctctcatccacatcatcgggcactgaatcaggtcctcagtctcctctgacaccagatggtaaacggaatcccaaaggcattaagaagttctggggaaaaatccgaagaactcagtcaggaaatttctacactgacacgctggggatggcagagtttcgacgaggtgggctccgggcaaccgcagggccaagactctctaggaccagggactccaagggacagaaaagtgacgccaatgccccctttgcccagtggagcacagagcgtgtgtgtgcatggctggaggactttggcctggctcagtatgtgatctttgccaggcagtgggtatcttctggccacaccttattgacagccacccctcaggacatggaaaaggagctaggaattaagcacccactccacaggaagaagcttgttttagcagtgaaagccatcaacaccaaacaggaggagaagtctgcactgctagaccacatttgggtgacaaggtggcttgatgatattggcttaccccagtacaaagaccagtttcatgaatctagagttgacggacgaatgctgcaatacctaactgtgaacgatttactcttcttaaaagtcaccagccaactacatcatctcagcatcaaatgtgccattcacgtgctgcatgtcaacaagttcaacccccactgcctgcaccggcggccagctgatgagagtaacctttctccttcagaagttgtacagtggtccaaccacagggtgatggagtggttacgatctgtggacctggcagagtatgcacccaatcttcgagggagtggagtccatggaggcctcattatcctggagccacgcttcactggggacaccctggctatgcttctcaacatccccccacaaaagacgctcctcaggcgccacctgaccaccaagttcaatgccttgattggtccggaggctgaacaggaaaagcgagagaaaatggcctcaccagcttacacaccactgaccaccacagccaaagtccggccaaggaaactaggattttcacacttcggaaacataagaaaaaagaagttcgatgaatcgacggactacatttgcccaatggagcccagtgacggtgtcagtgatagtcacagggtctacagtggctaccggggcctcagcccccttgatgcccctgaactggatgggctggaccagcaccagtggaaacacatgaacttcgatgcaggtccagagaccatggacactcccacgaggctcagctctcaggcaccccctacacttcagttgagggaaaagctcaagtgccttaggcccgtggaccacagtcttggctgagatcaaagggatgagcaacagggacttctgccacagtgacaatggaattgtgttgtgccttacttcagaggtggtctcttctttcttgtaataaaagcaatatttatgcggaaagcaagcaaaaaaa

SEQ ID NO: 504455 - DNA, 3351 bp, Homo sapiens
  misc_feature (17)..(17): n is a, c, g, or t
gagcgggctggccagcnggtccccgggaacaggaaccctggtggacgggtccagcaggcttcttcggtgcccgagagggagcgggtgcccaagggggtggtccctgtggcaggtcccggggtgggggcgcggcgctccgggaagagccttccgcaggtccccgccccgtcacgtgggcgccggccccggccgctgcggtcggtccgctggttggtcgggcgcttggtccggcagttggtcggtgggccagtggcccgtcgctcgcttctgggctctcatgtttgaaggtgggagggacacgggagcggcccgcacacctgagccgcccggagaggagcctcggccccgtacccagtaagaagaggaggaggccaggcaggcaaaaggagtcatggcttctgatgctagtcatgcgctggaagctgccctggagcaaatggacgggatcattgcaggcactaaaacaggtgcagatcttagtgatggtacttgtgagcctggactggcttccccggcctcctacatgaaccccttcccggtgctccatctcatcgaggacttgaggctggccttggagatgctggagcttcctcaggagagagcagccctcctgagccagatccctggcccaacagctgcctacataaaggaatggtttgaagagagcttgtcccaggtaaaccaccacagtgctgctagtaatgaaacctaccaggaacgcttggcacgtctagaaggggataaggagtccctcatattgcaggtgagtgtcctcacagaccaagtagaagcccagggagaaaagattcgagacctggaagtgtgtctggaaggacaccaggtgaaactcaatgctgctgaagagatgcttcaacaggagctgctaagccgcacatctcttgagacccagaagctcgatctgatgactgaagtgtctgagctgaagctcaagctggttggcatggagaaggagcagagagagcaggaggagaagcagagaaaagcagaggagttactgcaagagctcaggcacctcaaaatcaaagtggaagagttggaaaatgaaaggaatcagtatgaatggaagctaaaggccactaaggctgaagtcgcccagctgcaagaacaggtggccctgaaagatgcagaaattgagcgtctgcacagccagctctcccggacagcagctctccacagtgagagtcacacagagagagaccaagaaattcaacgtctgaaaatggggatggaaactttgctgcttgccaatgaagataaggaccgtcggatagaggagcttacggggctgttaaaccagtaccggaaggtaaaggagattgtgatggtcactcaagggccttcggagagaactctctcaatcaatgaagaagaaccggagggaggtttcagcaagtggaacgctacaaataaggaccctgaagaattatttaaacaagagatgcctccaagatgtagctctcctacagtggggccacctccattgccacagaaatcactggaaaccagggctcagaaaaagctctcttgtagtctagaagacttgagaagtgaatctgtggataagtgtatggatgggaaccagcccttcccggtgttagaacccaaggacagccctttcttggcggagcacaaatatcccactttacctgggaagctttcaggagccacgcccaatggagaggctgccaaatctcctcccaccatctgccagcctgacgccacggggagcagcctgctgaggctgagagacacagaaagtggctgggacgacactgctgtggtcaatgacctctcatccacatcatcgggcactgaatcaggtcctcagtctcctctgacaccagatggtaaacggaatcccaaaggcattaagaagttctggggaaaaatccgaagaactcagtcaggaaatttctacactgacacgctggggatggcagagtttcgacgaggtgggctccgggcaaccgcagggccaagactctctaggaccagggactccaagggacagaaaagtgacgccaatgccccctttgcccagtggagcacagagcgtgtgtgtgcatggctggaggactttggcctggctcagtatgtgatctttgccaggcagtgggtatcttctggccacaccttattgacagccacccctcaggacatggaaaaggagctaggaattaagcacccactccacaggaagaagcttgttttagcagtgaaagccatcaacaccaaacaggaggagaagtctgcactgctagaccacatttgggtgacaaggtggcttgatgatattggcttaccccagtacaaagaccagtttcatgaatctagagttgacggacgaatgctgcaatacctaactgtgaacgatttactcttcttaaaagtcaccagccaactacatcatctcagcatcaaatgtgccattcacgtgctgcatgtcaacaagttcaacccccactgcctgcaccggcggccagctgatgagagtaacctttctccttcagaagttgtacagtggtccaaccacagggtgatggagtggttacgatctgtggacctggcagagtatgcacccaatcttcgagggagtggagtccatggaggcctcattgtgagtggctctctggcctagcccacctgccttggtgcaaatgggatattcagaaacttatttattaaggacaagacacaaaagctaacgaaaaaaaataggtacttcatctggaggtcttgcataatttgatgtctcaaagtattttgataatttgtccttgagaattaatatacctcatggaagcaagatgccttctggcagcacctccttggcatgagacttgaggattctaggtcgatgggttgcatggagaccaacgcttacaaggcgagggaacagcagggctgaggaagggacggggaagccgtaaaaatgcagcttcccacttgctgcaataggatccctatcactactcagatctgtcagtggcaaagccagaggggaaatgaggaagtgtggtggcttggatgtcatccagagaagatcctgagagacagcctcaccaaagaggtcccagttctctgctggcctgtgaaaacaaggtggtcagtcagcacatgtgctagtatgtgctcagagccaggccctgtgccagccagtgagtggagtgggactcagaacaagtgactgagctcctgtccctcctctggaggcacccccagccccaacaggccagtctctcagcatcctccccctcgagccatttgtatttgctcctggccaggcttgtctctggttccttcttagatcctggagccacgcttccctgg

SEQ ID NO: 504456 - DNA, 147 bp, Homo sapiens
caggaccgaagcactgggaatagttacttggtttatatcacatttgatactatccttctgaaaagtctgagacagatctacaaaccacagtcaagaattatatgattaatgaggatatgaatgcactctatttgtgctttaagcttg

SEQ ID NO: 504457 - DNA, 2464 bp, Homo sapiens
  misc_feature (17)..(17): n is a, c, g, or t
gagcgggctggccagcnggtccccgggaacaggaaccctggtggacgggtccagcaggcttcttcggtgcccgagagggagcgggtgcccaagggggtggtccctgtggcaggtcccggggtgggggcgcggcgctccgggaagagccttccgcaggtccccgccccgtcacgtgggcgccggccccggccgctgcggtcggtccgctggttggtcgggcgcttggtccggcagttggtcggtgggccagtggcccgtcgctcgcttctgggctctcatgtttgaaggtgggagggacacgggagcggcccgcacacctgagccgcccggagaggagcctcggccccgtacccagtaagaagaggaggaggccaggcaggcaaaaggagtcatggcttctgatgctagtcatgcgctggaagctgccctggagcaaatggacgggatcattgcaggcactaaaacaggtgcagatcttagtgatggtacttgtgagcctggactggcttccccggcctcctacatgaaccccttcccggtgctccatctcatcgaggacttgaggctggccttggagatgctggagcttcctcaggagagagcagccctcctgagccagatccctggcccaacagctgcctacataaaggaatggtttgaagagagcttgtcccaggtaaaccaccacagtgctgctagtaatgaaacctaccaggaacgcttggcacgtctagaaggggataaggagtccctcatattgcaggtgagtgtcctcacagaccaagtagaagcccagggagaaaagattcgagacctggaagtgtgtctggaaggacaccaggtgaaactcaatgctgctgaagagatgcttcaacaggagctgctaagccgcacatctcttgagacccagaagctcgatctgatgactgaagtgtctgagctgaagctcaagctggttggcatggagaaggagcagagagagcaggaggagaagcagagaaaagcagaggagttactgcaagagctcaggcacctcaaaatcaaagtggaagagttggaaaatgaaaggaatcagtatgaatggaagctaaaggccactaaggctgaagtcgcccagctgcaagaacaggtggccctgaaagatgcagaaattgagcgtctgcacagccagctctcccggacagcagctctccacagtgagagtcacacagagagagaccaagaaattcaacgtctgaaaatggggatggaaactttgctgcttgccaatgaagataaggaccgtcggatagaggagcttacggggctgttaaaccagtaccggaaggtaaaggagattgtgatggtcactcaagggccttcggagagaactctctcaatcaatgaagaagaaccggagggaggtttcagcaagtggaacgctacaaataaggaccctgaagaattatttaaacaagagatgcctccaagatgtagctctcctacagtggggccacctccattgccacagaaatcactggaaaccagggctcagaaaaagctctcttgtagtctagaagacttgagaagtgaatctgtggataagtgtatggatgggaaccagcccttcccggtgttagaacccaaggacagccctttcttggcggagcacaaatatcccactttacctgggaagctttcaggagccacgcccaatggagaggctgccaaatctcctcccaccatctgccagcctgacgccacggggagcagcctgctgaggctgagagacacagaaagtggctgggacgacactgctgtggtcaatgacctctcatccacatcatcgggcactgaatcaggtcctcagtctcctctgacaccagatggtaaacggaatcccaaaggcattaagaagttctggggaaaaatccgaagaactcagtcaggaaatttctacactgacacgctggggatggcagagtttcgacgaggtgggctccgggcaaccgcagggccaagactctctaggaccagggactccaagggacagaaaagtgacgccaatgccccctttgcccagtggagcacagagcgtgtgtgtgcatggctggaggactttggcctggctcagtatgtgatctttgccaggcagtgggtatcttctggccacaccttattgacagccacccctcaggacatggaaaaggagctaggaattaagcacccactccacaggaagaagcttgttttagcagtgaaagccatcaacaccaaacaggaggagaagtctgcactgctagaccacatttgggtgacaaggtggcttgatgatattggcttaccccagtacaaagaccagtttcatgaatctagagttgacggacgaatgctgcaatacctaactgtgaacgatttactcttcttaaaagtcaccagccaactacatcatctcagcaggctcaaacaggtaccgagctcgact

SEQ ID NO: 504458 - DNA, 2134 bp, Homo sapiens
  misc_feature (17)..(17): n is a, c, g, or t
  misc_feature (1922)..(1922): n is a, c, g, or t
gagcgggctggccagcnggtccccgggaacaggaaccctggtggacgggtccagcaggcttcttcggtgcccgagagggagcgggtgcccaagggggtggtccctgtggcaggtcccggggtgggggcgcggcgctccgggaagagccttccgcaggtccccgccccgtcacgtgggcgccggccccggccgctgcggtcggtccgctggttggtcgggcgcttggtccggcagttggtcggtgggccagtggcccgtcgctcgcttctgggctctcatgtttgaaggtgggagggacacgggagcggcccgcacacctgagccgcccggagaggagcctcggccccgtacccagtaagaagaggaggaggccaggcaggcaaaaggagtcatggcttctgatgctagtcatgcgctggaagctgccctggagcaaatggacgggatcattgcaggcactaaaacaggtgcagatcttagtgatggtacttgtgagcctggactggcttccccggcctcctacatgaaccccttcccggtgctccatctcatcgaggacttgaggctggccttggagatgctggagcttcctcaggagagagcagccctcctgagccagatccctggcccaacagctgcctacataaaggaatggtttgaagagagcttgtcccaggtaaaccaccacagtgctgctagtaatgaaacctaccaggaacgcttggcacgtctagaaggggataaggagtccctcatattgcaggtgagtgtcctcacagaccaagtagaagcccagggagaaaagattcgagacctggaagtgtgtctggaaggacaccaggtgaaactcaatgctgctgaagagatgcttcaacaggagctgctaagccgcacatctcttgagacccagaagctcgatctgatgactgaagtgtctgagctgaagctcaagctggttggcatggagaaggagcagagagagcaggaggagaagcagagaaaagcagaggagttactgcaagagctcaggcacctcaaaatcaaagtggaagagttggaaaatgaaaggaatcagtatgaatggaagctaaaggccactaaggctgaagtcgcccagctgcaagaacaggtggccctgaaagatgcagaaattgagcgtctgcacagccagctctcccggacagcagctctccacagtgagagtcacacagagagagaccaagaaattcaacgtctgaaaatggggatggaaactttgctgcttgccaatgaagataaggaccgtcggatagaggagcttacggggctgttaaaccagtaccggaaggtaaaggagattgtgatggtcactcaagggccttcggagagaactctctcaatcaatgaagaagaaccggagggaggtttcagcaagtggaacgctacaaataaggaccctgaagaattatttaaacaagagatgcctccaagatgtagctctcctacagtggggccacctccattgccacagaaatcactggaaaccagggctcagaaaaagctctcttgtagtctagaagacttgagaagtgaatctgtggataagtgtatggatgggaaccagcccttcccggtgttagaacccaaggacagccctttcttggcggagcacaaatatcccactttacctgggaagctttcaggagccacgcccaatggagaggctgccaaatctcctcccaccatctgccagcctgacgccacggggagcagcctgctgaggctgagtgagtgtccagccctggtgctggtggcctctgagcagtgtccttggcactttcaatgattgtataagatccctgcacctaccaccacaatccacaattggagaatggtggggtgggtggctggaacaagttgtaccttggggtggtcccacctcnagaggctccccctgggcgagctgttttctaaggtcagcactctacagtctcagcaaaccagggtgtgtgtatcccctacttcttttcggctgcagcttttcacccttgtttcctctcttcttctcttcctcctctcgaactctttcctgtccttcctagcattgttttccctcctctcagacacccccttctacccttcctgccgctggtga

SEQ ID NO: 504459 - DNA, 1110 bp, Homo sapiens
  misc_feature (17)..(17): n is a, c, g, or t
gagcgggctggccagcnggtccccgggaacaggaaccctggtggacgggtccagcaggcttcttcggtgcccgagagggagcgggtgcccaagggggtggtccctgtggcaggtcccggggtgggggcgcggcgctccgggaagagccttccgcaggtccccgccccgtcacgtgggcgccggccccggccgctgcggtcggtccgctggttggtcgggcgcttggtccggcagttggtcggtgggccagtggcccgtcgctcgcttctgggctctcatgtttgaaggtgggagggacacgggagcggcccgcacacctgagccgcccggagaggagcctcggccccgtacccagtaagaagaggaggaggccaggcaggcaaaaggagtcatggcttctgatgctagtcatgcgctggaagctgccctggagcaaatggacgggatcattgcaggcactaaaacaggtgcagatcttagtgatggtacttgtgagcctggactggcttccccggcctcctacatgaaccccttcccggtgctccatctcatcgaggacttgaggctggccttggagatgctggagcttcctcaggagagagcagccctcctgagccagatccctggcccaacagctgcctacataaaggaatggtttgaagagagcttgtcccaggtaaaccaccacagtgctgctagtaatgaaacctaccaggaacgcttggcacgtctagaaggggataaggagtccctcatattgcaggtgagtgtcctcacagaccaagtagaagcccagggagaaaagattcgagacctggaagtgtgtctggaaggacaccaggtgaaactcaatgctgctgaagagatgcttcaacaggagctgctaagccgcacatctcttgagacccagaagctcgatctgatgactgaagtgtctgagctgaagctcaagctggttggcatggagaaggagcagagagagcaggaggagaagcagagaaaagcagaggtaagggtgagtgtgtactgtcctaagctcagacctgggaaggctgtcataatgtgaatttaggccatctggtcaactcccagcctggaagctattgggtg

SEQ ID NO: 504460 - DNA, 934 bp, Homo sapiens
  misc_feature (17)..(17): n is a, c, g, or t
gagcgggctggccagcnggtccccgggaacaggaaccctggtggacgggtccagcaggcttcttcggtgcccgagagggagcgggtgcccaagggggtggtccctgtggcaggtcccggggtgggggcgcggcgctccgggaagagccttccgcaggtccccgccccgtcacgtgggcgccggccccggccgctgcggtcggtccgctggttggtcgggcgcttggtccggcagttggtcggtgggccagtggcccgtcgctcgcttctgggctctcatgtttgaaggtgggagggacacgggagcggcccgcacacctgagccgcccggagaggagcctcggccccgtacccagtaagaagaggaggaggccaggcaggcaaaaggagtcatggcttctgatgctagtcatgcgctggaagctgccctggagcaaatggacgggatcattgcaggcactaaaacaggtgcagatcttagtgatggtacttgtgagcctggactggcttccccggcctcctacatgaaccccttcccggtgctccatctcatcgaggacttgaggctggccttggagatgctggagcttcctcaggagagagcagccctcctgagccagatccctggcccaacagctgcctacataaaggaatggtttgaagagagcttgtcccaggtaaaccaccacagtgctgctagtaatgaaacctaccaggaacgcttggcacgtctagaaggggataaggagtccctcatattgcaggtgagtgtcctcacagaccaagtagaagcccagggagaaaagattcgagacctggaagtgtgtctggaaggacaccaggtgaaactcaatgctgctgaagagatgcttcaacagatatgcaatttagtcctcagattttgtatgcttaatattacatttttcccatttaaa

SEQ ID NO: 504461 - DNA, 1277 bp, Homo sapiens
tagtcttcaggctgtggaatcggagctgccaccgcccgagactccaaagcaaagcccagtttccggcgcggaagcggagggatctcaggaattgtagtccgcggggtgggcgcggttctcgcttccggccagcgggtctggcctgcgcttgcgcgggtctccgccgcctgggctcctagggactgtggcctcggcggtatgtcccttgctttcccttgaagcgggagaagacccggcagaggcgctctgtccgctgcagccgcgcgggtggaggaggcagagtctgaggctttggggtggcctgccaccttggcgtccttacagacctgccgtgtgttggggtggccaagaaacttctgcaggtggatgggctggagaacaacgccctgcacaaggagaagatccgactcctgcagactcgaggagactcattccctctgctgggagactctgggactgtcctgggaatggccctgaggagccacgaccgcagcaccaggcccctctacatctccgtgggccacaggatgagcctggaggccgctgtgcgcctgacttgctgctgctgcaggttccggatcccagagcccgtgcgccagcactttgttgaacgtggtggtgagagcacacgtcctcgtctcattcctgatcgaacgcggtggtgagagcacacgtcctcgtctcgttcctgatcgaacgcggtggtgagagcacacgtcctcgtctcgttcctgatcgaacgcggtggtgagagcacacgtcctcgtctcgttcctgatcgaacgcggtggtgagagcacacgtcctcgtctcgttcctgatcgaacgtggtggtgagagcacacgtccttgtcttgttcctgatcttaagggaacgtttgcagtctttcaccactagatgtgatgtgagctgttagattttcaaggatgctcttcatccagctgaagacggtcccttctagtcctaatttgttaagtgtttttatccttaaagggtactggattttgtcaaatgcttttctggcctctattgaaaagatcctgtgttcttctgttaatatgaggtgttacattgattgattttcatatgttgagccagtttccatttgtggaatacatctaactcggtcatggtgtataatccatttactctgctgctgaatgtgatttgcttgtattttggtgcggatttttacatctgtatttataagggatattggtctggtgttttcttatgatgtcttcctttggttttgatatcaggataatattagcct

SEQ ID NO: 504462 - DNA, 96 bp, Homo sapiens
  misc_feature (2)..(2): n is a, c, g, or t
tntgagggcacatgtttatttagcagacaaggtggggctccagtcacggggtggcctggggaagcagctgcatgggtggcactgtggggagggtct

SEQ ID NO: 504463 - DNA, 130 bp, Homo sapiens
gccttttagttttgctaattgtgaaaaggaaatgctttccaggaagtaaatgccaattccttttaagtgggctttaaaaaaaaaaattttccccccaaaagaaatttaaaaaaaaaattttatttgttta

SEQ ID NO: 504464 - DNA, 1398 bp, Homo sapiens
tagtcttcaggctgtggaatcggagctgccaccgcccgagactccaaagcaaagcccagtttccggcgcggaagcggagggatctcaggaattgtagtccgcggggtgggcgcggttctcgcttccggccagcgggtctggcctgcgcttgcgcgggtctccgccgcctgggctcctagggactgtggcctcggcggtatgtcccttgctttcccttgaagcgggagaagacccggcagaggcgctctgtccgctgcagccgcgcgggtggaggaggcagagtctgaggctttggggtggcctgccaccttggcgtccttacagacctgccgtgtgttggggtggccaagaaacttctgcaggtggatgggctggagaacaacgccctgcacaaggagaagatccgactcctgcagactcgaggagactcattccctctgctgggagactctgggactgtcctgggaatggccctgaggagccacgaccgcagcaccaggcccctctacatctccgtgggccacaggatgagcctggaggccgctgtgcgcctgacttgctgctgctgcaggttccggatcccagagcccgtgcgccaggctgacatctgctcccgagagcacatccgcaagtcgctgggactccccgggccacccacaccgaggagcccgaaggcgcagaggccagtggcatgccccaaaggagactccggagagtcctcactttgttgaacgtggtggtgagagcacacgtcctcgtctcattcctgatcgaacgcggtggtgagagcacacgtcctcgtctcgttcctgatcgaacgcggtggtgagagcacacgtcctcgtctcgttcctgatcgaacgcggtggtgagagcacacgtcctcgtctcgttcctgatcgaacgcggtggtgagagcacacgtcctcgtctcgttcctgatcgaacgtggtggtgagagcacacgtccttgtcttgttcctgatcttaagggaacgtttgcagtctttcaccactagatgtgatgtgagctgttagattttcaaggatgctcttcatccagctgaagacggtcccttctagtcctaatttgttaagtgtttttatccttaaagggtactggattttgtcaaatgcttttctggcctctattgaaaagatcctgtgttcttctgttaatatgaggtgttacattgattgattttcatatgttgagccagtttccatttgtggaatacatctaactcggtcatggtgtataatccatttactctgctgctgaatgtgatttgcttgtattttggtgcggatttttacatctgtatttataagggatattggtctggtgttttcttatgatgtcttcctttggttttgatatcaggataatattagcct

SEQ ID NO: 504465 - DNA, 897 bp, Homo sapiens
ggcggaaggggtgcccgggacgaagccatggccctggaggcggcgggagggccgccggaggaaacgctgtcactgtggaaacgggagcaagctcggctgaaggcccacgtcgtagaccgggacaccgaggcgtggcagcgagaccccgccttctcgggtctgcagagggtcgggggcgttgacgtgtccttcgtgaaaggggacagtgtccgcgcttgtgcttccctggtggtgctcagcttccctgagctcgagttctagccttccaggtagcaaaaccagaacgggatcttccctgcacttcctgctttgtcacagccccttctagctgctttggaaaacaggcgttgccttgcctcccatttggagccccagaacaaaacagttggattcccccacaagaggacgggccgatggcctggaattagggaaccccgggttcaccacggccggtatccttttcaaacccttgtgggtatcccacgccgccgttggcgtatggccctttgggccacttcacttatggggcaaacgttaacgttattaccgttccgattcacgtttccggacccgggccaaaccgcaaagttttggcccagggacacgttcccgatattaatggggataggtgtggcccaggcttgggttggggtttaacccccgtgtgataaagccaacgtttcaccccccaatgcagacgggaaaaccgttggagttggaaacccaatggggcactttcccacgcgggacaaagggcaacacaactttcacaggggtgccaagggggcaccccccttgcaattcgtccgttggccaggggcacacgttgggagacccaacttattccgattcaccggattctccgaaagccaaggggcacccccaagccaagggatg

SEQ ID NO: 504466 - DNA, 700 bp, Homo sapiens
ggcggaaggggtgcccgggacgaagccatggccctggaggcggcgggagggccgccggaggaaacgctgtcactgtggaaacgggagcaagctcggctgaaggcccacgtcgtagaccgggacaccgaggcgtggcagcgagaccccgccttctcgggtctgcagagggtcgggggcgttgacgtgtccttcgtgaaaggggacagtgtccgcgcttgtgcttccctggtggtgctcagcttccctgagctcgaggtaacctgggaggacgccgagctcgaggcgggcccctcggtgggctcgggcgtgcggtctccgggacagggagcagtgcaagcgtagaacccggcttctcgttttgtaggatgtcattaatagtctggggagttggccgggcgcggtggctcgcgcctgcggtcccagcactttgggaggctgaggcgggggaatcacctggggtcgggagttcgagaccagcctgaccggcatggagaaacccggtctctactaaaaatacaaagttagacgggtgtggtggcatatacctgtgatcccggctactcggagggctgaggcgggcagaatcgcttgaacccgggaggcggaggttgcggtgagccaacattacgccattgcactccagcctcggcaacaagagcgaaactccatctgaaaaaaaacaatacaactatcacaaacc

SEQ ID NO: 504467 - DNA, 1280 bp, Homo sapiens
ggcggaaggggtgcccgggacgaagccatggccctggaggcggcgggagggccgccggaggaaacgctgtcactgtggaaacgggagcaagctcggctgaaggcccacgtcgtagaccgggacaccgaggcgtggcagcgagaccccgccttctcgggtctgcagagggtcgggggcgttgacgtgtccttcgtgaaaggggacagtgtccgcgcttgtgcttccctggtggtgctcagcttccctgagctcgaggtccttcttgtggatggaaacggggtactccaccaccgaggctttggggtggcctgccaccttggcgtccttacagacctgccgtgtgttggggtggccaagaaacttctgcaggtggatgggctggagaacaacgccctgcacaaggagaagatccgactcctgcagactcgaggagactcattccctctgctgggagactctgggactgtcctgggaatggccctgaggagccacgaccgcagcaccaggcccctctacatctccgtgggccacaggatgagcctggaggccgctgtgcgcctgacttgctgctgctgcaggttccggatcccagagcccgtgcgccaggctgacatctgctcccgagagcacatccgcaagtcgctgggactccccgggccacccacaccgaggagcccgaaggcgcagaggccagtggcatgccccaaaggagactccggagagtcctcaggtgaggccagcccccacaggaccacagcccaggccccaggacagccccaaggccaggctcccaggagcaggcgggcaaggactggcagtagggtggaactgggcaccatgaagacaagaaggccaccggccaccccgttctggcctcaggacactgaccacccctgggggtggtctagggacttaggggaacctcatctcagccgcaggtggagcacccagtccccaaagacaggctgaccgcaccaccccagggggacgccgcagcacagcccagcaccaggtggggcagaggtgaccacggcccctctttgctccgtcatcggctggtcagctgtggtcacggtgcctcagaggacagatctctatgggggcaagtgccagatcctgagagcgcatgagacgctttcccggagccgacgaaggggactcggagctgcagcctgcacgacccctgcagcctgtgctttgcccacccctttcaatagatggaacttgcttgctcttttttattcttctcaggattcattttttatttcaaaaaaaaaaaa

SEQ ID NO: 504468 - DNA, 1524 bp, Homo sapiens
tagtcttcaggctgtggaatcggagctgccaccgcccgagactccaaagcaaagcccagtttccggcgcggaagcggagggatctcaggaattgtagtccgcggggtgggcgcggttctcgcttccggccagcgggtctggcctgcgcttgcgcgggtctccgccgcctgggctcctagggactgtggcctcggcggtatgtcccttgctttcccttgaagcgggagaagacccggcagaggcgctctgtccgctgcagccgcgcgggtggaggaggcagagtctgaggtgtgaccccgaccaagtttgacgcttctgtcctcctagggagcaagctcggctgaaggcccacgtcgtagaccgggacaccgaggcgtggcagcgagaccccgccttctcgggtctgcagagggtcgggggcgttgacgtgtccttcgtgaaaggggacagtgtccgcgcttgtgcttccctggtggtgctcagcttccctgagctcgaggtccttcttgtggatggaaacggggtactccaccaccgaggctttggggtggcctgccaccttggcgtccttacagacctgccgtgtgttggggtggccaagaaacttctgcaggtggatgggctggagaacaacgccctgcacaaggagaagatccgactcctgcagactcgaggagactcattccctctgctgggagactctgggactgtcctgggaatggccctgaggagccacgaccgcagcaccaggcccctctacatctccgtgggccacaggatgagcctggaggccgctgtgcgcctgacttgctgctgctgcaggttccggatcccagagcccgtgcgccaggctgacatctgctcccgagagcacatccgcaagtcgctgggactccccgggccacccacaccgaggagcccgaaggcgcagaggccagtggcatgccccaaaggagactccggagagtcctcaggtgaggccagcccccacaggaccacagcccaggccccaggacagccccaaggccaggctcccaggagcaggcgggcaaggactggcagtagggtggaactgggcaccatgaagacaagaaggccaccggccaccccgttctggcctcaggacactgaccacccctgggggtggtctagggacttaggggaacctcatctcagccgcaggtggagcacccagtccccaaagacaggctgaccgcaccaccccagggggacgccgcagcacagcccagcaccaggtggggcagaggtgaccacggcccctctttgctccgtcatcggctggtcagctgtggtcacggtgcctcagaggacagatctctatgggggcaagtgccagatcctgagagcgcatgagacgctttcccggagccgacgaaggggactcggagctgcagcctgcacgacccctgcagcctgtgctttgcccacccctttcaatagatggaacttgcttgctcttttttattcttctcaggattcattttttatttcaaaaaaaaaaaa

SEQ ID NO: 504469 - DNA, 867 bp, Homo sapiens
ggcagacactgaccttcagcgcctcggtccagcgccatggcgccctccaggaagttcttcgttgggggaaactgaaaatgaacgggcgaagcagagtctgggggagctcatcggcactctgaacgcggcaaggtgcggcgacaccgaggtggttgtgtgctcccccctatgcctatatcgatttcgcccggaagaagcttagatcccaagatgggctgtggttgcgcagaattgctacaaagtgactaatggggctttaactggggagatcaagccctgggaatgatcaaagactggggagccacgtgggtggtcctggggcactcagagagaaggcattgtctggggggagtcagatgacgctgatgtgggcacgaaggtggggcccatgctctggcaggagggactcggggaaatcgccgtgcatggggggagacgctagatgacgggggacggtggcatcactgagaagggtttgttcgagcagacagaggtcatcgcagataacgtgaaggactgacgcagggtcgtcctgctatgagctgtgtggcccatggtactggcaagagtgcaacacccccaaatgcccaggaagtacacgagaaggcccgaggatggttgagaggccacgtctcctgatggcgggggacagaagcccggatcattaatgaggcgcctgggggactgggcacctggaaggaggtggcagcagggctgatgggatgccaccgggggggggctccctacaagcgagtcgggagacatcaggccaaaagaggccccaatttcaaacttcggcacccgggataacccagaaacagaaagggcccggaaagcagaggaagacgcccctcggcgcacaaagga

SEQ ID NO: 504470 - DNA, 715 bp, Homo sapiens
ttcggctcgaggagagagtttagagagagagttagacagagatttagagagggagagagagagagagagagggatagatttagatggagctagcctccccctcaacgcgggatttcgccatccgattacagctcacagcagtcgttgaaaagataaaatgtccagcttactaatcctggatataatcattcccgaagcactgctctgaggcaagaaacctggaattcatgctctccaggctaaggggccaccgcattggataaactctcacgcaccttccctggaccactgcacacacctaccagggtggcacggtcctcaaaaatatcccttaccttgtgaatgaccatgcatataccctgccgcgaccaccgacagtcaccataacccccctccgcgccccgcaaagaccctctgcttaccattccacaaccctcccattccgtatagataccaaggccacccacatttcccctgcgccccgctcgaccggcctcccgtcgaactcgcacttacaactctctctctccccctctcactctccgtaagctttcttccatctccctctcacaggacgcttccctgcccgccccccttaagccacatccaatcacctctttcacactgggtctctacggcacttttgaccatcgctcccctctgccattgtggctcccacccgccatgggcccctacctccattgcgcatgcttcc

SEQ ID NO: 504471 - DNA, 1415 bp, Homo sapiens
ggcggaaggggtgcccgggacgaagccatggccctggaggcggcgggagggccgccggaggaaacgctgtcactgtggaaacgggagcaagctcggctgaaggcccacgtcgtagaccgggacaccgaggcgtggcagcgagaccccgccttctcgggtctgcagagggtcgggggcgttgacgtgtccttcgtgaaaggggacagtgtccgcgcttgtgcttccctggtggtgctcagcttccctgagctcgaggtggtgtatgaggagagccgcatggtcagcctcacagccccctacgtgtcgggcttcctggccttccgagaggtgcccttcttgctggagctggtgcagcagctgcgggagaaggagccgggcctcatgccccaggtccttcttgtggatggaaacggggtactccaccaccgaggctttggggtggcctgccaccttggcgtccttacagacctgccgtgtgttggggtggccaagaaacttctgcaggtggatgggctggagaacaacgccctgcacaaggagaagatccgactcctgcagactcgaggagactcattccctctgctgggagactctgggactgtcctgggaatggccctgaggagccacgaccgcagcaccaggcccctctacatctccgtgggccacaggatgagcctggaggccgctgtgcgcctgacttgctgctgctgcaggttccggatcccagagcccgtgcgccaggctgacatctgctcccgagagcacatccgcaagtcgctgggactccccgggccacccacaccgaggagcccgaaggcgcagaggccagtggcatgccccaaaggagactccggagagtcctcaggtgaggccagcccccacaggaccacagcccaggccccaggacagccccaaggccaggctcccaggagcaggcgggcaaggactggcagtagggtggaactgggcaccatgaagacaagaaggccaccggccaccccgttctggcctcaggacactgaccacccctgggggtggtctagggacttaggggaacctcatctcagccgcaggtggagcacccagtccccaaagacaggctgaccgcaccaccccagggggacgccgcagcacagcccagcaccaggtggggcagaggtgaccacggcccctctttgctccgtcatcggctggtcagctgtggtcacggtgcctcagaggacagatctctatgggggcaagtgccagatcctgagagcgcatgagacgctttcccggagccgacgaaggggactcggagctgcagcctgcacgacccctgcagcctgtgctttgcccacccctttcaatagatggaacttgcttgctcttttttattcttctcaggattcattttttatttcaaaaaaaaaaaa

SEQ ID NO: 504472 - DNA, 1393 bp, Homo sapiens
tagtcttcaggctgtggaatcggagctgccaccgcccgagactccaaagcaaagcccagtttccggcgcggaagcggagggatctcaggaattgtagtccgcggggtgggcgcggttctcgcttccggccagcgggtctggcctgcgcttgcgcgggtctccgccgcctgggctcctagggactgtggcctcggcgggagcaagctcggctgaaggcccacgtcgtagaccgggacaccgaggcgtggcagcgagaccccgccttctcgggtctgcagagggtcgggggcgttgacgtgtccttcgtgaaaggggacagtgtccgcgcttgtgcttccctggtggtgctcagcttccctgagctcgaggtccttcttgtggatggaaacggggtactccaccaccgaggctttggggtggcctgccaccttggcgtccttacagacctgccgtgtgttggggtggccaagaaacttctgcaggtggatgggctggagaacaacgccctgcacaaggagaagatccgactcctgcagactcgaggagactcattccctctgctgggagactctgggactgtcctgggaatggccctgaggagccacgaccgcagcaccaggcccctctacatctccgtgggccacaggatgagcctggaggccgctgtgcgcctgacttgctgctgctgcaggttccggatcccagagcccgtgcgccaggctgacatctgctcccgagagcacatccgcaagtcgctgggactccccgggccacccacaccgaggagcccgaaggcgcagaggccagtggcatgccccaaaggagactccggagagtcctcaggtgaggccagcccccacaggaccacagcccaggccccaggacagccccaaggccaggctcccaggagcaggcgggcaaggactggcagtagggtggaactgggcaccatgaagacaagaaggccaccggccaccccgttctggcctcaggacactgaccacccctgggggtggtctagggacttaggggaacctcatctcagccgcaggtggagcacccagtccccaaagacaggctgaccgcaccaccccagggggacgccgcagcacagcccagcaccaggtggggcagaggtgaccacggcccctctttgctccgtcatcggctggtcagctgtggtcacggtgcctcagaggacagatctctatgggggcaagtgccagatcctgagagcgcatgagacgctttcccggagccgacgaaggggactcggagctgcagcctgcacgacccctgcagcctgtgctttgcccacccctttcaatagatggaacttgcttgctcttttttattcttctcaggattcattttttatttcaaaaaaaaaaaa

SEQ ID NO: 504473 - DNA, 1207 bp, Homo sapiens
ggcggaaggggtgcccgggacgaagccatggccctggaggcggcgggagggccgccggaggaaacgctgtcactgtggaaacgggagcaagctcggctgaaggcccacgtcgtagaccgggacaccgaggcgtggcagcgagaccccgccttctcgggtctgcagagggtcgggggcgttgacgtgtccttcgtgaaaggggacagtgtccgcgcttgtgcttccctggtggtgctcagcttccctgagctcgaggtggtgtatgaggagagccgcatggtcagcctcacagccccctacgtgtcgggcttcctggccttccgagaggtgcccttcttgctggagctggtgcagcagctgcgggagaaggagccgggcctcatgccccaggtccttcttgtggatggaaacggggtactccaccaccgaggctttggggtggcctgccaccttggcgtccttacagacctgccgtgtgttggggtggccaagaaacttctgcaggtggatgggctggagaacaacgccctgcacaaggagaagatccgactcctgcagactcgaggagactcattccctctgctgggagactctgggactgtcctgggaatggccctgaggagccacgaccgcagcaccaggcccctctacatctccgtgggccacaggatgagcctggaggccgctgtgcgcctgacttgctgctgctgcaggttccggatcccagagcccgtgcgccaggctgacatctgctcccgagagcacatccgcaagtcgctgggactccccgggccacccacaccgaggagcccgaaggcgcagaggccagtggcatgccccaaaggagactccggagagtcctcaggtggagcacccagtccccaaagacaggctgaccgcaccaccccagggggacgccgcagcacagcccagcaccaggtggggcagaggtgaccacggcccctctttgctccgtcatcggctggtcagctgtggtcacggtgcctcagaggacagatctctatgggggcaagtgccagatcctgagagcgcatgagacgctttcccggagccgacgaaggggactcggagctgcagcctgcacgacccctgcagcctgtgctttgcccacccctttcaatagatggaacttgcttgctcttttttattcttctcaggattcattttttatttcaaaaaaaaaaaa

SEQ ID NO: 504474 - DNA, 168 bp, Homo sapiens
aacgctacgctcacgggacacatgtgcttcttagtcctacgtcaccgcagtttacatgtccaggctcttgtggcggtgggagaccatgcaagcaagccgatggttacatttgctgccaacatcaacaaagagagcattgtggatgtcgaaggtgtcgtgacgaaaagt

SEQ ID NO: 504475 - DNA, 238 bp, Homo sapiens
atttccactagacaacatgttgctccacacacaatatattaaggcttatattaacaagggtattgagttaaataagaacatgattaaggtgatactcacttggaaaaaaaatacgttttatgaaaaaaatccccagggcctgtaatcatgtctctgtttctcaggctgtagataaaagggttcagcatgggggttaccactgtgtacatcatggaagcaggaaataaaaaatacatat

SEQ ID NO: 504476 - DNA, 944 bp, Homo sapiens
ggcggaaggggtgcccgggacgaagccatggccctggaggcggcgggagggccgccggaggaaacgctgtcactgtggaaacgggagcaagctcggctgaaggcccacgtcgtagaccgggacaccgaggcgtggcagcgagaccccgccttctcgggtctgcagagggtcgggggcgttgacgtgtccttcgtgaaaggggacagtgtccgcgcttgtgcttccctggtggtgctcagcttccctgagctcgaggtccttcttgtggatggaaacggggtactccaccaccgaggctttggggtggcctgccaccttggcgtccttacagacctgccgtgtgttggggtggccaagaaacttctgcaggtggatgggctggagaacaacgccctgcacaaggagaagatccgactcctgcagactcgaggagactcattccctctgctgggagactctgggactgtcctgggaatgggctgacatctgctcccgagagcacatccgcaagtcgctgggactccccgggccacccacaccgaggagcccgaaggcgcagaggccagtggcatgccccaaaggagactccggagagtcctcaggtggagcacccagtccccaaagacaggctgaccgcaccaccccagggggacgccgcagcacagcccagcaccaggtggggcagaggtgaccacggcccctctttgctccgtcatcggctggtcagctgtggtcacggtgcctcagaggacagatctctatgggggcaagtgccagatcctgagagcgcatgagacgctttcccggagccgacgaaggggactcggagctgcagcctgcacgacccctgcagcctgtgctttgcccacccctttcaatagatggaacttgcttgctcttttttattcttctcaggattcattttttatttcaaaaaaaaaaaa

SEQ ID NO: 504477 - DNA, 133 bp, Homo sapiens
agatagtgtctgggcaactgcaggatctgggcatacccacgccagcaaggcagcacctgttgcaagtcatgcagtaccagcctttcgctgggcaagcatccaaagcaccattgcttggcactgacgcacagtc

SEQ ID NO: 504478 - DNA, 341 bp, Homo sapiens
attttttttttttggcccctttataaataaaggatttttctttagtttgaaaagggggattaaaggtccctttttgggttcccagggtcttataaccccctgaatttttagttaaaaagtctttaaggagggggggagcccctttaaagggaaaattcccccccctctgttttttcccgtattccttaaaattgtttttttagggggagagagttttttttttccccccaaaggccgcttttttcccctttggggtttatgggttaatttggtttttaacctaggcccccctataaaagttgatactggggccgtaaactttttaaagttttccctgttta

SEQ ID NO: 504479 - DNA, 664 bp, Homo sapiens
  misc_feature (492)..(492): n is a, c, g, or t
gaaaagaagcgaaggaagtcaaatactcagggccctgcatactcacatctgacggagttgcaccacccccaactcccatggtggatcacctggttgcatccaacccttttgaagatgacttcggagcccccaaagtgggggttgcagcccctccattccttggcagtcctgtgcccttcggaggcttccgtgtgcaggggggcatggcgggccaggtacccccaggctacagcactggaggtggagggggccgcccagccactccgtcgacagccgagcgcccttccctcccaaagtcctatgggccctgggtgcaacatgccgcccacagggtccgtggtgaaccaaccgcaggaaagagtgaacttttccgcagccgagccattcagaccagcctctgggtcaaaacgtttgggtccgtcccaggtgggcagatgatgccgggcccagtggggggattggtcccatgagtctcacccaccatgggacagnctcccagagcagagctgggcccaccttctctgtcccaacgatttgctcagccaggggctccttttggccttctcctctccagagacctggtcaggggctccccagactgccgctaacacaagtccctttcctggtccggaccctgggtttcctggcctggtggtgaggatgg

SEQ ID NO: 504480 - DNA, 115 bp, Homo sapiens
accagacaaccttagctaaaccatttacccaaataaagtataggcgctagaaattgaaacctggcgcaatagctatagtaccccaagggaaagattgaaaaattattacccagga

SEQ ID NO: 504481 - DNA, 169 bp, Homo sapiens
gccaaagagcccctaaaacccgccacatctgccatgtccctctacatcaccgcccgaccttagctctaccatcgttcttctactatgagcccccttccccatacccaacccttggtacaactacaacctgagggcttctatttatttgagccaccttgtggctgaggcg

SEQ ID NO: 504482 - DNA, 271 bp, Homo sapiens
ttttttttttgcccccaaaaaaaaaaaaggggggggaaaggtttcccttttaagttcccttttctggggggaacccccccccgggggcctgttttttttggggggggggggatgccctgacccttttggggcctttttttgtttttattaaagggggggccccccttttttgggccccaaaaaaggggggtcccaaacccccccccggggggggtcccctggggggtccccaagggaaattggttttttttttaaaaaggggcctttccta

SEQ ID NO: 504483 - DNA, 598 bp, Homo sapiens
  misc_feature (34)..(34): n is a, c, g, or t
  misc_feature (45)..(45): n is a, c, g, or t
  misc_feature (50)..(51): n is a, c, g, or t
  misc_feature (59)..(59): n is a, c, g, or t
  misc_feature (66)..(66): n is a, c, g, or t
  misc_feature (69)..(69): n is a, c, g, or t
  misc_feature (92)..(93): n is a, c, g, or t
  misc_feature (99)..(100): n is a, c, g, or t
  misc_feature (127)..(127): n is a, c, g, or t
  misc_feature (131)..(131): n is a, c, g, or t
  misc_feature (137)..(137): n is a, c, g, or t
  misc_feature (143)..(143): n is a, c, g, or t
  misc_feature (155)..(155): n is a, c, g, or t
  misc_feature (329)..(329): n is a, c, g, or t
  misc_feature (334)..(335): n is a, c, g, or t
  misc_feature (337)..(337): n is a, c, g, or t
  misc_feature (339)..(339): n is a, c, g, or t
  misc_feature (349)..(349): n is a, c, g, or t
  misc_feature (361)..(361): n is a, c, g, or t
  misc_feature (374)..(377): n is a, c, g, or t
  misc_feature (381)..(381): n is a, c, g, or t
  misc_feature (385)..(386): n is a, c, g, or t
  misc_feature (396)..(396): n is a, c, g, or t
  misc_feature (400)..(400): n is a, c, g, or t
  misc_feature (402)..(403): n is a, c, g, or t
  misc_feature (405)..(405): n is a, c, g, or t
  misc_feature (409)..(409): n is a, c, g, or t
  misc_feature (411)..(413): n is a, c, g, or t
  misc_feature (418)..(418): n is a, c, g, or t
  misc_feature (429)..(431): n is a, c, g, or t
  misc_feature (436)..(436): n is a, c, g, or t
  misc_feature (442)..(442): n is a, c, g, or t
  misc_feature (451)..(451): n is a, c, g, or t
  misc_feature (463)..(463): n is a, c, g, or t
  misc_feature (468)..(468): n is a, c, g, or t
  misc_feature (471)..(471): n is a, c, g, or t
  misc_feature (482)..(482): n is a, c, g, or t
  misc_feature (504)..(504): n is a, c, g, or t
  misc_feature (520)..(520): n is a, c, g, or t
  misc_feature (525)..(525): n is a, c, g, or t
  misc_feature (536)..(536): n is a, c, g, or t
  misc_feature (539)..(539): n is a, c, g, or t
tcagaggatctcagcatcatggtgtcagccctanatagataccanaaaanntgaagatngaaagtngtnaaaaaaaaaaagggcaaagaaannaatatnnccaaagaaaaaagataaatggtagctnaaanataaancaaaancaccagttaatnaaactatacagatctaatacaaaccaaaaccagcctgaaagacccaaccttaaaagatgctaaaaattaaggcataaatctgcataatatggagttttatttccattctctcttttccctctactatgtatgcttaacctgatctgcctctaggggcttacaaaaaaacggttnccggnntncngtcttcaatntgacctcaaatntcctgagcaaagnnnnggtnatcnngctgagggtncttngnngntaancnnnagacntcattattccnnntaatncagaantaggatcgnagcgccaaattnaaatnctnccactggtacntctggaaggaattaaaactttnacagtgccttgcctgnacagnataatgttttnaanaaagaaaaccaagcaagaactataggctaaagaaggttcaaaattataaacaaacagat

SEQ ID NO: 504484 - DNA, 143 bp, Homo sapiens
cggtcgctcgtgctccagcggcgtcccgcccctcctcgtcggttgtcgccaccgccagcctcacttcccacaacctggcgcattaggagccctccgaccggcaccgcccccaagaaaaaaaaacagtgatgtgggtgcggccg

SEQ ID NO: 504485 - DNA, 122 bp, Homo sapiens
gaagtagtaaggtacacttcatttaaataaacacctgtttgtaactcttaaaacttatatattgcagaaggaaaaaattccttctatgtaatgataattttaaattatattttatattataa

SEQ ID NO: 504486 - DNA, 224 bp, Homo sapiens
gatgtggcactaaccacgcattctctatcgagctctctatgtggcatcactggtcagcgccggcccccacaacgactagataaatacaactagttatagagtcctcaggtgctaaattggcagagtgatatgtacttaaataattattattttttattatacttttaagttctagggtacacgtgcaactacgagcaggtttgttacatatgtatacatgtgcc

SEQ ID NO: 504487 - DNA, 804 bp, Homo sapiens
gtgatgctagcgaggagggtctacctatccccatcgcgggccggctagacctaccctaccagactgtaccgctatggctaccaaggctgttacccgccactcgacgtgtagatagcactttacagcggcagaagctgatggctgtgactagaatatatccgccccgaaaccagccatccacccatcatgcgctgtccatctcctacccagccccccacaggaggagataggcctgatacaggctatcatccgccgggagcatagcagtcagtcttccacggacaaccgactgctaggccgtctgccagaatagtggctctgacctgcagaggacacagctctcttatgcgacaccagcctgcaggaaacactgagactcctgatcgacggatacttgccccacgccaggtacctgaagcccttcctgcgacggattccacggtaccagacatcctggcctgccgcctgtcaccggtcgggggcaccaaccactgctgctggatccagtgcaccagccccaacgctcacacgcgacatggccacggactcttcaacggacctgtcggcgcctctccgcgcccgacagcccaacgcagcgccgccctaggagtggaacacacaaaccctccagcacacgccaccgggccataaatacacactcacgtcacacaggatacaaccaagcacaaggcaacccggaatagccacagaccaggagcaaacgaaaggcacgccctcacccagccaccagctcggaccaagaacacacatccactgggatccccagagaccaacgaaccaacc

SEQ ID NO: 504488 - DNA, 122 bp, Homo sapiens
ggcagggcaaacagaacctgtatcacctgttacgacagcagcttatggtttctcgccagaatgcttgtcgcacacgggatgcattataggatgcagctcttatccccttctgtcgtcttctc

SEQ ID NO: 504489 - DNA, 209 bp, Homo sapiens
  misc_feature (36)..(36): n is a, c, g, or t
  misc_feature (47)..(47): n is a, c, g, or t
  misc_feature (56)..(56): n is a, c, g, or t
  misc_feature (109)..(109): n is a, c, g, or t
  misc_feature (144)..(144): n is a, c, g, or t
tgcggtcccgcggttatgtttacgctccaaggtgtnactaggtgggntcctcaccnggccagttaacacttgctctgacccagaccataaatacattttcttctaatgntgctcaagctcaatcaacaataagtgagacttcgncaagagatataactttgccaggctatattaattaaacttaaaggctccgtaagacataaccgcgg

SEQ ID NO: 504490 - DNA, 196 bp, Homo sapiens
tagaccattattagacaatcattcgaactaatcagcacccaagtgctcttcactgctgcacaaaggaaaggtaagagagatagaccatacctacgctagcatcctattcaactacacccagcctccaaacacacgtgacctacttgcaagcgtaagcaaccgtcatccatagcctcttgttacacgcaggttaccc

SEQ ID NO: 504491 - DNA, 180 bp, Homo sapiens
cttttggggtctttgctacttccagtgtcaccacagagcttgttcttgtcatgagttctgccgccctttcctgagagagtccaaccagacttcgtccatccactctaggcagatgttatcttcgctgttgacccagatgcatatgcgctgttccctccttgactagcaggttgacataca

SEQ ID NO: 504492 - DNA, 175 bp, Homo sapiens
tcagcccacaaagctcagattgctaagtgaatattatcccttatacctgccaccccactcttcatcagtgctgcaagaacggtctctgaactgtgcgtttcaatcggccattttagtctagtcctacaagactggttgatgataacgatgcatcgtacaagcttcagaaggattg

SEQ ID NO: 504493 - DNA, 228 bp, Homo sapiens
tggcgacacgtatagccgaccgtattgaaaaaaaaaaaaaaaaaaaaaaaaaaaaaaaaaaaaaaaaattcggggtgttgtttgggggtttttccgcggggttccccggaaaaattaaagggggggggttcttttggccccccggaagggggccccgggggaaaagccccccgaaaacaaatttgccccccccccgtgggggcacgaaccacatcttgttcttcaaaa

SEQ ID NO: 504494 - DNA, 186 bp, Homo sapiens
  misc_feature (179)..(179): n is a, c, g, or t
aagtagatagcttgcatcctgacaccgtggcaaagttaagaaagttgaaggagaaacataccttgagagggggttttctttaaaactagtgttagaagcttagggatttttttttttattccttactaactttcacccagaaccgctctatttgacttgtgccgacattgcaaactttntgacagg

SEQ ID NO: 504495 - DNA, 765 bp, Homo sapiens
  misc_feature (441)..(441): n is a, c, g, or t
agcggactctgctgaaagactgagatgcgcacccgggcgggcacctgggctcgtaccggaacaggatcaggatggacgatgacatgctaaccagcctgaaagatcctcatcatcggcgtacaatggggtgggcaaggtcagccttggatcattgaggttcgataggatgatacgtttgatcggagaatttgcgaggaacagatagggtgttgactttaaggtgaaaacgaatttcgaggtggatggaaataaggctaaatttgcgaatatgggatactagtggtcaacgagaggtgtacgaacgattaacgtccgcagttattatagaggtgcacaggggtgttaatattagttctcatgaatgtcgtacgcaagaagcagcatacatttgtcaaactggcattaatgggaataaatgcaattagggaaacatgctgtcanacaggaaatgcatattagttaaacatgctcagtttgggaacatcaaataatcgcattacaggcaagaatctgtgaaagatccagatagaaattgaaggcctgcaagatttgcagcagagaagcattccagtgttcattgtagtagaggcaaagtgcagagaaaccatgtgatggtgtacaatgtgccttttgaagaacttgttgaatagatcatgcagaccccgtggactgtgggaaagttgagaatcagaataaaggagtcgaagctgtcacgacaggtcatgaagggcatcgaggaggagcctgtgggggtaatggtcctgg

SEQ ID NO: 504496 - DNA, 248 bp, Homo sapiens
gatgtatcgcccaacaccatgccggtaatttttttgtattttagtagagacaggtttcaccatgttggccaggctggtcttgaactcctgacctcaagtgatctgcctgctcggctcccaaagtactgggattacaggcatgagccaccgtgcctggccagtttttgactttttggagagatggggtttcaccaatgttgtccatactaggtctacaaattctatgggctataagcagtctagcctgc

SEQ ID NO: 504497 - DNA, 193 bp, Homo sapiens
ttagaggatccgtggcatttcagcagtgcttgttcttctgctggagctcactcccagtgcttccttctgccaggtacattcccatgaaatccatgcaaaagaacatcccctttccggccctgccttgggtcctggatccctgctaggtgccccttgacacgtccagtgctcctccatggggacaggaacaagc

SEQ ID NO: 504498 - DNA, 92 bp, Homo sapiens
aggaaaaggaaggggagggaagcttcccaaaagtagccccaacctgggcttttgggcattattttgagaataaatttttgtttcaaactgta

SEQ ID NO: 504499 - DNA, 542 bp, Homo sapiens
  misc_feature (54)..(54): n is a, c, g, or t
  misc_feature (440)..(440): n is a, c, g, or t
tctttgaaagtcttagccaggcatggtggctcacagctgtgatctcaggacttngggaggccgaggccggaggactgcatgagccctggagtccaagaccagcccgggcaacatagggagaccctgtctctacaaaaaaagtaaaaattagccaggtatgatggcatgtgcctttagtactagctacttaggaagctgaggtaggaggactgcttgagtctaggagatcgaggctgcagtaagccaagattgcaccactacactccagactgggcaacacagtgagactcctgacctcgtggtccgccggctttggactcccaaagtgcatgggtcagaactcctttagttatatgatagaaacttcatgcaaacttttggcttaagttaaaaagggtattcattggcattggcatatggaatccaaaaggggactgatngattgggaagagcattgagtcagctgggatttgggagcaaccggaaccagacccatttggatgctaccagtaatctctgtcaacagccctgctattttcccc

SEQ ID NO: 504500 - DNA, 716 bp, Homo sapiens
tcactactgttctaggggactgctgtctcttggttccttttaggttgtgttaggatgtgcacaagtaatcatttaatgttaaatgcacagtgtccaaagaaatgcagtcttaccagttctctggtcatatttcactttagcagttaggacaggcagacagctaacctgacttccattttacaacatcattagacaacttttctcttcagtaacaaaaacagggcaaggacaataacagccatgaactatttgctttatgtctgttctttaacaaacatcaatcgttctggaagtttgcttattagcttaataccttatagtacttttaaaaaatcatccttggtaattatgacttatcctagatccatgtacaattcagacttttatctgttagctttaataaaaatttaaaacatctcatttcagaatacactaacggaattacagttcatgcattagcatttttaagtgaacgttctcttaataagatgcttttgtctaaccgaaatagggcatacagattagttcggatgggcaagtggtcaagaattgagttttaaatactgtgcctatttccaaaagaagaccgatgtggcttttacatcatgctttacagagtcctggggatacctagtcttaacaaattgttggcgtaagttcagcggaaacggtgagaattatgctgagtatgtcacaataattgaactttgctgcta

SEQ ID NO: 504501 - DNA, 295 bp, Homo sapiens
tggtaaagtaataaaatcagtacaatcactaatctttcctttgtacactattatttggcagtatacgatgaatatcactaatcagtttgattattctcagagggtgctgctctttaatgaaaatgaacattatagctaatgtctatacctcaaactctgcttccggtaaccaatcagtgtataaatgttagttgtcgttcttctataaaatttaacataccaattcgttattctagtttgccaactgtgagtatgatatgtagaacatgatagtcacaggcacgacatgttcggt

SEQ ID NO: 504502 - DNA, 1399 bp, Homo sapiens
  misc_feature (370)..(370): n is a, c, g, or t
  misc_feature (572)..(572): n is a, c, g, or t
tgtgggccaagcttgaggcttgaaataaagcctttggagtgccacaaaaggggacgtgctgtgaaaaggtggcacagttgggcaccttataccttggggtgaccccattacgtttgggtggccacatgtgctttaagccattacacgtgtggtacacattgtgacatagtgggagcttctgggtgaaagaggtgataagtggtggcgaagtggtcttatgttagaactataagagaaagaaacatctgtggtaatattattcttttatcctatttttttaagagtgttcgcgtagatattctcgtgaaaagtgtgtctgtgtataatagaggtcttttaaatgcgtggcgtgctcttaacaagtcgtgancatgtataccccccgaagtgtggtcaatatgtggggatctcatatgtgagattctggagacacaaggaaatgtctggggttaaggagatataaagatctcttaaaaggcaagtataaatctctgtggctacaaggtggtgtgggatatatgtgagatattctctctctgtggcgaaatttttatacgtgggggtggacaacnaaagaaacatcgttgtggtgcttcttcccaaacccaacaatgtcggcggcgggctcaatttttctctgtgtgagagtggctccacccatattgtgggggtgggcgaaaacaaggttacaaaaagtggtggggctctctctatctcccctgtgtgtgcgttgtatctctttatcaccccatgaggggtggttccatacccctcccgtgttgggggccccacccccctttaaaaatcttctttgtccacaaagggggtgtggctactaaacatgttaggggtttcctcgtcccctaattttcacaccgcccagagaagaggggttattcgcccttcccgtgaaatgaagggaggagggcaacaacccccgggtgcccacaactttggcgggggcaacaacttgagttcctcgtggagaaagttccccgtggggcggaacttatcagcctttttaaagccaccctctttccgaagttttattgggccttttgttgctcccccacaaaaattttttcggcggggcgcccttttttcacagggggcgcccaggtggcacaccacttctcctcccagggccaagcgacacgggtccttttgcacacgcggctctgttccttcaagcacttttttcaaccagcgaatcgtgcgtctgtcttttcatctacaaccacatcaacggctgtctcgcggtgggcaaaactcctctttattcaatcccccccaagttttgtgatgatcagcagcccgtttttgccaagcggttcttcacatatgacgctcctaccgtgtggtctctcacacaaaaacagtcctgccgtcagctgtgcgc

SEQ ID NO: 504503 - DNA, 121 bp, Homo sapiens
gtattggggatgaccgtgcacaggcccaaaactccaaatggaacacatgatctaacacatctgttctggtgagacaccacgaaaaatatgactgaaagttcaaaatgtcctaatgtgtagt

SEQ ID NO: 504504 - DNA, 362 bp, Homo sapiens
  misc_feature (138)..(138): n is a, c, g, or t
tgtgtcggagaccaagcgcgtgccaccacgtgtttgtgtcaggtatgtctgcgtgtttgtgcctgcacagcgaaacccctcacctggcatctgaagcttccccttgtggccgccacctcgttttccctggctgccgcnctgcccggaaagaactaactcggggcccctcagctggacagtggcagctacgggttcagggttgtccctcaccttgcagctgtctgtggccttctaggctgtcctctaaatccagcccagggggggcggtgcatgtgtaggcgtgtgtgtgtgcatgtgtgtgtgcactcccacgtggacctctctccttccaccaagtcagaataggccagaaaggaccccag

SEQ ID NO: 504505 - DNA, 473 bp, Homo sapiens
ctggtagcagtgtcactgtcggggagcgagattccggagagattacggcaatgccgtgcagagactaaggattcggccgagagaaggtaggtgtcactaacctctgttttattatctgtatttaaaatttttttggtgttagagactgggtctcactctgtggtacaggctggagtgtagtggtgtgatcatggctcactgcagcctcagactcctgggctcaagcaagtcctccctcctcagcctcccgagtagctgggattacaggcatgtgccaccacgcctggctaattttttgtatttttagtagagatggggtttcatcatgttaggcaggatggtctcgatctcctgaccttgtgatccgcccgcctcggcctcccaaagtgctgggattaccggcgtgagccaccacacccgggtgatgaggttaggcattctaagtcacgggatgagacaggaagtcagcacaa

SEQ ID NO: 504506 - DNA, 932 bp, Homo sapiens
ggccgccggtcaccaacagacgcaggagtcctggagctgtgaggagattcgggagcgtcacccgtgagctcgccctgcgtcccggcaacgggcgcttctgtcacttggacccattccaacaattctcgtgaaacatggtggattactatgaagttctaggtgtgctgagacgtggcttgcccgagtgtattaaaagaggcatatcggaaagtggtagtgaagtggtatccagataaaaatccgtgagaatacatgaagaagctagagagtaaaattcgatgcaagtagcggaggcatatgaagtgctgtcggatgcctaaggaaacgggacgatcgtatgacaaatagtggcgaaacgaaggattaaattggtgtggagcgagggaggtcggaaagtcaattgtaagaccagtcctatctctgaatctggttccctcactatccactgtaaaccaccgaggatgaatagtcgttcaagtggtaatcccctgcgcgcaagggacccatacttcgatttggacctatcattttgcaagcaccgctctatgagcgcagttctctcgtgaaatctggaaggggtcccctgatgcaagctagacagccgacgcgacaggccttccgccttcatcctgctgcagtgccagtgaaatttgcgcgttcctgtcagccaaagctggactcttacatctgtttggatacaagtgaatttctccttccatgtttgggctccacctactgtacaccgggaggaaccttccaacttcaattctcattcccacgctccaatctggtgcgcccacagcggcatggcgccacagcttctcacactccggacatttcaactttcccactcagacattgctctaatggtccacaaaccaatcaacatacaaaagagacactgtccgacaaccgcccacaacaccagcctc

SEQ ID NO: 504507 - DNA, 159 bp, Homo sapiens
  misc_feature (47)..(47): n is a, c, g, or t
  misc_feature (57)..(57): n is a, c, g, or t
  misc_feature (92)..(92): n is a, c, g, or t
gcacggcggcccaccacgcacggagaaggtgatcccttttccttgtnttgtcattgnctcagctcgaagtctcctcacggtcgatcacaacnatttctaccgtctctctaactgcaaacttgctctggtctcgaactcatccttctccggtggcgtggt

SEQ ID NO: 504508 - DNA, 313 bp, Homo sapiens
  misc_feature (99)..(100): n is a, c, g, or t
ctttaaccccggggggtgtggttccccccccggggggggggttccttttttgggacccaggggggtccccccttttaacaccccccctttcccccaggnnccccaagggggggggtgggggggggggccttccccccaaaaatcccccgggttttgggggcaaaaaacccccgggccccccccccttttttttttggggcgggggggggggttttttaccccccttttgggtttttttccccccttggggccaggggtttttgggggcccccctttttggggtttggggaaatttaacccctttttcccccca

SEQ ID NO: 504509 - DNA, 758 bp, Homo sapiens
  misc_feature (672)..(672): n is a, c, g, or t
tggccaattcagttctttacgggagtggaagggcgggggacacaactcctttatgaaaggaaaccgagggccacttctccgggccccaatcgggggcgtcaatccagccgctgctccggtgcggttggggctcaggccattcttcttccttgggggggccccgggccccgggcctcgcccaccatccggggaagccccttcggggcccccgctcgggcctggggctcccggggactggtcctgggtctggggaaatcttctgggtcacaagggcgacccctgcctcgatccatttcccaccgcttccgtttccgccctggagatctgggcaacgccgtttctggctgggcctcggggaacagggtcctcactggggcgcctcgcccaccgccgggcagaaatactcgatgtcatcatcttcctgtcatcatcgtcctcacccaactccaggctcgccgtccttgaaggggatcccagaggcctcttcatcattacccccgaccggtgccttcttaatgccctccaggctcttctttctggggggcctcccgctgcctcctgttggcgctgcacattcggggcctgctgggcctgctctgggccttcagcgcagttcttctccttggtccaggagggctgaagtcctcctccgcttggtcaacaaactgtggnccctctttgcctcccgagcctctggacttgatgactgagcgcaccggggcgaatcgggggcgattgcgttgtgggccgttgtgcag

SEQ ID NO: 504510 - DNA, 203 bp, Homo sapiens
  misc_feature (97)..(100): n is a, c, g, or t
cagggccgcccagaagccctggggctcatcatcgcgatcgcccatgccggcctgcccgctggccctggccgtcgttttcccccgtcgaggctgggcnnnncccccccccgccctcccctccttcccgccctgctcctacccctttccctgggtctctctcttcccctcctccccgcctccccgtccttggcgtctcccttccc

SEQ ID NO: 504511 - DNA, 149 bp, Homo sapiens
tgctcggacctctccctacgtatctagcagcagcggagatgtgttaatgaacgggaaatggagacaaactgaaacaacttataaaatgttactttgaccaagtacgactgactagctttacttcctatcattaggatacagtagggaga

SEQ ID NO: 504512 - DNA, 765 bp, Homo sapiens
  misc_feature (354)..(354): n is a, c, g, or t
  misc_feature (492)..(492): n is a, c, g, or t
  misc_feature (557)..(557): n is a, c, g, or t
  misc_feature (598)..(598): n is a, c, g, or t
  misc_feature (648)..(648): n is a, c, g, or t
  misc_feature (672)..(672): n is a, c, g, or t
  misc_feature (687)..(687): n is a, c, g, or t
  misc_feature (698)..(698): n is a, c, g, or t
agcgggcgccgctgcggctgctgcgcggtgaggtcgtgacaagtcacagctaacttgccctccgcgccattccacgccaccaggaagcgcagccggtgcctctcggcatcggcgaagaggccttgccggaccggcgcccagccctccaggctgtcgagctgctcgtcctccatggccgtcggcggcagcggccctaggactcggcgggcgcgggcctgacctcgtcgcactgcctgtcaggggacagtcccaggcataactgaaggtgaaaggacagaatcaccgtgtgttactggcacagatgcatcggctagtgaagaaagaagacattcaaactagtcccgctctgtcgcncagtctggagtgcagcagcgccatcatagctcactgccacctagaagccggggtgaagcaatcctcctccatcagccttcagagtagctgggactacctgcgcggcccaccacacccggctaatctttgtggtttttnttttgttttccgttctgggtttccgtcgggcgcagtggctcaggcctcaatcccagcactttganggcagaggtggcggatcaccgagtcggagaccagcctgacnacatgaagaatccgtctctactaaaaaaaagaaaaaactcaaattagcgnatatgtggctcatgcctgtatccnagctactaggagccnagcagagatcncctaatccggagccgagtgcgtggcaagatcacacatcactcgcctgacgagggatgaccggtcctt

SEQ ID NO: 504513 - DNA, 865 bp, Homo sapiens
  misc_feature (176)..(176): n is a, c, g, or t
  misc_feature (861)..(861): n is a, c, g, or t
ggcttctctttcggagggagtgttcgccgccgccggcgccacctggagttcttcagactccagatttccctgtcaaccacgaggagtccagagaggaaagcggagcgaacacagtactgacgcctcttcagcccgggtatcgccccagcggggatgcgcgacaagtatctggtctngccttcccgcgtgctctttctgccgctctgccttcgggtgctgctgctggggggcggtttcacaccttccctcgataggatttcacctttacctttcccgccgcaagaaggagtggttctaccagccatgccctgagggctcgtggagatcgagtaccagtttcagatggcgcggattaagatatggattccattcttggcctctccagagggcaaaaccttagcttttgggaaccaacagaaaatcagatggagtccacactgtagagactgaagtggggagattactgtctgttttgacaatacattcagcaccattcctgagaaggtgacttctgtgaatactcctgattacatatgggagaccgggcacagaacaagaacgctggaagcaatttttctgcccaagatattttgctatgaactggaaacttcctggaatcatcacccgctcacggtcagactaagcaagtggccactacaactcgggtagagctttgagcccggcgaccttaacgaagccttggaaggacctggcctggcacaagggggggggggcccccacgttgcgagactgtggaaagaggcactacccacagcgctgagggactacgcggcaagtccatgataaagaattgaatcgtcgcgctggagctccacgctacggtctgtataatatctttgnggcg

SEQ ID NO: 504514 - DNA, 449 bp, Homo sapiens
  misc_feature (8)..(8): n is a, c, g, or t
  misc_feature (36)..(36): n is a, c, g, or t
  misc_feature (126)..(126): n is a, c, g, or t
  misc_feature (151)..(151): n is a, c, g, or t
aagaccgncacctggcctagccaatcacttcagtantaagttcctgctataacttatgtttgctccacctatctaaagctacctctgtaggtattagaccgacactatcacatatgttttaattcngcctgttatcagcagcagaaggtancctggaaaggggatttatggcattctgtttcctacggttggtcacaccacaaacaaatgaagcagcctccacagttaaggtttgtctacaacaacaccacacaatgtcagttttcaggtatacctttctcatgtcattcataattaagcaatgtcaacaaataacactgctgggtaacatccctcaagtatttagtctgccagaccttttctgaaagtatagtaagacaggcccacaatacaagcccaagtgctttttttttctctcgagacagggtctccctctgttgcccaggctt

SEQ ID NO: 504515 - DNA, 351 bp, Homo sapiens
tccactagtgtaggcaacaagagagaagctccatctcaaaaaaaaaaaaaccaatttggggggccatggcgggacacggttgctaatccttttaatcaaaacccttttgcggggggccgggaaacctgtttgcccccaagagttggaccccagccggggtaacacagtgagaccccttctttacaaaagctttttaaaatttatccgggggccccagggggggggctcacccttgtaatccaagcttttgggggggctgacccgggcaaatattttggggtcgggagttcggggccagcctggccaacatggaaaaaccttgtttttattaaaattccaaaatttgcccgg

SEQ ID NO: 504516 - DNA, 561 bp, Homo sapiens
cctgcagtcctgacccatcttataacagactcatctgtatagctaagccactcgcgtctatgacccattaattccattgattcatgaatgggttgagtcaattcagtgagggtagagccctcatgaacacaattacctcccagaggtcccacctcacagtattgctgcactggtggactaagtttcgaagacatgaacttgggtgggaacgttcaagccacaacaagcagataaagagaatgctgagaatggcacagcacccactgtctcacactaggtgactctccttagggcatggccttcttgtatcctgagtcgcatcttgcaattctacactaacttttacggggtaggatagtcagtagactccgcactctgtggttctaccggaggttgctctccacctacttaaccaaggtttggatgggctcacggaataattgtgtttactaggtactatgcactgtgcaagggttcccaggtatgatgctacataggaaagatgtgattcctgtcgtcctagactttgcctcattgggatctatttagctgaaagagctt

SEQ ID NO: 504517 - DNA, 847 bp, Homo sapiens
  misc_feature (257)..(257): n is a, c, g, or t
gtggatacaaggatgtggagaggggaaagactcccccattcctttccctcctccctcgtcatagaaagtgaggaccaaggcacccaaggtctgaccatctgtgtctccagagctcctgcatgtgactaacctctgtgtaaacttctccaaactgcacaccctgggtgacaggcccctgggaggcctcaagggacaccccttctactactatgccttctatgagcttgtagccaaaggagttgcctgtgccttggganacctctaagtgcaggtctgcacctggaaccccagccaatgtggtgaggacaatgggaggggcattctgttgctggtggggtgggcaagctgggactccagagcaggcctgccttgccctcctccctatcaggtacatgggctttgcatctgtccccaccagtcggtgcacactgtgagtgctgccaagacctgcaccaggatcatccatgacatgcagcagagcctgggcacccccatgcctgctgggatgaatgccatgctctactctgcctggccatacctgccacaggtccgcccaccccatatctacctttctggttctgcctcagaatgtgagtgccatgggatgtctacagttgtcactttgacacagctgtgtgtctggttatgtgagtggaggtgtgtgtgatgtgtgtcagcacaacacagctgggcgccactgtgagttctgctggcccttcttctactgtcatccctgagaggatccctgttcccctcggtcctgcagacatgagtccttcaacccctaatcccaacactgactcttatccttcagctccatggtgacctctgacctaattccatcctt

SEQ ID NO: 504518 - DNA, 1187 bp, Homo sapiens
  misc_feature (699)..(699): n is a, c, g, or t
  misc_feature (703)..(703): n is a, c, g, or t
  misc_feature (711)..(711): n is a, c, g, or t
  misc_feature (715)..(715): n is a, c, g, or t
  misc_feature (720)..(720): n is a, c, g, or t
  misc_feature (725)..(725): n is a, c, g, or t
acaagggtttgtatttagtgcgggagggatcctgaaccgcgcggccgaaccctccggtgtcccgacccaggctaagcttgagcatggctgagcaggagcccacagccgagcagctggcccagattgcagcggagaacgaggaggatgagcactcggtcaactacaagcccccggcccagaagagcatccaggagatccaggagctggacaaggacgacgagagcctgcgaaagtacaatggaggccctgctgggcctgcgtggcctgtttcctgcagacccctaacggtccccaaacagtcgtggtgacttggcctgaccctggtgtgcagctcgtgccccgggcccccctggagctggacctgacgggcgacctggacgagcttcaagaagcacgtctgtattgtgctgaaggacgggtgttggagtaccgggataaaaatctctttccgggttaaccgagagatagtgtccggcattgaagtacatccagcatacgtacaggaaaggcgtcaagattgacaagactgactacatggtaggcagctatgggccccgggccgaggagtacgagttcctgacccccgtggaggaggcacccaagggtatgctggcccggggcagctacagcatcaagtcccgctttcacagacgacgacaagaccgaccacctgtcctgggagtgaaatctcaccatcangaangactggangganctgancccanacagagggcgggcacaggcacacctgaccggacggacgacaggaccggcggaacacatgcacacaacaaaagcacaaaaacacaacagaaacaaaccaaaacgaacagagacacaacgaaacgaaacgacaacacaaaacaaacaacccacaaatcgaacaccccccacccacacacccacagagctacaacagacaggccgcaccgcaccaccgccgacgtagagcagaacaccgcgacacaccgacgcccagcagccgctgacactcacgtgagagctgagacgaagccggagggagaccaggacggcacacgagagcatacggccaccaccaacgatgacagacagacaacaggcgaggagcaagaagagagagtgcagaaggaggtcaagctacaatcggtaccagacagcacgtaggtagtcgctagctagagagcacggaacaacactacagaagg

SEQ ID NO: 504519 - DNA, 818 bp, Homo sapiens
gcccgcagcgccggagtcaaagccggttcccggcccagtcccagtccgtgctagcagtctgccgtcctcttgtcagacatggacagatggcgctgtgtccttctgccgaaggacttcctggcaggtggagtggccgcaagactatctccaagacaggcggtagcagcccatcgagcgggtcaagctgctgcatgcaggtgcagcatgccagcaagtcagatgcacggcagataagcaatacaaaggcatgatagactgcgtggtccgtattcccaaggagcagggagtgcgtgtccttcgtggctgcggtaacctggccaatgtcatcagatacttccccagccaggctcttaacttcgccttcaaatgataagatagcaagcagatcttcctagggtgcgtgtggaccgagagaatcgcagtgtttggcgcgacttggcaggggaactctggcatcgggtggatgccgcagggggccacatccctgtgttttgtgtaccgctcttgattttgcgcgtacccgtctagcagctgatgtgggtaaagctggagctgaaagggaatgccgaggctcggtgagtgcctggtgtaagatctacaaatctgatgggatgaagggcctgtagcaaggctttaacgtgttggtgcagggtaatgatgatctagcgagccgctacttcggtatctatgacctgcaaagggaatgcgtccggatccaagaacagtcaattcgtcatcaggggatgatcgcacagaatgtccctgctgttgcggggttgatccctatcatttgaccccgttcgccgcggcttggattg

SEQ ID NO: 504520 - DNA, 159 bp, Homo sapiens
atccaccaacttcaggctctcacatgctgggattacaggtgtgagctgccatgcctggcccttcttagagcggtcttgctttgttgccccacctggagtgcagtagagtgatcatagctcagtgcagccttaaactcccgggctcaaatgatcctccca

SEQ ID NO: 504521 - DNA, 1284 bp, Homo sapiens
  misc_feature (796)..(796): n is a, c, g, or t
  misc_feature (800)..(800): n is a, c, g, or t
  misc_feature (808)..(808): n is a, c, g, or t
  misc_feature (812)..(812): n is a, c, g, or t
  misc_feature (817)..(817): n is a, c, g, or t
  misc_feature (822)..(822): n is a, c, g, or t
gacgggctatcctcgctgcggcgcggaggccccagcccctggaggaatgcagggctggctggacccctggcctggtgtgtccctgggtgtgctgctccctgacccacctcccacgctgccgggaagtgatctgagcctgacagatcccctccggtgtcccgacccaggctaagcttgagcatggctgagcaggagcccacagccgagcagctggcccagattgcagcggagaacgaggaggatgagcactcggtcaactacaagcccccggcccagaagagcatccaggagatccaggagctggacaaggacgacgagagcctgcgaaagtacaatggaggccctgctgggcctgcgtggcctgtttcctgcagacccctaacggtccccaaacagtcgtggtgacttggcctgaccctggtgtgcagctcgtgccccgggcccccctggagctggacctgacgggcgacctggacgagcttcaagaagcacgtctgtattgtgctgaaggacgggtgttggagtaccgggataaaaatctctttccgggttaaccgagagatagtgtccggcattgaagtacatccagcatacgtacaggaaaggcgtcaagattgacaagactgactacatggtaggcagctatgggccccgggccgaggagtacgagttcctgacccccgtggaggaggcacccaagggtatgctggcccggggcagctacagcatcaagtcccgctttcacagacgacgacaagaccgaccacctgtcctgggagtgaaatctcaccatcangaangactggangganctgancccanacagagggcgggcacaggcacacctgaccggacggacgacaggaccggcggaacacatgcacacaacaaaagcacaaaaacacaacagaaacaaaccaaaacgaacagagacacaacgaaacgaaacgacaacacaaaacaaacaacccacaaatcgaacaccccccacccacacacccacagagctacaacagacaggccgcaccgcaccaccgccgacgtagagcagaacaccgcgacacaccgacgcccagcagccgctgacactcacgtgagagctgagacgaagccggagggagaccaggacggcacacgagagcatacggccaccaccaacgatgacagacagacaacaggcgaggagcaagaagagagagtgcagaaggaggtcaagctacaatcggtaccagacagcacgtaggtagtcgctagctagagagcacggaacaacactacagaagg

SEQ ID NO: 504522 - DNA, 647 bp, Homo sapiens
ctgatcttgaacttaaaacctcaagtgatgctcccctatctgcctcccaacactctgggattacaggtgtgagccactgcacctggctcttatcttggcttttgacatgactttctcactgaggttaatcatttccagcttttgatctaaagtgagaaatttgcaactccttctttcacttgaacagttagaggccattgtggggtaatgaatggcctaatttcaatattgtccctcagggaattaggaggcctgggaagaggaggagagaggggagagtggccagttggtggagcagtgagaacatagcatttgttaagtttgctgtcttcgaaggttgtggtttgtggtaccccaaaacaattaaaataggaacatcaaagatcacagagcagccgggcacggtggctcacacctgtaaatcccagcaccttgagaggctgaggtgagtgaatcatgaggtcaggagtgcgagaccagcctggccaccatggtgaaaccccgtctctactaaaaatacaaaaagttagccgggcatggtggcaggcacctatagtcccaggctattcaaggaggctgaggcaggagaatcgcttgaatccaggaggtggaggttagagtgagctgagatcacaccatgcctcccg

SEQ ID NO: 504523 - DNA, 147 bp, Homo sapiens
tatgggctctggtgcagggcggtcggctggtcgttagtgttgtccactcagcttctcagctaggcgtgcatgcagtggcccagttgggttctttgccatgctggcagggtgcagcaccaatgcacacatcccgcaacaccccattgt

SEQ ID NO: 504524 - DNA, 297 bp, Homo sapiens
  misc_feature (83)..(83): n is a, c, g, or t
  misc_feature (95)..(95): n is a, c, g, or t
  misc_feature (119)..(119): n is a, c, g, or t
  misc_feature (122)..(124): n is a, c, g, or t
aatgggaggtgattcctaggggttgtttgatcccgtttcgtgcaaaaatggaggtggagtgctgctaggctgcaataatgaanggcaagatgaantgaaaggtaaagaatcgtgttatnttnnnaggacatgtctactgagtagcctcctcagattcattgaactaggtctgtcccaacgtatgggatggcggatagtaagtttgtaattactgtggcccctcagaatgatatttggcctcacgggaggacatagcctatgaaggctgttgctatagttgcaagcaggaggataatg

SEQ ID NO: 504525 - DNA, 184 bp, Homo sapiens
ttccctgcttctggtcgcctctcgacggctcccccgctgttcgactcctcgtactggctttgaccgaacggcgtgggtacctgactgtgctgtgacctgctacgtgtgtgtgttggttgctgcctgacttgtaacctacttactgacgtcctacgtctgaccttgacacgttggcgaccggctc

SEQ ID NO: 504526 - DNA, 624 bp, Homo sapiens
  misc_feature (66)..(66): n is a, c, g, or t
  misc_feature (256)..(256): n is a, c, g, or t
  misc_feature (305)..(305): n is a, c, g, or t
caccaaaagccacagcggttgacaacgcgattttctgcccattggtcacccatttcgcgacgatgnctcaagttccgctgtctccgaaccgctgcttactcgccgattggtttcgcgggggcgaggccgctttgacacgaagccaaccagggtccgccgagtacatgatgctcgccgcacagagggccaaggcaacaccacgatcgaccttttcctcgtggagaaggccccggccgactagcctccctcgacgcgntcgccgacgctaccgcaacccggcatccgcattgacagttaccacgggnagtgcgagacatacttcggggaggcgctcacgctggccgccggggctagccttttcgtctttcttgatccgtgcggagctgtgctccccatggcctccatcagaaagatcctccagcagaggggaacgtggccgcgtaccgaggtgctgctcaatttcaacgccgatctgattcgccgcgttggtgggcagctgaaaatgggccagctcgaactaggcggcgtcgcacaggcggatgaggtgtgcggcggcgtttggtggcgggacgtggccctgcaggcgcattacacatccggtggacagacctgggaggcggccgc

SEQ ID NO: 504527 - DNA, 229 bp, Homo sapiens
cgtagtcttagaagtatcaatagcaaaaacaggttttctagatgtcagtggtactcaaagtctgctagatccgttggtgcaggcagcatcagcttcacttggaaacttgctagaaatacggatctcaggcccaggccccgcccgaggcctgctgaataaaaaggcctgtggtggggcctggcagcgtgtgtttaaaggaaggcctcctgagatcgccgctgatgccctg

SEQ ID NO: 504528 - DNA, 912 bp, Homo sapiens
tggttaaaaaaattaaaaggggttttccttccccttgcttcaaggggaaaaattttgggcattttttttttcccgttaattatgttggatgccatacgtgaatatcaacaaaaagctggatttgcccttttttcacataatataaaaaaattctttcatctcaacaaaaacaacacaaaagggggcgcacatcctaataaagactcccctaagacgggcccccatcctctttcgactgatacccccatcttgatatgcacagacgggcgcctccttattatggagtcgctctcttctcctgacgcactagcgaccgcggcggcgccgtcctgtactacaccacgccctccgtgcgagagcgagagagaagaccaggtgtcaaatcgctggtgagacatatctgtgtgtgggagagacagagacaccccttacatacttctgtgcgtgagcgcgcgtgacacacacttactgttgtgagacgacacaatacactcactgacgaccgagcaaactaaataaccacgcctctctcaccaccgacctacactatatcctaacacgtcccagacggcggtgttctaatgtgtggtgtcaccacaccccacgcacttgactactacacttcaccgcgggcccactggcatgattgtcggttacatcatagagagtagctctctcttttattagacaacaatatttttttctagtcaggaagtcctattccttcgaagttccgccccccttccacatccagacataaggaccacagtgacaacacccatcaccaccagactctaacataccatctagactcactacctaatgatcatcaacatacacatcttaccctcagcgaccactgtcagctatgaccacctgacaacactcgactgtcactgttaacccctagtc

SEQ ID NO: 504529 - DNA, 222 bp, Homo sapiens
atattatagtgaagatactctgtatcggactccacttatgactccctaaagcccatgtcgaatcccccatcgctgggtcaatagtagttgccgcagtactcttaaaatctaggcggctatggtataagtacgcctacacactctattctcacatccccctgaatcaaacactacatagccttacccacttccttgttactgggttaccgagcctcgaatttc

SEQ ID NO: 504530 - DNA, 82 bp, Homo sapiens
gagaccaacccacaaaaaacacaagaacacaagcacaaaaacaacaaaaaagacaaaaaacaaataacagagaacaaaagac

SEQ ID NO: 504531 - DNA, 391 bp, Homo sapiens
  misc_feature (100)..(100): n is a, c, g, or t
  misc_feature (115)..(115): n is a, c, g, or t
  misc_feature (257)..(257): n is a, c, g, or t
  misc_feature (265)..(265): n is a, c, g, or t
  misc_feature (269)..(269): n is a, c, g, or t
  misc_feature (274)..(275): n is a, c, g, or t
  misc_feature (280)..(280): n is a, c, g, or t
  misc_feature (307)..(307): n is a, c, g, or t
  misc_feature (328)..(328): n is a, c, g, or t
  misc_feature (371)..(371): n is a, c, g, or t
aaaaaaacacattagtagaccaggagtgaaaatagatcaagcgatcagcccacaatgtcaaagaaaatttagaatgttaatcaagcccagcacccatatntttcagaagtatttnagccgtatctaaagactttcccctccatgtgcctctcaggaaggctctcacagccaggcaactcccatgttagtggtaaccttgtatcaaccttacccacaattctaagaccctccttcttctccctgtatcctccccaaantgcaggangggngattnncactntttacctcatggttaaaaagtcaacgntagcaccaaagaagttctganacttcagaactggacttggtttatttctacaaaagtagctgtnacacattccaaaacagaatg

SEQ ID NO: 504532 - DNA, 442 bp, Homo sapiens
tatctttaaggctcaatgctctgtccatctgttacagtggcattcagaggaaggggaactttctgctaagaagaaaaggtattctctggaacctgccactccccaaaattttttttaattacttagaatttattgaatattaacagaatttgtcaaaagtagcatattcttcaagttgaccctttgttcattgaaggatgaaaggattcactggcagtttggagagaagttgctttaagcttggtagtggggatgtgggacatgattccttgaaacactgaccttgtacaaggtcattgctctggagcaggggtctctgagctggtttcagtgaactttatgaaaagcaatgtgatattttgagaaaagcagttatctttcatcagcttgttgaagtggccttcaatgtagaaaatataaagagtcactagccaaaaaaaaa

SEQ ID NO: 504533 - DNA, 523 bp, Homo sapiens
  misc_feature (226)..(226): n is a, c, g, or t
agatcgtcacagctgcacttgtaagagcattgacatcatcctcgtgctctgagaccatgtcagatcacactaagatattaaagcacatcttagaataatgttgcccaagtgttaattagcagaaacattatgcagggaactgtccttgatatgtatgcttttaaccttcatgtattttttctgaagcacaaaatttcctctcagtggatggtcagggaatgattgngcacagaaaaccaaccatctgaagtgttgattcataaaatgagttccatctttccacgcaggcttcagctgccttccagggtgacatccctttttatgagggggaccattctttggcatctaatgggcttttctccattcatttgggatgaccaatgcacctatggcctacttatgtctgaactctttcaataccaccaatctcttctgtccccttgtgccatcttcccacccccaatttcagccaattatgtttataagacatcagttagtgaatcacaattcaaatgaatccacg

SEQ ID NO: 504534 - DNA, 109 bp, Homo sapiens
  misc_feature (61)..(61): n is a, c, g, or t
agactcatctactaatgatatcctcaatgtatagtctgatatctacttaaaacagagatgngctgggtagtggtcacgcctgtaatcccgcacttgggagcgagatgat

SEQ ID NO: 504535 - DNA, 130 bp, Homo sapiens
gaaatgcctagccacttttacacaaggcacacctacacccttatcccatactagttattatcgaaccatcagcctacttattcaaaccaatagccctggccgtacggctaaccgttaacattactgcagg

SEQ ID NO: 504536 - DNA, 365 bp, Homo sapiens
ttggggctccattcagagagagctgctttggaagcttcttaacttcagttctggattattctggtccctcattttcttggccttcataactttaaaacgatcaaaatctgtcatctgggctttcctttctcgggcttcaatcttctgggcccatcggggggctgcccatttggtatggatgtctgccttcggccaggctggtcggacatacttcgggggggcacggtgcggaaactggaggatgaaatcagtgagctgcatgcactggaaaggcagggccggtctcctcactggagtgcaaggtccatcgaccaaagcccggttctgatcaataacatctacaatcgagcccaaggggtaccgag

SEQ ID NO: 504537 - DNA, 229 bp, Homo sapiens
tgtctgtctccccccctttccttccctccctgtagttttgaaacggatgtttgttctttatagatgttgtttaaaaagcctgataatggggattgaaatttacaaactttggggttttttttttttaagaaaaaaataaaatagtttttttcagggccaatgggctttcctaaccgggcccccccccccttttttttttggtaaaaaaagggctttttgtttaaaaaaa

SEQ ID NO: 504538 - DNA, 878 bp, Homo sapiens
gcgagaatgaggacgattctcagcaatcagactgtcgacattccatgcaaaatgtcgaggattactctgcaagggacgcacagcttatcgtgaagggccccagagagatgccctgtgggagggacttcaagtaccacatcattagtgtagaactcagccttcttggaaagaagaaacatagcacgggtccgggtcgactaaatggtggcggtaacagcagaaagtggtactggctaccgttcagagactatgatgttagtccactgtcacagaaccactaggatccaaagggttgttgacactggggcttcccgattaacacacgtactgaggtcttgtcgatatgctccactatccctctatcaaactgttgtttcatcgcgagcgaggaatgggtgctcgtctgctctgataacattcagagaagaattgtctatgcgggttgagaacatagtgatactccccgcacagggttgcgggattggacgaccagagagtgttgagcctctagttacagggtaattctacaaagggcccatgaaatatgactgaaatcttaaactccccatttgaaaaggtgaccataatggagcaatatcgaagctgggttgggtcaagactttccagggccgcgctctgggactgtgcatggcaaagccacaaaaacttgttgagagcaagtccgagcgggatctccacgcgaagatcttgggcgcgatgggtgactcttagtggtctactcagagaagaaccggacctggtctccatgcccggcgtaggatcgagtgaagatctagagagtccacctgggtttgacttcgcaaggaacgaatttgcgcatggttggacgactttaaagaaactgactgtgtagataa

SEQ ID NO: 504539 - DNA, 750 bp, Homo sapiens
gcaacgtatgatggggtggtgtgccagaacgcactgaggggggtcttccgcccctcgctcctcccgcccccgccagcagtggccccgccttagtcgggtgtttctttctggccgccccagctgttgtggaccgggcccttttccctcttcgccctcgcttcaatgcaggatgtctcgccggggggtgccgccgccactgtgggtcacaggggagttgagcgcgcgcgtgcatttacccagccgcgtgctagtgtcctgttgtctccgccgcgcgagcatttgattgctcactgtgtgggcgacacacactattgtggggtgataaaagccattcttcctcgcgcgtctttctctgaggcggtaggaccgccgccccgtgtggagtcgccgcagacataatggtcagtcccgtgtgtatgtattctgtgtgaacccgtccgtgtctgtcttcccgcgctatgtttccgccggtgtgcagccattctttgtacgtagcgggatccatgcgtgcataaatctgtacgttcgtgtgggaaccatttatgcgtcctgttttgcgaacgacatcatggtgtgtcgcccacataatttatctactacacttcttctattgtgcggtccaccatagtagatctgcccctctcccacgtgcgtatgccccccctttattatgtaacttttcaacctcctgcgtatctactattctttttcccaccaactacacacacacccacaaaataacaaacaaac

SEQ ID NO: 504540 - DNA, 1251 bp, Homo sapiens
  misc_feature (673)..(673): n is a, c, g, or t
  misc_feature (675)..(676): n is a, c, g, or t
tgcggtagctcatgcctgtaatctcagcactttgggagtccgaggtgggcggatcacgaggtcaggagatgtgagaccatcctggctaacacagtgaaaacctgtctctactaaaaatacaaaaaattagccaggcgtggtggcacgagcctgtagtcccagctactcaggaggcggaggcaggagaatcacttgaacccgggagacggaggttgcagtgagctagtatcgcgccactgcactccagcctggacgacagagcaagactgtctccaaaaaaaaaaaaaaaaatttaattggcaaataaaattatatgtacttacgtacaacatgatgttttgaagtatacttgcattgtggaatgtttaaatctagctaattagtaaatgcattacctcacagttattatttttgcggtgagaggaatgttttgaaaggttatgagaaagctcacacgatggaagagaaggctgggtaaccagacccataaacagaaaaccggcagctttagagttttgagagcagaaactgcccaaagttggcttctaattagtgctatttaaaaaatgaactataggctgggcatggtggctcatgcctgaatcctagcactttgggaggccaggcaggcagattaactgagtttagagttcaagaccagtcttgtgctggntnnggggttacgcctgtattccagcactttgggagggcgaggtggccagagttgagaccagcctggccacatggtgaaaccccgttggactaaaatgcaaaatttaccggatgtgtgccccctgcttgaatccagttccatggagacttgagtaggagaatgcttgaatccaaaggcaaagttgcagtgaccagtatggccattgacttcagcttgccaaagggaggaacttcatttggggttacaatgggcccaattcggctcattggccattgccctagggggggttaaaaaaggggccggcttaaaggcggcttggaaaccctggtcaccattaagctgtgaaaatccttttccggtggttaccaaggcccaccgtgtctttccaagtgccccctctgggaggtatcagcgggaatttgtccttaattctaaacgctctttacctcaggtatcgaaccttttatacagaactcgctaggtggggtcttcttcaccgctttataggggcttcctctcatcgggcgaccttgcgcgcctctcttcctaccccttctctggtggcggcgtcccatgcc

SEQ ID NO: 504541 - DNA, 142 bp, Homo sapiens
ttctgggcctccttcatcaggaatcatgggcccttctccccaggacgctcatcgatggccccggcttctcaagccctggcttctcaagccctggcttctcaggcctgggccctcttgggctgtggctgcaccctgggcttca

SEQ ID NO: 504542 - DNA, 100 bp, Homo sapiens
gaagatcctggtgtcgccatgggccgccgccccgccccgttgttaccggtattgtaagaaacaagccgtacccaaagtgtgcgttctgccgaggtgtccc

SEQ ID NO: 504543 - DNA, 1493 bp, Homo sapiens
  misc_feature (49)..(49): n is a, c, g, or t
  misc_feature (348)..(348): n is a, c, g, or t
  misc_feature (376)..(376): n is a, c, g, or t
  misc_feature (530)..(530): n is a, c, g, or t
  misc_feature (571)..(571): n is a, c, g, or t
  misc_feature (631)..(631): n is a, c, g, or t
  misc_feature (641)..(642): n is a, c, g, or t
  misc_feature (644)..(644): n is a, c, g, or t
  misc_feature (647)..(647): n is a, c, g, or t
  misc_feature (662)..(662): n is a, c, g, or t
  misc_feature (671)..(671): n is a, c, g, or t
  misc_feature (751)..(751): n is a, c, g, or t
  misc_feature (762)..(762): n is a, c, g, or t
  misc_feature (804)..(804): n is a, c, g, or t
  misc_feature (807)..(807): n is a, c, g, or t
  misc_feature (830)..(830): n is a, c, g, or t
  misc_feature (852)..(852): n is a, c, g, or t
  misc_feature (880)..(880): n is a, c, g, or t
ccaaaaattatgcaagaggaatggtcagcctttaaagctacctgacacnaagaggacactgttgttcacatttaatgtgcctggctcaggtaacacttacccaaaggatatggaggcactgctacccctgatgaacatggtgatttattctattgataaagccaaaaagttccgactcaacagagaaggcaaacaaaaagcagataagaaccgtgcccgagtagaagagaacttcttgaaactgacacatgtgcaaagacaggaagcagcacagtcgcgcgcgggaggagaaaaaaagagcagagaaggagcgaaccaggaaggaggaagacccggagaaacagcgcnggccggaggaggccgcagggaggcgcgngcaaaagaagtcggaaaagaagcaaaggaaaaggaaacaaaccaaagggaaagccagggaaagccaccccagagaggggaggcccgacgccacccggaagccccgaatccacaggaaacacgaaaaacgccagcccatttcccaacccgaaatnccagacaggccggggcaaccgagaaaccccgatgccaccanccaccccggtgggggggggggggttcacagagatggaagatacctggaaagggccctgtntcaagaattnngnttnccagataatcaaatnatggggatnaggttataaaaggaatgatctatgaaatctgtgtaggtttaaatattttaaaaattataatacaaatcatcagtgctttnagtacttcagngttaaagaaataccgtgaaatttataggtagataaccagatngtngcttttgtttaaaccaagcagtngaaatggctataaagactgacnctaaaccaagattctgcaaataatgatnggaatggcacaataaacatggctgtgatgttctggtatgtctacattaacatgtgagaaaaagtaaaaattagaacatgtatgtagtaatgaaatttcagggacccagaacataatgtagtatatgtcaaggtgggaggtgctgataacaaaattaataggaagtctgtaggcattaggatactgacatgtaccatggaaaattctagggacaggagcatcatttttttccttacctgataccacgaaccagtgacaacgtgaatgctgtattaaagtggtgatgtaattctgtgagtaacaaatgcatgaaaaataagtgttcacctaaggtaagatcatgtgccgtgtgtgacactcacaaaatgtttttttcccttcttggttgatgcaaccttggtggatgtcattggagaacgccctggtccctataatatggtgtgtgcgttgttctacctctgctttatcctttccccacggtgaggcggaatgtctttacaagaaatgggcatgattgtgtacgttacttggaaagagtcctaacattggagttttcacttgggaccacttggggagaggcacgttttcgcgaccctcttgggacactgctacag

SEQ ID NO: 504544 - DNA, 802 bp, Homo sapiens
  misc_feature (111)..(111): n is a, c, g, or t
  misc_feature (439)..(439): n is a, c, g, or t
tcccttccaagcaccggatggactcctttcggggcgtttacatagttagttttaatcgccgcctcgctcctgctcttttacgctaaccccccaggcggtgccttgtatgtnctccccagccgtcgctcgttgtattaaatttttcgtcggttgggggcgcgaccgctctcgggagcgactgagatgctccctacaccctctccgcggcgcgcctgatacacatctctgttatgaggtttctccccccacttacccatgccgcaggtcttttatatattcctcccttggtggtcccccccactatacttttcgcacccctccggggccgtcacacatgcttgtctgccttcgcgaggcgagtgatatacacgctgccccatctctcctcttttttttagtagagagcgcccccatcacattcccacaccacatcgagcgngtggtttccacccccccgcccgctttggtggtgaccggagcacttcctcctgtgggggggcccacctccccctctgtcttatagagaggtgttctgtctgtttctgtacacacacagctgatgtatatagtgtctctatccgcctgcgatgtagttgagtgagtgttttggaccccgcgcgtgatttcaccgcgctgggcgtgtgttgtatttttttttgctcaaatttcctctccccccttcttttccgaaacgaccaaagaaaaaaaaagcctcttttcccacaagcccctcccccccaaaaaaaattttttcccctttgttttaatacccccccccccccccgcacaacagggtttttta

SEQ ID NO: 504545 - DNA, 122 bp, Homo sapiens
ccggccaactcagggcgagctgcaggaattatgatatgggtgtcgagatccttttttctatcagatattcattgtcatgcagtagtagtaaaaacatcaaagatgcagctcgcccctgagtt

SEQ ID NO: 504546 - DNA, 331 bp, Homo sapiens
actcctaccccacgtcctccgctgcgggttgcccagcacatggccggtctgcgttctgtctgccttgtctttgaccagatgaaagccgtcccgaggtttgtggtcaatgcctccaatcggcgcatggcagtcaatgcagatgctctgttccatcggcctgccacactagggtgaagacagggcactagaaccacttctggagcagtaccattttatgcacaaatgccatcatgcaaatgaacacctccttatcaccggcagacgtgagcaccctcagattgtcccagtgtgtgcctgtttcgggtgggtggagaacccatgggaacaggat

SEQ ID NO: 504547 - DNA, 113 bp, Homo sapiens
tcctcacctgcagccaacatatgtttcctaaactcgaggttcactactcgattcatattcaccacagcccctagagagcccgtagaggtgtcgggtacctgagcttgattttg

SEQ ID NO: 504548 - DNA, 174 bp, Homo sapiens
gttaacgggacgcagctatctagtagcccaggccaggaaccggagaatgtcatataggtggtgggtttctcctaatgcaaggaaaaacgcggcatctagcacggggtcactggttccccctccactgtggcaggaagtcactcctgccataggtgtggtttcgaccagcatagc

SEQ ID NO: 504549 - DNA, 257 bp, Homo sapiens
ttgctgtgagtccatcagtgaagccaatgacccgacccagagccagatcaagactatactgatgggccctacgccgcctggaccccccacggcgccgacgcagcgttccctgccgggtacttggacgtagagcgttgtattccagccgcaacacactatatcttgcagtgcctggcaccacggtgctggaggatgaggcccgggagcagggccggggtcatccatgtcattgtcctcaaccaggccacgggccacgt

SEQ ID NO: 504550 - DNA, 544 bp, Homo sapiens
  misc_feature (85)..(85): n is a, c, g, or t
  misc_feature (136)..(136): n is a, c, g, or t
  misc_feature (139)..(139): n is a, c, g, or t
  misc_feature (200)..(200): n is a, c, g, or t
cagtgggagatgctcacacttctcccttctggagcagttgaagagcagttttaatgggtggcccgctggcaaactcacccaaggngaagaacagtatatttcggggtcacccggtgggtttcacaattttgaatcngangttctttccggtgtcactaaggtggtcgtgaagctcttttactctgatcccaacactgtgncgggccctgtagaagtctccaggaagaaccctaaatttatggaggccgtggcggagaaagcgctgccggaataccgcaaaaaaccccgggaggagttaaatgtggattttgcttttgcacccacggggggattttagtccagctccccccaaaattaggtgcagccccccagaaaaaggtttggaggttcccaaggaaacagggcccagcctccagggccccaaatccgcccagcctttccccgctttgggtcctgccctttaacactcgactttgttggtcatgggaaaaacaaaaatggtcccgccagccactaattcaataaaactgttttgtgaggtgga

SEQ ID NO: 504551 - DNA, 123 bp, Homo sapiens
taccaaagcgtataccaactacattggaggctgaggcgtagaattgcttgaacctcagaggcggatggttgcagtgagacaagatcatgtcactgccctccagtccagggtggacagatgcaa

SEQ ID NO: 504552 - DNA, 186 bp, Homo sapiens
ggtctatctgtactgccagccgtcgtcaatgcaaaggagcatcgtgtgggagcgcgtggaggaaacaccgaaagagtcgttcagacatactggccgagccatctgaagccctcgccgtagccttgcctcatcacgaccgagcacatgaagatctcgatggggcggatatcggtcagcggtaccttg

SEQ ID NO: 504553 - DNA, 656 bp, Homo sapiens
  misc_feature (548)..(548): n is a, c, g, or t
  misc_feature (621)..(621): n is a, c, g, or t
  misc_feature (628)..(628): n is a, c, g, or t
  misc_feature (630)..(630): n is a, c, g, or t
gataaaaccaagaatattgaggatgtagcaatgaatgctccaggtggcactatttggtgggtgaaatttaaaccttacatatccttgaagtatgcttttgtgattattaaaagcattttaaaaataagtattagagtttttacttagatgtttgaaaaagaattctgtcatcaaagtgtatgagagttgacaagtgtaaatatgcaggttagacagtttcaagggacgtgtattatttactgatcaatgtactgtctcctttggagccattacactcagtcatttcctgtcaatctctccacgctgttataatcagactatggatatgcatattaaaatataagaaagttattgtgtatgtgtggtggcagctttttaattgttaataatgttgctgctttaaaaaggtatcagggtagtttactcttaggatggttaatattctgcagaattgcatgagaaattaggggaaccaaaattcgagctggtggataatgaggccaataggtgggtgtctgtgcttctagtcgttgccccggttacaaaanaatgagcttttaatggtggtcctaatatggaggtaggttccttctgttcttttttcaaatttttatttatttnatttttntntactactgtgttttcaggaaaacttg

SEQ ID NO: 504554 - DNA, 519 bp, Homo sapiens
aggattctagagtgttattgatggagtaatggctctcatgacaagtgtgtctctgaacatcagttttcattgcataaacataaatttttacattttctctagaacagaatgagtggaagatcttcacagcttgtcttgtaagaagtctgcatgcggccgtgagccactgtgcacggccacaaaaacctttttaaatctcaagttttctttctgttgttttgaaaattgcctgatttctgttaccaattacatattactggttttgctttcctggagaaatttgagaacatacaaaagcctagggggttgtttatatggcagcgttcttgccagtggaagcacgaagccaacatatagccttagttagagagaccctcttttctctggccatcctgaggcgtctcaggcagtatggagctattttaggagaagaagcatggtttgaaaaggaagaaatattatatattgtttgttaaagtttattgaaataaagaatcatttaaatcttcaaaaaaaaaa

SEQ ID NO: 504555 - DNA, 894 bp, Homo sapiens
ctttttcttggcaagatggcggatcatacgacttgactactcgcatcgcgcacttttggatcggcatctagtctttccgcttcttgaatttctctctgtacaggagatctatcatgcaacaggacattcttacacaggtaaatgggaccttcttagtgataccaacatggtagactttgctatggatgtatacaaaaactttattctgatgatattcctcatgctttgagagagaaaagaaccaccagtggttgcacaaactgaaacagttcaggcagaacacagaaccaatggtgcagatgttcgaagatccagaaactacagaggcaaatgcagtcaacccagggatggtaggagtgctcttgactacctggcggacaaagccatgcgttttaggcaggactatttagactacaactctacgagatatgcaaaaattccagtacgaatgtgggaattactcaggagcagcagaatatctttatctctaagagtgctggtccagcaacagatagaaatgctttaagttcactctggggaaagctggcctctgaaatccttaatgcagaatggggtgcagccatgtaagaccttacacgggttaaaagagaccaatagattaataattctgtgagttctccactttcagtctcttcagcacgagaacatggtccatcagggtcctctgtggtttcttcaatcaccccaaggtcgcggataatttattggcctcttctttatcaggcaccatatcttacgcatccgcacaggggtccaattctccgattttgataacgcggctacaaccaatgtttcgacaagtcgggttcaaaactttgtaggttcaaccggtgttatttagccaccgactgggtgtctctactgacatgggcc

SEQ ID NO: 504556 - DNA, 134 bp, Homo sapiens
tcctatgggtgatgctcttgtaggcgatgtactaccggggcgttaatatgaggacagtcgagatgatccttagcaggagtttctacctcctcctagtcctcctcgccctccctccctcgatcgaaatgcaagca

SEQ ID NO: 504557 - DNA, 149 bp, Homo sapiens
agctcgacgcatcatggagctcgagtcggatctgcatgcgcagcctgaacctgacctcggaaatattcgaaaaggaaaaaggcgcggtggtgggcgagctacgccgtcacctcgactcggccggcagcattgcgtgggacgagctcatg

SEQ ID NO: 504558 - DNA, 349 bp, Homo sapiens
tccgggagacatacagaaatcactccagaagcaaagacaaactcttactttccagaatcccaccactgatgtaggaaaacagagtaccaaggaaactcggaaaccaaaaatacatggatctggtcatgtcgaagaaccagcatcaccactagccagcatatcagaacatctctcagcaagaaaccagcaagcttcataatagcacagcagactaaacccctgtgtgccctgtccagtcatgcaacacaagatgcagtcaggcaccttcctccaagccagcatggccaagcccaaaggcttcaagcctcccatgcacagcccagcaaggggtcccagttggggtcttgca

SEQ ID NO: 504559 - DNA, 617 bp, Homo sapiens
atcgcttattgtgctgggtgtggatcttgtgctcgttggttcttgtgctggaactgtgggagtgggaagggctagatgagggagcagtgggaggtgttggtcatcatgagcttttccttaggtacagaaagaagggaaatagagtgagccagactgcaagaggattttgaggtggagagggtgtgagtttgaggagcctccaacagaaaacttctttgtacgggattaggtgaaatcacttgtggagtgaggaggaaaaggatttggtgctaaaaaaaaaagtagaaatggggacagtagatgtgggaagtattgagggaggtcaagaaaaggtgaaccaaaggaggctgaacgttgcacgttctcagtgactccagtcacgcatagtttggtggctttccagtcggtcgtagaaaccagaaagcaggattagaaggagtaagcatggggcccttttctggactgggacttagaagtcaaggagcatggggagcgtcgcgcagttcaagggtgtcagccagttcttatttcatagttgggccgaggtgagtaaaactctgtttgcgggccattattagttctgacactaggtgcgcgacaaggtcaacgctactatc

SEQ ID NO: 504560 - DNA, 799 bp, Homo sapiens
agcgggttggctgtaggcagcgcaatgccaagacagagctgctggcggcgggggcgaatctccctgcaccatgagcctcggtccggccccgttagtggctgataagcacaggcacgccgcctccatttgccccggggccctcggtgcgaaatagcggggcggaaggaagtcgaggaaagcgctgggcggggtctctacgaacatgtgaaggaaaagcagctccgtccaaaacgcctgttcgagggctcctagggagtcgggccccgggccgcaccgtcacctcggccgctgcgttgtcgccaatcgcttgtttccccatcccccgccaatggccgaaggaccttctctgcggcacgtctacaccgaagatgatttctactgccccgtctgtcaggaggtgctcaaaatgcccgttgcggaccacggcctgtcagccacgtttttctgtacaacaatgtttcctgacctgcaatgagggcaagcgtgacgcacattgtcccctatgtcgtgcaacatgtgactagaaagagaggagagctgtcttgaagcggggcttttagacctttgaaacttataagtcaggaagttataccgtgttaagctggaagaatgcttgtggcaaaaagggataaactctattggattgagacttctttacgaatcttgttaagaacgtatcagggatgaatatggtgtcttataatcattccaaaagtttcagatctctcaagattcagtaggaacaagatagggagtgaaacattcgaattttgatacaagaaagtttccaagaaaattc

SEQ ID NO: 504561 - DNA, 733 bp, Homo sapiens
caagggccccggggttaacggacgacggagtttattgtcggcgacgtgccattcaggtttgcacaagctgtctacagagcaagcccaaggtcttctctcatagaaatacagaaacctgtgggtatagcgtaatcttggtcgacagacataagtttagtcacttggccaaagtcatcggaggattatcggcgtcggtgtaggcaaccccctccgggctagcagaagggtggtgtgctcacagatgtggcatggccggtgtctcatcctcaccacaggctgtgcccatgagtccctgtgcagaccagtggcacagcaagctggcccagatctcagggcacccgtttgtgatcctagcaaggatcctgagcatggccacacgaataggccatagagagcctcatggagcgaaactaaagaacaaacggttccattatgccctcttaagagtgatttatgaagcgggtttagcacaccgttctacggaacgtgttttaagggtaagtcagcattgtcttccagtggtacagagcatccctcacctatgcattgtacctacgtaaccaggccaatgaatggaatttccagcttgaatcagtacagtgaggtgaccactgaggctattataaggagaaatgcaatgagatgacaggagctgaaaatgaacaatctcgggagcacgttgaatgtaacaagaattgttacgtattcattcaacagctttccatagagattg

SEQ ID NO: 504562 - DNA, 148 bp, Homo sapiens
cactgcatatcactgcatatacacatgtatatcactgcatatccactgcatatcactgcgtatccactgcatatcactgccatatactcactgcatattcactgtcagatcccaccatgcataattactcgcgtataccacctgtcat

SEQ ID NO: 504563 - DNA, 195 bp, Homo sapiens
tgttggaatttaattcctttccaaagttttgtacaatttccatgtatcatataccatatttaaaacccttcactattttgcgtgatttctaattacataaaaaccatttaaatgcaataaattttgttgccgtaaaacaacaaaatatccccaacttataaaaacacaggaacaattatattcataaacatttac

SEQ ID NO: 504564 - DNA, 295 bp, Homo sapiens
cgcatatatagtgcctcgtctagagatctcggcagtcgtagtatggtagatcgcaggacttgcaaaagacgaggcttgcacaactagaagaattggcggaggactgatttatggttggctaccattagtaggtacagaaacaactatgagaaagtgtggcacaatcgccatatcacggtgcgcgtcttccaggagaatgatctagtatagctttatgacagttagttcgaaaaattctcaggaaaacttagcatgcattggttgggaccctatgtcgtcataacaccacacaatt

SEQ ID NO: 504565 - DNA, 222 bp, Homo sapiens
tagggccccccaggttttcccttttaggtttccggttggtatcttggggggaattgtgaggggataccattttcccacgggaaagaattttgcccaggattccccctggttaaaaattacccctcttaaaagggaaaaaaaaggggggttcccccccgtgggggagcggtttaaaaaatgggggttcccccggggtgggggcttttgtcggaaaaatgttta

SEQ ID NO: 504566 - DNA, 441 bp, Homo sapiens
ccctagggtttcaaacgagacatgtcttgtggggttggtgtgcctagtgatgggagtacttggctgctagataagctgaacaagcagctataacgcgggactgtaattcttcccgcagaagttgatgcctttctctgtaaagatttcagcctatagttaggagctgttaagcagtatctatcagtgtggcaacctaggacctgaatatggcttgatcaattgtgcaaaggggtttgatttctttgccttgcaatatctaataccaaatctcttgggggaggcagaggtaaaagactgatcagcgcggcactggattgccaatcgcacatcatctgcatcaacagtagctttcttagcatggcttgaatacatttttgcatcatctagaattgtggtcacatatcggaaggcaaactccaacatctgttttataactcttgg

SEQ ID NO: 504567 - DNA, 454 bp, Homo sapiens
  misc_feature (5)..(5): n is a, c, g, or t
aaaanaatttttcccactttgaaatgcctaaaaatggcatttttccctatgtgcagtcactccctctcatttcctaaaatagggaccgtggcccaggcacggtggctcatgccctgtaatccccagcactttgggaaggccgaggcaggcggcctcacgaggtcaggagatcgagactatccctggctaacacggtaaaaccctgtctctactaaaagtacaaaaaattagctgggcgtggtggtgggcacctgtagtccccagctactcgggaggctgaggcaggagaaaggcatgaatccaagaggcagagcttgcagtgagctgagatcacgccattgcactccagcctgggcaacagtgttaagactctgtctcaaatataaataaataaataaataaataaataaataaaaataaagcgagatgttgccctcaaacttcaaaaaaaaaa

SEQ ID NO: 504568 - DNA, 1032 bp, Homo sapiens
  misc_feature (781)..(781): n is a, c, g, or t
gctcagcaaaagcccatgtgccctgctcctgtgtgcagttggggtatggggcagctggctaatggtcaggtacatcactagtgtgcccatgccccgacagtacccacaagccctacccgtgctggagcttgcttcccgaacgtatttctactctcttacgagggaatcttccatcatagcctcagcacagagctgccatggccatgagtctacttgaacgggggccatctaggtccccgaacctcatggacatttgtcctccattattcaagcatccgccttttcttctcctattattcgtcatctggactttcttcagaccatgactcacaactaagaacgataaaacgactggaggttacgtcggagtgcccctccccaaagcatgggacgcctgggcattggcgcagaggaggtgactagcctaagatctccgtttgcgctcacgctgtctccccatcgtaaggaagccgtgtaccccttgaggcaagccgtgtcccatcaaccagtactgggctctttttccgccattcttcactcttcgcaggaccagcagaatgtgggtgaagcgtcttggattcatgtcgtacccgtataagcgcaggtcgtcaaatcgacaaccaaaggttggccaaccaaacgtgtacacccttgaccttcgagaaaacccccagcaattcccaaacttccaaaattagttggtacatcgtccttacattaaccccattccgacccatatcacccgcaaatcattatacgctcctaactattcatgccaatncatacctcattcccaaggctccttggaacttgcacaccttgatacttgaccccccgtattttgccagagcccccaccacgtggggacctgttctgtgccaaccaacgggggtttaacaaggtgggcccagagatttgtatggcggacgcgttatctactcggacacaaattccctggtataacacttacagcgcatcccccccccttttgtgcccccccgtagacgtctcgtacagagtggcccctgtaga

SEQ ID NO: 504569 - DNA, 106 bp, Homo sapiens
ccccaatattcatcccctccttctcccattgtgagagaatgcttgaaaacttgactcagatgggtacctggctgcccccaattttaataagggatgcctttcctgg

SEQ ID NO: 504570 - DNA, 454 bp, Homo sapiens
  misc_feature (336)..(336): n is a, c, g, or t
  misc_feature (375)..(375): n is a, c, g, or t
  misc_feature (447)..(447): n is a, c, g, or t
accaaggctgaagagtcaggttgaagcacaggcttttgttttttgttgtttttgttttttgagacagagtctcattctgtcacccaggctggagtgcagtggcgcaatcttggctcactgcaacctccgactcccaggttcaagcaattctcctgcctcggcctcctttagtaggtgggattacaggtgcataccaccacacctttctaatttttgcatttttagtagagatggggtttcaccatgttggtcaggctggtctcaacctcctggacctcaagtgatctggcccgcctcagcctcccaaagtgctggggatgatagggcgtgacaacncaacacccgggccaagcacagggtttttgaatgggtctncctcttccccagcccagggtaacatggagggccaagggtggaactgttggcatcctggaggactttgtgttnccctgag

SEQ ID NO: 504571 - DNA, 190 bp, Homo sapiens
  misc_feature (144)..(144): n is a, c, g, or t
atctaaggatcgctatacacatgatgagccctgggaggcgaaggatgtggctgacacgtgcctctgtggtgtaaacttgtaccagttttacggtccctctggccagtacacccatgaatttgatggagatgaggagttctacgntggacctggagacggaaggagactgcctggcgggtggccttgagtt

SEQ ID NO: 504572 - DNA, 669 bp, Homo sapiens
  misc_feature (463)..(463): n is a, c, g, or t
acattcctttaagaaaagggctttatatttcaacgggtccctccaacagctgccaaactgtgtttggcgctgcccccccacacccctttcttttggaaagaaaatcacccccccacggctccctgtaataaagtgtcaactccaaataaacaccctgtcttgttaagactgcaccataccctcattgtgccccacgaaaatactgccacctcttgtatgtactgccccaatagcccccctcacattgcctcttttccccacaacgatgaaccacccttcttctcctcctcttctataaggaagttactcctgatgtatgtgccgagttctattatttggcgataatttctcctccgtcacgcaaatttttttacaaacaatatgtgcttaaattctcctcgatgtataccaccacgtcggtagtatattgtatgtccgcacgcgcacctcactaattatacanccactttgtggagacggccacctatgacgaaaaacactttttattaattcatctcccagttgttgtctccctgatttttttacacttccaaattaacccccccggttttgttgatgaggggagcaccccgagacaccatgacaaatatattatgtaattacatcttgatctataagatttcacaccacccaactaataacaaaaaa

SEQ ID NO: 504573 - DNA, 450 bp, Homo sapiens
gtcgcgccaccacagttggctaatttttgtatttttagtagagatggggtttcgccatgttggccaggctggtttcaaactcctcacctcaggtgatccgcctgcctcagcctctcaaagtgctgggattacaggcatgagcaccgcacccggcctggtataatacatttaagggagaaatgtcttctataggagttaggagtcctgactaccagaagatctttattttattttgattataggtgagagtctccttatatctcttaccaaaggcagcagtgttttacagggtcatgctcctcctgcaggtcaagtagagagcctaaaaaagaaaaaaccaccatggaaagcatatgggtggggagataattagtaaagccagtttggggtggttaacattaggggagatgaaagcatattggaagttagcaactttaaggggggggatgg

SEQ ID NO: 504574 - DNA, 799 bp, Homo sapiens
gacgcactgctatcaacggggagttgcacacaatgtcggaacgcggaggtacggtggttgtcgttcctcgtagatcgcatagacatgccagtgatatagctctgggctcaatcgctgatacgagcatgatgctcggatggtgctgaagagagcaggagacaaggagctcgtatatcaatcgtactagaaaggagagtcaaggtgaaagcaaggactccagagcatttgacgcttgacgggttgctagtgtgacatgtatggatgtgcaaaggcatgaaagaggtggcaaacgatgcagacgtgcaagagatgaagagcgttcgtgatgccagtggatacattgggactaactgaaaagtgattaagggagaacgcaagagtggacggtgtgacctatattctgagaaagattacattgccagggaggtcactaggggatagaaaggtcctaggatgagaatgtacataggtgatgggtacgttgtcagaggatctcggggagacgaaagagtgagcgttgtggcaggattatttggtgggtcaccgtggaattgaacatgtaggagggagtagtgcaatgggatcgggtgtgattggtcctagatatgaatttggttatcaacagatatattgaaaggtgtactgcagaattattagttagaattccttgtgatgatatggggcatggtgatttatggtcgcattaggaatttaatataaagtaggttcttaaaattgttttggaggaggtggaggatatctaggggtattaatgagtaacgagactggcacaaaaatt

SEQ ID NO: 504575 - DNA, 410 bp, Homo sapiens
ggctggatgcacgagcgagtccgcgttttaataaaaaaaaaaaaaggaaatagaataactagtcaaatgtactaactgagtcctagattgtaaatctcttgaagacattatgggtcatgtcctaatccccttgatgtttccaggacccagccaagtacgtgaaatgttgatttattcgatattcatgaacacagatccaatgtgtaccaactacctgcacgcgcactgttccaggagctggaaatacagcagtgaataaacagaatctttaagaaatctctgctgagcactgacagtaactacatccagaaaggagacgaggaggacaagatggtaaaaataaaaacagagatacatcaggaaaaactgtcaattaagaaagttttaaacataaggaatgtcaaaggaga

SEQ ID NO: 504576 - DNA, 118 bp, Homo sapiens
tagtcgtggcaataaaaatgataggatactagtataagagatcaggttcgtcctttaatgttgtgtatggttatcatttgcttttagagagttagtctgattagtcattgttgggtgg

SEQ ID NO: 504577 - DNA, 112 bp, Homo sapiens
gctaggtaccccgtgctgaagaatgttgatgcacgtccgtcaggtcatgcagctggtcctccagtcgctcatacctgtatctttcctcttgcagggtctgagaaataaaacc

SEQ ID NO: 504578 - DNA, 216 bp, Homo sapiens
aggagtcccggagctgatcagtttgatgtccagttctctatcagtgtggctgtctcctctttcttgaacattcatgatcgcatcaaacaccttgaagatggggtccaggattcagctggcacaaggtgcgtggctagcttcttcccttcggggctggtggctgacttgctgaactggccgttgtttgacacaaagtacctgtcaccccacagcttc

SEQ ID NO: 504579 - DNA, 341 bp, Homo sapiens
cctccacctttacccacatcattttactccactacttgttgaaagcttgcttaaagaaaatccctcttggccgggtgtggtagcccacgcctcctaatcccagcactttgggaggctgaggcggggagatcacaaggtcaggagatcgagaccagccttgaccaacatggtgaaacccttgtctctactaaaaatacaaaaattagctgggctgttggcacacaccttgtaatcccagctactcaggaggctgaggcaggagaattactttaacctgcggggggagcctagattgcgctactgcactccagcctaggcaacagagggagactcttgtctca

SEQ ID NO: 504580 - DNA, 140 bp, Homo sapiens
acaatagagcacacggaattcactgattaagcactgtacacatacatgacagcctacaaccgtgatgagtgtcacatgtccacaggcagttagattaaaaaaggggaaaaaaccacagccacaaaaataaaacctgtttt

SEQ ID NO: 504581 - DNA, 380 bp, Homo sapiens
  misc_feature (37)..(37): n is a, c, g, or t
  misc_feature (96)..(96): n is a, c, g, or t
  misc_feature (108)..(108): n is a, c, g, or t
  misc_feature (115)..(115): n is a, c, g, or t
  misc_feature (117)..(117): n is a, c, g, or t
  misc_feature (144)..(145): n is a, c, g, or t
  misc_feature (162)..(162): n is a, c, g, or t
tataatatgcagttggtaaaaacaaaactggatggcntcaaaattgtctggaagtttggtcttgggcagtatgggctgggccaaatgaaagtgatnttttataattcntaaacangnttaccaaatgaaagtgtcagtggcttnnacttgggctcaattaanggggggaattttttataaaaaaaaaaaaaaaaaaaaaaaaaaaaaaaaaaacaaaaaaaaaaacaaaaaaaacacaaaacaaacatgaatacaaagaagaaacaaaacaccacaacgaaaatcaccaacaccaagcaccaccacccacaccaaaacacggcacgaccatcagacaagcccaaccgacacaccgcgtcggtgcccactcaacccgctca

SEQ ID NO: 504582 - DNA, 256 bp, Homo sapiens
agatggagttccgccatattccccaggctgataggctggtcttgaactcctgggcttaagtgatctgcccccctcagcctctcaaaatgctgacattataggcgtgagccactatgcttcccagatcttcttgtttttgtttttgctaaatcttttgttgttgttgttgttgttgttttgagatggactctcgctctgtcgcccaggctggagtgcagtggcgccatctcagctcactgcaacctccacctcccag

SEQ ID NO: 504583 - DNA, 221 bp, Homo sapiens
cctgttctgccgcttcctgcttctgccgcttcctgctgcttcctgcttctgccagagaattttaatctttatttttattatttgtggaaaacgaatgtctggtctctgtggcctaggcggaagtgcaggggccctatctcggctcgctgaaccctcggcctccgtgggttacaagcgaagttctctacctcagtccctcccaagttacctggaatttacca

SEQ ID NO: 504584 - DNA, 264 bp, Homo sapiens
tcggtatacgatgtacacgtggtacgggtgcgcggacggtgtgcgggtgagtctccccaaaagtggagcccttgtgatgacgagcacaggtccgcctgtgtgcccgtgggctgctctctcaccggtggctcttagtctcggagagcagaacccggcaccttcaggggctgcctgcgggtgggtgttccctgctgtacgtgtgtgttgggtaaggttgtggcctgctttttgctttatttctgaatggtcattaattctttaggt

SEQ ID NO: 504585 - DNA, 260 bp, Homo sapiens
tacatttccagtagctatttagttagttccagtgattcccactcaagtgtcccgtaaggaggtgccatgggaaataagagcagcctcttggcattctggttagaaagcctgaaccaaactttaaagctgtttttataaagggaggacatgtgatggccaaaaattgccttagattcatggagcacttggtcctaacccaggtgtggggggctgggtttcacatcatccaattttcttttttgccttcagacctgcaatgc

SEQ ID NO: 504586 - DNA, 887 bp, Homo sapiens
  misc_feature (38)..(38): n is a, c, g, or t
  misc_feature (61)..(61): n is a, c, g, or t
  misc_feature (70)..(70): n is a, c, g, or t
  misc_feature (82)..(82): n is a, c, g, or t
  misc_feature (101)..(101): n is a, c, g, or t
  misc_feature (147)..(147): n is a, c, g, or t
  misc_feature (188)..(188): n is a, c, g, or t
  misc_feature (224)..(224): n is a, c, g, or t
  misc_feature (242)..(242): n is a, c, g, or t
  misc_feature (249)..(249): n is a, c, g, or t
  misc_feature (299)..(299): n is a, c, g, or t
  misc_feature (386)..(386): n is a, c, g, or t
  misc_feature (453)..(453): n is a, c, g, or t
  misc_feature (470)..(470): n is a, c, g, or t
  misc_feature (479)..(479): n is a, c, g, or t
  misc_feature (483)..(484): n is a, c, g, or t
  misc_feature (528)..(528): n is a, c, g, or t
  misc_feature (543)..(543): n is a, c, g, or t
  misc_feature (556)..(556): n is a, c, g, or t
  misc_feature (561)..(561): n is a, c, g, or t
  misc_feature (596)..(596): n is a, c, g, or t
  misc_feature (607)..(607): n is a, c, g, or t
  misc_feature (617)..(617): n is a, c, g, or t
  misc_feature (632)..(632): n is a, c, g, or t
  misc_feature (689)..(689): n is a, c, g, or t
  misc_feature (722)..(722): n is a, c, g, or t
  misc_feature (736)..(736): n is a, c, g, or t
  misc_feature (782)..(782): n is a, c, g, or t
  misc_feature (793)..(793): n is a, c, g, or t
  misc_feature (811)..(811): n is a, c, g, or t
  misc_feature (830)..(830): n is a, c, g, or t
  misc_feature (853)..(853): n is a, c, g, or t
  misc_feature (879)..(879): n is a, c, g, or t
  misc_feature (881)..(881): n is a, c, g, or t
tgggccctcggagtagggtataggggcagcaggaccanaagaaaggaacaggtggcgattngccccagcnctcccccctaanatgcagaacctcaaaacangtagcggaaggtgagctccctgctccgagatgtagattcgggtgtnacgcaaagacggtatctttcaacaataaggtccccactgcntcaaagcccctaaggccacccgctggtcctggcatnctagacgggggtcccctnggccctncctttgtcttcctgttttgcagggtaatcccagggttccatgcgtttccnctgcacaaccagcatgggcccctcggtgcttgtttttccatttttctgttgttctgcgaaaataatggcccggaggagaggggggtncggcacggaggccaggttgttttccggcgccggcgtaaacccggtgaaggcctccccctcgtgcttnggcaccagccgccagtnatggaaaangagnngttcgaactcccgcgccttgctctaagttttccctgaagaaganaaagaggcgttttcncaaacttgctgtnccgtnggcggttggcatcgaactgccgggcacccgctctnccgagctttanctttgaaggncaggatgccccaggncttcccgtggtccaagttctacctgcgccgtgtagtggggccgcacccgcgttaagngccagttgcacggctcgtcgtgctgccacaccnaggacttgcgcgtnaccagggggcccaggccgaagagcgggagggggccgaccagctgcnagaggcggctntcgcggcgcacgttggcncaggcccggaccggcagcnggcgtccagagaacggccgcgtnaaggtctcgtagtacaccgcgtagancngggagt

SEQ ID NO: 504587 - DNA, 251 bp, Homo sapiens
  misc_feature (166)..(166): n is a, c, g, or t
  misc_feature (231)..(231): n is a, c, g, or t
gggtactggggattgtccccgggagagtcgggaggattactggaggccggatcggtacactaaagtgaaggtgaggtattgcgaggagtatgatccggatgattggttgtgtgattggtatatggttactaccgcgctacattgtgccctttcgtgtatggttccngtggtgtgtggtggacaggtttttccggaagctatgccctattaggataaataatggagtcttcnaaaaaaagaagcgtcctaaa

SEQ ID NO: 504588 - DNA, 311 bp, Homo sapiens
cgcagtatcgtccgccccaaattctaagttataaaggaaacaaccagttctcccacattttaaactccttctcaccccagtgtctggaaaagttaatcattaaataatagcacccactctgggtctggcactgtgtcgactactggagagcaaatagccaaattagtaccgttttcttcatccattgcctaaagtctagatggataagcgatatgattgcataagcaggtaacagccaaatgccatgcctctgagagtgaggtgttcagtgagggttcatttatttccatggcatcgcgtcggttaatttt

SEQ ID NO: 504589 - DNA, 207 bp, Homo sapiens
ggtgtttccctttgtctactaaaaatacaaaaaaaaaaaaattaataattcagttaagttgtggtggtgcacaccttgtaatcccagctactcgggagactgaggtaggagaatcgcttgaaccggggagatggaggttgtggtgagccgagatcgcgccatggcacaccagccggggcaacaagagctaaactcggtctcaaaaaa

SEQ ID NO: 504590 - DNA, 243 bp, Homo sapiens
ctcaggagttcaagacaggctaggtaatgaaaaaaataaccaaaaaattagacaggcgtggtagcgcaagccagtgatcccagccccttgggaggctgaggcaggtggatcgcttgagcctgggaggcagaggttgcagtgagccaagatcacaccactgcaccccaacctgggtgacagagtgggacccccatcacagaaaaaacaacaacaacaaacaaatttccattaactcgtaagtga

SEQ ID NO: 504591 - DNA, 121 bp, Homo sapiens
cggctgcagctgtggaggaggagttcagaggagagaggtcgcagagcagagagcctgagaagccagaggcaggtgaagagagggtggaaagtgagcagcgggatgggctggagccgcacac

SEQ ID NO: 504592 - DNA, 833 bp, Homo sapiens
gtataaacctgatcttgcttgaagtgagcaccagtaacgatttaaaggtgactctcagaacggagagaatacttgtgagaggttacaaatattgcaaactaaatgttatccaagcataaggtgaacatcatacataaagacaagaaggttattgcccactgctacggcatattctcagagagattcatatgccaggtattctctgcactaccgtataggatcctgctattattggcatcctacagtgtgtgtgattggcatccaaagtagaggaattgggagtagttgcacatacaagattgattgctgctgctacttctgtattaccacaactagattcttcatatgcctttccacgaggaatttccttataggatgaatcatatattagaatgtgaattctatctagttagaactaatggattgtagcttgatagtgtatcatccttatagaccttgtgctccagtatgtgcaggacatgggccaagaagacatgttgcttccccttgcatggaggatagtgaatgatacctagcagaacggatctttgcctacttgtatcctcctttcatgataagctatagctttgcctaacattgtagccctgtgtagtacaagcagaaaagatgccaggcaatcggttttgctgagctttctgggggaatatggaaacaaagatttggacactcactccagggtattacaaaactaatatgagccggtggaaagaaacatcgaatgaggaaccacagagactgggcacccatcttagtaagattgccataaaacgacaacaacctccaaacaaggaagagaacacgctccaacatgg

SEQ ID NO: 504593 - DNA, 140 bp, Homo sapiens
ctcacagaggtcaggccacagtgaggaatcaacagtatcccacagcggccaggtgcaagtggaacaacactcttcccttcccactctgcaacctcagtttatgttggagaacctaaaaactcacccatcacattcagtcc

SEQ ID NO: 504594 - DNA, 433 bp, Homo sapiens
  misc_feature (41)..(41): n is a, c, g, or t
  misc_feature (68)..(68): n is a, c, g, or t
ggggcccgtggttttttagatcctcagtagaacagtccagnagcctgaagacaagtggccccttgatnatttgggtctcccgggaccagctaggggtccaggtttcagtcagtaaataagggtggtccaggtcctaaagacccctttcctttacaaagacttgtgatgtttggggggttttgtggccaagccccccccttttctggtcatggtacccgtacagggttgatggccacagctcgaaggggggcttttgtgtccccctggggggtcagtgttttcagtaccccctttttcccgggcccacttgggtttttacttatttttttattgtgggccagtgatggggggtggggggtgggccttccccgccccctccacccctgttgtgacctgtccttccgtacttaataaagggggggtgggagtgtta

SEQ ID NO: 504595 - DNA, 1193 bp, Homo sapiens
  misc_feature (1193)..(1193): n is a, c, g, or t
gcccgcgatccggcgccactcgggccaggcagggaccccgtccacggtccgggaccgtcccggacccggccccagcccgcgcctctccgcgccgtcccgcgctccgcagcgcgccctctccgtcgtcccctgtcctgtgtcggttcggtatcgtggtcatgctcagggggcatttccgtctggcgaggcgattgaaaatcctgtgtgtgggagtcggtttggccatgttccgttctcaggatggagggtgtcctttgggtaaggaagaaaacatcattttctcgttctctgggaaggtgaacatttgtagtgcattgatttcccggtagtctggttaacatggtgagaagatacttttaaagtcgtctgaatgcgtgtgcatgaaggtgaaacgatggaaggatctgatctgtgaggctgtggtggatgaaccataagtggtggccttggatatcacagtgtagatcgggtggtgatggggtggtgccttctggcttttgccctatctttacctgactgtgttcttcgcttccttgtctataaacgccttaatctttcttctttctttaattcttccttgggtcctattttctggggtacaagtggaaggaaatagcagggcatagtgtaaagctagatcttttgtgcacctgatgtgtactgaggttgaatcactagtggagacttctaaaattatgtctgaatacagttggagatccgggtgggacctcgtgatggagacctctcggggctatgggtttcactcttacatttaaactcctttgaacgtgtggtcccagggggaatacagggtgcctctctttgaaggcagattcatcacctcttctattgagttttcagggcactgaccagtttcccggacggggacgacagaattagttggccaccaaccaccattttggcttcctgaacacccgggggcctgttacgcctgggaagaacaagggggatgggtccccctgccagcacatgagccccagacaactacagcgaaacaggggggcgcagacacgctgcagacaaaaactccctatctcaccgtgaggtcgcaatgtcccgtcccctaccactaactcacgactgacattaaccgacgcactactaagaagaagcaacagagcgcgactacgaacaacatcgtggtcggaccaaccccgacgccaccgagaagn

SEQ ID NO: 504596 - DNA, 933 bp, Homo sapiens
ctctaccggggattggatggcgtgatgtctcacagaaagttctccgtcccagacatggttccctcggttccttgcctcggaagcgcagagcaggcatcgtgcgaaggtgaagagctccctaaggatgacccatccagcgggtcaaccttcacagcccttcctggatacaaggctgcatgatcacatcgtcgcgggaaagtcgaccatggccgggtactccacgggtgaccaagacaggcagtgtgctgaggctgtgacccattgtagagacaccacccatgttgttggtgggcattgtgggcttatgtgaaaaccccttcgaggcctcggacctcaggattgtctttgctgcggcccatcagtgcatgaattgcaaccaagggtcctatagagactggcataatctctacggaaagaggggcctttaccacatgtactggcaaggaaatgggcaggatgaggatggccaagaaaggcatggttgacgcaggggaccttcgagccagcttgaagaatgtactgccaggtccatccctgtgtcatattggcccaaaccaagaatgcgctggttccttctgcgcaagaaagaggccccaccttgattggacactcactgtgactcggagcgctggtgcccggagcacgctgattggcccgaaaaggttgccagcggtaccttgtaacccatgttgtttggcacgataaatgatccgcgtcatcgggtgcccaggggaaacgctcaaggggtccacgttttggccccaagaaggtgcccgaagaccacgagcctgcaagtgggcagattgggcatgaacatgcggacactttggacggggaaagttcacacggggggaccagattaaatgcgggcttaaagagggaagaaccgtatactagccctggggctaggaactttagtgcaaccctcacgga

SEQ ID NO: 504597 - DNA, 416 bp, Homo sapiens
  misc_feature (110)..(110): n is a, c, g, or t
  misc_feature (407)..(407): n is a, c, g, or t
aaaaaaacaaaaccgtgtgtgaaagaacaaggagcctgaaaactgcacctgccccacgaatcccaagtcccctcaacatcctacctctgtgaccctatggccaggagganccccggaaagggacatgtgcctcctcccaaggcagagcggctccccccacttttcagtttgtgcttttgtatgggtattagccggggttctctagagggacagaactaataggatatataatgggatatatatatatgattgtggaagtcaatacttaataacacaatcacaatcttgtgatcgtgaatgttaatacttaataaactcccatatgtgtgtgtgtgtgtgtgtgtgtgtgtgtgtgtctgtgtgtgtgtgtataaatgcttgtaaacagtaatctgccaaaaataaanaagtaaaac

SEQ ID NO: 504598 - DNA, 231 bp, Homo sapiens
tctagaggatcccaagctctgataggggaagaagaagggcaagaaggcgccagcatagggcgtctcacactgcgggcactgccccccttctgatggcgagttctatcgactgcttccagaacatcaagctggcgattaacttgctggcaaagctgcagaagcacatccagaaccccagcgccgcgtagctcgtgcacttcctcttcgggcctctggaccttatcgtcaaca

SEQ ID NO: 504599 - DNA, 180 bp, Homo sapiens
gtttgcctgttagttttgaggagcaggagtctcatgggggcttctgtagcccctctcaaaaaggagtctttattctgagaatttgaagcctgaaccctctttaatcttcagaatgattttattgaagaggccgcaagcccaaatggaaactgttttagaaatatgatgattttgattgct

SEQ ID NO: 504600 - DNA, 1569 bp, Homo sapiens
gtgttcactccagaggatctgcacatatgtaggacgagacaggatgagaagaaaaagagtagagacagagacgaggacccacgctggaggacggtagatttggtgtaccgcctgcttgctgctcgacccatgtgcgatggtatctcgtgctgcaagtttcttgcaacaatgatttgcggcatgttgcctgagcgatactatgatgaacatgctgtcctggaaaacttcactcatcctccatgcgttgtgtgacaaacaggagactacccagtgaactgtctgctcttgctccgcctatgtcttcgaggtcttccaccagtcgagcgtggggcccatctatcacatttacgcgtctggtctgtggacttgaagggggaccctaaaacttggctcattccaccacaaaatatccttcctaccctagtgtgatggtgtccttcctagtctcatactcatgtcttcttaatttgcggcgacgagggcgcttgtcgatcgtcaacaaggcggtttcgacctcctacgactgccttaatgatatacttcgtgtgcgactatgcccaccactctattcatgcatgcggtgccccccaaaaaacttttgcgtcagtgacgaagcttcgcatcttagtgcttgtgtgcactcgagggacaacgtgctatatacctcccccggatctgcgcggagactacaacagcatgcgcgctggtctcgacatacggccccacgtacttcgactccctgcggacagatattccaagcggaccaccttgcatgcgttcgagaccagcggcagccttgtacagaaccatatcctccctctcataggggtaagcatggcaacatgcgtcctttcttcgtccattcaaagagcccccctggatgtagggggccaagcaccccccaacgtatcccttccttgtcccttcgttccttcggccgcaaagctgtctaagcctccacccatcattttgggcgttcgggtacgccgcgcgtaatacctctcttcttttgttgcctgaggaggacagagaccccgttggcctgctttggacatgttttctagtgctccttcatctttcatgccaataccgattaaggtgccatgcttgacactttgtgtgttgatattccacgcggcgtcttgtagattactcatccatcccttttattttgttgcgccggcgaggcccggaagggcgggtgcgttgtcgtccccccggcgccgcatcttttttttaattatcattaaacatcctcctccgatactgtgcaggagagaacaccccccctttttgtttacactaccggcgtaatccccaactatttcctcgctgtgtagttcaccgtccgggccgcggaaaatagtcggaacgggggccgttgtctcctttttttaaacaaacaacagagcatagatcgacgcacgcggatctttattcgtcgggcgggcgacacaaatatgttcatgttcgtatcgcatgctcttcaacgtcgctccccacccattttttcattcaaaaagatgaagtaactaacgcggccccaataggggagtaattcaacgggcg

SEQ ID NO: 504601 - DNA, 1390 bp, Homo sapiens
gtccccctgcctctcggactcgaggctgcgtgcgtcagccttcttcgggcctcggccagcggtagcggatcgctcgcctcagccccagacgcccctcggactaccctcggaaccaggaccacgacagcgaccgaccgccctcggccgaccccgacgccggactgggccgcggaccgcagacccacgggctacgcgtagagcgccgaaccgctccacggcaaccagaccacacataatgagaccaccccggacataagaagagcggccaagagcagaccgaccgagcacacgcagacgaagccccacagaaaagccttgagccacagggagggaaaagaccggaggtgcgtagacagagagacaacaaaacaagtcaaacaccataaaccaaatccgcacaggagcgagcacccaaacacaccagttaaccagaccagaaggagcgcgacaataccacgggaggaggccaacgccacgtggtgatgtgaagcacatgcccggacaacgaaggcacagggaagaggacgaccctggcgaccaccatagggcacgcggacggccccgcgacagcgacgcacacacggccggggacatggacgccaacgcaccgtaaacacatcagaaccccgacgacacacggcaccacagagcgcacccgcggagcggaaaacagcgtacgaaaagaacgacacccgaacacagtggacccctcaccagcacaaacagcgggagtacctcacagacacggccatcggggccagacggcgggcccacacgcaggagccagaagcggacggcgaacaacacacaacgaagagatcgccacgacgagcagagacacgcacactccgagcgaaaccaataaaaagccaattggagcacacgcgaccaggccgtggaaaccacagagcacataagagaacagagcctgacaacaggcgccagagagcaccaagtaccacgaggaacccgacccacaggcaggtaacatgccccacgcaaacacaagacgtatgcgcaagcggaatgccaataggtcaaacagcaaccacgtgcggcatcacatccgagcaacgagccaaacagaaccgagaggcggcaccacaccaaatcggaagagggagcccaacatcgatgcacacagagggaccccggagcaggaacggaaccacagacgccaccagcagtaggccgagttcggcgaaacacgacagcaacgttgggcaagcgcggaccaggccaaacccactctgcgagaacaccaaaggaggagcaagatcgatcaaatgagcgcgcgaccacaagaaagaaggcacgacacacacgacaggcgagcgaccgcgagtagcagtgacacgaggcgtaggcggagtagaggagaggtaccgca

SEQ ID NO: 504602 - DNA, 94 bp, Homo sapiens
aaaaacggtctgccggtgtggagcctccaattgcagtggattcctcggggatagaccaaagacctcgacgaccctttcatcagaggaaaagggc

SEQ ID NO: 504603 - DNA, 246 bp, Homo sapiens
tgcaaaatgcatactgaggtgtcaggtgacattattttaggcttctcagctgacagagcaaacagatatatgtgggtatactaacctatgtaactacacatatctataactatttctgtatgtcgtaatctgtatctgtgttgagttaaacatgaattcttactgatttcttgagctctgatccattattacatagatcattctaaaccctgtcccttattgatctgaaaatctccactccagcaa

SEQ ID NO: 504604 - DNA, 121 bp, Homo sapiens
ctcgttcggggcgcattgcggtggctcttctgtggggctcttggggggcacattgcgggccgcgttgtggtgcgcctcgggtggctcgtgcgggtgctagctagaggctgcaataatgaag

SEQ ID NO: 504605 - DNA, 130 bp, Homo sapiens
  misc_feature (11)..(11): n is a, c, g, or t
  misc_feature (75)..(75): n is a, c, g, or t
  misc_feature (92)..(92): n is a, c, g, or t
cgggcacttanagggggagcagagaatccttatccaacatcaacatcttggccagatttgaactcttcaatctcntgcacccaaagcttgtnaagatagttaagcgtgcataagttgcccgccaatcgaa

SEQ ID NO: 504606 - DNA, 222 bp, Homo sapiens
taccagtaaggcttggtacggaagtggaggtgcgccgtgaaccctggatagtctgggaggcttccctgcttgggtgaagttgggagggcttggacccagatagtctgtgaggacttgttggcaggggcaaaggtgtaggtagctaggaaccatgagtgtctagggagctcctagggacaaagacagtaggggctgttggcttgggataccgataggtccagt

SEQ ID NO: 504607 - DNA, 401 bp, Homo sapiens
  misc_feature (213)..(213): n is a, c, g, or t
  misc_feature (235)..(235): n is a, c, g, or t
  misc_feature (311)..(312): n is a, c, g, or t
  misc_feature (382)..(382): n is a, c, g, or t
acgcactagtgtacgctactagtgctgtccgaaaagagctctctaaggcatctgctgagacagttataccaaatacgtgtgctgcagctagcttaccaagctgtttggagagtgatgaccaagtgaacaagtctgtatttcaggtttattcaacagtatgaatagactctatagcagatagcacaaaagaacatgctatgtccaaaaacgtcntggaaatcaaaatttatacccnattatattgctgagtcctagcactttcatttgactagagatcttacttctcagaattaaagccagaactgcagctnncctcacatacccacctatgaacttagatgtctgcaggtgacagaaaaaaatttgtcatgttcagcttctngtatttacatatctaatac

SEQ ID NO: 504608 - DNA, 874 bp, Homo sapiens
  misc_feature (43)..(43): n is a, c, g, or t
  misc_feature (93)..(94): n is a, c, g, or t
  misc_feature (180)..(180): n is a, c, g, or t
  misc_feature (264)..(264): n is a, c, g, or t
  misc_feature (417)..(417): n is a, c, g, or t
  misc_feature (427)..(427): n is a, c, g, or t
  misc_feature (430)..(430): n is a, c, g, or t
  misc_feature (433)..(433): n is a, c, g, or t
  misc_feature (440)..(440): n is a, c, g, or t
  misc_feature (443)..(443): n is a, c, g, or t
  misc_feature (458)..(458): n is a, c, g, or t
  misc_feature (478)..(478): n is a, c, g, or t
  misc_feature (481)..(481): n is a, c, g, or t
  misc_feature (483)..(483): n is a, c, g, or t
  misc_feature (511)..(511): n is a, c, g, or t
  misc_feature (521)..(521): n is a, c, g, or t
  misc_feature (580)..(580): n is a, c, g, or t
  misc_feature (594)..(594): n is a, c, g, or t
  misc_feature (674)..(674): n is a, c, g, or t
  misc_feature (868)..(868): n is a, c, g, or t
tcgtaatgtatacagacatatataccacgttctagtataaatntttcaaaaaatacaataataatataatttataaagaacactcttctatgnncaaccaccaccaccaaaaaaaaaaagccctcagaaaatttctcacaaataaggcaactaatgcctgatatctcaaaatcctttacnaaaggagatagttctagtcaaggagttttgggtatgttactttttttttcttctttttcttttcatctgcctccatctaagtgnatttcttcagctgtaagagctcccgtttcttattctttgctttcttaaccttttccttgatgctggccacatcaattttagtttcagtagaagcttccttaggtttcacaattggtttttccttagggggaataaatgctttgtttctttccncttgtctctnacnganggcttcngcntgtttagcctttatngcttccattttcggccgccnctncngatttgccttcaaaaaggattcaccacnagccaattcnttatcgatcggactgccggggtgggggggggggaagggcggagatgcggccggaacagngtggggcggggggnccgggcggggaggcacatgggggtgtctgaacggtggcaaaaatcgcgcccaactttgtgatcgtaattcagaatctttngccaactctctcttaatcattaagcttttaatgttataaattggatgaatattcttcatagtatcaaggactacttttctaacctcttttaagccactaaaaggtccaatggctgaaactgtgtttccctgaaccataatgtaacaattagttaagagttccaatgccttcaatgtagaacctttgggaccaanaagccg

SEQ ID NO: 504609 - DNA, 874 bp, Homo sapiens
gttgactgagttggattcttcctgtaccctcgggtcgtcgtgaggcatgtgtgcacgagcaaccagtccgccccaccaggccaagagggagggtacgctctattccggcaacaggggacaagcagcagtgtcctcggtagtggacccaacgccacagtgttaagtcccaccctgtgacgtggcggtgggcagccattgtgggacgactgggggctaggtgtgtccgctggcccactcccggtcccctgatgattatacctctcttgacaccatattgtagtactcaggttgtaggacctctgcgctgcttgattgaaagttagctctagtatcaagccgtatcggatggtgattcgatcgttgttgtggcgggctatctgaggggggatcccaggctagcactgggtgtcgacttgccctgtgaatccttgaggtaagagacaattctcgctcgatgcgaagggtgctaggacgggaagttagcgcgtggctcttacaagcgcatgcaatcgtcatggtcagagaaactcaggtccacgcggatgcttgcagcacacgtcctccgtgggtactatacctttgcctttagagttgttttcaactaagaatggttcccttggatattgggctttttcataaaaaacaagaaattgaaaacggaggaaggaggcggcgcgaccgggttctcaaaagggatactctcctatctcgagggggtagccactagagaggtccacggcggtccgccacgaattgctcatgcgtccacaaggcgtgggtcccataaaggaggagcatcgaccataaggaccgcataagggaggcgtagcgccggaccgtggcaaagaacgtgcgcggtgcccgggggaacacc

SEQ ID NO: 504610 - DNA, 152 bp, Homo sapiens
gaattggtgtccgttgtccgtctctcctcccgggaggtcttcgtggctactcccagaagaggagggaagcacgagtatgagggtactttggagactcgaagccgtgtagctccgagactggtagtaacttcagaacccaggatgcgcaggct

SEQ ID NO: 504611 - DNA, 277 bp, Homo sapiens
aaacagaaagtagttttattttttctaaataggattttgtcacaaaaatgctggtgattcaaacctttaaaacagaagctggtgattcaaacctttaaaacagaagagcatacaacctaagaaatgcaaaacaggctacaaacctgtacatcatgttactgcactgaatactgtattcactgaacataatggaaatactgtaggcactgtaacataatggtatttgtatctaacataaaaggtatagtaaaatacagtattatatatctatgagact

SEQ ID NO: 504612 - DNA, 503 bp, Homo sapiens
taaaaccctcatcaatagatggagacttacagaaatagtcaaaccacttctacaaaatgccagtatcagggggggggtttcgaagccaaagtgatgttgggtattgtaaagtgaaattattagtggggggatgaagcagatagtgaggaaagttgagccaataatgacgtgaagtccgtggaagcctgtggctacaaaaaatgttgacccgtaaatgccgtcggaaaagtgggtgaagggagaactcgaaagtactcgtgaggcttgctaggagggtaaaatagagacccagtaaaattgtaatgagccaggtgccttaaattatgtggggtctctcgggagtgtgtttcacatattgtagaacatatgtgggtgagcccctcagaggtgatggaatacctccggaagtgcagagttacaatccgagattgctgtataagggaaggtggaacctcacctaggggcacttcaggcggggggaaacgcctggtcccaaaccacca

SEQ ID NO: 504613 - DNA, 334 bp, Homo sapiens
  misc_feature (6)..(6): n is a, c, g, or t
  misc_feature (53)..(53): n is a, c, g, or t
  misc_feature (149)..(149): n is a, c, g, or t
  misc_feature (191)..(191): n is a, c, g, or t
  misc_feature (222)..(222): n is a, c, g, or t
  misc_feature (229)..(229): n is a, c, g, or t
  misc_feature (231)..(231): n is a, c, g, or t
  misc_feature (279)..(279): n is a, c, g, or t
  misc_feature (319)..(319): n is a, c, g, or t
  misc_feature (334)..(334): n is a, c, g, or t
cttctnccacggtaaccatgtgacgaaccgaaagccgtgatcaaaaatgcggnacatgtcggaaagagaatgcaacaggactcgtggaagtgcgactactcaggacgctggaagaaaatacaacatagagaaggacattgacggctaanatcaagaagggaatttaacaaggaagtacaatcccacctggnaattgcatcgtggggaggaacttcggtagtnatgtaananatgaaaccaaacacttcatctacttctacctgggccaagtggccattnttctgttcaaatctggttaaaagcatggactgtgccacanacccagtaatccatn

SEQ ID NO: 504614 - DNA, 993 bp, Homo sapiens
ggctggctgggctgatggctggcgtggagtttttgtccataacctggtgcaacctgcgcagctggagtgatggcctcactcgtgggcctgcctgcagctgttggtgtgagcaggccgtccgtggtggctgagtgctggagcctggggccccgctggtgtgccgcccgccgccggcctcaccgtcctctctgtggtgcccctgtccccctgcaggctggggaacctctctacaactggcagtgctgaccaatggccgtcgctgaagtgagctgcttctgccttcctcttcaactcgtgatgctgctgaggcgatgtgctgcttcgtactgggcaagggtggtctgcggcgcccgccgcccgcttggtgtggccccgcagctgccatccccgcccacctgcttcgttgctggctgggcggcagcgccgtctttgacgccatgttcactggctggcatggccaccacgtcggccgagatcgagctggcggacgtggagcccgcagccttcctggcgctggctgagatttctatattcagatgaagttcaaattggtccagaaacagtaatgaccactctttatactgccaaggaaatacgcagtcccagacttggaagcacactgtgtagaatttctcaccaaacatcttagggcagataatgcctttatggtacttactcaggctcgatatttgatgaaacctcagatgctaaccttggtctagattcagtagaaaaagggacaatggatggaatcagtgcgaaggtttactgggtattgaaataggaaactcaggtgaagataaagaagaaggtcgtatagagagaatgaatttggagtgtgaatgctggaaaggaggagagttagagcagatagctggactgaggatagggtgagatgttatattttcttccggaaagagaaatgaagcggaatgatgaaggagtaaaaaaaaggacagaggaaagaaaggaacaaagaaaaaaaaatggggc

SEQ ID NO: 504615 - DNA, 478 bp, Homo sapiens
accagcttcgtggggttgaccaggcttagtacatcagagtctgctaaagtcctaccagtggaagatgcgtcaacaccatcctccttgctggagcagctgaactgagcagtttaactgggtgtcccggctggcaaacctcatgcatagcgaagaccagtactatctgcgggtcacacggtggattcccacacttctgattcggacgttccttccggtgtcacttgacgtggtcgtgaatttcaaagacccctgatcgccattcactgtgacggtccctgtagaagtctccaggaagaaccctaaatttatggagaccgtggcggagaaagcgctgcaggaataccgcaaaaagcaccgggaggagtgagatgtggatgttgcttttgcacctacgggggcatctgagtccagctccccccaagatgagctgcagccctccagagagagctctgcacgtcaccaagtaaccaaacccgag

SEQ ID NO: 504616 - DNA, 742 bp, Homo sapiens
  misc_feature (363)..(363): n is a, c, g, or t
  misc_feature (394)..(394): n is a, c, g, or t
  misc_feature (412)..(412): n is a, c, g, or t
  misc_feature (425)..(425): n is a, c, g, or t
agcggggggggggtatccaggacgaggagagggaggagtcgccatcgcctccgcctccgcctcctccggtgggaggggggctgagggaggagacggtggctgatcttgggatgttctggaagaagagaatttatccaaagattaaaactggaagcaacccttaatgtgcatgatggtggtgttaatacaatcggtgggaatgacacgggagaatatatttatcgggctcagatgacaccaaattagtaattagtaatccttacagcagaaaggtttggacaacaattcgttcagggcaccgagcaaacatatttagtggcaaagttcttacctgtgtacaaatgataaacagatggtatccgngtcgggagatggagtaatattttataccaangttgagcaagatgcaganaccaacagacaangccaatttacgtgtcattatggaactacttatgagattatgactgtacccaatgacccttacacttttctctctggttggtgaagatggaactgttagggggtggatacaggcatcaaaactagcttgcacaaaagaagatgtgtcacagatgatattttaattaactgtcgacgtgctgccacgtctgtggctatttgccaccaataccatattaccttgctggtggttgtctgggacagtcagtacgaactatatgatcggcgaatgctgggacaagagtacagggaattatgcaggtcgagggatacgggaatg

SEQ ID NO: 504617 - DNA, 687 bp, Homo sapiens
agcgggagcgtccgcggcccgcgcgcccgcgcggcggaggagaggtgttaagtgtgatgcttccataatacatttggatgctgtcagctaagttcacttctgaactaaggggttcctccaaatgttggctgaaattcatcccaaggctggtctgcaaagtctgcaattcataatggagctactgtactggctattggaaggaggagattctgaagataaggaggtaaaacctgtttagaaattaaaaatgagttacgatttaaagaaaattcagatgactcattgtgagtgctagttctcttgtaggatgccactggaaatgttgaaatgaaaaatattcagccgttggtctttgaaatttcctgtgatgtgtttcaatctagatgcaaagaacatggaaaaatcaaagtgctcgagtggtttaaatatgttttgggtattcctgtttatagactataatacttttccaattaaaatcctcagttgtcacgcagaagaaggttaagctgtatttgattgccagttttactgaaaatgcttagtattttacagtatcaccaaatatattttgtttagccaaggtataggaaaaataaaataaattgtataggttgacttttttctaaaatgtctttattggattgaatgaatgtttatacctgaaaaaaaaaggttcaaaaaaaaaaa

SEQ ID NO: 504618 - DNA, 589 bp, Homo sapiens
gggggcaatttgacagtttatgtagactatagcattaatgttcccaaatgttcagtgcatcctggctaatgtgttattgaaggtgttttcacgtaagcagttagaggaagcacttcacccctattactaagttattaaaatgcctcctaaaggtagcattttaaattagtatacataattgattagtaatttgtcttctcccaagcataaaacagcatagcagagttaagtgtgaccagtgaagtataagatattagggattgatggtgacaatgatcatagcaactaaatggattttttttttcttttagattcagccgttggtctttgaaatttcctgtgatgtgtttcaatctagatgcaaagaacatggaaaaatcaaagtgctcgagtggtttaaatatgttttgggtattcctgtttatagactataatacttttccaattaaaatcctcagttgtcacgcagaagaaggttaagctgtatttgattgccagttttactgaaaatgcttagtattttacagtatcaccaaatatattttgtttagccaaggtataggaaaaataaaataaattgtataggttg

SEQ ID NO: 504619 - DNA, 418 bp, Homo sapiens
acaaaaaaaggaaacaggttcttgcccctgtttgcccaggctgaagtgccgtgacacgatcatagctcactgtggcctcaaatttcctgggctcgattgatttctcctgcctcagtctcccaagtagctggaaccgcagttacttgccaccatgctaggctatttttatttttattttaaaaaaattaaatttttttttatttttattttgggcaacattgctattgtttgccctagacgtggtcttgaccctcctgtggcttcaggctttctccttctttgccctcggcccacccaaaagttgctgggatttgcaggttgtgaccttgccattgccctggcttttcatattctcatatttcataggagattaagctttttagagcctttcacattttgagttgttgaccttgtggat

SEQ ID NO: 504620 - DNA, 507 bp, Homo sapiens
ataaacaagctggtaatagcaggaaagtaagtatttgaataagatgtcaaactgatatttcatgtgaacctaactcattttatggtaactaataattatcttatttaaatcaataggtaaaacctgtttagaaattaaaaatgagttacgatttaaagaaaattcagatgactcattgtgagtgctagttctcttgtaggatgccactggaaatgttgaaatgaaaaatattcagccgttggtctttgaaatttcctgtgatgtgtttcaatctagatgcaaagaacatggaaaaatcaaagtgctcgagtggtttaaatatgttttgggtattcctgtttatagactataatacttttccaattaaaatcctcagttgtcacgcagaagaaggttaagctgtatttgattgccagttttactgaaaatgcttagtattttacagtatcaccaaatatattttgtttagccaaggtataggaaaaataaaataaattgtataggttg

SEQ ID NO: 504621 - DNA, 257 bp, Homo sapiens
attttttaaaaccctttaaagccaaaaatttttcccgggggggccggtttttgagggattttttaaccttggggttttcaaatttttaatttgtctctagaaattttttttttttttttggggtttttttttttacccctttttgggggtttaaaaactattttttttgccctaaaatggtcccccccaaatttttttgttttgttcccgttttttttgtgggaggtttttttttcaaaattaaaaatggggatcca

SEQ ID NO: 504622 - DNA, 662 bp, Homo sapiens
gggggcaatttgacagtttatgtagactatagcattaatgttcccaaatgttcagtgcatcctggctaatgtgttattgaaggtgttttcacgtaagcagttagaggaagcacttcacccctattactaagttattaaaatgcctcctaaaggtagcattttaaattagtatacataattgattagtaatttgtcttctcccaagcataaaacagcatagcagagttaagtgtgaccagtgaagtataagatattagggattgatggtgacaatgatcatagcaactaaatggattttttttttcttttagattcagccgttggtctttgaaatttcctgtgatgtgtttcaatctagatgcaaagaacatggaaaaatcaaagtgctcgagtggtttaaatatgttttgggtattcctgtttatagactataatacttttccaattaaaatcctcagttgtcacgcagaagaaggttaagctgtatttgattgccagttttactgaaaatgcttagtattttacagtatcaccaaatatattttgtttagccaaggtataggaaaaataaaataaattgtataggttgacttttttctaaaatgtctttattggattgaatgaatgtttatacctgaaaaaaaaaggttcaaaaaaaaaaa

SEQ ID NO: 504623 - DNA, 475 bp, Homo sapiens
  misc_feature (51)..(51): n is a, c, g, or t
agatctcaaagtgcactcttctatatctacttgctctgtccaggcagtatnatcaggtaatgccaagttgatgagaagaaatggctataatttcattgaatatttgagttggggttattttcagcttttgtacttttttagccacaccaagcatttaacgtttcatgttcacaagaagggattcttgtttgctttttactctaatctttggaggtataacttcctttgtggtctctgacaatcacaatgttagttcagctaatatgtctccagctcacattggggtctgtgttactgtgctgggtatgctatgtgtttgggatggacaaaggaagatgtggccccgccttcgaggcggcctggttaggggcacactgcaaaggggcacttggtatggtggaaacagcactgcaggcaggaggagaaaggctttctgtgtgtgttgtggttggtagatatagaagagtgccttttg

SEQ ID NO: 504624 - DNA, 596 bp, Homo sapiens
gggggcaatttgacagtttatgtagactatagcattaatgttcccaaatgttcagtgcatcctggctaatgtgttattgaaggtgttttcacgtaagcagttagaggaagcacttcacccctattactaagttattaaaatgcctcctaaaggtagcattttaaattagtatacataattgattagtaatttgtcttctcccaagcataaaacagcatagcagagttaagtgtgaccagtgaagtattcagccgttggtctttgaaatttcctgtgatgtgtttcaatctagatgcaaagaacatggaaaaatcaaagtgctcgagtggtttaaatatgttttgggtattcctgtttatagactataatacttttccaattaaaatcctcagttgtcacgcagaagaaggttaagctgtatttgattgccagttttactgaaaatgcttagtattttacagtatcaccaaatatattttgtttagccaaggtataggaaaaataaaataaattgtataggttgacttttttctaaaatgtctttattggattgaatgaatgtttatacctgaaaaaaaaaggttcaaaaaaaaaaa

SEQ ID NO: 504625 - DNA, 474 bp, Homo sapiens
gacctaggctgaggtcaagaggtcactgactttccaaggtggtcgtagtggtggagttggagttgaacacaggcctgaccctagcagtccacaccctgagccaaatcaattatattgcatcttgggtccataaaccctaatccataatcccatcaagaaaagctctgctgctcttagctctaaataattcagaatctattctcttctctccagtcccgtagttatagtcttcactcatagacttaagatgatcccatcaccagagaggtttctctaccattagcttccctcttccggccattcttcacaaagtcatatttctaaattctgtgtcacatacgatgatggcatttctggaaattccttcaggtgctctcaagccctgctgcagagatcctttacagagcacacacagtaccagcccatctgtctcaccctctccggtagtatccagctccaagacaaacttcagcc

SEQ ID NO: 504626 - DNA, 252 bp, Homo sapiens
gttttgttattttagtagcagaaatgggatgattgttaaagttcccccaaaatggtggcaggaaattaatttttccctccttaaagtcaagggccgtagaggaagaaaaacttttttttcatatcatgccctatgtaaacagacccattttgctatttgggtcatcaggaaagggtaagggggaggggagagaccaccctagacatttgcatttttgtaagttagccagccaataaagaaaagcagaatgga

SEQ ID NO: 504627 - DNA, 858 bp, Homo sapiens
ataaacaagctggtaatagcaggaaagtaagtatttgaataagatgtcaaactgatatttcatgtgaacctaactcattttatggtaactaataattatcttatttaaatcaataggtaaaacctgtttagaaattaaaaatgagttacgatttaaagaaaattcagatgactcattgtgagtgctagttctcttgtaggatgccactggaaatgttgaaatgaaaaatgtaagtatatctttggtggaaaaaaggatagtctctaggacacaaaattactgttttatttttttctcaggagtttgcctaagggtgtgacagatgatctctgtcacttgtcttagttgtgtcctgcaataaactggatgctttataaaatactagacctgtgatttcgtatgctgtaatatttcatttctccatcacccctccaaattatttcttagttggagtaaaataataaatgtattatagtcaacatctcttgacccctctttagtttcagctaaactaagcatgtgtgttgtgtgttcattttatagttcatgtgtagaactatgtgaattaaatttaagaaacatgtaaagtagaggaaatagttttctggagaaatttttccttttggatattatgcccttttccattgcttttctctgcttgaaagcaaaaaaaagtaccctaccccctgttctcctttagggaaaaactattcctataaagtatttttaaatcgtgcaagtcattgcctaggttagctaaaacatttctttttaacaaaggagaaaatgcccctggctttaacattttcttgtattgtatctattaagataacagtttactttgatacgtacatacca

SEQ ID NO: 504628 - DNA, 929 bp, Homo sapiens
gggaggagaggtgagcccccgcccgggccaggccctctggccgcgccgtccgcccctctagtcgtgtcccctcgtgggccgaacggacgcggcggtgccccgcgcccgaccagacgtcccgtgggctagggcctgggcctcgggccgcgtcggcgccggtcgagcctctccgggtgtcggggttcggggcgggcgcgcgtgggcgtggctcctctgtccacgcctgttcccttcgtcgccgcggctctcgtccgggacacggctttccggagtagagcccttggaggtgttaagtgtgatgcttccataatacatttggatgctgtcagctaagttcacttctgaactaaggggttcctccaaatgttggctgaaattcatcccaaggctggtctgcaaagtctgcaattcataatggagctactgtactggctattggaaggaggagattctgaagataaggaggtaaaacctgtttagaaattaaaaatgagttacgatttaaagaaaattcagatgactcattgtgagtgctagttctcttgtaggatgccactggaaatgttgaaatgaaaaatattcagccgttggtctttgaaatttcctgtgatgtgtttcaatctagatgcaaagaacatggaaaaatcaaagtgctcgagtggtttaaatatgttttgggtattcctgtttatagactataatacttttccaattaaaatcctcagttgtcacgcagaagaaggttaagctgtatttgattgccagttttactgaaaatgcttagtattttacagtatcaccaaatatattttgtttagccaaggtataggaaaaataaaataaattgtataggttgacttttttctaaaatgtctttattggattgaatgaatgtttatacctgaaaaaaaaaggttcaaaaaaaaaaa

SEQ ID NO: 504629 - DNA, 856 bp, Homo sapiens
gggaggagaggtgagcccccgcccgggccaggccctctggccgcgccgtccgcccctctagtcgtgtcccctcgtgggccgaacggacgcggcggtgccccgcgcccgaccagacgtcccgtgggctagggcctgggcctcgggccgcgtcggcgccggtcgagcctctccgggtgtcggggttcggggcgggcgcgcgtgggcgtggctcctctgtccacgcctgttcccttcgtcgccgcggctctcgtccgggacacggctttccggagtagagcccttggaggtgttaagtgtgatgcttccataatacatttggatgctgtcagctaagttcacttctgaactaaggggttcctccaaatgttggctgaaattcatcccaaggctggtctgcaaagtctgcaattcataatggagctactgtactggctattggaaggaggagattctgaagataaggaggtaaaacctgtttagaaattaaaaatgagttacgatttaaagaaaattcagatgactcattgtgagtgctagttctcttgtaggatgccactggaaatgttgaaatgaaaaatattcagccgttggtctttgaaatttcctgtgatgtgtttcaatctagatgcaaagaacatggaaaaatcaaagtgctcgagtggtttaaatatgttttgggtattcctgtttatagactataatacttttccaattaaaatcctcagttgtcacgcagaagaaggttaagctgtatttgattgccagttttactgaaaatgcttagtattttacagtatcaccaaatatattttgtttagccaaggtataggaaaaataaaataaattgtataggttg

SEQ ID NO: 504630 - DNA, 556 bp, Homo sapiens
  misc_feature (53)..(53): n is a, c, g, or t
ggccgagactgacttatacctggaccacacaaaaaaacacgcataaatgaagntaaaactgatttgcttacttcttccggattacaagtatcgaggcacggttgcgtgaactgcaaaaggacgtggagagataacctttctttcctctagctgggccattatttcctttcgtcggcgatgtagttcatctagactaggatgaggctggggaggaggaggaagccggctataaggaggttcctaaaaatagaaagattagttaaaattgaaagagaatttcaggacagattaattcatttaatatactcagcgtatattttaagttatgaaacagcttgtatacccttcttaacatttggaaacaccaacacttaacagaacaaagtaaaacaaaaccccccaaactctcaagatcttccaaatagctaaatttaggtttcttttatttggtcataattaccaagtagatctagaattgttaattaaaccatctaaagttcagaaactaagaaaggttaattgtggggacgaggcagatttttttctcattataata

SEQ ID NO: 504631 - DNA, 991 bp, Homo sapiens
gctggggtggctgcctcgccgcgccgtctgttattgtgctgcgcgtgcccgacgtggtgcgtccctctgcgcggtagtctaccgctgtgtggtcttgaggcatgctgctatcatcgaggttcgcaagtgtccgggcaggcttgtggcacacatatgcccccctgaccgcgggttatcctgctctcggtttctgctgtctccccccccattgtgccccccccgaagccccgtgttgtggggtcccacccgggtcgcgtgctaaggccagttctgtgtccgggagcgccagtcctttccgcctccgtgtggtgttcaacctgggggcagcgcgcccaatttcttgcggccttctgcggggagccgcccctttgtacttggcggttctctggcgccgcgccccacttcttgtgaggaagtgcttgtgcaagcaaggcaccccccatgggggttggcccctgcgcggtgctgcgagagaaagttggccgacacgaccccagcacaccgggtgggcgtcgctccgacacaatccactgggtcccgaccgcagcgtctttggcgtttgggtcaccgcgtcacttccagcatttcttctctcgcgccagcgactaccacagtgccttcatgggatcaatttcccccccccagatatcccccccccccctctcttatcaatcacttgttgcaaagactcgttcttccataacctgttttctcaccagctgccctactatacaacttctgtgctctgtcagaataccctgttcttctaatagacacaccaacacgtgtgtacaatccctcccacaagaacaaaaacgtcgaatattttattcaaggtcccccctgccgccttgtttttaaggacatcacgtccaaaatttattcgattattgtcagtagttccaacctcgcaattgtttatccatacagtctaacggtgcccacccttccccccggcattcttggcaccccttttaaacccaacaaaaca

SEQ ID NO: 504632 - DNA, 531 bp, Homo sapiens
agcgggagcgtccgcggcccgcgcgcccgcgcggcggaggagaggtgttaagtgtgatgcttccataatacatttggatgctgtcagctaagttcacttctgaactaaggggttcctccaaatgttggctgaaattcatcccaaggctggtctgcaaagtctgcaattcataatggagctactgtactggctattggaaggaggagattctgaagataaggaggatgccactggaaatgttgaaatgaaaaatattcagccgttggtctttgaaatttcctgtgatgtgtttcaatctagatgcaaagaacatggaaaaatcaaagtgctcgagtggtttaaatatgttttgggtattcctgtttatagactataatacttttccaattaaaatcctcagttgtcacgcagaagaaggttaagctgtatttgattgccagttttactgaaaatgcttagtattttacagtatcaccaaatatattttgtttagccaaggtataggaaaaataaaataaattgtataggttg

SEQ ID NO: 504633 - DNA, 951 bp, Homo sapiens
  misc_feature (64)..(64): n is a, c, g, or t
agaagagtggaatgataatatagaccaccgagtgccgcagttatccgagcttttaaagtgcctnttcttcctcctgatacatacagtggtcgtgacccctttttccgtaccaggtaggtgccgcatcacataagtggcgctcctacaccttctaaaacaaggtctaactgtaacatataaaccccacaaatttggcgcctggctctcccccttattatcgtacttggatcttcccccctgtggaaaccgtgtgattccacgccctaggcatttatattcgctgacgaccctatcattacccttctcttccccccctccaatctttttggttcctgtccccccctccccccgttaattgacaatcccgcctttttacccccccctgtttttatggcctttcccccagtcccccccaatactacagcgtgctttctataacacacccctggtcaacaaggcggccatttttcaataacaggttcagaagtatatgcgccacccatgacacccaccccctgcgagatgttccctcgggagcccacactagcaccacaacgtgcttgttgtacaacacccgggttccttcataacccaccgcctctgattatacatttttcatacaactggcgggtcttcaaaccccccccaagagcacttttgaaaagtgcctttcattcaacccccctcccatgccctcacaaaattggctttaccacaaacctctgtgcgaacctcatgttccaactgcccagattctccgcatccacgagtgatgaccacttgttcagaaggccctccttgtcaacaaacacattgattggattcagtcttctggtcgctacataaaattttttcggttccattttctttcttcttcaaaacacactcacgcaaatctacgtccccttttcgccaaaaaataaaatcgccgcccccgaaaaacaaaaacaa

SEQ ID NO: 504634 - DNA, 318 bp, Homo sapiens
aaagagaggattagcctgaggccagagagtttgaggctgcagtaagttgtgattgtgccactgtactctagcctgggagacagaatgagaccctgtctcttaaggaaaaaaagaaatcacgctatctacttataacgcatccgcttatacaaaatacacctccctgaacttcccctttaggctaataccctatcagggcttggagagtggcccacttgccggatgatctgtgagatggtcacaatgtaggccagatgccaaggggtaatcaggtgacaatgccaactggcaggactaacagaggtcatttacggtaga

SEQ ID NO: 504635 - DNA, 200 bp, Homo sapiens
  misc_feature (27)..(27): n is a, c, g, or t
  misc_feature (40)..(41): n is a, c, g, or t
  misc_feature (58)..(58): n is a, c, g, or t
  misc_feature (62)..(64): n is a, c, g, or t
  misc_feature (77)..(77): n is a, c, g, or t
  misc_feature (122)..(122): n is a, c, g, or t
  misc_feature (136)..(136): n is a, c, g, or t
  misc_feature (158)..(158): n is a, c, g, or t
  misc_feature (170)..(170): n is a, c, g, or t
  misc_feature (182)..(182): n is a, c, g, or t
tttagggtgattttttaaaaagacttntgcaatacatttnnaggtgaaacttagtggntttnnnctgataaattagngcatttaattgactattttattcaggttgatctgttgaatatttnctaaagaccagttntttaagctaagacatgtaaaanatcccaaatggnagtacctcattntttacttagcttttgtac

SEQ ID NO: 504636 - DNA, 450 bp, Homo sapiens
  misc_feature (50)..(50): n is a, c, g, or t
  misc_feature (99)..(99): n is a, c, g, or t
  misc_feature (117)..(117): n is a, c, g, or t
  misc_feature (122)..(122): n is a, c, g, or t
  misc_feature (127)..(127): n is a, c, g, or t
  misc_feature (129)..(129): n is a, c, g, or t
  misc_feature (134)..(134): n is a, c, g, or t
  misc_feature (138)..(138): n is a, c, g, or t
  misc_feature (145)..(145): n is a, c, g, or t
  misc_feature (151)..(152): n is a, c, g, or t
  misc_feature (172)..(172): n is a, c, g, or t
  misc_feature (175)..(175): n is a, c, g, or t
  misc_feature (177)..(177): n is a, c, g, or t
  misc_feature (183)..(183): n is a, c, g, or t
  misc_feature (194)..(194): n is a, c, g, or t
  misc_feature (197)..(197): n is a, c, g, or t
  misc_feature (204)..(204): n is a, c, g, or t
  misc_feature (208)..(209): n is a, c, g, or t
  misc_feature (214)..(214): n is a, c, g, or t
  misc_feature (292)..(292): n is a, c, g, or t
  misc_feature (303)..(303): n is a, c, g, or t
  misc_feature (305)..(305): n is a, c, g, or t
  misc_feature (318)..(321): n is a, c, g, or t
  misc_feature (338)..(338): n is a, c, g, or t
  misc_feature (349)..(349): n is a, c, g, or t
  misc_feature (351)..(351): n is a, c, g, or t
  misc_feature (386)..(386): n is a, c, g, or t
  misc_feature (403)..(403): n is a, c, g, or t
aaagccctaatggcgcgtaccctattaaaattcaggacctctccaatatnctccctctccgttattaactctccgtcatctcttcttttccctttaaanaaacattttcacggtttntcccncacangnccatntacnttcttgnctatcnntatacaattcaaaacatctnttncncacttngactgtcaccntcnccaggcnggcnnttganatcttattttttttccaactcatttttattaaaaaaataaaaaaatccccccactatcagctttacaaaatctctaanggaaacacaanancaaggtgctgagnnnnaaacacctgcggtagcntcttctgtgtntntttctcgttaaaaaaatctgtgaatttaacgcccngggccaacaaccttggnaaatttctactttcctccacattttttttttttaaagaaaggccccg

SEQ ID NO: 504637 - DNA, 494 bp, Homo sapiens
  misc_feature (388)..(388): n is a, c, g, or t
  misc_feature (397)..(398): n is a, c, g, or t
  misc_feature (400)..(400): n is a, c, g, or t
gccgcaggactgggagcggtctccgcagggactgggagcgggctccgcagcgcactctagcccgcggctcggctcagtcggtctgcgaggatccggcccgccgccccccgggggacccgatggcctcggagggcctggcgggggcgctggcttccgtgctggctggccaggggtccagcgtgcacagctgcgactcggcgccggccggggagccgccggcgcccgtgcggctgcggaagaacgtgtgctacgtggtgctggccgtgttcctcagcgagcaggatgaggtgctactgatccaggaggccaagagggagtgccgggggtcgtggtacctgcctgcggggagaatggagccaggggagaccatcgtggaggcgctgcagcnggaggtaannangaggcggggctgcactgtgagcccgagacactgctgtccgtggaggagcggggcccctcctgggtccgcttcgtgttcctcgctcgccccacag

SEQ ID NO: 504638 - DNA, 175 bp, Homo sapiens
ctttggcccccccgggttttccctttttggtttcgggttggtttttgggggggatttgtgaggggttccctttttcccccgggaaccgtttttgcctggtttcggtttttattcggcccccttttggggatttggcccctggggcccaaaatttgggccggggccttggcccgga

SEQ ID NO: 504639 - DNA, 153 bp, Homo sapiens
gtgggagaatctggtgaacaaggacgtgcggagtcgtgcacacccagctacaccctgcaaggctaggtcagcggcgccaccagctccacccagtgatgccaggaggaccggtgcaatgagaagctgcacaacgctgctaccactcgcaccgct

SEQ ID NO: 504640 - DNA, 1053 bp, Homo sapiens
  misc_feature (14)..(14): n is a, c, g, or t
  misc_feature (26)..(26): n is a, c, g, or t
  misc_feature (209)..(210): n is a, c, g, or t
  misc_feature (213)..(213): n is a, c, g, or t
  misc_feature (224)..(224): n is a, c, g, or t
  misc_feature (227)..(228): n is a, c, g, or t
  misc_feature (230)..(230): n is a, c, g, or t
  misc_feature (237)..(237): n is a, c, g, or t
  misc_feature (258)..(258): n is a, c, g, or t
  misc_feature (270)..(270): n is a, c, g, or t
  misc_feature (284)..(284): n is a, c, g, or t
  misc_feature (336)..(336): n is a, c, g, or t
  misc_feature (372)..(372): n is a, c, g, or t
  misc_feature (384)..(384): n is a, c, g, or t
  misc_feature (484)..(484): n is a, c, g, or t
  misc_feature (503)..(503): n is a, c, g, or t
  misc_feature (546)..(547): n is a, c, g, or t
  misc_feature (562)..(563): n is a, c, g, or t
  misc_feature (568)..(568): n is a, c, g, or t
  misc_feature (571)..(571): n is a, c, g, or t
  misc_feature (600)..(600): n is a, c, g, or t
cggcatatggatcncaggcagcagtnagcccgcgcccgcctgtgtgtccccagagccatggagagagccagtctgatccagaaggccaagctggcagagcaggccgaacgctatgaggacatggcagccttcatgacaaggcgccgtggagaagggcgaggagctctcctgcgaagagcgaaacctgctctcagtagcctataagaacnntgntgggcggccanagnngntgcctgnagggtgctgtccagtattgangcagaaaagcancgaggagggctcgngaagcgaacgaaggggcccgaggtgcgtgagtaccgggagacacggttggangacttgagctccagggcgtgtgcgaaccgtgctggncctgctggacanccacctcatcaaggaggccggggacgccgagagccgggtcttctacctgaagatgaagggtgactactaccgctacctggccgaggtggccaccggtgancgacaagaagcgcatcatngactcagcccggtcagcctaccaggaggccatggacaatcagnnaagaaggagatgccnnccacnaancccatccgcctggtgcctggccctgaacntttccgtctcttaccactacgagatcaggcaacagccccgaggaggccatctctctggtcaagaccaattactgacgagggcatggcatgatctgcacaacctcagacgaggacttccgtactaaagacgagcaccgcgtcatcatgcaggcgtgctgtgagataactgacactgtggaactgactcgacaaacgaccggggaagaggggaggcgaggctccccaggagtgcaccagagctgagtctgttgctccgtaatggcaagaagacatgcctcaaaacatgacgcactgtcacttcaataaacggcaactgctctatgcagacttcactattggtatcttggacaaatagatggacaaatcaaaagggaacatttccattaacctgacaggcacccagtaaatgcctgttcacctgcaacacgtgccctatctatcggaaataaaacg

SEQ ID NO: 504641 - DNA, 110 bp, Homo sapiens
cctagtttagaagtttcaatagcatgaatagtcaaagcacaagcgagtgggccgggggttctaggactaggtgctattgaaacttctaaaactagggggtaccgagctcg

SEQ ID NO: 504642 - DNA, 801 bp, Homo sapiens
  misc_feature (33)..(33): n is a, c, g, or t
  misc_feature (79)..(79): n is a, c, g, or t
  misc_feature (83)..(84): n is a, c, g, or t
  misc_feature (89)..(89): n is a, c, g, or t
  misc_feature (95)..(96): n is a, c, g, or t
  misc_feature (110)..(110): n is a, c, g, or t
  misc_feature (158)..(159): n is a, c, g, or t
  misc_feature (178)..(179): n is a, c, g, or t
  misc_feature (186)..(186): n is a, c, g, or t
  misc_feature (229)..(229): n is a, c, g, or t
  misc_feature (236)..(236): n is a, c, g, or t
  misc_feature (243)..(243): n is a, c, g, or t
  misc_feature (245)..(245): n is a, c, g, or t
ataaccatgcacactacgtataaccaccctaancctgacttccctaattccccccatccttaccaccctcgttaacccntaannaaaanaactcnntacccccattatgntaaaatccattgtcgcatccacctttattatcagtctcttccccacanncaatattcatgtgcctagnnccaaganagttattatctcgaactgacactgagccacaacccaaacaacnccagctnctccctnanagcttcaaactagactacttctccataatattcatccctgtagcattgttcgtgacatggtccatcatagaattctcacgtgtgatatataaactcagacccaaacattaatcagtgcttcaaatatctactcatcttcctaagttaccatactaatcttagttaccgctaacaacctattccaactgttcatcggctgagagggcgtaggaattatatccttcttgctcatcagttgatgatacgcccgagcagatgccaacacagcagccattcaagcaatcctatacaaccgtatcggcgatatcggtttcatcctcgccttagcatgatttatcctacactccaactcatgagacccacaacaaatagcccttctaaacgctaatccaagcctcaccccactactaggcctcctcctagcagcagcaggcaaatcagcccaattagggtctccaaccctgactcccctcagcctttttagcccaggaaacagccttagccatgattcggtctttcccgtgacgtagttttaccctcaggagcgagctatggc

SEQ ID NO: 504643 - DNA, 886 bp, Homo sapiens
  misc_feature (33)..(33): n is a, c, g, or t
  misc_feature (79)..(79): n is a, c, g, or t
  misc_feature (83)..(84): n is a, c, g, or t
  misc_feature (89)..(89): n is a, c, g, or t
  misc_feature (95)..(96): n is a, c, g, or t
  misc_feature (110)..(110): n is a, c, g, or t
  misc_feature (158)..(159): n is a, c, g, or t
  misc_feature (178)..(179): n is a, c, g, or t
  misc_feature (186)..(186): n is a, c, g, or t
  misc_feature (229)..(229): n is a, c, g, or t
  misc_feature (236)..(236): n is a, c, g, or t
  misc_feature (243)..(243): n is a, c, g, or t
  misc_feature (245)..(245): n is a, c, g, or t
ataaccatgcacactacgtataaccaccctaancctgacttccctaattccccccatccttaccaccctcgttaacccntaannaaaanaactcnntacccccattatgntaaaatccattgtcgcatccacctttattatcagtctcttccccacanncaatattcatgtgcctagnnccaaganagttattatctcgaactgacactgagccacaacccaaacaacnccagctnctccctnanagcttcaaactagactacttctccataatattcatccctgtagcattgttcgtgacatggtccatcatagaattctcacgtgtgatatataaactcagacccaaacattaatcagtgcttcaaatatctactcatcttcctaagttaccatactaatcttagttaccgctaacaacctattccaactgttcatcggctgagagggcgtaggaattatatccttcttgctcatcagttgatgatacgcccgagcagatgccaacacagcagccattcaagcaatcctatacaaccgtatcggcgatatcggtttcatcctcgccttagcatgatttatcctacactccaactcatgagacccacaacaaatagcccttctaaacgctaatccccggaatccccggtcgaccggtcgaccggggattggaacaggttgatgagtctggttagggaaacgtggagttaggaaatcagttcctatgttgtgctgtgttgggagctctgggctgggtggtggatctagatttaggtgtcatcagcacaccagtggtaggttggttgaaagtgattgagatcacccagggaagcttgctgagtgagaagaggaagtctagggctgagccgtaagcaaatgccaacat

SEQ ID NO: 504644 - DNA, 187 bp, Homo sapiens
actcagtaatgcaagcaactatgcttttacatcaggattccacggctgcacccaaagcactcaacaggaaaaatgtactctgagcgagggataagaaataatccccctataactgtgtattacgaagtgtgaatatcatccaagatcagtaactacaacaaaaatcaacattacagcagcatgcata

SEQ ID NO: 504645 - DNA, 163 bp, Homo sapiens
cttggattgtggacttcacctcatccactattggccaccatgttttcgttgtgtagtgagcaagggacagggaactttcctgccttatttaaacctagggccgaggattcgtggaatctagcttgatcacgagactctgagagccaacaaaccgcatacatac

SEQ ID NO: 504646 - DNA, 452 bp, Homo sapiens
  misc_feature (8)..(8): n is a, c, g, or t
tcccaccncaggtttttcttgtaacacaacagtaccgacaatgtaatgaacaccaaataaatgccagctgtcattgctaagtcctaccccttttccctgattgtatttgtttatatatttttttactaccccagcttttgatccttcattttacatttacatagattcattgtttactacttgcccttcaactatgtcttttccaatactgagttttccaatctttaaaaaaaagtttaaaagttgctacataatattttgcatatttatagggtaataagataatatgtgatattttgttatatatatagaatgtgtaatgatcaagtcagggtatttatttgacatgtctatcactttgagtatttatcatttctatgtgttgggaacaattcaagtcctctcttccagctactttgaaatacagaatatattgttgttaaaaaaaaaaa

SEQ ID NO: 504647 - DNA, 1114 bp, Homo sapiens
cagccctccctttttttgttgacaagttgcctgtctggtacccaggcaatgaggtgcctactggatgggtcttgtatgaagcggaagctccattcctttcccttgggtcccccaagaggtaataaaagtacctggaggagacatagtcaggtgattgaaccttctgtcctgcctactactgctacggtgatgtaggtggcagaacagccgtcctggcctgacctgatcctggggttgtggtacctgacattctttcgtagcacagagcatgtctccgctttgaatcacacaggcgttgcttgtctccagctaccttagactttgtgaccttcttcttgcatgccttgatggagcttaagaaccattacactgggcttggaacagtgcctcagccccttaccgtggggtactgagtgcgttcgagcaacctaaggactaaaccttatccaagactgaagttgagtccagttccaaacgcagtctacttattgcctaggtctgccagaagaaacacactctttgtggattctccgagagacctaagctccccccgaagattgttacaggactatttgacctaggattcggaagatggctctggggcgaaatttccacagaaggggtagtggtcgtagttgtcttggtggtagtagtcgtcatcgcttgtagtcgtcgtcctagctcgctgtcgtcgtcctagtggttagtagtagtcctggtgtcgtcgtaataaattctagcacgtgaaactcgatgggctcacacatggtacagcgaccccagggaagtcgctattgaggagctcaagcgaatagtcccttattgcgtgtacaacactcgatcgtgcagctcactgtagtcactctaagtggtggccaacccaagtctacgccgtttaaaaagccgaggggctataagggacgttgccgcttaactcgaactacaggggggaccatttaaatgtgacagtcctccccttagaggacgtacccgggggccccggacacaccgtggttgtgcggacaccaggcgggttaccgtggtcaatttccactgattctatccttctaggggtatcgggccctaaccgctagcgaaagaacccctaataacg

SEQ ID NO: 504648 - DNA, 444 bp, Homo sapiens
gatcagaatcgcgcatggacagcgtgttgaaaaaggccaagacagggtgctgtgggcgggcgtctcccccagctgtgatgacacaggcaaacaacagaatggctaaaggctacctgtatgaggtgacagctgacatgagtgtgcaagtacaagttaggggttaactggtcggtcacggggggacctgaaggggccaaggatcccacagaggtacaaagatttttctaaaacacagcagtcttatttcacgaagtatttaggataactaacaagacctgacaggagccatgagagctcagactaaaccggctggcaggagccagtataaacgattactctcttgctttacaatccacatcatgacttgtcaaagacagaaattgcttagcatttctgggggacgaagtcacccataactagtctacatcatttggccaatcacaa

SEQ ID NO: 504649 - DNA, 165 bp, Homo sapiens
tgaatctgaatgtgtttggtgagactagggtgttgtgagtgtaaatatgcgatgagtaggggaagggagcctactagggtgtagaataggaagtatgtgcctgcgttcaggtgttctgtgctgtgttgcgctcatcagtggtgactgataagccaaggatggtgg

SEQ ID NO: 504650 - DNA, 294 bp, Homo sapiens
acgccgggtgcagtggctcgcgcctgtgatcccagcactttgccgggggggagcacttgaggccgggagttcaggaccagcctggacagcgtggtaaaaccccgtctctactgaaatatgcaggagttggttgggtatggtggtgggtgcctgtggtcccagctacttggtaggctgaacaggagaagtgcttgggcccggggggcgggggttgcagtgggccgacgttgtgctactgcattccagcctgggtgacggaatgaaactctgtctccaataaataaataaataaat

SEQ ID NO: 504651 - DNA, 104 bp, Homo sapiens
  misc_feature (32)..(32): n is a, c, g, or t
  misc_feature (66)..(66): n is a, c, g, or t
  misc_feature (73)..(73): n is a, c, g, or t
  misc_feature (95)..(95): n is a, c, g, or t
  misc_feature (101)..(101): n is a, c, g, or t
gatctttgatatatcatagtcattaaaagacnttttcgtatttgtattgataatgtattaaaagtngtttgtncttaataaaagacttctttaancatctnaaa

SEQ ID NO: 504652 - DNA, 259 bp, Homo sapiens
caaaaaattttttgggggccccataaaagggggccccccgggggggggggggggtttttcggggggccccccccgcccccggggggggggggggggggaccccggggggggggggcccccccctgttgttcccccccccccaaaagggccccccccccccttggcccccggcggggggggggggggggggtttcccccctttgggggttccccaattttttggccccccccccccccaaaggggggggggtccccccca

SEQ ID NO: 504653 - DNA, 222 bp, Homo sapiens
tgtggatcatacaagtcttatatggagaacaagtgattatgctacctttgcacggtcagaataccgcggcgttaaactggtgtcactgggcaggcattgctctaatactagtaaatggctagaggtgatgtttatggtaaacaaggcggggttatgtgtttgcccgagttccttttactctcttttaattctttccttgtgtgcactcctagtgtatgggtt

SEQ ID NO: 504654 - DNA, 296 bp, Homo sapiens
  misc_feature (250)..(250): n is a, c, g, or t
tgaataaatcttctcagttcctgctcccaggccatgaagaagatgtacagggtgcctcaagtacccgatggaaacagaagcacctgcctcacttcaagcgtggtgcacgcgagcagaccgttgccgagctggcctgtcggagtgtcggtgcagcatgcggactcactggagaacatcgacgagagccggtggccgagagcagagaggagcggatgggcggccgggcggcgagggcagcgacgacgacgancggtccacctagtgcgcgcaccgcttcagggacggagacaggatac

SEQ ID NO: 504655 - DNA, 319 bp, Homo sapiens
gcataaggacaaaaaaaacagtgagataaagatggaccatctagaaaggccaggctgtcctttggagtcaccaaggagaggagttttgggagggaagaaaaatgggatgggaaacgacccattactatttgtgaaagtgacaaaagaacccagggattttgaggctgaaatttatacccctgggccttcagtttgagagtcatttagcctatatggaattacctgtgacattacattccagagagatgagaaattttgagacccttattatcgatgtttatattgaaaaaatggtaataaatattttgagattttcaga

SEQ ID NO: 504656 - DNA, 985 bp, Homo sapiens
accacactgtgcgcatctacgaggggtatgaccatcccccatgccatcctgcgtctggaacctggctgggcgggatctgactgcactacctcatgaatgatcctcagcgagcgaccgggtacagctttaccaccacggtcgatcgggaactcgtgcgtgacattaaggagaagctgtgctacgtcgccctggacttcgagcaagagatggccacggatggttgcaggtcctcgcctgggagaaagagatatgaggctgactgacggccaaggtcatcaccattggaaaggagcggtttccggtgtcctgaggcgactcttccagccggttccttgcctggggcatgggaggtcctgttggcatccacgaaactaccttgcagctccatcatgaatgtgtgagcgtggacatccggaaagacctgtacgcgcagcacagtgctgtcggtgggcatcaaccatgtaccctgggtattgccgataggatgcggaaggagatcatctgccctgggactccagcacaaatgaatgatcaagatcagttgtcctcctgagcgcaagtggctccgtgtggatcgggggtccatgctggctcgcagtcgacgttccagcagatgtggatcacgcgaagcaggagtatgacgagttcgggccctccaatcgtccatcggaggggcttctgagcggactatgacttaagttggttacacggttggtgacattagctaagttgggaggacaagagatgagaaatgccatggggttaattgattgggcggtaaggcccaaggtatggtgggttgacccagttaaaggggtggggaagtgtgctgtgtgtgtgcggggtccagagaaagggggggacttagaaggtgtgtagattcacaaagtaggttgaaaaggggtaaacatttagaagggtccacgggggggtgagggagaaccatatgaagggcccaatggtggtgggtttattatttggggtg

SEQ ID NO: 504657 - DNA, 253 bp, Homo sapiens
tactgagaagtgtcgagatcccatagacagaacacagggtgtagtggtcggtcgcgctgaattctcaattctgactctgctccctagtggccatgtgatcttggatcaaagacttaaccacgtagggcctctgttttctcatctgtacaacatggggctcatttgtctgtgcaaacaaaaaaaggaccccgccccagaactgtccatcaaagatgcacagtgggcatactcacagcacactgccatcctatat

SEQ ID NO: 504658 - DNA, 1660 bp, Homo sapiens
cacaaaaaaaaacaaagccaggaagaggccgggttaatcgagcagaggggacacatgattctcagcaaacaacgattacatgcagacagaagaggactgggaccgggacctgctccatggacccggcctgtggagaagcagcagagaaagacattcactgtgcatggtgtaactcccacctccgtgaacggctggggacacagatcgatgaacatcgaagacggacttccgaggatgtgactgaagctcatgcttgctgctgtgagtgctcatctcagtgtgaactgctatgagccaagcccagaagcgcaggccaagcatgagcagtgcaccacagatctcgcaacagtccaacacaggcacctggccatttcatcagcccagacaacaggacgtcaaaactaggatgtcccatcgagagcctgcacagcaaatccgtggcatcgggcacatgcttgcacagcactgcaccactaggcgcgactgcatcctgcgcaccaatccatcactcgcgacttatgccacatccaacggcaccatcatccgctggcacagcagcacttcacagaacacgaacaggcagacggcgcctcgactccactgcctcggccggtccacgaccgcaaacgagcacgcaccccatataccaaccaccctgctccacacacatccacgacacctacccaccataaacgcatgcgcaacggcatgcgaccctcgccgccatactcgtgggtggccaccccggaatacccaacacagcacacaacaccgggcacacgaagacattgcaatctcgacactcaccgcgagacacagccctcggacgggcacacgggcaactgcacgcccccagcctaccacccagaaacacacatacgaaaaacagcagcgaccacacacggcacggctagggccacagcacagcaacacgataaccccagacggagcaaaacaatcacccccccaaaaaggacatagacctatcggacacatttggcccccgcaacaccgaacacaacacccgcaaccgagcagcaaccctacggcgccccgacaaacaccgagacacttacacatcacaacccaccgcccaccgtccacctggacaccgctacaccacgagtaggcacccatagagcccagtacctgacaaccaaacgagcccacaacactccaaggggaacagaccccccaacggacaaccgggcagcggaccaacacacaagggcaagaacgaaaaaaaccacgagcacactacttttgcacaaaaggaatcgaaaagagagacccacagaccacacaagccccgacggaacgacacacacagcacagagcagcagccgtcaaagttgcggacagagccaacacccaacaagaaaaagcacggccccacagaccgccacacccctggaaacgcgccgcctgacataaccagaacggacgcacaatgactcaccaagcggctccgggacaaataaaccaacacgagcagaacacacagtaaaaccaaaaccaaacatgacaatcgacaaacgacacaccagcaagcagcctgtgacggcgaagatcaccagagacaacacacgaccaacaagcacaccacacgacccacgggctgcgacgagaccccaccacccgagaccccaacccaaccaca

SEQ ID NO: 504659 - DNA, 177 bp, Homo sapiens
atcccgtatctccaggcctcagccacaaattgctgctctctcagatagtctctagcagggcatccatgaagtccagaatgacttttgcacgcgcttctaccaagagcccagcaggattaaaaaggctgcttatgagaggcttgtctgggtcctccatgtgtagctccccgagaaaat

SEQ ID NO: 504660 - DNA, 210 bp, Homo sapiens
cattactcgagttctccccctttcagatcagcagcagcattagattctcatagaagtgcgaaccatatggtgaactggtatgtgagggatctagagtgccatgttcctcaagagaatctaatgcctgatgatctgaggtggaacagttcatcctgaaaccattcccccatccacagaacaattgtcttccatgaaactggtccgagcgga

SEQ ID NO: 504661 - DNA, 683 bp, Homo sapiens
ctggtgaatggtatcacaatgcgatgtagagagcttctcatcactggaaaggccaatttcattcttagctcttcaacggattggtgacagttctatgcgatcatctggtcagtcccatgaaagtagctttcgcactatggtgaactcattctcatgggcacgcagctctgaagagtttgggcatttatgctggcagtgcttcagctgattcttggacagataaagtcgttgcaactctacgaaggtgtaaatgctccaggactaactttgctatctatattgttggcaagaatcaatgcgtagaggttcttcaggttcgtacagtctccatctttgattccggttattctgatgttctgcaggtctagcagagttgtgtcaaggggaagatcctttggcactgtgtccagacgcaaatcagaacactggacctctcgaagatggcattgacaccggaaggggcacactgggcctaggtagggctcgaagtcacggtcgtcaggaacttctgggcctatcccagaagcctcatcttctagcataaagtcgaataagcctctctgttgaaacggtgcagcccaggaaactcacaaccagggaaccttgcaacagagttgtaacgattaaatgagatagtggacttctctactgtgtcccctggctcatacaggcaagagtctgcg

SEQ ID NO: 504662 - DNA, 118 bp, Homo sapiens
atatatgtaggatataggtagtggtgtgagcttgaacgcttcttatgggctgctttaggcctacatgggtgtaatttgtactctctctacaggtttttcctagtgtcaaagagctgtt

SEQ ID NO: 504663 - DNA, 587 bp, Homo sapiens
gctgatcagggccgagtatgtctcggcggcgctagacgatggcctcgcacccaggacagtccccctccccggggctctctcctcttgcctacgagtcccctctcctcgtaggcctctcggatctgatatcgtggggtgaggtgagcaggcccggggagggtggttaccgctgaggatgctgcagtgctctgtcgcatatcgagtagagtgtactgacaacaactgactctcagaaactggtacaccagactgaatgcccgtgtcggaaccgcaccctagatgtcatggcaataggtctgtcggttgggaggacgtaagttgagtctgtagcagcagatagatggcctcacgacatgactgcacagactaaggggactctttgcaacatgtaacacgatcctcttgagtctaactcagtttcttagcgctttgacacagagacatgtcgtctagctgtgaatctactggaccgattcctgtctacgatcgaaggtacaggccaagcaccttgggtgtgttggactgagctgcttttatttggtgtcaaaatcactagcagcggaacaggaatgtcccattggcctgac

SEQ ID NO: 504664 - DNA, 101 bp, Homo sapiens
tgggctgttaattgtcagttcagtgtattaatctgacgcaggattatgcggaggagaatgtgtcatgtaattatactacattagtcttctatagggtgata

SEQ ID NO: 504665 - DNA, 90 bp, Homo sapiens
  misc_feature (25)..(25): n is a, c, g, or t
  misc_feature (39)..(39): n is a, c, g, or t
  misc_feature (56)..(56): n is a, c, g, or t
  misc_feature (58)..(58): n is a, c, g, or t
  misc_feature (74)..(74): n is a, c, g, or t
  misc_feature (79)..(79): n is a, c, g, or t
  misc_feature (81)..(81): n is a, c, g, or t
atcgagtgtcatatagctacattcncacccttgtatccngggtcctagagaccctntntcagacagtgaaagtnaaatngnctgaattgc

SEQ ID NO: 504666 - DNA, 1905 bp, Homo sapiens
  misc_feature (890)..(890): n is a, c, g, or t
  misc_feature (1207)..(1207): n is a, c, g, or t
  misc_feature (1477)..(1477): n is a, c, g, or t
gcaccagatcgaactcgcatcaccgtggcggtttctcatcgtcgcaagggctctgcgggaacacggacgagagacgggaagtgcaatggacatcggcggctcctgaagcgtgacggacttcaccagaggcctcgtgtcatggcatgtgtgtgtctgttgccttgtatgacgcggccatgacgtcaggaacggtcgaagagaaactgttggcacagtagcctccgagcagatggcgtggcgttgagtgattagagccaacggcatgcgtccagcgtgtgtagcgagaggatcctcgcaagacacgtttgccaggacgttacacatcccgacagacacgtagtggcccttctgatacgcgcacgcaatgtgcgcgcatggaaccccggcggacatccgagtacgagtacgtaggaattgagccgagtatcgcgatggacgcgacccctcgcacgaccgggctcgggtggagtcggaacgagaggtcgtacacgttgagtcatacggtgatggcagtagggggacgcacaaccaggtgacggtgacccccgtttgtagccgcagaggccaccttattcgtgggaacctagacgtaatcctgcgatagggcgaacgccggggaataaaggcattacttaaccgttaacccctacatactagtttgtgcgcaagaacccaagtgcggaaggttcccgaaataggccccttagaagttacaatagtcttgggagccgaatgtttaaccatggaaaacctgccataggggtcagagcaaagccttggaatttggttccaggcggaaaaaatggccttggtacagacgttggtgccaatacatttgcgcctaggtccatgcattactggacctgacaaaatttgtacgacggttgcancagtccgaacgaaaagctatagtacttatggggcgccactggtctatggcgtggggtccccaaccatatgggagcggcttgtatatgcccctctatgacgaacgcgacgcattgtggtcataaggacctccgtgggcggcacacagtcccacaagaggggtgtaagtaccaagattaatttggcgatccgagcgataccaagctaggacacaccttcgatattgatgggcgtcccgctttggcggaccttagagatgggaataggctcccctcggagagtttctcggaaacggacaacccgtatatttattcaaacngagtatacaggaggtcttgagacagcgggagccgagggagaactcggaatagagacacgagagcacgaaagtacagtccctccacatagagccgcaattggaggttctccgagagggaatacctaaagggacaccaagggcatatatggggacacaccggtccggcccacttaacattgtagagcgtggaagtgccacgtcgacagatccgctcttaggagactatcggcgagatgccaaggggggaccacatggagcattggaggaccncctttaacagtgtatacgcagagaaacacgtactgcacttgtgtgagctccaagagggttgacgccccaaaaatgtgtgactctgtggtgtccccgatggaggcgaccaacgcaacgagctctggttcaccagtataattttggttgacggagagcattgaagaaggtggatttccaccgcgtgtcgtaggatgttgacacacgaccaggacaactggaagcggagactctatgaatcaacaatgaaacgctatgtgatgtcaagatctagacaataaaagaggcggaccaacagagcgcagcgcgagataatcgattcgcgccaccacatcatcgatttgtacacagcagggagagcgatacatagaagagatcaggacgagcctacatgacctgacacagttgaagagaataagatcgatgcttca

SEQ ID NO: 504667 - DNA, 258 bp, Homo sapiens
  misc_feature (5)..(5): n is a, c, g, or t
ctagngtaagaagggcaggttattagagaaattgtgacatatgttgcagtggcagctcagcatagaaggggctacctgcaaagaggcgaaggctggaggaaagtcttatagggtcctgctttagggtgctacgtgtgagatgaggtcattgtgcccgcaggttgtttgtgattagctgtctctaacaattgttcatacgataattgttcattattgttctcaacttggggctctccccaacctggggacccttcctta

SEQ ID NO: 504668 - DNA, 1119 bp, Homo sapiens
gggcgagacggagacggcaatcgcacctggggcctgcctaacaggacccccgattgaagccgtggaacggctcacacctggcactgtgctgcacctgcccacctgtcttccatcacctgccacacctgctggccaaggagagcatgtctgcagcccgctggtgcgctgtgtggccagggcctgcacctggagatgtctgcgtggtgattgggcatcccgagacgtgcgtgcgctgaggtgcactctgtacctgacttgacactcgtgcacatctgctcatctccgacgctgagccctgcaggacgaaggagtgactcgcgtcagtcgtggtgcatgctcgccgaggactgagctcacatgtacactatcgtgccagtgacatgagaatcatcaagtgcctttgttcccctacggacgatccaattctggtgctcctgcgtggtcatcgtcaccctacccccacacttctactcgtgacttctcccgagctccgagcagtcctgttgggagaccccaatggagagagtcaggtggaggaacaacgcggaacctcggattacttgcttcctcatgatagtacgcgcagttccacacgtgcatctaactaacgtcgacagctggacggatgacattcgttgggccacaagcgccacaacttaccttgagcaaccatgacacgcaactttgcacgtgcagcacgccttcaggaggactggctgatacctggaagtcctacccacgctgggcttcactccggtcaagactgtccacagtcgctggaaccttagccctgatagtagaggttcatccgtccatgtacatacccgggaacaagcccagtcgaagttggcctccgctgggaacccactacttcctgtgttgcgctgacacatggccattgccagccccactgatcgacaccggagtggcgccacaggccaaaagtgtgaccgcgggtgccgcatccggcctcactcattggtagaaatcctgcgtttgacaaggccggtgtcccgtgtctatcccctgccatagcgttgtcaggcgaaaacactatcactaccatccgtcatgtgcctgtgggcacgtactcacggtaaacgctggtgcatggctcac

SEQ ID NO: 504669 - DNA, 97 bp, Homo sapiens
catggtcgaactcaagcttctaacaatggacggggacaaggttgtggttaatttggtttatttttgttccccaagttaaataaattataaaactcga

SEQ ID NO: 504670 - DNA, 770 bp, Homo sapiens
tttatctgcaagcatgagagtagtgtaactatgtatcaagcattatgggggcctgagagacgagccagagctccatggtgtagcagccccgaggcggtagcattcagagcctccagtgacctgtggggctggaggtgaagtatgggggcccatggatgctgctgcatggtgctcaccctcctctgacagcactggtgcccatactgtgtgctgacgccggccaggagctaaccatgaaggctcagcttcccgaccagaaagccctgagcctagtaagctgtttcagcggggaggcgtcttatttggccacttgtctcctggacctgctgaactgactacctggactgccatagatgaggcccatggcagaccttgcacgtgacgctccagatacccacatgcaagagttcatcctggccatgggcttcttcctggatcctggatgatggagcagatcacactggcttacaaggagcagacagggccgtacaactcatggaggaaacaagggctctagctagggcaccagtgaatggtagggccagaaacattggacaatgatgggaccaggggtcccacaggacgagtaggagcccctagacaaccccctcagacttgcaatgcctgtgtaactaggatgttcttccctgcccctccactccgtgtacgaggagctggcggatagactgaaagaagacgggctcaaggaccatggaactgtgctgggtttgttggtccaaaggacatcctgatgacaactgcctaggatt

SEQ ID NO: 504671 - DNA, 250 bp, Homo sapiens
  misc_feature (145)..(145): n is a, c, g, or t
tgcttcgatcttatcatgttatctggaactcatatattattagaagtatggttccctttgtacagtttaatactggaatgtggaggtaggtcctatttgagataaagatgtagggagtccttcttactcctcattctcaactganccagctagaaaactattaagtataataattggatttataaggctttacatttgtactttacttttaaaaaatgtagtgtcttgtattatttaaatctaccggggg

SEQ ID NO: 504672 - DNA, 1004 bp, Homo sapiens
  misc_feature (815)..(815): n is a, c, g, or t
tggcggttcctggacacacgacactgcttcaaggagggtctacccatatccctgaaaaacggcaggaaccgggtgtgtgggaaaaatacatctaaaaaccgctgctgcgacaggcaccccgtacccccggtcatcgcttggagactggggaagaagagattcccggcaaagtgtggaccaaggaaccgtgcaacccgggaaaggtcggccccgccacagcatttcgccccggggggaaaaatccagggaaaccagtgggccaaaaaccgggcgcgggccccccagagacaaaaaatcctccggagcgccctcgatcccaggaacccaaattgtggaggatgcctcacagaaagttaactagaagggacgtttcatacggggggaaagaagctaaaggaaattccccggagctaatgggaagaaatcaataagggcccggcatctttccaaggagggttgatgggcctgaattgaagggccagaaggtggctaatgggggcacacgggatgccgccactacgcaacaatagcccccaccatcctcacggacgggacccccagtccccggtgaagcaagaggagatctcgggccctggctgcccatcgtggccggcgcagcctggaggaggccatccagttcatcaaccagcgtgagaagccccccggccctcacatgttctccagcaacgacaagggaacagcggcatgggatcctaccatggcaagaagagcttcgagactttctctcaccgccgctctgctggtgaggccttgatgaagagaaggctgaaggtcagataccccccgagcccgcnccaagatgaccagcactgaggaggggttgctccgctggccgggcaatactgtgtccatcggagtgcgaccaccctcactgctctcctggcctggagaatcgctcctgcaagccccagcccagcccactcctctgctgacctgctgacctgtgacacccactccaatggccaacctcacattcaagttta

SEQ ID NO: 504673 - DNA, 1421 bp, Homo sapiens
  misc_feature (1004)..(1004): n is a, c, g, or t
tgcagccactccctccaaccgccacaagcagcaaagggcatagatgaccacaggagagccctagggggaggccggctccaccagcagccccatacatggcactcccaggtaccccctgggcaacgtggatgacagcaggtctaaggacagcccagcaggagagccccaaggtcaggtcccactcacagcagatgtcttggcagtgagcagctctgtcgcatccactgactggcaggatatagatcaggcctccttcaagacggccacccccagggccatatcaacatctggagacaaagacaagagtgcagttgttccagaacacggccagaagacacccagaaaaatcacacctctgcttcccagccaaaatccaagtcccctgcaagtgtctatgagccttcagaatccagcgtgggacaggcaggttcaagacgcaaggacaagtcagagtctagtggttttcccaagtcacctcctgggtaaagacaagatgtcacaaatggcgagtgttcctgagagagagccggagtcagccccctctgccccgagtgctgagctacagtccacccagcacatggaggctcagcccgtcgagagtgatgctgaccatgtcacagcaggtgccaatggccagcatggccctcaggctgccagcaccaccaagtctgctgaggagaaagctgagcatccaaaggccccacaccctgaagctgaagctttaccatctgatgagtccccagtggcaatgggggcaaatgtggtggacagcttaggagacctgcagacttggttcttccctccactccagcaggcagtgtgtccccgtcgcctggcccccacgaggtggccctggggagaaggcccctggaacccagcctgtacacggccagtgaggagaacagctacatgcgctccatgaacagcctgctggacaggggcgaaggctccatcagctccctggcagacatcctggtgtggtccgagaccaccatgggcatggncatagccacaggcttcctggattccggccacagcactgtggcagacctgctgcacagctcggggcccagcttgcgctcggtccccagcctggtgggaagcgtcagctcggccttctcctctgggctggtgtcagggaccagctcagccctgcgcaccatcacccgtgtgctggagacagtggagcagaggaccgtggagggcatccgctcagccatgcgctacctgaccagccacctcaccccacgccaggcccaggctgaccccaactatgattagagccctgcacagggacccccgaagggctggttcagtggcctccagagatccctgggaccctcacgccctgctcccttgcccattcttgctctggacggttcccccagcccatgcaataaatcaccagtgagcatttaaaa

SEQ ID NO: 504674 - DNA, 142 bp, Homo sapiens
ctgtcacccttctgtgttctcctctgcgaggtcgctccctgatggtgcgctggctctcatcatttcaaattttaatttagcatgaatgaaaagatgtgaacttgtatatgtccttattttctacaaacaagccatggatcga

SEQ ID NO: 504675 - DNA, 100 bp, Homo sapiens
aatgcctttcccagctccctgatacaggccaatgtgaccgtggggacttgctcgggcttttgttcccagaaagagttccccttggccatttttagggcct

SEQ ID NO: 504676 - DNA, 143 bp, Homo sapiens
  misc_feature (135)..(135): n is a, c, g, or t
gaattctggatcctccttcagggaaaggggcaccacatatctgtcctgtcaccatggcaaagctggaagggtctgcaaacctacccaccatgctgctggtgttgttgtaaccaaccaaaggcaaattctcgccangaaaaatt

SEQ ID NO: 504677 - DNA, 469 bp, Homo sapiens
tgaggtgccttcccagtggcctggcttgtcggagcaagtttcatcagcccctagggaaaacacggccctcctgggaaccttccttacctggagtaaccggacaccttagacggaggtgcctgagggtggggtgggatttgcagggtcattatcagaacatgaggataacttccttgcccctgctctgtagccacctccttggcaccggcctctatttgtcataaggcggcgtgggcagaagcctgacacaggccagccttggcacgaggggggccaggggttctgagaagcgctgccctgtgagaccacgctggcctgtgagagccacgctggccttcgtctccatctctggttgacgggctgtccgtgtgcctcctgtgtgtctgcagacaagtcttgctgtgctttatttgtgaaactttaatgaggaaaaaacaaataataaatgttctcgttttgaaactcaaac

SEQ ID NO: 504678 - DNA, 213 bp, Homo sapiens
attaacaggctggtgagagaaaaatattttacattttctcttaaaaataaccattgtctactcggagtattcatcacacatgacagtgggaaagcacttatcctgggatgcagtagaagttactaaaatgtagcttaagcttgtaatcccagtcattctcccaatagctgctcagaagcatgcgtgtcgaaagattcccaatgtcttagacat

SEQ ID NO: 504679 - DNA, 271 bp, Homo sapiens
cagtaagctctccttaccataaatgtttcttggtcgacaacatctaagacaatattagtgggatgaaaaacgaggagctggggtgcttttggaagcattgttagtgttcctcaaaagtcggaacacttgcctgttgatatattaataagaccttaaaggcaaattcttatgttggcctgtcaaatgatttggatgccactctgcaaagtatttctaacctttaattcccagttgtaaaacagatatcataacagcatttaattggaatata

SEQ ID NO: 504680 - DNA, 530 bp, Homo sapiens
tgaggtgccttcccagtggcctggcttgtcggagcaagtttcatcagcccctagggaaaacacggccctcctgggaaccttccttacctggagtaaccggacaccttagacggaggtgcctgagggtggggtgggatttgcagggtcattatcagaacatgaggataacttccttgcccctgctctgtagccacctccttggcaccggcctctatttgtcataaggcggcgtgggcagaagcctgacacaggccagccttggcacgaggggggccaggggttctgagaagcgctgccctgtgagaccacgctggccttcgtctccatctctggttgacgggctgtccgtgtgcctcctgtgtgtctgcagacacacaggtgagagccacgctggccttcgtctccatctctggttgacgggctgtccgtgtgcctcctgtgtgtctgcagacaagtcttgctgtgctttatttgtgaaactttaatgaggaaaaaacaaataataaatgttctcgttttgaaactcaaac

SEQ ID NO: 504681 - DNA, 598 bp, Homo sapiens
  misc_feature (231)..(231): n is a, c, g, or t
cgcaaaggggtcgggtccctttcggagagcccaaaggtccgtgtgggggtgacgcgcccccctcttatttccgctgggttttacccctgcggtctctgcgtggggcccacccttaacattcccgcgccgcaatgggcgccttgtcttctccgagggcttgccgcgccatttattctcgtcgccctctcttgttgccccgcgggatagagggtgcccccttcctccgggcgnagtataatagtctcacaccccctccctcttaacccccgccgcggttcaatactgagacccttttgcgcccgggttgtttgcgagcgcctcgggcaaagtttcatatctgggagcgttcctttcccaatattggggctcggtgaactcttgtccaaccacgcgtgcgaggtgcacgaaccaacacggaaggtcctcgcccccctccactcggttcgggtctcaccggctaaggagaaaacaatattggcgatccatcagtacaaaaggaattccgagagaggttcttgattgatgaacagggccttgggttttttggaaaaaccccttttaaaaaaaggtccaaaaaaaaggggaccccccaaaaaaa

SEQ ID NO: 504682 - DNA, 444 bp, Homo sapiens
tgaggtgccttcccagtggcctggcttgtcggagcaagtttcatcagcccctagggaaaacacggccctcctgggaaccttccttacctggagtaaccggacaccttagacggaggtgcctgagggtggggtgggatttgcagggtcattatcagaacatgaggataacttccttgcccctgctctgtagccacctccttggcaccggcctctatttgtcataaggcggcgtgggcagaagcctgacacaggccagccttggcacgaggggggccaggggttctgagaagcggtgagagccacgctggccttcgtctccatctctggttgacgggctgtccgtgtgcctcctgtgtgtctgcagacaagtcttgctgtgctttatttgtgaaactttaatgaggaaaaaacaaataataaatgttctcgttttgaaactcaaac

SEQ ID NO: 504683 - DNA, 280 bp, Homo sapiens
  misc_feature (138)..(138): n is a, c, g, or t
  misc_feature (179)..(179): n is a, c, g, or t
  misc_feature (193)..(193): n is a, c, g, or t
  misc_feature (266)..(266): n is a, c, g, or t
caaaattcaaataatagtgatgcctcctattaaatttcttttataaaaaggcattcaaaggggggaaactgaggcagaaatttcaaaaataaatatgccatttcattcactccaagcaaaagtttaacaggtcaaggncaagggttaaaaagaaaagaacaagttttccctcggcctancaagctcacttcanggacagttataagataatgttgtttgagaagccaagtccaaaggaatgggttccagacatccctcccctctanaacaaggttgaagg

SEQ ID NO: 504684 - DNA, 225 bp, Homo sapiens
aatgtggttcttgggttttatttcccccccaagaaaagagggtctggctctgtcaccggggcgggagtgtatgggcccaatcatagctcattacagcttcgacctccgccctcagctccctgagtgccggggactccgggggggccacatcaccccgggtccccaactaagaaaaggtcctggaggggcagaagaggggggcacctctaagaagtcgcacggcag

SEQ ID NO: 504685 - DNA, 85 bp, Homo sapiens
gggttccggtctgtggagaggttgtgcggcgacagtgaagactgcttatcccagcattcttgctgagctcgcatgtgctgcgggg

SEQ ID NO: 504686 - DNA, 292 bp, Homo sapiens
  misc_feature (4)..(4): n is a, c, g, or t
  misc_feature (20)..(20): n is a, c, g, or t
  misc_feature (48)..(48): n is a, c, g, or t
  misc_feature (144)..(144): n is a, c, g, or t
  misc_feature (284)..(284): n is a, c, g, or t
acangcaggataaactgatnggaaataagggaacaacagctgtcagcngtaaacacggaaaacaagcagaagaccccatcacaactactcatccgcctaaggactggggctgggttttgcagagctgcactggcttccacgganaggccaccaaagtcgattttttttttcagacaggacttttttagggaaggtacagcatgcattagatggggaaataagggccatgaacatggatctgttagtaggtctgtgtttcttagaggagtctaccagggctggtnacagtttc

SEQ ID NO: 504687 - DNA, 519 bp, Homo sapiens
taaagacagacacctggggcaagtcagacactctggacaagacagacactaggggaaaagataacactggtattaactctcgaggagtttcctcaccaataaacagacaacctcaacggccagtgccctgcagcctcgggccacagcggcagcctggttggccttcccacctgcctctgccacaccgggtggctgaacatctctggtcgcccagaggccaggtgggggccatcctccaaggagggatctctgccctcaccgccggccacggggcaggatccctttcctctgcagggagaggtggctcctcggccatgcagccccgggcaggttccttctaaacatgcctgtggaccgggagctggcgccaccaagtccagggccttgccagggccagacaggtaacacgcgtgaacccgagggacagctcggaggggcggtaccggggtcaggagacaaagcgggcaggggcaggggtgaacgggaggcaagtcaagtcaccggtggcctgtggggctg

SEQ ID NO: 504688 - DNA, 416 bp, Homo sapiens
  misc_feature (372)..(372): n is a, c, g, or t
  misc_feature (399)..(399): n is a, c, g, or t
  misc_feature (416)..(416): n is a, c, g, or t
tcgaactcgagcttagtaccctcgataagggccaccacagcagtaagtaaggtgtatcgggaatgggtggggtatggggagcatcgtggctcacgctgcgggggactgtgggtgacagtgcgccaatggagtgccagccgtcacaagaggtatctctagtcatgtgtggaaatgatggaattagtgcctggtgacacacccctgcccacgcctacgggatgtatcccaatatgccgccggccgcaacactcagtgccgcaccatcaagagcccccttcctctgatgaggcagtggtcgacagacatgggcctgaggcggcaagtggagaatgggaacatggagcgtgggctcagaaccatgaaaacattggnagaatcttagctgggactttggccttnatcgagggggatcctcn

SEQ ID NO: 504689 - DNA, 396 bp, Homo sapiens
actcttacacgtgtggcaacctcctgtcatttaccactttcaacaagatgacagagcgacctgctcagatgctgaggggcggggactgccaggaaagatggctaggaaacccagtcctctccacaccctatagtaacttgatgccttgtgagggacacaggcgaagttcaattccttggaggtcaagggagactgagcagagtacagctgcagcactgagggagtgactgaacttcttaactggggatggtgggaggcttcgcagctggtgaggtggcatttgcagctaggcctctgcacagaggagcaggtcttagcaacttgcattttaggtagtacagcattgcgcgtgcaagggtgacactgtgagcggggatggcattcaggaaaatccaa

SEQ ID NO: 504690 - DNA, 358 bp, Homo sapiens
  misc_feature (6)..(6): n is a, c, g, or t
cctagnagaaggaacaactgagtgctcaaaaactatcttgtacagattctcagacctaccatgggatggaacttacttatgagccccagactccaaaaacatcacatcctaccagattcatggctgaagcgtctgaaacaagactaacaagactaacgagattaacaagagaaaaacatacaaatttttaaaatataagttgtatgtgacatagaagcatttataaagaaaagaagaccagaagaaacgggtagacctgggtatttttatgctacttttgatgaaaatgggaatgcttttggagacgcatgagtgaataaaaaaatatgatctaatggtaataaactagaggaaacag

SEQ ID NO: 504691 - DNA, 347 bp, Homo sapiens
  misc_feature (5)..(5): n is a, c, g, or t
  misc_feature (9)..(11): n is a, c, g, or t
  misc_feature (24)..(26): n is a, c, g, or t
  misc_feature (37)..(37): n is a, c, g, or t
cctangtgnnncctctgtcacccnnnctggagttcantggcatgatatcggctcactgcaacctctgcctccccggttcaagcaattctgcctcagcctcccaaattcatggctgaagcgtctgaaacaagactaacaagactaacgagattaacaagagaaaaacatacaaatttttaaaatataagttgtatgtgacatagaagcatttataaagaaaagaagaccagaagaaacgggtagacctgggtatttttatgctacttttgatgaaaatgggaatgcttttggagacgcatgagtgaataaaaaaatatgatctaatggtaataaactagaggaaacag

SEQ ID NO: 504692 - DNA, 1273 bp, Homo sapiens
  misc_feature (5)..(5): n is a, c, g, or t
  misc_feature (9)..(11): n is a, c, g, or t
  misc_feature (24)..(26): n is a, c, g, or t
  misc_feature (37)..(37): n is a, c, g, or t
  misc_feature (1187)..(1187): n is a, c, g, or t
  misc_feature (1200)..(1200): n is a, c, g, or t
  misc_feature (1203)..(1203): n is a, c, g, or t
cctangtgnnncctctgtcacccnnnctggagttcantggcatgatatcggctcactgcaacctctgcctccccggttcaagcaattctgcctcagcctcccaaattcatggctgaagcgtctgaaacaagactaacaagactaacgagattaacaagagaaaaacatacaaatttttaaaatataagttgtatgtgacatagaagcatttataaagaaaagaagaccagaagaaacgggtagacctgggtatttttatgctacttttgatgaaaatgggaatgcttttggagacgcatgagtgaataaaaaaatatgatctaatggtaataaactagaggaaacagagcaaagtctgttcagatcttctctgtgatgctttgtcttcagagctccttcagggttggaaggaatacctttacttgggggcatgtcaattcgtttttctcacttgattcatctttatgacttcctgaggacagatctaattctaaagtaaccagaagcctggccatctcagagcagcaaatccctcaaccttggagcacaaatgatcgctgatagagtctgcataaaatcatcttcctctatctgacagccatgagcagagccttgggggtaaaaaaagccacagccttaaatctcttcactcagaaattaccatgaagataaaataaataaatggaaaggactatcaagaagccaacaaaacataaacaccaaaccaactcatcttgtttcactttggaaataaactgttcccagatgtgagaccaacaaaattaatattaagcaattaaaccagtaaattataaactgatttatcatttgggaagtttaaagtacagagagatgaggtacctgtagccagaattacacatcatttcaaaatatgtagacaaaaagaaaactgaatgaacagagaaacattgcagcaatgcacagtcttaggacgaatgttgctgtttgcagacagagaatgtttgccatcttgtgtatagcctcaaagccatactgagataatagcattgttgtcaattgcttgaaaaattttcacattcaatccttcatgctatattggttggaagaggagggaagtcagttcttactgattacttctcagtgaacttctaatatttgcactggcacttccattcagggaatgaggtgggctggtcttcgcccanggcccataatttnaancacacaagcgttttgaggatccaaagggaaaaggagatttcaaacttgatttctcctcaaaaaaaaaaaa

SEQ ID NO: 504693 - DNA, 957 bp, Homo sapiens
agcggaaagatggcagcggctggagctggccgtctgaggcgagtggcatcgtgtctgctgctgcggatcccccgcctgcccgaccgggagtctgtcggccccggaccgtactctatcacaagaatggttgtggactcattatgaaaatcctataacacgtagggtcccattgacaagcactatctaaagaaatgttgcgaacatgcgacctggattggaggcgtctcctaagacactgtgagatcggacgataatgagatagttcacacgacttcaatctggtactgaagaagcgggaagattagtgtgagtgcctaggttttacactacactttggctgtgggtaccagctagatttgcctccatttgtcattagccactgtaatgcctgacatggaaagacggtggacgaagccttgcactatctaaaagacatcgagtatgtctgccaatgggagcctctgtcattcctctccgatgtaaatcatgcttcatgcatctcatgcatgtgcttgaacatgtcatatctaatgtcgcgtacctggacgtgacttatcgcagatttgtatgacatggaaccccttgagagggacgtaggctagatgagtaaatagagccctcccctcggacgatgcctccaagtcacggtccacgatccacgtcttgttttccccaacctggcattgtggcttatcaccccttgtgacttttcacacatgccgtttttcgctcttccatcgtggaaagagtctatgagactatcgcaacataatattttattgcttgtgtcactggtttattgacctcgttcgatgcgaagccgtaattacgacagggtttcagttggtttctgaaatccctggttggctaaccctttcagcgccatcttttttaatcggcctataaacctaactctaatgttattaatagcgaaacttggggttgttataaaacctc

SEQ ID NO: 504694 - DNA, 1250 bp, Homo sapiens
tctggagtgtcggggatatatttaacggggggacccacacaaggttataatataattgtcgccccccttgtgtgtagttgccccacaatgttttataaaaggggtggttgaaccaccttgagaacagtttttggcccccgctgctccttcaagttttattcatacatatgtgcctctttcggtggcagaaccgaccaaatggctttaggcaaccccccgggccaaaaggggtcaatccccagtggcaacacttttgggggaaatctcgtgagaaaagggatcttatttgtggccacccacggttccaacatgcgcaatcaagtgtggcccacgcccccggaaaggacttcggtggatatgtgggcccccctcccggggggaaaaacttgtttgggccgtgtatgtcgcccctcgcgggggctttttcacacgagacaacttcaagtctccctcgtcccgtctatcatggcgcgcttgtccaaaaggccttgttggggcacaaggttcaaatcccttgaggctttaaacgggaaaggcttcatcttgggcaatgggccctttcccggggtcccccaccgtgcgcacaaccggtgtcacaatggtgggagcactgagacctgtgccgtttttaggagaaaaaaccctgtcccccaaaatatatgagattgaaacacttcacacgaaagtgtgtgtgtaaagcacacgggcgctccgcgagggggccaccctcacaaaaggggcactcacctggggggtatcacctgagaggcacccacgggtgggttctctccttcttgagacttttcacacacacggcgagacacacccacacttccttccacccttttagaacgcctgtgggggttggcacttggccctctcacaccgaaccacctttgtcaaaggtcaatttcctggtaatgacacacgagaatttggctaacaagcaaacacagggtggtggagacctctaatggcgccacacacatggccctccacaaggaggtataagagacccctggagccacccagccccacgcaagaggcaccaagagggaaagaagagaagagccctcaactgctggggaggtccctgccaacacactcacgtcccccacccaccacctgaaatctcccctcctcacacacaggttgccacatgtagagaccccttgaagaggggaggggcctagggagccgcaccttgtcatgtaccatccaatataagtaccctgtgcgtcaacccacca

SEQ ID NO: 504695 - DNA, 984 bp, Homo sapiens
  misc_feature (5)..(5): n is a, c, g, or t
  misc_feature (9)..(11): n is a, c, g, or t
  misc_feature (24)..(26): n is a, c, g, or t
  misc_feature (37)..(37): n is a, c, g, or t
  misc_feature (898)..(898): n is a, c, g, or t
  misc_feature (911)..(911): n is a, c, g, or t
  misc_feature (914)..(914): n is a, c, g, or t
cctangtgnnncctctgtcacccnnnctggagttcantggcatgatatcggctcactgcaacctctgcctccccggttcaagcaattctgcctcagcctcccaatccttcagggttggaaggaatacctttacttgggggcatgtcaattcgtttttctcacttgattcatctttatgacttcctgaggacagatctaattctaaagtaaccagaagcctggccatctcagagcagcaaatccctcaaccttggagcacaaatgatcgctgatagagtctgcataaaatcatcttcctctatctgacagccatgagcagagccttgggggtaaaaaaagccacagccttaaatctcttcactcagaaattaccatgaagataaaataaataaatggaaaggactatcaagaagccaacaaaacataaacaccaaaccaactcatcttgtttcactttggaaataaactgttcccagatgtgagaccaacaaaattaatattaagcaattaaaccagtaaattataaactgatttatcatttgggaagtttaaagtacagagagatgaggtacctgtagccagaattacacatcatttcaaaatatgtagacaaaaagaaaactgaatgaacagagaaacattgcagcaatgcacagtcttaggacgaatgttgctgtttgcagacagagaatgtttgccatcttgtgtatagcctcaaagccatactgagataatagcattgttgtcaattgcttgaaaaattttcacattcaatccttcatgctatattggttggaagaggagggaagtcagttcttactgattacttctcagtgaacttctaatatttgcactggcacttccattcagggaatgaggtgggctggtcttcgcccanggcccataatttnaancacacaagcgttttgaggatccaaagggaaaaggagatttcaaacttgatttctcctcaaaaaaaaaaaa

SEQ ID NO: 504696 - DNA, 1335 bp, Homo sapiens
  misc_feature (197)..(197): n is a, c, g, or t
  misc_feature (784)..(784): n is a, c, g, or t
ggcatcctggccgacgagatgggcctggggcaagagcatccagaccatcgcgctcgatcacgtacctcatggacgacacaaactgcagtcattgggcccttcctcgatcatccgtgtcgcgtctctcaatcggctgttcaagtgggcggaaccgcgagttgcgacgaacgtggagcccctctcccgtcgtgtcgaangagtgtcgtctacgaagggcatcaccgcaagtacgctaagacgagggcactattgtccgcgcctagcgtcccgcgcatgtgggaacgttcaacggtcgttagcagaacgaccgtacagagtacgatcatccagacgacgaggcactattctctggcaaggatcgcgtgtcgcgaaggtacattgcaatctgtgtgcaccgaatgcgtcgacccgcgatgacagaacgctaccaattgcaatgcgttgacggcacgagttgctcaaataactgcacttattgtaggcaaacaccgccagccctcgctagctatgaccggagtccaactacccagctttgccatgtacatctaaggctatcccacagaaggtctgcgtggtgtggcgccctcgccattctacaacgtggtcatcttggtcgttgccccctatcacgagttctttccacaagaaaggtcttcgtgaagcaaccgcttttccgaacggcaaggtagcgttctgtaaagaaggccatacgaccgtgttctgctctcaatgggaacccccggggggaacagaccacgggcttgtggaccaccttgcaataatntgaaggggtacggggaaagagtccaattggcctccgagtgctagtccgccgggggcgaatcatgcccccacttcatgcgctagcttgaagcgggcgacatttcctattgggcccccggagcggcaatttgccacccgcaacgggacaggcacacacaagggccaccacagaggttcagccccccggaaaagaagggatcccccagatgatccgcttcgcatccctaagctagttggcagaacgacctagattctgcgacggccttgggagttctggaaggtcagccttcttacacgggggccataccactaagcacgttagccccaactggtgtactgtgagaagtgggctcggaacctggcatcgtgggctgctcgccgacatagcggacccacttgaaacgggacccaatggctggacacctattgtagcggccagcatggaaagcgatccaattccttaggccacgcactacgccggaaacgtaaggatagcacagaccaaccacgctaacaaatagtggcccaacgccaccaataggaccgccattc

SEQ ID NO: 504697 - DNA, 450 bp, Homo sapiens
tggggccctttggggggggggggataaaggggggaaacccgggggagggggaaggttggaaaaaaggggaggggggggtaaaaaaatccccgggggggcccaattagggtccccggtgctttctgtagaacaaaaggggtggccccaacagagggagcgtctgataaaaaaagcagcaaggcgggggcccgggggataaacaacgagccgtggggggaggaacaaaccgcgtcacgcggggactctgggagaggagagacccaatcctcgcgggggggaagcccctacgggggacaacaaccccacagagagaagtttaaacccgccccaggggaaacatacaaactccacggtgggtagtcggggtgacaacaaccgcgaaatcgcggcgcgcgaaaaattcgcgcacagggacacgacacaaattacccccgggccacagaaaacagt

SEQ ID NO: 504698 - DNA, 112 bp, Homo sapiens
aagacccttcaaatgccagcaccacagctatgccagtgacccagtctgtcaagaaacccaggtaaggcctgtaagaagaaccatgcttttaagatgtttggaaggccttccg

SEQ ID NO: 504699 - DNA, 1286 bp, Homo sapiens
  misc_feature (5)..(5): n is a, c, g, or t
  misc_feature (9)..(11): n is a, c, g, or t
  misc_feature (24)..(26): n is a, c, g, or t
  misc_feature (37)..(37): n is a, c, g, or t
cctangtgnnncctctgtcacccnnnctggagttcantggcatgatatcggctcactgcaacctctgcctccccggttcaagcaattctgcctcagcctcccaaattcatggctgaagcgtctgaaacaagactaacaagactaacgagattaacaagagaaaaacatacaaatttttaaaatataagttgtatgtgacatagaagcatttataaagaaaagaagaccagaagaaacgggtagacctgggtatttttatgctacttttgatgaaaatgggaatgcttttggagacgcatgagtgaataaaaaaatatgatctaatggtaataaactagaggaaacagagcaaagtctgttcagatcttctctgtgatgctttgtcttcagagctccttcagggttggaaggaatacctttacttgggggcatgtcaattcgtttttctcacttgattcatctttatgacttcctgaggacagatctaattctaaagtaaccagaagcctggccatctcagagcagcaaatccctcaaccttggagcacaaatgatcgctgatagagtctgcataaaatcatcttcctctatctgacagccatgagcagagccttgggggtaaaaaaagccacagccttaaatctcttcactcagaaattaccatgaagataaaataaataaatggaaaggactatcaagaagccaacaaaacataaacaccaaaccaactcatcttgtttcactttggaaataaactgttcccagatgtgagaccaacaaaattaatattaagcaattaaaccagtaaattataaactgatttatcatttgggaagtttaaagtacagagagatgaggtacctgtagccagaattacacatcatttcaaaatatgtagacaaaaagaaaactgaatgaacagagaaacattgcagcaatgcacagtcttaggacgaatgttgctgtttgcagacagagaatgtttgccatcttgtgtatagcctcaaagccatactgagataatagcattgttgtcaattgcttgaaaaattttcacattcaatccttcatgctatattggttggaagaggagggaagtcagttcttactgattacttctcagtgaacttctaatatttgcactggcacttccattcagggaatgaggtgggctgttatttgcacagatggtcccatgagttttgagaccacagcaagcagtttttttgcaggaatccaaaatggaaaaatgtaagaattctcaagacattgatatttcttctttc

SEQ ID NO: 504700 - DNA, 685 bp, Homo sapiens
gagtctgatctgagaggccacaatggtaacaaaataagcacttactccgagccaggcactagctaagcactgtacctggactggctcatttgatctcatgttatcaatgttcccatttcacagatacagacgctgaggttcagagaagctaagggctttggccaagagcaaatagccactaaatgacaagttgagtcccagccgagtaccacccaaagaccgggctttagttttaaccatggcctgtgctgtctctggacagtgtcacccctggctccctgccccgtgagctgggtggtggtctctttccaggagtggggcaatggtttgagccccaactgcagtggtttttgcctagattcagggactgtaactaggtactcagataaactgcacggcctcccaacagccctgggaagtaccccactgtagctcagaaactgaggctcaaggaggccaatccacctgcccaaagtcacactgctgctgagtggcagggccaggatgtgggtcccgtttccttctgcagcaccaacactacttaaacctctttgtaactccctcaacctcatgcagagagaagatcctttcattcttagcaaaccttacagtgaaactgagacttctcacagggaatcaaatctccatctggggaagtgttcattatttgacccagaccagccat

SEQ ID NO: 504701 - DNA, 439 bp, Homo sapiens
tgttcctgtatcagccagagggtgttcaggtcttcatgcagcagtcagggctgcaagccctggaaaggcatcaggaagaggcccagttccaggattgtgtgtatgctttccagcagacagctcttcaagggtgatcttgtttttcaatgtccctaattcccttttatggtgacatgagggttggtttgtccagtagagcgtcctccgatttaggcccgtaataaggtcgcatgttctttgctttcaaacataaccgaaggccgttgggtcccaggtcatccctttggcatggacgagctatgcagggaggagcatgaagaacgcccttcagtgggtacatggcctacatgcggccgagggtaccttgaccgtctgggaccggtcatgagccctctcgtgccccatccacccagacaagcaataaaagtggtttcctccc

SEQ ID NO: 504702 - DNA, 665 bp, Homo sapiens
gtatctaggtgactctaaggatcccctatgctacctcttcatcatatatcctgacacccagttgctctacagccagatgagtcaggccagtcctcagtgcctgcgcaagaacaggactcatcttctgagaaggatggatgcagcccaacaaatgggacaaggaccacattcggtgtgccatgagttgcggtcatgatcttcagcaagcggcaccaggccctggcagggcgcaccagggtcaccccaaccaggataaccggaccgtcagccagatactgagcaagcggtggtacaccctgggggccaatgagacgcagaaataccacgacctggccttccaggtgaaggtggcccacttgcaacaaggaccgaaagaagtccagctcagaggccaagcccacaagccaggggctagcaggagtgtaacaagggctcgtgggagcggagaatatcagagacgggcactgccactgcccctggggtgtccctctgaactcctgtcagttgcagcccaaacactccagagctcggataccaaggagcggcttctgtggggcagaatggctgcacacagtcagggaacctggcttagcctggcccaaagcttctcccacagtggggaaacaacctggacggcaggaaatagaccgtcaggcctaacggac

SEQ ID NO: 504703 - DNA, 183 bp, Homo sapiens
tgcctcggctctgacgtgtctcggtctaccttggctcggctctaccttgtctcggctctaccttgtctcggctctaccttgtctcggctctaccttgtctcggctctaccttgtcttgggttaatcgtgtgaccgcggtggctggcacgaaattgaccaaccctgagacaaggtagagccgag

SEQ ID NO: 504704 - DNA, 198 bp, Homo sapiens
acccccgtgtagtgcagtgcagcctttatctgtggctgaaggtctgagagcccctggtgtaggtccaagagtccaaaagctgaagacttggagtctgatgttcgagggcaggtagcatccagtaatggagaaagatggaggccagaagacctagccagtctagcccttccatgttcctctgcttgctttgatcctatc

SEQ ID NO: 504705 - DNA, 302 bp, Homo sapiens
ggctgcagtcagtgagatttcgcgtccagggcgttgcaggaagtgcttcgggagcggatgctcgaaggcagcatgctcgttacgagtcatcaccactccctaatcttaagtacccagggacacaaacacttcggaaggccgcagggacctctgcgctaggaaaaccagagacctttgttcacttgtttatctgctgaccttccctccactattggcctgtgaccctgccaaatccccctctgcgagaaacacccaagaatgatcaataaaaaaaaataaataaataaataaaaaagagcaaa

SEQ ID NO: 504706 - DNA, 412 bp, Homo sapiens
  misc_feature (291)..(291): n is a, c, g, or t
  misc_feature (293)..(293): n is a, c, g, or t
  misc_feature (387)..(387): n is a, c, g, or t
tgtccatataattactgtttattgaaagaaactattccttagcccacacatattcatgtttcatagttcaggagcgcaggtcagcaatgaacttctttggagcgcaatccaaagaattctttgcattctgaaatcacttggcactctgaaagataccagcctttcctcatctcttcgaaatctttcatggaatcataatttctgtagaattctgcatacgccttctttcttggctcagcacgccaaacttataggcagcggcaactcccagggccacaatgaatgcgccanantatgaacccgcagacgcttggccagaagaccacgcatctgtggtttgggcaacagcgcaccggaactcatggtagcctcgtgccgaattcgganagaagaaccatttggacatttcaga

SEQ ID NO: 504707 - DNA, 773 bp, Homo sapiens
gaaaatagaaagggacctctttcatataatgcttgtagtttcagaattaacccccattcaaggtcatccacttcaatttagtgcctacttgtgccaggcactgtgctgggtactgggaatggacgttaatattatgatgcagaccaggtttatttcatatgttgcttgctttatggtcttatcctcttgaataaaaaagagaagtaacaggccagatgtagtgactcacgcctgtaatcccagcacttggaaagctgaggcgggaggattgcttgagcccaggagtttaagaccagcctgagcaacatagtgagaccccatctccacaaaaagtgaaaaaaattacctgagcatagttgtgcatgcctgtattcctaaccttgtgaggggctgaggtaggaggatggcttgagcttgggaagttgaggttgcagtaagccctgatcatgacactgcactccagcctgggcaacagcaagaccctgtcttcttaagaagaaaaaaaagacaaagacaaaaaaaaaaaatgtgtgtggcgccggcctggggccccagaaaaaggtttctaagcccattccggtggggcgcggcggccccaaggagtggaagcgcacctgggcacaagcggggtcccaaaaggaggacccggggcacggcactaggggttggggttcccccccaataaaaaacgccggggcaaccgaggtgctggaaaactccagaggggtccggggccacgcggaccatcacccggggcaagagtcagtagcgcg

SEQ ID NO: 504708 - DNA, 383 bp, Homo sapiens
agtgactgaagcactgggggaataatgaaaccataccttataaagtctaatgctcctcttctacctaagccagctgaatgtgcccagacaatgcaacattctttgctacttatacagaatcaaaatgtgtgaaacaccccagtttccaggacttagtaggtcaccatctattagatcacagtgtagagtctttaaaaagaatcatactaagtctctgattctataattgcccataggtgtttgtttgtactggattttaggtataatcaaaagaacttacttaagagtacggtggggagggaaaggaggagatgctgcactgctgaacaccagctttgaggagctgaaataatgatgcctgttgcctagcaaccttttttttt

SEQ ID NO: 504709 - DNA, 477 bp, Homo sapiens
atgacttgagctccacctctgtctccgtctgggtgcctcgtgctcaccaaggaaggggtgcacgtgtggtgtgcagtcctggtgggtggtgctcaaggtcatcccctggaccccctggcctgagcaatggacccccagcccctcagtggggccagcgaagagcctagcaggtgacccaatctgaaggagggggcatgcagcagcagtggtgctggctcccctggcccccctggtggatcctcaggcccttgcagccccacagctgtgctgacactgcctgctgaatgaaattcttcctcctcctcatccccctcagagcggctctggcagaagctctccaggaaggcaatctcctccgccaacctgttagtgctggtcctgggagcacagagatgccgtggtgcggaaaagagcccctctccagccctggtgggccctggatctcggaggagcaattaccaatttggaaggcatctc

SEQ ID NO: 504710 - DNA, 667 bp, Homo sapiens
ccttaaggaagcggtgcggaagcagggacaagaagccgcgggatctcttcggtcccccaggacctccaggtgcagaagtgaccgcggagactctgcttcacgagtttcaggagctgctgaaaggtcagccgccctgcactgcccagagaccagacgtgcctgggccctgtgctgaccctgctggccgcctgtgccctcctccccacagaggccacggagcgccggttctcagggcttctggacccgctgctgccccaggggcgggcctgcggctggtgggcgaggcctttcactgccggctgcagggtccccgccgggtggacaagcggacgctggtggagctgcatggtttccaggctcctgctgcccaaggtgccttcctgcgaggctccggtctgagcctggcctcgggtcggttcacggcccccgtgtccggcatcttccagttctctgccagtctgcacgtgggtgagccggatggggcagtgccgtgtgctgtgacggggctgggctgagctttctgggggcgcctggcatcgccggccccgggtgcgggtcctgttagggacctatcccctgcccatggggggccttggactgggcatggggtccctgctgcacgctgctcaggggccccttccggcccagctcctggctgtctggtttc

SEQ ID NO: 504711 - DNA, 217 bp, Homo sapiens
tgagctggtacgggctcatcttctggcatacactaggagtggaattgccaggtcaaatggcaactgtacaactccctgaggaacttctggactgttttccaaagcagctccaccattttacattcccaccagcagtgtataaaggttctgatttctccagatcttcagaagatacaatttttattaatattatagccatcctaatgggtgtaaagtg

SEQ ID NO: 504712 - DNA, 136 bp, Homo sapiens
agctcggtaccatcgtaacctagtgcagatcaggtcaccagactggtcctgagaaaggaaagggtttgatgaagggttgatgacagagctttgatgacaggatatgatgaagggtttgatgacaggatttcgatga

SEQ ID NO: 504713 - DNA, 680 bp, Homo sapiens
  misc_feature (3)..(3): n is a, c, g, or t
  misc_feature (9)..(9): n is a, c, g, or t
  misc_feature (14)..(14): n is a, c, g, or t
  misc_feature (17)..(17): n is a, c, g, or t
  misc_feature (41)..(41): n is a, c, g, or t
  misc_feature (44)..(44): n is a, c, g, or t
  misc_feature (53)..(53): n is a, c, g, or t
  misc_feature (61)..(62): n is a, c, g, or t
  misc_feature (74)..(74): n is a, c, g, or t
  misc_feature (80)..(80): n is a, c, g, or t
  misc_feature (95)..(96): n is a, c, g, or t
  misc_feature (102)..(102): n is a, c, g, or t
  misc_feature (105)..(105): n is a, c, g, or t
  misc_feature (118)..(118): n is a, c, g, or t
  misc_feature (122)..(122): n is a, c, g, or t
  misc_feature (126)..(126): n is a, c, g, or t
  misc_feature (130)..(130): n is a, c, g, or t
  misc_feature (134)..(134): n is a, c, g, or t
  misc_feature (159)..(159): n is a, c, g, or t
  misc_feature (161)..(161): n is a, c, g, or t
  misc_feature (169)..(169): n is a, c, g, or t
  misc_feature (184)..(184): n is a, c, g, or t
  misc_feature (189)..(189): n is a, c, g, or t
  misc_feature (191)..(191): n is a, c, g, or t
  misc_feature (202)..(202): n is a, c, g, or t
  misc_feature (205)..(205): n is a, c, g, or t
  misc_feature (208)..(208): n is a, c, g, or t
  misc_feature (218)..(218): n is a, c, g, or t
  misc_feature (228)..(228): n is a, c, g, or t
  misc_feature (237)..(237): n is a, c, g, or t
  misc_feature (273)..(273): n is a, c, g, or t
  misc_feature (277)..(277): n is a, c, g, or t
  misc_feature (294)..(294): n is a, c, g, or t
  misc_feature (301)..(301): n is a, c, g, or t
  misc_feature (328)..(328): n is a, c, g, or t
  misc_feature (353)..(353): n is a, c, g, or t
  misc_feature (359)..(359): n is a, c, g, or t
  misc_feature (377)..(377): n is a, c, g, or t
  misc_feature (393)..(393): n is a, c, g, or t
  misc_feature (425)..(426): n is a, c, g, or t
  misc_feature (449)..(449): n is a, c, g, or t
  misc_feature (466)..(466): n is a, c, g, or t
  misc_feature (473)..(473): n is a, c, g, or t
  misc_feature (477)..(477): n is a, c, g, or t
  misc_feature (489)..(489): n is a, c, g, or t
  misc_feature (495)..(495): n is a, c, g, or t
  misc_feature (499)..(499): n is a, c, g, or t
  misc_feature (513)..(513): n is a, c, g, or t
  misc_feature (525)..(525): n is a, c, g, or t
  misc_feature (540)..(540): n is a, c, g, or t
  misc_feature (555)..(555): n is a, c, g, or t
  misc_feature (560)..(560): n is a, c, g, or t
  misc_feature (577)..(577): n is a, c, g, or t
  misc_feature (581)..(581): n is a, c, g, or t
  misc_feature (648)..(648): n is a, c, g, or t
tgncggggnttcanagnggactttattgggaaaagttagtnagngtaaaaaanattcaaannaattcaaaaaanttaaanaaggggaaagtaaannaaaccntgnagttaaaagtaancaancaancaancacnacagtaatcacaaaaaagggaaagncnaaattacngccttagcaaacacnatgtngncagggttttcngcngcnagcccaaggngggaaacacngcagtaatnagaagggagcccaatgatgaatttgcatttgaagcngggngaaagaggaaaaaaagngggtccngattatggcatcgagacactgtagccnaaaaaagcaactttattaatgtccngcagcngcgtacattagtaattanaacaatgcattaaaantttcatttcatgtcaaagagaatcagttttcnncatgaaacattatgttttaccgngggagtttgtccccccngagaccnttcngggaacatgccncccccngggnctgcctcccaagangcccaggttgcntaccacagggcatcnttgggcatttaaaancagtnaagctgtctggactgcncccnctcaactgaagttgagccaaattcccttctctcaaaccctaacgccgccatcactaagagaatgggnatctcggcttggtcagagcattactaacaagc

SEQ ID NO: 504714 - DNA, 1400 bp, Homo sapiens
  misc_feature (747)..(747): n is a, c, g, or t
actgatattctacagcttaacatgttatcttgacagatcaaaaagaagagtgttgtctagcactggcaagatcaacatgaatggcttacacacgtctaatgaacatcttgcataaagcatgtggaggatctagtatcccgcgagcactaaacaagaggccaaggtaacaacgaggtccagtatggatagagaaattccacaaatgaattacatgcccgcgatgaataacgttgtctacctttggtactaaggagtgcgcgatgacttgacgtgcgagcaagcataacgtaggcaatgaaatcttcacactcggtgcccgctgatgacggcacactagccatcaatagctttgcggaaaaagaatgctaggatgaacgccaaacataatgcaccttaggagagatcatcttctaggatggtggagcaatccaagaggatcgccattggaacgcgatagaaaactgcttgacgacatagatagaggcagcatcccggcggcacatggagactcttacgagaaatcgcgaatatgtaggactattcttttgctttgtcctaacgttagaacctgttagacaggggagtcccatactcaagtgctcgtagagcatagtaccccttttgcctcggggccaatgttctacgcttcaacattgacacagacaccgcattgtaatggctcaatggtatcatgtgggaacactcattgaggggactttgcaccaaagtattgacagcctgggaagncttcctaatgtaaagtggccatctaacgttggtcgtagtaacataccgtccaaggggaacttccacggcgtaaggcactatgagggaggggatatgcaaacatcgtgtaaagcaagaacaatcctgaatcaaggaggactctcacctataatcgttagcactttattgcacttcgaacagactttagggtgggaagacacctacaaggtttacatcacccagccccatagatggcggaacctccacaacgatacaagttgaaaagaggctgcccgaagtgatggctgcacgtggaaacacttattttgcacacggggttttgcccaatctacgacaacctgggtcgtaggcaacgcacaaaaggcttctaaagtcacataggcgtttatacggcgattatggaagacccaaaaggcgttattacaaccgcgggcatgacactttcgcagccgcaattggcgcaatagggacggcgatccaacccctggagattaatatggccccagagctacaaggccaaatgtcgagagtccctgataagcttagacgagaagaacggatacacttcgagaagagcaaaatgggacaatgtgagccccaccggtaacattagcaacccctgtagtaggatacgagacacaggagtgtgacaa

SEQ ID NO: 504715 - DNA, 100 bp, Homo sapiens
  misc_feature (58)..(58): n is a, c, g, or t
tttggtgtctggctatggacccccatctgactgtccagctctctctcccccacccctnccggtgttgttattaaacgtctgtggagcttctgctgcaagg

SEQ ID NO: 504716 - DNA, 431 bp, Homo sapiens
acggtatagagtctggggaaaaatgtagccatacttgctactcatgggtacacttaaactacgtctttacgtgtgtattgcgctatttgtagcttcatcacgtttgctgaagatggcggtatataggctgagcaagaggtggtgaggttgatcggcggttatcgattacagaacattatactctagagggatatgaagcaccgccaggtcctttgagttttaagctgtggctcatatcagttctggcgagcagttttgttgatttaactgttgaggtttagggctaagcctagtggggtatctaatcccagtttgggtcttagctatagtgtgttcagatatgttaaagccactttcgtagtctatttcgtgtccactgaagtcttttacaactcaggtgagtaaaagcaatataggggaggagtgctcta

SEQ ID NO: 504717 - DNA, 378 bp, Homo sapiens
  misc_feature (17)..(17): n is a, c, g, or t
  misc_feature (124)..(124): n is a, c, g, or t
  misc_feature (146)..(146): n is a, c, g, or t
  misc_feature (151)..(151): n is a, c, g, or t
  misc_feature (154)..(154): n is a, c, g, or t
  misc_feature (159)..(159): n is a, c, g, or t
  misc_feature (163)..(163): n is a, c, g, or t
  misc_feature (172)..(172): n is a, c, g, or t
  misc_feature (192)..(192): n is a, c, g, or t
  misc_feature (205)..(205): n is a, c, g, or t
  misc_feature (209)..(209): n is a, c, g, or t
  misc_feature (340)..(340): n is a, c, g, or t
aaacaaagcagaaatanaacagtcacagaaggtggtaaaggcagatattgtaaactacaaccagtgaacctatgtgcaagaactgttaacccttctagaagctctgtgtgtgcagtagggtganctcatttttacattgtattganagtantanaagcncttnacctctggntgtatctgaaaacttctaanaacttgtattatnagtnaccatctctgtagttcagttaacactttcctccgaacttgcttcatctttaagtgttcctcccaaccgcagcatgtacttgggttcaaaagaattcaactttggggccacacactttgcattcaaactggnagtctcattctctggaattagactgtttcattgaaaaa

SEQ ID NO: 504718 - DNA, 209 bp, Homo sapiens
tttttttccccccccccggggggggaaaggggccacccccccccgggggggggggtatttttcgcccttttttttcctttcaccaaaggaaaaggggggggggggggggggtttttttcttttaaaccggggaaaaaatttagggggcccccgggtccctttggggggggttggttaaaaaaatggggaaaaaagggccccctttttta

SEQ ID NO: 504719 - DNA, 477 bp, Homo sapiens
  misc_feature (228)..(228): n is a, c, g, or t
  misc_feature (243)..(243): n is a, c, g, or t
  misc_feature (366)..(366): n is a, c, g, or t
  misc_feature (410)..(410): n is a, c, g, or t
  misc_feature (412)..(412): n is a, c, g, or t
  misc_feature (419)..(419): n is a, c, g, or t
agtggagtcttccgcacccagcgcgtcgccctttcccgccaggtgaaggagaaacccttgtggccccaactctaaattagggttgccccctgatttccggtccttccatctcatcggtggcctctcactgtggctcactgtttaacacatgcctgtcccctgggcctcccccccagatgccctgggttggattcctaagccttgggagcggacagggctgccccctcnaaaggggccctcccnacgggcagaggggcctgggtcccgaggggacaaggagcctgggttgccccccccccgctgagggggttcctcttgccccctccccccgggggttgtatatagattataaatatataagggggnaaggggggggcgggggggggttggggggcgggggccccccttcncnttttctntttcctggtgccctgtgctttggcgggtttgttaaaaaagaggaataaaagggtttta

SEQ ID NO: 504720 - DNA, 288 bp, Homo sapiens
gcagtgcatatagtgataataactcactgcagccttgacttccaggctcaagcaatcctccaacctcagactttccagtagctggaactacagcgctatgccaccatgccctgctgatattttgcatttttatagagatggagactccccatgtttcccgggctggtctgtaactcctgagctcaagtgatccacccaatttggcctcccaaagtgctggcattacagcagtgagccaccacaggtgccacagttttatttttatttatatatttgggcgtacgggga

SEQ ID NO: 504721 - DNA, 446 bp, Homo sapiens
aaacagacatgaaataaagaattttatagaatgaaaaaaaaaaaaaaaaaaaaaaaaaaaaaaaaaaaaaaaaaaaaaaaaaaaaaaaaaaaaaaaaaaaaaaaaaaaaaaaaaaaaaaaaaggaaaaaaaaaaaaaaaaaaaaaaaaaaaaaccttgtggcccccttggcccaagcggtttttaaattgggcaaggtttttccttgggcccgaatttggggctaattgggcaatttccccttttggggggcggtttaaaatttaatggcccgggttttaaaaaggtgggaatgggaaaaccctgggggttcccaaattaaaccgctttgaaaaaaatccccttttgccaagtgggggaaatagcaaaaggccccgaacggatggcctttccaaaaagtggcccaccctaaagggcaatggaaaattgaaggggtaaatttttggt

SEQ ID NO: 504722 - DNA, 590 bp, Homo sapiens
tggtctcagcccaggacctccagggaacaatgaggcctacgcagagctcatcgtccttgtgtatgccgccggcaaagcagccacctcaggtgttcccagacatttactgacccccagacacctaatgcccacactgtctcccgccaagacccaaaaccccacgcagactagtgaattcccatgggccctgactacaaacgggtaccctggaggatacctggagacgtagacaaggagtagcctcagctggctggccatggctccatactagttaccccccccagtgcctttcgcgcgacacggacacgcagtgtggcctctgacagtccgcagtggctaccggattcaggccagcagcacgacgactcatgcgggtcctgtcctacctggcgcaccgcgctggccaccttcgaaccattctcgagcatgagacgcgcacagaggaccgtgtggaacgggccaagacgatgacaatcacgtaccatcaaagacgacgaatggcgatctcgagacccacccggcggcctgcactaaccccgaatccaggcatgacgagctgacgcgcacacaccccccgcactcccacgccc

SEQ ID NO: 504723 - DNA, 836 bp, Homo sapiens
gcggagaagagcgggacagtgcagggccgctgaatcagcttccaagagatgatgccctacactcacgattcactcctattgaacaagacggggtactgatagctcccaaggtcatcctcccagcttgtgatgtacactatcggagtgccgtgccacgtgtattgctgagtgcgtgtcacatcaaattcatgcctgggatccccgatgggatggaaacacaggcttgattgtcaatatggtcgagcagtgccatatagcagacagattgtctgaaatgcatgtgggacccactaattcgggacatgcgttctgtgatggttgtgccatccgtgaccagccagataagacttttggtgaaaccattagtctagacatccctaaaggagagcctgaatgggtagcgcgtgcatcgcgaaccaaaccttcgtagttgacactttgcttgggctgcgtacgcatggttctcctcgtacaagccatgggttggacatacgccttcattgttggaagggaaaagggtataagatacgcgcccacagaaaatccattcgattccgatgccctatatacgcaggctaatagggctcgaaactccccaagccttggggccatgttttgagatcccactggattccgcaacattgaaaggactccgccttggtgaaactcagtagtaggatcgacaggcgccacgaactacaaacctggtagagcactgccacagacgaggaaaagacctaagctaggggaaacacaacgtggtgacccacttgaacccgccttcctggagagctcccgaaaaggcatgaagtcattccccagcgcagaacaaagct

SEQ ID NO: 504724 - DNA, 732 bp, Homo sapiens
  misc_feature (3)..(3): n is a, c, g, or t
  misc_feature (555)..(555): n is a, c, g, or t
gtnctctctgctctcgcggccgactcgcaagatggcgccgcagaaagacaggaagcccaagaggtcaacctggaggtttaatttggaccttactcatccagtagaagatggaatttttgattctggaaattttgagcaatttctacgggagaaggttaaagtcaatggcaaaactggaaatctcgggaatgttgttcacattgaacgcttcaagaataaaatcacagttgtttctgagaaacagttctctaaaaggtatttgaaataccttaccaagaaataccttaagaagaacaatcttcgtgattggcttcgagtggttgcatctgacaaggagacctacgaacttcgttacttccagattagtcaagatgaagatgaatcagagtcggaggactaggcaaaggctccccttacagggctttgcttattaataaaataaatgaagtatacatgagaaataccaagaaattggcttttagtttatcagtgaataaaaaatattatactcttgaaaaaaaaaaaaaaaaaaaaaaaaaaaaaaaaaaaaaaaanaaaaaaaaaaagaaaaaagaaaaaaaaaaaaaaaaaaaaaaaaaaaaaaaatttggggcccctttggccaaaggatttttaaatttggaaaagtttttacttggggcccaaattggggccctttgggcaaattccccctaagggggggggtttaatttggctttggccccttttggc

SEQ ID NO: 504725 - DNA, 465 bp, Homo sapiens
  misc_feature (3)..(3): n is a, c, g, or t
gtnctctctgctctcgcggccgactcgcaagatggcgccgcagaaagacaggaagcccaagaggtcaacctggaggtttaatttggaccttactcatccagtagaagatggaatttttgattctggaaattttgagcaatttctacgggagaaggttaaagtcaatggcaaaactggaaatctcgggaatgttgttcacattgaacgcttcaagaataaaatcacagttgtttctgagaaacagttctctaaaaggtatttgaaataccttaccaagaaataccttaagaagaacaatcttcgtgattggcttcgagtggttgcatctgacaaggagacctacgaacttcgttacttccagattagtcaagatgaagatgaatcagagtcggaggactaggcaaaggctccccttacagggctttgcttattaataaaataaatgaagtatacatgagaaatacc

SEQ ID NO: 504726 - DNA, 214 bp, Homo sapiens
taagagaagcgtgcaagctcaacagccactacctaaaaaatcccagaacatagtacatgaactcctcacacccaaggtggaccatatctatcaccgctatagatagaactaactgttagttataaggtaacatgcaaaacattctcctccggcataagccttgcgtcagagttaaaacatctgaacttgacaatttaacaggcgccaagtatct

SEQ ID NO: 504727 - DNA, 878 bp, Homo sapiens
cggttctactgttcgcctctcctgtatttcgcgggttgttcgtctccggttatccccgcgcgggtgttctctctgcgcctgggcgcctcccctgtggtggtcctacaccgcttcgtcaaaccatggtccactgggtccagatggggagaacccaagtcttggtggtttgaccccccttttcccccgtggccgcatcgtttctctccccgcgtcccccctggatgtgtctcccgccccctgactttgcatcgccgcaccccgttcgtaatgtcctccttcgttcccccctggtgaatgtgccgcccccccccccgcgttctccttgtaccccctcagaattatgtccccttacttcacacattcctcccccacccaacaagccccattttttcagaacaatttctaattggggcgcaccccctaatacaacaatggtagccctcactcgcgtggatcaccccgatcccccgcggataactgctatccgcgcctattctaaaaattaacaatccttttatgggtcatatatccatctaaccttctatctgcgtagaggggaaggcatttctaccaccccggttagttctatgcggcgtggaaatcacctcaccgggctcggaattgtcgcacacttcttccccccgcgagtatgtggtcgagatggcaggcccgcgcgatgtagtatagagtgagaaatgagactgcggcctctccccgcatattcacaacaccccccaacaaccccgccctattcattctagggcccccaggaaaactcgcactaatcagtcgtgttgaccagttcattttttttttgtaaaccccaaaatacttccccccacccatttaaaaacattatccccctgtcccacaaaaca

SEQ ID NO: 504728 - DNA, 388 bp, Homo sapiens
cctggccttgttggtcaaagggtttttcccccgggacattcccctggggttggggggccccgggcccccgggggacaaatacaaccccccgccttccatttttggatccggcgggtccttttttctttaccgcaagctccccgttggccagggccggtggcccccgggggacattttttctttgtccgtggtgcatgggggttttcccaaccgctttacgccggagggccttttcctttttccgggtaaatgggttggacggccggcaaacccccccttcccgggtttttggggttgcgggggggttttttgcacgttccccgtttacatattttccgggccccccgcttgggaattaagccccccgggtttccctgggcccctgcca

SEQ ID NO: 504729 - DNA, 514 bp, Homo sapiens
  misc_feature (3)..(3): n is a, c, g, or t
gtnctctctgctctcgcggccgactcgcaagatggcgccgcagaaagacaggaagcccaagaggtcaacctggaggtttaatttggaccttactcatccagtagaagatggaatttttgattctggaaattttgagcaatttctacgggagaaggttaaagtcaatggcaaaactggaaatctcgggaatgttgttcacattgaacgcttcaagaataaaatcacagttgtttctgagaaacagttctctaaaaggtatttgaaataccttaccaagaaataccttaagaagaacaatcttcgtgattggcttcgagtggttgcatctgacaaggagacctacgaacttcgttacttccagattagtcaagatgaagatgaatcagagtcggaggactaggcaaaggctccccttacagggctttgcttattaataaaataaatgaagtatacatgagaaataccaagaaattggcttttagtttatcagtgaataaaaaatattatactcttg

SEQ ID NO: 504730 - DNA, 398 bp, Homo sapiens
  misc_feature (1)..(1): n is a, c, g, or t
  misc_feature (21)..(21): n is a, c, g, or t
  misc_feature (117)..(117): n is a, c, g, or t
  misc_feature (207)..(207): n is a, c, g, or t
natgggggccaattcccaagnagccttcgtgaagccacctgcttgaagctcttggggagataaaccttctcctacatcaaaatctggagagaggcaagcatgcctacagtttggganacggtttgtttgggtcctgcccaggtttcatgttgaaatttgaccccctgtgtgtttcccaggagagctggttgttgaaaagaccctggnacctccccccgctctctcttgcttcctttctgcccatgtggtctctccacacacaatgtcttcccttcactttctgtcatgactggaagcagcgtgacgtcctcaccacaagcaggtccaaacaccacgcttcctggacaacctggagaaccactatgagccgaataaataatctcttttttttttaaaaa

SEQ ID NO: 504731 - DNA, 459 bp, Homo sapiens
accagaacgcggtagtcggcgtgcctgggatgtgctcgtgcgcctcgcatttgatcatcatctgtgtctcctcctcgttgtcctttatctagtacgacttgctgttgagccggttggccacgttcttcagcaggatctcctcgtaggtggtccttgatctcatgaacccccatcattagcatgttgttgcctgctatgctgatgtctactgttaatctgctcttctgtactatgtaggtcttgttcaggcccaggtccttgttgatcagcttgatggcgttagcaagcacattactggtgtccccatgctgaggagcagaggtggccttgttcagagagtctatagaacattgatgatgtctcttggaggctttgttatctgacgagacggctgctctgtgattttgagcttgaaggcgtgtgccccaatgttgtaggggcctgcgtacttgattgtag

SEQ ID NO: 504732 - DNA, 543 bp, Homo sapiens
ggtcagaaacacaaccaagacgcgaggatcctgaactgtttttcgagactccctggcagctgccatgagcagaaagacaggaagcccaagaggtcaacctggaggtttaatttggaccttactcatccagtagaagatggaatttttgattctggaaattttgagcaatttctacgggagaaggttaaagtcaatggcaaaactggaaatctcgggaatgttgttcacattgaacgcttcaagaataaaatcacagttgtttctgagaaacagttctctaaaaggtatttgaaataccttaccaagaaataccttaagaagaacaatcttcgtgattggcttcgagtggttgcatctgacaaggagacctacgaacttcgttacttccagattagtcaagatgaagatgaatcagagtcggaggactaggcaaaggctccccttacagggctttgcttattaataaaataaatgaagtatacatgagaaataccaagaaattggcttttagtttatcagtgaataaaaaatattatactcttg

SEQ ID NO: 504733 - DNA, 581 bp, Homo sapiens
  misc_feature (3)..(3): n is a, c, g, or t
gtnctctctgctctcgcggccgactcgcaagatggcgccgcagaaagacaggaagcccaagaggtcaacctggaggtttaatttggaccttactcatccagtagaagatggaatttttgattctggaaattttggtaccttccctagtgaatatctagggttctcttccctagttttgcattttttctgttttaaaataggagcaatttctacgggagaaggttaaagtcaatggcaaaactggaaatctcgggaatgttgttcacattgaacgcttcaagaataaaatcacagttgtttctgagaaacagttctctaaaaggtatttgaaataccttaccaagaaataccttaagaagaacaatcttcgtgattggcttcgagtggttgcatctgacaaggagacctacgaacttcgttacttccagattagtcaagatgaagatgaatcagagtcggaggactaggcaaaggctccccttacagggctttgcttattaataaaataaatgaagtatacatgagaaataccaagaaattggcttttagtttatcagtgaataaaaaatattatactcttg

SEQ ID NO: 504734 - DNA, 230 bp, Homo sapiens
aattaactattatcccccattcggaggccaccgtttatatctaccactgctccagtcatatacgtgttgagagcaacagctaaaacaatttgtgctacctcagatggatgtccaaatcgcttcaaaggaatttttttataaggcatactctttcattttttgggataattgattggtcatggcgctaacaatcatgcctgggcataattgcattcacctctaattccatg

SEQ ID NO: 504735 - DNA, 226 bp, Homo sapiens
agctgggatataggccctgctaccactcccagctattttttgtatttttagtagagatggggtttcaccatctatggacaggctagttttgaactcctgacctcgggtgatccagtctacctcagcctgccaaagtgctagggtgctaggactacaggcatgagccactgtgcctggacttttttttttttttaaagacagggttctcactatttcgtcgggaatc

SEQ ID NO: 504736 - DNA, 115 bp, Homo sapiens
tcacgttgatcgggagatctataggtgcggggctagtatgattatggcgttgattagtactagtcactggttgaacattgtcagtgggtcgtccaagcgatatgggtagcgagct

SEQ ID NO: 504737 - DNA, 532 bp, Homo sapiens
  misc_feature (3)..(3): n is a, c, g, or t
gtnctctctgctctcgcggccgactcgcaagatggcgccgcagaaagacaggaagcccaagaggtcaacctggaggtttaatttggaccttactcatccagtagaagatggaatttttgattctggaaattttggtaccttccctagtgaatatctagggttctcttccctagttttgcattttttctgttttaaaataggagcaatttctacgggagaaggttaaagtcaatggcaaaactggaaatctcgggaatgttgttcacattgaacgcttcaagaataaaatcacagttgtttctgagaaacagttctctaaaaggtatttgaaataccttaccaagaaataccttaagaagaacaatcttcgtgattggcttcgagtggttgcatctgacaaggagacctacgaacttcgttacttccagattagtcaagatgaagatgaatcagagtcggaggactaggcaaaggctccccttacagggctttgcttattaataaaataaatgaagtatacatgagaaatacc

SEQ ID NO: 504738 - DNA, 404 bp, Homo sapiens
atatattgtgaatggaaggatgaaatattttggaggaagctaggtacagaaaagatgaatatgatgatgtatatttttcgtatagtaaacctttacatagtaggaattgtatttcttaatgaaatttatgtttttattttaaaaggtatttgaaataccttaccaagaaataccttaagaagaacaatcttcgtgattggcttcgagtggttgcatctgacaaggagacctacgaacttcgttacttccagattagtcaagatgaagatgaatcagagtcggaggactaggcaaaggctccccttacagggctttgcttattaataaaataaatgaagtatacatgagaaataccaagaaattggcttttagtttatcagtgaataaaaaatattatactcttg

SEQ ID NO: 504739 - DNA, 1378 bp, Homo sapiens
  misc_feature (3)..(3): n is a, c, g, or t
  misc_feature (816)..(817): n is a, c, g, or t
  misc_feature (1209)..(1209): n is a, c, g, or t
  misc_feature (1231)..(1231): n is a, c, g, or t
  misc_feature (1348)..(1348): n is a, c, g, or t
gtnctctctgctctcgcggccgactcgcaagatggcgccgcagaaagacaggaagcccaagaggtcaacctggaggtttaatttggaccttactcatccagtagaagatggaatttttgattctggaaattttgagcaatttctacgggagaaggttaaagtcaatggcaaaactggaaatctcgggaatgttgttcacattgaacgcttcaagaataaaatcacagttgtttctgagaaacagttctctaaaaggtatttgaaataccttaccaagaaataccttaagaagaacaatcttcgtgattggcttcgagtggttgcatctgacaaggagacctacgaacttcgttacttccagattagtcaagatgaagatgaatcagagtcggaggactaggcaaaggctccccttacagggctttgcttattaataaaataaatgaagtatacatgagaaataccaagaaattggcttttagtttatcagtgaataaaaaatattatactcttgaacttttgtctcatttttttgagtatgctgtttatatgattttgatttccctctgataactatcaacagtatttaaatagcttatagctggtataattttttcccacgatttccaaaatcttttatgtactcaggtaaaagtagcgttatataggaaatcttttttttagacactctcgttctgtcacccaggctggagtgcagtgactcagcttcctaaatagctggaattacaggtgtgagccaccatgcccggctaattttttgtacttttagtagagtagggtttggccatgttggcnnggctggtttcaaactcctgacctcaagtgatctacccacctcggcttcccaaagtgctgattatagctgtgaaccaccatgcccggccaggaaatcttactgtagaacaattttttatatagctgtataaaatgtatatgattgtcttgacagtctcaaatactgtttttaatagcttgtaaatgtaatctcaagtgcttagaacagttcttacatataagttgctctgtagtttgctcttatagttagcccaaagactctgggtgtgaggcctgctgtaaaccaatgttaaactgcttattagaaagccctaaccacctgctttgtaggcaccagaaactcaaaaccaaatctcaactcagctacagaatctactgtggtccttgtctganaaaattagttcactcggttggnatcttgtctcagagcatcctcatctctttctcaaaagccctaaccccaacaccggcgtgttggttgtctattgaaacttaacaagtggattgggtcgcttttctcccgaataaatgngctttgaaaaggtctaaaaagaaaaaaaaa

SEQ ID NO: 504740 - DNA, 773 bp, Homo sapiens
  misc_feature (3)..(3): n is a, c, g, or t
  misc_feature (596)..(596): n is a, c, g, or t
gtnctctctgctctcgcggccgactcgcaagatggcgccgcagaaagacaggaagcccaagaggtcaacctggaggtttaatttggaccttactcatccagtagaagatggaatttttgattctggaaattttgagcaatttctacgggagaaggttaaagtcaatggcaaaactggaaatctcgggaatgttgttcacattgaacgcttcaagaataaaatcacagttgtttctgagaaacagttctctaaaaggtatttgaaataccttaccaagaaataccttaagaagaacaatcttcgtgattggcttcgagtggttgcatctgacaaggagacctacgaacttcgttacttccagattagtcaagatgaagatgaatcagagtcggaggactaggcaaaggctccccttacagggctttgcttattaataaaataaatgaagtatacatgagaaataccaagaaattggcttttagtttatcagtgaataaaaaatattatactcttgaaaaaaaaaaaaaaaaaaaaaaaaaaaaaaaaaaaaaaaaaaaaaaaaaaaaaaaaaaaaaaaaaaaaaaaaaaaaaaaaanaaaaaaaaaaagaaaaaagaaaaaaaaaaaaaaaaaaaaaaaaaaaaaaaatttggggcccctttggccaaaggatttttaaatttggaaaagtttttacttggggcccaaattggggccctttgggcaaattccccctaagggggggggtttaatttggctttggccccttttggc

SEQ ID NO: 504741 - DNA, 799 bp, Homo sapiens
  misc_feature (3)..(3): n is a, c, g, or t
  misc_feature (622)..(622): n is a, c, g, or t
gtnctctctgctctcgcggccgactcgcaagatggcgccgcagaaagacaggaagcccaagaggtcaacctggaggtttaatttggaccttactcatccagtagaagatggaatttttgattctggaaattttggtaccttccctagtgaatatctagggttctcttccctagttttgcattttttctgttttaaaataggagcaatttctacgggagaaggttaaagtcaatggcaaaactggaaatctcgggaatgttgttcacattgaacgcttcaagaataaaatcacagttgtttctgagaaacagttctctaaaaggtatttgaaataccttaccaagaaataccttaagaagaacaatcttcgtgattggcttcgagtggttgcatctgacaaggagacctacgaacttcgttacttccagattagtcaagatgaagatgaatcagagtcggaggactaggcaaaggctccccttacagggctttgcttattaataaaataaatgaagtatacatgagaaataccaagaaattggcttttagtttatcagtgaataaaaaatattatactcttgaaaaaaaaaaaaaaaaaaaaaaaaaaaaaaaaaaaaaaaanaaaaaaaaaaagaaaaaagaaaaaaaaaaaaaaaaaaaaaaaaaaaaaaaatttggggcccctttggccaaaggatttttaaatttggaaaagtttttacttggggcccaaattggggccctttgggcaaattccccctaagggggggggtttaatttggctttggccccttttggc

SEQ ID NO: 504742 - DNA, 1510 bp, Homo sapiens
gggaaatataattcactcttgtacaattgacccattgaaagtgtacagttcgggctgggcgcgggggcttagcctggaatctcggcctcccaaagtgctgggattacaggtgtgagcccccgtgcccggcctattgtttatttttgtgtgtgtgtatttctgctgtttaacattctgtttttgtttcagattttaaaaatagctttattgaaatataattcacttttggacgagccactatgcccggccctccagatgcatttttaacagctgaattcatgtgtgaaatgacgtaaggtccgcgtagtccttctttctcagagaccagcgtgcgaggcccaagggacccaccttccgtcacccgttctgctttgtttacagggtgtgtccgcagccggccaggtggtatccctgaaggtgtggctgattgacgacattctagaaaagatcaacagccaccttccctctcacattcggattctgggactgaagcgggtcacgggcgggtttaactccaagaacagatgtgatgccaggacctattgctacctgctgcccacgtttgcctttgcgcacaaggaccgggacgttcaggatgagacctaccgcctgagcgccgagacgctgcagcaggtcaacaggctcctggcctgctacaagggcacgcacaacttccacaatttcacctcgcagaaggggccgcaggatcccagtgcctgccgctacatcctggagatgtactgcgaggaaccctttgtgcgggagggcctggagtttgcggtgatcagggtgaagggccagagcttcatgatgcatcagatccggaagatggtcggcctggtggtggccattgtgaagggttatgcccctgagagcgtgctggagcgcagctggggcacagagaaggtggacgtgcccaaggcgcccggactcggcctggtcctggagagggtgcacttcgagaagtacaaccagcgctttggcaacgatgggctgcatgagccgctggactgggcgcaggaggaaggaaaggtcgcagccttcaaggaggagcacatctaccccaccatcatcggcaccgagcgggacgaacgctccatggcccagtggctgagcaccttgcccatccacaacttcagtgccaccgctctcacggcaggtggcacgggcgccaaggtgcccagtcccctggaaggcagtgaaggggacggagacactgactgaggcgatgggagctgcccaccagagtgcctctgagcagctcacagtgtgtgcccagatgtgccacccctgtgggcagcaagaagctgggatcgctgcagccatgttttcccggccatgccggcgttgtaacctcaggaccttcccttgtaggaacagcctttctcgaatctgttttcagctcttgcattgcatagatgaacctcagcatgtaaagaactatttttttaaagaagtgattttcttattaaacaagtacaaattttgcttagtcaaaaaaaaaacaaag

SEQ ID NO: 504743 - DNA, 111 bp, Homo sapiens
aggcggccgccctgcgtcaccagcacatatgaaaatacctattttctacactccgtcatctctggataacattaatttaaaaatgtttccgtctgatgggacgaagatgcg

SEQ ID NO: 504744 - DNA, 2533 bp, Homo sapiens
  misc_feature (318)..(318): n is a, c, g, or t
  misc_feature (2349)..(2349): n is a, c, g, or t
  misc_feature (2359)..(2359): n is a, c, g, or t
taggagaaaggcacagcgcctggagggcgggagtggggcttgctgcagacggctgtctcctgcctccttggctcttgcactgccaggaacacgctctccccaacacctccatggctcattccccaaattcaagcttgtagttggttgaattgtggccccagagatgggattaaggattttgagattatgccagattatctgcgcgggcccaggatcatatgagtttgtctcttctcccgtattagttttgtccgcgctcggccgccgtgcagtcggtcgttccacttccgccttcgcccacgtggtccggctccggcncacgcgagccgcgtcgcgaatggggcaggagcgagcctctctggtcccgacgcgggtggcccgggtctcctcgactcctgaggaaagcccaccgggcggggcgggaggtgaagaggctggggaagtcagaggttaacctgggcgtcaggggacgttggagttgatccgtcagggtcccggggcggtctgggggcagtagagacggggcttgggcgcggggcctgagaggtcaggggtcagcaggagtgaggctggggcgtccaggtccgagaggtcaggggtcagctggagaggggctggggcgccggtttcccggaggtcaggggtcagaaggaacagggctgcagcgtcagggtccgagaggttaggggtcggcagaggcggagctggggcactgggggtcaggggtcggggatcagggcggggtcgggtgcactggtagcctgcgcatgggcctccagcttcgcgcgctgttgggagccttcggacggtggaccctgcgcctgggaccgcgtccgtcctgctcgccgcgcatggccgggaacgcggagccgccgcccgccggagccgcatgcccccaggaccggaggtcctgcagcggccgggccgggggcgaccgcgtctgggaggacggagaacatccggcgaagaagctcaagagcggtggcgacgaggagcggcgcgagaagccgcccaagcggaagatcgtgctgctcatggcctattcgggcaagggctaccacggcatgcagaggaatgtcgggtcctcacaattcaaaacaattgaagatgacttggtgtccgccctcgtccggtcaggctgtattcctgaaaatcatggtgaggacatgaggaaaatgtccttccagcgctgcgcccggacagacaagggtgtgtccgcagccggccaggtggtatccctgaaggtgtggctgattgacgacattctagaaaagatcaacagccaccttccctctcacattcggattctgggactgaagcgggtcacgggcgggtttaactccaagaacagatgtgatgccaggacctattgctacctgctgcccacgtttgcctttgcgcacaaggaccgggacgttcaggatgagacctaccgcctgagcgccgagacgctgcagcaggtcaacaggctcctggcctgctacaagggcacgcacaacttccacaatttcacctcgcagaaggggccgcaggatcccagtgcctgccgctacatcctggagatgtactgcgaggaaccctttgtgcgggagggcctggagtttgcggtgatcagggtgaagggccagagcttcatgatgcatcagatccggaagatggtcggcctggtggtggccattgtgaagggttatgcccctgagagcgtgctggagcgcagctggggcacagagaaggtggacgtgcccaaggcgcccggactcggcctggtcctggagagggtgcacttcgagaagtacaaccagcgctttggcaacgatgggctgcatgagccgctggactgggcgcaggaggaaggaaaggtcgcagccttcaaggaggagcacatctaccccaccatcatcggcaccgagcgggacgaacgctccatggcccagtggctgagcaccttgcccatccacaacttcagtgccaccgctctcacggcaggtggcacgggcgccaaggtgcccagtcccctggaaggcagtgaaggggacggagacactgactgaggcgatgggagctgcccaccagagtgcctctgagcagctcacagtgtgtgcccagatgtgccacccctgtgggcagcaagaagctgggaacgcggagccgccgcccgccggagccgcatgcccccaggaccggaggtcctgcagcggccgggccgggggcgaccgcgtctgggaggacggagaacatccggcgaagaagctcaagagcggtggcgacgaggagcggcgcgagaagccgcccaagcggaagatcgtgctgctcatggcctattcgggcaagggctaccacggcatgcanaggaatgtcnggtcctcacaattcaaaacaattgaagatgacttgtaggaacagcctttctcgaatctgttttcagctcttgcattgcatagatgaacctcagcatgtaaagaactatttttttaaagaagtgattttcttattaaacaagtacaaattttgcttagtcaaaaaaaaaacaaag

SEQ ID NO: 504745 - DNA, 225 bp, Homo sapiens
tttgctgcctgctgagtatttcgggcctcaccctcagacctaagcggtgtctttaaagctcctataggcagaatacttagacaggctgaggaacgctgtgcagaaaatgcgcagtgtagtaagccacggatgagtgtgcacgtgcacatagcgctccaacacataccaacacatctcatagtcgaatggatagcgaaacttatgggagacctacagaggtataaa

SEQ ID NO: 504746 - DNA, 2368 bp, Homo sapiens
  misc_feature (318)..(318): n is a, c, g, or t
taggagaaaggcacagcgcctggagggcgggagtggggcttgctgcagacggctgtctcctgcctccttggctcttgcactgccaggaacacgctctccccaacacctccatggctcattccccaaattcaagcttgtagttggttgaattgtggccccagagatgggattaaggattttgagattatgccagattatctgcgcgggcccaggatcatatgagtttgtctcttctcccgtattagttttgtccgcgctcggccgccgtgcagtcggtcgttccacttccgccttcgcccacgtggtccggctccggcncacgcgagccgcgtcgcgaatggggcaggagcgagcctctctggtcccgacgcgggtggcccgggtctcctcgactcctgaggaaagcccaccgggcggggcgggaggtgaagaggctggggaagtcagaggttaacctgggcgtcaggggacgttggagttgatccgtcagggtcccggggcggtctgggggcagtagagacggggcttgggcgcggggcctgagaggtcaggggtcagcaggagtgaggctggggcgtccaggtccgagaggtcaggggtcagctggagaggggctggggcgccggtttcccggaggtcaggggtcagaaggaacagggctgcagcgtcagggtccgagaggttaggggtcggcagaggcggagctggggcactgggggtcaggggtcggggatcagggcggggtcgggtgcactggtagcctgcgcatgggcctccagcttcgcgcgctgttgggagccttcggacggtggaccctgcgcctgggaccgcgtccgtcctgctcgccgcgcatggccgggaacgcggagccgccgcccgccggagccgcatgcccccaggaccggaggtcctgcagcggccgggccgggggcgaccgcgtctgggaggacggagaacatccggcgaagaagctcaagagcggtggcgacgaggagcggcgcgagaagccgcccaagcggaagatcgtgctgctcatggcctattcgggcaagggctaccacggcatgcagaggaatgtcgggtcctcacaattcaaaacaattgaagatgacttggtgtccgccctcgtccggtcaggctgtattcctgaaaatcatggtgaggacatgaggaaaatgtccttccagcgctgcgcccggacagacaagggtgtgtccgcagccggccaggtggtatccctgaaggtgtggctgattgacgacattctagaaaagatcaacagccaccttccctctcacattcggattctgggactgaagcgggtcacgggcgggtttaactccaagaacagatgtgatgccaggacctattgctacctgctgcccacgtttgcctttgcgcacaaggaccgggacgttcaggatgagacctaccgcctgagcgccgagacgctgcagcaggtcaacaggctcctggcctgctacaagggcacgcacaacttccacaatttcacctcgcagaaggggccgcaggatcccagtgcctgccgctacatcctggagatgtactgcgaggaaccctttgtgcgggagggcctggagtttgcggtgatcagggtgaagggccagagcttcatgatgcatcagatccggaagatggtcggcctggtggtggccattgtgaagggttatgcccctgagagcgtgctggagcgcagctggggcacagagaaggtggacgtgcccaaggcgcccggactcggcctggtcctggagagggtgcacttcgagaagtacaaccagcgctttggcaacgatgggctgcatgagccgctggactgggcgcaggaggaaggaaaggtcgcagccttcaaggaggagcacatctaccccaccatcatcggcaccgagcgggacgaacgctccatggcccagtggctgagcaccttgcccatccacaacttcagtgccaccgctctcacggcaggtggcacgggcgccaaggtgcccagtcccctggaaggcagtgaaggggacggagacactgactgaggcgatgggagctgcccaccagagtgcctctgagcagctcacagtgtgtgcccagaatgttgcccaaaccacccctttgggtttgggggggccaggccaaaggaaaaggcctgggggaattcgctgcagccatgttttcccggccatgccggcgttgtaacctcaggaccttcccttgtaggaacagcctttctcgaatctgttttcagctcttgcattgcatagatgaacctcagcatgtaaagaactatttttttaaagaagtgattttcttattaaacaagtacaaattttgcttagtcaaaaaaaaaacaaag

SEQ ID NO: 504747 - DNA, 1645 bp, Homo sapiens
  misc_feature (318)..(318): n is a, c, g, or t
taggagaaaggcacagcgcctggagggcgggagtggggcttgctgcagacggctgtctcctgcctccttggctcttgcactgccaggaacacgctctccccaacacctccatggctcattccccaaattcaagcttgtagttggttgaattgtggccccagagatgggattaaggattttgagattatgccagattatctgcgcgggcccaggatcatatgagtttgtctcttctcccgtattagttttgtccgcgctcggccgccgtgcagtcggtcgttccacttccgccttcgcccacgtggtccggctccggcncacgcgagccgcgtcgcgaatggggcaggagcgagcctctctggtcccgacgcgggtggcccgggtctcctcgactcctgaggaaagcccaccgggcggggcgggaggtgaagaggctggggaagtcagaggttaacctgggcgtcaggggacgttggagttgatccgtcagggtcccggggcggtctgggggcagtagagacggggcttgggcgcggggcctgagaggtcaggggtcagcaggagtgaggctggggcgtccaggtccgagaggtcaggggtcagctggagaggggctggggcgccggtttcccggaggtcaggggtcagaaggaacagggctgcagcgtcagggtccgagaggttaggggtcggcagaggcggagctggggcactgggggtcaggggtcggggatcagggcggggtcgggtgcactggtagcctgcgcatgggcctccagcttcgcgcgctgttgggagccttcggacggtggaccctgcgcctgggaccgcgtccgtcctgctcgccgcgcatggccgggaacgcggagccgccgcccgccggagccgcatgcccccaggaccggaggtcctgcagcggccgggccgggggcgaccgcgtctgggaggacggagaacatccggcgaagaagctcaagagcggtggcgacgaggagcggcgcgagaagccgcccaagcggaagatcgtgctgctcatggcctattcgggcaagggctaccacggcatgcagaggaatgtcgggtcctcacaattcaaaacaattgaagatgacttggtgtccgccctcgtccggtcaggctgtattcctgaaaatcatggtgaggacatgaggaaaatgtccttccagcgctgcgcccggacagacaagggtgtgtccgcagccggccaggtggtatccctgaaggtgtggctgattgacgacattctagaaaagatcaacagccaccttccctctcacattcggattctgggtgcccagtcccctggaaggcagtgaaggggacggagacactgactgaggcgatgggagctgcccaccagagtgcctctgagcagctcacagtgtgtgcccagatgtgccacccctgtgggcagcaagaagctgggatcgctgcagccatgttttcccggccatgccggcgttgtaacctcaggaccttcccttgtaggaacagcctttctcgaatctgttttcagctcttgcattgcatagatgaacctcagcatgtaaagaactatttttttaaagaagtgattttcttattaaacaagtacaaattttgcttagtcaaaaaaaaaacaaag

SEQ ID NO: 504748 - DNA, 330 bp, Homo sapiens
taacagatgtataaattaaagtaacaacacttaaattgccgatacaaggaagatattttctaaatacaagtgtataaatgtacaaatatgtgaagcgaaaggagaaaatactcatgacaattatggtcctcatttctgcaacgggccacatggtggtagctgggtatcggatggaccttcttctactaacaaccaattctggtattccctttggccttcagcaaagcacctcgagcaggtcatgggtttttttggcctgggtgggacgagacctcaaacctctcattcctggaaggagtctggggcccatttggtaggtctgggcctggg

SEQ ID NO: 504749 - DNA, 1578 bp, Homo sapiens
  misc_feature (318)..(318): n is a, c, g, or t
taggagaaaggcacagcgcctggagggcgggagtggggcttgctgcagacggctgtctcctgcctccttggctcttgcactgccaggaacacgctctccccaacacctccatggctcattccccaaattcaagcttgtagttggttgaattgtggccccagagatgggattaaggattttgagattatgccagattatctgcgcgggcccaggatcatatgagtttgtctcttctcccgtattagttttgtccgcgctcggccgccgtgcagtcggtcgttccacttccgccttcgcccacgtggtccggctccggcncacgcgagccgcgtcgcgaatggggcaggagcgagcctctctggtcccgacgcgggtggcccgggtctcctcgactcctgaggaaagcccaccgggcggggcgggaggtgaagaggctggggaagtcagaggttaacctgggcgtcaggggacgttggagttgatccgtcagggtcccggggcggtctgggggcagtagagacggggcttgggcgcggggcctgagaggtcaggggtcagcaggagtgaggctggggcgtccaggtccgagaggtcaggggtcagctggagaggggctggggcgccggtttcccggaggtcaggggtcagaaggaacagggctgcagcgtcagggtccgagaggttaggggtcggcagaggcggagctggggcactgggggtcaggggtcggggatcagggcggggtcgggtgcactggtagcctgcgcatgggcctccagcttcgcgcgctgttgggagccttcggacggtggaccctgcgcctgggaccgcgtccgtcctgctcgccgcgcatggccgggaacgcggagccgccgcccgccggagccgcatgcccccaggaccggaggtcctgcagcggccgggccgggggcgaccgcgtctgggaggacggagaacatccggcgaagaagctcaagagcggtggcgacgaggagcggcgcgagaagccgcccaagcggaagatcgtgctgctcatggcctattcgggcaagggctaccacggcatgcagaggaatgtcgggtcctcacaattcaaaacaattgaagatgacttggtgtccgccctcgtccggtcaggctgtattcctgaaaatcatggtgaggacatgaggaaaatgtccttccagcgctgcgcccggacagacaaggtgggtggtggccttctctgcccctcccccgctgctatgagcagcacgtggcccactttccagctcagtgttctggcttgttatgctgtttctgagcacataatgatgtacaaatcaaactagcctacgccttatgtaggtgagacgtccaggagcctggtcggctcaggtatagctggatctagatgctccctgccagtgggactctgtgttctctctggtctttgctttctcttgtgttgattctgttctcagggacacacattcttgcaggtggcacagtggcggccgcaatgtctgctttcgaacctccaatcaggctcactctgaggcagatgtacttgtgtggctgccaagggccagagagcca

SEQ ID NO: 504750 - DNA, 762 bp, Homo sapiens
  misc_feature (490)..(490): n is a, c, g, or t
ggaagagctgcgagcggcgcgtcggtgtcgggcgaactcggcgcggcacatgagcctcgtgtgaggctgatgcaactttccctttaatgaaagccacctggtgcgcaccgctggtgctggacccagcacgcctgtggccgtggggctgcagcatgctcttgagatctgtggctcttgaaatggcgctggagagctatgagccttgatgagtgttggtccccagatctagcctagtagccctcaacctcactcgcctgtccattggcttagtgaatcaggtgccgaaagggactgctggcgccttcatgttccccttacttcatcatgctcatcttctgcgggatccccctcttcttcatggagctctccttcggccaggtttgcaagccaggggtgcctgggggtctggaggatcagccccatgttcaaaggagtgggctatggtatgatggtgtgtccacctacatcggcatctactacaatgtggtcntctgcatcgccttctactacttcttctcgtccatgacgcacgtgctgccctgggcctactgcaataacccctggaacacgcatgactgcgccggtgtactggacgcctccaacctcaccaatggctctcggtcagccgtcttgcccagcaacctctcccagctgctcaatcacagcctccagaggaccagccccagcgaggagtactggaggctgtacgttgctgaagctgtcagatgacattgggaactttggggaggtgcggctgcccct

SEQ ID NO: 504751 - DNA, 567 bp, Homo sapiens
  misc_feature (209)..(209): n is a, c, g, or t
accaaaaaaaaaaaaaaaaaaaaaattatcctgattgggggggcccccaattgtattctgggcctccccaagttagctgggaacattaagggccagttgcaacaattgcctaagataaaattgactaggataatttataacgttaagacgtgtggggttaatccaccatgagatgggccaggctgtgattactgagaagctctctgtgnaccttcaacgtagactcccccccaacattacgcgaattactcaccagaaaagttagtctaggggcacattgtggcatatctatatataacgaccattgtgtcaacccacagacaagggaccaggggcaaatcacccacttcgtgatctctacatgtggaagataaaaaacttttatgaacagttgaataaccactctggagctactaagggagatgtgctaaatagggaacattcttcgtgagccgcgttttttagcactagttgttcgccggaacacctgtggatccaataatgctgatatcacgggacagaaacaatggggggaacacatgtgaaaacctcgcgtgcatactatag

SEQ ID NO: 504752 - DNA, 431 bp, Homo sapiens
tactgaaactggtaatatatcttaaactataggatttgcgagcaaatggctatatctgcagattaatgccatcactgtacactgtgaatgccatgacttgaagaattatcaggcaccccttcaggcgcaggaccaggtgcagggtcgaatctttctggatcttgtcctcgatagagtgcggtcttcttccatctgcttggttgcattgattagcgccccgctgctgtggggttatgccgttcttatgcggttttgtccttcgatttcctatgtgtctgtgctgtcccctcctgatgtgatggtcttgccggtcagggtctttacgaagatctggataccagctctcacacgcaggaccaggttgcagggtcgactccttctggatgttgtagtcagaaggagtgcggccatcttccagctgtttgcctgca

SEQ ID NO: 504753 - DNA, 351 bp, Homo sapiens
  misc_feature (317)..(317): n is a, c, g, or t
  misc_feature (344)..(344): n is a, c, g, or t
aattcggaacgagggtctcgcggttgtcacccgggctggagtgcagtggcgtgatctcggctcactgcaacttccacctcctgggttccagcagttctcctgcctcagcctcccaagtagctgagattacaggcgcctgccaccccacctgggctgatttttgtaattttagtagagacggggtttcaccatgttgggccagggctgattaactcctgacctcaggtgatccacctttctcggcctcccaaagtgctggggattacgggtgtgagccaccgtgcccggcctgcaaacacattttaatttgacaacantaggggtgtttgttacaaattagttantgattag

SEQ ID NO: 504754 - DNA, 539 bp, Homo sapiens
  misc_feature (297)..(298): n is a, c, g, or t
ccgcccagacctgaaattgatgaggaatctccggcccctttggagggtttcaaccgaacagcatccgggggtgcatttgtgggattcacagttcccagcctttccttgcctggcccataccccccaaggcaaattccaggccttgatgcccccggttatgagggtaagatttttttttcatgggccgcccccggggataatttttatggtgggaaaggtccccggtttttcctaagaataagggccaggatttttggttttaaaggccggtttggtgatgcttttccaggaaaaacnnctggtttggcccccaaggggggcccctcccagggaaggtttggcttttttccgcgaaaatttttccgaaggaaatgcccccccccttttttttgccctttaaaggatagataaaagccatttggcctccaaagggtccccccttggcccagggactttgtttttccccccagccaatcctggtggccttggtccctctccccctccccctccccctcctgattaaagttataattttggga

SEQ ID NO: 504755 - DNA, 155 bp, Homo sapiens
gcacaatgggtagaacccgagtacattcaaagaagcatctgcaacttaatgacctcccacagatccttaagcctgtatatgcgcaaagcaaagcctcttatcccgcaaactaaattccatccagtttagagactttcaggcagatcgcatgccct

SEQ ID NO: 504756 - DNA, 432 bp, Homo sapiens
  misc_feature (48)..(48): n is a, c, g, or t
  misc_feature (110)..(110): n is a, c, g, or t
  misc_feature (133)..(133): n is a, c, g, or t
  misc_feature (148)..(148): n is a, c, g, or t
  misc_feature (172)..(172): n is a, c, g, or t
  misc_feature (181)..(181): n is a, c, g, or t
  misc_feature (192)..(192): n is a, c, g, or t
  misc_feature (196)..(196): n is a, c, g, or t
  misc_feature (199)..(199): n is a, c, g, or t
  misc_feature (202)..(202): n is a, c, g, or t
  misc_feature (210)..(210): n is a, c, g, or t
  misc_feature (316)..(316): n is a, c, g, or t
  misc_feature (326)..(326): n is a, c, g, or t
  misc_feature (341)..(341): n is a, c, g, or t
  misc_feature (412)..(412): n is a, c, g, or t
ggccaaaacgggaccaggcccgccgggaggagcagagcaagcagcagnccaacgagcaccggcgccgccagggcgccagccaggccaaggggggggggcccgggagccanaccaagagggaggagagcgggcncagcgccagggagangaacgggacccgggaggaccagcngagccaccngaagcaggagnaacncancancggggacnacaagcccaaccgggaccggcgggagcagcagcaccagcgcagccaggaggcccgcagcggcgacaacaagcacaccaacgagaccagggagcacagccgcggggncggggagcancggcgcaccaccagngcccgcaccagcaacgagggggagaaccagagccgcacccgcgacgccaagggcagcagccaggagcagangcaggagtaccgggcgtccg

SEQ ID NO: 504757 - DNA, 116 bp, Homo sapiens
gatgggatttcgcgagctcacagtgcagactgcgattcattgttggttggcaacacaactcaattgtttcgtcagggaaatgccctcagttctctataagcagaataggttaaagt

SEQ ID NO: 504758 - DNA, 444 bp, Homo sapiens
aaccgagttcagatgtaaaagatcctagtctgttagctcacgggctgaccttggcttacggttggggtcattcacagctctgagtgccaggcttagactgctcctcacctcccatggtctggttccacctgacttgcgtacgaatagtagataaaactgtagagacccaaagtgcttggcagtgacccctgtcatagctcttcccggtctgaaaaacggagctgatcattccagggcccattctagctcactcaaggaagcgtcacttttccagaacattccttatttcctacaagagtacatgaagctcatttcacacagtctagacacactcaggtggagctcagcgacaggctggcatttgtctttaaaataaaaggaggtacccagatgactgaaagagaagtataaggcagaagctcaccaagaatgaaaggaggtggg

SEQ ID NO: 504759 - DNA, 440 bp, Homo sapiens
  misc_feature (195)..(195): n is a, c, g, or t
  misc_feature (226)..(227): n is a, c, g, or t
gcttcttcacactccagcccatgtcctgccatctgctgctttcctgtgctccatgtttgtaaattcattgctgctgtctaaagagactaagagtgctaaggaaattcctgaagatgtagatatggaagaagaaaaagaaagtgaagattcagatgaagaaaatgattttaccgaaaaagtccaggatacaagtancacaggtttaggagaagacattatacatcanntgtcaaaatctgaagaaaaagaactgagaaaatttgggaaaatagactacagctggatagctgccctttaggccttggaggtggggaggctcctgggccttggtttggggtgggggggtgctttttcccagaggccttctgtgtttaatgttatttctgttctaaaaataagataataaatattaacaaactttgcttttttaaaaaataaaa

SEQ ID NO: 504760 - DNA, 358 bp, Homo sapiens
tcagccgagcatatgctacactaagctaaacagactgtataagcaaacattctggatttaaaataggatcaagtatggctgtaacccaggagtagggtgatacaacgcgtgagttcgaatagtagcagcaggacaatacacgagcacgaatggccaagtgctgatcaaggctgagagcaattatttatagcttatcgaaaatagacaaactcacactccactatgcccagcatacctgtccagctcattggcatatgctaccactacgctaaacaagcattgttctttggcacacattctggctttaaaatagcatccagtgggctgtaccccaagcacgactgacagggggtcacgc

SEQ ID NO: 504761 - DNA, 552 bp, Homo sapiens
agcaatctacacgtgattataaccctcactgtgaacccagcacagacatgctcataaggaaaggggaaaaaaagtgaaaggagctctggaaatcttaacccgactgtgcacagagtttgagaactatgtggcagatatcgaggtggatggaaagcatgtagagatggctttgtgggacacaggtctgtcaggaagataatgaacgcctgagagcccttttctacaccagataccggtaggatactgaggtgtgtttacatatacaggcctgagaggttagaaaacatatccaggcggaccccagaaggcaagcatttatgtcccaacgtgcccataatactcggtgcgaataagaaggaacttcagaatgatgagcacacaaggcgggagctatccacgatgaagctcgagccggtggaacctgagggcagagatatggcatacaagaatggcgctttagggtccacggagtgttcaccccagaccccaagattgcgtgagagagaggtttgagatgggtatcgaagcttctctgtaagctatacgtgggag

SEQ ID NO: 504762 - DNA, 476 bp, Homo sapiens
  misc_feature (195)..(195): n is a, c, g, or t
  misc_feature (226)..(227): n is a, c, g, or t
gcttcttcacactccagcccatgtcctgccatctgctgctttcctgtgctccatgtttgtaaattcattgctgctgtctaaagagactaagagtgctaaggaaattcctgaagatgtagatatggaagaagaaaaagaaagtgaagattcagatgaagaaaatgattttaccgaaaaagtccaggatacaagtancacaggtttaggagaagacattatacatcanntgtcaccatcatgtaccacaacacctcagcggatgtaggattatacgctgcacttgtatatgttccctttaagccttggagatagtcaggatcagtgtcctttcgtgcttctgactgatatgcttatattcaacggctctccatgtctacgtacgcgtggttgtacgcgtgggcgaacgcgtgttcgcacgcgtggcgtttgtcgtgggtctgacccacgcgtccggttataaatcaagagcggccgct

SEQ ID NO: 504763 - DNA, 155 bp, Homo sapiens
agaacgatggcgtcgggtggaggtggctgtagcgcattcggagagactgcctccgcccagaacccggcctggagccggagtccgagggggcggcagagggatcagaaaccgaggctggagacaggcgacgccgacgggggaggacataatcaccg

SEQ ID NO: 504764 - DNA, 147 bp, Homo sapiens
cctaagagctcatgatgaataaagaagaacgtctttttgtttttaaaatgattttaatacgttttacaccgttctctcggtacttttttttagctaagtcagcattgtttccagtgtaaaggcatacctcactctgcaagaaccacg

SEQ ID NO: 504765 - DNA, 602 bp, Homo sapiens
atcataagggtatagcccgcaggcaggcagctcagaacgttaagactattaccatacccacgccaaacaggagagcagaacctttaaacctttacgaatgatcaactgagctactctaacctactaaccgcagaattgcgcaccagccacccaggcacacgcgatcaccccatttacccaggggaccggaggccgagggtttgagagcaccagatcaccccttacgctataacgcacctgcgcagctgagatctccagatgtcccattgtcacctacgaaagtgcgtatgacattttagcacacacgatcactcagtaccctaactgccattctgtacccagctaccctaatacgtaaagccctacagctcaacagacaaatctgctcgactgatcactagaacactaagagcagtcctgaaaccccgatcaacctaacaacctcacgatcagtcgataaaccgatatattgagatattcatgatgaagtgtacaaggctacgacatgtgcccacgtaccgacgttaggacaatgggtcaagcatgaggccataagaaatgaagtacatttcttaccttagtacctacgatagtacttatgc

SEQ ID NO: 504766 - DNA, 404 bp, Homo sapiens
  misc_feature (15)..(15): n is a, c, g, or t
ccaccactgacctgngacagagaatcgacaatgccgacttctgtacttagtcttgcatactactgatgccacacctgagctgacttttatcagtctcactgcctgaggattcccagggagatgctgctcacaagacagagacatacgagcctgtaacagaacacccaaccttgtacaaggacaattccaacgctcctaaatgtcggcttctataccctaaggagagacgacacggccacatgaccaatttctttctctgcccacagagcatcgatacagtcttttgcaatgatctccttgggaccgaaggtgaccatcacaaggaataccctgaatgcgcagatttcaacctcccggagattccggacggtcatatacatgaatgtttccaagctcctcctgcc

SEQ ID NO: 504767 - DNA, 148 bp, Homo sapiens
ccatagaggatccccaccgactagccgacagcattttgaaatttccttattgaacgtacttacttccctgatatggacatttcctggagctcatatgtcttgagaccgtctggtccccccaggaccttgccccactcttcccagagtc

SEQ ID NO: 504768 - DNA, 408 bp, Homo sapiens
ggatcatgagtcagtcggaaggaacgaccatatcaacctcataatcccttcatgtggcatccagcggatctctggtagctggagacagtcatcgagaccgctggtctcgcctcctcggtcgtctcacagatgcacgcacaggccaacctaggtgctagacaagcaacagcatttccgcttctattgcaatcattgcagtagagtaatatctccatgccaggttgatgcatcatactcatcagaatgttccctgtcgagaccatcaacatgtccagagagacaccttctaaggcgaagtccacatttacggttccaagcattgtgactcgtgggatatgcctcagatgacaaggtgaggtctgagcccagtaagatatgggtcgatccaacaatgactatctatcagct

SEQ ID NO: 504769 - DNA, 399 bp, Homo sapiens
  misc_feature (233)..(233): n is a, c, g, or t
  misc_feature (252)..(252): n is a, c, g, or t
  misc_feature (343)..(343): n is a, c, g, or t
gaagagtcttcacaaattttatgtcaatgtggatatagctaatgactcacatacattagcatacatatttttgataattcaataaattttattcccaagtacgtacagattttatttccaagatgatgataagaaaattggaagatgggaaatactttttagcaacatggtttttcacttgtgtatctgctaaaatcctggggtgtcacatagacacgctaaacctcgtctcnactaaaaacacaaaaaacnagctgggcgtggtggcgggcgcctgcagtcccagccactcaggaggctgaggcaggagaacggcgtgaacccgggaggcagagcctgcagngagccaagatcacgccactgcactccagcctgggcaacagagcgagactctgtccc

SEQ ID NO: 504770 - DNA, 188 bp, Homo sapiens
cacccgtgtgaaaatgtttttcgcttcccccggacgccggggggaaaaacacccccggggaaaaagttttttccgtccccccgggccgggggggaaaaaaccccctggggaaaatatttttctcccccccctgcgcggggggggttaaaacctccctgtgaatattttttctccctctccgggggggg

SEQ ID NO: 504771 - DNA, 414 bp, Homo sapiens
  misc_feature (18)..(18): n is a, c, g, or t
cggagggttgtctccacnggcaggttgtactccaccggcaggttgtactccaccggcaggttgtactccaccggcaggttgtaccccaccggcaggttgtactccaccggcaggttgtactccaccggcaggttgtactcaaactctcttttcctaaagccacacatttttgttgttattagtggtgttattacttttaaagaggttatctcttatttaaacaatatttatagcaagttatacataacaagtaacaatcatactagtagacatcttcaattctaatgcaagagcataagctcttcaccagcatcttaaatactgcgagagtcagtagtgcttaccaaaagtagagggtactcttctagggaatcagaaaattatcaaaataaggcacagcctgttgttatcaca

SEQ ID NO: 504772 - DNA, 254 bp, Homo sapiens
  misc_feature (18)..(18): n is a, c, g, or t
cggagggttgtctccacnggcaggttgtactccaccggcaggttgtactccaccggcaggttgtactccaccggcaggttgtaccccaccggcaggttgtactccaccggcaggttgtactccaccggcaggttgtactgttccatgggtgaaggctctaacacggtcactgtaaaaactgggtaaggagatgtaagagacatgggccaagtgctaaatggaggaagagggtaatgcaggcctagaagtacctg

SEQ ID NO: 504773 - DNA, 1016 bp, Homo sapiens
  misc_feature (140)..(140): n is a, c, g, or t
  misc_feature (303)..(303): n is a, c, g, or t
  misc_feature (409)..(409): n is a, c, g, or t
ggctcgcgtgaagttctcccacggagaaacagcctatgtggcagcttgcgacgtcggcgctccagcatcagtaggagagcaccgagatggacgacgtaacgccaggtacggatttcgacgtgccggctatctccgcacgnttctctactaggaggtgcgaggactgaaccctcgtggaccctcccaagggactccagtctgcatgggacgcctgcaatacttcacgtgactagcgtgacatggagagagttggaacgattggtgcgctggtctgggacacagctatcactcagagtctgttgntatccacgattccgtcgaatcgtgaagatctattccacgatggatccgaacgctccggctagtagctgcgaagtgggagaccaagttcacgtgggaagcatgtcgntctctgtatcgcgtgcgagaggagaaattgctgtcataagccagaactcgagaaaaggccgtacagaaaactagagcaaaagcgtcgccaggagccgtacctctgacacgctgtgcccggatgccatgcgcttgagggagcttggtcttcgccaagagcgaaagagttgtggaggcgaagcagaatccggcgtcaaactagatggcagtccggctcataaaggcttcatttggcacaaagcgacagcagaacaatgtggaacacaagggtttgaagagcttgtgttctggtgtctataagaagctcacgggcgaaggatgtgagattgttgaattcccagagtttcaattgtaaacaaaaatgactaagtaaaaagtatatattccacagtacagataacacataaatgtaaaattcctcgaaggggctcaagggccgaggtcgcgggacaaaagagcggtccagtcaccagggggacaccatggttccttggcctgtttccctgtgccccgagtttactggtgtccaaacgctggggagatctcgccgggtctcccctattaggaggtcggtattaatttgaaataacccagttttaccctgctaa

SEQ ID NO: 504774 - DNA, 1612 bp, Homo sapiens
ggagaacaagttacctcaaggtgtgggcgagatgtgcagggcggaccctggcgacctgacgctgcggaggctcgacgcggcgtatccataccacccagcctgttcgccgctgggaacccgccggcccgcaggtgacccagcgctggaaaaacgccagcgcacgtggcccatggcagcgctggctgctggggcaatggaccacccgctgccctgccttgcacgtcccagtcctccctccctagtgactgcacgggtgctgccccgtgtgccgccgccgtccgcgccttccccgtgaccgtgcgttccagatccctactccgcgccttccggccccatcccggccccacctgctgacgccgacacttgtgcctcttctgcccctgacgaccaccactgctcgtggccacgatgacctacccctttacaccgcaaccaacgtaactcactgcgtcttccccgcaattgcggcctcgacacggctgctccgttgaagcccactaacccccgttcacccgccccccccacactggcgcccaccggccctctccgcactccgatactctacgccgactctgcctcgcgccactctcgggcaccccgcttaggcattccccgggcggccccctgctcccgactcccacccctccccctggcgccgccactccttcgcgctccctacgttccccctactttgcccgggcctgccgcactccgccccccctctctgcgcccccgcactctcggccccgcccgctctcgcgcccgcaccgcgccccgcgcctcgccctcgaccgaccgcgcggcacaccccgggcgccctcccccttctcctcagcccaccttgcccccctgcgcgcgttcctcccggcccctctaccccgctctcgccccccggcccgtgggcagcccgctcgccatcccggcctgtcgcctcacctcccccccgcctctctgcgcctccttccgtccccctctctgcctggcgtcctcacctcttccgcgcacctgcacacctacgaccacacgcgccccccctccctcgcctcgcaccctctacctcctactctaggcacaatgtcacccccacatgagatcaacacatgccagcgagcggcagccattcttacattcgatccacacaacccacatgtcactctcacacgcagccgcctcacccgcctcctctccgacggacatctgcaacacctggcttgccgcacggcacagcccagtccaattacggctactggcgcatcggcccgtagcgactacatatcagcgccgcacacacactccatgcagacagaccactagtcggccatactcacctcatccaccgcacactgtctcgcacacactcacaccctccaccacaccctgtgatccagctctcatgtggatcgtcacacccctccgccgcgacgacgctaccaccagacacctatatccatggacacacggacgtaccacacacccacacctgacatcccaacctcagcgcacaaccctactatacccacgccacgctcgtctatacccaacacagctatcctcccactcacccgacacaccacctacgaaaaccagcaacatccatcctaacacgaccatc

SEQ ID NO: 504775 - DNA, 205 bp, Homo sapiens
  misc_feature (18)..(18): n is a, c, g, or t
cggagggttgtctccacnggcaggttgtactccaccggcaggttgtactccaccggcaggttgtactccaccggcaggttgtaccccaccggcaggttgtactccaccggcaggttgtactccaccggcaggttgtactcgtattgaattcaagtataatattaagtatgcatggacctctagagctaatagtcacctacgtcgc

SEQ ID NO: 504776 - DNA, 267 bp, Homo sapiens
  misc_feature (20)..(20): n is a, c, g, or t
aacgtgtctgactggtgacnaacctggtggactacgctgtgtaccatcacgcctcgcgaactttattgtatttttacgtgtgaaaccgtgtctctactacaatacaaaagactagctgagcactgtgtgggaagcacctgtaatcccagctactcagaaggctgaggtgggagaattgcttgaacccaggaggtggaggttgcagtgagctgagatcgtgccatgctactgcactccaggctgggcagcggagagagactccctgtc

SEQ ID NO: 504777 - DNA, 822 bp, Homo sapiens
taaatgtgcaggctatccaagttcaatagtaaaagctcaaaaatgaatgttctactccatgctgaaggactgaaagctgccttcttcatatttggcactttctggtattctcccctgttttttttaattccctaaaatggtgtggttggagtggaccgccctgcagtgggggggtaacaatggcccactgattttggccctttgaccctgcacaaatgaccttggcttcagccaaactcatttgccatgacaactctttgtactgtgtccgtgccacagatctgtgggctcacttggttcactagtcacggggacacgttggagacggccacattttacatttttctggtgggcaattttttctccaaggcgtggtaagtcagttttctttcttccctactactaaaggggtcccactagttaatcactcctcagaaaattatcggggtgtggcactccacacttgtttctgtgcgcacattggtcgaaaggcgcttaagggccattagtttcacgggtaccttagattaagcccttgatagacttttggccgtgatacgagctcccgggaacaacgcgggtgcgctaaaatactgtgaaaaacgcagctgtaaacgctagtggaccctaaaagacggttcttgtatactggctttctcggcacagactggttttggcacactcggtggcaccgggccctactgtggacccatttattccctttatgcaccaaggaagttctttctcccttatttctatcaagaaacatggcttataacactcccacacgaggattaagtcctgcgctcggcaacgtcgtcc

SEQ ID NO: 504778 - DNA, 382 bp, Homo sapiens
cgtatgggaatactgtgaaaaattgataaataacaggtaagagaaagatattgcgtaggcaattactaggatcattaggcaaaaagtgagtactgtggatctttgaaatatcgacagtcacacagatcatgcttgtccgtacagtattgcgggccagacacttaagtgaaagcagcaagtgttagggtgactttcctacttaaaattttggtccatatccattcaaaacatttgcatcttggtaggctgcatatgcttacctatttgatcccaaaccaaatcttagaatcacttcatttaaaatacttgagcggtattgaaatacttcgaagcagaaccggccatgtgcagccctcatttatgagagaaccctcaggaaact

SEQ ID NO: 504779 - DNA, 1486 bp, Homo sapiens
  misc_feature (164)..(164): n is a, c, g, or t
tcccgctgcgtttcctactcagagaaacagcaagggcggtgtctagagacacggagatgacgggaagcaggaagcggggtcagcagcacacacggtgtgggtccgtgggcgcgtgcaggccaggtccaggaatgcccatgccccgtcaccgtcgtatgatcggnccgccttagtggtgcctgcgtgccgcgtgataagctggatgcgcagagagtcagctgtcagccttgccaggtgttctgcccatgccaatagagcgactgtagtgcgttcacggggggtcgcttcatgagtacctagccatatcctccactgagcctccaagctgtctcgagaacggcctttgtatgggacagtagagggctggtgatgcaaggtgcgcccatgtcgggtgcgagagcattgagcgcggagcgctcatgccatcaaggcgatgctcggtgcagagagcatggaggcgggcatgggagcaccgatgccgtccacgcgtggaaggtggcgcgaggagcgtgctacatgagcagcgcgatcgtacgtgcaagacgttcatatcccccgttccattgcaccacaatggacggacttgtctccgttgccgttccccggacgcgcgttggtagctccgggaggagagaccacttaccgatagttgcccatagtcgttggtaagtcgttccattggttgcctttcggtacctcatagtgggccttggaccccaaggagtggggtcccgaaagcagaccccgaggatcgtcaatagccccaaggtcgcgccaatcacacgtgtctttccgcaaaaaacagttggcaacttgttggttgccaagttttgtggcgaacccaatatgtaagtcgccggcgtggacaattccagtgctccatttggagaaagcccccgttttcttcaattacatcacaaaaggccttgggttccagacataggacccctgggcaaccaagggggcaagggagagggttggtccccttcaaagagcaccccaaaagggttttaaagcacaacaagcgttccattaaggggttttgggcccacagatgtaaaccccacggtattgaacacacctcagggtgggagaacccccatcctttacactgggggggacatactcacaatcctcttctccttatcacccggattaatattatccgccgacaacacgtgtggggctatcacaactataaaagcattgtcacagttttgtgtgttttaaacaagacacaagaacagaggcaatcccaaaagacgtcgcaggcaacgaaaagaaagagtaggaaagaaagagacaagacggaggaagtaaaacaacaaccacccaagagaagggacgggagaggcaatcaaacagagaggggaccgaaggacaggagacacacttgatttataatacacgataacaggaagcagaagaaaagtagagtacaacgcacgaggacgaagagacgcagcacgatggatggaaatagaag

SEQ ID NO: 504780 - DNA, 698 bp, Homo sapiens
gcggggaccttgagtctctgtcggcctgcccctcagcaaaggggaggtgtcgggccctgaggaacgatgtaccctacatggccactctatcgaacctgtgtccccatgttccctgcttttttagtctctagctatttctcgagctaggagtcttggactggagctcgagatcgattagatacagcgactctccagcctgggctacagagtgagactctccaaaaaagaggaataataaataataataagacgtaaatagacaaggtctccaggtctggtcaagctcactggcctacaaagtgatcctcccacctcagcctccacaagcagaccgggactacaggcaaacatcaccatgtaccaagctgtccccagctttctaatactggtctttctcttgccggcacgaacctctaatgaaggaatacgaagccagcgcctgcagtgcagtccacccgaaccctcttctgggcatgcctgtggctctgttgcccatctctctgtgacagcaggaccatttgtgggtgcttcgtgcaactgttctggggcccagaacgggtgctggtccacattcaccaggcacccaacagcacttcaaagagtgggtaaaggagcttgccctcatgggccccccagccttagtgactcaccccacaacccccagccctgtcctgcaaaccctcctagtgggaagcata

SEQ ID NO: 504781 - DNA, 148 bp, Homo sapiens
aggaacagcatgagctcaggaagctctctttcttcacttaccattactaagctctccaagcatagaaatccctgggaatggcgagaataactcccactattttaaaatttatattcagattgtttcgtttcataagacacatcaaaca

SEQ ID NO: 504782 - DNA, 1059 bp, Homo sapiens
  misc_feature (1051)..(1051): n is a, c, g, or t
tggggtcaaccggttccttgacgatcctcgtgttgccctttgccactccctttctaggcgggatccgttccacacgtgacgcaagactatcctactgggagtggacgctccccaatgtcacagtccccaattcgcttctatcggtcgcatctcttcaggacgacttatgaaagacggcgtcacgggatgtttttggagctttggtttatgcaacgtttgcctatgtgcagatgtaagctaaagcaattccgtaggttcaacccagatgtccgttgcgaattctacttggccatcactgtgcacaggcattgaaaaatgaacaagtgttattaatggctgccataaaaagggaggtcgtcgcctgtgtgaggaaagggtaaaataagaggcatcgtttccaagtactctatctaattgtgaattgtcataaagacttgactaggccatgaacttacgttctccatcatcacgtaagtggttaaaggcgttgcaacccctccactgtgctgtgtctccctgtcaccgaagtgaagtgaccgtgccgatatcaacccacggtgggaccacctgtgtctgcagtccggaggggcttatgcaggaagcactcaccccccacacgttccccggccatgagcttcccctacctttcgtcaccacctgagggcatgagcacaaggccatggggcgtgcctggtgagtctgcctgtggttcaggacttagccatagtaggtctccatgtgtgctgctgcccgacatgggatgcgcaggggaggcgtggggacccgcaggagggtgcgttcgggatacaccggatacactgctgctctcattgctctgtgttaccaaatgcgtctatggacatttgtgtgctaaatcctaggaaataacaaagacgggttaaaacccagatgcggtatattcatttgtaatgatgtactaaagtgaagcagtatttaaactgtaaagatttttttcagtgtgttttctcgaattttgccacaacatacgtaggcttcgtattttatttatctttctttttagctcccaggntcagaccc

SEQ ID NO: 504783 - DNA, 946 bp, Homo sapiens
  misc_feature (1)..(1): n is a, c, g, or t
naccttctgtctttctgttttgttgtgcttggttgtctgttggttgttgtttcttgtttgttttttgtcttgttcttatgtgttgttcgtgggtggtttgtgaaaaaaaagaaagtaaccacggcgggacgaaggagaagggggaggctgagaagaagggggggggggggtctttttgatcaagggtttaaacgttttttaaacagtgttttttcaaagggaaattttcgccggcctgtacgaatgttgtagaatgtcgcccctcgggggctttttccccgtgcgtggagacgcacggtgtgctcttcacggggcttctcctttgggggggttagtgtgtctctctctggtaggggggccacattggggccctccgtggggggccctcctttgggggcgcccccccctctggttctccttaagggcgggcatgtttcacgcgggaccactgcggggtcaaagcccctctcaggtaatccggtctattgtgtggccccattcttgccaataagggctcctggcaaaagtttaaggggtcgaattcaagttgtaaacgatcacttgccacaacatgcttaactcttgacggccctagcaacggagggattttttgccccccccccgaaatgtgggagacaaatactgtctccgttctgagaacggtagagcacagccctcgtgtcagaaagcgtcacacctgtgaccctcggttatagagaaacgcccctttgttctccccccttatttgtggagtgcacgacccccctgctccctcacactgggtcatgagttgcacataggcacacccagtgggtcacccgcgtcgccttaatggcgcactttttagatgtcttctggcttattaagtggcaccgcctgtatcgtgctgtatatcaaaaagaggtgtgtgtccacatagggcggcaccaacaactgacaagaaaat

SEQ ID NO: 504784 - DNA, 1276 bp, Homo sapiens
  misc_feature (248)..(248): n is a, c, g, or t
  misc_feature (338)..(338): n is a, c, g, or t
cccctgcgctccagccatggcgatttctcggccgcgctgaccctgaatactcggcgcggttgccctggccccgtctcgctggtagggctttctcgggatacgggcgaccccccggcctgctcggccgtagcgctgacaggaatgcttgtgagagcgcagacggcgccttcatgtatcccgcagagctcgggaggggacagcgaccggagtttcttcagcgcaaccaacgagttttgcaatggagcccnctcgagaagccaactctgactttcttctaatgttcaatgacacttgtttatcctgtgcagaagcctcttcgaatgcccgaggtcctatcntggtgacactaaagctgtggactggtaacggcgccattgcttccaatggatgccgtacgactcatttgtgggagacctgcctttgtgtaccacagaagaatctatacgatgctgtgcaacacgtaacagacacaactgccatccctcctatgactgggcacttggacagcgtttcatccggcacgcaacatggtccgtactcagtcgggaggtgcaattaatacttgatattactacaagcgcgcaaacccgtgcaagattcgtccgattaccattgcatttagacgaaacaattggcctcctgtgaccttgtcgagcggacgtaccggctccaacaacgatcggcatagattcaggggggcagtgagtgctaatgaccaatgtgctgcgcctccttcttgtgtgggcccccaacgtgatcgcgctctagcaccggaacgcatcaattccaatccttccgttgccactgctgccgtcaagcagacttatcctttttgaagcccaccatcgttgtggcctgtgtaagcaggactgcacgcccataaggattgagacgatcccccaacaagttggggcattcgttggggactaacaaaacttggtaaaaccccccgtggccttcattcaccttatcccctgttacccccggtcaaatgaccgaactacttctccggttctgggttggttgccgaccttcttaattggcaaaggcttctttcccaggaacggggccagtccaccccccgaggggccaaatgggaagaaatgccgaggcaatacgagcggttatacgagcctctctaatgcagacttggacagggccaaagaaaaggatgccccgcgggcacccaagtggggccaagagccgcagacacatccttgggggggcttgagatagaaccacattccccttgtgtgacttgtcacagtctccgtca

SEQ ID NO: 504785 - DNA, 246 bp, Homo sapiens
ggtccctctggagctagtggtgaacgtggatcgcgctggtccatgggccccctggattggctggagcccctggtgaatctggacgtgagggggctcctggtgccgaaggtcccctggacgagacggttctcctggcgccaagggtgaccgtggtgagaccggccccgctggacccccttgtgttcctggtgctcctggtgccccttgccccgttggccctgctggcaagagtggtgatcgtggtta

SEQ ID NO: 504786 - DNA, 995 bp, Homo sapiens
ggacccggggtttgctcctggtcgccttcgcctcctagatccctatggccactatgcgtgagggcatctccagtccacgttggccatggctggtgtccagattggtaaatgccggctgggagctctattgtctggatcacggtatccagcccgatggccagatgccaagtgacaagaccatgggggaggagatgagctccttcaaaacaccttcttcagctgggagaccgggcgctggctagctagtgtcccgggcttgtgtgggtagacttggaacccacagtcattgatgaatggttcgcagtggcacgctacgcgtcaggtcttccacgccgtgagcagcctcatcaacaggcgaaggaagatagctggcgaataactatagcccgagggcactacaccatggcaaggagatcattgaccttgtgtgggagctgaattacgtcaagtcgggctgaccagatgctagcggatctatcaggacttcttgtgtatttaccacagctgtggtgggggaagctggttctgggttcagcctgcctgctcatggaagtctctgagtcgattatgggaggaagtccatgctggagttctgcattgacccggtcaacgcaggttgcacaggtgtagttgggcctagagatccatctcactaccatacaacctggagcgacgctgatggtgccgtcatgggtagaccagaggtcatctatgacagtccgcgaaagggccgatatgagggccagctaaggtaacgtaacggtgataaagcagatgtgctccatcgtggtcctggatggggggcccggatgtgcgtggcgagattcgagcagcggggcgaccccgcgcatccctgggaatagccgtgattgtggaacccacggcggttgggggaggaccacggtgtgggccaccatgtgggggccccggaaaattggcggcggcggggcgcaaacacggcgaacaggacaaggggggccagacaactctgggat

SEQ ID NO: 504787 - DNA, 394 bp, Homo sapiens
  misc_feature (102)..(102): n is a, c, g, or t
  misc_feature (214)..(214): n is a, c, g, or t
ccccccaaaacggggggcccctttggggggggggggcccataaaaatttttgggttttttgggaaaaaaaaaaaaaaaaaaaaaaaaggggcttttgggggntatggggtttttccccctttcccccccccccccccccccccccccaggggagggggggggggggggggggggggggccccccccaaaccccggggcccctgggggggggggncccccccccccttggagggaagggggggggatttttttttttttttttttttgggggggggggggggggggggggtttttttaaaccggtccctttttttttgggggggggggggccccccccttttttcaggggggtgggggtttttaaacccctgggaatttttttttttttttttta

SEQ ID NO: 504788 - DNA, 202 bp, Homo sapiens
gcgtcaccgatacaagtagtcagcctggatgttggcggcgatctcggcctcccacttgtccccgttgttgagcaacttctccttagttgtacatgcagctacctcatggtgtctccggtggcagaactcaagagtttggggcccttcgacgactggcatccacgtggaccaggcctccttggcatgaagccgcacgtagatg

SEQ ID NO: 504789 - DNA, 253 bp, Homo sapiens
aaaaagggcccggggggggggggggggggggggggggcttttttttttggggggggttggggaagcccccccccccccggggccctttgggggccccccggggtggggggggtaaaaaccggaacatttgttttgtggccccccccccccccctttggccccgggggttttccggtttcccccccccctccccccccccccccggggtggggggggggggggccccaaacccccttgccccctgttgggggga

SEQ ID NO: 504790 - DNA, 186 bp, Homo sapiens
cgtatggcagccagctgtacatccaccgggaagcctcgtctaacgatctgtgatgtctcggatgccgccactggagcctgcttccaccccagtggctgtgggtcttctctgcactcatctggaatggcctctatgtcctgcctgtcagccacattgaccttgatccccagctcaggccctggcact
